United States Patent Application Publication US 2025/0059576 A1 - sequence listing, part 2

SEQ ID NO: 21016 - DNA, 16 bp, synthetic construct
  misc_feature 1..16: note = synthetic [barcode part1]
  source 1..16: mol_type = other DNA
tgaatcgcctccgtac

SEQ ID NO: 21017 - DNA, 16 bp, synthetic construct
  misc_feature 1..16: note = synthetic [barcode part1]
  source 1..16: mol_type = other DNA
tagacgtagtcacgtc

SEQ ID NO: 21018 - DNA, 16 bp, synthetic construct
  misc_feature 1..16: note = synthetic [barcode part1]
  source 1..16: mol_type = other DNA
atcgagtgtccaacac

SEQ ID NO: 21019 - DNA, 16 bp, synthetic construct
  misc_feature 1..16: note = synthetic [barcode part1]
  source 1..16: mol_type = other DNA
gtctaagtacctaggc

SEQ ID NO: 21020 - DNA, 16 bp, synthetic construct
  misc_feature 1..16: note = synthetic [barcode part1]
  source 1..16: mol_type = other DNA
gcaagaagttgtcagt

SEQ ID NO: 21021 - DNA, 16 bp, synthetic construct
  misc_feature 1..16: note = synthetic [barcode part1]
  source 1..16: mol_type = other DNA
cgtgcgaagtaacgac

SEQ ID NO: 21022 - DNA, 16 bp, synthetic construct
  misc_feature 1..16: note = synthetic [barcode part1]
  source 1..16: mol_type = other DNA
gtcttgtggtagtggt

SEQ ID NO: 21023 - DNA, 16 bp, synthetic construct
  misc_feature 1..16: note = synthetic [barcode part1]
  source 1..16: mol_type = other DNA
agtgtgtagaaggttc

SEQ ID NO: 21024 - DNA, 16 bp, synthetic construct
  misc_feature 1..16: note = synthetic [barcode part1]
  source 1..16: mol_type = other DNA
aagtccacggacttac

SEQ ID NO: 21025 - DNA, 16 bp, synthetic construct
  misc_feature 1..16: note = synthetic [barcode part1]
  source 1..16: mol_type = other DNA
aactcacagatctgcg

SEQ ID NO: 21026 - DNA, 16 bp, synthetic construct
  misc_feature 1..16: note = synthetic [barcode part1]
  source 1..16: mol_type = other DNA
ttaaccgcaattggcg

SEQ ID NO: 21027 - DNA, 16 bp, synthetic construct
  misc_feature 1..16: note = synthetic [barcode part1]
  source 1..16: mol_type = other DNA
gatcggtattggtcgt

SEQ ID NO: 21028 - DNA, 16 bp, synthetic construct
  misc_feature 1..16: note = synthetic [barcode part1]
  source 1..16: mol_type = other DNA
gtcagttgtatacgcg

SEQ ID NO: 21029 - DNA, 16 bp, synthetic construct
  misc_feature 1..16: note = synthetic [barcode part1]
  source 1..16: mol_type = other DNA
tgtataggtggccgtt

SEQ ID NO: 21030 - DNA, 16 bp, synthetic construct
  misc_feature 1..16: note = synthetic [barcode part1]
  source 1..16: mol_type = other DNA
ttcacgattacggacg

SEQ ID NO: 21031 - DNA, 16 bp, synthetic construct
  misc_feature 1..16: note = synthetic [barcode part1]
  source 1..16: mol_type = other DNA
caagactagaacctcc

SEQ ID NO: 21032 - DNA, 16 bp, synthetic construct
  misc_feature 1..16: note = synthetic [barcode part1]
  source 1..16: mol_type = other DNA
gtgtgactgtggttgt

SEQ ID NO: 21033 - DNA, 16 bp, synthetic construct
  misc_feature 1..16: note = synthetic [barcode part1]
  source 1..16: mol_type = other DNA
tgttaaggtctccact

SEQ ID NO: 21034 - DNA, 16 bp, synthetic construct
  misc_feature 1..16: note = synthetic [barcode part1]
  source 1..16: mol_type = other DNA
acaccgaatacggtct

SEQ ID NO: 21035 - DNA, 16 bp, synthetic construct
  misc_feature 1..16: note = synthetic [barcode part1]
  source 1..16: mol_type = other DNA
tgtcacaactgtgacg

SEQ ID NO: 21036 - DNA, 16 bp, synthetic construct
  misc_feature 1..16: note = synthetic [barcode part1]
  source 1..16: mol_type = other DNA
acctgtagttactctg

SEQ ID NO: 21037 - DNA, 16 bp, synthetic construct
  misc_feature 1..16: note = synthetic [barcode part1]
  source 1..16: mol_type = other DNA
tgtggatccgtagatc

SEQ ID NO: 21038 - DNA, 16 bp, synthetic construct
  misc_feature 1..16: note = synthetic [barcode part1]
  source 1..16: mol_type = other DNA
gtcgcagatagtatcc

SEQ ID NO: 21039 - DNA, 16 bp, synthetic construct
  misc_feature 1..16: note = synthetic [barcode part1]
  source 1..16: mol_type = other DNA
tgtctgtcttggagtt

SEQ ID NO: 21040 - DNA, 16 bp, synthetic construct
  misc_feature 1..16: note = synthetic [barcode part1]
  source 1..16: mol_type = other DNA
tagaggactggtcctt

SEQ ID NO: 21041 - DNA, 16 bp, synthetic construct
  misc_feature 1..16: note = synthetic [barcode part1]
  source 1..16: mol_type = other DNA
ttggcagtgtcaggtt

SEQ ID NO: 21042 - DNA, 16 bp, synthetic construct
  misc_feature 1..16: note = synthetic [barcode part1]
  source 1..16: mol_type = other DNA
ttacggaagattaggc

SEQ ID NO: 21043 - DNA, 16 bp, synthetic construct
  misc_feature 1..16: note = synthetic [barcode part1]
  source 1..16: mol_type = other DNA
tattaccgcgagacac

SEQ ID NO: 21044 - DNA, 16 bp, synthetic construct
  misc_feature 1..16: note = synthetic [barcode part1]
  source 1..16: mol_type = other DNA
tctcgtcacagtagag

SEQ ID NO: 21045 - DNA, 16 bp, synthetic construct
  misc_feature 1..16: note = synthetic [barcode part1]
  source 1..16: mol_type = other DNA
agttgcagtacgtcac

SEQ ID NO: 21046 - DNA, 16 bp, synthetic construct
  misc_feature 1..16: note = synthetic [barcode part1]
  source 1..16: mol_type = other DNA
cctccggtaattgcac

SEQ ID NO: 21047 - DNA, 16 bp, synthetic construct
  misc_feature 1..16: note = synthetic [barcode part1]
  source 1..16: mol_type = other DNA
tggttaggagaggaac

SEQ ID NO: 21048 - DNA, 16 bp, synthetic construct
  misc_feature 1..16: note = synthetic [barcode part1]
  source 1..16: mol_type = other DNA
gcgcaactaatacgtc

SEQ ID NO: 21049 - DNA, 16 bp, synthetic construct
  misc_feature 1..16: note = synthetic [barcode part1]
  source 1..16: mol_type = other DNA
gactcctgattcgcac

SEQ ID NO: 21050 - DNA, 16 bp, synthetic construct
  misc_feature 1..16: note = synthetic [barcode part1]
  source 1..16: mol_type = other DNA
gtgtggttgacacgtt

SEQ ID NO: 21051 - DNA, 16 bp, synthetic construct
  misc_feature 1..16: note = synthetic [barcode part1]
  source 1..16: mol_type = other DNA
gtcaggcaagtataac

SEQ ID NO: 21052 - DNA, 16 bp, synthetic construct
  misc_feature 1..16: note = synthetic [barcode part1]
  source 1..16: mol_type = other DNA
ttctgacgcgcagtct

SEQ ID NO: 21053 - DNA, 16 bp, synthetic construct
  misc_feature 1..16: note = synthetic [barcode part1]
  source 1..16: mol_type = other DNA
agagagagttacggtg

SEQ ID NO: 21054 - DNA, 16 bp, synthetic construct
  misc_feature 1..16: note = synthetic [barcode part1]
  source 1..16: mol_type = other DNA
atatccgattcgcgag

SEQ ID NO: 21055 - DNA, 16 bp, synthetic construct
  misc_feature 1..16: note = synthetic [barcode part1]
  source 1..16: mol_type = other DNA
gtccggttagtagttg

SEQ ID NO: 21056 - DNA, 16 bp, synthetic construct
  misc_feature 1..16: note = synthetic [barcode part1]
  source 1..16: mol_type = other DNA
gatctcagtctatctg

SEQ ID NO: 21057 - DNA, 16 bp, synthetic construct
  misc_feature 1..16: note = synthetic [barcode part1]
  source 1..16: mol_type = other DNA
cagttctctccagtct

SEQ ID NO: 21058 - DNA, 16 bp, synthetic construct
  misc_feature 1..16: note = synthetic [barcode part1]
  source 1..16: mol_type = other DNA
tggtacgcgtatcagt

SEQ ID NO: 21059 - DNA, 16 bp, synthetic construct
  misc_feature 1..16: note = synthetic [barcode part1]
  source 1..16: mol_type = other DNA
tctcgtggccaagttc

SEQ ID NO: 21060 - DNA, 16 bp, synthetic construct
  misc_feature 1..16: note = synthetic [barcode part1]
  source 1..16: mol_type = other DNA
tacgtacacacacacg

SEQ ID NO: 21061 - DNA, 16 bp, synthetic construct
  misc_feature 1..16: note = synthetic [barcode part1]
  source 1..16: mol_type = other DNA
gcgtgtatctcagagt

SEQ ID NO: 21062 - DNA, 16 bp, synthetic construct
  misc_feature 1..16: note = synthetic [barcode part1]
  source 1..16: mol_type = other DNA
gataacctcttacacc

SEQ ID NO: 21063 - DNA, 16 bp, synthetic construct
  misc_feature 1..16: note = synthetic [barcode part1]
  source 1..16: mol_type = other DNA
caatacacgtgccagt

SEQ ID NO: 21064 - DNA, 16 bp, synthetic construct
  misc_feature 1..16: note = synthetic [barcode part1]
  source 1..16: mol_type = other DNA
tggtatcctatctacg

SEQ ID NO: 21065 - DNA, 16 bp, synthetic construct
  misc_feature 1..16: note = synthetic [barcode part1]
  source 1..16: mol_type = other DNA
aacacgtaaccttctc

SEQ ID NO: 21066 - DNA, 16 bp, synthetic construct
  misc_feature 1..16: note = synthetic [barcode part1]
  source 1..16: mol_type = other DNA
tacggacggtgaggtt

SEQ ID NO: 21067 - DNA, 16 bp, synthetic construct
  misc_feature 1..16: note = synthetic [barcode part1]
  source 1..16: mol_type = other DNA
tctacgtcgcgttctt

SEQ ID NO: 21068 - DNA, 16 bp, synthetic construct
  misc_feature 1..16: note = synthetic [barcode part1]
  source 1..16: mol_type = other DNA
gtatcagatcgcctcc

SEQ ID NO: 21069 - DNA, 16 bp, synthetic construct
  misc_feature 1..16: note = synthetic [barcode part1]
  source 1..16: mol_type = other DNA
acaccggtcttcaacc

SEQ ID NO: 21070 - DNA, 16 bp, synthetic construct
  misc_feature 1..16: note = synthetic [barcode part1]
  source 1..16: mol_type = other DNA
taatcctctcttcggc

SEQ ID NO: 21071 - DNA, 16 bp, synthetic construct
  misc_feature 1..16: note = synthetic [barcode part1]
  source 1..16: mol_type = other DNA
attaacgcctgcgagt

SEQ ID NO: 21072 - DNA, 16 bp, synthetic construct
  misc_feature 1..16: note = synthetic [barcode part1]
  source 1..16: mol_type = other DNA
acgccggttctcaact

SEQ ID NO: 21073 - DNA, 16 bp, synthetic construct
  misc_feature 1..16: note = synthetic [barcode part1]
  source 1..16: mol_type = other DNA
tcacgtccgaattgcc

SEQ ID NO: 21074 - DNA, 16 bp, synthetic construct
  misc_feature 1..16: note = synthetic [barcode part1]
  source 1..16: mol_type = other DNA
gagttgcgcaggaact

SEQ ID NO: 21075 - DNA, 16 bp, synthetic construct
  misc_feature 1..16: note = synthetic [barcode part1]
  source 1..16: mol_type = other DNA
tggacgaacttgtctg

SEQ ID NO: 21076 - DNA, 16 bp, synthetic construct
  misc_feature 1..16: note = synthetic [barcode part1]
  source 1..16: mol_type = other DNA
actgtccacgaacctc

SEQ ID NO: 21077 - DNA, 16 bp, synthetic construct
  misc_feature 1..16: note = synthetic [barcode part1]
  source 1..16: mol_type = other DNA
cgtagactcgcgaatt

SEQ ID NO: 21078 - DNA, 16 bp, synthetic construct
  misc_feature 1..16: note = synthetic [barcode part1]
  source 1..16: mol_type = other DNA
aggttacggcgtgaac

SEQ ID NO: 21079 - DNA, 16 bp, synthetic construct
  misc_feature 1..16: note = synthetic [barcode part1]
  source 1..16: mol_type = other DNA
gaagtataccgccgag

SEQ ID NO: 21080 - DNA, 16 bp, synthetic construct
  misc_feature 1..16: note = synthetic [barcode part1]
  source 1..16: mol_type = other DNA
ccaaccttaagaggtc

SEQ ID NO: 21081 - DNA, 16 bp, synthetic construct
  misc_feature 1..16: note = synthetic [barcode part1]
  source 1..16: mol_type = other DNA
agaccgtacagagatt

SEQ ID NO: 21082 - DNA, 16 bp, synthetic construct
  misc_feature 1..16: note = synthetic [barcode part1]
  source 1..16: mol_type = other DNA
cgcaacagtggtatct

SEQ ID NO: 21083 - DNA, 16 bp, synthetic construct
  misc_feature 1..16: note = synthetic [barcode part1]
  source 1..16: mol_type = other DNA
cgtgaattgtccgaac

SEQ ID NO: 21084 - DNA, 16 bp, synthetic construct
  misc_feature 1..16: note = synthetic [barcode part1]
  source 1..16: mol_type = other DNA
tattggaaggtcgcct

SEQ ID NO: 21085 - DNA, 16 bp, synthetic construct
  misc_feature 1..16: note = synthetic [barcode part1]
  source 1..16: mol_type = other DNA
aggatagtcgtaggtt

SEQ ID NO: 21086 - DNA, 16 bp, synthetic construct
  misc_feature 1..16: note = synthetic [barcode part1]
  source 1..16: mol_type = other DNA
tcacgtcacttctgtc

SEQ ID NO: 21087 - DNA, 16 bp, synthetic construct
  misc_feature 1..16: note = synthetic [barcode part1]
  source 1..16: mol_type = other DNA
tgagttggactaccac

SEQ ID NO: 21088 - DNA, 16 bp, synthetic construct
  misc_feature 1..16: note = synthetic [barcode part1]
  source 1..16: mol_type = other DNA
aacaccttaccttgtg

SEQ ID NO: 21089 - DNA, 16 bp, synthetic construct
  misc_feature 1..16: note = synthetic [barcode part1]
  source 1..16: mol_type = other DNA
tctctctatcagtcgc

SEQ ID NO: 21090 - DNA, 16 bp, synthetic construct
  misc_feature 1..16: note = synthetic [barcode part1]
  source 1..16: mol_type = other DNA
agtcggccagttaatc

SEQ ID NO: 21091 - DNA, 16 bp, synthetic construct
  misc_feature 1..16: note = synthetic [barcode part1]
  source 1..16: mol_type = other DNA
agtgtggtagaccgtg

SEQ ID NO: 21092 - DNA, 16 bp, synthetic construct
  misc_feature 1..16: note = synthetic [barcode part1]
  source 1..16: mol_type = other DNA
gcacttcttgacgacc

SEQ ID NO: 21093 - DNA, 16 bp, synthetic construct
  misc_feature 1..16: note = synthetic [barcode part1]
  source 1..16: mol_type = other DNA
acgaatcctggatacc

SEQ ID NO: 21094 - DNA, 16 bp, synthetic construct
  misc_feature 1..16: note = synthetic [barcode part1]
  source 1..16: mol_type = other DNA
acttaccacctgtcct

SEQ ID NO: 21095 - DNA, 16 bp, synthetic construct
  misc_feature 1..16: note = synthetic [barcode part1]
  source 1..16: mol_type = other DNA
tacaacacactcacct

SEQ ID NO: 21096 - DNA, 16 bp, synthetic construct
  misc_feature 1..16: note = synthetic [barcode part1]
  source 1..16: mol_type = other DNA
aatcttcgcactcggc

SEQ ID NO: 21097 - DNA, 16 bp, synthetic construct
  misc_feature 1..16: note = synthetic [barcode part1]
  source 1..16: mol_type = other DNA
gaggtccttacttgcc

SEQ ID NO: 21098 - DNA, 16 bp, synthetic construct
  misc_feature 1..16: note = synthetic [barcode part1]
  source 1..16: mol_type = other DNA
tgcgtgaaggtatcct

SEQ ID NO: 21099 - DNA, 16 bp, synthetic construct
  misc_feature 1..16: note = synthetic [barcode part1]
  source 1..16: mol_type = other DNA
accagttccagttgag

SEQ ID NO: 21100 - DNA, 16 bp, synthetic construct
  misc_feature 1..16: note = synthetic [barcode part1]
  source 1..16: mol_type = other DNA
tctccggtacgtggtt

SEQ ID NO: 21101 - DNA, 16 bp, synthetic construct
  misc_feature 1..16: note = synthetic [barcode part1]
  source 1..16: mol_type = other DNA
acaagagtggcgacct

SEQ ID NO: 21102 - DNA, 16 bp, synthetic construct
  misc_feature 1..16: note = synthetic [barcode part1]
  source 1..16: mol_type = other DNA
ttcagtccacaatcgt

SEQ ID NO: 21103 - DNA, 16 bp, synthetic construct
  misc_feature 1..16: note = synthetic [barcode part1]
  source 1..16: mol_type = other DNA
tgtgcctcttacactc

SEQ ID NO: 21104 - DNA, 16 bp, synthetic construct
  misc_feature 1..16: note = synthetic [barcode part1]
  source 1..16: mol_type = other DNA
aacacctctgtcaccg

SEQ ID NO: 21105 - DNA, 16 bp, synthetic construct
  misc_feature 1..16: note = synthetic [barcode part1]
  source 1..16: mol_type = other DNA
gaactcttcggtcaag

SEQ ID NO: 21106 - DNA, 16 bp, synthetic construct
  misc_feature 1..16: note = synthetic [barcode part1]
  source 1..16: mol_type = other DNA
gatcacgaactgaagt

SEQ ID NO: 21107 - DNA, 16 bp, synthetic construct
  misc_feature 1..16: note = synthetic [barcode part1]
  source 1..16: mol_type = other DNA
aagacggcaggtgttc

SEQ ID NO: 21108 - DNA, 16 bp, synthetic construct
  misc_feature 1..16: note = synthetic [barcode part1]
  source 1..16: mol_type = other DNA
tccaccgttaggcgtt

SEQ ID NO: 21109 - DNA, 16 bp, synthetic construct
  misc_feature 1..16: note = synthetic [barcode part1]
  source 1..16: mol_type = other DNA
attcgccagtaccgtc

SEQ ID NO: 21110 - DNA, 16 bp, synthetic construct
  misc_feature 1..16: note = synthetic [barcode part1]
  source 1..16: mol_type = other DNA
agattacagacgtggt

SEQ ID NO: 21111 - DNA, 16 bp, synthetic construct
  misc_feature 1..16: note = synthetic [barcode part1]
  source 1..16: mol_type = other DNA
atcaacgccactgtcc

SEQ ID NO: 21112 - DNA, 16 bp, synthetic construct
  misc_feature 1..16: note = synthetic [barcode part1]
  source 1..16: mol_type = other DNA
gcaacgtggagttctt

SEQ ID NO: 21113 - DNA, 16 bp, synthetic construct
  misc_feature 1..16: note = synthetic [barcode part1]
  source 1..16: mol_type = other DNA
tcgcacgtctcttgag

SEQ ID NO: 21114 - DNA, 16 bp, synthetic construct
  misc_feature 1..16: note = synthetic [barcode part1]
  source 1..16: mol_type = other DNA
cagtgattacaccttc

SEQ ID NO: 21115 - DNA, 16 bp, synthetic construct
  misc_feature 1..16: note = synthetic [barcode part1]
  source 1..16: mol_type = other DNA
atcctccgttgtgcag

SEQ ID NO: 21116 - DNA, 16 bp, synthetic construct
  misc_feature 1..16: note = synthetic [barcode part1]
  source 1..16: mol_type = other DNA
taccagactcgtattc

SEQ ID NO: 21117 - DNA, 16 bp, synthetic construct
  misc_feature 1..16: note = synthetic [barcode part1]
  source 1..16: mol_type = other DNA
gcaggaagacctagtc

SEQ ID NO: 21118 - DNA, 16 bp, synthetic construct
  misc_feature 1..16: note = synthetic [barcode part1]
  source 1..16: mol_type = other DNA
acttgaccgatccaag

SEQ ID NO: 21119 - DNA, 16 bp, synthetic construct
  misc_feature 1..16: note = synthetic [barcode part1]
  source 1..16: mol_type = other DNA
gcgttatcaggacttg

SEQ ID NO: 21120 - DNA, 16 bp, synthetic construct
  misc_feature 1..16: note = synthetic [barcode part1]
  source 1..16: mol_type = other DNA
cgcgtgtgtactatag

SEQ ID NO: 21121 - DNA, 16 bp, synthetic construct
  misc_feature 1..16: note = synthetic [barcode part1]
  source 1..16: mol_type = other DNA
cacgtgcgattgattg

SEQ ID NO: 21122 - DNA, 16 bp, synthetic construct
  misc_feature 1..16: note = synthetic [barcode part1]
  source 1..16: mol_type = other DNA
gtgtaacgtgcgttac

SEQ ID NO: 21123 - DNA, 16 bp, synthetic construct
  misc_feature 1..16: note = synthetic [barcode part1]
  source 1..16: mol_type = other DNA
cctacgtaagagtacc

SEQ ID NO: 21124 - DNA, 16 bp, synthetic construct
  misc_feature 1..16: note = synthetic [barcode part1]
  source 1..16: mol_type = other DNA
tgatagagtggattcg

SEQ ID NO: 21125 - DNA, 16 bp, synthetic construct
  misc_feature 1..16: note = synthetic [barcode part1]
  source 1..16: mol_type = other DNA
ttcgcaccgacgattc

SEQ ID NO: 21126 - DNA, 16 bp, synthetic construct
  misc_feature 1..16: note = synthetic [barcode part1]
  source 1..16: mol_type = other DNA
tacaggcactctactt

SEQ ID NO: 21127 - DNA, 16 bp, synthetic construct
  misc_feature 1..16: note = synthetic [barcode part1]
  source 1..16: mol_type = other DNA
taaccaaggccaacct

SEQ ID NO: 21128 - DNA, 16 bp, synthetic construct
  misc_feature 1..16: note = synthetic [barcode part1]
  source 1..16: mol_type = other DNA
gactagttagtcgacc

SEQ ID NO: 21129 - DNA, 16 bp, synthetic construct
  misc_feature 1..16: note = synthetic [barcode part1]
  source 1..16: mol_type = other DNA
gacgttgagtcaacct

SEQ ID NO: 21130 - DNA, 16 bp, synthetic construct
  misc_feature 1..16: note = synthetic [barcode part1]
  source 1..16: mol_type = other DNA
ttgacggaagtgtagt

SEQ ID NO: 21131 - DNA, 16 bp, synthetic construct
  misc_feature 1..16: note = synthetic [barcode part1]
  source 1..16: mol_type = other DNA
cacctctgagatacag

SEQ ID NO: 21132 - DNA, 16 bp, synthetic construct
  misc_feature 1..16: note = synthetic [barcode part1]
  source 1..16: mol_type = other DNA
tcttcagacgtcagtt

SEQ ID NO: 21133 - DNA, 16 bp, synthetic construct
  misc_feature 1..16: note = synthetic [barcode part1]
  source 1..16: mol_type = other DNA
tctccagtaacgcacc

SEQ ID NO: 21134 - DNA, 16 bp, synthetic construct
  misc_feature 1..16: note = synthetic [barcode part1]
  source 1..16: mol_type = other DNA
attactaccaggccag

SEQ ID NO: 21135 - DNA, 16 bp, synthetic construct
  misc_feature 1..16: note = synthetic [barcode part1]
  source 1..16: mol_type = other DNA
gtgcgaagtagtccag

SEQ ID NO: 21136 - DNA, 16 bp, synthetic construct
  misc_feature 1..16: note = synthetic [barcode part1]
  source 1..16: mol_type = other DNA
aagaactcgtgcgacg

SEQ ID NO: 21137 - DNA, 16 bp, synthetic construct
  misc_feature 1..16: note = synthetic [barcode part1]
  source 1..16: mol_type = other DNA
tagaggcggtgacttg

SEQ ID NO: 21138 - DNA, 16 bp, synthetic construct
  misc_feature 1..16: note = synthetic [barcode part1]
  source 1..16: mol_type = other DNA
gtcgaccgattaatcg

SEQ ID NO: 21139 - DNA, 16 bp, synthetic construct
  misc_feature 1..16: note = synthetic [barcode part1]
  source 1..16: mol_type = other DNA
aacaccaattacggcc

SEQ ID NO: 21140 - DNA, 16 bp, synthetic construct
  misc_feature 1..16: note = synthetic [barcode part1]
  source 1..16: mol_type = other DNA
gttataagaacggacc

SEQ ID NO: 21141 - DNA, 16 bp, synthetic construct
  misc_feature 1..16: note = synthetic [barcode part1]
  source 1..16: mol_type = other DNA
aagtgcctctactgtt

SEQ ID NO: 21142 - DNA, 16 bp, synthetic construct
  misc_feature 1..16: note = synthetic [barcode part1]
  source 1..16: mol_type = other DNA
acgacgttacgtgtgt

SEQ ID NO: 21143 - DNA, 16 bp, synthetic construct
  misc_feature 1..16: note = synthetic [barcode part1]
  source 1..16: mol_type = other DNA
gactaacttgactggc

SEQ ID NO: 21144 - DNA, 16 bp, synthetic construct
  misc_feature 1..16: note = synthetic [barcode part1]
  source 1..16: mol_type = other DNA
actgcaatccgtccac

SEQ ID NO: 21145 - DNA, 16 bp, synthetic construct
  misc_feature 1..16: note = synthetic [barcode part1]
  source 1..16: mol_type = other DNA
aagataagtccacggt

SEQ ID NO: 21146 - DNA, 16 bp, synthetic construct
  misc_feature 1..16: note = synthetic [barcode part1]
  source 1..16: mol_type = other DNA
gtgattcctcggtaag

SEQ ID NO: 21147 - DNA, 16 bp, synthetic construct
  misc_feature 1..16: note = synthetic [barcode part1]
  source 1..16: mol_type = other DNA
ataccgttgagtagag

SEQ ID NO: 21148 - DNA, 16 bp, synthetic construct
  misc_feature 1..16: note = synthetic [barcode part1]
  source 1..16: mol_type = other DNA
caattctcctcagtcc

SEQ ID NO: 21149 - DNA, 16 bp, synthetic construct
  misc_feature 1..16: note = synthetic [barcode part1]
  source 1..16: mol_type = other DNA
atcggaccaggaacgt

SEQ ID NO: 21150 - DNA, 16 bp, synthetic construct
  misc_feature 1..16: note = synthetic [barcode part1]
  source 1..16: mol_type = other DNA
caactcctcttgactc

SEQ ID NO: 21151 - DNA, 16 bp, synthetic construct
  misc_feature 1..16: note = synthetic [barcode part1]
  source 1..16: mol_type = other DNA
caagatatccacgaag

SEQ ID NO: 21152 - DNA, 16 bp, synthetic construct
  misc_feature 1..16: note = synthetic [barcode part1]
  source 1..16: mol_type = other DNA
tgaaggacgactgcgt

SEQ ID NO: 21153 - DNA, 16 bp, synthetic construct
  misc_feature 1..16: note = synthetic [barcode part1]
  source 1..16: mol_type = other DNA
cacgcaacaagtctgt

SEQ ID NO: 21154 - DNA, 16 bp, synthetic construct
  misc_feature 1..16: note = synthetic [barcode part1]
  source 1..16: mol_type = other DNA
attgaaggcacactag

SEQ ID NO: 21155 - DNA, 16 bp, synthetic construct
  misc_feature 1..16: note = synthetic [barcode part1]
  source 1..16: mol_type = other DNA
tgcggcacactataac

SEQ ID NO: 21156 - DNA, 16 bp, synthetic construct
  misc_feature 1..16: note = synthetic [barcode part1]
  source 1..16: mol_type = other DNA
accgcaggtaatatcc

SEQ ID NO: 21157 - DNA, 16 bp, synthetic construct
  misc_feature 1..16: note = synthetic [barcode part1]
  source 1..16: mol_type = other DNA
atccggaataggcctt

SEQ ID NO: 21158 - DNA, 16 bp, synthetic construct
  misc_feature 1..16: note = synthetic [barcode part1]
  source 1..16: mol_type = other DNA
tggtcctctctaatcc

SEQ ID NO: 21159 - DNA, 16 bp, synthetic construct
  misc_feature 1..16: note = synthetic [barcode part1]
  source 1..16: mol_type = other DNA
ccgacggtgaattact

SEQ ID NO: 21160 - DNA, 16 bp, synthetic construct
  misc_feature 1..16: note = synthetic [barcode part1]
  source 1..16: mol_type = other DNA
gccgatagaattaggt

SEQ ID NO: 21161 - DNA, 16 bp, synthetic construct
  misc_feature 1..16: note = synthetic [barcode part1]
  source 1..16: mol_type = other DNA
ttcacaggtgagtctg

SEQ ID NO: 21162 - DNA, 16 bp, synthetic construct
  misc_feature 1..16: note = synthetic [barcode part1]
  source 1..16: mol_type = other DNA
tccttggtcgaagaac

SEQ ID NO: 21163 - DNA, 16 bp, synthetic construct
  misc_feature 1..16: note = synthetic [barcode part1]
  source 1..16: mol_type = other DNA
tcactataacgtccac

SEQ ID NO: 21164 - DNA, 16 bp, synthetic construct
  misc_feature 1..16: note = synthetic [barcode part1]
  source 1..16: mol_type = other DNA
actcctaacctccgtt

SEQ ID NO: 21165 - DNA, 16 bp, synthetic construct
  misc_feature 1..16: note = synthetic [barcode part1]
  source 1..16: mol_type = other DNA
tctaactgcgttggcc

SEQ ID NO: 21166 - DNA, 16 bp, synthetic construct
  misc_feature 1..16: note = synthetic [barcode part1]
  source 1..16: mol_type = other DNA
cggtgtaggaataact

SEQ ID NO: 21167 - DNA, 16 bp, synthetic construct
  misc_feature 1..16: note = synthetic [barcode part1]
  source 1..16: mol_type = other DNA
cagtggacaagtaccg

SEQ ID NO: 21168 - DNA, 16 bp, synthetic construct
  misc_feature 1..16: note = synthetic [barcode part1]
  source 1..16: mol_type = other DNA
cgccaagatctagtac

SEQ ID NO: 21169 - DNA, 16 bp, synthetic construct
  misc_feature 1..16: note = synthetic [barcode part1]
  source 1..16: mol_type = other DNA
caaccggaagatcttc

SEQ ID NO: 21170 - DNA, 16 bp, synthetic construct
  misc_feature 1..16: note = synthetic [barcode part1]
  source 1..16: mol_type = other DNA
ttgccacctgcagatc

SEQ ID NO: 21171 - DNA, 16 bp, synthetic construct
  misc_feature 1..16: note = synthetic [barcode part1]
  source 1..16: mol_type = other DNA
attaccggtcgtcaag

SEQ ID NO: 21172 - DNA, 16 bp, synthetic construct
  misc_feature 1..16: note = synthetic [barcode part1]
  source 1..16: mol_type = other DNA
agttcggaccgaactt

SEQ ID NO: 21173 - DNA, 16 bp, synthetic construct
  misc_feature 1..16: note = synthetic [barcode part1]
  source 1..16: mol_type = other DNA
gtaattgagaggacct

SEQ ID NO: 21174 - DNA, 16 bp, synthetic construct
  misc_feature 1..16: note = synthetic [barcode part1]
  source 1..16: mol_type = other DNA
agtctgaactggactc

SEQ ID NO: 21175 - DNA, 16 bp, synthetic construct
  misc_feature 1..16: note = synthetic [barcode part1]
  source 1..16: mol_type = other DNA
gcactagaagaatcgt

SEQ ID NO: 21176 - DNA, 16 bp, synthetic construct
  misc_feature 1..16: note = synthetic [barcode part1]
  source 1..16: mol_type = other DNA
cgcggagttcttatag

SEQ ID NO: 21177 - DNA, 16 bp, synthetic construct
  misc_feature 1..16: note = synthetic [barcode part1]
  source 1..16: mol_type = other DNA
atcgcaggacgaacgt

SEQ ID NO: 21178 - DNA, 16 bp, synthetic construct
  misc_feature 1..16: note = synthetic [barcode part1]
  source 1..16: mol_type = other DNA
gttggaggatcttctg

SEQ ID NO: 21179 - DNA, 16 bp, synthetic construct
  misc_feature 1..16: note = synthetic [barcode part1]
  source 1..16: mol_type = other DNA
ttccagaccactcacg

SEQ ID NO: 21180 - DNA, 16 bp, synthetic construct
  misc_feature 1..16: note = synthetic [barcode part1]
  source 1..16: mol_type = other DNA
gatcacagaggccaac

SEQ ID NO: 21181 - DNA, 16 bp, synthetic construct
  misc_feature 1..16: note = synthetic [barcode part1]
  source 1..16: mol_type = other DNA
aacgactagaatacgc

SEQ ID NO: 21182 - DNA, 16 bp, synthetic construct
  misc_feature 1..16: note = synthetic [barcode part1]
  source 1..16: mol_type = other DNA
tactaggaacggttcc

SEQ ID NO: 21183 - DNA, 16 bp, synthetic construct
  misc_feature 1..16: note = synthetic [barcode part1]
  source 1..16: mol_type = other DNA
gcgcacaattacaacc

SEQ ID NO: 21184 - DNA, 16 bp, synthetic construct
  misc_feature 1..16: note = synthetic [barcode part1]
  source 1..16: mol_type = other DNA
tcagttccgaggaact

SEQ ID NO: 21185 - DNA, 16 bp, synthetic construct
  misc_feature 1..16: note = synthetic [barcode part1]
  source 1..16: mol_type = other DNA
taccaggtaccgaact

SEQ ID NO: 21186 - DNA, 16 bp, synthetic construct
  misc_feature 1..16: note = synthetic [barcode part1]
  source 1..16: mol_type = other DNA
ttaggactaccacgac

SEQ ID NO: 21187 - DNA, 16 bp, synthetic construct
  misc_feature 1..16: note = synthetic [barcode part1]
  source 1..16: mol_type = other DNA
actcgcgactgagaag

SEQ ID NO: 21188 - DNA, 16 bp, synthetic construct
  misc_feature 1..16: note = synthetic [barcode part1]
  source 1..16: mol_type = other DNA
tcacctgagacctcac

SEQ ID NO: 21189 - DNA, 16 bp, synthetic construct
  misc_feature 1..16: note = synthetic [barcode part1]
  source 1..16: mol_type = other DNA
acgacagacagaacag

SEQ ID NO: 21190 - DNA, 16 bp, synthetic construct
  misc_feature 1..16: note = synthetic [barcode part1]
  source 1..16: mol_type = other DNA
cacgaaggttaccgag

SEQ ID NO: 21191 - DNA, 16 bp, synthetic construct
  misc_feature 1..16: note = synthetic [barcode part1]
  source 1..16: mol_type = other DNA
caggactgtacgtgtt

SEQ ID NO: 21192 - DNA, 16 bp, synthetic construct
  misc_feature 1..16: note = synthetic [barcode part1]
  source 1..16: mol_type = other DNA
gaactacaagtgtgac

SEQ ID NO: 21193 - DNA, 16 bp, synthetic construct
  misc_feature 1..16: note = synthetic [barcode part1]
  source 1..16: mol_type = other DNA
taagtcctccgagtag

SEQ ID NO: 21194 - DNA, 16 bp, synthetic construct
  misc_feature 1..16: note = synthetic [barcode part1]
  source 1..16: mol_type = other DNA
taccagtgatctcttg

SEQ ID NO: 21195 - DNA, 16 bp, synthetic construct
  misc_feature 1..16: note = synthetic [barcode part1]
  source 1..16: mol_type = other DNA
cgtctcagataggatc

SEQ ID NO: 21196 - DNA, 16 bp, synthetic construct
  misc_feature 1..16: note = synthetic [barcode part1]
  source 1..16: mol_type = other DNA
tctgcctggtactacg

SEQ ID NO: 21197 - DNA, 16 bp, synthetic construct
  misc_feature 1..16: note = synthetic [barcode part1]
  source 1..16: mol_type = other DNA
tggaggttggatcgtg

SEQ ID NO: 21198 - DNA, 16 bp, synthetic construct
  misc_feature 1..16: note = synthetic [barcode part1]
  source 1..16: mol_type = other DNA
aatcctgtctatccag

SEQ ID NO: 21199 - DNA, 16 bp, synthetic construct
  misc_feature 1..16: note = synthetic [barcode part1]
  source 1..16: mol_type = other DNA
cgcgatacttgaggtt

SEQ ID NO: 21200 - DNA, 16 bp, synthetic construct
  misc_feature 1..16: note = synthetic [barcode part1]
  source 1..16: mol_type = other DNA
cggcgactgataatct

SEQ ID NO: 21201 - DNA, 16 bp, synthetic construct
  misc_feature 1..16: note = synthetic [barcode part1]
  source 1..16: mol_type = other DNA
ccgaagtggtgaacgt

SEQ ID NO: 21202 - DNA, 16 bp, synthetic construct
  misc_feature 1..16: note = synthetic [barcode part1]
  source 1..16: mol_type = other DNA
ttcaatccgtgcaatc

SEQ ID NO: 21203 - DNA, 16 bp, synthetic construct
  misc_feature 1..16: note = synthetic [barcode part1]
  source 1..16: mol_type = other DNA
gacgtgtcaacgtgtt

SEQ ID NO: 21204 - DNA, 16 bp, synthetic construct
  misc_feature 1..16: note = synthetic [barcode part1]
  source 1..16: mol_type = other DNA
actacgtggttcacag

SEQ ID NO: 21205 - DNA, 16 bp, synthetic construct
  misc_feature 1..16: note = synthetic [barcode part1]
  source 1..16: mol_type = other DNA
gtaacgtggttggttc

SEQ ID NO: 21206 - DNA, 16 bp, synthetic construct
  misc_feature 1..16: note = synthetic [barcode part1]
  source 1..16: mol_type = other DNA
gtctgtcagtaccgtc

SEQ ID NO: 21207 - DNA, 16 bp, synthetic construct
  misc_feature 1..16: note = synthetic [barcode part1]
  source 1..16: mol_type = other DNA
gttccacacttcctac

SEQ ID NO: 21208 - DNA, 16 bp, synthetic construct
  misc_feature 1..16: note = synthetic [barcode part1]
  source 1..16: mol_type = other DNA
ttggcggtactcctac

SEQ ID NO: 21209 - DNA, 16 bp, synthetic construct
  misc_feature 1..16: note = synthetic [barcode part1]
  source 1..16: mol_type = other DNA
tgaaggaaggagacct

SEQ ID NO: 21210 - DNA, 16 bp, synthetic construct
  misc_feature 1..16: note = synthetic [barcode part1]
  source 1..16: mol_type = other DNA
attaggtgcctctact

SEQ ID NO: 21211 - DNA, 16 bp, synthetic construct
  misc_feature 1..16: note = synthetic [barcode part1]
  source 1..16: mol_type = other DNA
tacctgtggacagact

SEQ ID NO: 21212 - DNA, 16 bp, synthetic construct
  misc_feature 1..16: note = synthetic [barcode part1]
  source 1..16: mol_type = other DNA
gacgacactataggcg

SEQ ID NO: 21213 - DNA, 16 bp, synthetic construct
  misc_feature 1..16: note = synthetic [barcode part1]
  source 1..16: mol_type = other DNA
ttgttgtgtagacctc

SEQ ID NO: 21214 - DNA, 16 bp, synthetic construct
  misc_feature 1..16: note = synthetic [barcode part1]
  source 1..16: mol_type = other DNA
gagattcacagacaac

SEQ ID NO: 21215 - DNA, 16 bp, synthetic construct
  misc_feature 1..16: note = synthetic [barcode part1]
  source 1..16: mol_type = other DNA
gcgactgttctagtcc

SEQ ID NO: 21216 - DNA, 16 bp, synthetic construct
  misc_feature 1..16: note = synthetic [barcode part1]
  source 1..16: mol_type = other DNA
acgtatctactggcag

SEQ ID NO: 21217 - DNA, 16 bp, synthetic construct
  misc_feature 1..16: note = synthetic [barcode part1]
  source 1..16: mol_type = other DNA
cacaccttaagttacc

SEQ ID NO: 21218 - DNA, 16 bp, synthetic construct
  misc_feature 1..16: note = synthetic [barcode part1]
  source 1..16: mol_type = other DNA
tattagacggaccgtc

SEQ ID NO: 21219 - DNA, 16 bp, synthetic construct
  misc_feature 1..16: note = synthetic [barcode part1]
  source 1..16: mol_type = other DNA
taagtactggtctcct

SEQ ID NO: 21220 - DNA, 16 bp, synthetic construct
  misc_feature 1..16: note = synthetic [barcode part1]
  source 1..16: mol_type = other DNA
gacactggatcaacct

SEQ ID NO: 21221 - DNA, 16 bp, synthetic construct
  misc_feature 1..16: note = synthetic [barcode part1]
  source 1..16: mol_type = other DNA
tagagatcgccgagtg

SEQ ID NO: 21222 - DNA, 16 bp, synthetic construct
  misc_feature 1..16: note = synthetic [barcode part1]
  source 1..16: mol_type = other DNA
ttcacgaagtgaagtg

SEQ ID NO: 21223 - DNA, 16 bp, synthetic construct
  misc_feature 1..16: note = synthetic [barcode part1]
  source 1..16: mol_type = other DNA
atctgtcttgcagtgt

SEQ ID NO: 21224 - DNA, 16 bp, synthetic construct
  misc_feature 1..16: note = synthetic [barcode part1]
  source 1..16: mol_type = other DNA
atagagtgtagatccg

SEQ ID NO: 21225 - DNA, 16 bp, synthetic construct
  misc_feature 1..16: note = synthetic [barcode part1]
  source 1..16: mol_type = other DNA
cagtctaggtaactcg

SEQ ID NO: 21226 - DNA, 16 bp, synthetic construct
  misc_feature 1..16: note = synthetic [barcode part1]
  source 1..16: mol_type = other DNA
gtgattcagacgcgag

SEQ ID NO: 21227 - DNA, 16 bp, synthetic construct
  misc_feature 1..16: note = synthetic [barcode part1]
  source 1..16: mol_type = other DNA
gtccggtaaggtgtag

SEQ ID NO: 21228 - DNA, 16 bp, synthetic construct
  misc_feature 1..16: note = synthetic [barcode part1]
  source 1..16: mol_type = other DNA
gaaccagattggcacg

SEQ ID NO: 21229 - DNA, 16 bp, synthetic construct
  misc_feature 1..16: note = synthetic [barcode part1]
  source 1..16: mol_type = other DNA
acctgaattattccgc

SEQ ID NO: 21230 - DNA, 16 bp, synthetic construct
  misc_feature 1..16: note = synthetic [barcode part1]
  source 1..16: mol_type = other DNA
ataaccggacctcctc

SEQ ID NO: 21231 - DNA, 16 bp, synthetic construct
  misc_feature 1..16: note = synthetic [barcode part1]
  source 1..16: mol_type = other DNA
gtctctaagtgacctt

SEQ ID NO: 21232 - DNA, 16 bp, synthetic construct
  misc_feature 1..16: note = synthetic [barcode part1]
  source 1..16: mol_type = other DNA
ttggcgactcacgtct

SEQ ID NO: 21233 - DNA, 16 bp, synthetic construct
  misc_feature 1..16: note = synthetic [barcode part1]
  source 1..16: mol_type = other DNA
aggtccaatccgaact

SEQ ID NO: 21234 - DNA, 16 bp, synthetic construct
  misc_feature 1..16: note = synthetic [barcode part1]
  source 1..16: mol_type = other DNA
aggcaccaatattcgc

SEQ ID NO: 21235 - DNA, 16 bp, synthetic construct
  misc_feature 1..16: note = synthetic [barcode part1]
  source 1..16: mol_type = other DNA
tgccttgtagagtgac

SEQ ID NO: 21236 - DNA, 16 bp, synthetic construct
  misc_feature 1..16: note = synthetic [barcode part1]
  source 1..16: mol_type = other DNA
ttgactcacaaggcgt

SEQ ID NO: 21237 - DNA, 16 bp, synthetic construct
  misc_feature 1..16: note = synthetic [barcode part1]
  source 1..16: mol_type = other DNA
tcggaccgaagtacag

SEQ ID NO: 21238 - DNA, 16 bp, synthetic construct
  misc_feature 1..16: note = synthetic [barcode part1]
  source 1..16: mol_type = other DNA
gccgtacttaagtgtg

SEQ ID NO: 21239 - DNA, 16 bp, synthetic construct
  misc_feature 1..16: note = synthetic [barcode part1]
  source 1..16: mol_type = other DNA
aggtcttaaccgatcg

SEQ ID NO: 21240 - DNA, 16 bp, synthetic construct
  misc_feature 1..16: note = synthetic [barcode part1]
  source 1..16: mol_type = other DNA
tgcgccaggaatcaag

SEQ ID NO: 21241 - DNA, 16 bp, synthetic construct
  misc_feature 1..16: note = synthetic [barcode part1]
  source 1..16: mol_type = other DNA
gaattgacacgactag

SEQ ID NO: 21242 - DNA, 16 bp, synthetic construct
  misc_feature 1..16: note = synthetic [barcode part1]
  source 1..16: mol_type = other DNA
tacgttgttctaaccg

SEQ ID NO: 21243 - DNA, 16 bp, synthetic construct
  misc_feature 1..16: note = synthetic [barcode part1]
  source 1..16: mol_type = other DNA
gtcagtatcacgcaac

SEQ ID NO: 21244 - DNA, 16 bp, synthetic construct
  misc_feature 1..16: note = synthetic [barcode part1]
  source 1..16: mol_type = other DNA
gttgcaacctgaagtc

SEQ ID NO: 21245 - DNA, 16 bp, synthetic construct
  misc_feature 1..16: note = synthetic [barcode part1]
  source 1..16: mol_type = other DNA
gaatcaaccagaggag

SEQ ID NO: 21246 - DNA, 16 bp, synthetic construct
  misc_feature 1..16: note = synthetic [barcode part1]
  source 1..16: mol_type = other DNA
tacgtcaagaaggccg

SEQ ID NO: 21247 - DNA, 16 bp, synthetic construct
  misc_feature 1..16: note = synthetic [barcode part1]
  source 1..16: mol_type = other DNA
ccgttcgaccttgagt

SEQ ID NO: 21248 - DNA, 16 bp, synthetic construct
  misc_feature 1..16: note = synthetic [barcode part1]
  source 1..16: mol_type = other DNA
acacgcgccaattaac

SEQ ID NO: 21249 - DNA, 16 bp, synthetic construct
  misc_feature 1..16: note = synthetic [barcode part1]
  source 1..16: mol_type = other DNA
gagacgaattccactc

SEQ ID NO: 21250 - DNA, 16 bp, synthetic construct
  misc_feature 1..16: note = synthetic [barcode part1]
  source 1..16: mol_type = other DNA
taccaaggtccagtac

SEQ ID NO: 21251 - DNA, 16 bp, synthetic construct
  misc_feature 1..16: note = synthetic [barcode part1]
  source 1..16: mol_type = other DNA
agaagtgtaggtcact

SEQ ID NO: 21252 - DNA, 16 bp, synthetic construct
  misc_feature 1..16: note = synthetic [barcode part1]
  source 1..16: mol_type = other DNA
atacggccaactgtgt

SEQ ID NO: 21253 - DNA, 16 bp, synthetic construct
  misc_feature 1..16: note = synthetic [barcode part1]
  source 1..16: mol_type = other DNA
gataaccggagtgcac

SEQ ID NO: 21254 - DNA, 16 bp, synthetic construct
  misc_feature 1..16: note = synthetic [barcode part1]
  source 1..16: mol_type = other DNA
tctcaattctccggtc

SEQ ID NO: 21255 - DNA, 16 bp, synthetic construct
  misc_feature 1..16: note = synthetic [barcode part1]
  source 1..16: mol_type = other DNA
gaccacagatcggagt

SEQ ID NO: 21256 - DNA, 16 bp, synthetic construct
  misc_feature 1..16: note = synthetic [barcode part1]
  source 1..16: mol_type = other DNA
ccttgaacacttactg

SEQ ID NO: 21257 - DNA, 16 bp, synthetic construct
  misc_feature 1..16: note = synthetic [barcode part1]
  source 1..16: mol_type = other DNA
tcgttgatagtccgag

SEQ ID NO: 21258 - DNA, 16 bp, synthetic construct
  misc_feature 1..16: note = synthetic [barcode part1]
  source 1..16: mol_type = other DNA
attgagtgacacaggt

SEQ ID NO: 21259 - DNA, 16 bp, synthetic construct
  misc_feature 1..16: note = synthetic [barcode part1]
  source 1..16: mol_type = other DNA
ttacggataagaggtc

SEQ ID NO: 21260 - DNA, 16 bp, synthetic construct
  misc_feature 1..16: note = synthetic [barcode part1]
  source 1..16: mol_type = other DNA
aagaagtgtctgaacc

SEQ ID NO: 21261 - DNA, 16 bp, synthetic construct
  misc_feature 1..16: note = synthetic [barcode part1]
  source 1..16: mol_type = other DNA
ttatctgcactcgtcc

SEQ ID NO: 21262 - DNA, 16 bp, synthetic construct
  misc_feature 1..16: note = synthetic [barcode part1]
  source 1..16: mol_type = other DNA
tgtactcttcggcggt

SEQ ID NO: 21263 - DNA, 16 bp, synthetic construct
  misc_feature 1..16: note = synthetic [barcode part1]
  source 1..16: mol_type = other DNA
caggtgtcacaagtct

SEQ ID NO: 21264 - DNA, 16 bp, synthetic construct
  misc_feature 1..16: note = synthetic [barcode part1]
  source 1..16: mol_type = other DNA
tctcacaatcgttggt

SEQ ID NO: 21265 - DNA, 16 bp, synthetic construct
  misc_feature 1..16: note = synthetic [barcode part1]
  source 1..16: mol_type = other DNA
ttgttctgcgcgactg

SEQ ID NO: 21266 - DNA, 16 bp, synthetic construct
  misc_feature 1..16: note = synthetic [barcode part1]
  source 1..16: mol_type = other DNA
cgacgactacacttcc

SEQ ID NO: 21267 - DNA, 16 bp, synthetic construct
  misc_feature 1..16: note = synthetic [barcode part1]
  source 1..16: mol_type = other DNA
cgcgatcttcttgacg

SEQ ID NO: 21268 - DNA, 16 bp, synthetic construct
  misc_feature 1..16: note = synthetic [barcode part1]
  source 1..16: mol_type = other DNA
gaagtcttgaacgaac

SEQ ID NO: 21269 - DNA, 16 bp, synthetic construct
  misc_feature 1..16: note = synthetic [barcode part1]
  source 1..16: mol_type = other DNA
attcctggagtacggt

SEQ ID NO: 21270 - DNA, 16 bp, synthetic construct
  misc_feature 1..16: note = synthetic [barcode part1]
  source 1..16: mol_type = other DNA
aatactacgacgccac

SEQ ID NO: 21271 - DNA, 16 bp, synthetic construct
  misc_feature 1..16: note = synthetic [barcode part1]
  source 1..16: mol_type = other DNA
agatccacttgtaggc

SEQ ID NO: 21272 - DNA, 16 bp, synthetic construct
  misc_feature 1..16: note = synthetic [barcode part1]
  source 1..16: mol_type = other DNA
gtgacagttgtcactg

SEQ ID NO: 21273 - DNA, 16 bp, synthetic construct
  misc_feature 1..16: note = synthetic [barcode part1]
  source 1..16: mol_type = other DNA
ccagtccaggtgtctt

SEQ ID NO: 21274 - DNA, 16 bp, synthetic construct
  misc_feature 1..16: note = synthetic [barcode part1]
  source 1..16: mol_type = other DNA
acaactgccaatcttc

SEQ ID NO: 21275 - DNA, 16 bp, synthetic construct
  misc_feature 1..16: note = synthetic [barcode part1]
  source 1..16: mol_type = other DNA
gaccaagatcttccag

SEQ ID NO: 21276 - DNA, 16 bp, synthetic construct
  misc_feature 1..16: note = synthetic [barcode part1]
  source 1..16: mol_type = other DNA
ttgacgtcctcaaccg

SEQ ID NO: 21277 - DNA, 16 bp, synthetic construct
  misc_feature 1..16: note = synthetic [barcode part1]
  source 1..16: mol_type = other DNA
tcggcaagacacaggt

SEQ ID NO: 21278 - DNA, 16 bp, synthetic construct
  misc_feature 1..16: note = synthetic [barcode part1]
  source 1..16: mol_type = other DNA
cgaataacctgtccag

SEQ ID NO: 21279 - DNA, 16 bp, synthetic construct
  misc_feature 1..16: note = synthetic [barcode part1]
  source 1..16: mol_type = other DNA
atctctagacacaggc

SEQ ID NO: 21280 - DNA, 16 bp, synthetic construct
  misc_feature 1..16: note = synthetic [barcode part1]
  source 1..16: mol_type = other DNA
tatccttgtcgaatcg

SEQ ID NO: 21281 - DNA, 16 bp, synthetic construct
  misc_feature 1..16: note = synthetic [barcode part1]
  source 1..16: mol_type = other DNA
cctgaattcaccgtcg

SEQ ID NO: 21282 - DNA, 16 bp, synthetic construct
  misc_feature 1..16: note = synthetic [barcode part1]
  source 1..16: mol_type = other DNA
tcagaggcgtagatcg

SEQ ID NO: 21283 - DNA, 16 bp, synthetic construct
  misc_feature 1..16: note = synthetic [barcode part1]
  source 1..16: mol_type = other DNA
gataagtgcagtgttg

SEQ ID NO: 21284 - DNA, 16 bp, synthetic construct
  misc_feature 1..16: note = synthetic [barcode part1]
  source 1..16: mol_type = other DNA
atcacgagtgaacggc

SEQ ID NO: 21285 - DNA, 16 bp, synthetic construct
  misc_feature 1..16: note = synthetic [barcode part1]
  source 1..16: mol_type = other DNA
tcggcggaatacgagt

SEQ ID NO: 21286 - DNA, 16 bp, synthetic construct
  misc_feature 1..16: note = synthetic [barcode part1]
  source 1..16: mol_type = other DNA
tctatacggtccaatc

SEQ ID NO: 21287 - DNA, 16 bp, synthetic construct
  misc_feature 1..16: note = synthetic [barcode part1]
  source 1..16: mol_type = other DNA
tacggcggcaagtaac

SEQ ID NO: 21288 - DNA, 16 bp, synthetic construct
  misc_feature 1..16: note = synthetic [barcode part1]
  source 1..16: mol_type = other DNA
ttcgtatccaggttac

SEQ ID NO: 21289 - DNA, 16 bp, synthetic construct
  misc_feature 1..16: note = synthetic [barcode part1]
  source 1..16: mol_type = other DNA
tctcctgtgttggcag

SEQ ID NO: 21290 - DNA, 16 bp, synthetic construct
  misc_feature 1..16: note = synthetic [barcode part1]
  source 1..16: mol_type = other DNA
cactaagacctccgtc

SEQ ID NO: 21291 - DNA, 16 bp, synthetic construct
  misc_feature 1..16: note = synthetic [barcode part1]
  source 1..16: mol_type = other DNA
tggcaattcctcgtgc

SEQ ID NO: 21292 - DNA, 16 bp, synthetic construct
  misc_feature 1..16: note = synthetic [barcode part1]
  source 1..16: mol_type = other DNA
taggttacgacgacct

SEQ ID NO: 21293 - DNA, 16 bp, synthetic construct
  misc_feature 1..16: note = synthetic [barcode part1]
  source 1..16: mol_type = other DNA
tcgatctgtgagacgt

SEQ ID NO: 21294 - DNA, 16 bp, synthetic construct
  misc_feature 1..16: note = synthetic [barcode part1]
  source 1..16: mol_type = other DNA
gatccgcaacaaggtg

SEQ ID NO: 21295 - DNA, 16 bp, synthetic construct
  misc_feature 1..16: note = synthetic [barcode part1]
  source 1..16: mol_type = other DNA
ttgtgtggtacgtcag

SEQ ID NO: 21296 - DNA, 16 bp, synthetic construct
  misc_feature 1..16: note = synthetic [barcode part1]
  source 1..16: mol_type = other DNA
cgattgtaggtacctg

SEQ ID NO: 21297 - DNA, 16 bp, synthetic construct
  misc_feature 1..16: note = synthetic [barcode part1]
  source 1..16: mol_type = other DNA
tgaaggccgagttgtg

SEQ ID NO: 21298 - DNA, 16 bp, synthetic construct
  misc_feature 1..16: note = synthetic [barcode part1]
  source 1..16: mol_type = other DNA
gttaagttacctccgt

SEQ ID NO: 21299 - DNA, 16 bp, synthetic construct
  misc_feature 1..16: note = synthetic [barcode part1]
  source 1..16: mol_type = other DNA
tgatacactggcgtgt

SEQ ID NO: 21300 - DNA, 16 bp, synthetic construct
  misc_feature 1..16: note = synthetic [barcode part1]
  source 1..16: mol_type = other DNA
gaccagtacactgtgt

SEQ ID NO: 21301 - DNA, 16 bp, synthetic construct
  misc_feature 1..16: note = synthetic [barcode part1]
  source 1..16: mol_type = other DNA
cgtaggaatcactaag

SEQ ID NO: 21302 - DNA, 16 bp, synthetic construct
  misc_feature 1..16: note = synthetic [barcode part1]
  source 1..16: mol_type = other DNA
gaacctacaggagacc

SEQ ID NO: 21303 - DNA, 16 bp, synthetic construct
  misc_feature 1..16: note = synthetic [barcode part1]
  source 1..16: mol_type = other DNA
gccagtgttgtgtaac

SEQ ID NO: 21304 - DNA, 16 bp, synthetic construct
  misc_feature 1..16: note = synthetic [barcode part1]
  source 1..16: mol_type = other DNA
cgtcttaggatctact

SEQ ID NO: 21305 - DNA, 16 bp, synthetic construct
  misc_feature 1..16: note = synthetic [barcode part1]
  source 1..16: mol_type = other DNA
atcagatcggaggcgt

SEQ ID NO: 21306 - DNA, 16 bp, synthetic construct
  misc_feature 1..16: note = synthetic [barcode part1]
  source 1..16: mol_type = other DNA
acttgagttgtctcac

SEQ ID NO: 21307 - DNA, 16 bp, synthetic construct
  misc_feature 1..16: note = synthetic [barcode part1]
  source 1..16: mol_type = other DNA
ttatcgtggacggtac

SEQ ID NO: 21308 - DNA, 16 bp, synthetic construct
  misc_feature 1..16: note = synthetic [barcode part1]
  source 1..16: mol_type = other DNA
cagtacaccttgtcgc

SEQ ID NO: 21309 - DNA, 16 bp, synthetic construct
  misc_feature 1..16: note = synthetic [barcode part1]
  source 1..16: mol_type = other DNA
agttggcggtcaactt

SEQ ID NO: 21310 - DNA, 16 bp, synthetic construct
  misc_feature 1..16: note = synthetic [barcode part1]
  source 1..16: mol_type = other DNA
agacgttatccgtgac

SEQ ID NO: 21311 - DNA, 16 bp, synthetic construct
  misc_feature 1..16: note = synthetic [barcode part1]
  source 1..16: mol_type = other DNA
ataagtcgtcagaggt

SEQ ID NO: 21312 - DNA, 16 bp, synthetic construct
  misc_feature 1..16: note = synthetic [barcode part1]
  source 1..16: mol_type = other DNA
ttctggagagtctcag

SEQ ID NO: 21313 - DNA, 16 bp, synthetic construct
  misc_feature 1..16: note = synthetic [barcode part1]
  source 1..16: mol_type = other DNA
gtcaaggttagaggag

SEQ ID NO: 21314 - DNA, 16 bp, synthetic construct
  misc_feature 1..16: note = synthetic [barcode part1]
  source 1..16: mol_type = other DNA
agtatacaggatcggt

SEQ ID NO: 21315 - DNA, 16 bp, synthetic construct
  misc_feature 1..16: note = synthetic [barcode part1]
  source 1..16: mol_type = other DNA
gactcgatcagatcgt

SEQ ID NO: 21316 - DNA, 16 bp, synthetic construct
  misc_feature 1..16: note = synthetic [barcode part1]
  source 1..16: mol_type = other DNA
tggacgaatctatccg

SEQ ID NO: 21317 - DNA, 16 bp, synthetic construct
  misc_feature 1..16: note = synthetic [barcode part1]
  source 1..16: mol_type = other DNA
gcctacctaccacagt

SEQ ID NO: 21318 - DNA, 16 bp, synthetic construct
  misc_feature 1..16: note = synthetic [barcode part1]
  source 1..16: mol_type = other DNA
tggagtcttctcctct

SEQ ID NO: 21319 - DNA, 16 bp, synthetic construct
  misc_feature 1..16: note = synthetic [barcode part1]
  source 1..16: mol_type = other DNA
agtatcgcgattgacc

SEQ ID NO: 21320 - DNA, 16 bp, synthetic construct
  misc_feature 1..16: note = synthetic [barcode part1]
  source 1..16: mol_type = other DNA
tgttacgcgattgacg

SEQ ID NO: 21321 - DNA, 16 bp, synthetic construct
  misc_feature 1..16: note = synthetic [barcode part1]
  source 1..16: mol_type = other DNA
tggatcaagagtacac

SEQ ID NO: 21322 - DNA, 16 bp, synthetic construct
  misc_feature 1..16: note = synthetic [barcode part1]
  source 1..16: mol_type = other DNA
caacggatcgtaggtg

SEQ ID NO: 21323 - DNA, 16 bp, synthetic construct
  misc_feature 1..16: note = synthetic [barcode part1]
  source 1..16: mol_type = other DNA
atatcttatcgccggt

SEQ ID NO: 21324 - DNA, 16 bp, synthetic construct
  misc_feature 1..16: note = synthetic [barcode part1]
  source 1..16: mol_type = other DNA
gtcgacgttatacgac

SEQ ID NO: 21325 - DNA, 16 bp, synthetic construct
  misc_feature 1..16: note = synthetic [barcode part1]
  source 1..16: mol_type = other DNA
ttctgcctgttgttcg

SEQ ID NO: 21326 - DNA, 16 bp, synthetic construct
  misc_feature 1..16: note = synthetic [barcode part1]
  source 1..16: mol_type = other DNA
tgtctcactgtgaact

SEQ ID NO: 21327 - DNA, 16 bp, synthetic construct
  misc_feature 1..16: note = synthetic [barcode part1]
  source 1..16: mol_type = other DNA
tggcgtggtataatcc

SEQ ID NO: 21328 - DNA, 16 bp, synthetic construct
  misc_feature 1..16: note = synthetic [barcode part1]
  source 1..16: mol_type = other DNA
caactagtgcaacgtc

SEQ ID NO: 21329 - DNA, 16 bp, synthetic construct
  misc_feature 1..16: note = synthetic [barcode part1]
  source 1..16: mol_type = other DNA
gcgtcttgactcgatc

SEQ ID NO: 21330 - DNA, 16 bp, synthetic construct
  misc_feature 1..16: note = synthetic [barcode part1]
  source 1..16: mol_type = other DNA
gaacggtgtataactg

SEQ ID NO: 21331 - DNA, 16 bp, synthetic construct
  misc_feature 1..16: note = synthetic [barcode part1]
  source 1..16: mol_type = other DNA
cagataccacggattc

SEQ ID NO: 21332 - DNA, 16 bp, synthetic construct
  misc_feature 1..16: note = synthetic [barcode part1]
  source 1..16: mol_type = other DNA
tcgccgtacttgcagt

SEQ ID NO: 21333 - DNA, 16 bp, synthetic construct
  misc_feature 1..16: note = synthetic [barcode part1]
  source 1..16: mol_type = other DNA
agacttccgtgatacg

SEQ ID NO: 21334 - DNA, 16 bp, synthetic construct
  misc_feature 1..16: note = synthetic [barcode part1]
  source 1..16: mol_type = other DNA
tacaaccgccgaagag

SEQ ID NO: 21335 - DNA, 16 bp, synthetic construct
  misc_feature 1..16: note = synthetic [barcode part1]
  source 1..16: mol_type = other DNA
tcactgacagtagtcg

SEQ ID NO: 21336 - DNA, 16 bp, synthetic construct
  misc_feature 1..16: note = synthetic [barcode part1]
  source 1..16: mol_type = other DNA
aagtcctattggccag

SEQ ID NO: 21337 - DNA, 16 bp, synthetic construct
  misc_feature 1..16: note = synthetic [barcode part1]
  source 1..16: mol_type = other DNA
actacgacttattcgc

SEQ ID NO: 21338 - DNA, 16 bp, synthetic construct
  misc_feature 1..16: note = synthetic [barcode part1]
  source 1..16: mol_type = other DNA
taacgtacctcgttgt

SEQ ID NO: 21339 - DNA, 16 bp, synthetic construct
  misc_feature 1..16: note = synthetic [barcode part1]
  source 1..16: mol_type = other DNA
ttaaggtgcctgttct

SEQ ID NO: 21340 - DNA, 16 bp, synthetic construct
  misc_feature 1..16: note = synthetic [barcode part1]
  source 1..16: mol_type = other DNA
gaggcgcactgaattg

SEQ ID NO: 21341 - DNA, 16 bp, synthetic construct
  misc_feature 1..16: note = synthetic [barcode part1]
  source 1..16: mol_type = other DNA
gaggatccagtgtacg

SEQ ID NO: 21342 - DNA, 16 bp, synthetic construct
  misc_feature 1..16: note = synthetic [barcode part1]
  source 1..16: mol_type = other DNA
tgtactgtcgaagaag

SEQ ID NO: 21343 - DNA, 16 bp, synthetic construct
  misc_feature 1..16: note = synthetic [barcode part1]
  source 1..16: mol_type = other DNA
ccgcgttataggagtt

SEQ ID NO: 21344 - DNA, 16 bp, synthetic construct
  misc_feature 1..16: note = synthetic [barcode part1]
  source 1..16: mol_type = other DNA
gtgatcactctgattc

SEQ ID NO: 21345 - DNA, 16 bp, synthetic construct
  misc_feature 1..16: note = synthetic [barcode part1]
  source 1..16: mol_type = other DNA
agacgagactctaggc

SEQ ID NO: 21346 - DNA, 16 bp, synthetic construct
  misc_feature 1..16: note = synthetic [barcode part1]
  source 1..16: mol_type = other DNA
accttgtcgtcctgtt

SEQ ID NO: 21347 - DNA, 16 bp, synthetic construct
  misc_feature 1..16: note = synthetic [barcode part1]
  source 1..16: mol_type = other DNA
ttgccgcagatagtgt

SEQ ID NO: 21348 - DNA, 16 bp, synthetic construct
  misc_feature 1..16: note = synthetic [barcode part1]
  source 1..16: mol_type = other DNA
gtgtggaggtatagag

SEQ ID NO: 21349 - DNA, 16 bp, synthetic construct
  misc_feature 1..16: note = synthetic [barcode part1]
  source 1..16: mol_type = other DNA
gtcaggacgtgtagtg

SEQ ID NO: 21350 - DNA, 16 bp, synthetic construct
  misc_feature 1..16: note = synthetic [barcode part1]
  source 1..16: mol_type = other DNA
ttgtatcacgatccac

SEQ ID NO: 21351 - DNA, 16 bp, synthetic construct
  misc_feature 1..16: note = synthetic [barcode part1]
  source 1..16: mol_type = other DNA
atctctactgccggac

SEQ ID NO: 21352 - DNA, 16 bp, synthetic construct
  misc_feature 1..16: note = synthetic [barcode part1]
  source 1..16: mol_type = other DNA
gtagtcgaggatcggt

SEQ ID NO: 21353 - DNA, 16 bp, synthetic construct
  misc_feature 1..16: note = synthetic [barcode part1]
  source 1..16: mol_type = other DNA
cacgagactcttacag

SEQ ID NO: 21354 - DNA, 16 bp, synthetic construct
  misc_feature 1..16: note = synthetic [barcode part1]
  source 1..16: mol_type = other DNA
ttcagacggtagtaag

SEQ ID NO: 21355 - DNA, 16 bp, synthetic construct
  misc_feature 1..16: note = synthetic [barcode part1]
  source 1..16: mol_type = other DNA
atctaggataacaggc

SEQ ID NO: 21356 - DNA, 16 bp, synthetic construct
  misc_feature 1..16: note = synthetic [barcode part1]
  source 1..16: mol_type = other DNA
acggaagtgtactctc

SEQ ID NO: 21357 - DNA, 16 bp, synthetic construct
  misc_feature 1..16: note = synthetic [barcode part1]
  source 1..16: mol_type = other DNA
atatcaatctcgccac

SEQ ID NO: 21358 - DNA, 16 bp, synthetic construct
  misc_feature 1..16: note = synthetic [barcode part1]
  source 1..16: mol_type = other DNA
caactgtgcgagacag

SEQ ID NO: 21359 - DNA, 16 bp, synthetic construct
  misc_feature 1..16: note = synthetic [barcode part1]
  source 1..16: mol_type = other DNA
gtctggaggtattcgt

SEQ ID NO: 21360 - DNA, 16 bp, synthetic construct
  misc_feature 1..16: note = synthetic [barcode part1]
  source 1..16: mol_type = other DNA
gcgttatcgcctactg

SEQ ID NO: 21361 - DNA, 16 bp, synthetic construct
  misc_feature 1..16: note = synthetic [barcode part1]
  source 1..16: mol_type = other DNA
ttggacttgacaaccg

SEQ ID NO: 21362 - DNA, 16 bp, synthetic construct
  misc_feature 1..16: note = synthetic [barcode part1]
  source 1..16: mol_type = other DNA
actactgtcgaaccag

SEQ ID NO: 21363 - DNA, 16 bp, synthetic construct
  misc_feature 1..16: note = synthetic [barcode part1]
  source 1..16: mol_type = other DNA
gacggttcagtgatct

SEQ ID NO: 21364 - DNA, 16 bp, synthetic construct
  misc_feature 1..16: note = synthetic [barcode part1]
  source 1..16: mol_type = other DNA
tcgaggaattgttccg

SEQ ID NO: 21365 - DNA, 16 bp, synthetic construct
  misc_feature 1..16: note = synthetic [barcode part1]
  source 1..16: mol_type = other DNA
aacaaccgatctggtc

SEQ ID NO: 21366 - DNA, 16 bp, synthetic construct
  misc_feature 1..16: note = synthetic [barcode part1]
  source 1..16: mol_type = other DNA
aacgcgtggaagacct

SEQ ID NO: 21367 - DNA, 16 bp, synthetic construct
  misc_feature 1..16: note = synthetic [barcode part1]
  source 1..16: mol_type = other DNA
cctgacctctcttagt

SEQ ID NO: 21368 - DNA, 16 bp, synthetic construct
  misc_feature 1..16: note = synthetic [barcode part1]
  source 1..16: mol_type = other DNA
cagtgtagtgcaactc

SEQ ID NO: 21369 - DNA, 16 bp, synthetic construct
  misc_feature 1..16: note = synthetic [barcode part1]
  source 1..16: mol_type = other DNA
ccagaaggaaggttag

SEQ ID NO: 21370 - DNA, 16 bp, synthetic construct
  misc_feature 1..16: note = synthetic [barcode part1]
  source 1..16: mol_type = other DNA
gagtatcgtgagttcc

SEQ ID NO: 21371 - DNA, 16 bp, synthetic construct
  misc_feature 1..16: note = synthetic [barcode part1]
  source 1..16: mol_type = other DNA
tcaggaccactacagt

SEQ ID NO: 21372 - DNA, 16 bp, synthetic construct
  misc_feature 1..16: note = synthetic [barcode part1]
  source 1..16: mol_type = other DNA
tctgtgttcagtggtt

SEQ ID NO: 21373 - DNA, 16 bp, synthetic construct
  misc_feature 1..16: note = synthetic [barcode part1]
  source 1..16: mol_type = other DNA
cactctacgaacactt

SEQ ID NO: 21374 - DNA, 16 bp, synthetic construct
  misc_feature 1..16: note = synthetic [barcode part1]
  source 1..16: mol_type = other DNA
atcctccttctaaccg

SEQ ID NO: 21375 - DNA, 16 bp, synthetic construct
  misc_feature 1..16: note = synthetic [barcode part1]
  source 1..16: mol_type = other DNA
ccttcaggttgcacac

SEQ ID NO: 21376 - DNA, 16 bp, synthetic construct
  misc_feature 1..16: note = synthetic [barcode part1]
  source 1..16: mol_type = other DNA
aacgttctctgcagag

SEQ ID NO: 21377 - DNA, 16 bp, synthetic construct
  misc_feature 1..16: note = synthetic [barcode part1]
  source 1..16: mol_type = other DNA
acaaccaggagttaac

SEQ ID NO: 21378 - DNA, 16 bp, synthetic construct
  misc_feature 1..16: note = synthetic [barcode part1]
  source 1..16: mol_type = other DNA
cgaacgcaacttgtac

SEQ ID NO: 21379 - DNA, 16 bp, synthetic construct
  misc_feature 1..16: note = synthetic [barcode part1]
  source 1..16: mol_type = other DNA
agagacggtctaatac

SEQ ID NO: 21380 - DNA, 16 bp, synthetic construct
  misc_feature 1..16: note = synthetic [barcode part1]
  source 1..16: mol_type = other DNA
gcgatagaagtacttg

SEQ ID NO: 21381 - DNA, 16 bp, synthetic construct
  misc_feature 1..16: note = synthetic [barcode part1]
  source 1..16: mol_type = other DNA
actccacctgcgtaac

SEQ ID NO: 21382 - DNA, 16 bp, synthetic construct
  misc_feature 1..16: note = synthetic [barcode part1]
  source 1..16: mol_type = other DNA
tccttctactgcagtc

SEQ ID NO: 21383 - DNA, 16 bp, synthetic construct
  misc_feature 1..16: note = synthetic [barcode part1]
  source 1..16: mol_type = other DNA
ttgagacttacggtgc

SEQ ID NO: 21384 - DNA, 16 bp, synthetic construct
  misc_feature 1..16: note = synthetic [barcode part1]
  source 1..16: mol_type = other DNA
atctctactcggcgac

SEQ ID NO: 21385 - DNA, 16 bp, synthetic construct
  misc_feature 1..16: note = synthetic [barcode part1]
  source 1..16: mol_type = other DNA
aggtccgttaccactc

SEQ ID NO: 21386 - DNA, 16 bp, synthetic construct
  misc_feature 1..16: note = synthetic [barcode part1]
  source 1..16: mol_type = other DNA
tgacacgtgtactggt

SEQ ID NO: 21387 - DNA, 16 bp, synthetic construct
  misc_feature 1..16: note = synthetic [barcode part1]
  source 1..16: mol_type = other DNA
aacgtgcaacttcctt

SEQ ID NO: 21388 - DNA, 16 bp, synthetic construct
  misc_feature 1..16: note = synthetic [barcode part1]
  source 1..16: mol_type = other DNA
gtgtcaagttatcctc

SEQ ID NO: 21389 - DNA, 16 bp, synthetic construct
  misc_feature 1..16: note = synthetic [barcode part1]
  source 1..16: mol_type = other DNA
ccgttacgcctacaac

SEQ ID NO: 21390 - DNA, 16 bp, synthetic construct
  misc_feature 1..16: note = synthetic [barcode part1]
  source 1..16: mol_type = other DNA
aattctcgcactcaac

SEQ ID NO: 21391 - DNA, 16 bp, synthetic construct
  misc_feature 1..16: note = synthetic [barcode part1]
  source 1..16: mol_type = other DNA
gtgataaggcgacaag

SEQ ID NO: 21392 - DNA, 16 bp, synthetic construct
  misc_feature 1..16: note = synthetic [barcode part1]
  source 1..16: mol_type = other DNA
acacaggtagattgtg

SEQ ID NO: 21393 - DNA, 16 bp, synthetic construct
  misc_feature 1..16: note = synthetic [barcode part1]
  source 1..16: mol_type = other DNA
tacaatatcgcctgtc

SEQ ID NO: 21394 - DNA, 16 bp, synthetic construct
  misc_feature 1..16: note = synthetic [barcode part1]
  source 1..16: mol_type = other DNA
gtggtactgcaacact

SEQ ID NO: 21395 - DNA, 16 bp, synthetic construct
  misc_feature 1..16: note = synthetic [barcode part1]
  source 1..16: mol_type = other DNA
caacactgtggataag

SEQ ID NO: 21396 - DNA, 16 bp, synthetic construct
  misc_feature 1..16: note = synthetic [barcode part1]
  source 1..16: mol_type = other DNA
ttaacctggcacgtcc

SEQ ID NO: 21397 - DNA, 16 bp, synthetic construct
  misc_feature 1..16: note = synthetic [barcode part1]
  source 1..16: mol_type = other DNA
tcgcaagattcttcgt

SEQ ID NO: 21398 - DNA, 16 bp, synthetic construct
  misc_feature 1..16: note = synthetic [barcode part1]
  source 1..16: mol_type = other DNA
gaaggcaggactgttc

SEQ ID NO: 21399 - DNA, 16 bp, synthetic construct
  misc_feature 1..16: note = synthetic [barcode part1]
  source 1..16: mol_type = other DNA
tgtgatccgtaagtcg

SEQ ID NO: 21400 - DNA, 16 bp, synthetic construct
  misc_feature 1..16: note = synthetic [barcode part1]
  source 1..16: mol_type = other DNA
gacaatcgttactggc

SEQ ID NO: 21401 - DNA, 16 bp, synthetic construct
  misc_feature 1..16: note = synthetic [barcode part1]
  source 1..16: mol_type = other DNA
agagacgttcgtatcc

SEQ ID NO: 21402 - DNA, 16 bp, synthetic construct
  misc_feature 1..16: note = synthetic [barcode part1]
  source 1..16: mol_type = other DNA
ttcagtgcagatcgtg

SEQ ID NO: 21403 - DNA, 16 bp, synthetic construct
  misc_feature 1..16: note = synthetic [barcode part1]
  source 1..16: mol_type = other DNA
tcacgtccgaagatac

SEQ ID NO: 21404 - DNA, 16 bp, synthetic construct
  misc_feature 1..16: note = synthetic [barcode part1]
  source 1..16: mol_type = other DNA
agtcaacgtacacgtc

SEQ ID NO: 21405 - DNA, 16 bp, synthetic construct
  misc_feature 1..16: note = synthetic [barcode part1]
  source 1..16: mol_type = other DNA
ccaaggaactaccttg

SEQ ID NO: 21406 - DNA, 16 bp, synthetic construct
  misc_feature 1..16: note = synthetic [barcode part1]
  source 1..16: mol_type = other DNA
aatcttcttgacacgc

SEQ ID NO: 21407 - DNA, 16 bp, synthetic construct
  misc_feature 1..16: note = synthetic [barcode part1]
  source 1..16: mol_type = other DNA
cgtgtgattcagtctt

SEQ ID NO: 21408 - DNA, 16 bp, synthetic construct
  misc_feature 1..16: note = synthetic [barcode part1]
  source 1..16: mol_type = other DNA
gtagactgatcacacc

SEQ ID NO: 21409 - DNA, 16 bp, synthetic construct
  misc_feature 1..16: note = synthetic [barcode part1]
  source 1..16: mol_type = other DNA
gcaacgattgttgtcg

SEQ ID NO: 21410 - DNA, 16 bp, synthetic construct
  misc_feature 1..16: note = synthetic [barcode part1]
  source 1..16: mol_type = other DNA
tggtgaccgatagtct

SEQ ID NO: 21411 - DNA, 16 bp, synthetic construct
  misc_feature 1..16: note = synthetic [barcode part1]
  source 1..16: mol_type = other DNA
tctcagacttaaggcg

SEQ ID NO: 21412 - DNA, 16 bp, synthetic construct
  misc_feature 1..16: note = synthetic [barcode part1]
  source 1..16: mol_type = other DNA
cgtcaattctcaactg

SEQ ID NO: 21413 - DNA, 16 bp, synthetic construct
  misc_feature 1..16: note = synthetic [barcode part1]
  source 1..16: mol_type = other DNA
caccggtcaattgtag

SEQ ID NO: 21414 - DNA, 16 bp, synthetic construct
  misc_feature 1..16: note = synthetic [barcode part1]
  source 1..16: mol_type = other DNA
gtcgacaacttcttgt

SEQ ID NO: 21415 - DNA, 16 bp, synthetic construct
  misc_feature 1..16: note = synthetic [barcode part1]
  source 1..16: mol_type = other DNA
tccggagtggttaatc

SEQ ID NO: 21416 - DNA, 16 bp, synthetic construct
  misc_feature 1..16: note = synthetic [barcode part1]
  source 1..16: mol_type = other DNA
agaagaggaccttgag

SEQ ID NO: 21417 - DNA, 16 bp, synthetic construct
  misc_feature 1..16: note = synthetic [barcode part1]
  source 1..16: mol_type = other DNA
aacgttgcacaacacc

SEQ ID NO: 21418 - DNA, 16 bp, synthetic construct
  misc_feature 1..16: note = synthetic [barcode part1]
  source 1..16: mol_type = other DNA
gagtgtctctgccact

SEQ ID NO: 21419 - DNA, 16 bp, synthetic construct
  misc_feature 1..16: note = synthetic [barcode part1]
  source 1..16: mol_type = other DNA
gaccacgtcctaactc

SEQ ID NO: 21420 - DNA, 16 bp, synthetic construct
  misc_feature 1..16: note = synthetic [barcode part1]
  source 1..16: mol_type = other DNA
gacggatcttatccag

SEQ ID NO: 21421 - DNA, 16 bp, synthetic construct
  misc_feature 1..16: note = synthetic [barcode part1]
  source 1..16: mol_type = other DNA
ttgacttaacgcgttc

SEQ ID NO: 21422 - DNA, 16 bp, synthetic construct
  misc_feature 1..16: note = synthetic [barcode part1]
  source 1..16: mol_type = other DNA
ttccggtgattatacc

SEQ ID NO: 21423 - DNA, 16 bp, synthetic construct
  misc_feature 1..16: note = synthetic [barcode part1]
  source 1..16: mol_type = other DNA
gtcaacgtggattcgt

SEQ ID NO: 21424 - DNA, 16 bp, synthetic construct
  misc_feature 1..16: note = synthetic [barcode part1]
  source 1..16: mol_type = other DNA
aactggcggaactctt

SEQ ID NO: 21425 - DNA, 16 bp, synthetic construct
  misc_feature 1..16: note = synthetic [barcode part1]
  source 1..16: mol_type = other DNA
gccgaataagtacagt

SEQ ID NO: 21426 - DNA, 16 bp, synthetic construct
  misc_feature 1..16: note = synthetic [barcode part1]
  source 1..16: mol_type = other DNA
tcagaggtacgccaag

SEQ ID NO: 21427 - DNA, 16 bp, synthetic construct
  misc_feature 1..16: note = synthetic [barcode part1]
  source 1..16: mol_type = other DNA
acctgatcgcagagag

SEQ ID NO: 21428 - DNA, 16 bp, synthetic construct
  misc_feature 1..16: note = synthetic [barcode part1]
  source 1..16: mol_type = other DNA
gttaagacgcgtgacg

SEQ ID NO: 21429 - DNA, 16 bp, synthetic construct
  misc_feature 1..16: note = synthetic [barcode part1]
  source 1..16: mol_type = other DNA
agataaggcgaacgac

SEQ ID NO: 21430 - DNA, 16 bp, synthetic construct
  misc_feature 1..16: note = synthetic [barcode part1]
  source 1..16: mol_type = other DNA
acagtgtaccaaccac

SEQ ID NO: 21431 - DNA, 16 bp, synthetic construct
  misc_feature 1..16: note = synthetic [barcode part1]
  source 1..16: mol_type = other DNA
tagtaatcgtacctcc

SEQ ID NO: 21432 - DNA, 16 bp, synthetic construct
  misc_feature 1..16: note = synthetic [barcode part1]
  source 1..16: mol_type = other DNA
caacaggacctgcaag

SEQ ID NO: 21433 - DNA, 16 bp, synthetic construct
  misc_feature 1..16: note = synthetic [barcode part1]
  source 1..16: mol_type = other DNA
gtgttcaattccgttg

SEQ ID NO: 21434 - DNA, 16 bp, synthetic construct
  misc_feature 1..16: note = synthetic [barcode part1]
  source 1..16: mol_type = other DNA
tagtacgtaatcctcc

SEQ ID NO: 21435 - DNA, 16 bp, synthetic construct
  misc_feature 1..16: note = synthetic [barcode part1]
  source 1..16: mol_type = other DNA
gcactctgtattctcc

SEQ ID NO: 21436 - DNA, 16 bp, synthetic construct
  misc_feature 1..16: note = synthetic [barcode part1]
  source 1..16: mol_type = other DNA
aactcctagttgcact

SEQ ID NO: 21437 - DNA, 16 bp, synthetic construct
  misc_feature 1..16: note = synthetic [barcode part1]
  source 1..16: mol_type = other DNA
agtattgccgatcggt

SEQ ID NO: 21438 - DNA, 16 bp, synthetic construct
  misc_feature 1..16: note = synthetic [barcode part1]
  source 1..16: mol_type = other DNA
tgtacttcgtctctgc

SEQ ID NO: 21439 - DNA, 16 bp, synthetic construct
  misc_feature 1..16: note = synthetic [barcode part1]
  source 1..16: mol_type = other DNA
aatcaataccgaccgc

SEQ ID NO: 21440 - DNA, 16 bp, synthetic construct
  misc_feature 1..16: note = synthetic [barcode part1]
  source 1..16: mol_type = other DNA
tatcgtgaaggtcctg

SEQ ID NO: 21441 - DNA, 16 bp, synthetic construct
  misc_feature 1..16: note = synthetic [barcode part1]
  source 1..16: mol_type = other DNA
agtctgacaacttggc

SEQ ID NO: 21442 - DNA, 16 bp, synthetic construct
  misc_feature 1..16: note = synthetic [barcode part1]
  source 1..16: mol_type = other DNA
tggttggaattggcct

SEQ ID NO: 21443 - DNA, 16 bp, synthetic construct
  misc_feature 1..16: note = synthetic [barcode part1]
  source 1..16: mol_type = other DNA
gtcactcttcgttgtc

SEQ ID NO: 21444 - DNA, 16 bp, synthetic construct
  misc_feature 1..16: note = synthetic [barcode part1]
  source 1..16: mol_type = other DNA
agtcgagtaccaatag

SEQ ID NO: 21445 - DNA, 16 bp, synthetic construct
  misc_feature 1..16: note = synthetic [barcode part1]
  source 1..16: mol_type = other DNA
gccagatcgagagtgt

SEQ ID NO: 21446 - DNA, 16 bp, synthetic construct
  misc_feature 1..16: note = synthetic [barcode part1]
  source 1..16: mol_type = other DNA
gcgtcttgactatcgc

SEQ ID NO: 21447 - DNA, 16 bp, synthetic construct
  misc_feature 1..16: note = synthetic [barcode part1]
  source 1..16: mol_type = other DNA
atctatactaggcgcg

SEQ ID NO: 21448 - DNA, 16 bp, synthetic construct
  misc_feature 1..16: note = synthetic [barcode part1]
  source 1..16: mol_type = other DNA
tcggagagagaatcag

SEQ ID NO: 21449 - DNA, 16 bp, synthetic construct
  misc_feature 1..16: note = synthetic [barcode part1]
  source 1..16: mol_type = other DNA
cgtgaattgaacgtcc

SEQ ID NO: 21450 - DNA, 16 bp, synthetic construct
  misc_feature 1..16: note = synthetic [barcode part1]
  source 1..16: mol_type = other DNA
gcaccaaggttacgtt

SEQ ID NO: 21451 - DNA, 16 bp, synthetic construct
  misc_feature 1..16: note = synthetic [barcode part1]
  source 1..16: mol_type = other DNA
ttccgtggattcggtc

SEQ ID NO: 21452 - DNA, 16 bp, synthetic construct
  misc_feature 1..16: note = synthetic [barcode part1]
  source 1..16: mol_type = other DNA
agtagagtggcgaagt

SEQ ID NO: 21453 - DNA, 16 bp, synthetic construct
  misc_feature 1..16: note = synthetic [barcode part1]
  source 1..16: mol_type = other DNA
tgagttaccgacggtt

SEQ ID NO: 21454 - DNA, 16 bp, synthetic construct
  misc_feature 1..16: note = synthetic [barcode part1]
  source 1..16: mol_type = other DNA
cacaactccagtacag

SEQ ID NO: 21455 - DNA, 16 bp, synthetic construct
  misc_feature 1..16: note = synthetic [barcode part1]
  source 1..16: mol_type = other DNA
tagttggattacggcc

SEQ ID NO: 21456 - DNA, 16 bp, synthetic construct
  misc_feature 1..16: note = synthetic [barcode part1]
  source 1..16: mol_type = other DNA
gaatagacttggaacc

SEQ ID NO: 21457 - DNA, 16 bp, synthetic construct
  misc_feature 1..16: note = synthetic [barcode part1]
  source 1..16: mol_type = other DNA
tggtcgcgagttgaag

SEQ ID NO: 21458 - DNA, 16 bp, synthetic construct
  misc_feature 1..16: note = synthetic [barcode part1]
  source 1..16: mol_type = other DNA
gcaatcaactaacgcc

SEQ ID NO: 21459 - DNA, 16 bp, synthetic construct
  misc_feature 1..16: note = synthetic [barcode part1]
  source 1..16: mol_type = other DNA
cagtcaacgtgatacc

SEQ ID NO: 21460 - DNA, 16 bp, synthetic construct
  misc_feature 1..16: note = synthetic [barcode part1]
  source 1..16: mol_type = other DNA
acgccgagtatctaac

SEQ ID NO: 21461 - DNA, 16 bp, synthetic construct
  misc_feature 1..16: note = synthetic [barcode part1]
  source 1..16: mol_type = other DNA
acagtaacggaagacg

SEQ ID NO: 21462 - DNA, 16 bp, synthetic construct
  misc_feature 1..16: note = synthetic [barcode part1]
  source 1..16: mol_type = other DNA
tgtccgtctcgagatc

SEQ ID NO: 21463 - DNA, 16 bp, synthetic construct
  misc_feature 1..16: note = synthetic [barcode part1]
  source 1..16: mol_type = other DNA
gagtctacctgtagac

SEQ ID NO: 21464 - DNA, 16 bp, synthetic construct
  misc_feature 1..16: note = synthetic [barcode part1]
  source 1..16: mol_type = other DNA
aactcttgttggaggc

SEQ ID NO: 21465 - DNA, 16 bp, synthetic construct
  misc_feature 1..16: note = synthetic [barcode part1]
  source 1..16: mol_type = other DNA
cgtatcaccgatcctg

SEQ ID NO: 21466 - DNA, 16 bp, synthetic construct
  misc_feature 1..16: note = synthetic [barcode part1]
  source 1..16: mol_type = other DNA
actaagattctggccg

SEQ ID NO: 21467 - DNA, 16 bp, synthetic construct
  misc_feature 1..16: note = synthetic [barcode part1]
  source 1..16: mol_type = other DNA
caactgacaacactgc

SEQ ID NO: 21468 - DNA, 16 bp, synthetic construct
  misc_feature 1..16: note = synthetic [barcode part1]
  source 1..16: mol_type = other DNA
tggaacggtaggatag

SEQ ID NO: 21469 - DNA, 16 bp, synthetic construct
  misc_feature 1..16: note = synthetic [barcode part1]
  source 1..16: mol_type = other DNA
ttgcaacggccttaag

SEQ ID NO: 21470 - DNA, 16 bp, synthetic construct
  misc_feature 1..16: note = synthetic [barcode part1]
  source 1..16: mol_type = other DNA
aaggcggacttacggt

SEQ ID NO: 21471 - DNA, 16 bp, synthetic construct
  misc_feature 1..16: note = synthetic [barcode part1]
  source 1..16: mol_type = other DNA
acagacgcaggattcg

SEQ ID NO: 21472 - DNA, 16 bp, synthetic construct
  misc_feature 1..16: note = synthetic [barcode part1]
  source 1..16: mol_type = other DNA
atactgcgtagtgtcg

SEQ ID NO: 21473 - DNA, 16 bp, synthetic construct
  misc_feature 1..16: note = synthetic [barcode part1]
  source 1..16: mol_type = other DNA
tgtccgttgttgtggc

SEQ ID NO: 21474 - DNA, 16 bp, synthetic construct
  misc_feature 1..16: note = synthetic [barcode part1]
  source 1..16: mol_type = other DNA
tctgtagattcgcgag

SEQ ID NO: 21475 - DNA, 16 bp, synthetic construct
  misc_feature 1..16: note = synthetic [barcode part1]
  source 1..16: mol_type = other DNA
ttggacactcgagtac

SEQ ID NO: 21476 - DNA, 16 bp, synthetic construct
  misc_feature 1..16: note = synthetic [barcode part1]
  source 1..16: mol_type = other DNA
gttgcggttgtctgtc

SEQ ID NO: 21477 - DNA, 16 bp, synthetic construct
  misc_feature 1..16: note = synthetic [barcode part1]
  source 1..16: mol_type = other DNA
ttcgtcgaacttacac

SEQ ID NO: 21478 - DNA, 16 bp, synthetic construct
  misc_feature 1..16: note = synthetic [barcode part1]
  source 1..16: mol_type = other DNA
atcgtggtgtctactt

SEQ ID NO: 21479 - DNA, 16 bp, synthetic construct
  misc_feature 1..16: note = synthetic [barcode part1]
  source 1..16: mol_type = other DNA
gaccaacgtcagttgt

SEQ ID NO: 21480 - DNA, 16 bp, synthetic construct
  misc_feature 1..16: note = synthetic [barcode part1]
  source 1..16: mol_type = other DNA
acgcgtggttatagtc

SEQ ID NO: 21481 - DNA, 16 bp, synthetic construct
  misc_feature 1..16: note = synthetic [barcode part1]
  source 1..16: mol_type = other DNA
atcacacggagtggtg

SEQ ID NO: 21482 - DNA, 16 bp, synthetic construct
  misc_feature 1..16: note = synthetic [barcode part1]
  source 1..16: mol_type = other DNA
tagaattcggccaacc

SEQ ID NO: 21483 - DNA, 16 bp, synthetic construct
  misc_feature 1..16: note = synthetic [barcode part1]
  source 1..16: mol_type = other DNA
cagacagaatatcacg

SEQ ID NO: 21484 - DNA, 16 bp, synthetic construct
  misc_feature 1..16: note = synthetic [barcode part1]
  source 1..16: mol_type = other DNA
gtactgagtgtggttc

SEQ ID NO: 21485 - DNA, 16 bp, synthetic construct
  misc_feature 1..16: note = synthetic [barcode part1]
  source 1..16: mol_type = other DNA
gagagtcacacgtcag

SEQ ID NO: 21486 - DNA, 16 bp, synthetic construct
  misc_feature 1..16: note = synthetic [barcode part1]
  source 1..16: mol_type = other DNA
attgtctggacttacc

SEQ ID NO: 21487 - DNA, 16 bp, synthetic construct
  misc_feature 1..16: note = synthetic [barcode part1]
  source 1..16: mol_type = other DNA
tccaccggttactctt

SEQ ID NO: 21488 - DNA, 16 bp, synthetic construct
  misc_feature 1..16: note = synthetic [barcode part1]
  source 1..16: mol_type = other DNA
atactcgttgttccag

SEQ ID NO: 21489 - DNA, 16 bp, synthetic construct
  misc_feature 1..16: note = synthetic [barcode part1]
  source 1..16: mol_type = other DNA
tggtctcttaggagac

SEQ ID NO: 21490 - DNA, 16 bp, synthetic construct
  misc_feature 1..16: note = synthetic [barcode part1]
  source 1..16: mol_type = other DNA
cgccttgtgaatactt

SEQ ID NO: 21491 - DNA, 16 bp, synthetic construct
  misc_feature 1..16: note = synthetic [barcode part1]
  source 1..16: mol_type = other DNA
cgaatctcctgtcacg

SEQ ID NO: 21492 - DNA, 16 bp, synthetic construct
  misc_feature 1..16: note = synthetic [barcode part1]
  source 1..16: mol_type = other DNA
gtgattgcgtgtagtc

SEQ ID NO: 21493 - DNA, 16 bp, synthetic construct
  misc_feature 1..16: note = synthetic [barcode part1]
  source 1..16: mol_type = other DNA
tactgagagacgtggc

SEQ ID NO: 21494 - DNA, 16 bp, synthetic construct
  misc_feature 1..16: note = synthetic [barcode part1]
  source 1..16: mol_type = other DNA
acaactggtacaccac

SEQ ID NO: 21495 - DNA, 16 bp, synthetic construct
  misc_feature 1..16: note = synthetic [barcode part1]
  source 1..16: mol_type = other DNA
acaatcctcgtattcg

SEQ ID NO: 21496 - DNA, 16 bp, synthetic construct
  misc_feature 1..16: note = synthetic [barcode part1]
  source 1..16: mol_type = other DNA
gcacgtggattaactc

SEQ ID NO: 21497 - DNA, 16 bp, synthetic construct
  misc_feature 1..16: note = synthetic [barcode part1]
  source 1..16: mol_type = other DNA
aaggcgacttgaatac

SEQ ID NO: 21498 - DNA, 16 bp, synthetic construct
  misc_feature 1..16: note = synthetic [barcode part1]
  source 1..16: mol_type = other DNA
acacacagtactgtgc

SEQ ID NO: 21499 - DNA, 16 bp, synthetic construct
  misc_feature 1..16: note = synthetic [barcode part1]
  source 1..16: mol_type = other DNA
aagtgtcgcgaatctc

SEQ ID NO: 21500 - DNA, 16 bp, synthetic construct
  misc_feature 1..16: note = synthetic [barcode part1]
  source 1..16: mol_type = other DNA
gttcactcgaggcctt

SEQ ID NO: 21501 - DNA, 16 bp, synthetic construct
  misc_feature 1..16: note = synthetic [barcode part1]
  source 1..16: mol_type = other DNA
ttaacaaggcacgaac

SEQ ID NO: 21502 - DNA, 16 bp, synthetic construct
  misc_feature 1..16: note = synthetic [barcode part1]
  source 1..16: mol_type = other DNA
gacctccgatcacgtt

SEQ ID NO: 21503 - DNA, 16 bp, synthetic construct
  misc_feature 1..16: note = synthetic [barcode part1]
  source 1..16: mol_type = other DNA
aacgaatcaggatctg

SEQ ID NO: 21504 - DNA, 16 bp, synthetic construct
  misc_feature 1..16: note = synthetic [barcode part1]
  source 1..16: mol_type = other DNA
accaccggttatcaag

SEQ ID NO: 21505 - DNA, 16 bp, synthetic construct
  misc_feature 1..16: note = synthetic [barcode part1]
  source 1..16: mol_type = other DNA
acgacaggtgatcgtg

SEQ ID NO: 21506 - DNA, 16 bp, synthetic construct
  misc_feature 1..16: note = synthetic [barcode part1]
  source 1..16: mol_type = other DNA
cgtcctagatattcac

SEQ ID NO: 21507 - DNA, 16 bp, synthetic construct
  misc_feature 1..16: note = synthetic [barcode part1]
  source 1..16: mol_type = other DNA
agagtcggtgcctaag

SEQ ID NO: 21508 - DNA, 16 bp, synthetic construct
  misc_feature 1..16: note = synthetic [barcode part1]
  source 1..16: mol_type = other DNA
gccttgtacttaggcc

SEQ ID NO: 21509 - DNA, 16 bp, synthetic construct
  misc_feature 1..16: note = synthetic [barcode part1]
  source 1..16: mol_type = other DNA
actacttgtccgtggc

SEQ ID NO: 21510 - DNA, 16 bp, synthetic construct
  misc_feature 1..16: note = synthetic [barcode part1]
  source 1..16: mol_type = other DNA
acctaccgacgttacc

SEQ ID NO: 21511 - DNA, 16 bp, synthetic construct
  misc_feature 1..16: note = synthetic [barcode part1]
  source 1..16: mol_type = other DNA
cggaacttacacacgt

SEQ ID NO: 21512 - DNA, 16 bp, synthetic construct
  misc_feature 1..16: note = synthetic [barcode part1]
  source 1..16: mol_type = other DNA
aacgactggttcagtc

SEQ ID NO: 21513 - DNA, 16 bp, synthetic construct
  misc_feature 1..16: note = synthetic [barcode part1]
  source 1..16: mol_type = other DNA
gtccaggacaacgaac

SEQ ID NO: 21514 - DNA, 16 bp, synthetic construct
  misc_feature 1..16: note = synthetic [barcode part1]
  source 1..16: mol_type = other DNA
ccttaaccgtgccagt

SEQ ID NO: 21515 - DNA, 16 bp, synthetic construct
  misc_feature 1..16: note = synthetic [barcode part1]
  source 1..16: mol_type = other DNA
caactccaccagtgtc

SEQ ID NO: 21516 - DNA, 16 bp, synthetic construct
  misc_feature 1..16: note = synthetic [barcode part1]
  source 1..16: mol_type = other DNA
tggtatctactcactg

SEQ ID NO: 21517 - DNA, 16 bp, synthetic construct
  misc_feature 1..16: note = synthetic [barcode part1]
  source 1..16: mol_type = other DNA
tgttgtggccgattag

SEQ ID NO: 21518 - DNA, 16 bp, synthetic construct
  misc_feature 1..16: note = synthetic [barcode part1]
  source 1..16: mol_type = other DNA
attcggaagtaaggtc

SEQ ID NO: 21519 - DNA, 16 bp, synthetic construct
  misc_feature 1..16: note = synthetic [barcode part1]
  source 1..16: mol_type = other DNA
gacaatcgagatacac

SEQ ID NO: 21520 - DNA, 16 bp, synthetic construct
  misc_feature 1..16: note = synthetic [barcode part1]
  source 1..16: mol_type = other DNA
gttcaccttcagaatc

SEQ ID NO: 21521 - DNA, 16 bp, synthetic construct
  misc_feature 1..16: note = synthetic [barcode part1]
  source 1..16: mol_type = other DNA
ttcctgacctctcagt

SEQ ID NO: 21522 - DNA, 16 bp, synthetic construct
  misc_feature 1..16: note = synthetic [barcode part1]
  source 1..16: mol_type = other DNA
taacacgcggtctctc

SEQ ID NO: 21523 - DNA, 16 bp, synthetic construct
  misc_feature 1..16: note = synthetic [barcode part1]
  source 1..16: mol_type = other DNA
taacgacttaggccac

SEQ ID NO: 21524 - DNA, 16 bp, synthetic construct
  misc_feature 1..16: note = synthetic [barcode part1]
  source 1..16: mol_type = other DNA
cgacagagtcctattg

SEQ ID NO: 21525 - DNA, 16 bp, synthetic construct
  misc_feature 1..16: note = synthetic [barcode part1]
  source 1..16: mol_type = other DNA
atcacagtcgcagtac

SEQ ID NO: 21526 - DNA, 16 bp, synthetic construct
  misc_feature 1..16: note = synthetic [barcode part1]
  source 1..16: mol_type = other DNA
tagtggtaagacgtac

SEQ ID NO: 21527 - DNA, 16 bp, synthetic construct
  misc_feature 1..16: note = synthetic [barcode part1]
  source 1..16: mol_type = other DNA
tgcacagaatagtggt

SEQ ID NO: 21528 - DNA, 16 bp, synthetic construct
  misc_feature 1..16: note = synthetic [barcode part1]
  source 1..16: mol_type = other DNA
tacgccggtgtattag

SEQ ID NO: 21529 - DNA, 16 bp, synthetic construct
  misc_feature 1..16: note = synthetic [barcode part1]
  source 1..16: mol_type = other DNA
tcaccacggtattcgc

SEQ ID NO: 21530 - DNA, 16 bp, synthetic construct
  misc_feature 1..16: note = synthetic [barcode part1]
  source 1..16: mol_type = other DNA
tccagtcaccagtacc

SEQ ID NO: 21531 - DNA, 16 bp, synthetic construct
  misc_feature 1..16: note = synthetic [barcode part1]
  source 1..16: mol_type = other DNA
atccgatagtctgacg

SEQ ID NO: 21532 - DNA, 16 bp, synthetic construct
  misc_feature 1..16: note = synthetic [barcode part1]
  source 1..16: mol_type = other DNA
acgccaggattatacc

SEQ ID NO: 21533 - DNA, 16 bp, synthetic construct
  misc_feature 1..16: note = synthetic [barcode part1]
  source 1..16: mol_type = other DNA
gtagacgttgcaatag

SEQ ID NO: 21534 - DNA, 16 bp, synthetic construct
  misc_feature 1..16: note = synthetic [barcode part1]
  source 1..16: mol_type = other DNA
gtggaacctatcctag

SEQ ID NO: 21535 - DNA, 16 bp, synthetic construct
  misc_feature 1..16: note = synthetic [barcode part1]
  source 1..16: mol_type = other DNA
agacaggtaagattcc

SEQ ID NO: 21536 - DNA, 16 bp, synthetic construct
  misc_feature 1..16: note = synthetic [barcode part1]
  source 1..16: mol_type = other DNA
cgcaatagtagacaac

SEQ ID NO: 21537 - DNA, 16 bp, synthetic construct
  misc_feature 1..16: note = synthetic [barcode part1]
  source 1..16: mol_type = other DNA
attctggtcggagttg

SEQ ID NO: 21538 - DNA, 16 bp, synthetic construct
  misc_feature 1..16: note = synthetic [barcode part1]
  source 1..16: mol_type = other DNA
tagtcctctctgacct

SEQ ID NO: 21539 - DNA, 16 bp, synthetic construct
  misc_feature 1..16: note = synthetic [barcode part1]
  source 1..16: mol_type = other DNA
aacactggacttcgac

SEQ ID NO: 21540 - DNA, 16 bp, synthetic construct
  misc_feature 1..16: note = synthetic [barcode part1]
  source 1..16: mol_type = other DNA
atataacacgcgccac

SEQ ID NO: 21541 - DNA, 16 bp, synthetic construct
  misc_feature 1..16: note = synthetic [barcode part1]
  source 1..16: mol_type = other DNA
gtagttctctgcgtcg

SEQ ID NO: 21542 - DNA, 16 bp, synthetic construct
  misc_feature 1..16: note = synthetic [barcode part1]
  source 1..16: mol_type = other DNA
ttcaaggtgatcggtc

SEQ ID NO: 21543 - DNA, 16 bp, synthetic construct
  misc_feature 1..16: note = synthetic [barcode part1]
  source 1..16: mol_type = other DNA
tcagacggatacctgt

SEQ ID NO: 21544 - DNA, 16 bp, synthetic construct
  misc_feature 1..16: note = synthetic [barcode part1]
  source 1..16: mol_type = other DNA
tggcagaacaggttcg

SEQ ID NO: 21545 - DNA, 16 bp, synthetic construct
  misc_feature 1..16: note = synthetic [barcode part1]
  source 1..16: mol_type = other DNA
tattagtcacggccag

SEQ ID NO: 21546 - DNA, 16 bp, synthetic construct
  misc_feature 1..16: note = synthetic [barcode part1]
  source 1..16: mol_type = other DNA
actcctcaccacgtag

SEQ ID NO: 21547 - DNA, 16 bp, synthetic construct
  misc_feature 1..16: note = synthetic [barcode part1]
  source 1..16: mol_type = other DNA
cgtgtagaggtactct

SEQ ID NO: 21548 - DNA, 16 bp, synthetic construct
  misc_feature 1..16: note = synthetic [barcode part1]
  source 1..16: mol_type = other DNA
cgcaatacgaatagac

SEQ ID NO: 21549 - DNA, 16 bp, synthetic construct
  misc_feature 1..16: note = synthetic [barcode part1]
  source 1..16: mol_type = other DNA
aacctggccgataact

SEQ ID NO: 21550 - DNA, 16 bp, synthetic construct
  misc_feature 1..16: note = synthetic [barcode part1]
  source 1..16: mol_type = other DNA
atcggtactgccgttc

SEQ ID NO: 21551 - DNA, 16 bp, synthetic construct
  misc_feature 1..16: note = synthetic [barcode part1]
  source 1..16: mol_type = other DNA
gacttacctcgttgcg

SEQ ID NO: 21552 - DNA, 16 bp, synthetic construct
  misc_feature 1..16: note = synthetic [barcode part1]
  source 1..16: mol_type = other DNA
gagataggatacctgt

SEQ ID NO: 21553 - DNA, 16 bp, synthetic construct
  misc_feature 1..16: note = synthetic [barcode part1]
  source 1..16: mol_type = other DNA
attccttatcaacgcg

SEQ ID NO: 21554 - DNA, 16 bp, synthetic construct
  misc_feature 1..16: note = synthetic [barcode part1]
  source 1..16: mol_type = other DNA
gtaaccggaccaaggt

SEQ ID NO: 21555 - DNA, 16 bp, synthetic construct
  misc_feature 1..16: note = synthetic [barcode part1]
  source 1..16: mol_type = other DNA
gaggtgaatctacggc

SEQ ID NO: 21556 - DNA, 16 bp, synthetic construct
  misc_feature 1..16: note = synthetic [barcode part1]
  source 1..16: mol_type = other DNA
ccgagtactcaagtgt

SEQ ID NO: 21557 - DNA, 16 bp, synthetic construct
  misc_feature 1..16: note = synthetic [barcode part1]
  source 1..16: mol_type = other DNA
acctcacacctgaacc

SEQ ID NO: 21558 - DNA, 16 bp, synthetic construct
  misc_feature 1..16: note = synthetic [barcode part1]
  source 1..16: mol_type = other DNA
tatcgacttccttgag

SEQ ID NO: 21559 - DNA, 16 bp, synthetic construct
  misc_feature 1..16: note = synthetic [barcode part1]
  source 1..16: mol_type = other DNA
atctcgcgtccagatc

SEQ ID NO: 21560 - DNA, 16 bp, synthetic construct
  misc_feature 1..16: note = synthetic [barcode part1]
  source 1..16: mol_type = other DNA
tacacactgcacacag

SEQ ID NO: 21561 - DNA, 16 bp, synthetic construct
  misc_feature 1..16: note = synthetic [barcode part1]
  source 1..16: mol_type = other DNA
atagagtgtccgcgag

SEQ ID NO: 21562 - DNA, 16 bp, synthetic construct
  misc_feature 1..16: note = synthetic [barcode part1]
  source 1..16: mol_type = other DNA
aacgtacggagttaac

SEQ ID NO: 21563 - DNA, 16 bp, synthetic construct
  misc_feature 1..16: note = synthetic [barcode part1]
  source 1..16: mol_type = other DNA
agaccacagaccactt

SEQ ID NO: 21564 - DNA, 16 bp, synthetic construct
  misc_feature 1..16: note = synthetic [barcode part1]
  source 1..16: mol_type = other DNA
acagtcaggccttctc

SEQ ID NO: 21565 - DNA, 16 bp, synthetic construct
  misc_feature 1..16: note = synthetic [barcode part1]
  source 1..16: mol_type = other DNA
gcgcagtcaactatac

SEQ ID NO: 21566 - DNA, 16 bp, synthetic construct
  misc_feature 1..16: note = synthetic [barcode part1]
  source 1..16: mol_type = other DNA
cactcaccggaatctc

SEQ ID NO: 21567 - DNA, 16 bp, synthetic construct
  misc_feature 1..16: note = synthetic [barcode part1]
  source 1..16: mol_type = other DNA
gaacttcaccgatcag

SEQ ID NO: 21568 - DNA, 16 bp, synthetic construct
  misc_feature 1..16: note = synthetic [barcode part1]
  source 1..16: mol_type = other DNA
gacttgatagtggtcc

SEQ ID NO: 21569 - DNA, 16 bp, synthetic construct
  misc_feature 1..16: note = synthetic [barcode part1]
  source 1..16: mol_type = other DNA
ttccgtccttaggcag

SEQ ID NO: 21570 - DNA, 16 bp, synthetic construct
  misc_feature 1..16: note = synthetic [barcode part1]
  source 1..16: mol_type = other DNA
aaccacagtcaacgtc

SEQ ID NO: 21571 - DNA, 16 bp, synthetic construct
  misc_feature 1..16: note = synthetic [barcode part1]
  source 1..16: mol_type = other DNA
tgcactaattggcacg

SEQ ID NO: 21572 - DNA, 16 bp, synthetic construct
  misc_feature 1..16: note = synthetic [barcode part1]
  source 1..16: mol_type = other DNA
caagtgccgactcctt

SEQ ID NO: 21573 - DNA, 16 bp, synthetic construct
  misc_feature 1..16: note = synthetic [barcode part1]
  source 1..16: mol_type = other DNA
atcgcaacgaagttcc

SEQ ID NO: 21574 - DNA, 16 bp, synthetic construct
  misc_feature 1..16: note = synthetic [barcode part1]
  source 1..16: mol_type = other DNA
tgttccacgagtatct

SEQ ID NO: 21575 - DNA, 16 bp, synthetic construct
  misc_feature 1..16: note = synthetic [barcode part1]
  source 1..16: mol_type = other DNA
agaaggtctcgtaagt

SEQ ID NO: 21576 - DNA, 16 bp, synthetic construct
  misc_feature 1..16: note = synthetic [barcode part1]
  source 1..16: mol_type = other DNA
aactagagtctgaacg

SEQ ID NO: 21577 - DNA, 16 bp, synthetic construct
  misc_feature 1..16: note = synthetic [barcode part1]
  source 1..16: mol_type = other DNA
atcttgtacagtcacc

SEQ ID NO: 21578 - DNA, 16 bp, synthetic construct
  misc_feature 1..16: note = synthetic [barcode part1]
  source 1..16: mol_type = other DNA
ttacgcacttcggtcg

SEQ ID NO: 21579 - DNA, 16 bp, synthetic construct
  misc_feature 1..16: note = synthetic [barcode part1]
  source 1..16: mol_type = other DNA
acgattaagtcggagt

SEQ ID NO: 21580 - DNA, 16 bp, synthetic construct
  misc_feature 1..16: note = synthetic [barcode part1]
  source 1..16: mol_type = other DNA
aatcaagtccgacctg

SEQ ID NO: 21581 - DNA, 16 bp, synthetic construct
  misc_feature 1..16: note = synthetic [barcode part1]
  source 1..16: mol_type = other DNA
tcgtgtatcctccgag

SEQ ID NO: 21582 - DNA, 16 bp, synthetic construct
  misc_feature 1..16: note = synthetic [barcode part1]
  source 1..16: mol_type = other DNA
cgaggcgtatcagtag

SEQ ID NO: 21583 - DNA, 16 bp, synthetic construct
  misc_feature 1..16: note = synthetic [barcode part1]
  source 1..16: mol_type = other DNA
caggcgttcctattgc

SEQ ID NO: 21584 - DNA, 16 bp, synthetic construct
  misc_feature 1..16: note = synthetic [barcode part1]
  source 1..16: mol_type = other DNA
cgacggttaactcaac

SEQ ID NO: 21585 - DNA, 16 bp, synthetic construct
  misc_feature 1..16: note = synthetic [barcode part1]
  source 1..16: mol_type = other DNA
aattcgccagacactg

SEQ ID NO: 21586 - DNA, 16 bp, synthetic construct
  misc_feature 1..16: note = synthetic [barcode part1]
  source 1..16: mol_type = other DNA
ttgccacaggtaacac

SEQ ID NO: 21587 - DNA, 16 bp, synthetic construct
  misc_feature 1..16: note = synthetic [barcode part1]
  source 1..16: mol_type = other DNA
gcacgcgtgtgatatt

SEQ ID NO: 21588 - DNA, 16 bp, synthetic construct
  misc_feature 1..16: note = synthetic [barcode part1]
  source 1..16: mol_type = other DNA
tagagtaggtgacgag

SEQ ID NO: 21589 - DNA, 16 bp, synthetic construct
  misc_feature 1..16: note = synthetic [barcode part1]
  source 1..16: mol_type = other DNA
tgcaatcgattgtgcg

SEQ ID NO: 21590 - DNA, 16 bp, synthetic construct
  misc_feature 1..16: note = synthetic [barcode part1]
  source 1..16: mol_type = other DNA
agagaatcggagagtc

SEQ ID NO: 21591 - DNA, 16 bp, synthetic construct
  misc_feature 1..16: note = synthetic [barcode part1]
  source 1..16: mol_type = other DNA
cgtactaccagttccg

SEQ ID NO: 21592 - DNA, 16 bp, synthetic construct
  misc_feature 1..16: note = synthetic [barcode part1]
  source 1..16: mol_type = other DNA
attgcaggaatagacc

SEQ ID NO: 21593 - DNA, 16 bp, synthetic construct
  misc_feature 1..16: note = synthetic [barcode part1]
  source 1..16: mol_type = other DNA
gataccaggttggttc

SEQ ID NO: 21594 - DNA, 16 bp, synthetic construct
  misc_feature 1..16: note = synthetic [barcode part1]
  source 1..16: mol_type = other DNA
tcgaactaggaacgcg

SEQ ID NO: 21595 - DNA, 16 bp, synthetic construct
  misc_feature 1..16: note = synthetic [barcode part1]
  source 1..16: mol_type = other DNA
gtacctagaattcgcg

SEQ ID NO: 21596 - DNA, 16 bp, synthetic construct
  misc_feature 1..16: note = synthetic [barcode part1]
  source 1..16: mol_type = other DNA
tccacacttctcacac

SEQ ID NO: 21597 - DNA, 16 bp, synthetic construct
  misc_feature 1..16: note = synthetic [barcode part1]
  source 1..16: mol_type = other DNA
aatcctggtagtaccg

SEQ ID NO: 21598 - DNA, 16 bp, synthetic construct
  misc_feature 1..16: note = synthetic [barcode part1]
  source 1..16: mol_type = other DNA
tccgtctcgttgcaag

SEQ ID NO: 21599 - DNA, 16 bp, synthetic construct
  misc_feature 1..16: note = synthetic [barcode part1]
  source 1..16: mol_type = other DNA
atctcgcgcaactacc

SEQ ID NO: 21600 - DNA, 16 bp, synthetic construct
  misc_feature 1..16: note = synthetic [barcode part1]
  source 1..16: mol_type = other DNA
aagttgcgacgattcc

SEQ ID NO: 21601 - DNA, 16 bp, synthetic construct
  misc_feature 1..16: note = synthetic [barcode part1]
  source 1..16: mol_type = other DNA
ttagtggcgcctctac

SEQ ID NO: 21602 - DNA, 16 bp, synthetic construct
  misc_feature 1..16: note = synthetic [barcode part1]
  source 1..16: mol_type = other DNA
agagttcgataggcgc

SEQ ID NO: 21603 - DNA, 16 bp, synthetic construct
  misc_feature 1..16: note = synthetic [barcode part1]
  source 1..16: mol_type = other DNA
tgagtcacctcacgtc

SEQ ID NO: 21604 - DNA, 16 bp, synthetic construct
  misc_feature 1..16: note = synthetic [barcode part1]
  source 1..16: mol_type = other DNA
tcgttcgatagtatcc

SEQ ID NO: 21605 - DNA, 16 bp, synthetic construct
  misc_feature 1..16: note = synthetic [barcode part1]
  source 1..16: mol_type = other DNA
ttgttcgacggtactt

SEQ ID NO: 21606 - DNA, 16 bp, synthetic construct
  misc_feature 1..16: note = synthetic [barcode part1]
  source 1..16: mol_type = other DNA
agttctcacgcctggt

SEQ ID NO: 21607 - DNA, 16 bp, synthetic construct
  misc_feature 1..16: note = synthetic [barcode part1]
  source 1..16: mol_type = other DNA
taagattcacgtgcgc

SEQ ID NO: 21608 - DNA, 16 bp, synthetic construct
  misc_feature 1..16: note = synthetic [barcode part1]
  source 1..16: mol_type = other DNA
tcgaagtgtctatctc

SEQ ID NO: 21609 - DNA, 16 bp, synthetic construct
  misc_feature 1..16: note = synthetic [barcode part1]
  source 1..16: mol_type = other DNA
ccaacttgagtgttct

SEQ ID NO: 21610 - DNA, 16 bp, synthetic construct
  misc_feature 1..16: note = synthetic [barcode part1]
  source 1..16: mol_type = other DNA
cgatcttcctcgatct

SEQ ID NO: 21611 - DNA, 16 bp, synthetic construct
  misc_feature 1..16: note = synthetic [barcode part1]
  source 1..16: mol_type = other DNA
accggatcaagtcgtt

SEQ ID NO: 21612 - DNA, 16 bp, synthetic construct
  misc_feature 1..16: note = synthetic [barcode part1]
  source 1..16: mol_type = other DNA
ttcactgtggtctcct

SEQ ID NO: 21613 - DNA, 16 bp, synthetic construct
  misc_feature 1..16: note = synthetic [barcode part1]
  source 1..16: mol_type = other DNA
tggtgcctacttaccg

SEQ ID NO: 21614 - DNA, 16 bp, synthetic construct
  misc_feature 1..16: note = synthetic [barcode part1]
  source 1..16: mol_type = other DNA
ttccggcgtgtagtct

SEQ ID NO: 21615 - DNA, 16 bp, synthetic construct
  misc_feature 1..16: note = synthetic [barcode part1]
  source 1..16: mol_type = other DNA
gaccggtgttaactac

SEQ ID NO: 21616 - DNA, 16 bp, synthetic construct
  misc_feature 1..16: note = synthetic [barcode part1]
  source 1..16: mol_type = other DNA
tggtcaacaatcgacc

SEQ ID NO: 21617 - DNA, 16 bp, synthetic construct
  misc_feature 1..16: note = synthetic [barcode part1]
  source 1..16: mol_type = other DNA
cctatcctccaagacg

SEQ ID NO: 21618 - DNA, 16 bp, synthetic construct
  misc_feature 1..16: note = synthetic [barcode part1]
  source 1..16: mol_type = other DNA
taatacgtcttgccgt

SEQ ID NO: 21619 - DNA, 16 bp, synthetic construct
  misc_feature 1..16: note = synthetic [barcode part1]
  source 1..16: mol_type = other DNA
ccgaataccgtcttgc

SEQ ID NO: 21620 - DNA, 16 bp, synthetic construct
  misc_feature 1..16: note = synthetic [barcode part1]
  source 1..16: mol_type = other DNA
ttcaggaattgcggtc

SEQ ID NO: 21621 - DNA, 16 bp, synthetic construct
  misc_feature 1..16: note = synthetic [barcode part1]
  source 1..16: mol_type = other DNA
ttcgcctatctgtctg

SEQ ID NO: 21622 - DNA, 16 bp, synthetic construct
  misc_feature 1..16: note = synthetic [barcode part1]
  source 1..16: mol_type = other DNA
cgtcctggacacttgt

SEQ ID NO: 21623 - DNA, 16 bp, synthetic construct
  misc_feature 1..16: note = synthetic [barcode part1]
  source 1..16: mol_type = other DNA
gcactggattgccttc

SEQ ID NO: 21624 - DNA, 16 bp, synthetic construct
  misc_feature 1..16: note = synthetic [barcode part1]
  source 1..16: mol_type = other DNA
tgattgccggattcag

SEQ ID NO: 21625 - DNA, 16 bp, synthetic construct
  misc_feature 1..16: note = synthetic [barcode part1]
  source 1..16: mol_type = other DNA
gtaccgagattgcact

SEQ ID NO: 21626 - DNA, 16 bp, synthetic construct
  misc_feature 1..16: note = synthetic [barcode part1]
  source 1..16: mol_type = other DNA
gtacacactagtcgac

SEQ ID NO: 21627 - DNA, 16 bp, synthetic construct
  misc_feature 1..16: note = synthetic [barcode part1]
  source 1..16: mol_type = other DNA
gtgtgttgaacgtctg

SEQ ID NO: 21628 - DNA, 16 bp, synthetic construct
  misc_feature 1..16: note = synthetic [barcode part1]
  source 1..16: mol_type = other DNA
gcgacgtcaactaatc

SEQ ID NO: 21629 - DNA, 16 bp, synthetic construct
  misc_feature 1..16: note = synthetic [barcode part1]
  source 1..16: mol_type = other DNA
gagtggatactcactc

SEQ ID NO: 21630 - DNA, 16 bp, synthetic construct
  misc_feature 1..16: note = synthetic [barcode part1]
  source 1..16: mol_type = other DNA
agatcggttccaatcg

SEQ ID NO: 21631 - DNA, 16 bp, synthetic construct
  misc_feature 1..16: note = synthetic [barcode part1]
  source 1..16: mol_type = other DNA
aaccaatccaggacct

SEQ ID NO: 21632 - DNA, 16 bp, synthetic construct
  misc_feature 1..16: note = synthetic [barcode part1]
  source 1..16: mol_type = other DNA
gagagtgttgttgaac

SEQ ID NO: 21633 - DNA, 16 bp, synthetic construct
  misc_feature 1..16: note = synthetic [barcode part1]
  source 1..16: mol_type = other DNA
gcaactgacgtcagtt

SEQ ID NO: 21634 - DNA, 16 bp, synthetic construct
  misc_feature 1..16: note = synthetic [barcode part1]
  source 1..16: mol_type = other DNA
tgagtaaggcaccgtg

SEQ ID NO: 21635 - DNA, 16 bp, synthetic construct
  misc_feature 1..16: note = synthetic [barcode part1]
  source 1..16: mol_type = other DNA
caatcaacgacaccgt

SEQ ID NO: 21636 - DNA, 16 bp, synthetic construct
  misc_feature 1..16: note = synthetic [barcode part1]
  source 1..16: mol_type = other DNA
tcacgtcgagttattc

SEQ ID NO: 21637 - DNA, 16 bp, synthetic construct
  misc_feature 1..16: note = synthetic [barcode part1]
  source 1..16: mol_type = other DNA
tccaaggagttctggt

SEQ ID NO: 21638 - DNA, 16 bp, synthetic construct
  misc_feature 1..16: note = synthetic [barcode part1]
  source 1..16: mol_type = other DNA
ttatagaacaaggcgc

SEQ ID NO: 21639 - DNA, 16 bp, synthetic construct
  misc_feature 1..16: note = synthetic [barcode part1]
  source 1..16: mol_type = other DNA
taatccggagttgtcg

SEQ ID NO: 21640 - DNA, 16 bp, synthetic construct
  misc_feature 1..16: note = synthetic [barcode part1]
  source 1..16: mol_type = other DNA
gcaactattgaaggac

SEQ ID NO: 21641 - DNA, 16 bp, synthetic construct
  misc_feature 1..16: note = synthetic [barcode part1]
  source 1..16: mol_type = other DNA
gacctatacagatccg

SEQ ID NO: 21642 - DNA, 16 bp, synthetic construct
  misc_feature 1..16: note = synthetic [barcode part1]
  source 1..16: mol_type = other DNA
cggaccgtgtattcct

SEQ ID NO: 21643 - DNA, 16 bp, synthetic construct
  misc_feature 1..16: note = synthetic [barcode part1]
  source 1..16: mol_type = other DNA
cagttggcagtcaact

SEQ ID NO: 21644 - DNA, 16 bp, synthetic construct
  misc_feature 1..16: note = synthetic [barcode part1]
  source 1..16: mol_type = other DNA
atccgagagtactcgt

SEQ ID NO: 21645 - DNA, 16 bp, synthetic construct
  misc_feature 1..16: note = synthetic [barcode part1]
  source 1..16: mol_type = other DNA
tgaacgcgattgcgtt

SEQ ID NO: 21646 - DNA, 16 bp, synthetic construct
  misc_feature 1..16: note = synthetic [barcode part1]
  source 1..16: mol_type = other DNA
acacggaactcttacg

SEQ ID NO: 21647 - DNA, 16 bp, synthetic construct
  misc_feature 1..16: note = synthetic [barcode part1]
  source 1..16: mol_type = other DNA
gccagtcaattagtcg

SEQ ID NO: 21648 - DNA, 16 bp, synthetic construct
  misc_feature 1..16: note = synthetic [barcode part1]
  source 1..16: mol_type = other DNA
tgcgaccagagatcag

SEQ ID NO: 21649 - DNA, 16 bp, synthetic construct
  misc_feature 1..16: note = synthetic [barcode part1]
  source 1..16: mol_type = other DNA
atccgaatctatcgtc

SEQ ID NO: 21650 - DNA, 16 bp, synthetic construct
  misc_feature 1..16: note = synthetic [barcode part1]
  source 1..16: mol_type = other DNA
agactaccttgtactc

SEQ ID NO: 21651 - DNA, 16 bp, synthetic construct
  misc_feature 1..16: note = synthetic [barcode part1]
  source 1..16: mol_type = other DNA
agtctactccagacag

SEQ ID NO: 21652 - DNA, 16 bp, synthetic construct
  misc_feature 1..16: note = synthetic [barcode part1]
  source 1..16: mol_type = other DNA
gtaggaattcctgcgt

SEQ ID NO: 21653 - DNA, 16 bp, synthetic construct
  misc_feature 1..16: note = synthetic [barcode part1]
  source 1..16: mol_type = other DNA
aacgtaatagaccgtg

SEQ ID NO: 21654 - DNA, 16 bp, synthetic construct
  misc_feature 1..16: note = synthetic [barcode part1]
  source 1..16: mol_type = other DNA
accgacgagatattcc

SEQ ID NO: 21655 - DNA, 16 bp, synthetic construct
  misc_feature 1..16: note = synthetic [barcode part1]
  source 1..16: mol_type = other DNA
gtagtatacgccacgt

SEQ ID NO: 21656 - DNA, 16 bp, synthetic construct
  misc_feature 1..16: note = synthetic [barcode part1]
  source 1..16: mol_type = other DNA
cgatacactctgccac

SEQ ID NO: 21657 - DNA, 16 bp, synthetic construct
  misc_feature 1..16: note = synthetic [barcode part1]
  source 1..16: mol_type = other DNA
tggactactaacgacc

SEQ ID NO: 21658 - DNA, 16 bp, synthetic construct
  misc_feature 1..16: note = synthetic [barcode part1]
  source 1..16: mol_type = other DNA
cgccttgcacttaggt

SEQ ID NO: 21659 - DNA, 16 bp, synthetic construct
  misc_feature 1..16: note = synthetic [barcode part1]
  source 1..16: mol_type = other DNA
agttctgcacttgccg

SEQ ID NO: 21660 - DNA, 16 bp, synthetic construct
  misc_feature 1..16: note = synthetic [barcode part1]
  source 1..16: mol_type = other DNA
gcaccaggtatagttc

SEQ ID NO: 21661 - DNA, 16 bp, synthetic construct
  misc_feature 1..16: note = synthetic [barcode part1]
  source 1..16: mol_type = other DNA
cacagtgtgagactct

SEQ ID NO: 21662 - DNA, 16 bp, synthetic construct
  misc_feature 1..16: note = synthetic [barcode part1]
  source 1..16: mol_type = other DNA
cctactgacacaattc

SEQ ID NO: 21663 - DNA, 16 bp, synthetic construct
  misc_feature 1..16: note = synthetic [barcode part1]
  source 1..16: mol_type = other DNA
gtagacttggtgaggc

SEQ ID NO: 21664 - DNA, 16 bp, synthetic construct
  misc_feature 1..16: note = synthetic [barcode part1]
  source 1..16: mol_type = other DNA
tgaactcctacagacg

SEQ ID NO: 21665 - DNA, 16 bp, synthetic construct
  misc_feature 1..16: note = synthetic [barcode part1]
  source 1..16: mol_type = other DNA
tgcgcactgtatacag

SEQ ID NO: 21666 - DNA, 16 bp, synthetic construct
  misc_feature 1..16: note = synthetic [barcode part1]
  source 1..16: mol_type = other DNA
aggtattggtggagtt

SEQ ID NO: 21667 - DNA, 16 bp, synthetic construct
  misc_feature 1..16: note = synthetic [barcode part1]
  source 1..16: mol_type = other DNA
agacgtcctgcagatt

SEQ ID NO: 21668 - DNA, 16 bp, synthetic construct
  misc_feature 1..16: note = synthetic [barcode part1]
  source 1..16: mol_type = other DNA
acaatccggacgcaag

SEQ ID NO: 21669 - DNA, 16 bp, synthetic construct
  misc_feature 1..16: note = synthetic [barcode part1]
  source 1..16: mol_type = other DNA
tgagtaactgtgacag

SEQ ID NO: 21670 - DNA, 16 bp, synthetic construct
  misc_feature 1..16: note = synthetic [barcode part1]
  source 1..16: mol_type = other DNA
aatagttgcgtgagac

SEQ ID NO: 21671 - DNA, 16 bp, synthetic construct
  misc_feature 1..16: note = synthetic [barcode part1]
  source 1..16: mol_type = other DNA
ttatctccggtggaag

SEQ ID NO: 21672 - DNA, 16 bp, synthetic construct
  misc_feature 1..16: note = synthetic [barcode part1]
  source 1..16: mol_type = other DNA
gaacgaccgcaagttg

SEQ ID NO: 21673 - DNA, 16 bp, synthetic construct
  misc_feature 1..16: note = synthetic [barcode part1]
  source 1..16: mol_type = other DNA
cacgtctcctaataac

SEQ ID NO: 21674 - DNA, 16 bp, synthetic construct
  misc_feature 1..16: note = synthetic [barcode part1]
  source 1..16: mol_type = other DNA
agatcctgagacttcg

SEQ ID NO: 21675 - DNA, 16 bp, synthetic construct
  misc_feature 1..16: note = synthetic [barcode part1]
  source 1..16: mol_type = other DNA
gaatcgcgaactgtct

SEQ ID NO: 21676 - DNA, 16 bp, synthetic construct
  misc_feature 1..16: note = synthetic [barcode part1]
  source 1..16: mol_type = other DNA
accgtaactacttacc

SEQ ID NO: 21677 - DNA, 16 bp, synthetic construct
  misc_feature 1..16: note = synthetic [barcode part1]
  source 1..16: mol_type = other DNA
ccacttccgtgttgag

SEQ ID NO: 21678 - DNA, 16 bp, synthetic construct
  misc_feature 1..16: note = synthetic [barcode part1]
  source 1..16: mol_type = other DNA
gacacgacagagatag

SEQ ID NO: 21679 - DNA, 16 bp, synthetic construct
  misc_feature 1..16: note = synthetic [barcode part1]
  source 1..16: mol_type = other DNA
cctggttgtcagtacc

SEQ ID NO: 21680 - DNA, 16 bp, synthetic construct
  misc_feature 1..16: note = synthetic [barcode part1]
  source 1..16: mol_type = other DNA
cgttctatcgccttgt

SEQ ID NO: 21681 - DNA, 16 bp, synthetic construct
  misc_feature 1..16: note = synthetic [barcode part1]
  source 1..16: mol_type = other DNA
tggatacaggacggtc

SEQ ID NO: 21682 - DNA, 16 bp, synthetic construct
  misc_feature 1..16: note = synthetic [barcode part1]
  source 1..16: mol_type = other DNA
ttacctacctatccgc

SEQ ID NO: 21683 - DNA, 16 bp, synthetic construct
  misc_feature 1..16: note = synthetic [barcode part1]
  source 1..16: mol_type = other DNA
cagtcaactaaccgac

SEQ ID NO: 21684 - DNA, 16 bp, synthetic construct
  misc_feature 1..16: note = synthetic [barcode part1]
  source 1..16: mol_type = other DNA
cctggtccgcacaatt

SEQ ID NO: 21685 - DNA, 16 bp, synthetic construct
  misc_feature 1..16: note = synthetic [barcode part1]
  source 1..16: mol_type = other DNA
atacgacgaaggattc

SEQ ID NO: 21686 - DNA, 16 bp, synthetic construct
  misc_feature 1..16: note = synthetic [barcode part1]
  source 1..16: mol_type = other DNA
gtcaccgttgagttag

SEQ ID NO: 21687 - DNA, 16 bp, synthetic construct
  misc_feature 1..16: note = synthetic [barcode part1]
  source 1..16: mol_type = other DNA
ttataccgtcttcgcc

SEQ ID NO: 21688 - DNA, 16 bp, synthetic construct
  misc_feature 1..16: note = synthetic [barcode part1]
  source 1..16: mol_type = other DNA
atctggaagacctgtc

SEQ ID NO: 21689 - DNA, 16 bp, synthetic construct
  misc_feature 1..16: note = synthetic [barcode part1]
  source 1..16: mol_type = other DNA
agttgacgtgtgtacc

SEQ ID NO: 21690 - DNA, 16 bp, synthetic construct
  misc_feature 1..16: note = synthetic [barcode part1]
  source 1..16: mol_type = other DNA
aacggacgatactgcg

SEQ ID NO: 21691 - DNA, 16 bp, synthetic construct
  misc_feature 1..16: note = synthetic [barcode part1]
  source 1..16: mol_type = other DNA
ccagtcgaactctaag

SEQ ID NO: 21692 - DNA, 16 bp, synthetic construct
  misc_feature 1..16: note = synthetic [barcode part1]
  source 1..16: mol_type = other DNA
aatccgatccttgcgc

SEQ ID NO: 21693 - DNA, 16 bp, synthetic construct
  misc_feature 1..16: note = synthetic [barcode part1]
  source 1..16: mol_type = other DNA
gtcgcaggtctacttc

SEQ ID NO: 21694 - DNA, 16 bp, synthetic construct
  misc_feature 1..16: note = synthetic [barcode part1]
  source 1..16: mol_type = other DNA
gtctgttcacctgtct

SEQ ID NO: 21695 - DNA, 16 bp, synthetic construct
  misc_feature 1..16: note = synthetic [barcode part1]
  source 1..16: mol_type = other DNA
cctctagtggtgtgtc

SEQ ID NO: 21696 - DNA, 16 bp, synthetic construct
  misc_feature 1..16: note = synthetic [barcode part1]
  source 1..16: mol_type = other DNA
gcgcgccttatataag

SEQ ID NO: 21697 - DNA, 16 bp, synthetic construct
  misc_feature 1..16: note = synthetic [barcode part1]
  source 1..16: mol_type = other DNA
gacagaactgaacgtt

SEQ ID NO: 21698 - DNA, 16 bp, synthetic construct
  misc_feature 1..16: note = synthetic [barcode part1]
  source 1..16: mol_type = other DNA
cgttcgtacctcagac

SEQ ID NO: 21699 - DNA, 16 bp, synthetic construct
  misc_feature 1..16: note = synthetic [barcode part1]
  source 1..16: mol_type = other DNA
attgcactgataggag

SEQ ID NO: 21700 - DNA, 16 bp, synthetic construct
  misc_feature 1..16: note = synthetic [barcode part1]
  source 1..16: mol_type = other DNA
tgcaggttatcgtctt

SEQ ID NO: 21701 - DNA, 16 bp, synthetic construct
  misc_feature 1..16: note = synthetic [barcode part1]
  source 1..16: mol_type = other DNA
agtgttgcagtaccac

SEQ ID NO: 21702 - DNA, 16 bp, synthetic construct
  misc_feature 1..16: note = synthetic [barcode part1]
  source 1..16: mol_type = other DNA
aattgcctgccaagtg

SEQ ID NO: 21703 - DNA, 16 bp, synthetic construct
  misc_feature 1..16: note = synthetic [barcode part1]
  source 1..16: mol_type = other DNA
gtcgatacggacttac

SEQ ID NO: 21704 - DNA, 16 bp, synthetic construct
  misc_feature 1..16: note = synthetic [barcode part1]
  source 1..16: mol_type = other DNA
cgcgaggaagatatag

SEQ ID NO: 21705 - DNA, 16 bp, synthetic construct
  misc_feature 1..16: note = synthetic [barcode part1]
  source 1..16: mol_type = other DNA
attacggaagtcctgc

SEQ ID NO: 21706 - DNA, 16 bp, synthetic construct
  misc_feature 1..16: note = synthetic [barcode part1]
  source 1..16: mol_type = other DNA
ataacagataaccgcg

SEQ ID NO: 21707 - DNA, 16 bp, synthetic construct
  misc_feature 1..16: note = synthetic [barcode part1]
  source 1..16: mol_type = other DNA
tctgttaggtccgtgc

SEQ ID NO: 21708 - DNA, 16 bp, synthetic construct
  misc_feature 1..16: note = synthetic [barcode part1]
  source 1..16: mol_type = other DNA
gagatagacctcgtct

SEQ ID NO: 21709 - DNA, 16 bp, synthetic construct
  misc_feature 1..16: note = synthetic [barcode part1]
  source 1..16: mol_type = other DNA
tatagttagaggccag

SEQ ID NO: 21710 - DNA, 16 bp, synthetic construct
  misc_feature 1..16: note = synthetic [barcode part1]
  source 1..16: mol_type = other DNA
gtacggtctaatctct

SEQ ID NO: 21711 - DNA, 16 bp, synthetic construct
  misc_feature 1..16: note = synthetic [barcode part1]
  source 1..16: mol_type = other DNA
gaactgccgtcaagtt

SEQ ID NO: 21712 - DNA, 16 bp, synthetic construct
  misc_feature 1..16: note = synthetic [barcode part1]
  source 1..16: mol_type = other DNA
actggtacaagttcgc

SEQ ID NO: 21713 - DNA, 16 bp, synthetic construct
  misc_feature 1..16: note = synthetic [barcode part1]
  source 1..16: mol_type = other DNA
cgtgtcgcaattacag

SEQ ID NO: 21714 - DNA, 16 bp, synthetic construct
  misc_feature 1..16: note = synthetic [barcode part1]
  source 1..16: mol_type = other DNA
tgtcacctaggtctgc

SEQ ID NO: 21715 - DNA, 16 bp, synthetic construct
  misc_feature 1..16: note = synthetic [barcode part1]
  source 1..16: mol_type = other DNA
aattcggcggttcaac

SEQ ID NO: 21716 - DNA, 16 bp, synthetic construct
  misc_feature 1..16: note = synthetic [barcode part1]
  source 1..16: mol_type = other DNA
ccagaacacttactct

SEQ ID NO: 21717 - DNA, 16 bp, synthetic construct
  misc_feature 1..16: note = synthetic [barcode part1]
  source 1..16: mol_type = other DNA
aaggtccacgaatagt

SEQ ID NO: 21718 - DNA, 16 bp, synthetic construct
  misc_feature 1..16: note = synthetic [barcode part1]
  source 1..16: mol_type = other DNA
gattgtacttcgacct

SEQ ID NO: 21719 - DNA, 16 bp, synthetic construct
  misc_feature 1..16: note = synthetic [barcode part1]
  source 1..16: mol_type = other DNA
taaccttgttaacgcc

SEQ ID NO: 21720 - DNA, 16 bp, synthetic construct
  misc_feature 1..16: note = synthetic [barcode part1]
  source 1..16: mol_type = other DNA
actacaacctacctgt

SEQ ID NO: 21721 - DNA, 16 bp, synthetic construct
  misc_feature 1..16: note = synthetic [barcode part1]
  source 1..16: mol_type = other DNA
gtgtgacggaggatct

SEQ ID NO: 21722 - DNA, 16 bp, synthetic construct
  misc_feature 1..16: note = synthetic [barcode part1]
  source 1..16: mol_type = other DNA
aggtagagtctgtcct

SEQ ID NO: 21723 - DNA, 16 bp, synthetic construct
  misc_feature 1..16: note = synthetic [barcode part1]
  source 1..16: mol_type = other DNA
tccactgcacaccaac

SEQ ID NO: 21724 - DNA, 16 bp, synthetic construct
  misc_feature 1..16: note = synthetic [barcode part1]
  source 1..16: mol_type = other DNA
acgttaggcacgattc

SEQ ID NO: 21725 - DNA, 16 bp, synthetic construct
  misc_feature 1..16: note = synthetic [barcode part1]
  source 1..16: mol_type = other DNA
acgactacggtatacc

SEQ ID NO: 21726 - DNA, 16 bp, synthetic construct
  misc_feature 1..16: note = synthetic [barcode part1]
  source 1..16: mol_type = other DNA
tgtattagaggccaag

SEQ ID NO: 21727 - DNA, 16 bp, synthetic construct
  misc_feature 1..16: note = synthetic [barcode part1]
  source 1..16: mol_type = other DNA
tccttcctctctctct

SEQ ID NO: 21728 - DNA, 16 bp, synthetic construct
  misc_feature 1..16: note = synthetic [barcode part1]
  source 1..16: mol_type = other DNA
tcgtcacgtcttactc

SEQ ID NO: 21729 - DNA, 16 bp, synthetic construct
  misc_feature 1..16: note = synthetic [barcode part1]
  source 1..16: mol_type = other DNA
cggatataagacggcc

SEQ ID NO: 21730 - DNA, 16 bp, synthetic construct
  misc_feature 1..16: note = synthetic [barcode part1]
  source 1..16: mol_type = other DNA
tcgacttccactacct

SEQ ID NO: 21731 - DNA, 16 bp, synthetic construct
  misc_feature 1..16: note = synthetic [barcode part1]
  source 1..16: mol_type = other DNA
cgtggcagataggtac

SEQ ID NO: 21732 - DNA, 16 bp, synthetic construct
  misc_feature 1..16: note = synthetic [barcode part1]
  source 1..16: mol_type = other DNA
aaggtcgtgatcttcg

SEQ ID NO: 21733 - DNA, 16 bp, synthetic construct
  misc_feature 1..16: note = synthetic [barcode part1]
  source 1..16: mol_type = other DNA
ccaccagagttgttag

SEQ ID NO: 21734 - DNA, 16 bp, synthetic construct
  misc_feature 1..16: note = synthetic [barcode part1]
  source 1..16: mol_type = other DNA
cgattctggagttggt

SEQ ID NO: 21735 - DNA, 16 bp, synthetic construct
  misc_feature 1..16: note = synthetic [barcode part1]
  source 1..16: mol_type = other DNA
tgacggatagagtgag

SEQ ID NO: 21736 - DNA, 16 bp, synthetic construct
  misc_feature 1..16: note = synthetic [barcode part1]
  source 1..16: mol_type = other DNA
ttgacgagtgaaggcc

SEQ ID NO: 21737 - DNA, 16 bp, synthetic construct
  misc_feature 1..16: note = synthetic [barcode part1]
  source 1..16: mol_type = other DNA
cacggtaatctgtctt

SEQ ID NO: 21738 - DNA, 16 bp, synthetic construct
  misc_feature 1..16: note = synthetic [barcode part1]
  source 1..16: mol_type = other DNA
tccgcgttagtctggt

SEQ ID NO: 21739 - DNA, 16 bp, synthetic construct
  misc_feature 1..16: note = synthetic [barcode part1]
  source 1..16: mol_type = other DNA
agtgtggtagagacag

SEQ ID NO: 21740 - DNA, 16 bp, synthetic construct
  misc_feature 1..16: note = synthetic [barcode part1]
  source 1..16: mol_type = other DNA
ttgacacgttggtacg

SEQ ID NO: 21741 - DNA, 16 bp, synthetic construct
  misc_feature 1..16: note = synthetic [barcode part1]
  source 1..16: mol_type = other DNA
tgtactgacgttgacg

SEQ ID NO: 21742 - DNA, 16 bp, synthetic construct
  misc_feature 1..16: note = synthetic [barcode part1]
  source 1..16: mol_type = other DNA
ttacggagtctctcgc

SEQ ID NO: 21743 - DNA, 16 bp, synthetic construct
  misc_feature 1..16: note = synthetic [barcode part1]
  source 1..16: mol_type = other DNA
agacttaacgaggtgt

SEQ ID NO: 21744 - DNA, 16 bp, synthetic construct
  misc_feature 1..16: note = synthetic [barcode part1]
  source 1..16: mol_type = other DNA
aatagaggcacgattc

SEQ ID NO: 21745 - DNA, 16 bp, synthetic construct
  misc_feature 1..16: note = synthetic [barcode part1]
  source 1..16: mol_type = other DNA
cagtactagtgtcacg

SEQ ID NO: 21746 - DNA, 16 bp, synthetic construct
  misc_feature 1..16: note = synthetic [barcode part1]
  source 1..16: mol_type = other DNA
agttggcagttgacct

SEQ ID NO: 21747 - DNA, 16 bp, synthetic construct
  misc_feature 1..16: note = synthetic [barcode part1]
  source 1..16: mol_type = other DNA
aactcgtgtctcaccg

SEQ ID NO: 21748 - DNA, 16 bp, synthetic construct
  misc_feature 1..16: note = synthetic [barcode part1]
  source 1..16: mol_type = other DNA
gtgtggcaggattgac

SEQ ID NO: 21749 - DNA, 16 bp, synthetic construct
  misc_feature 1..16: note = synthetic [barcode part1]
  source 1..16: mol_type = other DNA
gcaatctctgcgttcg

SEQ ID NO: 21750 - DNA, 16 bp, synthetic construct
  misc_feature 1..16: note = synthetic [barcode part1]
  source 1..16: mol_type = other DNA
acctgttcacctacct

SEQ ID NO: 21751 - DNA, 16 bp, synthetic construct
  misc_feature 1..16: note = synthetic [barcode part1]
  source 1..16: mol_type = other DNA
cacttataacaggcgc

SEQ ID NO: 21752 - DNA, 16 bp, synthetic construct
  misc_feature 1..16: note = synthetic [barcode part1]
  source 1..16: mol_type = other DNA
tctatacaaggtgcgc

SEQ ID NO: 21753 - DNA, 16 bp, synthetic construct
  misc_feature 1..16: note = synthetic [barcode part1]
  source 1..16: mol_type = other DNA
gttaggttctacgttc

SEQ ID NO: 21754 - DNA, 16 bp, synthetic construct
  misc_feature 1..16: note = synthetic [barcode part1]
  source 1..16: mol_type = other DNA
cgtatcctagactgcc

SEQ ID NO: 21755 - DNA, 16 bp, synthetic construct
  misc_feature 1..16: note = synthetic [barcode part1]
  source 1..16: mol_type = other DNA
agttcgtgttctgttg

SEQ ID NO: 21756 - DNA, 16 bp, synthetic construct
  misc_feature 1..16: note = synthetic [barcode part1]
  source 1..16: mol_type = other DNA
gaatagtccttcgacg

SEQ ID NO: 21757 - DNA, 16 bp, synthetic construct
  misc_feature 1..16: note = synthetic [barcode part1]
  source 1..16: mol_type = other DNA
cgttcctactaggtcg

SEQ ID NO: 21758 - DNA, 16 bp, synthetic construct
  misc_feature 1..16: note = synthetic [barcode part1]
  source 1..16: mol_type = other DNA
tatcttgagatccgtc

SEQ ID NO: 21759 - DNA, 16 bp, synthetic construct
  misc_feature 1..16: note = synthetic [barcode part1]
  source 1..16: mol_type = other DNA
tgcacctcgttcttac

SEQ ID NO: 21760 - DNA, 16 bp, synthetic construct
  misc_feature 1..16: note = synthetic [barcode part1]
  source 1..16: mol_type = other DNA
taaccggcgatcaact

SEQ ID NO: 21761 - DNA, 16 bp, synthetic construct
  misc_feature 1..16: note = synthetic [barcode part1]
  source 1..16: mol_type = other DNA
tatcgcaactacgacg

SEQ ID NO: 21762 - DNA, 16 bp, synthetic construct
  misc_feature 1..16: note = synthetic [barcode part1]
  source 1..16: mol_type = other DNA
gattccagttccgaag

SEQ ID NO: 21763 - DNA, 16 bp, synthetic construct
  misc_feature 1..16: note = synthetic [barcode part1]
  source 1..16: mol_type = other DNA
tccgccaagttcacgt

SEQ ID NO: 21764 - DNA, 16 bp, synthetic construct
  misc_feature 1..16: note = synthetic [barcode part1]
  source 1..16: mol_type = other DNA
cacgtaattcgatctc

SEQ ID NO: 21765 - DNA, 16 bp, synthetic construct
  misc_feature 1..16: note = synthetic [barcode part1]
  source 1..16: mol_type = other DNA
caacgtgcgacagagt

SEQ ID NO: 21766 - DNA, 16 bp, synthetic construct
  misc_feature 1..16: note = synthetic [barcode part1]
  source 1..16: mol_type = other DNA
ttcgtacgactatcgt

SEQ ID NO: 21767 - DNA, 16 bp, synthetic construct
  misc_feature 1..16: note = synthetic [barcode part1]
  source 1..16: mol_type = other DNA
aaccacacaacgtgtc

SEQ ID NO: 21768 - DNA, 16 bp, synthetic construct
  misc_feature 1..16: note = synthetic [barcode part1]
  source 1..16: mol_type = other DNA
atcacgaggcgttatc

SEQ ID NO: 21769 - DNA, 16 bp, synthetic construct
  misc_feature 1..16: note = synthetic [barcode part1]
  source 1..16: mol_type = other DNA
ccacctgcagaacctt

SEQ ID NO: 21770 - DNA, 16 bp, synthetic construct
  misc_feature 1..16: note = synthetic [barcode part1]
  source 1..16: mol_type = other DNA
acctgtcctcaaggtc

SEQ ID NO: 21771 - DNA, 16 bp, synthetic construct
  misc_feature 1..16: note = synthetic [barcode part1]
  source 1..16: mol_type = other DNA
tcctcagagtcagaac

SEQ ID NO: 21772 - DNA, 16 bp, synthetic construct
  misc_feature 1..16: note = synthetic [barcode part1]
  source 1..16: mol_type = other DNA
cgtgattgcgttcaag

SEQ ID NO: 21773 - DNA, 16 bp, synthetic construct
  misc_feature 1..16: note = synthetic [barcode part1]
  source 1..16: mol_type = other DNA
aagtcggtaacgcacg

SEQ ID NO: 21774 - DNA, 16 bp, synthetic construct
  misc_feature 1..16: note = synthetic [barcode part1]
  source 1..16: mol_type = other DNA
taacgaacctggatag

SEQ ID NO: 21775 - DNA, 16 bp, synthetic construct
  misc_feature 1..16: note = synthetic [barcode part1]
  source 1..16: mol_type = other DNA
tgcagagactaggtcg

SEQ ID NO: 21776 - DNA, 16 bp, synthetic construct
  misc_feature 1..16: note = synthetic [barcode part1]
  source 1..16: mol_type = other DNA
acgtaggcgaactgtg

SEQ ID NO: 21777 - DNA, 16 bp, synthetic construct
  misc_feature 1..16: note = synthetic [barcode part1]
  source 1..16: mol_type = other DNA
gagttcttggttggtg

SEQ ID NO: 21778 - DNA, 16 bp, synthetic construct
  misc_feature 1..16: note = synthetic [barcode part1]
  source 1..16: mol_type = other DNA
tatcaccgtgatcact

SEQ ID NO: 21779 - DNA, 16 bp, synthetic construct
  misc_feature 1..16: note = synthetic [barcode part1]
  source 1..16: mol_type = other DNA
ccggagtattctgaac

SEQ ID NO: 21780 - DNA, 16 bp, synthetic construct
  misc_feature 1..16: note = synthetic [barcode part1]
  source 1..16: mol_type = other DNA
cggttctatattggtc

SEQ ID NO: 21781 - DNA, 16 bp, synthetic construct
  misc_feature 1..16: note = synthetic [barcode part1]
  source 1..16: mol_type = other DNA
cgaatcgtcagactgt

SEQ ID NO: 21782 - DNA, 16 bp, synthetic construct
  misc_feature 1..16: note = synthetic [barcode part1]
  source 1..16: mol_type = other DNA
ccaagtacctattacc

SEQ ID NO: 21783 - DNA, 16 bp, synthetic construct
  misc_feature 1..16: note = synthetic [barcode part1]
  source 1..16: mol_type = other DNA
gtagaggtgcaagaac

SEQ ID NO: 21784 - DNA, 16 bp, synthetic construct
  misc_feature 1..16: note = synthetic [barcode part1]
  source 1..16: mol_type = other DNA
cgattccaaggtcaac

SEQ ID NO: 21785 - DNA, 16 bp, synthetic construct
  misc_feature 1..16: note = synthetic [barcode part1]
  source 1..16: mol_type = other DNA
ttgaggtaataccgcc

SEQ ID NO: 21786 - DNA, 16 bp, synthetic construct
  misc_feature 1..16: note = synthetic [barcode part1]
  source 1..16: mol_type = other DNA
aggtcaggccgtatag

SEQ ID NO: 21787 - DNA, 16 bp, synthetic construct
  misc_feature 1..16: note = synthetic [barcode part1]
  source 1..16: mol_type = other DNA
tccgacgtgtccttag

SEQ ID NO: 21788 - DNA, 16 bp, synthetic construct
  misc_feature 1..16: note = synthetic [barcode part1]
  source 1..16: mol_type = other DNA
cagaaccaacctcagt

SEQ ID NO: 21789 - DNA, 16 bp, synthetic construct
  misc_feature 1..16: note = synthetic [barcode part1]
  source 1..16: mol_type = other DNA
acctcaccgagtctac

SEQ ID NO: 21790 - DNA, 16 bp, synthetic construct
  misc_feature 1..16: note = synthetic [barcode part1]
  source 1..16: mol_type = other DNA
aatcgcagattccttc

SEQ ID NO: 21791 - DNA, 16 bp, synthetic construct
  misc_feature 1..16: note = synthetic [barcode part1]
  source 1..16: mol_type = other DNA
cctagttctctgacct

SEQ ID NO: 21792 - DNA, 16 bp, synthetic construct
  misc_feature 1..16: note = synthetic [barcode part1]
  source 1..16: mol_type = other DNA
gaacggttgcgtcaag

SEQ ID NO: 21793 - DNA, 16 bp, synthetic construct
  misc_feature 1..16: note = synthetic [barcode part1]
  source 1..16: mol_type = other DNA
tataatccttccggtg

SEQ ID NO: 21794 - DNA, 16 bp, synthetic construct
  misc_feature 1..16: note = synthetic [barcode part1]
  source 1..16: mol_type = other DNA
atcgcctcttactacc

SEQ ID NO: 21795 - DNA, 16 bp, synthetic construct
  misc_feature 1..16: note = synthetic [barcode part1]
  source 1..16: mol_type = other DNA
gaagttaacgcagttg

SEQ ID NO: 21796 - DNA, 16 bp, synthetic construct
  misc_feature 1..16: note = synthetic [barcode part1]
  source 1..16: mol_type = other DNA
caggtgaattcgtctg

SEQ ID NO: 21797 - DNA, 16 bp, synthetic construct
  misc_feature 1..16: note = synthetic [barcode part1]
  source 1..16: mol_type = other DNA
gtagaaggccaccagt

SEQ ID NO: 21798 - DNA, 16 bp, synthetic construct
  misc_feature 1..16: note = synthetic [barcode part1]
  source 1..16: mol_type = other DNA
tggtacggaggactgt

SEQ ID NO: 21799 - DNA, 16 bp, synthetic construct
  misc_feature 1..16: note = synthetic [barcode part1]
  source 1..16: mol_type = other DNA
actgcagtgtctgcct

SEQ ID NO: 21800 - DNA, 16 bp, synthetic construct
  misc_feature 1..16: note = synthetic [barcode part1]
  source 1..16: mol_type = other DNA
gaatcaccactctcgc

SEQ ID NO: 21801 - DNA, 16 bp, synthetic construct
  misc_feature 1..16: note = synthetic [barcode part1]
  source 1..16: mol_type = other DNA
ttattccaactacgcg

SEQ ID NO: 21802 - DNA, 16 bp, synthetic construct
  misc_feature 1..16: note = synthetic [barcode part1]
  source 1..16: mol_type = other DNA
gttgttgactggactg

SEQ ID NO: 21803 - DNA, 16 bp, synthetic construct
  misc_feature 1..16: note = synthetic [barcode part1]
  source 1..16: mol_type = other DNA
gtatcggtaacctctt

SEQ ID NO: 21804 - DNA, 16 bp, synthetic construct
  misc_feature 1..16: note = synthetic [barcode part1]
  source 1..16: mol_type = other DNA
gtacgacttaggaagt

SEQ ID NO: 21805 - DNA, 16 bp, synthetic construct
  misc_feature 1..16: note = synthetic [barcode part1]
  source 1..16: mol_type = other DNA
gtggcgtcaattgatc

SEQ ID NO: 21806 - DNA, 16 bp, synthetic construct
  misc_feature 1..16: note = synthetic [barcode part1]
  source 1..16: mol_type = other DNA
cctactcacctcgaag

SEQ ID NO: 21807 - DNA, 16 bp, synthetic construct
  misc_feature 1..16: note = synthetic [barcode part1]
  source 1..16: mol_type = other DNA
gccagtagtggaacgt

SEQ ID NO: 21808 - DNA, 16 bp, synthetic construct
  misc_feature 1..16: note = synthetic [barcode part1]
  source 1..16: mol_type = other DNA
caaccttccttggtct

SEQ ID NO: 21809 - DNA, 16 bp, synthetic construct
  misc_feature 1..16: note = synthetic [barcode part1]
  source 1..16: mol_type = other DNA
ccgaatacagagtggc

SEQ ID NO: 21810 - DNA, 16 bp, synthetic construct
  misc_feature 1..16: note = synthetic [barcode part1]
  source 1..16: mol_type = other DNA
gtgaggattcctgtac

SEQ ID NO: 21811 - DNA, 16 bp, synthetic construct
  misc_feature 1..16: note = synthetic [barcode part1]
  source 1..16: mol_type = other DNA
gtactggaatccgtgt

SEQ ID NO: 21812 - DNA, 16 bp, synthetic construct
  misc_feature 1..16: note = synthetic [barcode part1]
  source 1..16: mol_type = other DNA
aaggcctgtgacactt

SEQ ID NO: 21813 - DNA, 16 bp, synthetic construct
  misc_feature 1..16: note = synthetic [barcode part1]
  source 1..16: mol_type = other DNA
tcagtagtgccagatc

SEQ ID NO: 21814 - DNA, 16 bp, synthetic construct
  misc_feature 1..16: note = synthetic [barcode part1]
  source 1..16: mol_type = other DNA
acctaggatctgcagt

SEQ ID NO: 21815 - DNA, 16 bp, synthetic construct
  misc_feature 1..16: note = synthetic [barcode part1]
  source 1..16: mol_type = other DNA
taggacggtggaatag

SEQ ID NO: 21816 - DNA, 16 bp, synthetic construct
  misc_feature 1..16: note = synthetic [barcode part1]
  source 1..16: mol_type = other DNA
acaacaaggcaacgag

SEQ ID NO: 21817 - DNA, 16 bp, synthetic construct
  misc_feature 1..16: note = synthetic [barcode part1]
  source 1..16: mol_type = other DNA
ttgattcacttggacc

SEQ ID NO: 21818 - DNA, 16 bp, synthetic construct
  misc_feature 1..16: note = synthetic [barcode part1]
  source 1..16: mol_type = other DNA
tgtcgattacggtcag

SEQ ID NO: 21819 - DNA, 16 bp, synthetic construct
  misc_feature 1..16: note = synthetic [barcode part1]
  source 1..16: mol_type = other DNA
gcaattcttcacgccg

SEQ ID NO: 21820 - DNA, 16 bp, synthetic construct
  misc_feature 1..16: note = synthetic [barcode part1]
  source 1..16: mol_type = other DNA
tgattgaacgcgcgtt

SEQ ID NO: 21821 - DNA, 16 bp, synthetic construct
  misc_feature 1..16: note = synthetic [barcode part1]
  source 1..16: mol_type = other DNA
acaacggaagttggag

SEQ ID NO: 21822 - DNA, 16 bp, synthetic construct
  misc_feature 1..16: note = synthetic [barcode part1]
  source 1..16: mol_type = other DNA
gtggtgaagtgacaag

SEQ ID NO: 21823 - DNA, 16 bp, synthetic construct
  misc_feature 1..16: note = synthetic [barcode part1]
  source 1..16: mol_type = other DNA
tactcgaggagattag

SEQ ID NO: 21824 - DNA, 16 bp, synthetic construct
  misc_feature 1..16: note = synthetic [barcode part1]
  source 1..16: mol_type = other DNA
cgttctcgaagatacg

SEQ ID NO: 21825 - DNA, 16 bp, synthetic construct
  misc_feature 1..16: note = synthetic [barcode part1]
  source 1..16: mol_type = other DNA
agtctcctgacttctc

SEQ ID NO: 21826 - DNA, 16 bp, synthetic construct
  misc_feature 1..16: note = synthetic [barcode part1]
  source 1..16: mol_type = other DNA
ttacgtcaacgatcct

SEQ ID NO: 21827 - DNA, 16 bp, synthetic construct
  misc_feature 1..16: note = synthetic [barcode part1]
  source 1..16: mol_type = other DNA
aggtcaggtgttggtg

SEQ ID NO: 21828 - DNA, 16 bp, synthetic construct
  misc_feature 1..16: note = synthetic [barcode part1]
  source 1..16: mol_type = other DNA
tgacgtagtacctgac

SEQ ID NO: 21829 - DNA, 16 bp, synthetic construct
  misc_feature 1..16: note = synthetic [barcode part1]
  source 1..16: mol_type = other DNA
acgagtgcgtcgtaag

SEQ ID NO: 21830 - DNA, 16 bp, synthetic construct
  misc_feature 1..16: note = synthetic [barcode part1]
  source 1..16: mol_type = other DNA
aagtagtcacgccgag

SEQ ID NO: 21831 - DNA, 16 bp, synthetic construct
  misc_feature 1..16: note = synthetic [barcode part1]
  source 1..16: mol_type = other DNA
gacgaagttaggtatc

SEQ ID NO: 21832 - DNA, 16 bp, synthetic construct
  misc_feature 1..16: note = synthetic [barcode part1]
  source 1..16: mol_type = other DNA
gacaggataactctcc

SEQ ID NO: 21833 - DNA, 16 bp, synthetic construct
  misc_feature 1..16: note = synthetic [barcode part1]
  source 1..16: mol_type = other DNA
aggattcgagtaggcc

SEQ ID NO: 21834 - DNA, 16 bp, synthetic construct
  misc_feature 1..16: note = synthetic [barcode part1]
  source 1..16: mol_type = other DNA
ccttacgtcttcgtac

SEQ ID NO: 21835 - DNA, 16 bp, synthetic construct
  misc_feature 1..16: note = synthetic [barcode part1]
  source 1..16: mol_type = other DNA
ccggttcgatacacct

SEQ ID NO: 21836 - DNA, 16 bp, synthetic construct
  misc_feature 1..16: note = synthetic [barcode part1]
  source 1..16: mol_type = other DNA
cgttaacgtcgtgtag

SEQ ID NO: 21837 - DNA, 16 bp, synthetic construct
  misc_feature 1..16: note = synthetic [barcode part1]
  source 1..16: mol_type = other DNA
ataggccacgtctagt

SEQ ID NO: 21838 - DNA, 16 bp, synthetic construct
  misc_feature 1..16: note = synthetic [barcode part1]
  source 1..16: mol_type = other DNA
tcaagtaacctcgtct

SEQ ID NO: 21839 - DNA, 16 bp, synthetic construct
  misc_feature 1..16: note = synthetic [barcode part1]
  source 1..16: mol_type = other DNA
caggagtggattaccg

SEQ ID NO: 21840 - DNA, 16 bp, synthetic construct
  misc_feature 1..16: note = synthetic [barcode part1]
  source 1..16: mol_type = other DNA
tcctcggattggcgtt

SEQ ID NO: 21841 - DNA, 16 bp, synthetic construct
  misc_feature 1..16: note = synthetic [barcode part1]
  source 1..16: mol_type = other DNA
tacaacgtgttcgttc

SEQ ID NO: 21842 - DNA, 16 bp, synthetic construct
  misc_feature 1..16: note = synthetic [barcode part1]
  source 1..16: mol_type = other DNA
gatcgcggacttcttc

SEQ ID NO: 21843 - DNA, 16 bp, synthetic construct
  misc_feature 1..16: note = synthetic [barcode part1]
  source 1..16: mol_type = other DNA
aaggataacctggtac

SEQ ID NO: 21844 - DNA, 16 bp, synthetic construct
  misc_feature 1..16: note = synthetic [barcode part1]
  source 1..16: mol_type = other DNA
gtccaattgtaccttg

SEQ ID NO: 21845 - DNA, 16 bp, synthetic construct
  misc_feature 1..16: note = synthetic [barcode part1]
  source 1..16: mol_type = other DNA
tctggcgtctataccg

SEQ ID NO: 21846 - DNA, 16 bp, synthetic construct
  misc_feature 1..16: note = synthetic [barcode part1]
  source 1..16: mol_type = other DNA
ttattgcaggcggtac

SEQ ID NO: 21847 - DNA, 16 bp, synthetic construct
  misc_feature 1..16: note = synthetic [barcode part1]
  source 1..16: mol_type = other DNA
tactcttagtcaccag

SEQ ID NO: 21848 - DNA, 16 bp, synthetic construct
  misc_feature 1..16: note = synthetic [barcode part1]
  source 1..16: mol_type = other DNA
atctattggcaccact

SEQ ID NO: 21849 - DNA, 16 bp, synthetic construct
  misc_feature 1..16: note = synthetic [barcode part1]
  source 1..16: mol_type = other DNA
cactctcgattcggtg

SEQ ID NO: 21850 - DNA, 16 bp, synthetic construct
  misc_feature 1..16: note = synthetic [barcode part1]
  source 1..16: mol_type = other DNA
tgagtattggccttct

SEQ ID NO: 21851 - DNA, 16 bp, synthetic construct
  misc_feature 1..16: note = synthetic [barcode part1]
  source 1..16: mol_type = other DNA
tggcaatcgactcaac

SEQ ID NO: 21852 - DNA, 16 bp, synthetic construct
  misc_feature 1..16: note = synthetic [barcode part1]
  source 1..16: mol_type = other DNA
gccgtgaacagtattc

SEQ ID NO: 21853 - DNA, 16 bp, synthetic construct
  misc_feature 1..16: note = synthetic [barcode part1]
  source 1..16: mol_type = other DNA
gatatacgtcggcact

SEQ ID NO: 21854 - DNA, 16 bp, synthetic construct
  misc_feature 1..16: note = synthetic [barcode part1]
  source 1..16: mol_type = other DNA
gacagttccgagttac

SEQ ID NO: 21855 - DNA, 16 bp, synthetic construct
  misc_feature 1..16: note = synthetic [barcode part1]
  source 1..16: mol_type = other DNA
gcgccttaatcaccgt

SEQ ID NO: 21856 - DNA, 16 bp, synthetic construct
  misc_feature 1..16: note = synthetic [barcode part1]
  source 1..16: mol_type = other DNA
tccagagaatctcggt

SEQ ID NO: 21857 - DNA, 16 bp, synthetic construct
  misc_feature 1..16: note = synthetic [barcode part1]
  source 1..16: mol_type = other DNA
gatccagactatcggt

SEQ ID NO: 21858 - DNA, 16 bp, synthetic construct
  misc_feature 1..16: note = synthetic [barcode part1]
  source 1..16: mol_type = other DNA
aagtattctgtctcgc

SEQ ID NO: 21859 - DNA, 16 bp, synthetic construct
  misc_feature 1..16: note = synthetic [barcode part1]
  source 1..16: mol_type = other DNA
taggacggtaaggtag

SEQ ID NO: 21860 - DNA, 16 bp, synthetic construct
  misc_feature 1..16: note = synthetic [barcode part1]
  source 1..16: mol_type = other DNA
ccggttgttaagatcg

SEQ ID NO: 21861 - DNA, 16 bp, synthetic construct
  misc_feature 1..16: note = synthetic [barcode part1]
  source 1..16: mol_type = other DNA
aacgcagtgaattgtg

SEQ ID NO: 21862 - DNA, 16 bp, synthetic construct
  misc_feature 1..16: note = synthetic [barcode part1]
  source 1..16: mol_type = other DNA
acttacgtgcagatcg

SEQ ID NO: 21863 - DNA, 16 bp, synthetic construct
  misc_feature 1..16: note = synthetic [barcode part1]
  source 1..16: mol_type = other DNA
acgcgtcttactgtcg

SEQ ID NO: 21864 - DNA, 16 bp, synthetic construct
  misc_feature 1..16: note = synthetic [barcode part1]
  source 1..16: mol_type = other DNA
gaccgacctaattgac

SEQ ID NO: 21865 - DNA, 16 bp, synthetic construct
  misc_feature 1..16: note = synthetic [barcode part1]
  source 1..16: mol_type = other DNA
acgtaactcctctggc

SEQ ID NO: 21866 - DNA, 16 bp, synthetic construct
  misc_feature 1..16: note = synthetic [barcode part1]
  source 1..16: mol_type = other DNA
tacagtccggcagaag

SEQ ID NO: 21867 - DNA, 16 bp, synthetic construct
  misc_feature 1..16: note = synthetic [barcode part1]
  source 1..16: mol_type = other DNA
accgttccaggtgttc

SEQ ID NO: 21868 - DNA, 16 bp, synthetic construct
  misc_feature 1..16: note = synthetic [barcode part1]
  source 1..16: mol_type = other DNA
tgaacaagtcttggag

SEQ ID NO: 21869 - DNA, 16 bp, synthetic construct
  misc_feature 1..16: note = synthetic [barcode part1]
  source 1..16: mol_type = other DNA
tagttctcgtacggcc

SEQ ID NO: 21870 - DNA, 16 bp, synthetic construct
  misc_feature 1..16: note = synthetic [barcode part1]
  source 1..16: mol_type = other DNA
ccgtgttgtagtctgc

SEQ ID NO: 21871 - DNA, 16 bp, synthetic construct
  misc_feature 1..16: note = synthetic [barcode part1]
  source 1..16: mol_type = other DNA
gcgagtaaggccttag

SEQ ID NO: 21872 - DNA, 16 bp, synthetic construct
  misc_feature 1..16: note = synthetic [barcode part1]
  source 1..16: mol_type = other DNA
gaggacttcttccaag

SEQ ID NO: 21873 - DNA, 16 bp, synthetic construct
  misc_feature 1..16: note = synthetic [barcode part1]
  source 1..16: mol_type = other DNA
taccagttcttccaag

SEQ ID NO: 21874 - DNA, 16 bp, synthetic construct
  misc_feature 1..16: note = synthetic [barcode part1]
  source 1..16: mol_type = other DNA
gccgagtataatctgc

SEQ ID NO: 21875 - DNA, 16 bp, synthetic construct
  misc_feature 1..16: note = synthetic [barcode part1]
  source 1..16: mol_type = other DNA
aaggaacgtccagatt

SEQ ID NO: 21876 - DNA, 16 bp, synthetic construct
  misc_feature 1..16: note = synthetic [barcode part1]
  source 1..16: mol_type = other DNA
tgaagtcggagttctc

SEQ ID NO: 21877 - DNA, 16 bp, synthetic construct
  misc_feature 1..16: note = synthetic [barcode part1]
  source 1..16: mol_type = other DNA
attgtccgcaagttct

SEQ ID NO: 21878 - DNA, 16 bp, synthetic construct
  misc_feature 1..16: note = synthetic [barcode part1]
  source 1..16: mol_type = other DNA
ttcagttgcgtcgacc

SEQ ID NO: 21879 - DNA, 16 bp, synthetic construct
  misc_feature 1..16: note = synthetic [barcode part1]
  source 1..16: mol_type = other DNA
ttcacgagtgagttcg

SEQ ID NO: 21880 - DNA, 16 bp, synthetic construct
  misc_feature 1..16: note = synthetic [barcode part1]
  source 1..16: mol_type = other DNA
tggttcaccgttagag

SEQ ID NO: 21881 - DNA, 16 bp, synthetic construct
  misc_feature 1..16: note = synthetic [barcode part1]
  source 1..16: mol_type = other DNA
gcctatacacaggttg

SEQ ID NO: 21882 - DNA, 16 bp, synthetic construct
  misc_feature 1..16: note = synthetic [barcode part1]
  source 1..16: mol_type = other DNA
agagtcgagttgcacg

SEQ ID NO: 21883 - DNA, 16 bp, synthetic construct
  misc_feature 1..16: note = synthetic [barcode part1]
  source 1..16: mol_type = other DNA
cctccttaggatctct

SEQ ID NO: 21884 - DNA, 16 bp, synthetic construct
  misc_feature 1..16: note = synthetic [barcode part1]
  source 1..16: mol_type = other DNA
cggttggtaataccac

SEQ ID NO: 21885 - DNA, 16 bp, synthetic construct
  misc_feature 1..16: note = synthetic [barcode part1]
  source 1..16: mol_type = other DNA
gtcaggtcgaagacgt

SEQ ID NO: 21886 - DNA, 16 bp, synthetic construct
  misc_feature 1..16: note = synthetic [barcode part1]
  source 1..16: mol_type = other DNA
actctgtggtgtgcct

SEQ ID NO: 21887 - DNA, 16 bp, synthetic construct
  misc_feature 1..16: note = synthetic [barcode part1]
  source 1..16: mol_type = other DNA
gtatagataccgaacg

SEQ ID NO: 21888 - DNA, 16 bp, synthetic construct
  misc_feature 1..16: note = synthetic [barcode part1]
  source 1..16: mol_type = other DNA
attcgtgtagtggaag

SEQ ID NO: 21889 - DNA, 16 bp, synthetic construct
  misc_feature 1..16: note = synthetic [barcode part1]
  source 1..16: mol_type = other DNA
cagtagtaaggcgtgc

SEQ ID NO: 21890 - DNA, 16 bp, synthetic construct
  misc_feature 1..16: note = synthetic [barcode part1]
  source 1..16: mol_type = other DNA
acgcagttggttacgt

SEQ ID NO: 21891 - DNA, 16 bp, synthetic construct
  misc_feature 1..16: note = synthetic [barcode part1]
  source 1..16: mol_type = other DNA
aactgtgactgcacac

SEQ ID NO: 21892 - DNA, 16 bp, synthetic construct
  misc_feature 1..16: note = synthetic [barcode part1]
  source 1..16: mol_type = other DNA
tcgaaggatactcaag

SEQ ID NO: 21893 - DNA, 16 bp, synthetic construct
  misc_feature 1..16: note = synthetic [barcode part1]
  source 1..16: mol_type = other DNA
tgaggactcgtatctg

SEQ ID NO: 21894 - DNA, 16 bp, synthetic construct
  misc_feature 1..16: note = synthetic [barcode part1]
  source 1..16: mol_type = other DNA
tcgagatagtaggcgc

SEQ ID NO: 21895 - DNA, 16 bp, synthetic construct
  misc_feature 1..16: note = synthetic [barcode part1]
  source 1..16: mol_type = other DNA
ttgcaactgtgtgcag

SEQ ID NO: 21896 - DNA, 16 bp, synthetic construct
  misc_feature 1..16: note = synthetic [barcode part1]
  source 1..16: mol_type = other DNA
gagacggacctgtagt

SEQ ID NO: 21897 - DNA, 16 bp, synthetic construct
  misc_feature 1..16: note = synthetic [barcode part1]
  source 1..16: mol_type = other DNA
cgattgatcaaggtcc

SEQ ID NO: 21898 - DNA, 16 bp, synthetic construct
  misc_feature 1..16: note = synthetic [barcode part1]
  source 1..16: mol_type = other DNA
gatctgaagaatacgc

SEQ ID NO: 21899 - DNA, 16 bp, synthetic construct
  misc_feature 1..16: note = synthetic [barcode part1]
  source 1..16: mol_type = other DNA
gtggagatagtaatcc

SEQ ID NO: 21900 - DNA, 16 bp, synthetic construct
  misc_feature 1..16: note = synthetic [barcode part1]
  source 1..16: mol_type = other DNA
cctaaccgttggtgtc

SEQ ID NO: 21901 - DNA, 16 bp, synthetic construct
  misc_feature 1..16: note = synthetic [barcode part1]
  source 1..16: mol_type = other DNA
tcactacggcacctgt

SEQ ID NO: 21902 - DNA, 16 bp, synthetic construct
  misc_feature 1..16: note = synthetic [barcode part1]
  source 1..16: mol_type = other DNA
tgttactgcaaccgcc

SEQ ID NO: 21903 - DNA, 16 bp, synthetic construct
  misc_feature 1..16: note = synthetic [barcode part1]
  source 1..16: mol_type = other DNA
gtaccagtacaccagt

SEQ ID NO: 21904 - DNA, 16 bp, synthetic construct
  misc_feature 1..16: note = synthetic [barcode part1]
  source 1..16: mol_type = other DNA
gttgttgtcttcgtag

SEQ ID NO: 21905 - DNA, 16 bp, synthetic construct
  misc_feature 1..16: note = synthetic [barcode part1]
  source 1..16: mol_type = other DNA
cgtcgaaggtagttct

SEQ ID NO: 21906 - DNA, 16 bp, synthetic construct
  misc_feature 1..16: note = synthetic [barcode part1]
  source 1..16: mol_type = other DNA
actcgtattggtgcag

SEQ ID NO: 21907 - DNA, 16 bp, synthetic construct
  misc_feature 1..16: note = synthetic [barcode part1]
  source 1..16: mol_type = other DNA
cactgccgagtgttct

SEQ ID NO: 21908 - DNA, 16 bp, synthetic construct
  misc_feature 1..16: note = synthetic [barcode part1]
  source 1..16: mol_type = other DNA
cgtcctggtgaactct

SEQ ID NO: 21909 - DNA, 16 bp, synthetic construct
  misc_feature 1..16: note = synthetic [barcode part1]
  source 1..16: mol_type = other DNA
ttgagatctgtggcgt

SEQ ID NO: 21910 - DNA, 16 bp, synthetic construct
  misc_feature 1..16: note = synthetic [barcode part1]
  source 1..16: mol_type = other DNA
tgcgaatcgttgcctc

SEQ ID NO: 21911 - DNA, 16 bp, synthetic construct
  misc_feature 1..16: note = synthetic [barcode part1]
  source 1..16: mol_type = other DNA
ttactaccaggcgtcc

SEQ ID NO: 21912 - DNA, 16 bp, synthetic construct
  misc_feature 1..16: note = synthetic [barcode part1]
  source 1..16: mol_type = other DNA
tgaagtcggccttaac

SEQ ID NO: 21913 - DNA, 16 bp, synthetic construct
  misc_feature 1..16: note = synthetic [barcode part1]
  source 1..16: mol_type = other DNA
tgcagttagttcgcag

SEQ ID NO: 21914 - DNA, 16 bp, synthetic construct
  misc_feature 1..16: note = synthetic [barcode part1]
  source 1..16: mol_type = other DNA
aggaattacacaccag

SEQ ID NO: 21915 - DNA, 16 bp, synthetic construct
  misc_feature 1..16: note = synthetic [barcode part1]
  source 1..16: mol_type = other DNA
tgcgtagttcaatcct

SEQ ID NO: 21916 - DNA, 16 bp, synthetic construct
  misc_feature 1..16: note = synthetic [barcode part1]
  source 1..16: mol_type = other DNA
agacggtgttaccttg

SEQ ID NO: 21917 - DNA, 16 bp, synthetic construct
  misc_feature 1..16: note = synthetic [barcode part1]
  source 1..16: mol_type = other DNA
taacgcacgtgttgac

SEQ ID NO: 21918 - DNA, 16 bp, synthetic construct
  misc_feature 1..16: note = synthetic [barcode part1]
  source 1..16: mol_type = other DNA
cgcgtgtgttgattag

SEQ ID NO: 21919 - DNA, 16 bp, synthetic construct
  misc_feature 1..16: note = synthetic [barcode part1]
  source 1..16: mol_type = other DNA
aggcaccttgtctcac

SEQ ID NO: 21920 - DNA, 16 bp, synthetic construct
  misc_feature 1..16: note = synthetic [barcode part1]
  source 1..16: mol_type = other DNA
tcaacgaagtgacctc

SEQ ID NO: 21921 - DNA, 16 bp, synthetic construct
  misc_feature 1..16: note = synthetic [barcode part1]
  source 1..16: mol_type = other DNA
tcgatccagatatctc

SEQ ID NO: 21922 - DNA, 16 bp, synthetic construct
  misc_feature 1..16: note = synthetic [barcode part1]
  source 1..16: mol_type = other DNA
acgagttgcgtagttc

SEQ ID NO: 21923 - DNA, 16 bp, synthetic construct
  misc_feature 1..16: note = synthetic [barcode part1]
  source 1..16: mol_type = other DNA
ttgttgcctactccgt

SEQ ID NO: 21924 - DNA, 16 bp, synthetic construct
  misc_feature 1..16: note = synthetic [barcode part1]
  source 1..16: mol_type = other DNA
tgtcgccactcaggtt

SEQ ID NO: 21925 - DNA, 16 bp, synthetic construct
  misc_feature 1..16: note = synthetic [barcode part1]
  source 1..16: mol_type = other DNA
tgttgacagtctcttg

SEQ ID NO: 21926 - DNA, 16 bp, synthetic construct
  misc_feature 1..16: note = synthetic [barcode part1]
  source 1..16: mol_type = other DNA
atagacaagtgttgcg

SEQ ID NO: 21927 - DNA, 16 bp, synthetic construct
  misc_feature 1..16: note = synthetic [barcode part1]
  source 1..16: mol_type = other DNA
gtctagtattgccgag

SEQ ID NO: 21928 - DNA, 16 bp, synthetic construct
  misc_feature 1..16: note = synthetic [barcode part1]
  source 1..16: mol_type = other DNA
gacgtacgtgttgact

SEQ ID NO: 21929 - DNA, 16 bp, synthetic construct
  misc_feature 1..16: note = synthetic [barcode part1]
  source 1..16: mol_type = other DNA
cgtaactcggtccttg

SEQ ID NO: 21930 - DNA, 16 bp, synthetic construct
  misc_feature 1..16: note = synthetic [barcode part1]
  source 1..16: mol_type = other DNA
tgcaatctaactctcg

SEQ ID NO: 21931 - DNA, 16 bp, synthetic construct
  misc_feature 1..16: note = synthetic [barcode part1]
  source 1..16: mol_type = other DNA
gtgtctcttgatagtc

SEQ ID NO: 21932 - DNA, 16 bp, synthetic construct
  misc_feature 1..16: note = synthetic [barcode part1]
  source 1..16: mol_type = other DNA
ttactgtgatacctgc

SEQ ID NO: 21933 - DNA, 16 bp, synthetic construct
  misc_feature 1..16: note = synthetic [barcode part1]
  source 1..16: mol_type = other DNA
gaccaatcgacgttac

SEQ ID NO: 21934 - DNA, 16 bp, synthetic construct
  misc_feature 1..16: note = synthetic [barcode part1]
  source 1..16: mol_type = other DNA
gacgagagattcacgc

SEQ ID NO: 21935 - DNA, 16 bp, synthetic construct
  misc_feature 1..16: note = synthetic [barcode part1]
  source 1..16: mol_type = other DNA
gcaatctgacaatccg

SEQ ID NO: 21936 - DNA, 16 bp, synthetic construct
  misc_feature 1..16: note = synthetic [barcode part1]
  source 1..16: mol_type = other DNA
gagaattctccggttg

SEQ ID NO: 21937 - DNA, 16 bp, synthetic construct
  misc_feature 1..16: note = synthetic [barcode part1]
  source 1..16: mol_type = other DNA
tcctagtgcactcggt

SEQ ID NO: 21938 - DNA, 16 bp, synthetic construct
  misc_feature 1..16: note = synthetic [barcode part1]
  source 1..16: mol_type = other DNA
gagtcagatattgacg

SEQ ID NO: 21939 - DNA, 16 bp, synthetic construct
  misc_feature 1..16: note = synthetic [barcode part1]
  source 1..16: mol_type = other DNA
atcggttcagtcagtg

SEQ ID NO: 21940 - DNA, 16 bp, synthetic construct
  misc_feature 1..16: note = synthetic [barcode part1]
  source 1..16: mol_type = other DNA
agtgaggtatagactc

SEQ ID NO: 21941 - DNA, 16 bp, synthetic construct
  misc_feature 1..16: note = synthetic [barcode part1]
  source 1..16: mol_type = other DNA
acagatctcttcagtc

SEQ ID NO: 21942 - DNA, 16 bp, synthetic construct
  misc_feature 1..16: note = synthetic [barcode part1]
  source 1..16: mol_type = other DNA
tcgcgtgtacagttag

SEQ ID NO: 21943 - DNA, 16 bp, synthetic construct
  misc_feature 1..16: note = synthetic [barcode part1]
  source 1..16: mol_type = other DNA
cctgttgttggatatc

SEQ ID NO: 21944 - DNA, 16 bp, synthetic construct
  misc_feature 1..16: note = synthetic [barcode part1]
  source 1..16: mol_type = other DNA
cctgaaggaagtcctt

SEQ ID NO: 21945 - DNA, 16 bp, synthetic construct
  misc_feature 1..16: note = synthetic [barcode part1]
  source 1..16: mol_type = other DNA
ccaataggtaagagtc

SEQ ID NO: 21946 - DNA, 16 bp, synthetic construct
  misc_feature 1..16: note = synthetic [barcode part1]
  source 1..16: mol_type = other DNA
cgtggtcctctgttag

SEQ ID NO: 21947 - DNA, 16 bp, synthetic construct
  misc_feature 1..16: note = synthetic [barcode part1]
  source 1..16: mol_type = other DNA
ttactaacgacggtcg

SEQ ID NO: 21948 - DNA, 16 bp, synthetic construct
  misc_feature 1..16: note = synthetic [barcode part1]
  source 1..16: mol_type = other DNA
tcgccacggatctact

SEQ ID NO: 21949 - DNA, 16 bp, synthetic construct
  misc_feature 1..16: note = synthetic [barcode part1]
  source 1..16: mol_type = other DNA
cctgcacgacctaact

SEQ ID NO: 21950 - DNA, 16 bp, synthetic construct
  misc_feature 1..16: note = synthetic [barcode part1]
  source 1..16: mol_type = other DNA
ataattcctcgcgccg

SEQ ID NO: 21951 - DNA, 16 bp, synthetic construct
  misc_feature 1..16: note = synthetic [barcode part1]
  source 1..16: mol_type = other DNA
tcggaattacctactc

SEQ ID NO: 21952 - DNA, 16 bp, synthetic construct
  misc_feature 1..16: note = synthetic [barcode part1]
  source 1..16: mol_type = other DNA
aacttgactctgcact

SEQ ID NO: 21953 - DNA, 16 bp, synthetic construct
  misc_feature 1..16: note = synthetic [barcode part1]
  source 1..16: mol_type = other DNA
ccaagagtgtaagttg

SEQ ID NO: 21954 - DNA, 16 bp, synthetic construct
  misc_feature 1..16: note = synthetic [barcode part1]
  source 1..16: mol_type = other DNA
taacgtgtagtaggac

SEQ ID NO: 21955 - DNA, 16 bp, synthetic construct
  misc_feature 1..16: note = synthetic [barcode part1]
  source 1..16: mol_type = other DNA
gatcgtggcgtcaatt

SEQ ID NO: 21956 - DNA, 16 bp, synthetic construct
  misc_feature 1..16: note = synthetic [barcode part1]
  source 1..16: mol_type = other DNA
caactggagttgacct

SEQ ID NO: 21957 - DNA, 16 bp, synthetic construct
  misc_feature 1..16: note = synthetic [barcode part1]
  source 1..16: mol_type = other DNA
tggtaacgcgtaggac

SEQ ID NO: 21958 - DNA, 16 bp, synthetic construct
  misc_feature 1..16: note = synthetic [barcode part1]
  source 1..16: mol_type = other DNA
tagtcagatcggtcac

SEQ ID NO: 21959 - DNA, 16 bp, synthetic construct
  misc_feature 1..16: note = synthetic [barcode part1]
  source 1..16: mol_type = other DNA
gttgaaccagaagtac

SEQ ID NO: 21960 - DNA, 16 bp, synthetic construct
  misc_feature 1..16: note = synthetic [barcode part1]
  source 1..16: mol_type = other DNA
cgtcggaagattgttc

SEQ ID NO: 21961 - DNA, 16 bp, synthetic construct
  misc_feature 1..16: note = synthetic [barcode part1]
  source 1..16: mol_type = other DNA
tcgcctactgtgacac

SEQ ID NO: 21962 - DNA, 16 bp, synthetic construct
  misc_feature 1..16: note = synthetic [barcode part1]
  source 1..16: mol_type = other DNA
gtacaggcgagaatag

SEQ ID NO: 21963 - DNA, 16 bp, synthetic construct
  misc_feature 1..16: note = synthetic [barcode part1]
  source 1..16: mol_type = other DNA
agatcgtcgttcttac

SEQ ID NO: 21964 - DNA, 16 bp, synthetic construct
  misc_feature 1..16: note = synthetic [barcode part1]
  source 1..16: mol_type = other DNA
agtacaccacagtcac

SEQ ID NO: 21965 - DNA, 16 bp, synthetic construct
  misc_feature 1..16: note = synthetic [barcode part1]
  source 1..16: mol_type = other DNA
tccgacctctcaatct

SEQ ID NO: 21966 - DNA, 16 bp, synthetic construct
  misc_feature 1..16: note = synthetic [barcode part1]
  source 1..16: mol_type = other DNA
taattggacgtcgcgt

SEQ ID NO: 21967 - DNA, 16 bp, synthetic construct
  misc_feature 1..16: note = synthetic [barcode part1]
  source 1..16: mol_type = other DNA
aagaagtcgttaacgc

SEQ ID NO: 21968 - DNA, 16 bp, synthetic construct
  misc_feature 1..16: note = synthetic [barcode part1]
  source 1..16: mol_type = other DNA
gtacacgaggatctct

SEQ ID NO: 21969 - DNA, 16 bp, synthetic construct
  misc_feature 1..16: note = synthetic [barcode part1]
  source 1..16: mol_type = other DNA
tcgtaggtaggtctgt

SEQ ID NO: 21970 - DNA, 16 bp, synthetic construct
  misc_feature 1..16: note = synthetic [barcode part1]
  source 1..16: mol_type = other DNA
tcttatctgaggcgag

SEQ ID NO: 21971 - DNA, 16 bp, synthetic construct
  misc_feature 1..16: note = synthetic [barcode part1]
  source 1..16: mol_type = other DNA
gcggtcttgtcttcag

SEQ ID NO: 21972 - DNA, 16 bp, synthetic construct
  misc_feature 1..16: note = synthetic [barcode part1]
  source 1..16: mol_type = other DNA
tcagagttaggtagac

SEQ ID NO: 21973 - DNA, 16 bp, synthetic construct
  misc_feature 1..16: note = synthetic [barcode part1]
  source 1..16: mol_type = other DNA
cgtctaacgtgagttg

SEQ ID NO: 21974 - DNA, 16 bp, synthetic construct
  misc_feature 1..16: note = synthetic [barcode part1]
  source 1..16: mol_type = other DNA
cgcagtgacagtattc

SEQ ID NO: 21975 - DNA, 16 bp, synthetic construct
  misc_feature 1..16: note = synthetic [barcode part1]
  source 1..16: mol_type = other DNA
ccagatattgcagacc

SEQ ID NO: 21976 - DNA, 16 bp, synthetic construct
  misc_feature 1..16: note = synthetic [barcode part1]
  source 1..16: mol_type = other DNA
tccggtcgcgttaact

SEQ ID NO: 21977 - DNA, 16 bp, synthetic construct
  misc_feature 1..16: note = synthetic [barcode part1]
  source 1..16: mol_type = other DNA
tgtctcctacgaagag

SEQ ID NO: 21978 - DNA, 16 bp, synthetic construct
  misc_feature 1..16: note = synthetic [barcode part1]
  source 1..16: mol_type = other DNA
tcaacttgcaatcgtc

SEQ ID NO: 21979 - DNA, 16 bp, synthetic construct
  misc_feature 1..16: note = synthetic [barcode part1]
  source 1..16: mol_type = other DNA
tcgcagaagaccgagt

SEQ ID NO: 21980 - DNA, 16 bp, synthetic construct
  misc_feature 1..16: note = synthetic [barcode part1]
  source 1..16: mol_type = other DNA
cgaaggaagttccttc

SEQ ID NO: 21981 - DNA, 16 bp, synthetic construct
  misc_feature 1..16: note = synthetic [barcode part1]
  source 1..16: mol_type = other DNA
tctctgatcgagaggt

SEQ ID NO: 21982 - DNA, 16 bp, synthetic construct
  misc_feature 1..16: note = synthetic [barcode part1]
  source 1..16: mol_type = other DNA
ttccgcgccaacagtt

SEQ ID NO: 21983 - DNA, 16 bp, synthetic construct
  misc_feature 1..16: note = synthetic [barcode part1]
  source 1..16: mol_type = other DNA
tgatcagatcgtggtc

SEQ ID NO: 21984 - DNA, 16 bp, synthetic construct
  misc_feature 1..16: note = synthetic [barcode part1]
  source 1..16: mol_type = other DNA
tagatcggccgttaac

SEQ ID NO: 21985 - DNA, 16 bp, synthetic construct
  misc_feature 1..16: note = synthetic [barcode part1]
  source 1..16: mol_type = other DNA
cagaccaactgttggt

SEQ ID NO: 21986 - DNA, 16 bp, synthetic construct
  misc_feature 1..16: note = synthetic [barcode part1]
  source 1..16: mol_type = other DNA
tccgattgtcggcgtt

SEQ ID NO: 21987 - DNA, 16 bp, synthetic construct
  misc_feature 1..16: note = synthetic [barcode part1]
  source 1..16: mol_type = other DNA
tgtgagtccactccac

SEQ ID NO: 21988 - DNA, 16 bp, synthetic construct
  misc_feature 1..16: note = synthetic [barcode part1]
  source 1..16: mol_type = other DNA
ttctgcgactattgac

SEQ ID NO: 21989 - DNA, 16 bp, synthetic construct
  misc_feature 1..16: note = synthetic [barcode part1]
  source 1..16: mol_type = other DNA
gtatcctgtcgttagt

SEQ ID NO: 21990 - DNA, 16 bp, synthetic construct
  misc_feature 1..16: note = synthetic [barcode part1]
  source 1..16: mol_type = other DNA
cctaagttcacgtgag

SEQ ID NO: 21991 - DNA, 16 bp, synthetic construct
  misc_feature 1..16: note = synthetic [barcode part1]
  source 1..16: mol_type = other DNA
cgtggatacttgcagt

SEQ ID NO: 21992 - DNA, 16 bp, synthetic construct
  misc_feature 1..16: note = synthetic [barcode part1]
  source 1..16: mol_type = other DNA
agttcttgatcacgtc

SEQ ID NO: 21993 - DNA, 16 bp, synthetic construct
  misc_feature 1..16: note = synthetic [barcode part1]
  source 1..16: mol_type = other DNA
aaggcctgacactgtt

SEQ ID NO: 21994 - DNA, 16 bp, synthetic construct
  misc_feature 1..16: note = synthetic [barcode part1]
  source 1..16: mol_type = other DNA
cacgattgtcgaggag

SEQ ID NO: 21995 - DNA, 16 bp, synthetic construct
  misc_feature 1..16: note = synthetic [barcode part1]
  source 1..16: mol_type = other DNA
gacgttgactggttgt

SEQ ID NO: 21996 - DNA, 16 bp, synthetic construct
  misc_feature 1..16: note = synthetic [barcode part1]
  source 1..16: mol_type = other DNA
gagacgtgacttggtg

SEQ ID NO: 21997 - DNA, 16 bp, synthetic construct
  misc_feature 1..16: note = synthetic [barcode part1]
  source 1..16: mol_type = other DNA
tatcgactgatcgcag

SEQ ID NO: 21998 - DNA, 16 bp, synthetic construct
  misc_feature 1..16: note = synthetic [barcode part1]
  source 1..16: mol_type = other DNA
gtgacactgtggtgtt

SEQ ID NO: 21999 - DNA, 16 bp, synthetic construct
  misc_feature 1..16: note = synthetic [barcode part1]
  source 1..16: mol_type = other DNA
acggtgattgtcgttg

SEQ ID NO: 22000 - DNA, 16 bp, synthetic construct
  misc_feature 1..16: note = synthetic [barcode part1]
  source 1..16: mol_type = other DNA
gttccaccaaggaatc

SEQ ID NO: 22001 - DNA, 16 bp, synthetic construct
  misc_feature 1..16: note = synthetic [barcode part1]
  source 1..16: mol_type = other DNA
aacgtcttgtctcgcg

SEQ ID NO: 22002 - DNA, 16 bp, synthetic construct
  misc_feature 1..16: note = synthetic [barcode part1]
  source 1..16: mol_type = other DNA
gcaagactgttgtctg

SEQ ID NO: 22003 - DNA, 16 bp, synthetic construct
  misc_feature 1..16: note = synthetic [barcode part1]
  source 1..16: mol_type = other DNA
accttgaggtctcaag

SEQ ID NO: 22004 - DNA, 16 bp, synthetic construct
  misc_feature 1..16: note = synthetic [barcode part1]
  source 1..16: mol_type = other DNA
caagtcacgatagtcc

SEQ ID NO: 22005 - DNA, 16 bp, synthetic construct
  misc_feature 1..16: note = synthetic [barcode part1]
  source 1..16: mol_type = other DNA
cacagactgttcaggt

SEQ ID NO: 22006 - DNA, 16 bp, synthetic construct
  misc_feature 1..16: note = synthetic [barcode part1]
  source 1..16: mol_type = other DNA
tgtgataggtgaacgt

SEQ ID NO: 22007 - DNA, 16 bp, synthetic construct
  misc_feature 1..16: note = synthetic [barcode part1]
  source 1..16: mol_type = other DNA
cacgcagagtaacgac

SEQ ID NO: 22008 - DNA, 16 bp, synthetic construct
  misc_feature 1..16: note = synthetic [barcode part1]
  source 1..16: mol_type = other DNA
aatctccaacctgtgt

SEQ ID NO: 22009 - DNA, 16 bp, synthetic construct
  misc_feature 1..16: note = synthetic [barcode part1]
  source 1..16: mol_type = other DNA
tgactgtacggttacg

SEQ ID NO: 22010 - DNA, 16 bp, synthetic construct
  misc_feature 1..16: note = synthetic [barcode part1]
  source 1..16: mol_type = other DNA
gcgaacacgagacttg

SEQ ID NO: 22011 - DNA, 16 bp, synthetic construct
  misc_feature 1..16: note = synthetic [barcode part1]
  source 1..16: mol_type = other DNA
gagttaacgtacggcg

SEQ ID NO: 22012 - DNA, 16 bp, synthetic construct
  misc_feature 1..16: note = synthetic [barcode part1]
  source 1..16: mol_type = other DNA
tgaacgcgttatcctt

SEQ ID NO: 22013 - DNA, 16 bp, synthetic construct
  misc_feature 1..16: note = synthetic [barcode part1]
  source 1..16: mol_type = other DNA
tgaactgcctcacgtc

SEQ ID NO: 22014 - DNA, 16 bp, synthetic construct
  misc_feature 1..16: note = synthetic [barcode part1]
  source 1..16: mol_type = other DNA
tgaattgtctcgcact

SEQ ID NO: 22015 - DNA, 16 bp, synthetic construct
  misc_feature 1..16: note = synthetic [barcode part1]
  source 1..16: mol_type = other DNA
ccaggtgaggcaatac

SEQ ID NO: 22016 - DNA, 16 bp, synthetic construct
  misc_feature 1..16: note = synthetic [barcode part1]
  source 1..16: mol_type = other DNA
ttaactacgacgccag

SEQ ID NO: 22017 - DNA, 16 bp, synthetic construct
  misc_feature 1..16: note = synthetic [barcode part1]
  source 1..16: mol_type = other DNA
caccaattcggtcctg

SEQ ID NO: 22018 - DNA, 16 bp, synthetic construct
  misc_feature 1..16: note = synthetic [barcode part1]
  source 1..16: mol_type = other DNA
agttagttgcgcacgt

SEQ ID NO: 22019 - DNA, 16 bp, synthetic construct
  misc_feature 1..16: note = synthetic [barcode part1]
  source 1..16: mol_type = other DNA
attcgagaagttcgcc

SEQ ID NO: 22020 - DNA, 16 bp, synthetic construct
  misc_feature 1..16: note = synthetic [barcode part1]
  source 1..16: mol_type = other DNA
acttccgtgccgaatc

SEQ ID NO: 22021 - DNA, 16 bp, synthetic construct
  misc_feature 1..16: note = synthetic [barcode part1]
  source 1..16: mol_type = other DNA
aatcgcactcttcaac

SEQ ID NO: 22022 - DNA, 16 bp, synthetic construct
  misc_feature 1..16: note = synthetic [barcode part1]
  source 1..16: mol_type = other DNA
tgtagacgacactcac

SEQ ID NO: 22023 - DNA, 16 bp, synthetic construct
  misc_feature 1..16: note = synthetic [barcode part1]
  source 1..16: mol_type = other DNA
cctgttcttatccacg

SEQ ID NO: 22024 - DNA, 16 bp, synthetic construct
  misc_feature 1..16: note = synthetic [barcode part1]
  source 1..16: mol_type = other DNA
tctgagtcgtcgatag

SEQ ID NO: 22025 - DNA, 16 bp, synthetic construct
  misc_feature 1..16: note = synthetic [barcode part1]
  source 1..16: mol_type = other DNA
aattccgagacaagtg

SEQ ID NO: 22026 - DNA, 16 bp, synthetic construct
  misc_feature 1..16: note = synthetic [barcode part1]
  source 1..16: mol_type = other DNA
tcgaacactaccttac

SEQ ID NO: 22027 - DNA, 16 bp, synthetic construct
  misc_feature 1..16: note = synthetic [barcode part1]
  source 1..16: mol_type = other DNA
gtgtgttcgtcaacag

SEQ ID NO: 22028 - DNA, 16 bp, synthetic construct
  misc_feature 1..16: note = synthetic [barcode part1]
  source 1..16: mol_type = other DNA
atcgacggacgacagt

SEQ ID NO: 22029 - DNA, 16 bp, synthetic construct
  misc_feature 1..16: note = synthetic [barcode part1]
  source 1..16: mol_type = other DNA
gttacctaacacctgt

SEQ ID NO: 22030 - DNA, 16 bp, synthetic construct
  misc_feature 1..16: note = synthetic [barcode part1]
  source 1..16: mol_type = other DNA
tggttgtgcaattgcg

SEQ ID NO: 22031 - DNA, 16 bp, synthetic construct
  misc_feature 1..16: note = synthetic [barcode part1]
  source 1..16: mol_type = other DNA
aggttactgcctctgc

SEQ ID NO: 22032 - DNA, 16 bp, synthetic construct
  misc_feature 1..16: note = synthetic [barcode part1]
  source 1..16: mol_type = other DNA
ttatacttcgccgagt

SEQ ID NO: 22033 - DNA, 16 bp, synthetic construct
  misc_feature 1..16: note = synthetic [barcode part1]
  source 1..16: mol_type = other DNA
atcggtgcggagaact

SEQ ID NO: 22034 - DNA, 16 bp, synthetic construct
  misc_feature 1..16: note = synthetic [barcode part1]
  source 1..16: mol_type = other DNA
cggcagttatattctc

SEQ ID NO: 22035 - DNA, 16 bp, synthetic construct
  misc_feature 1..16: note = synthetic [barcode part1]
  source 1..16: mol_type = other DNA
gtgacttcgaaggcag

SEQ ID NO: 22036 - DNA, 16 bp, synthetic construct
  misc_feature 1..16: note = synthetic [barcode part1]
  source 1..16: mol_type = other DNA
acactgagactacacc

SEQ ID NO: 22037 - DNA, 16 bp, synthetic construct
  misc_feature 1..16: note = synthetic [barcode part1]
  source 1..16: mol_type = other DNA
gcctcgtcttgattct

SEQ ID NO: 22038 - DNA, 16 bp, synthetic construct
  misc_feature 1..16: note = synthetic [barcode part1]
  source 1..16: mol_type = other DNA
tctcttcgaaggagac

SEQ ID NO: 22039 - DNA, 16 bp, synthetic construct
  misc_feature 1..16: note = synthetic [barcode part1]
  source 1..16: mol_type = other DNA
tcgattcgcggtcgtt

SEQ ID NO: 22040 - DNA, 16 bp, synthetic construct
  misc_feature 1..16: note = synthetic [barcode part1]
  source 1..16: mol_type = other DNA
atcggatctcgcgttc

SEQ ID NO: 22041 - DNA, 16 bp, synthetic construct
  misc_feature 1..16: note = synthetic [barcode part1]
  source 1..16: mol_type = other DNA
agtactgtggtgttgc

SEQ ID NO: 22042 - DNA, 16 bp, synthetic construct
  misc_feature 1..16: note = synthetic [barcode part1]
  source 1..16: mol_type = other DNA
cactggacaccgaatt

SEQ ID NO: 22043 - DNA, 16 bp, synthetic construct
  misc_feature 1..16: note = synthetic [barcode part1]
  source 1..16: mol_type = other DNA
taccacctatcctgtc

SEQ ID NO: 22044 - DNA, 16 bp, synthetic construct
  misc_feature 1..16: note = synthetic [barcode part1]
  source 1..16: mol_type = other DNA
tagactaccttgcact

SEQ ID NO: 22045 - DNA, 16 bp, synthetic construct
  misc_feature 1..16: note = synthetic [barcode part1]
  source 1..16: mol_type = other DNA
agacaaggcctactct

SEQ ID NO: 22046 - DNA, 16 bp, synthetic construct
  misc_feature 1..16: note = synthetic [barcode part1]
  source 1..16: mol_type = other DNA
acgtaaccgactgtac

SEQ ID NO: 22047 - DNA, 16 bp, synthetic construct
  misc_feature 1..16: note = synthetic [barcode part1]
  source 1..16: mol_type = other DNA
caactacacaaggtag

SEQ ID NO: 22048 - DNA, 16 bp, synthetic construct
  misc_feature 1..16: note = synthetic [barcode part1]
  source 1..16: mol_type = other DNA
cctggaactcttcctt

SEQ ID NO: 22049 - DNA, 16 bp, synthetic construct
  misc_feature 1..16: note = synthetic [barcode part1]
  source 1..16: mol_type = other DNA
actctagtggttgacg

SEQ ID NO: 22050 - DNA, 16 bp, synthetic construct
  misc_feature 1..16: note = synthetic [barcode part1]
  source 1..16: mol_type = other DNA
tcttggcgaagactac

SEQ ID NO: 22051 - DNA, 16 bp, synthetic construct
  misc_feature 1..16: note = synthetic [barcode part1]
  source 1..16: mol_type = other DNA
cacaacagtaagtgac

SEQ ID NO: 22052 - DNA, 16 bp, synthetic construct
  misc_feature 1..16: note = synthetic [barcode part1]
  source 1..16: mol_type = other DNA
cgcctattcgcagtac

SEQ ID NO: 22053 - DNA, 16 bp, synthetic construct
  misc_feature 1..16: note = synthetic [barcode part1]
  source 1..16: mol_type = other DNA
tcaacgtctgacctcg

SEQ ID NO: 22054 - DNA, 16 bp, synthetic construct
  misc_feature 1..16: note = synthetic [barcode part1]
  source 1..16: mol_type = other DNA
ttcgtacgtacctcct

SEQ ID NO: 22055 - DNA, 16 bp, synthetic construct
  misc_feature 1..16: note = synthetic [barcode part1]
  source 1..16: mol_type = other DNA
gcagagtacagacctg

SEQ ID NO: 22056 - DNA, 16 bp, synthetic construct
  misc_feature 1..16: note = synthetic [barcode part1]
  source 1..16: mol_type = other DNA
cctcagtgtgtctgac

SEQ ID NO: 22057 - DNA, 16 bp, synthetic construct
  misc_feature 1..16: note = synthetic [barcode part1]
  source 1..16: mol_type = other DNA
gcgtgacgtcaatatc

SEQ ID NO: 22058 - DNA, 16 bp, synthetic construct
  misc_feature 1..16: note = synthetic [barcode part1]
  source 1..16: mol_type = other DNA
actgcaacctgagatc

SEQ ID NO: 22059 - DNA, 16 bp, synthetic construct
  misc_feature 1..16: note = synthetic [barcode part1]
  source 1..16: mol_type = other DNA
ccttacgtgacttaac

SEQ ID NO: 22060 - DNA, 16 bp, synthetic construct
  misc_feature 1..16: note = synthetic [barcode part1]
  source 1..16: mol_type = other DNA
gatcacactgatcttc

SEQ ID NO: 22061 - DNA, 16 bp, synthetic construct
  misc_feature 1..16: note = synthetic [barcode part1]
  source 1..16: mol_type = other DNA
agtgaagatactcggt

SEQ ID NO: 22062 - DNA, 16 bp, synthetic construct
  misc_feature 1..16: note = synthetic [barcode part1]
  source 1..16: mol_type = other DNA
aggccgttatcttcgc

SEQ ID NO: 22063 - DNA, 16 bp, synthetic construct
  misc_feature 1..16: note = synthetic [barcode part1]
  source 1..16: mol_type = other DNA
gacctgagatcgttgt

SEQ ID NO: 22064 - DNA, 16 bp, synthetic construct
  misc_feature 1..16: note = synthetic [barcode part1]
  source 1..16: mol_type = other DNA
tcggagtggataagtt

SEQ ID NO: 22065 - DNA, 16 bp, synthetic construct
  misc_feature 1..16: note = synthetic [barcode part1]
  source 1..16: mol_type = other DNA
cctcactgcgaacttg

SEQ ID NO: 22066 - DNA, 16 bp, synthetic construct
  misc_feature 1..16: note = synthetic [barcode part1]
  source 1..16: mol_type = other DNA
taacgaaggcgaagtg

SEQ ID NO: 22067 - DNA, 16 bp, synthetic construct
  misc_feature 1..16: note = synthetic [barcode part1]
  source 1..16: mol_type = other DNA
agaggcgtgttaagtt

SEQ ID NO: 22068 - DNA, 16 bp, synthetic construct
  misc_feature 1..16: note = synthetic [barcode part1]
  source 1..16: mol_type = other DNA
acaaggcaccttatcg

SEQ ID NO: 22069 - DNA, 16 bp, synthetic construct
  misc_feature 1..16: note = synthetic [barcode part1]
  source 1..16: mol_type = other DNA
caccgagaacacgaac

SEQ ID NO: 22070 - DNA, 16 bp, synthetic construct
  misc_feature 1..16: note = synthetic [barcode part1]
  source 1..16: mol_type = other DNA
cagatctgaactcacg

SEQ ID NO: 22071 - DNA, 16 bp, synthetic construct
  misc_feature 1..16: note = synthetic [barcode part1]
  source 1..16: mol_type = other DNA
tcttcctgagaaggac

SEQ ID NO: 22072 - DNA, 16 bp, synthetic construct
  misc_feature 1..16: note = synthetic [barcode part1]
  source 1..16: mol_type = other DNA
acgaattgtcaggagt

SEQ ID NO: 22073 - DNA, 16 bp, synthetic construct
  misc_feature 1..16: note = synthetic [barcode part1]
  source 1..16: mol_type = other DNA
gtcaagtaagtgtgac

SEQ ID NO: 22074 - DNA, 16 bp, synthetic construct
  misc_feature 1..16: note = synthetic [barcode part1]
  source 1..16: mol_type = other DNA
actgtagttgttcacc

SEQ ID NO: 22075 - DNA, 16 bp, synthetic construct
  misc_feature 1..16: note = synthetic [barcode part1]
  source 1..16: mol_type = other DNA
gaatacctccagacac

SEQ ID NO: 22076 - DNA, 16 bp, synthetic construct
  misc_feature 1..16: note = synthetic [barcode part1]
  source 1..16: mol_type = other DNA
tgtgatctgtgtcgag

SEQ ID NO: 22077 - DNA, 16 bp, synthetic construct
  misc_feature 1..16: note = synthetic [barcode part1]
  source 1..16: mol_type = other DNA
agttccacgagattcg

SEQ ID NO: 22078 - DNA, 16 bp, synthetic construct
  misc_feature 1..16: note = synthetic [barcode part1]
  source 1..16: mol_type = other DNA
cacagttaaggtagtg

SEQ ID NO: 22079 - DNA, 16 bp, synthetic construct
  misc_feature 1..16: note = synthetic [barcode part1]
  source 1..16: mol_type = other DNA
tctggcgaatacggag

SEQ ID NO: 22080 - DNA, 16 bp, synthetic construct
  misc_feature 1..16: note = synthetic [barcode part1]
  source 1..16: mol_type = other DNA
tattgagtcgcgttct

SEQ ID NO: 22081 - DNA, 16 bp, synthetic construct
  misc_feature 1..16: note = synthetic [barcode part1]
  source 1..16: mol_type = other DNA
ttcgagagtatacgcc

SEQ ID NO: 22082 - DNA, 16 bp, synthetic construct
  misc_feature 1..16: note = synthetic [barcode part1]
  source 1..16: mol_type = other DNA
cacgattaatcgcacg

SEQ ID NO: 22083 - DNA, 16 bp, synthetic construct
  misc_feature 1..16: note = synthetic [barcode part1]
  source 1..16: mol_type = other DNA
tgtccgttggagttcc

SEQ ID NO: 22084 - DNA, 16 bp, synthetic construct
  misc_feature 1..16: note = synthetic [barcode part1]
  source 1..16: mol_type = other DNA
ccaccgtaggtctgtt

SEQ ID NO: 22085 - DNA, 16 bp, synthetic construct
  misc_feature 1..16: note = synthetic [barcode part1]
  source 1..16: mol_type = other DNA
tgatcacacctgagtg

SEQ ID NO: 22086 - DNA, 16 bp, synthetic construct
  misc_feature 1..16: note = synthetic [barcode part1]
  source 1..16: mol_type = other DNA
ccaatccgtaattacc

SEQ ID NO: 22087 - DNA, 16 bp, synthetic construct
  misc_feature 1..16: note = synthetic [barcode part1]
  source 1..16: mol_type = other DNA
gcgttattcacttacg

SEQ ID NO: 22088 - DNA, 16 bp, synthetic construct
  misc_feature 1..16: note = synthetic [barcode part1]
  source 1..16: mol_type = other DNA
acttccggcaatccac

SEQ ID NO: 22089 - DNA, 16 bp, synthetic construct
  misc_feature 1..16: note = synthetic [barcode part1]
  source 1..16: mol_type = other DNA
tgtccgtcgaatagac

SEQ ID NO: 22090 - DNA, 16 bp, synthetic construct
  misc_feature 1..16: note = synthetic [barcode part1]
  source 1..16: mol_type = other DNA
cgagagtaataatccg

SEQ ID NO: 22091 - DNA, 16 bp, synthetic construct
  misc_feature 1..16: note = synthetic [barcode part1]
  source 1..16: mol_type = other DNA
atcctgacaactgacg

SEQ ID NO: 22092 - DNA, 16 bp, synthetic construct
  misc_feature 1..16: note = synthetic [barcode part1]
  source 1..16: mol_type = other DNA
ataccgataacaggac

SEQ ID NO: 22093 - DNA, 16 bp, synthetic construct
  misc_feature 1..16: note = synthetic [barcode part1]
  source 1..16: mol_type = other DNA
cgtattcggtaactct

SEQ ID NO: 22094 - DNA, 16 bp, synthetic construct
  misc_feature 1..16: note = synthetic [barcode part1]
  source 1..16: mol_type = other DNA
gtatcctaccgccagt

SEQ ID NO: 22095 - DNA, 16 bp, synthetic construct
  misc_feature 1..16: note = synthetic [barcode part1]
  source 1..16: mol_type = other DNA
cgtctggtagtccttg

SEQ ID NO: 22096 - DNA, 16 bp, synthetic construct
  misc_feature 1..16: note = synthetic [barcode part1]
  source 1..16: mol_type = other DNA
ttcgcggtactactcg

SEQ ID NO: 22097 - DNA, 16 bp, synthetic construct
  misc_feature 1..16: note = synthetic [barcode part1]
  source 1..16: mol_type = other DNA
caactctcacgtagtt

SEQ ID NO: 22098 - DNA, 16 bp, synthetic construct
  misc_feature 1..16: note = synthetic [barcode part1]
  source 1..16: mol_type = other DNA
aattcggatacctctc

SEQ ID NO: 22099 - DNA, 16 bp, synthetic construct
  misc_feature 1..16: note = synthetic [barcode part1]
  source 1..16: mol_type = other DNA
gagttgtgcctctgtc

SEQ ID NO: 22100 - DNA, 16 bp, synthetic construct
  misc_feature 1..16: note = synthetic [barcode part1]
  source 1..16: mol_type = other DNA
tgtgttcggacacagt

SEQ ID NO: 22101 - DNA, 16 bp, synthetic construct
  misc_feature 1..16: note = synthetic [barcode part1]
  source 1..16: mol_type = other DNA
gtactgtgatagacag

SEQ ID NO: 22102 - DNA, 16 bp, synthetic construct
  misc_feature 1..16: note = synthetic [barcode part1]
  source 1..16: mol_type = other DNA
ccaccgttaggatagt

SEQ ID NO: 22103 - DNA, 16 bp, synthetic construct
  misc_feature 1..16: note = synthetic [barcode part1]
  source 1..16: mol_type = other DNA
gagagtgcaagagtac

SEQ ID NO: 22104 - DNA, 16 bp, synthetic construct
  misc_feature 1..16: note = synthetic [barcode part1]
  source 1..16: mol_type = other DNA
tagtgatcacgtcctt

SEQ ID NO: 22105 - DNA, 16 bp, synthetic construct
  misc_feature 1..16: note = synthetic [barcode part1]
  source 1..16: mol_type = other DNA
tggttgttcgcgtaag

SEQ ID NO: 22106 - DNA, 16 bp, synthetic construct
  misc_feature 1..16: note = synthetic [barcode part1]
  source 1..16: mol_type = other DNA
aggataacctggatac

SEQ ID NO: 22107 - DNA, 16 bp, synthetic construct
  misc_feature 1..16: note = synthetic [barcode part1]
  source 1..16: mol_type = other DNA
gagatctagacctcac

SEQ ID NO: 22108 - DNA, 16 bp, synthetic construct
  misc_feature 1..16: note = synthetic [barcode part1]
  source 1..16: mol_type = other DNA
tcgacttcgaattcgt

SEQ ID NO: 22109 - DNA, 16 bp, synthetic construct
  misc_feature 1..16: note = synthetic [barcode part1]
  source 1..16: mol_type = other DNA
agaagttaggaccgag

SEQ ID NO: 22110 - DNA, 16 bp, synthetic construct
  misc_feature 1..16: note = synthetic [barcode part1]
  source 1..16: mol_type = other DNA
agtgacttcgaaccac

SEQ ID NO: 22111 - DNA, 16 bp, synthetic construct
  misc_feature 1..16: note = synthetic [barcode part1]
  source 1..16: mol_type = other DNA
gatacggtgtcaggtg

SEQ ID NO: 22112 - DNA, 16 bp, synthetic construct
  misc_feature 1..16: note = synthetic [barcode part1]
  source 1..16: mol_type = other DNA
gagacttatctactcc

SEQ ID NO: 22113 - DNA, 16 bp, synthetic construct
  misc_feature 1..16: note = synthetic [barcode part1]
  source 1..16: mol_type = other DNA
acacaggcgttaggtg

SEQ ID NO: 22114 - DNA, 16 bp, synthetic construct
  misc_feature 1..16: note = synthetic [barcode part1]
  source 1..16: mol_type = other DNA
tccggaatagtcgact

SEQ ID NO: 22115 - DNA, 16 bp, synthetic construct
  misc_feature 1..16: note = synthetic [barcode part1]
  source 1..16: mol_type = other DNA
ccgcaggtgaagaact

SEQ ID NO: 22116 - DNA, 16 bp, synthetic construct
  misc_feature 1..16: note = synthetic [barcode part1]
  source 1..16: mol_type = other DNA
cgcctgtgtctatctt

SEQ ID NO: 22117 - DNA, 16 bp, synthetic construct
  misc_feature 1..16: note = synthetic [barcode part1]
  source 1..16: mol_type = other DNA
gttacttctgcaagtc

SEQ ID NO: 22118 - DNA, 16 bp, synthetic construct
  misc_feature 1..16: note = synthetic [barcode part1]
  source 1..16: mol_type = other DNA
acaggtgtctgaggtg

SEQ ID NO: 22119 - DNA, 16 bp, synthetic construct
  misc_feature 1..16: note = synthetic [barcode part1]
  source 1..16: mol_type = other DNA
gagttcggtaaggcgt

SEQ ID NO: 22120 - DNA, 16 bp, synthetic construct
  misc_feature 1..16: note = synthetic [barcode part1]
  source 1..16: mol_type = other DNA
tgaatccagtagagtg

SEQ ID NO: 22121 - DNA, 16 bp, synthetic construct
  misc_feature 1..16: note = synthetic [barcode part1]
  source 1..16: mol_type = other DNA
gaactatctgccgagt

SEQ ID NO: 22122 - DNA, 16 bp, synthetic construct
  misc_feature 1..16: note = synthetic [barcode part1]
  source 1..16: mol_type = other DNA
aatcggcgttggttgt

SEQ ID NO: 22123 - DNA, 16 bp, synthetic construct
  misc_feature 1..16: note = synthetic [barcode part1]
  source 1..16: mol_type = other DNA
tcagaacacagacaac

SEQ ID NO: 22124 - DNA, 16 bp, synthetic construct
  misc_feature 1..16: note = synthetic [barcode part1]
  source 1..16: mol_type = other DNA
ccgagacttgtgatac

SEQ ID NO: 22125 - DNA, 16 bp, synthetic construct
  misc_feature 1..16: note = synthetic [barcode part1]
  source 1..16: mol_type = other DNA
gtctcctgaaggattg

SEQ ID NO: 22126 - DNA, 16 bp, synthetic construct
  misc_feature 1..16: note = synthetic [barcode part1]
  source 1..16: mol_type = other DNA
agtagaacgcgagtcc

SEQ ID NO: 22127 - DNA, 16 bp, synthetic construct
  misc_feature 1..16: note = synthetic [barcode part1]
  source 1..16: mol_type = other DNA
gcacagtgtcaacgtt

SEQ ID NO: 22128 - DNA, 16 bp, synthetic construct
  misc_feature 1..16: note = synthetic [barcode part1]
  source 1..16: mol_type = other DNA
aagtacaccttacgcg

SEQ ID NO: 22129 - DNA, 16 bp, synthetic construct
  misc_feature 1..16: note = synthetic [barcode part1]
  source 1..16: mol_type = other DNA
gtcacggtcgtctatc

SEQ ID NO: 22130 - DNA, 16 bp, synthetic construct
  misc_feature 1..16: note = synthetic [barcode part1]
  source 1..16: mol_type = other DNA
ttcgtccgacactacg

SEQ ID NO: 22131 - DNA, 16 bp, synthetic construct
  misc_feature 1..16: note = synthetic [barcode part1]
  source 1..16: mol_type = other DNA
aggttctgactgatcg

SEQ ID NO: 22132 - DNA, 16 bp, synthetic construct
  misc_feature 1..16: note = synthetic [barcode part1]
  source 1..16: mol_type = other DNA
cgaactgactggatct

SEQ ID NO: 22133 - DNA, 16 bp, synthetic construct
  misc_feature 1..16: note = synthetic [barcode part1]
  source 1..16: mol_type = other DNA
acctacacgaccttcg

SEQ ID NO: 22134 - DNA, 16 bp, synthetic construct
  misc_feature 1..16: note = synthetic [barcode part1]
  source 1..16: mol_type = other DNA
ataacacgactccggt

SEQ ID NO: 22135 - DNA, 16 bp, synthetic construct
  misc_feature 1..16: note = synthetic [barcode part1]
  source 1..16: mol_type = other DNA
ttggcaaggatacaac

SEQ ID NO: 22136 - DNA, 16 bp, synthetic construct
  misc_feature 1..16: note = synthetic [barcode part1]
  source 1..16: mol_type = other DNA
caaggttgtgtgtacc

SEQ ID NO: 22137 - DNA, 16 bp, synthetic construct
  misc_feature 1..16: note = synthetic [barcode part1]
  source 1..16: mol_type = other DNA
gtcagaccgtcgaatt

SEQ ID NO: 22138 - DNA, 16 bp, synthetic construct
  misc_feature 1..16: note = synthetic [barcode part1]
  source 1..16: mol_type = other DNA
ataacgcgtcgactac

SEQ ID NO: 22139 - DNA, 16 bp, synthetic construct
  misc_feature 1..16: note = synthetic [barcode part1]
  source 1..16: mol_type = other DNA
tgtaagacgattcgag

SEQ ID NO: 22140 - DNA, 16 bp, synthetic construct
  misc_feature 1..16: note = synthetic [barcode part1]
  source 1..16: mol_type = other DNA
tactgtccttggtcct

SEQ ID NO: 22141 - DNA, 16 bp, synthetic construct
  misc_feature 1..16: note = synthetic [barcode part1]
  source 1..16: mol_type = other DNA
ccgttcaacagtattc

SEQ ID NO: 22142 - DNA, 16 bp, synthetic construct
  misc_feature 1..16: note = synthetic [barcode part1]
  source 1..16: mol_type = other DNA
cggttcggttcttacg

SEQ ID NO: 22143 - DNA, 16 bp, synthetic construct
  misc_feature 1..16: note = synthetic [barcode part1]
  source 1..16: mol_type = other DNA
tgccttggaatagtgc

SEQ ID NO: 22144 - DNA, 16 bp, synthetic construct
  misc_feature 1..16: note = synthetic [barcode part1]
  source 1..16: mol_type = other DNA
ttaatccacggtcgcc

SEQ ID NO: 22145 - DNA, 16 bp, synthetic construct
  misc_feature 1..16: note = synthetic [barcode part1]
  source 1..16: mol_type = other DNA
tgtcaccttcaactcc

SEQ ID NO: 22146 - DNA, 16 bp, synthetic construct
  misc_feature 1..16: note = synthetic [barcode part1]
  source 1..16: mol_type = other DNA
cgatccttgtagtcgc

SEQ ID NO: 22147 - DNA, 16 bp, synthetic construct
  misc_feature 1..16: note = synthetic [barcode part1]
  source 1..16: mol_type = other DNA
gtccaaggaactcact

SEQ ID NO: 22148 - DNA, 16 bp, synthetic construct
  misc_feature 1..16: note = synthetic [barcode part1]
  source 1..16: mol_type = other DNA
cggttgcagatcagag

SEQ ID NO: 22149 - DNA, 16 bp, synthetic construct
  misc_feature 1..16: note = synthetic [barcode part1]
  source 1..16: mol_type = other DNA
tcgaacacaggtatcc

SEQ ID NO: 22150 - DNA, 16 bp, synthetic construct
  misc_feature 1..16: note = synthetic [barcode part1]
  source 1..16: mol_type = other DNA
ttgcaggcctaattct

SEQ ID NO: 22151 - DNA, 16 bp, synthetic construct
  misc_feature 1..16: note = synthetic [barcode part1]
  source 1..16: mol_type = other DNA
tagaccaagtcactgc

SEQ ID NO: 22152 - DNA, 16 bp, synthetic construct
  misc_feature 1..16: note = synthetic [barcode part1]
  source 1..16: mol_type = other DNA
gtagaggattatcgac

SEQ ID NO: 22153 - DNA, 16 bp, synthetic construct
  misc_feature 1..16: note = synthetic [barcode part1]
  source 1..16: mol_type = other DNA
ttgagtcaagacacag

SEQ ID NO: 22154 - DNA, 16 bp, synthetic construct
  misc_feature 1..16: note = synthetic [barcode part1]
  source 1..16: mol_type = other DNA
tcgtagaagatcgaac

SEQ ID NO: 22155 - DNA, 16 bp, synthetic construct
  misc_feature 1..16: note = synthetic [barcode part1]
  source 1..16: mol_type = other DNA
acttgcaacacaaccg

SEQ ID NO: 22156 - DNA, 16 bp, synthetic construct
  misc_feature 1..16: note = synthetic [barcode part1]
  source 1..16: mol_type = other DNA
acaatccgtggttcag

SEQ ID NO: 22157 - DNA, 16 bp, synthetic construct
  misc_feature 1..16: note = synthetic [barcode part1]
  source 1..16: mol_type = other DNA
cacagtacttgtccgc

SEQ ID NO: 22158 - DNA, 16 bp, synthetic construct
  misc_feature 1..16: note = synthetic [barcode part1]
  source 1..16: mol_type = other DNA
tatcttgttcggacac

SEQ ID NO: 22159 - DNA, 16 bp, synthetic construct
  misc_feature 1..16: note = synthetic [barcode part1]
  source 1..16: mol_type = other DNA
gttcgagtaaggtagt

SEQ ID NO: 22160 - DNA, 16 bp, synthetic construct
  misc_feature 1..16: note = synthetic [barcode part1]
  source 1..16: mol_type = other DNA
cggtcaagattgacct

SEQ ID NO: 22161 - DNA, 16 bp, synthetic construct
  misc_feature 1..16: note = synthetic [barcode part1]
  source 1..16: mol_type = other DNA
aggaagattggaaccg

SEQ ID NO: 22162 - DNA, 16 bp, synthetic construct
  misc_feature 1..16: note = synthetic [barcode part1]
  source 1..16: mol_type = other DNA
gtaatcctagaccacg

SEQ ID NO: 22163 - DNA, 16 bp, synthetic construct
  misc_feature 1..16: note = synthetic [barcode part1]
  source 1..16: mol_type = other DNA
atccgatacgtcctcg

SEQ ID NO: 22164 - DNA, 16 bp, synthetic construct
  misc_feature 1..16: note = synthetic [barcode part1]
  source 1..16: mol_type = other DNA
tcaagtgccgtcttgc

SEQ ID NO: 22165 - DNA, 16 bp, synthetic construct
  misc_feature 1..16: note = synthetic [barcode part1]
  source 1..16: mol_type = other DNA
gacggaaccagtacac

SEQ ID NO: 22166 - DNA, 16 bp, synthetic construct
  misc_feature 1..16: note = synthetic [barcode part1]
  source 1..16: mol_type = other DNA
cacgattaccggagag

SEQ ID NO: 22167 - DNA, 16 bp, synthetic construct
  misc_feature 1..16: note = synthetic [barcode part1]
  source 1..16: mol_type = other DNA
tctgagtacgaggcag

SEQ ID NO: 22168 - DNA, 16 bp, synthetic construct
  misc_feature 1..16: note = synthetic [barcode part1]
  source 1..16: mol_type = other DNA
acaacaaggacgtccg

SEQ ID NO: 22169 - DNA, 16 bp, synthetic construct
  misc_feature 1..16: note = synthetic [barcode part1]
  source 1..16: mol_type = other DNA
cacctaacacgaatcg

SEQ ID NO: 22170 - DNA, 16 bp, synthetic construct
  misc_feature 1..16: note = synthetic [barcode part1]
  source 1..16: mol_type = other DNA
ccgtgtgagtcagaag

SEQ ID NO: 22171 - DNA, 16 bp, synthetic construct
  misc_feature 1..16: note = synthetic [barcode part1]
  source 1..16: mol_type = other DNA
cgagattgccagttac

SEQ ID NO: 22172 - DNA, 16 bp, synthetic construct
  misc_feature 1..16: note = synthetic [barcode part1]
  source 1..16: mol_type = other DNA
gagtcgtctacgcctt

SEQ ID NO: 22173 - DNA, 16 bp, synthetic construct
  misc_feature 1..16: note = synthetic [barcode part1]
  source 1..16: mol_type = other DNA
gatcctacgttgcaag

SEQ ID NO: 22174 - DNA, 16 bp, synthetic construct
  misc_feature 1..16: note = synthetic [barcode part1]
  source 1..16: mol_type = other DNA
agaactcttatctgcc

SEQ ID NO: 22175 - DNA, 16 bp, synthetic construct
  misc_feature 1..16: note = synthetic [barcode part1]
  source 1..16: mol_type = other DNA
tacgacaggtaagtac

SEQ ID NO: 22176 - DNA, 16 bp, synthetic construct
  misc_feature 1..16: note = synthetic [barcode part1]
  source 1..16: mol_type = other DNA
aagttagtaacgtgcg

SEQ ID NO: 22177 - DNA, 16 bp, synthetic construct
  misc_feature 1..16: note = synthetic [barcode part1]
  source 1..16: mol_type = other DNA
aaccgagacaattgtg

SEQ ID NO: 22178 - DNA, 16 bp, synthetic construct
  misc_feature 1..16: note = synthetic [barcode part1]
  source 1..16: mol_type = other DNA
acagtcaaccaacgtc

SEQ ID NO: 22179 - DNA, 16 bp, synthetic construct
  misc_feature 1..16: note = synthetic [barcode part1]
  source 1..16: mol_type = other DNA
aggataactgcctcac

SEQ ID NO: 22180 - DNA, 16 bp, synthetic construct
  misc_feature 1..16: note = synthetic [barcode part1]
  source 1..16: mol_type = other DNA
gatcgatacactgtgc

SEQ ID NO: 22181 - DNA, 16 bp, synthetic construct
  misc_feature 1..16: note = synthetic [barcode part1]
  source 1..16: mol_type = other DNA
tcctgataggacggtt

SEQ ID NO: 22182 - DNA, 16 bp, synthetic construct
  misc_feature 1..16: note = synthetic [barcode part1]
  source 1..16: mol_type = other DNA
ccagagttatccgcct

SEQ ID NO: 22183 - DNA, 16 bp, synthetic construct
  misc_feature 1..16: note = synthetic [barcode part1]
  source 1..16: mol_type = other DNA
gtcgcaaggtatcact

SEQ ID NO: 22184 - DNA, 16 bp, synthetic construct
  misc_feature 1..16: note = synthetic [barcode part1]
  source 1..16: mol_type = other DNA
ttactctatacggtcg

SEQ ID NO: 22185 - DNA, 16 bp, synthetic construct
  misc_feature 1..16: note = synthetic [barcode part1]
  source 1..16: mol_type = other DNA
agatctcttgaggtcg

SEQ ID NO: 22186 - DNA, 16 bp, synthetic construct
  misc_feature 1..16: note = synthetic [barcode part1]
  source 1..16: mol_type = other DNA
acttcgccaagttcgc

SEQ ID NO: 22187 - DNA, 16 bp, synthetic construct
  misc_feature 1..16: note = synthetic [barcode part1]
  source 1..16: mol_type = other DNA
gacgtgcagttccttc

SEQ ID NO: 22188 - DNA, 16 bp, synthetic construct
  misc_feature 1..16: note = synthetic [barcode part1]
  source 1..16: mol_type = other DNA
acgtacacttcggaac

SEQ ID NO: 22189 - DNA, 16 bp, synthetic construct
  misc_feature 1..16: note = synthetic [barcode part1]
  source 1..16: mol_type = other DNA
tcctgaacctatctag

SEQ ID NO: 22190 - DNA, 16 bp, synthetic construct
  misc_feature 1..16: note = synthetic [barcode part1]
  source 1..16: mol_type = other DNA
tccaaggaggatcctt

SEQ ID NO: 22191 - DNA, 16 bp, synthetic construct
  misc_feature 1..16: note = synthetic [barcode part1]
  source 1..16: mol_type = other DNA
agaggaatcctaggag

SEQ ID NO: 22192 - DNA, 16 bp, synthetic construct
  misc_feature 1..16: note = synthetic [barcode part1]
  source 1..16: mol_type = other DNA
ttggttctcaccacct

SEQ ID NO: 22193 - DNA, 16 bp, synthetic construct
  misc_feature 1..16: note = synthetic [barcode part1]
  source 1..16: mol_type = other DNA
agatcaattccggtcg

SEQ ID NO: 22194 - DNA, 16 bp, synthetic construct
  misc_feature 1..16: note = synthetic [barcode part1]
  source 1..16: mol_type = other DNA
agacgtcgtgagtctt

SEQ ID NO: 22195 - DNA, 16 bp, synthetic construct
  misc_feature 1..16: note = synthetic [barcode part1]
  source 1..16: mol_type = other DNA
agacctactcaacttc

SEQ ID NO: 22196 - DNA, 16 bp, synthetic construct
  misc_feature 1..16: note = synthetic [barcode part1]
  source 1..16: mol_type = other DNA
gcacctgattctattg

SEQ ID NO: 22197 - DNA, 16 bp, synthetic construct
  misc_feature 1..16: note = synthetic [barcode part1]
  source 1..16: mol_type = other DNA
aggacggttgcagact

SEQ ID NO: 22198 - DNA, 16 bp, synthetic construct
  misc_feature 1..16: note = synthetic [barcode part1]
  source 1..16: mol_type = other DNA
tggagttgttaaccgc

SEQ ID NO: 22199 - DNA, 16 bp, synthetic construct
  misc_feature 1..16: note = synthetic [barcode part1]
  source 1..16: mol_type = other DNA
gtgcctgtgagacaag

SEQ ID NO: 22200 - DNA, 16 bp, synthetic construct
  misc_feature 1..16: note = synthetic [barcode part1]
  source 1..16: mol_type = other DNA
tgttcagtcgacgtag

SEQ ID NO: 22201 - DNA, 16 bp, synthetic construct
  misc_feature 1..16: note = synthetic [barcode part1]
  source 1..16: mol_type = other DNA
cctgtgtaaccaccac

SEQ ID NO: 22202 - DNA, 16 bp, synthetic construct
  misc_feature 1..16: note = synthetic [barcode part1]
  source 1..16: mol_type = other DNA
gataagacgcgttaac

SEQ ID NO: 22203 - DNA, 16 bp, synthetic construct
  misc_feature 1..16: note = synthetic [barcode part1]
  source 1..16: mol_type = other DNA
gcgaagtcctagacag

SEQ ID NO: 22204 - DNA, 16 bp, synthetic construct
  misc_feature 1..16: note = synthetic [barcode part1]
  source 1..16: mol_type = other DNA
gtattcgtctgttgtg

SEQ ID NO: 22205 - DNA, 16 bp, synthetic construct
  misc_feature 1..16: note = synthetic [barcode part1]
  source 1..16: mol_type = other DNA
tagaacctgtgtacgc

SEQ ID NO: 22206 - DNA, 16 bp, synthetic construct
  misc_feature 1..16: note = synthetic [barcode part1]
  source 1..16: mol_type = other DNA
cgtgattcgtgtcaag

SEQ ID NO: 22207 - DNA, 16 bp, synthetic construct
  misc_feature 1..16: note = synthetic [barcode part1]
  source 1..16: mol_type = other DNA
tacctagtgtgagtcg

SEQ ID NO: 22208 - DNA, 16 bp, synthetic construct
  misc_feature 1..16: note = synthetic [barcode part1]
  source 1..16: mol_type = other DNA
attgaacctcgcgcct

SEQ ID NO: 22209 - DNA, 16 bp, synthetic construct
  misc_feature 1..16: note = synthetic [barcode part1]
  source 1..16: mol_type = other DNA
acaaccaactgcacac

SEQ ID NO: 22210 - DNA, 16 bp, synthetic construct
  misc_feature 1..16: note = synthetic [barcode part1]
  source 1..16: mol_type = other DNA
tccttaagtacaccac

SEQ ID NO: 22211 - DNA, 16 bp, synthetic construct
  misc_feature 1..16: note = synthetic [barcode part1]
  source 1..16: mol_type = other DNA
gcgagttaggacggtt

SEQ ID NO: 22212 - DNA, 16 bp, synthetic construct
  misc_feature 1..16: note = synthetic [barcode part1]
  source 1..16: mol_type = other DNA
gttattcacgacaggc

SEQ ID NO: 22213 - DNA, 16 bp, synthetic construct
  misc_feature 1..16: note = synthetic [barcode part1]
  source 1..16: mol_type = other DNA
gcgtcttcagttcgac

SEQ ID NO: 22214 - DNA, 16 bp, synthetic construct
  misc_feature 1..16: note = synthetic [barcode part1]
  source 1..16: mol_type = other DNA
tgaactcaccttgccg

SEQ ID NO: 22215 - DNA, 16 bp, synthetic construct
  misc_feature 1..16: note = synthetic [barcode part1]
  source 1..16: mol_type = other DNA
gccaacgccgttattc

SEQ ID NO: 22216 - DNA, 16 bp, synthetic construct
  misc_feature 1..16: note = synthetic [barcode part1]
  source 1..16: mol_type = other DNA
gacctggtcaacaatc

SEQ ID NO: 22217 - DNA, 16 bp, synthetic construct
  misc_feature 1..16: note = synthetic [barcode part1]
  source 1..16: mol_type = other DNA
aagatcacggttctcg

SEQ ID NO: 22218 - DNA, 16 bp, synthetic construct
  misc_feature 1..16: note = synthetic [barcode part1]
  source 1..16: mol_type = other DNA
ttcgaccgcgttagtc

SEQ ID NO: 22219 - DNA, 16 bp, synthetic construct
  misc_feature 1..16: note = synthetic [barcode part1]
  source 1..16: mol_type = other DNA
ccgattcggtatattc

SEQ ID NO: 22220 - DNA, 16 bp, synthetic construct
  misc_feature 1..16: note = synthetic [barcode part1]
  source 1..16: mol_type = other DNA
atcaaccacaccacag

SEQ ID NO: 22221 - DNA, 16 bp, synthetic construct
  misc_feature 1..16: note = synthetic [barcode part1]
  source 1..16: mol_type = other DNA
gataattccggcgatc

SEQ ID NO: 22222 - DNA, 16 bp, synthetic construct
  misc_feature 1..16: note = synthetic [barcode part1]
  source 1..16: mol_type = other DNA
gtatcctcacgttcct

SEQ ID NO: 22223 - DNA, 16 bp, synthetic construct
  misc_feature 1..16: note = synthetic [barcode part1]
  source 1..16: mol_type = other DNA
gaggaacttcagttcc

SEQ ID NO: 22224 - DNA, 16 bp, synthetic construct
  misc_feature 1..16: note = synthetic [barcode part1]
  source 1..16: mol_type = other DNA
cctagtcagaagactc

SEQ ID NO: 22225 - DNA, 16 bp, synthetic construct
  misc_feature 1..16: note = synthetic [barcode part1]
  source 1..16: mol_type = other DNA
tacgtccttacacctc

SEQ ID NO: 22226 - DNA, 16 bp, synthetic construct
  misc_feature 1..16: note = synthetic [barcode part1]
  source 1..16: mol_type = other DNA
aacctaccgagtactg

SEQ ID NO: 22227 - DNA, 16 bp, synthetic construct
  misc_feature 1..16: note = synthetic [barcode part1]
  source 1..16: mol_type = other DNA
tcacacctgttaggcc

SEQ ID NO: 22228 - DNA, 16 bp, synthetic construct
  misc_feature 1..16: note = synthetic [barcode part1]
  source 1..16: mol_type = other DNA
cacggtaattcgttct

SEQ ID NO: 22229 - DNA, 16 bp, synthetic construct
  misc_feature 1..16: note = synthetic [barcode part1]
  source 1..16: mol_type = other DNA
gagacctcactcacct

SEQ ID NO: 22230 - DNA, 16 bp, synthetic construct
  misc_feature 1..16: note = synthetic [barcode part1]
  source 1..16: mol_type = other DNA
ttccaagtggaacctg

SEQ ID NO: 22231 - DNA, 16 bp, synthetic construct
  misc_feature 1..16: note = synthetic [barcode part1]
  source 1..16: mol_type = other DNA
aaggaaggtatcgcag

SEQ ID NO: 22232 - DNA, 16 bp, synthetic construct
  misc_feature 1..16: note = synthetic [barcode part1]
  source 1..16: mol_type = other DNA
cacttgacgaccttcg

SEQ ID NO: 22233 - DNA, 16 bp, synthetic construct
  misc_feature 1..16: note = synthetic [barcode part1]
  source 1..16: mol_type = other DNA
agttggtggttgactc

SEQ ID NO: 22234 - DNA, 16 bp, synthetic construct
  misc_feature 1..16: note = synthetic [barcode part1]
  source 1..16: mol_type = other DNA
ttggccttaggagatc

SEQ ID NO: 22235 - DNA, 16 bp, synthetic construct
  misc_feature 1..16: note = synthetic [barcode part1]
  source 1..16: mol_type = other DNA
ttgcgtctactcctac

SEQ ID NO: 22236 - DNA, 16 bp, synthetic construct
  misc_feature 1..16: note = synthetic [barcode part1]
  source 1..16: mol_type = other DNA
gttctatcctgcggac

SEQ ID NO: 22237 - DNA, 16 bp, synthetic construct
  misc_feature 1..16: note = synthetic [barcode part1]
  source 1..16: mol_type = other DNA
tggcaagttgtctcag

SEQ ID NO: 22238 - DNA, 16 bp, synthetic construct
  misc_feature 1..16: note = synthetic [barcode part1]
  source 1..16: mol_type = other DNA
tggcaattcggattgc

SEQ ID NO: 22239 - DNA, 16 bp, synthetic construct
  misc_feature 1..16: note = synthetic [barcode part1]
  source 1..16: mol_type = other DNA
tctcgtcgtcctattg

SEQ ID NO: 22240 - DNA, 16 bp, synthetic construct
  misc_feature 1..16: note = synthetic [barcode part1]
  source 1..16: mol_type = other DNA
cgtattcctcgacggt

SEQ ID NO: 22241 - DNA, 16 bp, synthetic construct
  misc_feature 1..16: note = synthetic [barcode part1]
  source 1..16: mol_type = other DNA
tgcacaatccaatctc

SEQ ID NO: 22242 - DNA, 16 bp, synthetic construct
  misc_feature 1..16: note = synthetic [barcode part1]
  source 1..16: mol_type = other DNA
cgccaacgtgtattag

SEQ ID NO: 22243 - DNA, 16 bp, synthetic construct
  misc_feature 1..16: note = synthetic [barcode part1]
  source 1..16: mol_type = other DNA
acttgttgacactacc

SEQ ID NO: 22244 - DNA, 16 bp, synthetic construct
  misc_feature 1..16: note = synthetic [barcode part1]
  source 1..16: mol_type = other DNA
cgagtcgaatctgatc

SEQ ID NO: 22245 - DNA, 16 bp, synthetic construct
  misc_feature 1..16: note = synthetic [barcode part1]
  source 1..16: mol_type = other DNA
tagtacgatatccggc

SEQ ID NO: 22246 - DNA, 16 bp, synthetic construct
  misc_feature 1..16: note = synthetic [barcode part1]
  source 1..16: mol_type = other DNA
gacgattatactctcc

SEQ ID NO: 22247 - DNA, 16 bp, synthetic construct
  misc_feature 1..16: note = synthetic [barcode part1]
  source 1..16: mol_type = other DNA
cactacctgaattcac

SEQ ID NO: 22248 - DNA, 16 bp, synthetic construct
  misc_feature 1..16: note = synthetic [barcode part1]
  source 1..16: mol_type = other DNA
gtggagtgtgagtctg

SEQ ID NO: 22249 - DNA, 16 bp, synthetic construct
  misc_feature 1..16: note = synthetic [barcode part1]
  source 1..16: mol_type = other DNA
tgagaccggaatctct

SEQ ID NO: 22250 - DNA, 16 bp, synthetic construct
  misc_feature 1..16: note = synthetic [barcode part1]
  source 1..16: mol_type = other DNA
ccgtcgtaagtaacgt

SEQ ID NO: 22251 - DNA, 16 bp, synthetic construct
  misc_feature 1..16: note = synthetic [barcode part1]
  source 1..16: mol_type = other DNA
cggataccggtagagt

SEQ ID NO: 22252 - DNA, 16 bp, synthetic construct
  misc_feature 1..16: note = synthetic [barcode part1]
  source 1..16: mol_type = other DNA
gtgaacgaataggcag

SEQ ID NO: 22253 - DNA, 16 bp, synthetic construct
  misc_feature 1..16: note = synthetic [barcode part1]
  source 1..16: mol_type = other DNA
ttatctcgcgtaactg

SEQ ID NO: 22254 - DNA, 16 bp, synthetic construct
  misc_feature 1..16: note = synthetic [barcode part1]
  source 1..16: mol_type = other DNA
tccacaacctaggtag

SEQ ID NO: 22255 - DNA, 16 bp, synthetic construct
  misc_feature 1..16: note = synthetic [barcode part1]
  source 1..16: mol_type = other DNA
gacggatcgtcacaag

SEQ ID NO: 22256 - DNA, 16 bp, synthetic construct
  misc_feature 1..16: note = synthetic [barcode part1]
  source 1..16: mol_type = other DNA
tctgccgatatctagt

SEQ ID NO: 22257 - DNA, 16 bp, synthetic construct
  misc_feature 1..16: note = synthetic [barcode part1]
  source 1..16: mol_type = other DNA
aagtctccgtgatacg

SEQ ID NO: 22258 - DNA, 16 bp, synthetic construct
  misc_feature 1..16: note = synthetic [barcode part1]
  source 1..16: mol_type = other DNA
acacagtctgattctc

SEQ ID NO: 22259 - DNA, 16 bp, synthetic construct
  misc_feature 1..16: note = synthetic [barcode part1]
  source 1..16: mol_type = other DNA
gtcaagtcttgacgac

SEQ ID NO: 22260 - DNA, 16 bp, synthetic construct
  misc_feature 1..16: note = synthetic [barcode part1]
  source 1..16: mol_type = other DNA
agaaggagaaggagag

SEQ ID NO: 22261 - DNA, 16 bp, synthetic construct
  misc_feature 1..16: note = synthetic [barcode part1]
  source 1..16: mol_type = other DNA
gagtcgcacttctgtc

SEQ ID NO: 22262 - DNA, 16 bp, synthetic construct
  misc_feature 1..16: note = synthetic [barcode part1]
  source 1..16: mol_type = other DNA
gacaattgaggacgtt

SEQ ID NO: 22263 - DNA, 16 bp, synthetic construct
  misc_feature 1..16: note = synthetic [barcode part1]
  source 1..16: mol_type = other DNA
ccagtagagaccactt

SEQ ID NO: 22264 - DNA, 16 bp, synthetic construct
  misc_feature 1..16: note = synthetic [barcode part1]
  source 1..16: mol_type = other DNA
atctctaaggtgtggc

SEQ ID NO: 22265 - DNA, 16 bp, synthetic construct
  misc_feature 1..16: note = synthetic [barcode part1]
  source 1..16: mol_type = other DNA
acctccactgtattcc

SEQ ID NO: 22266 - DNA, 16 bp, synthetic construct
  misc_feature 1..16: note = synthetic [barcode part1]
  source 1..16: mol_type = other DNA
cctctaacttcctggt

SEQ ID NO: 22267 - DNA, 16 bp, synthetic construct
  misc_feature 1..16: note = synthetic [barcode part1]
  source 1..16: mol_type = other DNA
atcggacaagtcacct

SEQ ID NO: 22268 - DNA, 16 bp, synthetic construct
  misc_feature 1..16: note = synthetic [barcode part1]
  source 1..16: mol_type = other DNA
caacgtacctctgacc

SEQ ID NO: 22269 - DNA, 16 bp, synthetic construct
  misc_feature 1..16: note = synthetic [barcode part1]
  source 1..16: mol_type = other DNA
ccgcgttactcctatt

SEQ ID NO: 22270 - DNA, 16 bp, synthetic construct
  misc_feature 1..16: note = synthetic [barcode part1]
  source 1..16: mol_type = other DNA
aggagtgaatagtctc

SEQ ID NO: 22271 - DNA, 16 bp, synthetic construct
  misc_feature 1..16: note = synthetic [barcode part1]
  source 1..16: mol_type = other DNA
tctggagactgtgact

SEQ ID NO: 22272 - DNA, 16 bp, synthetic construct
  misc_feature 1..16: note = synthetic [barcode part1]
  source 1..16: mol_type = other DNA
attgcggacttcaggt

SEQ ID NO: 22273 - DNA, 16 bp, synthetic construct
  misc_feature 1..16: note = synthetic [barcode part1]
  source 1..16: mol_type = other DNA
cagtcggtgatactac

SEQ ID NO: 22274 - DNA, 16 bp, synthetic construct
  misc_feature 1..16: note = synthetic [barcode part1]
  source 1..16: mol_type = other DNA
tgccacttagaggatc

SEQ ID NO: 22275 - DNA, 16 bp, synthetic construct
  misc_feature 1..16: note = synthetic [barcode part1]
  source 1..16: mol_type = other DNA
tagtgcacagtcctcc

SEQ ID NO: 22276 - DNA, 16 bp, synthetic construct
  misc_feature 1..16: note = synthetic [barcode part1]
  source 1..16: mol_type = other DNA
gcactatctattcacg

SEQ ID NO: 22277 - DNA, 16 bp, synthetic construct
  misc_feature 1..16: note = synthetic [barcode part1]
  source 1..16: mol_type = other DNA
gatcgcactctggtct

SEQ ID NO: 22278 - DNA, 16 bp, synthetic construct
  misc_feature 1..16: note = synthetic [barcode part1]
  source 1..16: mol_type = other DNA
attaggccaggaatac

SEQ ID NO: 22279 - DNA, 16 bp, synthetic construct
  misc_feature 1..16: note = synthetic [barcode part1]
  source 1..16: mol_type = other DNA
gttggcagtggttact

SEQ ID NO: 22280 - DNA, 16 bp, synthetic construct
  misc_feature 1..16: note = synthetic [barcode part1]
  source 1..16: mol_type = other DNA
aaggagtcaagttcgt

SEQ ID NO: 22281 - DNA, 16 bp, synthetic construct
  misc_feature 1..16: note = synthetic [barcode part1]
  source 1..16: mol_type = other DNA
gccttaagtgtcacag

SEQ ID NO: 22282 - DNA, 16 bp, synthetic construct
  misc_feature 1..16: note = synthetic [barcode part1]
  source 1..16: mol_type = other DNA
aggcgcctattattct

SEQ ID NO: 22283 - DNA, 16 bp, synthetic construct
  misc_feature 1..16: note = synthetic [barcode part1]
  source 1..16: mol_type = other DNA
ccaacctacaatcgcc

SEQ ID NO: 22284 - DNA, 16 bp, synthetic construct
  misc_feature 1..16: note = synthetic [barcode part1]
  source 1..16: mol_type = other DNA
ttgaagaaccacctcg

SEQ ID NO: 22285 - DNA, 16 bp, synthetic construct
  misc_feature 1..16: note = synthetic [barcode part1]
  source 1..16: mol_type = other DNA
cgtggattactgttct

SEQ ID NO: 22286 - DNA, 16 bp, synthetic construct
  misc_feature 1..16: note = synthetic [barcode part1]
  source 1..16: mol_type = other DNA
ccagttcgcagttacc

SEQ ID NO: 22287 - DNA, 16 bp, synthetic construct
  misc_feature 1..16: note = synthetic [barcode part1]
  source 1..16: mol_type = other DNA
tccacgtccaacagtc

SEQ ID NO: 22288 - DNA, 16 bp, synthetic construct
  misc_feature 1..16: note = synthetic [barcode part1]
  source 1..16: mol_type = other DNA
aactacctgaaccgtg

SEQ ID NO: 22289 - DNA, 16 bp, synthetic construct
  misc_feature 1..16: note = synthetic [barcode part1]
  source 1..16: mol_type = other DNA
tgcctcaagatagtgc

SEQ ID NO: 22290 - DNA, 16 bp, synthetic construct
  misc_feature 1..16: note = synthetic [barcode part1]
  source 1..16: mol_type = other DNA
cagagtctcaggactt

SEQ ID NO: 22291 - DNA, 16 bp, synthetic construct
  misc_feature 1..16: note = synthetic [barcode part1]
  source 1..16: mol_type = other DNA
aacttaggcaccttct

SEQ ID NO: 22292 - DNA, 16 bp, synthetic construct
  misc_feature 1..16: note = synthetic [barcode part1]
  source 1..16: mol_type = other DNA
cctactcagtaccgtg

SEQ ID NO: 22293 - DNA, 16 bp, synthetic construct
  misc_feature 1..16: note = synthetic [barcode part1]
  source 1..16: mol_type = other DNA
gacctgaccaagttgt

SEQ ID NO: 22294 - DNA, 16 bp, synthetic construct
  misc_feature 1..16: note = synthetic [barcode part1]
  source 1..16: mol_type = other DNA
aattgttgaaccgccg

SEQ ID NO: 22295 - DNA, 16 bp, synthetic construct
  misc_feature 1..16: note = synthetic [barcode part1]
  source 1..16: mol_type = other DNA
cgtgcggtgttctact

SEQ ID NO: 22296 - DNA, 16 bp, synthetic construct
  misc_feature 1..16: note = synthetic [barcode part1]
  source 1..16: mol_type = other DNA
gagaacctacgtggtg

SEQ ID NO: 22297 - DNA, 16 bp, synthetic construct
  misc_feature 1..16: note = synthetic [barcode part1]
  source 1..16: mol_type = other DNA
actactgcaacggttg

SEQ ID NO: 22298 - DNA, 16 bp, synthetic construct
  misc_feature 1..16: note = synthetic [barcode part1]
  source 1..16: mol_type = other DNA
tacttactgccgtggc

SEQ ID NO: 22299 - DNA, 16 bp, synthetic construct
  misc_feature 1..16: note = synthetic [barcode part1]
  source 1..16: mol_type = other DNA
atatcggttgaacgcc

SEQ ID NO: 22300 - DNA, 16 bp, synthetic construct
  misc_feature 1..16: note = synthetic [barcode part1]
  source 1..16: mol_type = other DNA
gaagtgcctggtaacg

SEQ ID NO: 22301 - DNA, 16 bp, synthetic construct
  misc_feature 1..16: note = synthetic [barcode part1]
  source 1..16: mol_type = other DNA
ttacaggacggttacc

SEQ ID NO: 22302 - DNA, 16 bp, synthetic construct
  misc_feature 1..16: note = synthetic [barcode part1]
  source 1..16: mol_type = other DNA
gttatctggcgcctac

SEQ ID NO: 22303 - DNA, 16 bp, synthetic construct
  misc_feature 1..16: note = synthetic [barcode part1]
  source 1..16: mol_type = other DNA
agtcacaacaccagtc

SEQ ID NO: 22304 - DNA, 16 bp, synthetic construct
  misc_feature 1..16: note = synthetic [barcode part1]
  source 1..16: mol_type = other DNA
gtgaactcacgaactc

SEQ ID NO: 22305 - DNA, 16 bp, synthetic construct
  misc_feature 1..16: note = synthetic [barcode part1]
  source 1..16: mol_type = other DNA
ttacaccgtagtctgt

SEQ ID NO: 22306 - DNA, 16 bp, synthetic construct
  misc_feature 1..16: note = synthetic [barcode part1]
  source 1..16: mol_type = other DNA
acacaactgtgcagtc

SEQ ID NO: 22307 - DNA, 16 bp, synthetic construct
  misc_feature 1..16: note = synthetic [barcode part1]
  source 1..16: mol_type = other DNA
tagtattatccgtccg

SEQ ID NO: 22308 - DNA, 16 bp, synthetic construct
  misc_feature 1..16: note = synthetic [barcode part1]
  source 1..16: mol_type = other DNA
taccagtactggtgtg

SEQ ID NO: 22309 - DNA, 16 bp, synthetic construct
  misc_feature 1..16: note = synthetic [barcode part1]
  source 1..16: mol_type = other DNA
tgtgaggaattcaacg

SEQ ID NO: 22310 - DNA, 16 bp, synthetic construct
  misc_feature 1..16: note = synthetic [barcode part1]
  source 1..16: mol_type = other DNA
acgaaggtaacaactc

SEQ ID NO: 22311 - DNA, 16 bp, synthetic construct
  misc_feature 1..16: note = synthetic [barcode part1]
  source 1..16: mol_type = other DNA
tgaccggtatacgtac

SEQ ID NO: 22312 - DNA, 16 bp, synthetic construct
  misc_feature 1..16: note = synthetic [barcode part1]
  source 1..16: mol_type = other DNA
ttgacctcttgcaagt

SEQ ID NO: 22313 - DNA, 16 bp, synthetic construct
  misc_feature 1..16: note = synthetic [barcode part1]
  source 1..16: mol_type = other DNA
tcagacaccacaagtc

SEQ ID NO: 22314 - DNA, 16 bp, synthetic construct
  misc_feature 1..16: note = synthetic [barcode part1]
  source 1..16: mol_type = other DNA
tgaccttcgtggtcgt

SEQ ID NO: 22315 - DNA, 16 bp, synthetic construct
  misc_feature 1..16: note = synthetic [barcode part1]
  source 1..16: mol_type = other DNA
acgtgtacgtgtacac

SEQ ID NO: 22316 - DNA, 16 bp, synthetic construct
  misc_feature 1..16: note = synthetic [barcode part1]
  source 1..16: mol_type = other DNA
gtatcggcggttctct

SEQ ID NO: 22317 - DNA, 16 bp, synthetic construct
  misc_feature 1..16: note = synthetic [barcode part1]
  source 1..16: mol_type = other DNA
aattaggacgaccgcg

SEQ ID NO: 22318 - DNA, 16 bp, synthetic construct
  misc_feature 1..16: note = synthetic [barcode part1]
  source 1..16: mol_type = other DNA
atataggacttccgcg

SEQ ID NO: 22319 - DNA, 16 bp, synthetic construct
  misc_feature 1..16: note = synthetic [barcode part1]
  source 1..16: mol_type = other DNA
tattcgcctcggaatt

SEQ ID NO: 22320 - DNA, 16 bp, synthetic construct
  misc_feature 1..16: note = synthetic [barcode part1]
  source 1..16: mol_type = other DNA
tcaacaacgttcctgt

SEQ ID NO: 22321 - DNA, 16 bp, synthetic construct
  misc_feature 1..16: note = synthetic [barcode part1]
  source 1..16: mol_type = other DNA
ttaataggcgacctgc

SEQ ID NO: 22322 - DNA, 16 bp, synthetic construct
  misc_feature 1..16: note = synthetic [barcode part1]
  source 1..16: mol_type = other DNA
gaggcaactcgagtac

SEQ ID NO: 22323 - DNA, 16 bp, synthetic construct
  misc_feature 1..16: note = synthetic [barcode part1]
  source 1..16: mol_type = other DNA
gaatccgttcagttct

SEQ ID NO: 22324 - DNA, 16 bp, synthetic construct
  misc_feature 1..16: note = synthetic [barcode part1]
  source 1..16: mol_type = other DNA
agactaatacacggtg

SEQ ID NO: 22325 - DNA, 16 bp, synthetic construct
  misc_feature 1..16: note = synthetic [barcode part1]
  source 1..16: mol_type = other DNA
aagatctaggtggact

SEQ ID NO: 22326 - DNA, 16 bp, synthetic construct
  misc_feature 1..16: note = synthetic [barcode part1]
  source 1..16: mol_type = other DNA
gccacaacttgagact

SEQ ID NO: 22327 - DNA, 16 bp, synthetic construct
  misc_feature 1..16: note = synthetic [barcode part1]
  source 1..16: mol_type = other DNA
attaccttcgtaggtc

SEQ ID NO: 22328 - DNA, 16 bp, synthetic construct
  misc_feature 1..16: note = synthetic [barcode part1]
  source 1..16: mol_type = other DNA
tcggaagaactacgcg

SEQ ID NO: 22329 - DNA, 16 bp, synthetic construct
  misc_feature 1..16: note = synthetic [barcode part1]
  source 1..16: mol_type = other DNA
tcctggcgattgcact

SEQ ID NO: 22330 - DNA, 16 bp, synthetic construct
  misc_feature 1..16: note = synthetic [barcode part1]
  source 1..16: mol_type = other DNA
gcaatcgtcgactcct

SEQ ID NO: 22331 - DNA, 16 bp, synthetic construct
  misc_feature 1..16: note = synthetic [barcode part1]
  source 1..16: mol_type = other DNA
tctatcacacgaatcc

SEQ ID NO: 22332 - DNA, 16 bp, synthetic construct
  misc_feature 1..16: note = synthetic [barcode part1]
  source 1..16: mol_type = other DNA
atagagactctacgcc

SEQ ID NO: 22333 - DNA, 16 bp, synthetic construct
  misc_feature 1..16: note = synthetic [barcode part1]
  source 1..16: mol_type = other DNA
agaggactattggtac

SEQ ID NO: 22334 - DNA, 16 bp, synthetic construct
  misc_feature 1..16: note = synthetic [barcode part1]
  source 1..16: mol_type = other DNA
tgacaggagtatctag

SEQ ID NO: 22335 - DNA, 16 bp, synthetic construct
  misc_feature 1..16: note = synthetic [barcode part1]
  source 1..16: mol_type = other DNA
ccacttcacgcaatcg

SEQ ID NO: 22336 - DNA, 16 bp, synthetic construct
  misc_feature 1..16: note = synthetic [barcode part1]
  source 1..16: mol_type = other DNA
actcagattgtctcac

SEQ ID NO: 22337 - DNA, 16 bp, synthetic construct
  misc_feature 1..16: note = synthetic [barcode part1]
  source 1..16: mol_type = other DNA
cctcgatacacgatcc

SEQ ID NO: 22338 - DNA, 16 bp, synthetic construct
  misc_feature 1..16: note = synthetic [barcode part1]
  source 1..16: mol_type = other DNA
acgttgatccttggcc

SEQ ID NO: 22339 - DNA, 16 bp, synthetic construct
  misc_feature 1..16: note = synthetic [barcode part1]
  source 1..16: mol_type = other DNA
aacgaggtacgagtcc

SEQ ID NO: 22340 - DNA, 16 bp, synthetic construct
  misc_feature 1..16: note = synthetic [barcode part1]
  source 1..16: mol_type = other DNA
caggtcagtcagactt

SEQ ID NO: 22341 - DNA, 16 bp, synthetic construct
  misc_feature 1..16: note = synthetic [barcode part1]
  source 1..16: mol_type = other DNA
gtcggatagtggttct

SEQ ID NO: 22342 - DNA, 16 bp, synthetic construct
  misc_feature 1..16: note = synthetic [barcode part1]
  source 1..16: mol_type = other DNA
ccgttgcctacaggtt

SEQ ID NO: 22343 - DNA, 16 bp, synthetic construct
  misc_feature 1..16: note = synthetic [barcode part1]
  source 1..16: mol_type = other DNA
acaagatcggacaccg

SEQ ID NO: 22344 - DNA, 16 bp, synthetic construct
  misc_feature 1..16: note = synthetic [barcode part1]
  source 1..16: mol_type = other DNA
atcgtgttcttcaacg

SEQ ID NO: 22345 - DNA, 16 bp, synthetic construct
  misc_feature 1..16: note = synthetic [barcode part1]
  source 1..16: mol_type = other DNA
gaacgacctggtgtag

SEQ ID NO: 22346 - DNA, 16 bp, synthetic construct
  misc_feature 1..16: note = synthetic [barcode part1]
  source 1..16: mol_type = other DNA
tctacgcactagattc

SEQ ID NO: 22347 - DNA, 16 bp, synthetic construct
  misc_feature 1..16: note = synthetic [barcode part1]
  source 1..16: mol_type = other DNA
cgttcggaacttgtag

SEQ ID NO: 22348 - DNA, 16 bp, synthetic construct
  misc_feature 1..16: note = synthetic [barcode part1]
  source 1..16: mol_type = other DNA
tgatcgtcctaacttg

SEQ ID NO: 22349 - DNA, 16 bp, synthetic construct
  misc_feature 1..16: note = synthetic [barcode part1]
  source 1..16: mol_type = other DNA
cacctcactgtaggtc

SEQ ID NO: 22350 - DNA, 16 bp, synthetic construct
  misc_feature 1..16: note = synthetic [barcode part1]
  source 1..16: mol_type = other DNA
ccacggatcgttatcc

SEQ ID NO: 22351 - DNA, 16 bp, synthetic construct
  misc_feature 1..16: note = synthetic [barcode part1]
  source 1..16: mol_type = other DNA
tcagtgtatcgcgtag

SEQ ID NO: 22352 - DNA, 16 bp, synthetic construct
  misc_feature 1..16: note = synthetic [barcode part1]
  source 1..16: mol_type = other DNA
tcagtggcctacgtct

SEQ ID NO: 22353 - DNA, 16 bp, synthetic construct
  misc_feature 1..16: note = synthetic [barcode part1]
  source 1..16: mol_type = other DNA
tggaagagtaccagtt

SEQ ID NO: 22354 - DNA, 16 bp, synthetic construct
  misc_feature 1..16: note = synthetic [barcode part1]
  source 1..16: mol_type = other DNA
caagtaagataccgtg

SEQ ID NO: 22355 - DNA, 16 bp, synthetic construct
  misc_feature 1..16: note = synthetic [barcode part1]
  source 1..16: mol_type = other DNA
gcctactgagtctcac

SEQ ID NO: 22356 - DNA, 16 bp, synthetic construct
  misc_feature 1..16: note = synthetic [barcode part1]
  source 1..16: mol_type = other DNA
acttcgtcgccttgtt

SEQ ID NO: 22357 - DNA, 16 bp, synthetic construct
  misc_feature 1..16: note = synthetic [barcode part1]
  source 1..16: mol_type = other DNA
ttccaccagtgaagtg

SEQ ID NO: 22358 - DNA, 16 bp, synthetic construct
  misc_feature 1..16: note = synthetic [barcode part1]
  source 1..16: mol_type = other DNA
atatcgcgagtaagtg

SEQ ID NO: 22359 - DNA, 16 bp, synthetic construct
  misc_feature 1..16: note = synthetic [barcode part1]
  source 1..16: mol_type = other DNA
attcgtcggcgttatt

SEQ ID NO: 22360 - DNA, 16 bp, synthetic construct
  misc_feature 1..16: note = synthetic [barcode part1]
  source 1..16: mol_type = other DNA
ttgtatctcgcacctc

SEQ ID NO: 22361 - DNA, 16 bp, synthetic construct
  misc_feature 1..16: note = synthetic [barcode part1]
  source 1..16: mol_type = other DNA
acgttagattggagac

SEQ ID NO: 22362 - DNA, 16 bp, synthetic construct
  misc_feature 1..16: note = synthetic [barcode part1]
  source 1..16: mol_type = other DNA
caacagtaagacacac

SEQ ID NO: 22363 - DNA, 16 bp, synthetic construct
  misc_feature 1..16: note = synthetic [barcode part1]
  source 1..16: mol_type = other DNA
tagttctcagtgtgtc

SEQ ID NO: 22364 - DNA, 16 bp, synthetic construct
  misc_feature 1..16: note = synthetic [barcode part1]
  source 1..16: mol_type = other DNA
ttgcgcgacgtattag

SEQ ID NO: 22365 - DNA, 16 bp, synthetic construct
  misc_feature 1..16: note = synthetic [barcode part1]
  source 1..16: mol_type = other DNA
acttggaccgttctgc

SEQ ID NO: 22366 - DNA, 16 bp, synthetic construct
  misc_feature 1..16: note = synthetic [barcode part1]
  source 1..16: mol_type = other DNA
aatcgtggcgtactac

SEQ ID NO: 22367 - DNA, 16 bp, synthetic construct
  misc_feature 1..16: note = synthetic [barcode part1]
  source 1..16: mol_type = other DNA
actgcaagtgacgttc

SEQ ID NO: 22368 - DNA, 16 bp, synthetic construct
  misc_feature 1..16: note = synthetic [barcode part1]
  source 1..16: mol_type = other DNA
tatccagaactgtgcg

SEQ ID NO: 22369 - DNA, 16 bp, synthetic construct
  misc_feature 1..16: note = synthetic [barcode part1]
  source 1..16: mol_type = other DNA
taccaacacgttgacg

SEQ ID NO: 22370 - DNA, 16 bp, synthetic construct
  misc_feature 1..16: note = synthetic [barcode part1]
  source 1..16: mol_type = other DNA
ttggcctcaagtccac

SEQ ID NO: 22371 - DNA, 16 bp, synthetic construct
  misc_feature 1..16: note = synthetic [barcode part1]
  source 1..16: mol_type = other DNA
ccgtgaaggtgtactt

SEQ ID NO: 22372 - DNA, 16 bp, synthetic construct
  misc_feature 1..16: note = synthetic [barcode part1]
  source 1..16: mol_type = other DNA
gttgcctagtgtctgc

SEQ ID NO: 22373 - DNA, 16 bp, synthetic construct
  misc_feature 1..16: note = synthetic [barcode part1]
  source 1..16: mol_type = other DNA
ttgaggtacagacggc

SEQ ID NO: 22374 - DNA, 16 bp, synthetic construct
  misc_feature 1..16: note = synthetic [barcode part1]
  source 1..16: mol_type = other DNA
agtacgtacgtcaacc

SEQ ID NO: 22375 - DNA, 16 bp, synthetic construct
  misc_feature 1..16: note = synthetic [barcode part1]
  source 1..16: mol_type = other DNA
attggcggaaccgagt

SEQ ID NO: 22376 - DNA, 16 bp, synthetic construct
  misc_feature 1..16: note = synthetic [barcode part1]
  source 1..16: mol_type = other DNA
caatcttgtacgtcac

SEQ ID NO: 22377 - DNA, 16 bp, synthetic construct
  misc_feature 1..16: note = synthetic [barcode part1]
  source 1..16: mol_type = other DNA
cacgtccttgtgttct

SEQ ID NO: 22378 - DNA, 16 bp, synthetic construct
  misc_feature 1..16: note = synthetic [barcode part1]
  source 1..16: mol_type = other DNA
gccgttcgtaacaagt

SEQ ID NO: 22379 - DNA, 16 bp, synthetic construct
  misc_feature 1..16: note = synthetic [barcode part1]
  source 1..16: mol_type = other DNA
gactctaacaggcgag

SEQ ID NO: 22380 - DNA, 16 bp, synthetic construct
  misc_feature 1..16: note = synthetic [barcode part1]
  source 1..16: mol_type = other DNA
tggaggatcctagttc

SEQ ID NO: 22381 - DNA, 16 bp, synthetic construct
  misc_feature 1..16: note = synthetic [barcode part1]
  source 1..16: mol_type = other DNA
gcagtacaccacaact

SEQ ID NO: 22382 - DNA, 16 bp, synthetic construct
  misc_feature 1..16: note = synthetic [barcode part1]
  source 1..16: mol_type = other DNA
ttccgcgttaagttgt

SEQ ID NO: 22383 - DNA, 16 bp, synthetic construct
  misc_feature 1..16: note = synthetic [barcode part1]
  source 1..16: mol_type = other DNA
agaagtgtctacgcct

SEQ ID NO: 22384 - DNA, 16 bp, synthetic construct
  misc_feature 1..16: note = synthetic [barcode part1]
  source 1..16: mol_type = other DNA
ttggtactcttgactg

SEQ ID NO: 22385 - DNA, 16 bp, synthetic construct
  misc_feature 1..16: note = synthetic [barcode part1]
  source 1..16: mol_type = other DNA
gtattgcctacttgtg

SEQ ID NO: 22386 - DNA, 16 bp, synthetic construct
  misc_feature 1..16: note = synthetic [barcode part1]
  source 1..16: mol_type = other DNA
acgataacaccagtag

SEQ ID NO: 22387 - DNA, 16 bp, synthetic construct
  misc_feature 1..16: note = synthetic [barcode part1]
  source 1..16: mol_type = other DNA
agtctggttgacggtt

SEQ ID NO: 22388 - DNA, 16 bp, synthetic construct
  misc_feature 1..16: note = synthetic [barcode part1]
  source 1..16: mol_type = other DNA
cacgccaggaagattg

SEQ ID NO: 22389 - DNA, 16 bp, synthetic construct
  misc_feature 1..16: note = synthetic [barcode part1]
  source 1..16: mol_type = other DNA
gacgtacgatcggagt

SEQ ID NO: 22390 - DNA, 16 bp, synthetic construct
  misc_feature 1..16: note = synthetic [barcode part1]
  source 1..16: mol_type = other DNA
acgccaggagaatcac

SEQ ID NO: 22391 - DNA, 16 bp, synthetic construct
  misc_feature 1..16: note = synthetic [barcode part1]
  source 1..16: mol_type = other DNA
atagttggtcacgcgt

SEQ ID NO: 22392 - DNA, 16 bp, synthetic construct
  misc_feature 1..16: note = synthetic [barcode part1]
  source 1..16: mol_type = other DNA
agtgatcggttcagtc

SEQ ID NO: 22393 - DNA, 16 bp, synthetic construct
  misc_feature 1..16: note = synthetic [barcode part1]
  source 1..16: mol_type = other DNA
taatccgtctacgttg

SEQ ID NO: 22394 - DNA, 16 bp, synthetic construct
  misc_feature 1..16: note = synthetic [barcode part1]
  source 1..16: mol_type = other DNA
taataactcctgtgcc

SEQ ID NO: 22395 - DNA, 16 bp, synthetic construct
  misc_feature 1..16: note = synthetic [barcode part1]
  source 1..16: mol_type = other DNA
ttcgttgtcagacgtt

SEQ ID NO: 22396 - DNA, 16 bp, synthetic construct
  misc_feature 1..16: note = synthetic [barcode part1]
  source 1..16: mol_type = other DNA
tgttcgattggcacag

SEQ ID NO: 22397 - DNA, 16 bp, synthetic construct
  misc_feature 1..16: note = synthetic [barcode part1]
  source 1..16: mol_type = other DNA
tactcgtggacaggtt

SEQ ID NO: 22398 - DNA, 16 bp, synthetic construct
  misc_feature 1..16: note = synthetic [barcode part1]
  source 1..16: mol_type = other DNA
cacaatcagagtaacg

SEQ ID NO: 22399 - DNA, 16 bp, synthetic construct
  misc_feature 1..16: note = synthetic [barcode part1]
  source 1..16: mol_type = other DNA
ttcgtcgtcggtacac

SEQ ID NO: 22400 - DNA, 16 bp, synthetic construct
  misc_feature 1..16: note = synthetic [barcode part1]
  source 1..16: mol_type = other DNA
aactaccggtgcgaag

SEQ ID NO: 22401 - DNA, 16 bp, synthetic construct
  misc_feature 1..16: note = synthetic [barcode part1]
  source 1..16: mol_type = other DNA
cggtaacgattcggtt

SEQ ID NO: 22402 - DNA, 16 bp, synthetic construct
  misc_feature 1..16: note = synthetic [barcode part1]
  source 1..16: mol_type = other DNA
gactagtgagactctc

SEQ ID NO: 22403 - DNA, 16 bp, synthetic construct
  misc_feature 1..16: note = synthetic [barcode part1]
  source 1..16: mol_type = other DNA
atcaacagttctccgt

SEQ ID NO: 22404 - DNA, 16 bp, synthetic construct
  misc_feature 1..16: note = synthetic [barcode part1]
  source 1..16: mol_type = other DNA
caatataccggtgtgc

SEQ ID NO: 22405 - DNA, 16 bp, synthetic construct
  misc_feature 1..16: note = synthetic [barcode part1]
  source 1..16: mol_type = other DNA
agtcggatcgtataag

SEQ ID NO: 22406 - DNA, 16 bp, synthetic construct
  misc_feature 1..16: note = synthetic [barcode part1]
  source 1..16: mol_type = other DNA
attacgcctggtgtag

SEQ ID NO: 22407 - DNA, 16 bp, synthetic construct
  misc_feature 1..16: note = synthetic [barcode part1]
  source 1..16: mol_type = other DNA
aatcgtgccgaccttc

SEQ ID NO: 22408 - DNA, 16 bp, synthetic construct
  misc_feature 1..16: note = synthetic [barcode part1]
  source 1..16: mol_type = other DNA
gaactctgccagttag

SEQ ID NO: 22409 - DNA, 16 bp, synthetic construct
  misc_feature 1..16: note = synthetic [barcode part1]
  source 1..16: mol_type = other DNA
tatcgacaccgatacg

SEQ ID NO: 22410 - DNA, 16 bp, synthetic construct
  misc_feature 1..16: note = synthetic [barcode part1]
  source 1..16: mol_type = other DNA
gtgttagacgcagttc

SEQ ID NO: 22411 - DNA, 16 bp, synthetic construct
  misc_feature 1..16: note = synthetic [barcode part1]
  source 1..16: mol_type = other DNA
gagagacggattagac

SEQ ID NO: 22412 - DNA, 16 bp, synthetic construct
  misc_feature 1..16: note = synthetic [barcode part1]
  source 1..16: mol_type = other DNA
gcactgattcttggtt

SEQ ID NO: 22413 - DNA, 16 bp, synthetic construct
  misc_feature 1..16: note = synthetic [barcode part1]
  source 1..16: mol_type = other DNA
atcttcaggcggttcc

SEQ ID NO: 22414 - DNA, 16 bp, synthetic construct
  misc_feature 1..16: note = synthetic [barcode part1]
  source 1..16: mol_type = other DNA
tgcctaacacggattg

SEQ ID NO: 22415 - DNA, 16 bp, synthetic construct
  misc_feature 1..16: note = synthetic [barcode part1]
  source 1..16: mol_type = other DNA
tgagtcgccttgcgtt

SEQ ID NO: 22416 - DNA, 16 bp, synthetic construct
  misc_feature 1..16: note = synthetic [barcode part1]
  source 1..16: mol_type = other DNA
acacgtgcggttagtt

SEQ ID NO: 22417 - DNA, 16 bp, synthetic construct
  misc_feature 1..16: note = synthetic [barcode part1]
  source 1..16: mol_type = other DNA
ttcgaccttgacttcc

SEQ ID NO: 22418 - DNA, 16 bp, synthetic construct
  misc_feature 1..16: note = synthetic [barcode part1]
  source 1..16: mol_type = other DNA
cgaatactaacctctc

SEQ ID NO: 22419 - DNA, 16 bp, synthetic construct
  misc_feature 1..16: note = synthetic [barcode part1]
  source 1..16: mol_type = other DNA
gacacagtactggacg

SEQ ID NO: 22420 - DNA, 16 bp, synthetic construct
  misc_feature 1..16: note = synthetic [barcode part1]
  source 1..16: mol_type = other DNA
acggcactgattagtc

SEQ ID NO: 22421 - DNA, 16 bp, synthetic construct
  misc_feature 1..16: note = synthetic [barcode part1]
  source 1..16: mol_type = other DNA
gtgactgttctggcct

SEQ ID NO: 22422 - DNA, 16 bp, synthetic construct
  misc_feature 1..16: note = synthetic [barcode part1]
  source 1..16: mol_type = other DNA
taggcgtagttcacgt

SEQ ID NO: 22423 - DNA, 16 bp, synthetic construct
  misc_feature 1..16: note = synthetic [barcode part1]
  source 1..16: mol_type = other DNA
aacggtcgtattctct

SEQ ID NO: 22424 - DNA, 16 bp, synthetic construct
  misc_feature 1..16: note = synthetic [barcode part1]
  source 1..16: mol_type = other DNA
ccagtgcaactcttcg

SEQ ID NO: 22425 - DNA, 16 bp, synthetic construct
  misc_feature 1..16: note = synthetic [barcode part1]
  source 1..16: mol_type = other DNA
gacacactgacgtact

SEQ ID NO: 22426 - DNA, 16 bp, synthetic construct
  misc_feature 1..16: note = synthetic [barcode part1]
  source 1..16: mol_type = other DNA
cctaaccgtaccagtc

SEQ ID NO: 22427 - DNA, 16 bp, synthetic construct
  misc_feature 1..16: note = synthetic [barcode part1]
  source 1..16: mol_type = other DNA
ccaagaggcacaatcg

SEQ ID NO: 22428 - DNA, 16 bp, synthetic construct
  misc_feature 1..16: note = synthetic [barcode part1]
  source 1..16: mol_type = other DNA
gaacgtccttaggtgt

SEQ ID NO: 22429 - DNA, 16 bp, synthetic construct
  misc_feature 1..16: note = synthetic [barcode part1]
  source 1..16: mol_type = other DNA
atccgtagtacgatcg

SEQ ID NO: 22430 - DNA, 16 bp, synthetic construct
  misc_feature 1..16: note = synthetic [barcode part1]
  source 1..16: mol_type = other DNA
tcgaatcgaaggtgcg

SEQ ID NO: 22431 - DNA, 16 bp, synthetic construct
  misc_feature 1..16: note = synthetic [barcode part1]
  source 1..16: mol_type = other DNA
tcttctactatcgccg

SEQ ID NO: 22432 - DNA, 16 bp, synthetic construct
  misc_feature 1..16: note = synthetic [barcode part1]
  source 1..16: mol_type = other DNA
tgagaggagtcaagac

SEQ ID NO: 22433 - DNA, 16 bp, synthetic construct
  misc_feature 1..16: note = synthetic [barcode part1]
  source 1..16: mol_type = other DNA
gcgatcgatcgatatc

SEQ ID NO: 22434 - DNA, 16 bp, synthetic construct
  misc_feature 1..16: note = synthetic [barcode part1]
  source 1..16: mol_type = other DNA
tgacggtctggtagtt

SEQ ID NO: 22435 - DNA, 16 bp, synthetic construct
  misc_feature 1..16: note = synthetic [barcode part1]
  source 1..16: mol_type = other DNA
gcaataagtagtcacg

SEQ ID NO: 22436 - DNA, 16 bp, synthetic construct
  misc_feature 1..16: note = synthetic [barcode part1]
  source 1..16: mol_type = other DNA
gagagtcgtgtgtcag

SEQ ID NO: 22437 - DNA, 16 bp, synthetic construct
  misc_feature 1..16: note = synthetic [barcode part1]
  source 1..16: mol_type = other DNA
tataccgccagtcctg

SEQ ID NO: 22438 - DNA, 16 bp, synthetic construct
  misc_feature 1..16: note = synthetic [barcode part1]
  source 1..16: mol_type = other DNA
agtctaggatcgtcac

SEQ ID NO: 22439 - DNA, 16 bp, synthetic construct
  misc_feature 1..16: note = synthetic [barcode part1]
  source 1..16: mol_type = other DNA
aaggcgagttcgcaac

SEQ ID NO: 22440 - DNA, 16 bp, synthetic construct
  misc_feature 1..16: note = synthetic [barcode part1]
  source 1..16: mol_type = other DNA
ttgtgagaggttgaac

SEQ ID NO: 22441 - DNA, 16 bp, synthetic construct
  misc_feature 1..16: note = synthetic [barcode part1]
  source 1..16: mol_type = other DNA
cgttgtcagtatactc

SEQ ID NO: 22442 - DNA, 16 bp, synthetic construct
  misc_feature 1..16: note = synthetic [barcode part1]
  source 1..16: mol_type = other DNA
attccttgccagtgcg

SEQ ID NO: 22443 - DNA, 16 bp, synthetic construct
  misc_feature 1..16: note = synthetic [barcode part1]
  source 1..16: mol_type = other DNA
agacaataccgtctcg

SEQ ID NO: 22444 - DNA, 16 bp, synthetic construct
  misc_feature 1..16: note = synthetic [barcode part1]
  source 1..16: mol_type = other DNA
gagtgtcgataggatt

SEQ ID NO: 22445 - DNA, 16 bp, synthetic construct
  misc_feature 1..16: note = synthetic [barcode part1]
  source 1..16: mol_type = other DNA
gacgtcaacgtgtgtt

SEQ ID NO: 22446 - DNA, 16 bp, synthetic construct
  misc_feature 1..16: note = synthetic [barcode part1]
  source 1..16: mol_type = other DNA
ccacttcctaagtgcg

SEQ ID NO: 22447 - DNA, 16 bp, synthetic construct
  misc_feature 1..16: note = synthetic [barcode part1]
  source 1..16: mol_type = other DNA
accacgatatcgtggt

SEQ ID NO: 22448 - DNA, 16 bp, synthetic construct
  misc_feature 1..16: note = synthetic [barcode part1]
  source 1..16: mol_type = other DNA
tgcaccgtcaattccg

SEQ ID NO: 22449 - DNA, 16 bp, synthetic construct
  misc_feature 1..16: note = synthetic [barcode part1]
  source 1..16: mol_type = other DNA
aagtcgttgtcgagtc

SEQ ID NO: 22450 - DNA, 16 bp, synthetic construct
  misc_feature 1..16: note = synthetic [barcode part1]
  source 1..16: mol_type = other DNA
tatcctactacgaacc

SEQ ID NO: 22451 - DNA, 16 bp, synthetic construct
  misc_feature 1..16: note = synthetic [barcode part1]
  source 1..16: mol_type = other DNA
taggactgactggttc

SEQ ID NO: 22452 - DNA, 16 bp, synthetic construct
  misc_feature 1..16: note = synthetic [barcode part1]
  source 1..16: mol_type = other DNA
tatcttaccgtggact

SEQ ID NO: 22453 - DNA, 16 bp, synthetic construct
  misc_feature 1..16: note = synthetic [barcode part1]
  source 1..16: mol_type = other DNA
tcctcgtgatagtccg

SEQ ID NO: 22454 - DNA, 16 bp, synthetic construct
  misc_feature 1..16: note = synthetic [barcode part1]
  source 1..16: mol_type = other DNA
gtattaggcgtgacct

SEQ ID NO: 22455 - DNA, 16 bp, synthetic construct
  misc_feature 1..16: note = synthetic [barcode part1]
  source 1..16: mol_type = other DNA
cgtctgcacttatcct

SEQ ID NO: 22456 - DNA, 16 bp, synthetic construct
  misc_feature 1..16: note = synthetic [barcode part1]
  source 1..16: mol_type = other DNA
aagtggactcgtctgt

SEQ ID NO: 22457 - DNA, 16 bp, synthetic construct
  misc_feature 1..16: note = synthetic [barcode part1]
  source 1..16: mol_type = other DNA
gtctgtcctacaacgc

SEQ ID NO: 22458 - DNA, 16 bp, synthetic construct
  misc_feature 1..16: note = synthetic [barcode part1]
  source 1..16: mol_type = other DNA
agtcgcggttgtatac

SEQ ID NO: 22459 - DNA, 16 bp, synthetic construct
  misc_feature 1..16: note = synthetic [barcode part1]
  source 1..16: mol_type = other DNA
tatcttcaatccggtg

SEQ ID NO: 22460 - DNA, 16 bp, synthetic construct
  misc_feature 1..16: note = synthetic [barcode part1]
  source 1..16: mol_type = other DNA
gtacggagtctggtag

SEQ ID NO: 22461 - DNA, 16 bp, synthetic construct
  misc_feature 1..16: note = synthetic [barcode part1]
  source 1..16: mol_type = other DNA
acggtacggttaacct

SEQ ID NO: 22462 - DNA, 16 bp, synthetic construct
  misc_feature 1..16: note = synthetic [barcode part1]
  source 1..16: mol_type = other DNA
gtctccgaacgatcct

SEQ ID NO: 22463 - DNA, 16 bp, synthetic construct
  misc_feature 1..16: note = synthetic [barcode part1]
  source 1..16: mol_type = other DNA
cctcctactcaattcg

SEQ ID NO: 22464 - DNA, 16 bp, synthetic construct
  misc_feature 1..16: note = synthetic [barcode part1]
  source 1..16: mol_type = other DNA
agttctgtattcgtcg

SEQ ID NO: 22465 - DNA, 16 bp, synthetic construct
  misc_feature 1..16: note = synthetic [barcode part1]
  source 1..16: mol_type = other DNA
ttctactgcggtgaag

SEQ ID NO: 22466 - DNA, 16 bp, synthetic construct
  misc_feature 1..16: note = synthetic [barcode part1]
  source 1..16: mol_type = other DNA
agtaccactgaccaac

SEQ ID NO: 22467 - DNA, 16 bp, synthetic construct
  misc_feature 1..16: note = synthetic [barcode part1]
  source 1..16: mol_type = other DNA
acgtcctatacggaac

SEQ ID NO: 22468 - DNA, 16 bp, synthetic construct
  misc_feature 1..16: note = synthetic [barcode part1]
  source 1..16: mol_type = other DNA
atccgagtgaagtagt

SEQ ID NO: 22469 - DNA, 16 bp, synthetic construct
  misc_feature 1..16: note = synthetic [barcode part1]
  source 1..16: mol_type = other DNA
tcagtgagagttgtcc

SEQ ID NO: 22470 - DNA, 16 bp, synthetic construct
  misc_feature 1..16: note = synthetic [barcode part1]
  source 1..16: mol_type = other DNA
atatagtaccggcacc

SEQ ID NO: 22471 - DNA, 16 bp, synthetic construct
  misc_feature 1..16: note = synthetic [barcode part1]
  source 1..16: mol_type = other DNA
cgcactccactgaact

SEQ ID NO: 22472 - DNA, 16 bp, synthetic construct
  misc_feature 1..16: note = synthetic [barcode part1]
  source 1..16: mol_type = other DNA
agttattccgcgtccg

SEQ ID NO: 22473 - DNA, 16 bp, synthetic construct
  misc_feature 1..16: note = synthetic [barcode part1]
  source 1..16: mol_type = other DNA
gcgttctgtcaagtcc

SEQ ID NO: 22474 - DNA, 16 bp, synthetic construct
  misc_feature 1..16: note = synthetic [barcode part1]
  source 1..16: mol_type = other DNA
gaggcgattataggtt

SEQ ID NO: 22475 - DNA, 16 bp, synthetic construct
  misc_feature 1..16: note = synthetic [barcode part1]
  source 1..16: mol_type = other DNA
agtcgatctgatcgac

SEQ ID NO: 22476 - DNA, 16 bp, synthetic construct
  misc_feature 1..16: note = synthetic [barcode part1]
  source 1..16: mol_type = other DNA
gtctgtacaatccttg

SEQ ID NO: 22477 - DNA, 16 bp, synthetic construct
  misc_feature 1..16: note = synthetic [barcode part1]
  source 1..16: mol_type = other DNA
tgttgttctgcgcgac

SEQ ID NO: 22478 - DNA, 16 bp, synthetic construct
  misc_feature 1..16: note = synthetic [barcode part1]
  source 1..16: mol_type = other DNA
cgtcgtccgaagaatt

SEQ ID NO: 22479 - DNA, 16 bp, synthetic construct
  misc_feature 1..16: note = synthetic [barcode part1]
  source 1..16: mol_type = other DNA
accgccaatacggaag

SEQ ID NO: 22480 - DNA, 16 bp, synthetic construct
  misc_feature 1..16: note = synthetic [barcode part1]
  source 1..16: mol_type = other DNA
cacttatacggtatcc

SEQ ID NO: 22481 - DNA, 16 bp, synthetic construct
  misc_feature 1..16: note = synthetic [barcode part1]
  source 1..16: mol_type = other DNA
aaggataaggccgtcc

SEQ ID NO: 22482 - DNA, 16 bp, synthetic construct
  misc_feature 1..16: note = synthetic [barcode part1]
  source 1..16: mol_type = other DNA
gtcacttgagtctgtt

SEQ ID NO: 22483 - DNA, 16 bp, synthetic construct
  misc_feature 1..16: note = synthetic [barcode part1]
  source 1..16: mol_type = other DNA
ccgatcttatcggcac

SEQ ID NO: 22484 - DNA, 16 bp, synthetic construct
  misc_feature 1..16: note = synthetic [barcode part1]
  source 1..16: mol_type = other DNA
atacctgtccgtcacg

SEQ ID NO: 22485 - DNA, 16 bp, synthetic construct
  misc_feature 1..16: note = synthetic [barcode part1]
  source 1..16: mol_type = other DNA
agttaccacctgacag

SEQ ID NO: 22486 - DNA, 16 bp, synthetic construct
  misc_feature 1..16: note = synthetic [barcode part1]
  source 1..16: mol_type = other DNA
tcgcgtcgtgattcgt

SEQ ID NO: 22487 - DNA, 16 bp, synthetic construct
  misc_feature 1..16: note = synthetic [barcode part1]
  source 1..16: mol_type = other DNA
aggtgaggagtaagtc

SEQ ID NO: 22488 - DNA, 16 bp, synthetic construct
  misc_feature 1..16: note = synthetic [barcode part1]
  source 1..16: mol_type = other DNA
tacacgacgtcaacac

SEQ ID NO: 22489 - DNA, 16 bp, synthetic construct
  misc_feature 1..16: note = synthetic [barcode part1]
  source 1..16: mol_type = other DNA
agtcctagacgttgtg

SEQ ID NO: 22490 - DNA, 16 bp, synthetic construct
  misc_feature 1..16: note = synthetic [barcode part1]
  source 1..16: mol_type = other DNA
cactgtatctctctcg

SEQ ID NO: 22491 - DNA, 16 bp, synthetic construct
  misc_feature 1..16: note = synthetic [barcode part1]
  source 1..16: mol_type = other DNA
gaccgcagaagaatcc

SEQ ID NO: 22492 - DNA, 16 bp, synthetic construct
  misc_feature 1..16: note = synthetic [barcode part1]
  source 1..16: mol_type = other DNA
caaggagtaatcgcgc

SEQ ID NO: 22493 - DNA, 16 bp, synthetic construct
  misc_feature 1..16: note = synthetic [barcode part1]
  source 1..16: mol_type = other DNA
actggaggaggaattg

SEQ ID NO: 22494 - DNA, 16 bp, synthetic construct
  misc_feature 1..16: note = synthetic [barcode part1]
  source 1..16: mol_type = other DNA
agtgttccgagaggtg

SEQ ID NO: 22495 - DNA, 16 bp, synthetic construct
  misc_feature 1..16: note = synthetic [barcode part1]
  source 1..16: mol_type = other DNA
agatagtcgactctcg

SEQ ID NO: 22496 - DNA, 16 bp, synthetic construct
  misc_feature 1..16: note = synthetic [barcode part1]
  source 1..16: mol_type = other DNA
aggattagatctgcag

SEQ ID NO: 22497 - DNA, 16 bp, synthetic construct
  misc_feature 1..16: note = synthetic [barcode part1]
  source 1..16: mol_type = other DNA
tacaccacacacagtg

SEQ ID NO: 22498 - DNA, 16 bp, synthetic construct
  misc_feature 1..16: note = synthetic [barcode part1]
  source 1..16: mol_type = other DNA
gatcgtagtacgttgc

SEQ ID NO: 22499 - DNA, 16 bp, synthetic construct
  misc_feature 1..16: note = synthetic [barcode part1]
  source 1..16: mol_type = other DNA
gtcggcaagatatctc

SEQ ID NO: 22500 - DNA, 16 bp, synthetic construct
  misc_feature 1..16: note = synthetic [barcode part1]
  source 1..16: mol_type = other DNA
gagtcacctcacgtct

SEQ ID NO: 22501 - DNA, 16 bp, synthetic construct
  misc_feature 1..16: note = synthetic [barcode part1]
  source 1..16: mol_type = other DNA
actactcctgtggatt

SEQ ID NO: 22502 - DNA, 16 bp, synthetic construct
  misc_feature 1..16: note = synthetic [barcode part1]
  source 1..16: mol_type = other DNA
attggcacttgatctc

SEQ ID NO: 22503 - DNA, 16 bp, synthetic construct
  misc_feature 1..16: note = synthetic [barcode part1]
  source 1..16: mol_type = other DNA
taagagttgccggacg

SEQ ID NO: 22504 - DNA, 16 bp, synthetic construct
  misc_feature 1..16: note = synthetic [barcode part1]
  source 1..16: mol_type = other DNA
gactgaggtaggatag

SEQ ID NO: 22505 - DNA, 16 bp, synthetic construct
  misc_feature 1..16: note = synthetic [barcode part1]
  source 1..16: mol_type = other DNA
tgagtcactagatcgc

SEQ ID NO: 22506 - DNA, 16 bp, synthetic construct
  misc_feature 1..16: note = synthetic [barcode part1]
  source 1..16: mol_type = other DNA
gcgatatcagtactgc

SEQ ID NO: 22507 - DNA, 16 bp, synthetic construct
  misc_feature 1..16: note = synthetic [barcode part1]
  source 1..16: mol_type = other DNA
atcggttggagttctg

SEQ ID NO: 22508 - DNA, 16 bp, synthetic construct
  misc_feature 1..16: note = synthetic [barcode part1]
  source 1..16: mol_type = other DNA
cctcgattatactgac

SEQ ID NO: 22509 - DNA, 16 bp, synthetic construct
  misc_feature 1..16: note = synthetic [barcode part1]
  source 1..16: mol_type = other DNA
gtcgattattgcggtg

SEQ ID NO: 22510 - DNA, 16 bp, synthetic construct
  misc_feature 1..16: note = synthetic [barcode part1]
  source 1..16: mol_type = other DNA
tacgacgaggcgagtt

SEQ ID NO: 22511 - DNA, 16 bp, synthetic construct
  misc_feature 1..16: note = synthetic [barcode part1]
  source 1..16: mol_type = other DNA
ttctgtagaagtgcgc

SEQ ID NO: 22512 - DNA, 16 bp, synthetic construct
  misc_feature 1..16: note = synthetic [barcode part1]
  source 1..16: mol_type = other DNA
cggtattcaggcagag

SEQ ID NO: 22513 - DNA, 16 bp, synthetic construct
  misc_feature 1..16: note = synthetic [barcode part1]
  source 1..16: mol_type = other DNA
acgttcaattctgtcg

SEQ ID NO: 22514 - DNA, 16 bp, synthetic construct
  misc_feature 1..16: note = synthetic [barcode part1]
  source 1..16: mol_type = other DNA
attccacaggtactct

SEQ ID NO: 22515 - DNA, 16 bp, synthetic construct
  misc_feature 1..16: note = synthetic [barcode part1]
  source 1..16: mol_type = other DNA
cgtgaacacgaactct

SEQ ID NO: 22516 - DNA, 16 bp, synthetic construct
  misc_feature 1..16: note = synthetic [barcode part1]
  source 1..16: mol_type = other DNA
ttgccgtagacctacc

SEQ ID NO: 22517 - DNA, 16 bp, synthetic construct
  misc_feature 1..16: note = synthetic [barcode part1]
  source 1..16: mol_type = other DNA
cctcaacctgagtacc

SEQ ID NO: 22518 - DNA, 16 bp, synthetic construct
  misc_feature 1..16: note = synthetic [barcode part1]
  source 1..16: mol_type = other DNA
gacaccgattgactac

SEQ ID NO: 22519 - DNA, 16 bp, synthetic construct
  misc_feature 1..16: note = synthetic [barcode part1]
  source 1..16: mol_type = other DNA
ttggcctcctgtagac

SEQ ID NO: 22520 - DNA, 16 bp, synthetic construct
  misc_feature 1..16: note = synthetic [barcode part1]
  source 1..16: mol_type = other DNA
tggtgaggtccgtaag

SEQ ID NO: 22521 - DNA, 16 bp, synthetic construct
  misc_feature 1..16: note = synthetic [barcode part1]
  source 1..16: mol_type = other DNA
gagaattgccgtgcag

SEQ ID NO: 22522 - DNA, 16 bp, synthetic construct
  misc_feature 1..16: note = synthetic [barcode part1]
  source 1..16: mol_type = other DNA
gttgttgagtcgtcag

SEQ ID NO: 22523 - DNA, 16 bp, synthetic construct
  misc_feature 1..16: note = synthetic [barcode part1]
  source 1..16: mol_type = other DNA
gcgatatatcgcgatc

SEQ ID NO: 22524 - DNA, 16 bp, synthetic construct
  misc_feature 1..16: note = synthetic [barcode part1]
  source 1..16: mol_type = other DNA
ttagagtgtgacgcct

SEQ ID NO: 22525 - DNA, 16 bp, synthetic construct
  misc_feature 1..16: note = synthetic [barcode part1]
  source 1..16: mol_type = other DNA
cagatcgttcttacgt

SEQ ID NO: 22526 - DNA, 16 bp, synthetic construct
  misc_feature 1..16: note = synthetic [barcode part1]
  source 1..16: mol_type = other DNA
gtcgttcggcacttac

SEQ ID NO: 22527 - DNA, 16 bp, synthetic construct
  misc_feature 1..16: note = synthetic [barcode part1]
  source 1..16: mol_type = other DNA
atagttggccgacgtt

SEQ ID NO: 22528 - DNA, 16 bp, synthetic construct
  misc_feature 1..16: note = synthetic [barcode part1]
  source 1..16: mol_type = other DNA
accactagtcgtcaag

SEQ ID NO: 22529 - DNA, 16 bp, synthetic construct
  misc_feature 1..16: note = synthetic [barcode part1]
  source 1..16: mol_type = other DNA
cgagagtccactgaag

SEQ ID NO: 22530 - DNA, 16 bp, synthetic construct
  misc_feature 1..16: note = synthetic [barcode part1]
  source 1..16: mol_type = other DNA
tctcacgtaactcggc

SEQ ID NO: 22531 - DNA, 16 bp, synthetic construct
  misc_feature 1..16: note = synthetic [barcode part1]
  source 1..16: mol_type = other DNA
gtctctcaatcggaag

SEQ ID NO: 22532 - DNA, 16 bp, synthetic construct
  misc_feature 1..16: note = synthetic [barcode part1]
  source 1..16: mol_type = other DNA
atcacgaacaggtaac

SEQ ID NO: 22533 - DNA, 16 bp, synthetic construct
  misc_feature 1..16: note = synthetic [barcode part1]
  source 1..16: mol_type = other DNA
cactgcggtattacag

SEQ ID NO: 22534 - DNA, 16 bp, synthetic construct
  misc_feature 1..16: note = synthetic [barcode part1]
  source 1..16: mol_type = other DNA
gaacgacttcctagtg

SEQ ID NO: 22535 - DNA, 16 bp, synthetic construct
  misc_feature 1..16: note = synthetic [barcode part1]
  source 1..16: mol_type = other DNA
aatcggtggaaggaac

SEQ ID NO: 22536 - DNA, 16 bp, synthetic construct
  misc_feature 1..16: note = synthetic [barcode part1]
  source 1..16: mol_type = other DNA
acaaccttagaccgtg

SEQ ID NO: 22537 - DNA, 16 bp, synthetic construct
  misc_feature 1..16: note = synthetic [barcode part1]
  source 1..16: mol_type = other DNA
acacacagtcacaacc

SEQ ID NO: 22538 - DNA, 16 bp, synthetic construct
  misc_feature 1..16: note = synthetic [barcode part1]
  source 1..16: mol_type = other DNA
accttactccgcgagt

SEQ ID NO: 22539 - DNA, 16 bp, synthetic construct
  misc_feature 1..16: note = synthetic [barcode part1]
  source 1..16: mol_type = other DNA
gaaggtggcagttcac

SEQ ID NO: 22540 - DNA, 16 bp, synthetic construct
  misc_feature 1..16: note = synthetic [barcode part1]
  source 1..16: mol_type = other DNA
aaccgagttgcgtgag

SEQ ID NO: 22541 - DNA, 16 bp, synthetic construct
  misc_feature 1..16: note = synthetic [barcode part1]
  source 1..16: mol_type = other DNA
tgtgcgatctgatctt

SEQ ID NO: 22542 - DNA, 16 bp, synthetic construct
  misc_feature 1..16: note = synthetic [barcode part1]
  source 1..16: mol_type = other DNA
tgaggaccttgtatcg

SEQ ID NO: 22543 - DNA, 16 bp, synthetic construct
  misc_feature 1..16: note = synthetic [barcode part1]
  source 1..16: mol_type = other DNA
atcaaccactggtcag

SEQ ID NO: 22544 - DNA, 16 bp, synthetic construct
  misc_feature 1..16: note = synthetic [barcode part1]
  source 1..16: mol_type = other DNA
gcgtcgatcttactgc

SEQ ID NO: 22545 - DNA, 16 bp, synthetic construct
  misc_feature 1..16: note = synthetic [barcode part1]
  source 1..16: mol_type = other DNA
actgtgttcgagtgtg

SEQ ID NO: 22546 - DNA, 16 bp, synthetic construct
  misc_feature 1..16: note = synthetic [barcode part1]
  source 1..16: mol_type = other DNA
cactaccgtaattgtc

SEQ ID NO: 22547 - DNA, 16 bp, synthetic construct
  misc_feature 1..16: note = synthetic [barcode part1]
  source 1..16: mol_type = other DNA
tgttctgtcacgaact

SEQ ID NO: 22548 - DNA, 16 bp, synthetic construct
  misc_feature 1..16: note = synthetic [barcode part1]
  source 1..16: mol_type = other DNA
cgcgtctcggactatt

SEQ ID NO: 22549 - DNA, 16 bp, synthetic construct
  misc_feature 1..16: note = synthetic [barcode part1]
  source 1..16: mol_type = other DNA
tagaattggccggttc

SEQ ID NO: 22550 - DNA, 16 bp, synthetic construct
  misc_feature 1..16: note = synthetic [barcode part1]
  source 1..16: mol_type = other DNA
caggtcacctcgtact

SEQ ID NO: 22551 - DNA, 16 bp, synthetic construct
  misc_feature 1..16: note = synthetic [barcode part1]
  source 1..16: mol_type = other DNA
cgttccaactctgttc

SEQ ID NO: 22552 - DNA, 16 bp, synthetic construct
  misc_feature 1..16: note = synthetic [barcode part1]
  source 1..16: mol_type = other DNA
gtcaatccggtgttag

SEQ ID NO: 22553 - DNA, 16 bp, synthetic construct
  misc_feature 1..16: note = synthetic [barcode part1]
  source 1..16: mol_type = other DNA
ttggtgtcctcctgag

SEQ ID NO: 22554 - DNA, 16 bp, synthetic construct
  misc_feature 1..16: note = synthetic [barcode part1]
  source 1..16: mol_type = other DNA
tccagtatccaacgag

SEQ ID NO: 22555 - DNA, 16 bp, synthetic construct
  misc_feature 1..16: note = synthetic [barcode part1]
  source 1..16: mol_type = other DNA
tcgagtgcaagatagt

SEQ ID NO: 22556 - DNA, 16 bp, synthetic construct
  misc_feature 1..16: note = synthetic [barcode part1]
  source 1..16: mol_type = other DNA
tataagtcggaacgac

SEQ ID NO: 22557 - DNA, 16 bp, synthetic construct
  misc_feature 1..16: note = synthetic [barcode part1]
  source 1..16: mol_type = other DNA
gcacctgtgttgtctg

SEQ ID NO: 22558 - DNA, 16 bp, synthetic construct
  misc_feature 1..16: note = synthetic [barcode part1]
  source 1..16: mol_type = other DNA
tcctcgaaccacgtac

SEQ ID NO: 22559 - DNA, 16 bp, synthetic construct
  misc_feature 1..16: note = synthetic [barcode part1]
  source 1..16: mol_type = other DNA
tcgcgttcgagttgtc

SEQ ID NO: 22560 - DNA, 16 bp, synthetic construct
  misc_feature 1..16: note = synthetic [barcode part1]
  source 1..16: mol_type = other DNA
tacctgaagaagtcag

SEQ ID NO: 22561 - DNA, 16 bp, synthetic construct
  misc_feature 1..16: note = synthetic [barcode part1]
  source 1..16: mol_type = other DNA
caagacgacggttgtg

SEQ ID NO: 22562 - DNA, 16 bp, synthetic construct
  misc_feature 1..16: note = synthetic [barcode part1]
  source 1..16: mol_type = other DNA
gtccttaagtggtctt

SEQ ID NO: 22563 - DNA, 16 bp, synthetic construct
  misc_feature 1..16: note = synthetic [barcode part1]
  source 1..16: mol_type = other DNA
caccaatactacgcag

SEQ ID NO: 22564 - DNA, 16 bp, synthetic construct
  misc_feature 1..16: note = synthetic [barcode part1]
  source 1..16: mol_type = other DNA
acctaaccacgttccg

SEQ ID NO: 22565 - DNA, 16 bp, synthetic construct
  misc_feature 1..16: note = synthetic [barcode part1]
  source 1..16: mol_type = other DNA
agatcgtggcacgaac

SEQ ID NO: 22566 - DNA, 16 bp, synthetic construct
  misc_feature 1..16: note = synthetic [barcode part1]
  source 1..16: mol_type = other DNA
actcaaccacactccg

SEQ ID NO: 22567 - DNA, 16 bp, synthetic construct
  misc_feature 1..16: note = synthetic [barcode part1]
  source 1..16: mol_type = other DNA
aaggacaggtacgagt

SEQ ID NO: 22568 - DNA, 16 bp, synthetic construct
  misc_feature 1..16: note = synthetic [barcode part1]
  source 1..16: mol_type = other DNA
accggaaggaattgag

SEQ ID NO: 22569 - DNA, 16 bp, synthetic construct
  misc_feature 1..16: note = synthetic [barcode part1]
  source 1..16: mol_type = other DNA
acggactagaacaact

SEQ ID NO: 22570 - DNA, 16 bp, synthetic construct
  misc_feature 1..16: note = synthetic [barcode part1]
  source 1..16: mol_type = other DNA
tcagacaacgaacctc

SEQ ID NO: 22571 - DNA, 16 bp, synthetic construct
  misc_feature 1..16: note = synthetic [barcode part1]
  source 1..16: mol_type = other DNA
acacgtgaccgtgatt

SEQ ID NO: 22572 - DNA, 16 bp, synthetic construct
  misc_feature 1..16: note = synthetic [barcode part1]
  source 1..16: mol_type = other DNA
caactagatcgatcgc

SEQ ID NO: 22573 - DNA, 16 bp, synthetic construct
  misc_feature 1..16: note = synthetic [barcode part1]
  source 1..16: mol_type = other DNA
aactgtccgttgagtg

SEQ ID NO: 22574 - DNA, 16 bp, synthetic construct
  misc_feature 1..16: note = synthetic [barcode part1]
  source 1..16: mol_type = other DNA
tgtctcggtagtagac

SEQ ID NO: 22575 - DNA, 16 bp, synthetic construct
  misc_feature 1..16: note = synthetic [barcode part1]
  source 1..16: mol_type = other DNA
gaagtctcgttgtgac

SEQ ID NO: 22576 - DNA, 16 bp, synthetic construct
  misc_feature 1..16: note = synthetic [barcode part1]
  source 1..16: mol_type = other DNA
acgacgttcgactagt

SEQ ID NO: 22577 - DNA, 16 bp, synthetic construct
  misc_feature 1..16: note = synthetic [barcode part1]
  source 1..16: mol_type = other DNA
tagacgttggtgaggc

SEQ ID NO: 22578 - DNA, 16 bp, synthetic construct
  misc_feature 1..16: note = synthetic [barcode part1]
  source 1..16: mol_type = other DNA
tataccgtctcagttg

SEQ ID NO: 22579 - DNA, 16 bp, synthetic construct
  misc_feature 1..16: note = synthetic [barcode part1]
  source 1..16: mol_type = other DNA
ccactatcgtccaggt

SEQ ID NO: 22580 - DNA, 16 bp, synthetic construct
  misc_feature 1..16: note = synthetic [barcode part1]
  source 1..16: mol_type = other DNA
gtcgaaggaagaatcg

SEQ ID NO: 22581 - DNA, 16 bp, synthetic construct
  misc_feature 1..16: note = synthetic [barcode part1]
  source 1..16: mol_type = other DNA
gactcagactgagtct

SEQ ID NO: 22582 - DNA, 16 bp, synthetic construct
  misc_feature 1..16: note = synthetic [barcode part1]
  source 1..16: mol_type = other DNA
tgcctaagaagtggcg

SEQ ID NO: 22583 - DNA, 16 bp, synthetic construct
  misc_feature 1..16: note = synthetic [barcode part1]
  source 1..16: mol_type = other DNA
cgttcacaagtcctgc

SEQ ID NO: 22584 - DNA, 16 bp, synthetic construct
  misc_feature 1..16: note = synthetic [barcode part1]
  source 1..16: mol_type = other DNA
gattcgagtgtaagac

SEQ ID NO: 22585 - DNA, 16 bp, synthetic construct
  misc_feature 1..16: note = synthetic [barcode part1]
  source 1..16: mol_type = other DNA
gacgactaacctggtt

SEQ ID NO: 22586 - DNA, 16 bp, synthetic construct
  misc_feature 1..16: note = synthetic [barcode part1]
  source 1..16: mol_type = other DNA
gtgtatcttgtcgttg

SEQ ID NO: 22587 - DNA, 16 bp, synthetic construct
  misc_feature 1..16: note = synthetic [barcode part1]
  source 1..16: mol_type = other DNA
actaagtgtctggcgt

SEQ ID NO: 22588 - DNA, 16 bp, synthetic construct
  misc_feature 1..16: note = synthetic [barcode part1]
  source 1..16: mol_type = other DNA
atcaagtggaccacct

SEQ ID NO: 22589 - DNA, 16 bp, synthetic construct
  misc_feature 1..16: note = synthetic [barcode part1]
  source 1..16: mol_type = other DNA
agataaggataccacc

SEQ ID NO: 22590 - DNA, 16 bp, synthetic construct
  misc_feature 1..16: note = synthetic [barcode part1]
  source 1..16: mol_type = other DNA
tgagactaaccgatcc

SEQ ID NO: 22591 - DNA, 16 bp, synthetic construct
  misc_feature 1..16: note = synthetic [barcode part1]
  source 1..16: mol_type = other DNA
ttgattctgccaacac

SEQ ID NO: 22592 - DNA, 16 bp, synthetic construct
  misc_feature 1..16: note = synthetic [barcode part1]
  source 1..16: mol_type = other DNA
ttatcggtgtaccttg

SEQ ID NO: 22593 - DNA, 16 bp, synthetic construct
  misc_feature 1..16: note = synthetic [barcode part1]
  source 1..16: mol_type = other DNA
gtaatcgacgtaccac

SEQ ID NO: 22594 - DNA, 16 bp, synthetic construct
  misc_feature 1..16: note = synthetic [barcode part1]
  source 1..16: mol_type = other DNA
tatacggtgtcgacac

SEQ ID NO: 22595 - DNA, 16 bp, synthetic construct
  misc_feature 1..16: note = synthetic [barcode part1]
  source 1..16: mol_type = other DNA
aggacagttgtcttgc

SEQ ID NO: 22596 - DNA, 16 bp, synthetic construct
  misc_feature 1..16: note = synthetic [barcode part1]
  source 1..16: mol_type = other DNA
cgacacaagaagttgt

SEQ ID NO: 22597 - DNA, 16 bp, synthetic construct
  misc_feature 1..16: note = synthetic [barcode part1]
  source 1..16: mol_type = other DNA
attaccggaagtacag

SEQ ID NO: 22598 - DNA, 16 bp, synthetic construct
  misc_feature 1..16: note = synthetic [barcode part1]
  source 1..16: mol_type = other DNA
gcaaggtgcaatagag

SEQ ID NO: 22599 - DNA, 16 bp, synthetic construct
  misc_feature 1..16: note = synthetic [barcode part1]
  source 1..16: mol_type = other DNA
cgaacgttataggcct

SEQ ID NO: 22600 - DNA, 16 bp, synthetic construct
  misc_feature 1..16: note = synthetic [barcode part1]
  source 1..16: mol_type = other DNA
ataagaggcgtccttc

SEQ ID NO: 22601 - DNA, 16 bp, synthetic construct
  misc_feature 1..16: note = synthetic [barcode part1]
  source 1..16: mol_type = other DNA
tgagtctgtaacagag

SEQ ID NO: 22602 - DNA, 16 bp, synthetic construct
  misc_feature 1..16: note = synthetic [barcode part1]
  source 1..16: mol_type = other DNA
ccttcgacagtacgtc

SEQ ID NO: 22603 - DNA, 16 bp, synthetic construct
  misc_feature 1..16: note = synthetic [barcode part1]
  source 1..16: mol_type = other DNA
gtaatacgcgtcacgt

SEQ ID NO: 22604 - DNA, 16 bp, synthetic construct
  misc_feature 1..16: note = synthetic [barcode part1]
  source 1..16: mol_type = other DNA
aatcggcgtgtgtact

SEQ ID NO: 22605 - DNA, 16 bp, synthetic construct
  misc_feature 1..16: note = synthetic [barcode part1]
  source 1..16: mol_type = other DNA
atctacgagaacagtg

SEQ ID NO: 22606 - DNA, 16 bp, synthetic construct
  misc_feature 1..16: note = synthetic [barcode part1]
  source 1..16: mol_type = other DNA
tgacacgtacaccagt

SEQ ID NO: 22607 - DNA, 16 bp, synthetic construct
  misc_feature 1..16: note = synthetic [barcode part1]
  source 1..16: mol_type = other DNA
ttgatagtctggcggt

SEQ ID NO: 22608 - DNA, 16 bp, synthetic construct
  misc_feature 1..16: note = synthetic [barcode part1]
  source 1..16: mol_type = other DNA
tccttcgaagtacttg

SEQ ID NO: 22609 - DNA, 16 bp, synthetic construct
  misc_feature 1..16: note = synthetic [barcode part1]
  source 1..16: mol_type = other DNA
tatccagtggccttcg

SEQ ID NO: 22610 - DNA, 16 bp, synthetic construct
  misc_feature 1..16: note = synthetic [barcode part1]
  source 1..16: mol_type = other DNA
ccttcggatcacacgt

SEQ ID NO: 22611 - DNA, 16 bp, synthetic construct
  misc_feature 1..16: note = synthetic [barcode part1]
  source 1..16: mol_type = other DNA
tgccttcaacttaacg

SEQ ID NO: 22612 - DNA, 16 bp, synthetic construct
  misc_feature 1..16: note = synthetic [barcode part1]
  source 1..16: mol_type = other DNA
gacggttgtgtcctct

SEQ ID NO: 22613 - DNA, 16 bp, synthetic construct
  misc_feature 1..16: note = synthetic [barcode part1]
  source 1..16: mol_type = other DNA
attcacctgttcgcct

SEQ ID NO: 22614 - DNA, 16 bp, synthetic construct
  misc_feature 1..16: note = synthetic [barcode part1]
  source 1..16: mol_type = other DNA
tggttggacgttacgt

SEQ ID NO: 22615 - DNA, 16 bp, synthetic construct
  misc_feature 1..16: note = synthetic [barcode part1]
  source 1..16: mol_type = other DNA
actcctaacaacctgt

SEQ ID NO: 22616 - DNA, 16 bp, synthetic construct
  misc_feature 1..16: note = synthetic [barcode part1]
  source 1..16: mol_type = other DNA
aactgtgcaacgtgtc

SEQ ID NO: 22617 - DNA, 16 bp, synthetic construct
  misc_feature 1..16: note = synthetic [barcode part1]
  source 1..16: mol_type = other DNA
gtgtcaatcctaccgc

SEQ ID NO: 22618 - DNA, 16 bp, synthetic construct
  misc_feature 1..16: note = synthetic [barcode part1]
  source 1..16: mol_type = other DNA
cctcctctaatcagtc

SEQ ID NO: 22619 - DNA, 16 bp, synthetic construct
  misc_feature 1..16: note = synthetic [barcode part1]
  source 1..16: mol_type = other DNA
agacgcagtcgagttg

SEQ ID NO: 22620 - DNA, 16 bp, synthetic construct
  misc_feature 1..16: note = synthetic [barcode part1]
  source 1..16: mol_type = other DNA
gacttacgagtggcag

SEQ ID NO: 22621 - DNA, 16 bp, synthetic construct
  misc_feature 1..16: note = synthetic [barcode part1]
  source 1..16: mol_type = other DNA
cgagtgtactgcctct

SEQ ID NO: 22622 - DNA, 16 bp, synthetic construct
  misc_feature 1..16: note = synthetic [barcode part1]
  source 1..16: mol_type = other DNA
gtcacaaggactctac

SEQ ID NO: 22623 - DNA, 16 bp, synthetic construct
  misc_feature 1..16: note = synthetic [barcode part1]
  source 1..16: mol_type = other DNA
agtgactatcgttggc

SEQ ID NO: 22624 - DNA, 16 bp, synthetic construct
  misc_feature 1..16: note = synthetic [barcode part1]
  source 1..16: mol_type = other DNA
gatcttcaggagtcgt

SEQ ID NO: 22625 - DNA, 16 bp, synthetic construct
  misc_feature 1..16: note = synthetic [barcode part1]
  source 1..16: mol_type = other DNA
tctggagtggtcaact

SEQ ID NO: 22626 - DNA, 16 bp, synthetic construct
  misc_feature 1..16: note = synthetic [barcode part1]
  source 1..16: mol_type = other DNA
gtgtactgacacgttg

SEQ ID NO: 22627 - DNA, 16 bp, synthetic construct
  misc_feature 1..16: note = synthetic [barcode part1]
  source 1..16: mol_type = other DNA
ttcggagagtcctagt

SEQ ID NO: 22628 - DNA, 16 bp, synthetic construct
  misc_feature 1..16: note = synthetic [barcode part1]
  source 1..16: mol_type = other DNA
gtagatcgatcgtacc

SEQ ID NO: 22629 - DNA, 16 bp, synthetic construct
  misc_feature 1..16: note = synthetic [barcode part1]
  source 1..16: mol_type = other DNA
cctagttgcactaact

SEQ ID NO: 22630 - DNA, 16 bp, synthetic construct
  misc_feature 1..16: note = synthetic [barcode part1]
  source 1..16: mol_type = other DNA
cgcggcagaataggtt

SEQ ID NO: 22631 - DNA, 16 bp, synthetic construct
  misc_feature 1..16: note = synthetic [barcode part1]
  source 1..16: mol_type = other DNA
tgtctcctcttcgtag

SEQ ID NO: 22632 - DNA, 16 bp, synthetic construct
  misc_feature 1..16: note = synthetic [barcode part1]
  source 1..16: mol_type = other DNA
acctgatcgacgattg

SEQ ID NO: 22633 - DNA, 16 bp, synthetic construct
  misc_feature 1..16: note = synthetic [barcode part1]
  source 1..16: mol_type = other DNA
ttgtcgagtacagaag

SEQ ID NO: 22634 - DNA, 16 bp, synthetic construct
  misc_feature 1..16: note = synthetic [barcode part1]
  source 1..16: mol_type = other DNA
ataggaagaccgtcgc

SEQ ID NO: 22635 - DNA, 16 bp, synthetic construct
  misc_feature 1..16: note = synthetic [barcode part1]
  source 1..16: mol_type = other DNA
tagacggcctacttag

SEQ ID NO: 22636 - DNA, 16 bp, synthetic construct
  misc_feature 1..16: note = synthetic [barcode part1]
  source 1..16: mol_type = other DNA
gagtgtgtaataaccg

SEQ ID NO: 22637 - DNA, 16 bp, synthetic construct
  misc_feature 1..16: note = synthetic [barcode part1]
  source 1..16: mol_type = other DNA
agtccttctggatact

SEQ ID NO: 22638 - DNA, 16 bp, synthetic construct
  misc_feature 1..16: note = synthetic [barcode part1]
  source 1..16: mol_type = other DNA
gcgttgcagatcttag

SEQ ID NO: 22639 - DNA, 16 bp, synthetic construct
  misc_feature 1..16: note = synthetic [barcode part1]
  source 1..16: mol_type = other DNA
ttgccaagtgttcttg

SEQ ID NO: 22640 - DNA, 16 bp, synthetic construct
  misc_feature 1..16: note = synthetic [barcode part1]
  source 1..16: mol_type = other DNA
tctgaccttgactctc

SEQ ID NO: 22641 - DNA, 16 bp, synthetic construct
  misc_feature 1..16: note = synthetic [barcode part1]
  source 1..16: mol_type = other DNA
acagtacctgagatcc

SEQ ID NO: 22642 - DNA, 16 bp, synthetic construct
  misc_feature 1..16: note = synthetic [barcode part1]
  source 1..16: mol_type = other DNA
ataagttgaaggccac

SEQ ID NO: 22643 - DNA, 16 bp, synthetic construct
  misc_feature 1..16: note = synthetic [barcode part1]
  source 1..16: mol_type = other DNA
taacctcctgaggagt

SEQ ID NO: 22644 - DNA, 16 bp, synthetic construct
  misc_feature 1..16: note = synthetic [barcode part1]
  source 1..16: mol_type = other DNA
agttagtcacgtgcgt

SEQ ID NO: 22645 - DNA, 16 bp, synthetic construct
  misc_feature 1..16: note = synthetic [barcode part1]
  source 1..16: mol_type = other DNA
ccgtctatctaaggcc

SEQ ID NO: 22646 - DNA, 16 bp, synthetic construct
  misc_feature 1..16: note = synthetic [barcode part1]
  source 1..16: mol_type = other DNA
aggtggttcagtgcag

SEQ ID NO: 22647 - DNA, 16 bp, synthetic construct
  misc_feature 1..16: note = synthetic [barcode part1]
  source 1..16: mol_type = other DNA
aacggttacgtagaac

SEQ ID NO: 22648 - DNA, 16 bp, synthetic construct
  misc_feature 1..16: note = synthetic [barcode part1]
  source 1..16: mol_type = other DNA
agaacggttcgaatac

SEQ ID NO: 22649 - DNA, 16 bp, synthetic construct
  misc_feature 1..16: note = synthetic [barcode part1]
  source 1..16: mol_type = other DNA
attgagagtatcgacg

SEQ ID NO: 22650 - DNA, 16 bp, synthetic construct
  misc_feature 1..16: note = synthetic [barcode part1]
  source 1..16: mol_type = other DNA
acctctcaccgtgtag

SEQ ID NO: 22651 - DNA, 16 bp, synthetic construct
  misc_feature 1..16: note = synthetic [barcode part1]
  source 1..16: mol_type = other DNA
tgaaccttctgccacg

SEQ ID NO: 22652 - DNA, 16 bp, synthetic construct
  misc_feature 1..16: note = synthetic [barcode part1]
  source 1..16: mol_type = other DNA
gatccaggtatctctt

SEQ ID NO: 22653 - DNA, 16 bp, synthetic construct
  misc_feature 1..16: note = synthetic [barcode part1]
  source 1..16: mol_type = other DNA
tgtgcctgcaacctac

SEQ ID NO: 22654 - DNA, 16 bp, synthetic construct
  misc_feature 1..16: note = synthetic [barcode part1]
  source 1..16: mol_type = other DNA
acgttcttgcagaggt

SEQ ID NO: 22655 - DNA, 16 bp, synthetic construct
  misc_feature 1..16: note = synthetic [barcode part1]
  source 1..16: mol_type = other DNA
agtgtgtcaacgtgtc

SEQ ID NO: 22656 - DNA, 16 bp, synthetic construct
  misc_feature 1..16: note = synthetic [barcode part1]
  source 1..16: mol_type = other DNA
gaattgatcggttccg

SEQ ID NO: 22657 - DNA, 16 bp, synthetic construct
  misc_feature 1..16: note = synthetic [barcode part1]
  source 1..16: mol_type = other DNA
aagtaagacggtatcc

SEQ ID NO: 22658 - DNA, 16 bp, synthetic construct
  misc_feature 1..16: note = synthetic [barcode part1]
  source 1..16: mol_type = other DNA
gatcgtatcagttctc

SEQ ID NO: 22659 - DNA, 16 bp, synthetic construct
  misc_feature 1..16: note = synthetic [barcode part1]
  source 1..16: mol_type = other DNA
tgcctgtacggataac

SEQ ID NO: 22660 - DNA, 16 bp, synthetic construct
  misc_feature 1..16: note = synthetic [barcode part1]
  source 1..16: mol_type = other DNA
gttggcctatagtacg

SEQ ID NO: 22661 - DNA, 16 bp, synthetic construct
  misc_feature 1..16: note = synthetic [barcode part1]
  source 1..16: mol_type = other DNA
gccagatcactctcgt

SEQ ID NO: 22662 - DNA, 16 bp, synthetic construct
  misc_feature 1..16: note = synthetic [barcode part1]
  source 1..16: mol_type = other DNA
tagacgcaaggaccgt

SEQ ID NO: 22663 - DNA, 16 bp, synthetic construct
  misc_feature 1..16: note = synthetic [barcode part1]
  source 1..16: mol_type = other DNA
actgtccacgagttcc

SEQ ID NO: 22664 - DNA, 16 bp, synthetic construct
  misc_feature 1..16: note = synthetic [barcode part1]
  source 1..16: mol_type = other DNA
ccaatagatccggtac

SEQ ID NO: 22665 - DNA, 16 bp, synthetic construct
  misc_feature 1..16: note = synthetic [barcode part1]
  source 1..16: mol_type = other DNA
cgagtgcgttatcctc

SEQ ID NO: 22666 - DNA, 16 bp, synthetic construct
  misc_feature 1..16: note = synthetic [barcode part1]
  source 1..16: mol_type = other DNA
cacttacctcgttcgt

SEQ ID NO: 22667 - DNA, 16 bp, synthetic construct
  misc_feature 1..16: note = synthetic [barcode part1]
  source 1..16: mol_type = other DNA
gcactggactacttcc

SEQ ID NO: 22668 - DNA, 16 bp, synthetic construct
  misc_feature 1..16: note = synthetic [barcode part1]
  source 1..16: mol_type = other DNA
tcagttgagtctcgag

SEQ ID NO: 22669 - DNA, 16 bp, synthetic construct
  misc_feature 1..16: note = synthetic [barcode part1]
  source 1..16: mol_type = other DNA
attgtggaggcggatc

SEQ ID NO: 22670 - DNA, 16 bp, synthetic construct
  misc_feature 1..16: note = synthetic [barcode part1]
  source 1..16: mol_type = other DNA
agaatcagattacgcg

SEQ ID NO: 22671 - DNA, 16 bp, synthetic construct
  misc_feature 1..16: note = synthetic [barcode part1]
  source 1..16: mol_type = other DNA
gcaactgtgactgtgt

SEQ ID NO: 22672 - DNA, 16 bp, synthetic construct
  misc_feature 1..16: note = synthetic [barcode part1]
  source 1..16: mol_type = other DNA
tacacagacagagtac

SEQ ID NO: 22673 - DNA, 16 bp, synthetic construct
  misc_feature 1..16: note = synthetic [barcode part1]
  source 1..16: mol_type = other DNA
actgcaacctgcctac

SEQ ID NO: 22674 - DNA, 16 bp, synthetic construct
  misc_feature 1..16: note = synthetic [barcode part1]
  source 1..16: mol_type = other DNA
gaactgtactcaacgc

SEQ ID NO: 22675 - DNA, 16 bp, synthetic construct
  misc_feature 1..16: note = synthetic [barcode part1]
  source 1..16: mol_type = other DNA
ttattcgcggacgaac

SEQ ID NO: 22676 - DNA, 16 bp, synthetic construct
  misc_feature 1..16: note = synthetic [barcode part1]
  source 1..16: mol_type = other DNA
ccaagatctacggtac

SEQ ID NO: 22677 - DNA, 16 bp, synthetic construct
  misc_feature 1..16: note = synthetic [barcode part1]
  source 1..16: mol_type = other DNA
cacctgttgtctgttc

SEQ ID NO: 22678 - DNA, 16 bp, synthetic construct
  misc_feature 1..16: note = synthetic [barcode part1]
  source 1..16: mol_type = other DNA
aggaagtggcacacct

SEQ ID NO: 22679 - DNA, 16 bp, synthetic construct
  misc_feature 1..16: note = synthetic [barcode part1]
  source 1..16: mol_type = other DNA
tctattgccgatacac

SEQ ID NO: 22680 - DNA, 16 bp, synthetic construct
  misc_feature 1..16: note = synthetic [barcode part1]
  source 1..16: mol_type = other DNA
caattccagagtcggt

SEQ ID NO: 22681 - DNA, 16 bp, synthetic construct
  misc_feature 1..16: note = synthetic [barcode part1]
  source 1..16: mol_type = other DNA
gtcagattgtcgaacc

SEQ ID NO: 22682 - DNA, 16 bp, synthetic construct
  misc_feature 1..16: note = synthetic [barcode part1]
  source 1..16: mol_type = other DNA
actagtcgactgactg

SEQ ID NO: 22683 - DNA, 16 bp, synthetic construct
  misc_feature 1..16: note = synthetic [barcode part1]
  source 1..16: mol_type = other DNA
tcggcaattacgtctt

SEQ ID NO: 22684 - DNA, 16 bp, synthetic construct
  misc_feature 1..16: note = synthetic [barcode part1]
  source 1..16: mol_type = other DNA
tcactgaagtctgacg

SEQ ID NO: 22685 - DNA, 16 bp, synthetic construct
  misc_feature 1..16: note = synthetic [barcode part1]
  source 1..16: mol_type = other DNA
accttcgtcgttggac

SEQ ID NO: 22686 - DNA, 16 bp, synthetic construct
  misc_feature 1..16: note = synthetic [barcode part1]
  source 1..16: mol_type = other DNA
gtctagtgtattcctg

SEQ ID NO: 22687 - DNA, 16 bp, synthetic construct
  misc_feature 1..16: note = synthetic [barcode part1]
  source 1..16: mol_type = other DNA
cgcgacttaatctccg

SEQ ID NO: 22688 - DNA, 16 bp, synthetic construct
  misc_feature 1..16: note = synthetic [barcode part1]
  source 1..16: mol_type = other DNA
tctgagagaccaatcc

SEQ ID NO: 22689 - DNA, 16 bp, synthetic construct
  misc_feature 1..16: note = synthetic [barcode part1]
  source 1..16: mol_type = other DNA
aggtactcaaggcgac

SEQ ID NO: 22690 - DNA, 16 bp, synthetic construct
  misc_feature 1..16: note = synthetic [barcode part1]
  source 1..16: mol_type = other DNA
tcgtattacggtctac

SEQ ID NO: 22691 - DNA, 16 bp, synthetic construct
  misc_feature 1..16: note = synthetic [barcode part1]
  source 1..16: mol_type = other DNA
gaggttggactgtacg

SEQ ID NO: 22692 - DNA, 16 bp, synthetic construct
  misc_feature 1..16: note = synthetic [barcode part1]
  source 1..16: mol_type = other DNA
tatcgaggcagttcac

SEQ ID NO: 22693 - DNA, 16 bp, synthetic construct
  misc_feature 1..16: note = synthetic [barcode part1]
  source 1..16: mol_type = other DNA
taagtgcaggacaatc

SEQ ID NO: 22694 - DNA, 16 bp, synthetic construct
  misc_feature 1..16: note = synthetic [barcode part1]
  source 1..16: mol_type = other DNA
aactgactgcaacacc

SEQ ID NO: 22695 - DNA, 16 bp, synthetic construct
  misc_feature 1..16: note = synthetic [barcode part1]
  source 1..16: mol_type = other DNA
tcgccttccagtacag

SEQ ID NO: 22696 - DNA, 16 bp, synthetic construct
  misc_feature 1..16: note = synthetic [barcode part1]
  source 1..16: mol_type = other DNA
atccgagatcctactt

SEQ ID NO: 22697 - DNA, 16 bp, synthetic construct
  misc_feature 1..16: note = synthetic [barcode part1]
  source 1..16: mol_type = other DNA
cgtgtagtatctcact

SEQ ID NO: 22698 - DNA, 16 bp, synthetic construct
  misc_feature 1..16: note = synthetic [barcode part1]
  source 1..16: mol_type = other DNA
tgtaccaactgtgcag

SEQ ID NO: 22699 - DNA, 16 bp, synthetic construct
  misc_feature 1..16: note = synthetic [barcode part1]
  source 1..16: mol_type = other DNA
acgtcggttagtgtac

SEQ ID NO: 22700 - DNA, 16 bp, synthetic construct
  misc_feature 1..16: note = synthetic [barcode part1]
  source 1..16: mol_type = other DNA
gcctgagatctgtaac

SEQ ID NO: 22701 - DNA, 16 bp, synthetic construct
  misc_feature 1..16: note = synthetic [barcode part1]
  source 1..16: mol_type = other DNA
tgaactggccgaattc

SEQ ID NO: 22702 - DNA, 16 bp, synthetic construct
  misc_feature 1..16: note = synthetic [barcode part1]
  source 1..16: mol_type = other DNA
atacgaccgacgtatc

SEQ ID NO: 22703 - DNA, 16 bp, synthetic construct
  misc_feature 1..16: note = synthetic [barcode part1]
  source 1..16: mol_type = other DNA
tagtggccaatctggt

SEQ ID NO: 22704 - DNA, 16 bp, synthetic construct
  misc_feature 1..16: note = synthetic [barcode part1]
  source 1..16: mol_type = other DNA
gattacgcctcaattc

SEQ ID NO: 22705 - DNA, 16 bp, synthetic construct
  misc_feature 1..16: note = synthetic [barcode part1]
  source 1..16: mol_type = other DNA
cactacctagaggatc

SEQ ID NO: 22706 - DNA, 16 bp, synthetic construct
  misc_feature 1..16: note = synthetic [barcode part1]
  source 1..16: mol_type = other DNA
ccgattactaggatcg

SEQ ID NO: 22707 - DNA, 16 bp, synthetic construct
  misc_feature 1..16: note = synthetic [barcode part1]
  source 1..16: mol_type = other DNA
ccgattaacgtacacg

SEQ ID NO: 22708 - DNA, 16 bp, synthetic construct
  misc_feature 1..16: note = synthetic [barcode part1]
  source 1..16: mol_type = other DNA
aactgtctcgtacttg

SEQ ID NO: 22709 - DNA, 16 bp, synthetic construct
  misc_feature 1..16: note = synthetic [barcode part1]
  source 1..16: mol_type = other DNA
atacggcggagttggt

SEQ ID NO: 22710 - DNA, 16 bp, synthetic construct
  misc_feature 1..16: note = synthetic [barcode part1]
  source 1..16: mol_type = other DNA
atctcttactggtacg

SEQ ID NO: 22711 - DNA, 16 bp, synthetic construct
  misc_feature 1..16: note = synthetic [barcode part1]
  source 1..16: mol_type = other DNA
actagaacgcgcagtg

SEQ ID NO: 22712 - DNA, 16 bp, synthetic construct
  misc_feature 1..16: note = synthetic [barcode part1]
  source 1..16: mol_type = other DNA
ataggagactgaacct

SEQ ID NO: 22713 - DNA, 16 bp, synthetic construct
  misc_feature 1..16: note = synthetic [barcode part1]
  source 1..16: mol_type = other DNA
gtactctgtgcagagt

SEQ ID NO: 22714 - DNA, 16 bp, synthetic construct
  misc_feature 1..16: note = synthetic [barcode part1]
  source 1..16: mol_type = other DNA
gttcctctgtgtggtg

SEQ ID NO: 22715 - DNA, 16 bp, synthetic construct
  misc_feature 1..16: note = synthetic [barcode part1]
  source 1..16: mol_type = other DNA
atctcgaacgtacacg

SEQ ID NO: 22716 - DNA, 16 bp, synthetic construct
  misc_feature 1..16: note = synthetic [barcode part1]
  source 1..16: mol_type = other DNA
ttcggtaccacacctg

SEQ ID NO: 22717 - DNA, 16 bp, synthetic construct
  misc_feature 1..16: note = synthetic [barcode part1]
  source 1..16: mol_type = other DNA
gacctctagagtagtc

SEQ ID NO: 22718 - DNA, 16 bp, synthetic construct
  misc_feature 1..16: note = synthetic [barcode part1]
  source 1..16: mol_type = other DNA
cgccgattacgattag

SEQ ID NO: 22719 - DNA, 16 bp, synthetic construct
  misc_feature 1..16: note = synthetic [barcode part1]
  source 1..16: mol_type = other DNA
aatcagaagtggcgag

SEQ ID NO: 22720 - DNA, 16 bp, synthetic construct
  misc_feature 1..16: note = synthetic [barcode part1]
  source 1..16: mol_type = other DNA
gttaacgacgactacc

SEQ ID NO: 22721 - DNA, 16 bp, synthetic construct
  misc_feature 1..16: note = synthetic [barcode part1]
  source 1..16: mol_type = other DNA
tgtggcagtaacacct

SEQ ID NO: 22722 - DNA, 16 bp, synthetic construct
  misc_feature 1..16: note = synthetic [barcode part1]
  source 1..16: mol_type = other DNA
agataggtgagactct

SEQ ID NO: 22723 - DNA, 16 bp, synthetic construct
  misc_feature 1..16: note = synthetic [barcode part1]
  source 1..16: mol_type = other DNA
aaccacgagagttagt

SEQ ID NO: 22724 - DNA, 16 bp, synthetic construct
  misc_feature 1..16: note = synthetic [barcode part1]
  source 1..16: mol_type = other DNA
ttcgcacactactggc

SEQ ID NO: 22725 - DNA, 16 bp, synthetic construct
  misc_feature 1..16: note = synthetic [barcode part1]
  source 1..16: mol_type = other DNA
acacggagttcttgtg

SEQ ID NO: 22726 - DNA, 16 bp, synthetic construct
  misc_feature 1..16: note = synthetic [barcode part1]
  source 1..16: mol_type = other DNA
ttagtgcgacctcctg

SEQ ID NO: 22727 - DNA, 16 bp, synthetic construct
  misc_feature 1..16: note = synthetic [barcode part1]
  source 1..16: mol_type = other DNA
gtggtagacgaagtag

SEQ ID NO: 22728 - DNA, 16 bp, synthetic construct
  misc_feature 1..16: note = synthetic [barcode part1]
  source 1..16: mol_type = other DNA
gtctcctgtcgatacg

SEQ ID NO: 22729 - DNA, 16 bp, synthetic construct
  misc_feature 1..16: note = synthetic [barcode part1]
  source 1..16: mol_type = other DNA
agttatacgcgcaacc

SEQ ID NO: 22730 - DNA, 16 bp, synthetic construct
  misc_feature 1..16: note = synthetic [barcode part1]
  source 1..16: mol_type = other DNA
agtcgaggtctagacg

SEQ ID NO: 22731 - DNA, 16 bp, synthetic construct
  misc_feature 1..16: note = synthetic [barcode part1]
  source 1..16: mol_type = other DNA
gtgattgattggcacc

SEQ ID NO: 22732 - DNA, 16 bp, synthetic construct
  misc_feature 1..16: note = synthetic [barcode part1]
  source 1..16: mol_type = other DNA
agtatagaggccaccg

SEQ ID NO: 22733 - DNA, 16 bp, synthetic construct
  misc_feature 1..16: note = synthetic [barcode part1]
  source 1..16: mol_type = other DNA
tctccaggttagtgcc

SEQ ID NO: 22734 - DNA, 16 bp, synthetic construct
  misc_feature 1..16: note = synthetic [barcode part1]
  source 1..16: mol_type = other DNA
acttcgcggcgtattc

SEQ ID NO: 22735 - DNA, 16 bp, synthetic construct
  misc_feature 1..16: note = synthetic [barcode part1]
  source 1..16: mol_type = other DNA
aatctaacgactcggc

SEQ ID NO: 22736 - DNA, 16 bp, synthetic construct
  misc_feature 1..16: note = synthetic [barcode part1]
  source 1..16: mol_type = other DNA
acaacacctgagactc

SEQ ID NO: 22737 - DNA, 16 bp, synthetic construct
  misc_feature 1..16: note = synthetic [barcode part1]
  source 1..16: mol_type = other DNA
tatagttgagacggtg

SEQ ID NO: 22738 - DNA, 16 bp, synthetic construct
  misc_feature 1..16: note = synthetic [barcode part1]
  source 1..16: mol_type = other DNA
actcctaaggcgtagt

SEQ ID NO: 22739 - DNA, 16 bp, synthetic construct
  misc_feature 1..16: note = synthetic [barcode part1]
  source 1..16: mol_type = other DNA
ttggtagaatacggac

SEQ ID NO: 22740 - DNA, 16 bp, synthetic construct
  misc_feature 1..16: note = synthetic [barcode part1]
  source 1..16: mol_type = other DNA
ttgatctccgtgcgac

SEQ ID NO: 22741 - DNA, 16 bp, synthetic construct
  misc_feature 1..16: note = synthetic [barcode part1]
  source 1..16: mol_type = other DNA
gttagtccacaacgtg

SEQ ID NO: 22742 - DNA, 16 bp, synthetic construct
  misc_feature 1..16: note = synthetic [barcode part1]
  source 1..16: mol_type = other DNA
gacgaagttgagtgcc

SEQ ID NO: 22743 - DNA, 16 bp, synthetic construct
  misc_feature 1..16: note = synthetic [barcode part1]
  source 1..16: mol_type = other DNA
gacactagttacggtc

SEQ ID NO: 22744 - DNA, 16 bp, synthetic construct
  misc_feature 1..16: note = synthetic [barcode part1]
  source 1..16: mol_type = other DNA
gtgatcgatcgacact

SEQ ID NO: 22745 - DNA, 16 bp, synthetic construct
  misc_feature 1..16: note = synthetic [barcode part1]
  source 1..16: mol_type = other DNA
cactctgactctgttc

SEQ ID NO: 22746 - DNA, 16 bp, synthetic construct
  misc_feature 1..16: note = synthetic [barcode part1]
  source 1..16: mol_type = other DNA
gccgtacttcttgacg

SEQ ID NO: 22747 - DNA, 16 bp, synthetic construct
  misc_feature 1..16: note = synthetic [barcode part1]
  source 1..16: mol_type = other DNA
tacagaaccggattag

SEQ ID NO: 22748 - DNA, 16 bp, synthetic construct
  misc_feature 1..16: note = synthetic [barcode part1]
  source 1..16: mol_type = other DNA
cctaccaacactcgac

SEQ ID NO: 22749 - DNA, 16 bp, synthetic construct
  misc_feature 1..16: note = synthetic [barcode part1]
  source 1..16: mol_type = other DNA
agtgttcttcgattcg

SEQ ID NO: 22750 - DNA, 16 bp, synthetic construct
  misc_feature 1..16: note = synthetic [barcode part1]
  source 1..16: mol_type = other DNA
gtgatatccggagtct

SEQ ID NO: 22751 - DNA, 16 bp, synthetic construct
  misc_feature 1..16: note = synthetic [barcode part1]
  source 1..16: mol_type = other DNA
ccgtgtcttcggtagt

SEQ ID NO: 22752 - DNA, 16 bp, synthetic construct
  misc_feature 1..16: note = synthetic [barcode part1]
  source 1..16: mol_type = other DNA
gttacggcggataggt

SEQ ID NO: 22753 - DNA, 16 bp, synthetic construct
  misc_feature 1..16: note = synthetic [barcode part1]
  source 1..16: mol_type = other DNA
cgagtcctctactgtg

SEQ ID NO: 22754 - DNA, 16 bp, synthetic construct
  misc_feature 1..16: note = synthetic [barcode part1]
  source 1..16: mol_type = other DNA
ttcacaggaacaacag

SEQ ID NO: 22755 - DNA, 16 bp, synthetic construct
  misc_feature 1..16: note = synthetic [barcode part1]
  source 1..16: mol_type = other DNA
ccttgtcgtcttactg

SEQ ID NO: 22756 - DNA, 16 bp, synthetic construct
  misc_feature 1..16: note = synthetic [barcode part1]
  source 1..16: mol_type = other DNA
ttcctatctgccggag

SEQ ID NO: 22757 - DNA, 16 bp, synthetic construct
  misc_feature 1..16: note = synthetic [barcode part1]
  source 1..16: mol_type = other DNA
tggaatcctggtcaac

SEQ ID NO: 22758 - DNA, 16 bp, synthetic construct
  misc_feature 1..16: note = synthetic [barcode part1]
  source 1..16: mol_type = other DNA
cagacgactcgaagtg

SEQ ID NO: 22759 - DNA, 16 bp, synthetic construct
  misc_feature 1..16: note = synthetic [barcode part1]
  source 1..16: mol_type = other DNA
aggcgcgtcagattag

SEQ ID NO: 22760 - DNA, 16 bp, synthetic construct
  misc_feature 1..16: note = synthetic [barcode part1]
  source 1..16: mol_type = other DNA
tctcaaggtagtgtcg

SEQ ID NO: 22761 - DNA, 16 bp, synthetic construct
  misc_feature 1..16: note = synthetic [barcode part1]
  source 1..16: mol_type = other DNA
acgagtcacacttggt

SEQ ID NO: 22762 - DNA, 16 bp, synthetic construct
  misc_feature 1..16: note = synthetic [barcode part1]
  source 1..16: mol_type = other DNA
caaggttgaggtcttc

SEQ ID NO: 22763 - DNA, 16 bp, synthetic construct
  misc_feature 1..16: note = synthetic [barcode part1]
  source 1..16: mol_type = other DNA
gagaggttaggtccac

SEQ ID NO: 22764 - DNA, 16 bp, synthetic construct
  misc_feature 1..16: note = synthetic [barcode part1]
  source 1..16: mol_type = other DNA
gaagacctcctagttg

SEQ ID NO: 22765 - DNA, 16 bp, synthetic construct
  misc_feature 1..16: note = synthetic [barcode part1]
  source 1..16: mol_type = other DNA
gatctgactcctgtgc

SEQ ID NO: 22766 - DNA, 16 bp, synthetic construct
  misc_feature 1..16: note = synthetic [barcode part1]
  source 1..16: mol_type = other DNA
tgcggaatacaggaag

SEQ ID NO: 22767 - DNA, 16 bp, synthetic construct
  misc_feature 1..16: note = synthetic [barcode part1]
  source 1..16: mol_type = other DNA
gtgattgtctcagttc

SEQ ID NO: 22768 - DNA, 16 bp, synthetic construct
  misc_feature 1..16: note = synthetic [barcode part1]
  source 1..16: mol_type = other DNA
tgaccaaggttagtcc

SEQ ID NO: 22769 - DNA, 16 bp, synthetic construct
  misc_feature 1..16: note = synthetic [barcode part1]
  source 1..16: mol_type = other DNA
tcagtgacaccttcgc

SEQ ID NO: 22770 - DNA, 16 bp, synthetic construct
  misc_feature 1..16: note = synthetic [barcode part1]
  source 1..16: mol_type = other DNA
tcctgtcgtggacttg

SEQ ID NO: 22771 - DNA, 16 bp, synthetic construct
  misc_feature 1..16: note = synthetic [barcode part1]
  source 1..16: mol_type = other DNA
gaccacgcaatatacc

SEQ ID NO: 22772 - DNA, 16 bp, synthetic construct
  misc_feature 1..16: note = synthetic [barcode part1]
  source 1..16: mol_type = other DNA
gccaccttcacagact

SEQ ID NO: 22773 - DNA, 16 bp, synthetic construct
  misc_feature 1..16: note = synthetic [barcode part1]
  source 1..16: mol_type = other DNA
ttactgtaagtggcgc

SEQ ID NO: 22774 - DNA, 16 bp, synthetic construct
  misc_feature 1..16: note = synthetic [barcode part1]
  source 1..16: mol_type = other DNA
ttccaactacgttggt

SEQ ID NO: 22775 - DNA, 16 bp, synthetic construct
  misc_feature 1..16: note = synthetic [barcode part1]
  source 1..16: mol_type = other DNA
ttcacgagtgaacctg

SEQ ID NO: 22776 - DNA, 16 bp, synthetic construct
  misc_feature 1..16: note = synthetic [barcode part1]
  source 1..16: mol_type = other DNA
aagtattcgaggtgac

SEQ ID NO: 22777 - DNA, 16 bp, synthetic construct
  misc_feature 1..16: note = synthetic [barcode part1]
  source 1..16: mol_type = other DNA
gcgtagaggtgacttg

SEQ ID NO: 22778 - DNA, 16 bp, synthetic construct
  misc_feature 1..16: note = synthetic [barcode part1]
  source 1..16: mol_type = other DNA
gatcgactgatcgact

SEQ ID NO: 22779 - DNA, 16 bp, synthetic construct
  misc_feature 1..16: note = synthetic [barcode part1]
  source 1..16: mol_type = other DNA
ttacgacagttgaccg

SEQ ID NO: 22780 - DNA, 16 bp, synthetic construct
  misc_feature 1..16: note = synthetic [barcode part1]
  source 1..16: mol_type = other DNA
tcttggcaggaactac

SEQ ID NO: 22781 - DNA, 16 bp, synthetic construct
  misc_feature 1..16: note = synthetic [barcode part1]
  source 1..16: mol_type = other DNA
gttgcaatctattcgc

SEQ ID NO: 22782 - DNA, 16 bp, synthetic construct
  misc_feature 1..16: note = synthetic [barcode part1]
  source 1..16: mol_type = other DNA
gatctggtacactctt

SEQ ID NO: 22783 - DNA, 16 bp, synthetic construct
  misc_feature 1..16: note = synthetic [barcode part1]
  source 1..16: mol_type = other DNA
acactacacggacgag

SEQ ID NO: 22784 - DNA, 16 bp, synthetic construct
  misc_feature 1..16: note = synthetic [barcode part1]
  source 1..16: mol_type = other DNA
ccgttacctataagtc

SEQ ID NO: 22785 - DNA, 16 bp, synthetic construct
  misc_feature 1..16: note = synthetic [barcode part1]
  source 1..16: mol_type = other DNA
tcgtaagactctccgc

SEQ ID NO: 22786 - DNA, 16 bp, synthetic construct
  misc_feature 1..16: note = synthetic [barcode part1]
  source 1..16: mol_type = other DNA
ccttacctaagtatcg

SEQ ID NO: 22787 - DNA, 16 bp, synthetic construct
  misc_feature 1..16: note = synthetic [barcode part1]
  source 1..16: mol_type = other DNA
agtcgccagatacgag

SEQ ID NO: 22788 - DNA, 16 bp, synthetic construct
  misc_feature 1..16: note = synthetic [barcode part1]
  source 1..16: mol_type = other DNA
tggcgtacagtcctct

SEQ ID NO: 22789 - DNA, 16 bp, synthetic construct
  misc_feature 1..16: note = synthetic [barcode part1]
  source 1..16: mol_type = other DNA
tgtcgaaggattgtcc

SEQ ID NO: 22790 - DNA, 16 bp, synthetic construct
  misc_feature 1..16: note = synthetic [barcode part1]
  source 1..16: mol_type = other DNA
actggcgatctctcac

SEQ ID NO: 22791 - DNA, 16 bp, synthetic construct
  misc_feature 1..16: note = synthetic [barcode part1]
  source 1..16: mol_type = other DNA
ccacgactaactagtg

SEQ ID NO: 22792 - DNA, 16 bp, synthetic construct
  misc_feature 1..16: note = synthetic [barcode part1]
  source 1..16: mol_type = other DNA
actggatagacacaac

SEQ ID NO: 22793 - DNA, 16 bp, synthetic construct
  misc_feature 1..16: note = synthetic [barcode part1]
  source 1..16: mol_type = other DNA
ccttcaggtgtgtcac

SEQ ID NO: 22794 - DNA, 16 bp, synthetic construct
  misc_feature 1..16: note = synthetic [barcode part1]
  source 1..16: mol_type = other DNA
acacctctggttcgac

SEQ ID NO: 22795 - DNA, 16 bp, synthetic construct
  misc_feature 1..16: note = synthetic [barcode part1]
  source 1..16: mol_type = other DNA
cgtagattccactatc

SEQ ID NO: 22796 - DNA, 16 bp, synthetic construct
  misc_feature 1..16: note = synthetic [barcode part1]
  source 1..16: mol_type = other DNA
cgtcctatccaggtac

SEQ ID NO: 22797 - DNA, 16 bp, synthetic construct
  misc_feature 1..16: note = synthetic [barcode part1]
  source 1..16: mol_type = other DNA
aggtaatcacaagtcg

SEQ ID NO: 22798 - DNA, 16 bp, synthetic construct
  misc_feature 1..16: note = synthetic [barcode part1]
  source 1..16: mol_type = other DNA
ttggtggtccagtagt

SEQ ID NO: 22799 - DNA, 16 bp, synthetic construct
  misc_feature 1..16: note = synthetic [barcode part1]
  source 1..16: mol_type = other DNA
ttcactagaccgtatc

SEQ ID NO: 22800 - DNA, 16 bp, synthetic construct
  misc_feature 1..16: note = synthetic [barcode part1]
  source 1..16: mol_type = other DNA
gtggttgtgacgtact

SEQ ID NO: 22801 - DNA, 16 bp, synthetic construct
  misc_feature 1..16: note = synthetic [barcode part1]
  source 1..16: mol_type = other DNA
gtacgtacagtcaacc

SEQ ID NO: 22802 - DNA, 16 bp, synthetic construct
  misc_feature 1..16: note = synthetic [barcode part1]
  source 1..16: mol_type = other DNA
gcacagattcagtaag

SEQ ID NO: 22803 - DNA, 16 bp, synthetic construct
  misc_feature 1..16: note = synthetic [barcode part1]
  source 1..16: mol_type = other DNA
tcaggcaacctacagt

SEQ ID NO: 22804 - DNA, 16 bp, synthetic construct
  misc_feature 1..16: note = synthetic [barcode part1]
  source 1..16: mol_type = other DNA
aagtgtaccaggccag

SEQ ID NO: 22805 - DNA, 16 bp, synthetic construct
  misc_feature 1..16: note = synthetic [barcode part1]
  source 1..16: mol_type = other DNA
ccactcagatactgcc

SEQ ID NO: 22806 - DNA, 16 bp, synthetic construct
  misc_feature 1..16: note = synthetic [barcode part1]
  source 1..16: mol_type = other DNA
tctaccgttaggtatc

SEQ ID NO: 22807 - DNA, 16 bp, synthetic construct
  misc_feature 1..16: note = synthetic [barcode part1]
  source 1..16: mol_type = other DNA
ttgcgccacaagagtt

SEQ ID NO: 22808 - DNA, 16 bp, synthetic construct
  misc_feature 1..16: note = synthetic [barcode part1]
  source 1..16: mol_type = other DNA
gaccttcgcacgattc

SEQ ID NO: 22809 - DNA, 16 bp, synthetic construct
  misc_feature 1..16: note = synthetic [barcode part1]
  source 1..16: mol_type = other DNA
gacgttgcaaccagtt

SEQ ID NO: 22810 - DNA, 16 bp, synthetic construct
  misc_feature 1..16: note = synthetic [barcode part1]
  source 1..16: mol_type = other DNA
cgagtgcctctactac

SEQ ID NO: 22811 - DNA, 16 bp, synthetic construct
  misc_feature 1..16: note = synthetic [barcode part1]
  source 1..16: mol_type = other DNA
actcttaagtggtctc

SEQ ID NO: 22812 - DNA, 16 bp, synthetic construct
  misc_feature 1..16: note = synthetic [barcode part1]
  source 1..16: mol_type = other DNA
aaccgcggtactaatc

SEQ ID NO: 22813 - DNA, 16 bp, synthetic construct
  misc_feature 1..16: note = synthetic [barcode part1]
  source 1..16: mol_type = other DNA
tgtcttgtcgtaggtt

SEQ ID NO: 22814 - DNA, 16 bp, synthetic construct
  misc_feature 1..16: note = synthetic [barcode part1]
  source 1..16: mol_type = other DNA
accacctatcctactc

SEQ ID NO: 22815 - DNA, 16 bp, synthetic construct
  misc_feature 1..16: note = synthetic [barcode part1]
  source 1..16: mol_type = other DNA
acgcctgacagtagag

SEQ ID NO: 22816 - DNA, 16 bp, synthetic construct
  misc_feature 1..16: note = synthetic [barcode part1]
  source 1..16: mol_type = other DNA
tatcgaaccaccaggt

SEQ ID NO: 22817 - DNA, 16 bp, synthetic construct
  misc_feature 1..16: note = synthetic [barcode part1]
  source 1..16: mol_type = other DNA
agacgaccacgttgag

SEQ ID NO: 22818 - DNA, 16 bp, synthetic construct
  misc_feature 1..16: note = synthetic [barcode part1]
  source 1..16: mol_type = other DNA
cgtataccgactaacg

SEQ ID NO: 22819 - DNA, 16 bp, synthetic construct
  misc_feature 1..16: note = synthetic [barcode part1]
  source 1..16: mol_type = other DNA
cgattggagaaggagt

SEQ ID NO: 22820 - DNA, 16 bp, synthetic construct
  misc_feature 1..16: note = synthetic [barcode part1]
  source 1..16: mol_type = other DNA
ccgtcgatacgagaag

SEQ ID NO: 22821 - DNA, 16 bp, synthetic construct
  misc_feature 1..16: note = synthetic [barcode part1]
  source 1..16: mol_type = other DNA
atctcgcggtatattc

SEQ ID NO: 22822 - DNA, 16 bp, synthetic construct
  misc_feature 1..16: note = synthetic [barcode part1]
  source 1..16: mol_type = other DNA
tagagtaggactggag

SEQ ID NO: 22823 - DNA, 16 bp, synthetic construct
  misc_feature 1..16: note = synthetic [barcode part1]
  source 1..16: mol_type = other DNA
gaggtcttctgagact

SEQ ID NO: 22824 - DNA, 16 bp, synthetic construct
  misc_feature 1..16: note = synthetic [barcode part1]
  source 1..16: mol_type = other DNA
gatacgtatcgtgcac

SEQ ID NO: 22825 - DNA, 16 bp, synthetic construct
  misc_feature 1..16: note = synthetic [barcode part1]
  source 1..16: mol_type = other DNA
tataactggtcgcgtg

SEQ ID NO: 22826 - DNA, 16 bp, synthetic construct
  misc_feature 1..16: note = synthetic [barcode part1]
  source 1..16: mol_type = other DNA
gatcttgcctagaacg

SEQ ID NO: 22827 - DNA, 16 bp, synthetic construct
  misc_feature 1..16: note = synthetic [barcode part1]
  source 1..16: mol_type = other DNA
acgcaacacgtcgatt

SEQ ID NO: 22828 - DNA, 16 bp, synthetic construct
  misc_feature 1..16: note = synthetic [barcode part1]
  source 1..16: mol_type = other DNA
tgactctgagatcggt

SEQ ID NO: 22829 - DNA, 16 bp, synthetic construct
  misc_feature 1..16: note = synthetic [barcode part1]
  source 1..16: mol_type = other DNA
tcactagtggtgactg

SEQ ID NO: 22830 - DNA, 16 bp, synthetic construct
  misc_feature 1..16: note = synthetic [barcode part1]
  source 1..16: mol_type = other DNA
cgcacgtattagtcag

SEQ ID NO: 22831 - DNA, 16 bp, synthetic construct
  misc_feature 1..16: note = synthetic [barcode part1]
  source 1..16: mol_type = other DNA
agtcttgcgagattcg

SEQ ID NO: 22832 - DNA, 16 bp, synthetic construct
  misc_feature 1..16: note = synthetic [barcode part1]
  source 1..16: mol_type = other DNA
cgaatcacgactcaac

SEQ ID NO: 22833 - DNA, 16 bp, synthetic construct
  misc_feature 1..16: note = synthetic [barcode part1]
  source 1..16: mol_type = other DNA
gaatccacggaagacc

SEQ ID NO: 22834 - DNA, 16 bp, synthetic construct
  misc_feature 1..16: note = synthetic [barcode part1]
  source 1..16: mol_type = other DNA
aggatcctacctatct

SEQ ID NO: 22835 - DNA, 16 bp, synthetic construct
  misc_feature 1..16: note = synthetic [barcode part1]
  source 1..16: mol_type = other DNA
cagataaccgtggcag

SEQ ID NO: 22836 - DNA, 16 bp, synthetic construct
  misc_feature 1..16: note = synthetic [barcode part1]
  source 1..16: mol_type = other DNA
tggagttgtgcgtatc

SEQ ID NO: 22837 - DNA, 16 bp, synthetic construct
  misc_feature 1..16: note = synthetic [barcode part1]
  source 1..16: mol_type = other DNA
ccaagaccgaataagt

SEQ ID NO: 22838 - DNA, 16 bp, synthetic construct
  misc_feature 1..16: note = synthetic [barcode part1]
  source 1..16: mol_type = other DNA
attaacaggcacgtcc

SEQ ID NO: 22839 - DNA, 16 bp, synthetic construct
  misc_feature 1..16: note = synthetic [barcode part1]
  source 1..16: mol_type = other DNA
atcgactggttctgag

SEQ ID NO: 22840 - DNA, 16 bp, synthetic construct
  misc_feature 1..16: note = synthetic [barcode part1]
  source 1..16: mol_type = other DNA
tatctcaggcactcgc

SEQ ID NO: 22841 - DNA, 16 bp, synthetic construct
  misc_feature 1..16: note = synthetic [barcode part1]
  source 1..16: mol_type = other DNA
tgactacgaattggag

SEQ ID NO: 22842 - DNA, 16 bp, synthetic construct
  misc_feature 1..16: note = synthetic [barcode part1]
  source 1..16: mol_type = other DNA
tacagtcgtactcgag

SEQ ID NO: 22843 - DNA, 16 bp, synthetic construct
  misc_feature 1..16: note = synthetic [barcode part1]
  source 1..16: mol_type = other DNA
gacggtcgtattcctc

SEQ ID NO: 22844 - DNA, 16 bp, synthetic construct
  misc_feature 1..16: note = synthetic [barcode part1]
  source 1..16: mol_type = other DNA
cagactacaatctggc

SEQ ID NO: 22845 - DNA, 16 bp, synthetic construct
  misc_feature 1..16: note = synthetic [barcode part1]
  source 1..16: mol_type = other DNA
agaggcgtggactgtt

SEQ ID NO: 22846 - DNA, 16 bp, synthetic construct
  misc_feature 1..16: note = synthetic [barcode part1]
  source 1..16: mol_type = other DNA
acgagaattggcagtt

SEQ ID NO: 22847 - DNA, 16 bp, synthetic construct
  misc_feature 1..16: note = synthetic [barcode part1]
  source 1..16: mol_type = other DNA
attactccaggtgttc

SEQ ID NO: 22848 - DNA, 16 bp, synthetic construct
  misc_feature 1..16: note = synthetic [barcode part1]
  source 1..16: mol_type = other DNA
cgtactatcaactctg

SEQ ID NO: 22849 - DNA, 16 bp, synthetic construct
  misc_feature 1..16: note = synthetic [barcode part1]
  source 1..16: mol_type = other DNA
agttaacgcacgcact

SEQ ID NO: 22850 - DNA, 16 bp, synthetic construct
  misc_feature 1..16: note = synthetic [barcode part1]
  source 1..16: mol_type = other DNA
agaatcaggtcgcacg

SEQ ID NO: 22851 - DNA, 16 bp, synthetic construct
  misc_feature 1..16: note = synthetic [barcode part1]
  source 1..16: mol_type = other DNA
ttgccggacgttcttg

SEQ ID NO: 22852 - DNA, 16 bp, synthetic construct
  misc_feature 1..16: note = synthetic [barcode part1]
  source 1..16: mol_type = other DNA
aataaggagttacgcc

SEQ ID NO: 22853 - DNA, 16 bp, synthetic construct
  misc_feature 1..16: note = synthetic [barcode part1]
  source 1..16: mol_type = other DNA
cgtgttcacctaatac

SEQ ID NO: 22854 - DNA, 16 bp, synthetic construct
  misc_feature 1..16: note = synthetic [barcode part1]
  source 1..16: mol_type = other DNA
accaagtcggactatc

SEQ ID NO: 22855 - DNA, 16 bp, synthetic construct
  misc_feature 1..16: note = synthetic [barcode part1]
  source 1..16: mol_type = other DNA
tagactcctcaccacg

SEQ ID NO: 22856 - DNA, 16 bp, synthetic construct
  misc_feature 1..16: note = synthetic [barcode part1]
  source 1..16: mol_type = other DNA
gcacaagtatcggacg

SEQ ID NO: 22857 - DNA, 16 bp, synthetic construct
  misc_feature 1..16: note = synthetic [barcode part1]
  source 1..16: mol_type = other DNA
tccacgtccaagtcac

SEQ ID NO: 22858 - DNA, 16 bp, synthetic construct
  misc_feature 1..16: note = synthetic [barcode part1]
  source 1..16: mol_type = other DNA
tcgatcctgaaggatc

SEQ ID NO: 22859 - DNA, 16 bp, synthetic construct
  misc_feature 1..16: note = synthetic [barcode part1]
  source 1..16: mol_type = other DNA
ttcaaggactacggtc

SEQ ID NO: 22860 - DNA, 16 bp, synthetic construct
  misc_feature 1..16: note = synthetic [barcode part1]
  source 1..16: mol_type = other DNA
tcggagtggattctgt

SEQ ID NO: 22861 - DNA, 16 bp, synthetic construct
  misc_feature 1..16: note = synthetic [barcode part1]
  source 1..16: mol_type = other DNA
gtacacgtcctagagt

SEQ ID NO: 22862 - DNA, 16 bp, synthetic construct
  misc_feature 1..16: note = synthetic [barcode part1]
  source 1..16: mol_type = other DNA
taacttctagtacgcc

SEQ ID NO: 22863 - DNA, 16 bp, synthetic construct
  misc_feature 1..16: note = synthetic [barcode part1]
  source 1..16: mol_type = other DNA
cgtgcctggattgtct

SEQ ID NO: 22864 - DNA, 16 bp, synthetic construct
  misc_feature 1..16: note = synthetic [barcode part1]
  source 1..16: mol_type = other DNA
gcggagaactaggtct

SEQ ID NO: 22865 - DNA, 16 bp, synthetic construct
  misc_feature 1..16: note = synthetic [barcode part1]
  source 1..16: mol_type = other DNA
acggcaataggaagtg

SEQ ID NO: 22866 - DNA, 16 bp, synthetic construct
  misc_feature 1..16: note = synthetic [barcode part1]
  source 1..16: mol_type = other DNA
cggttcttatacagtc

SEQ ID NO: 22867 - DNA, 16 bp, synthetic construct
  misc_feature 1..16: note = synthetic [barcode part1]
  source 1..16: mol_type = other DNA
ttgagattgtccgtct

SEQ ID NO: 22868 - DNA, 16 bp, synthetic construct
  misc_feature 1..16: note = synthetic [barcode part1]
  source 1..16: mol_type = other DNA
caacacacgatagaac

SEQ ID NO: 22869 - DNA, 16 bp, synthetic construct
  misc_feature 1..16: note = synthetic [barcode part1]
  source 1..16: mol_type = other DNA
aaggcacgttaagttg

SEQ ID NO: 22870 - DNA, 16 bp, synthetic construct
  misc_feature 1..16: note = synthetic [barcode part1]
  source 1..16: mol_type = other DNA
gtaactaggaaccagt

SEQ ID NO: 22871 - DNA, 16 bp, synthetic construct
  misc_feature 1..16: note = synthetic [barcode part1]
  source 1..16: mol_type = other DNA
aatatacgccagtgcc

SEQ ID NO: 22872 - DNA, 16 bp, synthetic construct
  misc_feature 1..16: note = synthetic [barcode part1]
  source 1..16: mol_type = other DNA
agatcctaccgactag

SEQ ID NO: 22873 - DNA, 16 bp, synthetic construct
  misc_feature 1..16: note = synthetic [barcode part1]
  source 1..16: mol_type = other DNA
aaccgactgtacacgt

SEQ ID NO: 22874 - DNA, 16 bp, synthetic construct
  misc_feature 1..16: note = synthetic [barcode part1]
  source 1..16: mol_type = other DNA
agagatagtggtccgc

SEQ ID NO: 22875 - DNA, 16 bp, synthetic construct
  misc_feature 1..16: note = synthetic [barcode part1]
  source 1..16: mol_type = other DNA
ttcaactcgtggtcgc

SEQ ID NO: 22876 - DNA, 16 bp, synthetic construct
  misc_feature 1..16: note = synthetic [barcode part1]
  source 1..16: mol_type = other DNA
ttgcggcaccaattag

SEQ ID NO: 22877 - DNA, 16 bp, synthetic construct
  misc_feature 1..16: note = synthetic [barcode part1]
  source 1..16: mol_type = other DNA
taggttgcctctgtgc

SEQ ID NO: 22878 - DNA, 16 bp, synthetic construct
  misc_feature 1..16: note = synthetic [barcode part1]
  source 1..16: mol_type = other DNA
gtcgagacgtgtaacg

SEQ ID NO: 22879 - DNA, 16 bp, synthetic construct
  misc_feature 1..16: note = synthetic [barcode part1]
  source 1..16: mol_type = other DNA
gtctctgtattagacc

SEQ ID NO: 22880 - DNA, 16 bp, synthetic construct
  misc_feature 1..16: note = synthetic [barcode part1]
  source 1..16: mol_type = other DNA
tcaacacaccagtgtg

SEQ ID NO: 22881 - DNA, 16 bp, synthetic construct
  misc_feature 1..16: note = synthetic [barcode part1]
  source 1..16: mol_type = other DNA
acctgtcagtaggtac

SEQ ID NO: 22882 - DNA, 16 bp, synthetic construct
  misc_feature 1..16: note = synthetic [barcode part1]
  source 1..16: mol_type = other DNA
ataccacggtactacg

SEQ ID NO: 22883 - DNA, 16 bp, synthetic construct
  misc_feature 1..16: note = synthetic [barcode part1]
  source 1..16: mol_type = other DNA
tagaggatagtcacgt

SEQ ID NO: 22884 - DNA, 16 bp, synthetic construct
  misc_feature 1..16: note = synthetic [barcode part1]
  source 1..16: mol_type = other DNA
cacaactaggacggtg

SEQ ID NO: 22885 - DNA, 16 bp, synthetic construct
  misc_feature 1..16: note = synthetic [barcode part1]
  source 1..16: mol_type = other DNA
cagtgatcgcaaggac

SEQ ID NO: 22886 - DNA, 16 bp, synthetic construct
  misc_feature 1..16: note = synthetic [barcode part1]
  source 1..16: mol_type = other DNA
caataaggaattcgcg

SEQ ID NO: 22887 - DNA, 16 bp, synthetic construct
  misc_feature 1..16: note = synthetic [barcode part1]
  source 1..16: mol_type = other DNA
gaacgactctcactag

SEQ ID NO: 22888 - DNA, 16 bp, synthetic construct
  misc_feature 1..16: note = synthetic [barcode part1]
  source 1..16: mol_type = other DNA
gaggtgttcagattag

SEQ ID NO: 22889 - DNA, 16 bp, synthetic construct
  misc_feature 1..16: note = synthetic [barcode part1]
  source 1..16: mol_type = other DNA
gtcgagtgcaattcgt

SEQ ID NO: 22890 - DNA, 16 bp, synthetic construct
  misc_feature 1..16: note = synthetic [barcode part1]
  source 1..16: mol_type = other DNA
acggtattgtacacgc

SEQ ID NO: 22891 - DNA, 16 bp, synthetic construct
  misc_feature 1..16: note = synthetic [barcode part1]
  source 1..16: mol_type = other DNA
gcctagagttctatct

SEQ ID NO: 22892 - DNA, 16 bp, synthetic construct
  misc_feature 1..16: note = synthetic [barcode part1]
  source 1..16: mol_type = other DNA
tctgcactcggtgatc

SEQ ID NO: 22893 - DNA, 16 bp, synthetic construct
  misc_feature 1..16: note = synthetic [barcode part1]
  source 1..16: mol_type = other DNA
caagtctcctattacg

SEQ ID NO: 22894 - DNA, 16 bp, synthetic construct
  misc_feature 1..16: note = synthetic [barcode part1]
  source 1..16: mol_type = other DNA
accaggaaggattgag

SEQ ID NO: 22895 - DNA, 16 bp, synthetic construct
  misc_feature 1..16: note = synthetic [barcode part1]
  source 1..16: mol_type = other DNA
gtacgccgtcttctag

SEQ ID NO: 22896 - DNA, 16 bp, synthetic construct
  misc_feature 1..16: note = synthetic [barcode part1]
  source 1..16: mol_type = other DNA
cagataccttccggtc

SEQ ID NO: 22897 - DNA, 16 bp, synthetic construct
  misc_feature 1..16: note = synthetic [barcode part1]
  source 1..16: mol_type = other DNA
caagactcagtcgatc

SEQ ID NO: 22898 - DNA, 16 bp, synthetic construct
  misc_feature 1..16: note = synthetic [barcode part1]
  source 1..16: mol_type = other DNA
gccggagatatcagtg

SEQ ID NO: 22899 - DNA, 16 bp, synthetic construct
  misc_feature 1..16: note = synthetic [barcode part1]
  source 1..16: mol_type = other DNA
aagaggccactaatac

SEQ ID NO: 22900 - DNA, 16 bp, synthetic construct
  misc_feature 1..16: note = synthetic [barcode part1]
  source 1..16: mol_type = other DNA
agtgtcacgatcgatc

SEQ ID NO: 22901 - DNA, 16 bp, synthetic construct
  misc_feature 1..16: note = synthetic [barcode part1]
  source 1..16: mol_type = other DNA
taacctggcctagtag

SEQ ID NO: 22902 - DNA, 16 bp, synthetic construct
  misc_feature 1..16: note = synthetic [barcode part1]
  source 1..16: mol_type = other DNA
agatccactgttatcc

SEQ ID NO: 22903 - DNA, 16 bp, synthetic construct
  misc_feature 1..16: note = synthetic [barcode part1]
  source 1..16: mol_type = other DNA
tgatagtcggtctggt

SEQ ID NO: 22904 - DNA, 16 bp, synthetic construct
  misc_feature 1..16: note = synthetic [barcode part1]
  source 1..16: mol_type = other DNA
tagttctctccgatcc

SEQ ID NO: 22905 - DNA, 16 bp, synthetic construct
  misc_feature 1..16: note = synthetic [barcode part1]
  source 1..16: mol_type = other DNA
tcagagtaataccgcc

SEQ ID NO: 22906 - DNA, 16 bp, synthetic construct
  misc_feature 1..16: note = synthetic [barcode part1]
  source 1..16: mol_type = other DNA
tccttaagtcagtgtc

SEQ ID NO: 22907 - DNA, 16 bp, synthetic construct
  misc_feature 1..16: note = synthetic [barcode part1]
  source 1..16: mol_type = other DNA
tgtattcttaccggac

SEQ ID NO: 22908 - DNA, 16 bp, synthetic construct
  misc_feature 1..16: note = synthetic [barcode part1]
  source 1..16: mol_type = other DNA
agaggtactcggtggt

SEQ ID NO: 22909 - DNA, 16 bp, synthetic construct
  misc_feature 1..16: note = synthetic [barcode part1]
  source 1..16: mol_type = other DNA
ccttaaggttctggag

SEQ ID NO: 22910 - DNA, 16 bp, synthetic construct
  misc_feature 1..16: note = synthetic [barcode part1]
  source 1..16: mol_type = other DNA
tacgtgactcgtagac

SEQ ID NO: 22911 - DNA, 16 bp, synthetic construct
  misc_feature 1..16: note = synthetic [barcode part1]
  source 1..16: mol_type = other DNA
tagtcacgtggttacg

SEQ ID NO: 22912 - DNA, 16 bp, synthetic construct
  misc_feature 1..16: note = synthetic [barcode part1]
  source 1..16: mol_type = other DNA
gttcctgagtgacctc

SEQ ID NO: 22913 - DNA, 16 bp, synthetic construct
  misc_feature 1..16: note = synthetic [barcode part1]
  source 1..16: mol_type = other DNA
ttgttggtggtggttg

SEQ ID NO: 22914 - DNA, 16 bp, synthetic construct
  misc_feature 1..16: note = synthetic [barcode part1]
  source 1..16: mol_type = other DNA
ccaccacgtgagtctt

SEQ ID NO: 22915 - DNA, 16 bp, synthetic construct
  misc_feature 1..16: note = synthetic [barcode part1]
  source 1..16: mol_type = other DNA
attcacctctaggact

SEQ ID NO: 22916 - DNA, 16 bp, synthetic construct
  misc_feature 1..16: note = synthetic [barcode part1]
  source 1..16: mol_type = other DNA
ttgcagtcaaccagtg

SEQ ID NO: 22917 - DNA, 16 bp, synthetic construct
  misc_feature 1..16: note = synthetic [barcode part1]
  source 1..16: mol_type = other DNA
gttgacagtaggacgc

SEQ ID NO: 22918 - DNA, 16 bp, synthetic construct
  misc_feature 1..16: note = synthetic [barcode part1]
  source 1..16: mol_type = other DNA
gttgagtccgtgttcc

SEQ ID NO: 22919 - DNA, 16 bp, synthetic construct
  misc_feature 1..16: note = synthetic [barcode part1]
  source 1..16: mol_type = other DNA
cactatctcgccactt

SEQ ID NO: 22920 - DNA, 16 bp, synthetic construct
  misc_feature 1..16: note = synthetic [barcode part1]
  source 1..16: mol_type = other DNA
cacagtgttcaggact

SEQ ID NO: 22921 - DNA, 16 bp, synthetic construct
  misc_feature 1..16: note = synthetic [barcode part1]
  source 1..16: mol_type = other DNA
tcgcgttacctaacgc

SEQ ID NO: 22922 - DNA, 16 bp, synthetic construct
  misc_feature 1..16: note = synthetic [barcode part1]
  source 1..16: mol_type = other DNA
aagaggttctacgagt

SEQ ID NO: 22923 - DNA, 16 bp, synthetic construct
  misc_feature 1..16: note = synthetic [barcode part1]
  source 1..16: mol_type = other DNA
ttccggtaatctgtac

SEQ ID NO: 22924 - DNA, 16 bp, synthetic construct
  misc_feature 1..16: note = synthetic [barcode part1]
  source 1..16: mol_type = other DNA
gcaacttcgtcaagtg

SEQ ID NO: 22925 - DNA, 16 bp, synthetic construct
  misc_feature 1..16: note = synthetic [barcode part1]
  source 1..16: mol_type = other DNA
agttgcagtgtcaacc

SEQ ID NO: 22926 - DNA, 16 bp, synthetic construct
  misc_feature 1..16: note = synthetic [barcode part1]
  source 1..16: mol_type = other DNA
tcaaggtccgtaacac

SEQ ID NO: 22927 - DNA, 16 bp, synthetic construct
  misc_feature 1..16: note = synthetic [barcode part1]
  source 1..16: mol_type = other DNA
cactgtctgaactcgc

SEQ ID NO: 22928 - DNA, 16 bp, synthetic construct
  misc_feature 1..16: note = synthetic [barcode part1]
  source 1..16: mol_type = other DNA
tcttatcggcgtccag

SEQ ID NO: 22929 - DNA, 16 bp, synthetic construct
  misc_feature 1..16: note = synthetic [barcode part1]
  source 1..16: mol_type = other DNA
gcgttaagatccacac

SEQ ID NO: 22930 - DNA, 16 bp, synthetic construct
  misc_feature 1..16: note = synthetic [barcode part1]
  source 1..16: mol_type = other DNA
agtctacgttcacgag

SEQ ID NO: 22931 - DNA, 16 bp, synthetic construct
  misc_feature 1..16: note = synthetic [barcode part1]
  source 1..16: mol_type = other DNA
cgtctgtaggccttac

SEQ ID NO: 22932 - DNA, 16 bp, synthetic construct
  misc_feature 1..16: note = synthetic [barcode part1]
  source 1..16: mol_type = other DNA
tagtggtgccgaattc

SEQ ID NO: 22933 - DNA, 16 bp, synthetic construct
  misc_feature 1..16: note = synthetic [barcode part1]
  source 1..16: mol_type = other DNA
gcggaccactatctct

SEQ ID NO: 22934 - DNA, 16 bp, synthetic construct
  misc_feature 1..16: note = synthetic [barcode part1]
  source 1..16: mol_type = other DNA
agttgcacacacagtc

SEQ ID NO: 22935 - DNA, 16 bp, synthetic construct
  misc_feature 1..16: note = synthetic [barcode part1]
  source 1..16: mol_type = other DNA
attgcgtgagaactag

SEQ ID NO: 22936 - DNA, 16 bp, synthetic construct
  misc_feature 1..16: note = synthetic [barcode part1]
  source 1..16: mol_type = other DNA
tgcaacgcaaggttct

SEQ ID NO: 22937 - DNA, 16 bp, synthetic construct
  misc_feature 1..16: note = synthetic [barcode part1]
  source 1..16: mol_type = other DNA
atctctgtcgttgagt

SEQ ID NO: 22938 - DNA, 16 bp, synthetic construct
  misc_feature 1..16: note = synthetic [barcode part1]
  source 1..16: mol_type = other DNA
cagtcttgactgaggt

SEQ ID NO: 22939 - DNA, 16 bp, synthetic construct
  misc_feature 1..16: note = synthetic [barcode part1]
  source 1..16: mol_type = other DNA
gttcagtccaacagtg

SEQ ID NO: 22940 - DNA, 16 bp, synthetic construct
  misc_feature 1..16: note = synthetic [barcode part1]
  source 1..16: mol_type = other DNA
agattgccactctcgc

SEQ ID NO: 22941 - DNA, 16 bp, synthetic construct
  misc_feature 1..16: note = synthetic [barcode part1]
  source 1..16: mol_type = other DNA
ccgaattcaactcgag

SEQ ID NO: 22942 - DNA, 16 bp, synthetic construct
  misc_feature 1..16: note = synthetic [barcode part1]
  source 1..16: mol_type = other DNA
tactcacctgtagtgt

SEQ ID NO: 22943 - DNA, 16 bp, synthetic construct
  misc_feature 1..16: note = synthetic [barcode part1]
  source 1..16: mol_type = other DNA
cctcacaatatcctcc

SEQ ID NO: 22944 - DNA, 16 bp, synthetic construct
  misc_feature 1..16: note = synthetic [barcode part1]
  source 1..16: mol_type = other DNA
tacggagacacttctg

SEQ ID NO: 22945 - DNA, 16 bp, synthetic construct
  misc_feature 1..16: note = synthetic [barcode part1]
  source 1..16: mol_type = other DNA
tagatcaaccggacct

SEQ ID NO: 22946 - DNA, 16 bp, synthetic construct
  misc_feature 1..16: note = synthetic [barcode part1]
  source 1..16: mol_type = other DNA
gaaggataggtgttct

SEQ ID NO: 22947 - DNA, 16 bp, synthetic construct
  misc_feature 1..16: note = synthetic [barcode part1]
  source 1..16: mol_type = other DNA
tctgattagagtcggc

SEQ ID NO: 22948 - DNA, 16 bp, synthetic construct
  misc_feature 1..16: note = synthetic [barcode part1]
  source 1..16: mol_type = other DNA
cactcggtagtccttg

SEQ ID NO: 22949 - DNA, 16 bp, synthetic construct
  misc_feature 1..16: note = synthetic [barcode part1]
  source 1..16: mol_type = other DNA
acagtggacggaatag

SEQ ID NO: 22950 - DNA, 16 bp, synthetic construct
  misc_feature 1..16: note = synthetic [barcode part1]
  source 1..16: mol_type = other DNA
gacgagtgtagacaag

SEQ ID NO: 22951 - DNA, 16 bp, synthetic construct
  misc_feature 1..16: note = synthetic [barcode part1]
  source 1..16: mol_type = other DNA
ttaccacgccttgtct

SEQ ID NO: 22952 - DNA, 16 bp, synthetic construct
  misc_feature 1..16: note = synthetic [barcode part1]
  source 1..16: mol_type = other DNA
aacacgcgagagacct

SEQ ID NO: 22953 - DNA, 16 bp, synthetic construct
  misc_feature 1..16: note = synthetic [barcode part1]
  source 1..16: mol_type = other DNA
ccactatagtgttcgt

SEQ ID NO: 22954 - DNA, 16 bp, synthetic construct
  misc_feature 1..16: note = synthetic [barcode part1]
  source 1..16: mol_type = other DNA
tcgttagttaggccag

SEQ ID NO: 22955 - DNA, 16 bp, synthetic construct
  misc_feature 1..16: note = synthetic [barcode part1]
  source 1..16: mol_type = other DNA
cgtaggtatcttacct

SEQ ID NO: 22956 - DNA, 16 bp, synthetic construct
  misc_feature 1..16: note = synthetic [barcode part1]
  source 1..16: mol_type = other DNA
atagaaccgtcacctg

SEQ ID NO: 22957 - DNA, 16 bp, synthetic construct
  misc_feature 1..16: note = synthetic [barcode part1]
  source 1..16: mol_type = other DNA
ttgtgcagtacaccag

SEQ ID NO: 22958 - DNA, 16 bp, synthetic construct
  misc_feature 1..16: note = synthetic [barcode part1]
  source 1..16: mol_type = other DNA
atattgtcaccgcgag

SEQ ID NO: 22959 - DNA, 16 bp, synthetic construct
  misc_feature 1..16: note = synthetic [barcode part1]
  source 1..16: mol_type = other DNA
acgaggttctatcgtg

SEQ ID NO: 22960 - DNA, 16 bp, synthetic construct
  misc_feature 1..16: note = synthetic [barcode part1]
  source 1..16: mol_type = other DNA
actcttacagaccgcc

SEQ ID NO: 22961 - DNA, 16 bp, synthetic construct
  misc_feature 1..16: note = synthetic [barcode part1]
  source 1..16: mol_type = other DNA
gacgaaggtgcgattc

SEQ ID NO: 22962 - DNA, 16 bp, synthetic construct
  misc_feature 1..16: note = synthetic [barcode part1]
  source 1..16: mol_type = other DNA
tcttcggtaaccacgc

SEQ ID NO: 22963 - DNA, 16 bp, synthetic construct
  misc_feature 1..16: note = synthetic [barcode part1]
  source 1..16: mol_type = other DNA
atctattaggcctcgt

SEQ ID NO: 22964 - DNA, 16 bp, synthetic construct
  misc_feature 1..16: note = synthetic [barcode part1]
  source 1..16: mol_type = other DNA
tgccggttcaatctcg

SEQ ID NO: 22965 - DNA, 16 bp, synthetic construct
  misc_feature 1..16: note = synthetic [barcode part1]
  source 1..16: mol_type = other DNA
gtagttaccgactctt

SEQ ID NO: 22966 - DNA, 16 bp, synthetic construct
  misc_feature 1..16: note = synthetic [barcode part1]
  source 1..16: mol_type = other DNA
tgttcgccttatccac

SEQ ID NO: 22967 - DNA, 16 bp, synthetic construct
  misc_feature 1..16: note = synthetic [barcode part1]
  source 1..16: mol_type = other DNA
agtaccttcgtcaccg

SEQ ID NO: 22968 - DNA, 16 bp, synthetic construct
  misc_feature 1..16: note = synthetic [barcode part1]
  source 1..16: mol_type = other DNA
tgttggaccgtgttcc

SEQ ID NO: 22969 - DNA, 16 bp, synthetic construct
  misc_feature 1..16: note = synthetic [barcode part1]
  source 1..16: mol_type = other DNA
tactaggtctagtggc

SEQ ID NO: 22970 - DNA, 16 bp, synthetic construct
  misc_feature 1..16: note = synthetic [barcode part1]
  source 1..16: mol_type = other DNA
acctccagtaattcac

SEQ ID NO: 22971 - DNA, 16 bp, synthetic construct
  misc_feature 1..16: note = synthetic [barcode part1]
  source 1..16: mol_type = other DNA
acctaagttcgagtgc

SEQ ID NO: 22972 - DNA, 16 bp, synthetic construct
  misc_feature 1..16: note = synthetic [barcode part1]
  source 1..16: mol_type = other DNA
caccgtgtaactaacg

SEQ ID NO: 22973 - DNA, 16 bp, synthetic construct
  misc_feature 1..16: note = synthetic [barcode part1]
  source 1..16: mol_type = other DNA
gtggtgtcgatcgatt

SEQ ID NO: 22974 - DNA, 16 bp, synthetic construct
  misc_feature 1..16: note = synthetic [barcode part1]
  source 1..16: mol_type = other DNA
gcctcagacactatag

SEQ ID NO: 22975 - DNA, 16 bp, synthetic construct
  misc_feature 1..16: note = synthetic [barcode part1]
  source 1..16: mol_type = other DNA
gagagacttcagtctc

SEQ ID NO: 22976 - DNA, 16 bp, synthetic construct
  misc_feature 1..16: note = synthetic [barcode part1]
  source 1..16: mol_type = other DNA
gcaacgaggatatccg

SEQ ID NO: 22977 - DNA, 16 bp, synthetic construct
  misc_feature 1..16: note = synthetic [barcode part1]
  source 1..16: mol_type = other DNA
aggacctgaatagact

SEQ ID NO: 22978 - DNA, 16 bp, synthetic construct
  misc_feature 1..16: note = synthetic [barcode part1]
  source 1..16: mol_type = other DNA
cggttaagactagtcc

SEQ ID NO: 22979 - DNA, 16 bp, synthetic construct
  misc_feature 1..16: note = synthetic [barcode part1]
  source 1..16: mol_type = other DNA
aaggccactggatacg

SEQ ID NO: 22980 - DNA, 16 bp, synthetic construct
  misc_feature 1..16: note = synthetic [barcode part1]
  source 1..16: mol_type = other DNA
taactctgccaacgcc

SEQ ID NO: 22981 - DNA, 16 bp, synthetic construct
  misc_feature 1..16: note = synthetic [barcode part1]
  source 1..16: mol_type = other DNA
actgacggtggttgtt

SEQ ID NO: 22982 - DNA, 16 bp, synthetic construct
  misc_feature 1..16: note = synthetic [barcode part1]
  source 1..16: mol_type = other DNA
caacaaccgcgttctc

SEQ ID NO: 22983 - DNA, 16 bp, synthetic construct
  misc_feature 1..16: note = synthetic [barcode part1]
  source 1..16: mol_type = other DNA
gaggcggaatacctac

SEQ ID NO: 22984 - DNA, 16 bp, synthetic construct
  misc_feature 1..16: note = synthetic [barcode part1]
  source 1..16: mol_type = other DNA
gaggataggcacaagt

SEQ ID NO: 22985 - DNA, 16 bp, synthetic construct
  misc_feature 1..16: note = synthetic [barcode part1]
  source 1..16: mol_type = other DNA
acttcacctacacagt

SEQ ID NO: 22986 - DNA, 16 bp, synthetic construct
  misc_feature 1..16: note = synthetic [barcode part1]
  source 1..16: mol_type = other DNA
tgcaagtgacggagtc

SEQ ID NO: 22987 - DNA, 16 bp, synthetic construct
  misc_feature 1..16: note = synthetic [barcode part1]
  source 1..16: mol_type = other DNA
cactagtctggaggag

SEQ ID NO: 22988 - DNA, 16 bp, synthetic construct
  misc_feature 1..16: note = synthetic [barcode part1]
  source 1..16: mol_type = other DNA
atacgtcttcaactcg

SEQ ID NO: 22989 - DNA, 16 bp, synthetic construct
  misc_feature 1..16: note = synthetic [barcode part1]
  source 1..16: mol_type = other DNA
gcgtagatattaggtg

SEQ ID NO: 22990 - DNA, 16 bp, synthetic construct
  misc_feature 1..16: note = synthetic [barcode part1]
  source 1..16: mol_type = other DNA
acgccgacaataaggc

SEQ ID NO: 22991 - DNA, 16 bp, synthetic construct
  misc_feature 1..16: note = synthetic [barcode part1]
  source 1..16: mol_type = other DNA
agacttcggtcagttg

SEQ ID NO: 22992 - DNA, 16 bp, synthetic construct
  misc_feature 1..16: note = synthetic [barcode part1]
  source 1..16: mol_type = other DNA
ccgataggtctctatt

SEQ ID NO: 22993 - DNA, 16 bp, synthetic construct
  misc_feature 1..16: note = synthetic [barcode part1]
  source 1..16: mol_type = other DNA
aatccttaaggtggcc

SEQ ID NO: 22994 - DNA, 16 bp, synthetic construct
  misc_feature 1..16: note = synthetic [barcode part1]
  source 1..16: mol_type = other DNA
taacgcactaagtgcc

SEQ ID NO: 22995 - DNA, 16 bp, synthetic construct
  misc_feature 1..16: note = synthetic [barcode part1]
  source 1..16: mol_type = other DNA
actctgtcggaaggtt

SEQ ID NO: 22996 - DNA, 16 bp, synthetic construct
  misc_feature 1..16: note = synthetic [barcode part1]
  source 1..16: mol_type = other DNA
aatataaggcgcggag

SEQ ID NO: 22997 - DNA, 16 bp, synthetic construct
  misc_feature 1..16: note = synthetic [barcode part1]
  source 1..16: mol_type = other DNA
cgcgcagatagttgtt

SEQ ID NO: 22998 - DNA, 16 bp, synthetic construct
  misc_feature 1..16: note = synthetic [barcode part1]
  source 1..16: mol_type = other DNA
aagaggtgcctcttgt

SEQ ID NO: 22999 - DNA, 16 bp, synthetic construct
  misc_feature 1..16: note = synthetic [barcode part1]
  source 1..16: mol_type = other DNA
gtctctaccgtgttct

SEQ ID NO: 23000 - DNA, 16 bp, synthetic construct
  misc_feature 1..16: note = synthetic [barcode part1]
  source 1..16: mol_type = other DNA
atacggccaacgtact

SEQ ID NO: 23001 - DNA, 16 bp, synthetic construct
  misc_feature 1..16: note = synthetic [barcode part1]
  source 1..16: mol_type = other DNA
acgcgatacacactgt

SEQ ID NO: 23002 - DNA, 16 bp, synthetic construct
  misc_feature 1..16: note = synthetic [barcode part1]
  source 1..16: mol_type = other DNA
gtaggaacgtgtcctt

SEQ ID NO: 23003 - DNA, 16 bp, synthetic construct
  misc_feature 1..16: note = synthetic [barcode part1]
  source 1..16: mol_type = other DNA
aggacactacgttctg

SEQ ID NO: 23004 - DNA, 16 bp, synthetic construct
  misc_feature 1..16: note = synthetic [barcode part1]
  source 1..16: mol_type = other DNA
ttccaagattccggag

SEQ ID NO: 23005 - DNA, 16 bp, synthetic construct
  misc_feature 1..16: note = synthetic [barcode part1]
  source 1..16: mol_type = other DNA
gacggataatatcgtg

SEQ ID NO: 23006 - DNA, 16 bp, synthetic construct
  misc_feature 1..16: note = synthetic [barcode part1]
  source 1..16: mol_type = other DNA
gtagttcacaagaacg

SEQ ID NO: 23007 - DNA, 16 bp, synthetic construct
  misc_feature 1..16: note = synthetic [barcode part1]
  source 1..16: mol_type = other DNA
gcgtaccgatatactg

SEQ ID NO: 23008 - DNA, 16 bp, synthetic construct
  misc_feature 1..16: note = synthetic [barcode part1]
  source 1..16: mol_type = other DNA
cgtattgagttggaag

SEQ ID NO: 23009 - DNA, 16 bp, synthetic construct
  misc_feature 1..16: note = synthetic [barcode part1]
  source 1..16: mol_type = other DNA
tggcacgtaactcctc

SEQ ID NO: 23010 - DNA, 16 bp, synthetic construct
  misc_feature 1..16: note = synthetic [barcode part1]
  source 1..16: mol_type = other DNA
aagtaggccacctgtt

SEQ ID NO: 23011 - DNA, 16 bp, synthetic construct
  misc_feature 1..16: note = synthetic [barcode part1]
  source 1..16: mol_type = other DNA
agtcggtccagaatct

SEQ ID NO: 23012 - DNA, 16 bp, synthetic construct
  misc_feature 1..16: note = synthetic [barcode part1]
  source 1..16: mol_type = other DNA
ttcacgaagactcgtg

SEQ ID NO: 23013 - DNA, 16 bp, synthetic construct
  misc_feature 1..16: note = synthetic [barcode part1]
  source 1..16: mol_type = other DNA
ccactggttgaatcag

SEQ ID NO: 23014 - DNA, 16 bp, synthetic construct
  misc_feature 1..16: note = synthetic [barcode part1]
  source 1..16: mol_type = other DNA
tatagagtgcgtctcg

SEQ ID NO: 23015 - DNA, 16 bp, synthetic construct
  misc_feature 1..16: note = synthetic [barcode part1]
  source 1..16: mol_type = other DNA
tagatcgtatagaggc

SEQ ID NO: 23016 - DNA, 16 bp, synthetic construct
  misc_feature 1..16: note = synthetic [barcode part1]
  source 1..16: mol_type = other DNA
cggttccagagaatct

SEQ ID NO: 23017 - DNA, 16 bp, synthetic construct
  misc_feature 1..16: note = synthetic [barcode part1]
  source 1..16: mol_type = other DNA
gattacgtgtgtggtc

SEQ ID NO: 23018 - DNA, 16 bp, synthetic construct
  misc_feature 1..16: note = synthetic [barcode part1]
  source 1..16: mol_type = other DNA
cgtgtggtagagagtc

SEQ ID NO: 23019 - DNA, 16 bp, synthetic construct
  misc_feature 1..16: note = synthetic [barcode part1]
  source 1..16: mol_type = other DNA
cgataggtaggtattg

SEQ ID NO: 23020 - DNA, 16 bp, synthetic construct
  misc_feature 1..16: note = synthetic [barcode part1]
  source 1..16: mol_type = other DNA
aagaatccggtatacg

SEQ ID NO: 23021 - DNA, 16 bp, synthetic construct
  misc_feature 1..16: note = synthetic [barcode part1]
  source 1..16: mol_type = other DNA
gaaccgtcagatcact

SEQ ID NO: 23022 - DNA, 16 bp, synthetic construct
  misc_feature 1..16: note = synthetic [barcode part1]
  source 1..16: mol_type = other DNA
tgatcagtacgcacac

SEQ ID NO: 23023 - DNA, 16 bp, synthetic construct
  misc_feature 1..16: note = synthetic [barcode part1]
  source 1..16: mol_type = other DNA
atatccttggcagttc

SEQ ID NO: 23024 - DNA, 16 bp, synthetic construct
  misc_feature 1..16: note = synthetic [barcode part1]
  source 1..16: mol_type = other DNA
aacaagtgtcttggag

SEQ ID NO: 23025 - DNA, 16 bp, synthetic construct
  misc_feature 1..16: note = synthetic [barcode part1]
  source 1..16: mol_type = other DNA
gtagtcgtcctgacct

SEQ ID NO: 23026 - DNA, 16 bp, synthetic construct
  misc_feature 1..16: note = synthetic [barcode part1]
  source 1..16: mol_type = other DNA
actgaggtaatcacag

SEQ ID NO: 23027 - DNA, 16 bp, synthetic construct
  misc_feature 1..16: note = synthetic [barcode part1]
  source 1..16: mol_type = other DNA
ttgccgcagtagagtt

SEQ ID NO: 23028 - DNA, 16 bp, synthetic construct
  misc_feature 1..16: note = synthetic [barcode part1]
  source 1..16: mol_type = other DNA
ttacgttgtctggtac

SEQ ID NO: 23029 - DNA, 16 bp, synthetic construct
  misc_feature 1..16: note = synthetic [barcode part1]
  source 1..16: mol_type = other DNA
cagtgcaacgtagtct

SEQ ID NO: 23030 - DNA, 16 bp, synthetic construct
  misc_feature 1..16: note = synthetic [barcode part1]
  source 1..16: mol_type = other DNA
gtatcaacgacaaggt

SEQ ID NO: 23031 - DNA, 16 bp, synthetic construct
  misc_feature 1..16: note = synthetic [barcode part1]
  source 1..16: mol_type = other DNA
cagatacaggacaatc

SEQ ID NO: 23032 - DNA, 16 bp, synthetic construct
  misc_feature 1..16: note = synthetic [barcode part1]
  source 1..16: mol_type = other DNA
tcaacggtagaccact

SEQ ID NO: 23033 - DNA, 16 bp, synthetic construct
  misc_feature 1..16: note = synthetic [barcode part1]
  source 1..16: mol_type = other DNA
tattgaatcgtgcctc

SEQ ID NO: 23034 - DNA, 16 bp, synthetic construct
  misc_feature 1..16: note = synthetic [barcode part1]
  source 1..16: mol_type = other DNA
gacgtcctatcctacg

SEQ ID NO: 23035 - DNA, 16 bp, synthetic construct
  misc_feature 1..16: note = synthetic [barcode part1]
  source 1..16: mol_type = other DNA
caacacgtggcgaagt

SEQ ID NO: 23036 - DNA, 16 bp, synthetic construct
  misc_feature 1..16: note = synthetic [barcode part1]
  source 1..16: mol_type = other DNA
aatctcggcctatccg

SEQ ID NO: 23037 - DNA, 16 bp, synthetic construct
  misc_feature 1..16: note = synthetic [barcode part1]
  source 1..16: mol_type = other DNA
gttcctcgtgttgacg

SEQ ID NO: 23038 - DNA, 16 bp, synthetic construct
  misc_feature 1..16: note = synthetic [barcode part1]
  source 1..16: mol_type = other DNA
actaaccagtctcgag

SEQ ID NO: 23039 - DNA, 16 bp, synthetic construct
  misc_feature 1..16: note = synthetic [barcode part1]
  source 1..16: mol_type = other DNA
ttaagagttgacgcag

SEQ ID NO: 23040 - DNA, 16 bp, synthetic construct
  misc_feature 1..16: note = synthetic [barcode part1]
  source 1..16: mol_type = other DNA
tgtctcgttgtgaatc

SEQ ID NO: 23041 - DNA, 16 bp, synthetic construct
  misc_feature 1..16: note = synthetic [barcode part1]
  source 1..16: mol_type = other DNA
tgattggtcgaagtcc

SEQ ID NO: 23042 - DNA, 16 bp, synthetic construct
  misc_feature 1..16: note = synthetic [barcode part1]
  source 1..16: mol_type = other DNA
caagtacggttacacc

SEQ ID NO: 23043 - DNA, 16 bp, synthetic construct
  misc_feature 1..16: note = synthetic [barcode part1]
  source 1..16: mol_type = other DNA
gagtgtgacacttctg

SEQ ID NO: 23044 - DNA, 16 bp, synthetic construct
  misc_feature 1..16: note = synthetic [barcode part1]
  source 1..16: mol_type = other DNA
tcgaactgcgttcctg

SEQ ID NO: 23045 - DNA, 16 bp, synthetic construct
  misc_feature 1..16: note = synthetic [barcode part1]
  source 1..16: mol_type = other DNA
ccttattggcagagtg

SEQ ID NO: 23046 - DNA, 16 bp, synthetic construct
  misc_feature 1..16: note = synthetic [barcode part1]
  source 1..16: mol_type = other DNA
gtgacacggttgatct

SEQ ID NO: 23047 - DNA, 16 bp, synthetic construct
  misc_feature 1..16: note = synthetic [barcode part1]
  source 1..16: mol_type = other DNA
aggtcgaacaccagtg

SEQ ID NO: 23048 - DNA, 16 bp, synthetic construct
  misc_feature 1..16: note = synthetic [barcode part1]
  source 1..16: mol_type = other DNA
gtagtcacgtagttgc

SEQ ID NO: 23049 - DNA, 16 bp, synthetic construct
  misc_feature 1..16: note = synthetic [barcode part1]
  source 1..16: mol_type = other DNA
tacctgtctgtccgtt

SEQ ID NO: 23050 - DNA, 16 bp, synthetic construct
  misc_feature 1..16: note = synthetic [barcode part1]
  source 1..16: mol_type = other DNA
gtagaccggaacaatt

SEQ ID NO: 23051 - DNA, 16 bp, synthetic construct
  misc_feature 1..16: note = synthetic [barcode part1]
  source 1..16: mol_type = other DNA
cacgataggaccttac

SEQ ID NO: 23052 - DNA, 16 bp, synthetic construct
  misc_feature 1..16: note = synthetic [barcode part1]
  source 1..16: mol_type = other DNA
cactatcctgcgtggt

SEQ ID NO: 23053 - DNA, 16 bp, synthetic construct
  misc_feature 1..16: note = synthetic [barcode part1]
  source 1..16: mol_type = other DNA
taatcgcacagttgcg

SEQ ID NO: 23054 - DNA, 16 bp, synthetic construct
  misc_feature 1..16: note = synthetic [barcode part1]
  source 1..16: mol_type = other DNA
gtcggtcgattgattg

SEQ ID NO: 23055 - DNA, 16 bp, synthetic construct
  misc_feature 1..16: note = synthetic [barcode part1]
  source 1..16: mol_type = other DNA
gtcggtggtaaggtac

SEQ ID NO: 23056 - DNA, 16 bp, synthetic construct
  misc_feature 1..16: note = synthetic [barcode part1]
  source 1..16: mol_type = other DNA
cgaacacgactacact

SEQ ID NO: 23057 - DNA, 16 bp, synthetic construct
  misc_feature 1..16: note = synthetic [barcode part1]
  source 1..16: mol_type = other DNA
attcgagactctactc

SEQ ID NO: 23058 - DNA, 16 bp, synthetic construct
  misc_feature 1..16: note = synthetic [barcode part1]
  source 1..16: mol_type = other DNA
ttaacgaggcggttct

SEQ ID NO: 23059 - DNA, 16 bp, synthetic construct
  misc_feature 1..16: note = synthetic [barcode part1]
  source 1..16: mol_type = other DNA
tagtcgtcgccaatag

SEQ ID NO: 23060 - DNA, 16 bp, synthetic construct
  misc_feature 1..16: note = synthetic [barcode part1]
  source 1..16: mol_type = other DNA
ccttattcttgccgtg

SEQ ID NO: 23061 - DNA, 16 bp, synthetic construct
  misc_feature 1..16: note = synthetic [barcode part1]
  source 1..16: mol_type = other DNA
agacaattcggtgtag

SEQ ID NO: 23062 - DNA, 16 bp, synthetic construct
  misc_feature 1..16: note = synthetic [barcode part1]
  source 1..16: mol_type = other DNA
ttacgtgagagagttg

SEQ ID NO: 23063 - DNA, 16 bp, synthetic construct
  misc_feature 1..16: note = synthetic [barcode part1]
  source 1..16: mol_type = other DNA
gtgtatcacgactgtg

SEQ ID NO: 23064 - DNA, 16 bp, synthetic construct
  misc_feature 1..16: note = synthetic [barcode part1]
  source 1..16: mol_type = other DNA
tgcgaatacggtggac

SEQ ID NO: 23065 - DNA, 16 bp, synthetic construct
  misc_feature 1..16: note = synthetic [barcode part1]
  source 1..16: mol_type = other DNA
ttcggagtgaccaact

SEQ ID NO: 23066 - DNA, 16 bp, synthetic construct
  misc_feature 1..16: note = synthetic [barcode part1]
  source 1..16: mol_type = other DNA
caacgttcttgaggtg

SEQ ID NO: 23067 - DNA, 16 bp, synthetic construct
  misc_feature 1..16: note = synthetic [barcode part1]
  source 1..16: mol_type = other DNA
aacagtctcgacagtc

SEQ ID NO: 23068 - DNA, 16 bp, synthetic construct
  misc_feature 1..16: note = synthetic [barcode part1]
  source 1..16: mol_type = other DNA
atctggaaggtctacc

SEQ ID NO: 23069 - DNA, 16 bp, synthetic construct
  misc_feature 1..16: note = synthetic [barcode part1]
  source 1..16: mol_type = other DNA
ccgtgaacactagtgt

SEQ ID NO: 23070 - DNA, 16 bp, synthetic construct
  misc_feature 1..16: note = synthetic [barcode part1]
  source 1..16: mol_type = other DNA
cgatatactccactgt

SEQ ID NO: 23071 - DNA, 16 bp, synthetic construct
  misc_feature 1..16: note = synthetic [barcode part1]
  source 1..16: mol_type = other DNA
cggacaactacaatag

SEQ ID NO: 23072 - DNA, 16 bp, synthetic construct
  misc_feature 1..16: note = synthetic [barcode part1]
  source 1..16: mol_type = other DNA
aaggtggatcctatcc

SEQ ID NO: 23073 - DNA, 16 bp, synthetic construct
  misc_feature 1..16: note = synthetic [barcode part1]
  source 1..16: mol_type = other DNA
agaatacggtcgccag

SEQ ID NO: 23074 - DNA, 16 bp, synthetic construct
  misc_feature 1..16: note = synthetic [barcode part1]
  source 1..16: mol_type = other DNA
agatccgtgcctcact

SEQ ID NO: 23075 - DNA, 16 bp, synthetic construct
  misc_feature 1..16: note = synthetic [barcode part1]
  source 1..16: mol_type = other DNA
tgagaggcgtacgatc

SEQ ID NO: 23076 - DNA, 16 bp, synthetic construct
  misc_feature 1..16: note = synthetic [barcode part1]
  source 1..16: mol_type = other DNA
taccagttcttgatcg

SEQ ID NO: 23077 - DNA, 16 bp, synthetic construct
  misc_feature 1..16: note = synthetic [barcode part1]
  source 1..16: mol_type = other DNA
gaagattggtcgagag

SEQ ID NO: 23078 - DNA, 16 bp, synthetic construct
  misc_feature 1..16: note = synthetic [barcode part1]
  source 1..16: mol_type = other DNA
tccgttcctacttacg

SEQ ID NO: 23079 - DNA, 16 bp, synthetic construct
  misc_feature 1..16: note = synthetic [barcode part1]
  source 1..16: mol_type = other DNA
actgccgttaagtcag

SEQ ID NO: 23080 - DNA, 16 bp, synthetic construct
  misc_feature 1..16: note = synthetic [barcode part1]
  source 1..16: mol_type = other DNA
actacaaggacggatt

SEQ ID NO: 23081 - DNA, 16 bp, synthetic construct
  misc_feature 1..16: note = synthetic [barcode part1]
  source 1..16: mol_type = other DNA
agtgcacggaattagt

SEQ ID NO: 23082 - DNA, 16 bp, synthetic construct
  misc_feature 1..16: note = synthetic [barcode part1]
  source 1..16: mol_type = other DNA
tacttactccgttcgc

SEQ ID NO: 23083 - DNA, 16 bp, synthetic construct
  misc_feature 1..16: note = synthetic [barcode part1]
  source 1..16: mol_type = other DNA
gtactaatcggcgtgt

SEQ ID NO: 23084 - DNA, 16 bp, synthetic construct
  misc_feature 1..16: note = synthetic [barcode part1]
  source 1..16: mol_type = other DNA
ccgcgtagactaagag

SEQ ID NO: 23085 - DNA, 16 bp, synthetic construct
  misc_feature 1..16: note = synthetic [barcode part1]
  source 1..16: mol_type = other DNA
aaccagtggttgactc

SEQ ID NO: 23086 - DNA, 16 bp, synthetic construct
  misc_feature 1..16: note = synthetic [barcode part1]
  source 1..16: mol_type = other DNA
ccttcgtactcggtag

SEQ ID NO: 23087 - DNA, 16 bp, synthetic construct
  misc_feature 1..16: note = synthetic [barcode part1]
  source 1..16: mol_type = other DNA
gatcgattgtgtgcac

SEQ ID NO: 23088 - DNA, 16 bp, synthetic construct
  misc_feature 1..16: note = synthetic [barcode part1]
  source 1..16: mol_type = other DNA
caattctatcgcacac

SEQ ID NO: 23089 - DNA, 16 bp, synthetic construct
  misc_feature 1..16: note = synthetic [barcode part1]
  source 1..16: mol_type = other DNA
taacgcagattgcgtc

SEQ ID NO: 23090 - DNA, 16 bp, synthetic construct
  misc_feature 1..16: note = synthetic [barcode part1]
  source 1..16: mol_type = other DNA
acactacgttcgtccg

SEQ ID NO: 23091 - DNA, 16 bp, synthetic construct
  misc_feature 1..16: note = synthetic [barcode part1]
  source 1..16: mol_type = other DNA
aacctaggtacgaggc

SEQ ID NO: 23092 - DNA, 16 bp, synthetic construct
  misc_feature 1..16: note = synthetic [barcode part1]
  source 1..16: mol_type = other DNA
ttataaccgtggtgcg

SEQ ID NO: 23093 - DNA, 16 bp, synthetic construct
  misc_feature 1..16: note = synthetic [barcode part1]
  source 1..16: mol_type = other DNA
gagatctagactctgc

SEQ ID NO: 23094 - DNA, 16 bp, synthetic construct
  misc_feature 1..16: note = synthetic [barcode part1]
  source 1..16: mol_type = other DNA
ttccgtcgcaagttcg

SEQ ID NO: 23095 - DNA, 16 bp, synthetic construct
  misc_feature 1..16: note = synthetic [barcode part1]
  source 1..16: mol_type = other DNA
gcaacgagaacgttcg

SEQ ID NO: 23096 - DNA, 16 bp, synthetic construct
  misc_feature 1..16: note = synthetic [barcode part1]
  source 1..16: mol_type = other DNA
tgcagttatcaccttg

SEQ ID NO: 23097 - DNA, 16 bp, synthetic construct
  misc_feature 1..16: note = synthetic [barcode part1]
  source 1..16: mol_type = other DNA
gccggtggtaattgtt

SEQ ID NO: 23098 - DNA, 16 bp, synthetic construct
  misc_feature 1..16: note = synthetic [barcode part1]
  source 1..16: mol_type = other DNA
acgttcacaagtaccg

SEQ ID NO: 23099 - DNA, 16 bp, synthetic construct
  misc_feature 1..16: note = synthetic [barcode part1]
  source 1..16: mol_type = other DNA
cgtcgttacctgagtc

SEQ ID NO: 23100 - DNA, 16 bp, synthetic construct
  misc_feature 1..16: note = synthetic [barcode part1]
  source 1..16: mol_type = other DNA
gacactgtcgagatct

SEQ ID NO: 23101 - DNA, 16 bp, synthetic construct
  misc_feature 1..16: note = synthetic [barcode part1]
  source 1..16: mol_type = other DNA
ccaagatcgagtggac

SEQ ID NO: 23102 - DNA, 16 bp, synthetic construct
  misc_feature 1..16: note = synthetic [barcode part1]
  source 1..16: mol_type = other DNA
ataggcgtggagtctg

SEQ ID NO: 23103 - DNA, 16 bp, synthetic construct
  misc_feature 1..16: note = synthetic [barcode part1]
  source 1..16: mol_type = other DNA
cgaactgaccaagtct

SEQ ID NO: 23104 - DNA, 16 bp, synthetic construct
  misc_feature 1..16: note = synthetic [barcode part1]
  source 1..16: mol_type = other DNA
gaatcactgaaggtac

SEQ ID NO: 23105 - DNA, 16 bp, synthetic construct
  misc_feature 1..16: note = synthetic [barcode part1]
  source 1..16: mol_type = other DNA
cactagtggtcttccg

SEQ ID NO: 23106 - DNA, 16 bp, synthetic construct
  misc_feature 1..16: note = synthetic [barcode part1]
  source 1..16: mol_type = other DNA
agatctgcggacttac

SEQ ID NO: 23107 - DNA, 16 bp, synthetic construct
  misc_feature 1..16: note = synthetic [barcode part1]
  source 1..16: mol_type = other DNA
accgaacgcaacttgt

SEQ ID NO: 23108 - DNA, 16 bp, synthetic construct
  misc_feature 1..16: note = synthetic [barcode part1]
  source 1..16: mol_type = other DNA
agttcagtgtgcctcc

SEQ ID NO: 23109 - DNA, 16 bp, synthetic construct
  misc_feature 1..16: note = synthetic [barcode part1]
  source 1..16: mol_type = other DNA
gaagtctggcaggtac

SEQ ID NO: 23110 - DNA, 16 bp, synthetic construct
  misc_feature 1..16: note = synthetic [barcode part1]
  source 1..16: mol_type = other DNA
gcacaagagtgacctg

SEQ ID NO: 23111 - DNA, 16 bp, synthetic construct
  misc_feature 1..16: note = synthetic [barcode part1]
  source 1..16: mol_type = other DNA
aacaagttccaagacg

SEQ ID NO: 23112 - DNA, 16 bp, synthetic construct
  misc_feature 1..16: note = synthetic [barcode part1]
  source 1..16: mol_type = other DNA
cgataacgcgtctctc

SEQ ID NO: 23113 - DNA, 16 bp, synthetic construct
  misc_feature 1..16: note = synthetic [barcode part1]
  source 1..16: mol_type = other DNA
attaatcgaccggtcg

SEQ ID NO: 23114 - DNA, 16 bp, synthetic construct
  misc_feature 1..16: note = synthetic [barcode part1]
  source 1..16: mol_type = other DNA
agacctgtaggaagtt

SEQ ID NO: 23115 - DNA, 16 bp, synthetic construct
  misc_feature 1..16: note = synthetic [barcode part1]
  source 1..16: mol_type = other DNA
gtggtacaccaactgt

SEQ ID NO: 23116 - DNA, 16 bp, synthetic construct
  misc_feature 1..16: note = synthetic [barcode part1]
  source 1..16: mol_type = other DNA
cggttctgtactaatc

SEQ ID NO: 23117 - DNA, 16 bp, synthetic construct
  misc_feature 1..16: note = synthetic [barcode part1]
  source 1..16: mol_type = other DNA
gtgcctcaattactgt

SEQ ID NO: 23118 - DNA, 16 bp, synthetic construct
  misc_feature 1..16: note = synthetic [barcode part1]
  source 1..16: mol_type = other DNA
cagtatacgtaccggt

SEQ ID NO: 23119 - DNA, 16 bp, synthetic construct
  misc_feature 1..16: note = synthetic [barcode part1]
  source 1..16: mol_type = other DNA
cggaatctctcaaggt

SEQ ID NO: 23120 - DNA, 16 bp, synthetic construct
  misc_feature 1..16: note = synthetic [barcode part1]
  source 1..16: mol_type = other DNA
attcggacttgtcgcc

SEQ ID NO: 23121 - DNA, 16 bp, synthetic construct
  misc_feature 1..16: note = synthetic [barcode part1]
  source 1..16: mol_type = other DNA
tcaacctgacgcgtct

SEQ ID NO: 23122 - DNA, 16 bp, synthetic construct
  misc_feature 1..16: note = synthetic [barcode part1]
  source 1..16: mol_type = other DNA
tccgattagaggacct

SEQ ID NO: 23123 - DNA, 16 bp, synthetic construct
  misc_feature 1..16: note = synthetic [barcode part1]
  source 1..16: mol_type = other DNA
atacctgcctgagtag

SEQ ID NO: 23124 - DNA, 16 bp, synthetic construct
  misc_feature 1..16: note = synthetic [barcode part1]
  source 1..16: mol_type = other DNA
accagtgtactggtgt

SEQ ID NO: 23125 - DNA, 16 bp, synthetic construct
  misc_feature 1..16: note = synthetic [barcode part1]
  source 1..16: mol_type = other DNA
aggatcctcacagtgt

SEQ ID NO: 23126 - DNA, 16 bp, synthetic construct
  misc_feature 1..16: note = synthetic [barcode part1]
  source 1..16: mol_type = other DNA
accgtcgaatcactag

SEQ ID NO: 23127 - DNA, 16 bp, synthetic construct
  misc_feature 1..16: note = synthetic [barcode part1]
  source 1..16: mol_type = other DNA
attagtgaacgcgcct

SEQ ID NO: 23128 - DNA, 16 bp, synthetic construct
  misc_feature 1..16: note = synthetic [barcode part1]
  source 1..16: mol_type = other DNA
tcgcacttcaccgaac

SEQ ID NO: 23129 - DNA, 16 bp, synthetic construct
  misc_feature 1..16: note = synthetic [barcode part1]
  source 1..16: mol_type = other DNA
gtcttgttatcgacgt

SEQ ID NO: 23130 - DNA, 16 bp, synthetic construct
  misc_feature 1..16: note = synthetic [barcode part1]
  source 1..16: mol_type = other DNA
cgaagaagtcaacact

SEQ ID NO: 23131 - DNA, 16 bp, synthetic construct
  misc_feature 1..16: note = synthetic [barcode part1]
  source 1..16: mol_type = other DNA
cggtcttcagtacacc

SEQ ID NO: 23132 - DNA, 16 bp, synthetic construct
  misc_feature 1..16: note = synthetic [barcode part1]
  source 1..16: mol_type = other DNA
ccgagtcagaacacag

SEQ ID NO: 23133 - DNA, 16 bp, synthetic construct
  misc_feature 1..16: note = synthetic [barcode part1]
  source 1..16: mol_type = other DNA
ataccgtctgcctacg

SEQ ID NO: 23134 - DNA, 16 bp, synthetic construct
  misc_feature 1..16: note = synthetic [barcode part1]
  source 1..16: mol_type = other DNA
acaccgacgactcctt

SEQ ID NO: 23135 - DNA, 16 bp, synthetic construct
  misc_feature 1..16: note = synthetic [barcode part1]
  source 1..16: mol_type = other DNA
gaagtggtcgtggatc

SEQ ID NO: 23136 - DNA, 16 bp, synthetic construct
  misc_feature 1..16: note = synthetic [barcode part1]
  source 1..16: mol_type = other DNA
aattgcgccgatcctc

SEQ ID NO: 23137 - DNA, 16 bp, synthetic construct
  misc_feature 1..16: note = synthetic [barcode part1]
  source 1..16: mol_type = other DNA
tggtcaggttgtgact

SEQ ID NO: 23138 - DNA, 16 bp, synthetic construct
  misc_feature 1..16: note = synthetic [barcode part1]
  source 1..16: mol_type = other DNA
ttgcgagttatcacct

SEQ ID NO: 23139 - DNA, 16 bp, synthetic construct
  misc_feature 1..16: note = synthetic [barcode part1]
  source 1..16: mol_type = other DNA
attgaaggaaggaccg

SEQ ID NO: 23140 - DNA, 16 bp, synthetic construct
  misc_feature 1..16: note = synthetic [barcode part1]
  source 1..16: mol_type = other DNA
atcgaacgtgatctgc

SEQ ID NO: 23141 - DNA, 16 bp, synthetic construct
  misc_feature 1..16: note = synthetic [barcode part1]
  source 1..16: mol_type = other DNA
taagttgcggcgatct

SEQ ID NO: 23142 - DNA, 16 bp, synthetic construct
  misc_feature 1..16: note = synthetic [barcode part1]
  source 1..16: mol_type = other DNA
acgtgcggattctaac

SEQ ID NO: 23143 - DNA, 16 bp, synthetic construct
  misc_feature 1..16: note = synthetic [barcode part1]
  source 1..16: mol_type = other DNA
tcactgtctcaagtgt

SEQ ID NO: 23144 - DNA, 16 bp, synthetic construct
  misc_feature 1..16: note = synthetic [barcode part1]
  source 1..16: mol_type = other DNA
gtgacttatctggcag

SEQ ID NO: 23145 - DNA, 16 bp, synthetic construct
  misc_feature 1..16: note = synthetic [barcode part1]
  source 1..16: mol_type = other DNA
gtcgcactaacaggag

SEQ ID NO: 23146 - DNA, 16 bp, synthetic construct
  misc_feature 1..16: note = synthetic [barcode part1]
  source 1..16: mol_type = other DNA
actcaagaggtctgtc

SEQ ID NO: 23147 - DNA, 16 bp, synthetic construct
  misc_feature 1..16: note = synthetic [barcode part1]
  source 1..16: mol_type = other DNA
caattatcgttctgcg

SEQ ID NO: 23148 - DNA, 16 bp, synthetic construct
  misc_feature 1..16: note = synthetic [barcode part1]
  source 1..16: mol_type = other DNA
ttctagttggcggaac

SEQ ID NO: 23149 - DNA, 16 bp, synthetic construct
  misc_feature 1..16: note = synthetic [barcode part1]
  source 1..16: mol_type = other DNA
gaggacgataggaact

SEQ ID NO: 23150 - DNA, 16 bp, synthetic construct
  misc_feature 1..16: note = synthetic [barcode part1]
  source 1..16: mol_type = other DNA
tatactctaagtcgcc

SEQ ID NO: 23151 - DNA, 16 bp, synthetic construct
  misc_feature 1..16: note = synthetic [barcode part1]
  source 1..16: mol_type = other DNA
tactccagttcacagt

SEQ ID NO: 23152 - DNA, 16 bp, synthetic construct
  misc_feature 1..16: note = synthetic [barcode part1]
  source 1..16: mol_type = other DNA
cagtgaccgtaggagt

SEQ ID NO: 23153 - DNA, 16 bp, synthetic construct
  misc_feature 1..16: note = synthetic [barcode part1]
  source 1..16: mol_type = other DNA
tcgttgcgacgtctac

SEQ ID NO: 23154 - DNA, 16 bp, synthetic construct
  misc_feature 1..16: note = synthetic [barcode part1]
  source 1..16: mol_type = other DNA
tggtgcactgaacact

SEQ ID NO: 23155 - DNA, 16 bp, synthetic construct
  misc_feature 1..16: note = synthetic [barcode part1]
  source 1..16: mol_type = other DNA
acgccgaactacttcc

SEQ ID NO: 23156 - DNA, 16 bp, synthetic construct
  misc_feature 1..16: note = synthetic [barcode part1]
  source 1..16: mol_type = other DNA
caggcgtattgtcctc

SEQ ID NO: 23157 - DNA, 16 bp, synthetic construct
  misc_feature 1..16: note = synthetic [barcode part1]
  source 1..16: mol_type = other DNA
cgcacctactcttact

SEQ ID NO: 23158 - DNA, 16 bp, synthetic construct
  misc_feature 1..16: note = synthetic [barcode part1]
  source 1..16: mol_type = other DNA
tgatccaacctgacag

SEQ ID NO: 23159 - DNA, 16 bp, synthetic construct
  misc_feature 1..16: note = synthetic [barcode part1]
  source 1..16: mol_type = other DNA
ttcgacctacacgacc

SEQ ID NO: 23160 - DNA, 16 bp, synthetic construct
  misc_feature 1..16: note = synthetic [barcode part1]
  source 1..16: mol_type = other DNA
ttacgaggacgtactc

SEQ ID NO: 23161 - DNA, 16 bp, synthetic construct
  misc_feature 1..16: note = synthetic [barcode part1]
  source 1..16: mol_type = other DNA
ttctcaggatcggagt

SEQ ID NO: 23162 - DNA, 16 bp, synthetic construct
  misc_feature 1..16: note = synthetic [barcode part1]
  source 1..16: mol_type = other DNA
actctgactccagaag

SEQ ID NO: 23163 - DNA, 16 bp, synthetic construct
  misc_feature 1..16: note = synthetic [barcode part1]
  source 1..16: mol_type = other DNA
ttggcaggtctccact

SEQ ID NO: 23164 - DNA, 16 bp, synthetic construct
  misc_feature 1..16: note = synthetic [barcode part1]
  source 1..16: mol_type = other DNA
cctactgtggttcttc

SEQ ID NO: 23165 - DNA, 16 bp, synthetic construct
  misc_feature 1..16: note = synthetic [barcode part1]
  source 1..16: mol_type = other DNA
gcggaatacaagtccg

SEQ ID NO: 23166 - DNA, 16 bp, synthetic construct
  misc_feature 1..16: note = synthetic [barcode part1]
  source 1..16: mol_type = other DNA
cctgtattcggtagtt

SEQ ID NO: 23167 - DNA, 16 bp, synthetic construct
  misc_feature 1..16: note = synthetic [barcode part1]
  source 1..16: mol_type = other DNA
attaccttccagacac

SEQ ID NO: 23168 - DNA, 16 bp, synthetic construct
  misc_feature 1..16: note = synthetic [barcode part1]
  source 1..16: mol_type = other DNA
ccggtgatctaacaac

SEQ ID NO: 23169 - DNA, 16 bp, synthetic construct
  misc_feature 1..16: note = synthetic [barcode part1]
  source 1..16: mol_type = other DNA
tcaactctctgtgagt

SEQ ID NO: 23170 - DNA, 16 bp, synthetic construct
  misc_feature 1..16: note = synthetic [barcode part1]
  source 1..16: mol_type = other DNA
gttacttaggtgacgc

SEQ ID NO: 23171 - DNA, 16 bp, synthetic construct
  misc_feature 1..16: note = synthetic [barcode part1]
  source 1..16: mol_type = other DNA
cctcttgcaggtctag

SEQ ID NO: 23172 - DNA, 16 bp, synthetic construct
  misc_feature 1..16: note = synthetic [barcode part1]
  source 1..16: mol_type = other DNA
ttctaacacgcaatcc

SEQ ID NO: 23173 - DNA, 16 bp, synthetic construct
  misc_feature 1..16: note = synthetic [barcode part1]
  source 1..16: mol_type = other DNA
gtgaatctaacaggac

SEQ ID NO: 23174 - DNA, 16 bp, synthetic construct
  misc_feature 1..16: note = synthetic [barcode part1]
  source 1..16: mol_type = other DNA
tctgcggtatcgtctg

SEQ ID NO: 23175 - DNA, 16 bp, synthetic construct
  misc_feature 1..16: note = synthetic [barcode part1]
  source 1..16: mol_type = other DNA
tgaatccgataaggtg

SEQ ID NO: 23176 - DNA, 16 bp, synthetic construct
  misc_feature 1..16: note = synthetic [barcode part1]
  source 1..16: mol_type = other DNA
aggcactacggattct

SEQ ID NO: 23177 - DNA, 16 bp, synthetic construct
  misc_feature 1..16: note = synthetic [barcode part1]
  source 1..16: mol_type = other DNA
gtgatcaggaagattc

SEQ ID NO: 23178 - DNA, 16 bp, synthetic construct
  misc_feature 1..16: note = synthetic [barcode part1]
  source 1..16: mol_type = other DNA
ttgaccagaggaagag

SEQ ID NO: 23179 - DNA, 16 bp, synthetic construct
  misc_feature 1..16: note = synthetic [barcode part1]
  source 1..16: mol_type = other DNA
actccgcgataacagt

SEQ ID NO: 23180 - DNA, 16 bp, synthetic construct
  misc_feature 1..16: note = synthetic [barcode part1]
  source 1..16: mol_type = other DNA
tgaattacgcgttctc

SEQ ID NO: 23181 - DNA, 16 bp, synthetic construct
  misc_feature 1..16: note = synthetic [barcode part1]
  source 1..16: mol_type = other DNA
tcggtgcgattcttcg

SEQ ID NO: 23182 - DNA, 16 bp, synthetic construct
  misc_feature 1..16: note = synthetic [barcode part1]
  source 1..16: mol_type = other DNA
ccacaccgacaactct

SEQ ID NO: 23183 - DNA, 16 bp, synthetic construct
  misc_feature 1..16: note = synthetic [barcode part1]
  source 1..16: mol_type = other DNA
tctgatcgttgcgcgt

SEQ ID NO: 23184 - DNA, 16 bp, synthetic construct
  misc_feature 1..16: note = synthetic [barcode part1]
  source 1..16: mol_type = other DNA
gttgttggaggacgtg

SEQ ID NO: 23185 - DNA, 16 bp, synthetic construct
  misc_feature 1..16: note = synthetic [barcode part1]
  source 1..16: mol_type = other DNA
agtccgacttcgcgtt

SEQ ID NO: 23186 - DNA, 16 bp, synthetic construct
  misc_feature 1..16: note = synthetic [barcode part1]
  source 1..16: mol_type = other DNA
acagtgtagtcctgac

SEQ ID NO: 23187 - DNA, 16 bp, synthetic construct
  misc_feature 1..16: note = synthetic [barcode part1]
  source 1..16: mol_type = other DNA
ccacaatccttccttg

SEQ ID NO: 23188 - DNA, 16 bp, synthetic construct
  misc_feature 1..16: note = synthetic [barcode part1]
  source 1..16: mol_type = other DNA
ttcgccaccagatacc

SEQ ID NO: 23189 - DNA, 16 bp, synthetic construct
  misc_feature 1..16: note = synthetic [barcode part1]
  source 1..16: mol_type = other DNA
agagatataccgagtc

SEQ ID NO: 23190 - DNA, 16 bp, synthetic construct
  misc_feature 1..16: note = synthetic [barcode part1]
  source 1..16: mol_type = other DNA
tgcgttcttattggac

SEQ ID NO: 23191 - DNA, 16 bp, synthetic construct
  misc_feature 1..16: note = synthetic [barcode part1]
  source 1..16: mol_type = other DNA
ttaaggccggaattcc

SEQ ID NO: 23192 - DNA, 16 bp, synthetic construct
  misc_feature 1..16: note = synthetic [barcode part1]
  source 1..16: mol_type = other DNA
aggcgtctatcactcc

SEQ ID NO: 23193 - DNA, 16 bp, synthetic construct
  misc_feature 1..16: note = synthetic [barcode part1]
  source 1..16: mol_type = other DNA
acacgcgtaataccac

SEQ ID NO: 23194 - DNA, 16 bp, synthetic construct
  misc_feature 1..16: note = synthetic [barcode part1]
  source 1..16: mol_type = other DNA
gcagtcaagtcctcct

SEQ ID NO: 23195 - DNA, 16 bp, synthetic construct
  misc_feature 1..16: note = synthetic [barcode part1]
  source 1..16: mol_type = other DNA
gttcaccgacaagtac

SEQ ID NO: 23196 - DNA, 16 bp, synthetic construct
  misc_feature 1..16: note = synthetic [barcode part1]
  source 1..16: mol_type = other DNA
cgtcacggtatatacg

SEQ ID NO: 23197 - DNA, 16 bp, synthetic construct
  misc_feature 1..16: note = synthetic [barcode part1]
  source 1..16: mol_type = other DNA
ttacactactcagtgc

SEQ ID NO: 23198 - DNA, 16 bp, synthetic construct
  misc_feature 1..16: note = synthetic [barcode part1]
  source 1..16: mol_type = other DNA
ccacttggatactatc

SEQ ID NO: 23199 - DNA, 16 bp, synthetic construct
  misc_feature 1..16: note = synthetic [barcode part1]
  source 1..16: mol_type = other DNA
tcgagatcctatctac

SEQ ID NO: 23200 - DNA, 16 bp, synthetic construct
  misc_feature 1..16: note = synthetic [barcode part1]
  source 1..16: mol_type = other DNA
gtatcaggtgttcgac

SEQ ID NO: 23201 - DNA, 16 bp, synthetic construct
  misc_feature 1..16: note = synthetic [barcode part1]
  source 1..16: mol_type = other DNA
gcactatagtggatag

SEQ ID NO: 23202 - DNA, 16 bp, synthetic construct
  misc_feature 1..16: note = synthetic [barcode part1]
  source 1..16: mol_type = other DNA
aacaagagtacagtcc

SEQ ID NO: 23203 - DNA, 16 bp, synthetic construct
  misc_feature 1..16: note = synthetic [barcode part1]
  source 1..16: mol_type = other DNA
agacgaggtctcgaac

SEQ ID NO: 23204 - DNA, 16 bp, synthetic construct
  misc_feature 1..16: note = synthetic [barcode part1]
  source 1..16: mol_type = other DNA
agaccgtagtgacctt

SEQ ID NO: 23205 - DNA, 16 bp, synthetic construct
  misc_feature 1..16: note = synthetic [barcode part1]
  source 1..16: mol_type = other DNA
acaacactcagagtcc

SEQ ID NO: 23206 - DNA, 16 bp, synthetic construct
  misc_feature 1..16: note = synthetic [barcode part1]
  source 1..16: mol_type = other DNA
tgccaggagatacgac

SEQ ID NO: 23207 - DNA, 16 bp, synthetic construct
  misc_feature 1..16: note = synthetic [barcode part1]
  source 1..16: mol_type = other DNA
gttccgccactaacgt

SEQ ID NO: 23208 - DNA, 16 bp, synthetic construct
  misc_feature 1..16: note = synthetic [barcode part1]
  source 1..16: mol_type = other DNA
gtctagtgacctaacg

SEQ ID NO: 23209 - DNA, 16 bp, synthetic construct
  misc_feature 1..16: note = synthetic [barcode part1]
  source 1..16: mol_type = other DNA
caagtacggttgtgtc

SEQ ID NO: 23210 - DNA, 16 bp, synthetic construct
  misc_feature 1..16: note = synthetic [barcode part1]
  source 1..16: mol_type = other DNA
cagacttcttatcacg

SEQ ID NO: 23211 - DNA, 16 bp, synthetic construct
  misc_feature 1..16: note = synthetic [barcode part1]
  source 1..16: mol_type = other DNA
attactcggacagtgc

SEQ ID NO: 23212 - DNA, 16 bp, synthetic construct
  misc_feature 1..16: note = synthetic [barcode part1]
  source 1..16: mol_type = other DNA
aaccagtaaccgactc

SEQ ID NO: 23213 - DNA, 16 bp, synthetic construct
  misc_feature 1..16: note = synthetic [barcode part1]
  source 1..16: mol_type = other DNA
atactgaggagtggtt

SEQ ID NO: 23214 - DNA, 16 bp, synthetic construct
  misc_feature 1..16: note = synthetic [barcode part1]
  source 1..16: mol_type = other DNA
tgtaggtacgagttcc

SEQ ID NO: 23215 - DNA, 16 bp, synthetic construct
  misc_feature 1..16: note = synthetic [barcode part1]
  source 1..16: mol_type = other DNA
gtctccaactcggtac

SEQ ID NO: 23216 - DNA, 16 bp, synthetic construct
  misc_feature 1..16: note = synthetic [barcode part1]
  source 1..16: mol_type = other DNA
tcgttgaccagtaacg

SEQ ID NO: 23217 - DNA, 16 bp, synthetic construct
  misc_feature 1..16: note = synthetic [barcode part1]
  source 1..16: mol_type = other DNA
aacaaccagaagtacc

SEQ ID NO: 23218 - DNA, 16 bp, synthetic construct
  misc_feature 1..16: note = synthetic [barcode part1]
  source 1..16: mol_type = other DNA
cggagataacaattcg

SEQ ID NO: 23219 - DNA, 16 bp, synthetic construct
  misc_feature 1..16: note = synthetic [barcode part1]
  source 1..16: mol_type = other DNA
cagatacaaggcgacc

SEQ ID NO: 23220 - DNA, 16 bp, synthetic construct
  misc_feature 1..16: note = synthetic [barcode part1]
  source 1..16: mol_type = other DNA
ccaaggattaggtgcg

SEQ ID NO: 23221 - DNA, 16 bp, synthetic construct
  misc_feature 1..16: note = synthetic [barcode part1]
  source 1..16: mol_type = other DNA
acgacgtgactagtct

SEQ ID NO: 23222 - DNA, 16 bp, synthetic construct
  misc_feature 1..16: note = synthetic [barcode part1]
  source 1..16: mol_type = other DNA
tgtcgatctcctcgag

SEQ ID NO: 23223 - DNA, 16 bp, synthetic construct
  misc_feature 1..16: note = synthetic [barcode part1]
  source 1..16: mol_type = other DNA
actggcgacagagtac

SEQ ID NO: 23224 - DNA, 16 bp, synthetic construct
  misc_feature 1..16: note = synthetic [barcode part1]
  source 1..16: mol_type = other DNA
ataccaaggaggccgt

SEQ ID NO: 23225 - DNA, 16 bp, synthetic construct
  misc_feature 1..16: note = synthetic [barcode part1]
  source 1..16: mol_type = other DNA
tctaacggtccttgcg

SEQ ID NO: 23226 - DNA, 16 bp, synthetic construct
  misc_feature 1..16: note = synthetic [barcode part1]
  source 1..16: mol_type = other DNA
cggacgtaagacaacc

SEQ ID NO: 23227 - DNA, 16 bp, synthetic construct
  misc_feature 1..16: note = synthetic [barcode part1]
  source 1..16: mol_type = other DNA
tcctgcaaccagatcc

SEQ ID NO: 23228 - DNA, 16 bp, synthetic construct
  misc_feature 1..16: note = synthetic [barcode part1]
  source 1..16: mol_type = other DNA
tgacactgataggtag

SEQ ID NO: 23229 - DNA, 16 bp, synthetic construct
  misc_feature 1..16: note = synthetic [barcode part1]
  source 1..16: mol_type = other DNA
tgcctgtacaatatcc

SEQ ID NO: 23230 - DNA, 16 bp, synthetic construct
  misc_feature 1..16: note = synthetic [barcode part1]
  source 1..16: mol_type = other DNA
ttggatatcgttccgt

SEQ ID NO: 23231 - DNA, 16 bp, synthetic construct
  misc_feature 1..16: note = synthetic [barcode part1]
  source 1..16: mol_type = other DNA
gcagtgagtagagtag

SEQ ID NO: 23232 - DNA, 16 bp, synthetic construct
  misc_feature 1..16: note = synthetic [barcode part1]
  source 1..16: mol_type = other DNA
agtcctacctagagtg

SEQ ID NO: 23233 - DNA, 16 bp, synthetic construct
  misc_feature 1..16: note = synthetic [barcode part1]
  source 1..16: mol_type = other DNA
tgtcaggagtataggt

SEQ ID NO: 23234 - DNA, 16 bp, synthetic construct
  misc_feature 1..16: note = synthetic [barcode part1]
  source 1..16: mol_type = other DNA
acaacacgtgtacgtc

SEQ ID NO: 23235 - DNA, 16 bp, synthetic construct
  misc_feature 1..16: note = synthetic [barcode part1]
  source 1..16: mol_type = other DNA
tctgtgtggcctggtt

SEQ ID NO: 23236 - DNA, 16 bp, synthetic construct
  misc_feature 1..16: note = synthetic [barcode part1]
  source 1..16: mol_type = other DNA
tacttgtcaccacaac

SEQ ID NO: 23237 - DNA, 16 bp, synthetic construct
  misc_feature 1..16: note = synthetic [barcode part1]
  source 1..16: mol_type = other DNA
aagttcgaacaacgac

SEQ ID NO: 23238 - DNA, 16 bp, synthetic construct
  misc_feature 1..16: note = synthetic [barcode part1]
  source 1..16: mol_type = other DNA
agtgtgtgacttcttc

SEQ ID NO: 23239 - DNA, 16 bp, synthetic construct
  misc_feature 1..16: note = synthetic [barcode part1]
  source 1..16: mol_type = other DNA
tattccgtcgcagatt

SEQ ID NO: 23240 - DNA, 16 bp, synthetic construct
  misc_feature 1..16: note = synthetic [barcode part1]
  source 1..16: mol_type = other DNA
tagtaatctccacgtc

SEQ ID NO: 23241 - DNA, 16 bp, synthetic construct
  misc_feature 1..16: note = synthetic [barcode part1]
  source 1..16: mol_type = other DNA
tccagtctgacacacc

SEQ ID NO: 23242 - DNA, 16 bp, synthetic construct
  misc_feature 1..16: note = synthetic [barcode part1]
  source 1..16: mol_type = other DNA
cctactccaggattcg

SEQ ID NO: 23243 - DNA, 16 bp, synthetic construct
  misc_feature 1..16: note = synthetic [barcode part1]
  source 1..16: mol_type = other DNA
gtcgtcggttaagttg

SEQ ID NO: 23244 - DNA, 16 bp, synthetic construct
  misc_feature 1..16: note = synthetic [barcode part1]
  source 1..16: mol_type = other DNA
agacaggtgaacagac

SEQ ID NO: 23245 - DNA, 16 bp, synthetic construct
  misc_feature 1..16: note = synthetic [barcode part1]
  source 1..16: mol_type = other DNA
cggtattacaacaccg

SEQ ID NO: 23246 - DNA, 16 bp, synthetic construct
  misc_feature 1..16: note = synthetic [barcode part1]
  source 1..16: mol_type = other DNA
ttgccaccaagtgtcc

SEQ ID NO: 23247 - DNA, 16 bp, synthetic construct
  misc_feature 1..16: note = synthetic [barcode part1]
  source 1..16: mol_type = other DNA
tcgttcgtaaggcctc

SEQ ID NO: 23248 - DNA, 16 bp, synthetic construct
  misc_feature 1..16: note = synthetic [barcode part1]
  source 1..16: mol_type = other DNA
gtcggattctacgcct

SEQ ID NO: 23249 - DNA, 16 bp, synthetic construct
  misc_feature 1..16: note = synthetic [barcode part1]
  source 1..16: mol_type = other DNA
ttgtactggtaactcc

SEQ ID NO: 23250 - DNA, 16 bp, synthetic construct
  misc_feature 1..16: note = synthetic [barcode part1]
  source 1..16: mol_type = other DNA
ttaccagaggatacag

SEQ ID NO: 23251 - DNA, 16 bp, synthetic construct
  misc_feature 1..16: note = synthetic [barcode part1]
  source 1..16: mol_type = other DNA
gagaacgattcgacgc

SEQ ID NO: 23252 - DNA, 16 bp, synthetic construct
  misc_feature 1..16: note = synthetic [barcode part1]
  source 1..16: mol_type = other DNA
ccttcggtagtcacgt

SEQ ID NO: 23253 - DNA, 16 bp, synthetic construct
  misc_feature 1..16: note = synthetic [barcode part1]
  source 1..16: mol_type = other DNA
ttggttgaccaaccag

SEQ ID NO: 23254 - DNA, 16 bp, synthetic construct
  misc_feature 1..16: note = synthetic [barcode part1]
  source 1..16: mol_type = other DNA
tggactactggtaacc

SEQ ID NO: 23255 - DNA, 16 bp, synthetic construct
  misc_feature 1..16: note = synthetic [barcode part1]
  source 1..16: mol_type = other DNA
gtatagtgtgccgact

SEQ ID NO: 23256 - DNA, 16 bp, synthetic construct
  misc_feature 1..16: note = synthetic [barcode part1]
  source 1..16: mol_type = other DNA
agtcaggtaagaggtg

SEQ ID NO: 23257 - DNA, 16 bp, synthetic construct
  misc_feature 1..16: note = synthetic [barcode part1]
  source 1..16: mol_type = other DNA
cgaacacgtgtgactt

SEQ ID NO: 23258 - DNA, 16 bp, synthetic construct
  misc_feature 1..16: note = synthetic [barcode part1]
  source 1..16: mol_type = other DNA
gataccggtatcacgt

SEQ ID NO: 23259 - DNA, 16 bp, synthetic construct
  misc_feature 1..16: note = synthetic [barcode part1]
  source 1..16: mol_type = other DNA
gtcggtaccgttgtct

SEQ ID NO: 23260 - DNA, 16 bp, synthetic construct
  misc_feature 1..16: note = synthetic [barcode part1]
  source 1..16: mol_type = other DNA
cggtggttacgagaac

SEQ ID NO: 23261 - DNA, 16 bp, synthetic construct
  misc_feature 1..16: note = synthetic [barcode part1]
  source 1..16: mol_type = other DNA
tctaatcggaatcggc

SEQ ID NO: 23262 - DNA, 16 bp, synthetic construct
  misc_feature 1..16: note = synthetic [barcode part1]
  source 1..16: mol_type = other DNA
gacggtccaatctaac

SEQ ID NO: 23263 - DNA, 16 bp, synthetic construct
  misc_feature 1..16: note = synthetic [barcode part1]
  source 1..16: mol_type = other DNA
ttcggttcaacacact

SEQ ID NO: 23264 - DNA, 16 bp, synthetic construct
  misc_feature 1..16: note = synthetic [barcode part1]
  source 1..16: mol_type = other DNA
cctaactaaggtcggt

SEQ ID NO: 23265 - DNA, 16 bp, synthetic construct
  misc_feature 1..16: note = synthetic [barcode part1]
  source 1..16: mol_type = other DNA
acctaagtaaggtgac

SEQ ID NO: 23266 - DNA, 16 bp, synthetic construct
  misc_feature 1..16: note = synthetic [barcode part1]
  source 1..16: mol_type = other DNA
gttaagacctcgatcg

SEQ ID NO: 23267 - DNA, 16 bp, synthetic construct
  misc_feature 1..16: note = synthetic [barcode part1]
  source 1..16: mol_type = other DNA
agtccgcctaccttag

SEQ ID NO: 23268 - DNA, 16 bp, synthetic construct
  misc_feature 1..16: note = synthetic [barcode part1]
  source 1..16: mol_type = other DNA
cctgttcgtggataag

SEQ ID NO: 23269 - DNA, 16 bp, synthetic construct
  misc_feature 1..16: note = synthetic [barcode part1]
  source 1..16: mol_type = other DNA
cacctgtagattccgc

SEQ ID NO: 23270 - DNA, 16 bp, synthetic construct
  misc_feature 1..16: note = synthetic [barcode part1]
  source 1..16: mol_type = other DNA
tgtatcgtcgactccg

SEQ ID NO: 23271 - DNA, 16 bp, synthetic construct
  misc_feature 1..16: note = synthetic [barcode part1]
  source 1..16: mol_type = other DNA
gacgttgcagtcaact

SEQ ID NO: 23272 - DNA, 16 bp, synthetic construct
  misc_feature 1..16: note = synthetic [barcode part1]
  source 1..16: mol_type = other DNA
gagttgtgtgagaatc

SEQ ID NO: 23273 - DNA, 16 bp, synthetic construct
  misc_feature 1..16: note = synthetic [barcode part1]
  source 1..16: mol_type = other DNA
gacgaaggtatccgac

SEQ ID NO: 23274 - DNA, 16 bp, synthetic construct
  misc_feature 1..16: note = synthetic [barcode part1]
  source 1..16: mol_type = other DNA
tgttggttgactgcag

SEQ ID NO: 23275 - DNA, 16 bp, synthetic construct
  misc_feature 1..16: note = synthetic [barcode part1]
  source 1..16: mol_type = other DNA
gtaagatcggacgtcg

SEQ ID NO: 23276 - DNA, 16 bp, synthetic construct
  misc_feature 1..16: note = synthetic [barcode part1]
  source 1..16: mol_type = other DNA
gcaaccgtctctcaac

SEQ ID NO: 23277 - DNA, 16 bp, synthetic construct
  misc_feature 1..16: note = synthetic [barcode part1]
  source 1..16: mol_type = other DNA
tgagatctcaggatcc

SEQ ID NO: 23278 - DNA, 16 bp, synthetic construct
  misc_feature 1..16: note = synthetic [barcode part1]
  source 1..16: mol_type = other DNA
ataattcgtccttgcg

SEQ ID NO: 23279 - DNA, 16 bp, synthetic construct
  misc_feature 1..16: note = synthetic [barcode part1]
  source 1..16: mol_type = other DNA
cgaattactccacgtt

SEQ ID NO: 23280 - DNA, 16 bp, synthetic construct
  misc_feature 1..16: note = synthetic [barcode part1]
  source 1..16: mol_type = other DNA
agagaatcttgcagac

SEQ ID NO: 23281 - DNA, 16 bp, synthetic construct
  misc_feature 1..16: note = synthetic [barcode part1]
  source 1..16: mol_type = other DNA
gacgagaaggacaatc

SEQ ID NO: 23282 - DNA, 16 bp, synthetic construct
  misc_feature 1..16: note = synthetic [barcode part1]
  source 1..16: mol_type = other DNA
ccttaagaccttggag

SEQ ID NO: 23283 - DNA, 16 bp, synthetic construct
  misc_feature 1..16: note = synthetic [barcode part1]
  source 1..16: mol_type = other DNA
tacacacacacgtacg

SEQ ID NO: 23284 - DNA, 16 bp, synthetic construct
  misc_feature 1..16: note = synthetic [barcode part1]
  source 1..16: mol_type = other DNA
gccggtgtgtcttgtt

SEQ ID NO: 23285 - DNA, 16 bp, synthetic construct
  misc_feature 1..16: note = synthetic [barcode part1]
  source 1..16: mol_type = other DNA
agtacgtgtacgttgc

SEQ ID NO: 23286 - DNA, 16 bp, synthetic construct
  misc_feature 1..16: note = synthetic [barcode part1]
  source 1..16: mol_type = other DNA
aacaacagtggtggag

SEQ ID NO: 23287 - DNA, 16 bp, synthetic construct
  misc_feature 1..16: note = synthetic [barcode part1]
  source 1..16: mol_type = other DNA
cactctcctcttgtag

SEQ ID NO: 23288 - DNA, 16 bp, synthetic construct
  misc_feature 1..16: note = synthetic [barcode part1]
  source 1..16: mol_type = other DNA
acaatagaggcacttg

SEQ ID NO: 23289 - DNA, 16 bp, synthetic construct
  misc_feature 1..16: note = synthetic [barcode part1]
  source 1..16: mol_type = other DNA
cgcgaggattaggttg

SEQ ID NO: 23290 - DNA, 16 bp, synthetic construct
  misc_feature 1..16: note = synthetic [barcode part1]
  source 1..16: mol_type = other DNA
ccttaacttgacgtgt

SEQ ID NO: 23291 - DNA, 16 bp, synthetic construct
  misc_feature 1..16: note = synthetic [barcode part1]
  source 1..16: mol_type = other DNA
tcagttccgttccgtt

SEQ ID NO: 23292 - DNA, 16 bp, synthetic construct
  misc_feature 1..16: note = synthetic [barcode part1]
  source 1..16: mol_type = other DNA
gagtactacttgtggc

SEQ ID NO: 23293 - DNA, 16 bp, synthetic construct
  misc_feature 1..16: note = synthetic [barcode part1]
  source 1..16: mol_type = other DNA
acgaagataatccggt

SEQ ID NO: 23294 - DNA, 16 bp, synthetic construct
  misc_feature 1..16: note = synthetic [barcode part1]
  source 1..16: mol_type = other DNA
tgtataacaccggcac

SEQ ID NO: 23295 - DNA, 16 bp, synthetic construct
  misc_feature 1..16: note = synthetic [barcode part1]
  source 1..16: mol_type = other DNA
tagtcaagtgccacgt

SEQ ID NO: 23296 - DNA, 16 bp, synthetic construct
  misc_feature 1..16: note = synthetic [barcode part1]
  source 1..16: mol_type = other DNA
tgaagtcgtgtgtacc

SEQ ID NO: 23297 - DNA, 16 bp, synthetic construct
  misc_feature 1..16: note = synthetic [barcode part1]
  source 1..16: mol_type = other DNA
acgcgatcacacaact

SEQ ID NO: 23298 - DNA, 16 bp, synthetic construct
  misc_feature 1..16: note = synthetic [barcode part1]
  source 1..16: mol_type = other DNA
cgcggatataacggac

SEQ ID NO: 23299 - DNA, 16 bp, synthetic construct
  misc_feature 1..16: note = synthetic [barcode part1]
  source 1..16: mol_type = other DNA
ttggataggcactcgt

SEQ ID NO: 23300 - DNA, 16 bp, synthetic construct
  misc_feature 1..16: note = synthetic [barcode part1]
  source 1..16: mol_type = other DNA
tgaaccagatcgtcac

SEQ ID NO: 23301 - DNA, 16 bp, synthetic construct
  misc_feature 1..16: note = synthetic [barcode part1]
  source 1..16: mol_type = other DNA
gtgacagttgttgtcg

SEQ ID NO: 23302 - DNA, 16 bp, synthetic construct
  misc_feature 1..16: note = synthetic [barcode part1]
  source 1..16: mol_type = other DNA
tcgaactggtctaacg

SEQ ID NO: 23303 - DNA, 16 bp, synthetic construct
  misc_feature 1..16: note = synthetic [barcode part1]
  source 1..16: mol_type = other DNA
ttgttcgtaccgtagt

SEQ ID NO: 23304 - DNA, 16 bp, synthetic construct
  misc_feature 1..16: note = synthetic [barcode part1]
  source 1..16: mol_type = other DNA
gtgcaaccgcgtaatt

SEQ ID NO: 23305 - DNA, 16 bp, synthetic construct
  misc_feature 1..16: note = synthetic [barcode part1]
  source 1..16: mol_type = other DNA
gccacaatctgaggtt

SEQ ID NO: 23306 - DNA, 16 bp, synthetic construct
  misc_feature 1..16: note = synthetic [barcode part1]
  source 1..16: mol_type = other DNA
ttgtgttccgtcaggc

SEQ ID NO: 23307 - DNA, 16 bp, synthetic construct
  misc_feature 1..16: note = synthetic [barcode part1]
  source 1..16: mol_type = other DNA
atacgcgcaactgact

SEQ ID NO: 23308 - DNA, 16 bp, synthetic construct
  misc_feature 1..16: note = synthetic [barcode part1]
  source 1..16: mol_type = other DNA
ccacggtctaagattg

SEQ ID NO: 23309 - DNA, 16 bp, synthetic construct
  misc_feature 1..16: note = synthetic [barcode part1]
  source 1..16: mol_type = other DNA
aattcaactggcgacc

SEQ ID NO: 23310 - DNA, 16 bp, synthetic construct
  misc_feature 1..16: note = synthetic [barcode part1]
  source 1..16: mol_type = other DNA
acgtcttatcgttggt

SEQ ID NO: 23311 - DNA, 16 bp, synthetic construct
  misc_feature 1..16: note = synthetic [barcode part1]
  source 1..16: mol_type = other DNA
ttcggttactgacgtt

SEQ ID NO: 23312 - DNA, 16 bp, synthetic construct
  misc_feature 1..16: note = synthetic [barcode part1]
  source 1..16: mol_type = other DNA
cacactctgaactatc

SEQ ID NO: 23313 - DNA, 16 bp, synthetic construct
  misc_feature 1..16: note = synthetic [barcode part1]
  source 1..16: mol_type = other DNA
aactctgaacaccgtg

SEQ ID NO: 23314 - DNA, 16 bp, synthetic construct
  misc_feature 1..16: note = synthetic [barcode part1]
  source 1..16: mol_type = other DNA
tccttcgtcgtgtgag

SEQ ID NO: 23315 - DNA, 16 bp, synthetic construct
  misc_feature 1..16: note = synthetic [barcode part1]
  source 1..16: mol_type = other DNA
tctcttcaaggtcctc

SEQ ID NO: 23316 - DNA, 16 bp, synthetic construct
  misc_feature 1..16: note = synthetic [barcode part1]
  source 1..16: mol_type = other DNA
attaccgtctcgtgcg

SEQ ID NO: 23317 - DNA, 16 bp, synthetic construct
  misc_feature 1..16: note = synthetic [barcode part1]
  source 1..16: mol_type = other DNA
tcaaggtagtgtcgtc

SEQ ID NO: 23318 - DNA, 16 bp, synthetic construct
  misc_feature 1..16: note = synthetic [barcode part1]
  source 1..16: mol_type = other DNA
gatcctactacttgtg

SEQ ID NO: 23319 - DNA, 16 bp, synthetic construct
  misc_feature 1..16: note = synthetic [barcode part1]
  source 1..16: mol_type = other DNA
ttcctctcggttgatc

SEQ ID NO: 23320 - DNA, 16 bp, synthetic construct
  misc_feature 1..16: note = synthetic [barcode part1]
  source 1..16: mol_type = other DNA
cctggtggttcaatag

SEQ ID NO: 23321 - DNA, 16 bp, synthetic construct
  misc_feature 1..16: note = synthetic [barcode part1]
  source 1..16: mol_type = other DNA
ttacctacttgcctgc

SEQ ID NO: 23322 - DNA, 16 bp, synthetic construct
  misc_feature 1..16: note = synthetic [barcode part1]
  source 1..16: mol_type = other DNA
tggacgagagtctcag

SEQ ID NO: 23323 - DNA, 16 bp, synthetic construct
  misc_feature 1..16: note = synthetic [barcode part1]
  source 1..16: mol_type = other DNA
ccttcggtgtatagtt

SEQ ID NO: 23324 - DNA, 16 bp, synthetic construct
  misc_feature 1..16: note = synthetic [barcode part1]
  source 1..16: mol_type = other DNA
tgcgacgtattcgtcc

SEQ ID NO: 23325 - DNA, 16 bp, synthetic construct
  misc_feature 1..16: note = synthetic [barcode part1]
  source 1..16: mol_type = other DNA
ttctactcgtcgtctg

SEQ ID NO: 23326 - DNA, 16 bp, synthetic construct
  misc_feature 1..16: note = synthetic [barcode part1]
  source 1..16: mol_type = other DNA
aagaggcagatatctc

SEQ ID NO: 23327 - DNA, 16 bp, synthetic construct
  misc_feature 1..16: note = synthetic [barcode part1]
  source 1..16: mol_type = other DNA
aaggccttactcgcct

SEQ ID NO: 23328 - DNA, 16 bp, synthetic construct
  misc_feature 1..16: note = synthetic [barcode part1]
  source 1..16: mol_type = other DNA
gtactcctatacctcc

SEQ ID NO: 23329 - DNA, 16 bp, synthetic construct
  misc_feature 1..16: note = synthetic [barcode part1]
  source 1..16: mol_type = other DNA
gttcagatcgccttgc

SEQ ID NO: 23330 - DNA, 16 bp, synthetic construct
  misc_feature 1..16: note = synthetic [barcode part1]
  source 1..16: mol_type = other DNA
tacacctggaccacct

SEQ ID NO: 23331 - DNA, 16 bp, synthetic construct
  misc_feature 1..16: note = synthetic [barcode part1]
  source 1..16: mol_type = other DNA
atcgtggtagacaagt

SEQ ID NO: 23332 - DNA, 16 bp, synthetic construct
  misc_feature 1..16: note = synthetic [barcode part1]
  source 1..16: mol_type = other DNA
attcggatcacggatc

SEQ ID NO: 23333 - DNA, 16 bp, synthetic construct
  misc_feature 1..16: note = synthetic [barcode part1]
  source 1..16: mol_type = other DNA
taatcctgcactggcc

SEQ ID NO: 23334 - DNA, 16 bp, synthetic construct
  misc_feature 1..16: note = synthetic [barcode part1]
  source 1..16: mol_type = other DNA
gaattgccactagacc

SEQ ID NO: 23335 - DNA, 16 bp, synthetic construct
  misc_feature 1..16: note = synthetic [barcode part1]
  source 1..16: mol_type = other DNA
gaggtagtctaggcac

SEQ ID NO: 23336 - DNA, 16 bp, synthetic construct
  misc_feature 1..16: note = synthetic [barcode part1]
  source 1..16: mol_type = other DNA
gacagttcggtaactc

SEQ ID NO: 23337 - DNA, 16 bp, synthetic construct
  misc_feature 1..16: note = synthetic [barcode part1]
  source 1..16: mol_type = other DNA
cgttccgacgaatcct

SEQ ID NO: 23338 - DNA, 16 bp, synthetic construct
  misc_feature 1..16: note = synthetic [barcode part1]
  source 1..16: mol_type = other DNA
tatcgtcttacacggt

SEQ ID NO: 23339 - DNA, 16 bp, synthetic construct
  misc_feature 1..16: note = synthetic [barcode part1]
  source 1..16: mol_type = other DNA
cgcaattctgaacgtg

SEQ ID NO: 23340 - DNA, 16 bp, synthetic construct
  misc_feature 1..16: note = synthetic [barcode part1]
  source 1..16: mol_type = other DNA
cctacaacaggtatcg

SEQ ID NO: 23341 - DNA, 16 bp, synthetic construct
  misc_feature 1..16: note = synthetic [barcode part1]
  source 1..16: mol_type = other DNA
aagtgtacgtggagag

SEQ ID NO: 23342 - DNA, 16 bp, synthetic construct
  misc_feature 1..16: note = synthetic [barcode part1]
  source 1..16: mol_type = other DNA
aatacgtcgcggttgt

SEQ ID NO: 23343 - DNA, 16 bp, synthetic construct
  misc_feature 1..16: note = synthetic [barcode part1]
  source 1..16: mol_type = other DNA
gacagttccgacaatc

SEQ ID NO: 23344 - DNA, 16 bp, synthetic construct
  misc_feature 1..16: note = synthetic [barcode part1]
  source 1..16: mol_type = other DNA
gccggattaggttatc

SEQ ID NO: 23345 - DNA, 16 bp, synthetic construct
  misc_feature 1..16: note = synthetic [barcode part1]
  source 1..16: mol_type = other DNA
actcaagtggagtggc

SEQ ID NO: 23346 - DNA, 16 bp, synthetic construct
  misc_feature 1..16: note = synthetic [barcode part1]
  source 1..16: mol_type = other DNA
tcagacaaggttcgtc

SEQ ID NO: 23347 - DNA, 16 bp, synthetic construct
  misc_feature 1..16: note = synthetic [barcode part1]
  source 1..16: mol_type = other DNA
gtagtgcaactccagt

SEQ ID NO: 23348 - DNA, 16 bp, synthetic construct
  misc_feature 1..16: note = synthetic [barcode part1]
  source 1..16: mol_type = other DNA
acgtgcacgatactgt

SEQ ID NO: 23349 - DNA, 16 bp, synthetic construct
  misc_feature 1..16: note = synthetic [barcode part1]
  source 1..16: mol_type = other DNA
atatactctgcgcgag

SEQ ID NO: 23350 - DNA, 16 bp, synthetic construct
  misc_feature 1..16: note = synthetic [barcode part1]
  source 1..16: mol_type = other DNA
cctgcgtgtattctct

SEQ ID NO: 23351 - DNA, 16 bp, synthetic construct
  misc_feature 1..16: note = synthetic [barcode part1]
  source 1..16: mol_type = other DNA
tcacctccgcgttaag

SEQ ID NO: 23352 - DNA, 16 bp, synthetic construct
  misc_feature 1..16: note = synthetic [barcode part1]
  source 1..16: mol_type = other DNA
atcaagtcactctcgt

SEQ ID NO: 23353 - DNA, 16 bp, synthetic construct
  misc_feature 1..16: note = synthetic [barcode part1]
  source 1..16: mol_type = other DNA
acactaacttcgtcgt

SEQ ID NO: 23354 - DNA, 16 bp, synthetic construct
  misc_feature 1..16: note = synthetic [barcode part1]
  source 1..16: mol_type = other DNA
gtaagaacctctgcac

SEQ ID NO: 23355 - DNA, 16 bp, synthetic construct
  misc_feature 1..16: note = synthetic [barcode part1]
  source 1..16: mol_type = other DNA
cgtcaataacttctcg

SEQ ID NO: 23356 - DNA, 16 bp, synthetic construct
  misc_feature 1..16: note = synthetic [barcode part1]
  source 1..16: mol_type = other DNA
agtcttgttattcgcg

SEQ ID NO: 23357 - DNA, 16 bp, synthetic construct
  misc_feature 1..16: note = synthetic [barcode part1]
  source 1..16: mol_type = other DNA
acttcgtgcgaccgtt

SEQ ID NO: 23358 - DNA, 16 bp, synthetic construct
  misc_feature 1..16: note = synthetic [barcode part1]
  source 1..16: mol_type = other DNA
atctgtgtcagacgtg

SEQ ID NO: 23359 - DNA, 16 bp, synthetic construct
  misc_feature 1..16: note = synthetic [barcode part1]
  source 1..16: mol_type = other DNA
agtcttggttcacttg

SEQ ID NO: 23360 - DNA, 16 bp, synthetic construct
  misc_feature 1..16: note = synthetic [barcode part1]
  source 1..16: mol_type = other DNA
ttctcaactggtctcc

SEQ ID NO: 23361 - DNA, 16 bp, synthetic construct
  misc_feature 1..16: note = synthetic [barcode part1]
  source 1..16: mol_type = other DNA
tcagacagaacggtgc

SEQ ID NO: 23362 - DNA, 16 bp, synthetic construct
  misc_feature 1..16: note = synthetic [barcode part1]
  source 1..16: mol_type = other DNA
tccgacttacgattac

SEQ ID NO: 23363 - DNA, 16 bp, synthetic construct
  misc_feature 1..16: note = synthetic [barcode part1]
  source 1..16: mol_type = other DNA
gacaccgtcaatcaac

SEQ ID NO: 23364 - DNA, 16 bp, synthetic construct
  misc_feature 1..16: note = synthetic [barcode part1]
  source 1..16: mol_type = other DNA
tacggtaatctgttcc

SEQ ID NO: 23365 - DNA, 16 bp, synthetic construct
  misc_feature 1..16: note = synthetic [barcode part1]
  source 1..16: mol_type = other DNA
tctgcgcgttgagtct

SEQ ID NO: 23366 - DNA, 16 bp, synthetic construct
  misc_feature 1..16: note = synthetic [barcode part1]
  source 1..16: mol_type = other DNA
tgtccgcacggtatct

SEQ ID NO: 23367 - DNA, 16 bp, synthetic construct
  misc_feature 1..16: note = synthetic [barcode part1]
  source 1..16: mol_type = other DNA
tcgagtggtgaatcct

SEQ ID NO: 23368 - DNA, 16 bp, synthetic construct
  misc_feature 1..16: note = synthetic [barcode part1]
  source 1..16: mol_type = other DNA
gactacaagagtcaac

SEQ ID NO: 23369 - DNA, 16 bp, synthetic construct
  misc_feature 1..16: note = synthetic [barcode part1]
  source 1..16: mol_type = other DNA
ttgagtggtccgtaac

SEQ ID NO: 23370 - DNA, 16 bp, synthetic construct
  misc_feature 1..16: note = synthetic [barcode part1]
  source 1..16: mol_type = other DNA
aggtaccgttcgtagt

SEQ ID NO: 23371 - DNA, 16 bp, synthetic construct
  misc_feature 1..16: note = synthetic [barcode part1]
  source 1..16: mol_type = other DNA
gttctcgcaagtcgtc

SEQ ID NO: 23372 - DNA, 16 bp, synthetic construct
  misc_feature 1..16: note = synthetic [barcode part1]
  source 1..16: mol_type = other DNA
ttgagtgatctgcgac

SEQ ID NO: 23373 - DNA, 16 bp, synthetic construct
  misc_feature 1..16: note = synthetic [barcode part1]
  source 1..16: mol_type = other DNA
gacggagttctactgt

SEQ ID NO: 23374 - DNA, 16 bp, synthetic construct
  misc_feature 1..16: note = synthetic [barcode part1]
  source 1..16: mol_type = other DNA
tattgccggatactct

SEQ ID NO: 23375 - DNA, 16 bp, synthetic construct
  misc_feature 1..16: note = synthetic [barcode part1]
  source 1..16: mol_type = other DNA
tgaacggtccaaggtg

SEQ ID NO: 23376 - DNA, 16 bp, synthetic construct
  misc_feature 1..16: note = synthetic [barcode part1]
  source 1..16: mol_type = other DNA
cgcaagattaacggcg

SEQ ID NO: 23377 - DNA, 16 bp, synthetic construct
  misc_feature 1..16: note = synthetic [barcode part1]
  source 1..16: mol_type = other DNA
tcagacggcgacaagt

SEQ ID NO: 23378 - DNA, 16 bp, synthetic construct
  misc_feature 1..16: note = synthetic [barcode part1]
  source 1..16: mol_type = other DNA
ttgacgaacaggaatc

SEQ ID NO: 23379 - DNA, 16 bp, synthetic construct
  misc_feature 1..16: note = synthetic [barcode part1]
  source 1..16: mol_type = other DNA
attctgtgtggttgtc

SEQ ID NO: 23380 - DNA, 16 bp, synthetic construct
  misc_feature 1..16: note = synthetic [barcode part1]
  source 1..16: mol_type = other DNA
gcaaggtattccgttg

SEQ ID NO: 23381 - DNA, 16 bp, synthetic construct
  misc_feature 1..16: note = synthetic [barcode part1]
  source 1..16: mol_type = other DNA
cgtcctggagtctgtt

SEQ ID NO: 23382 - DNA, 16 bp, synthetic construct
  misc_feature 1..16: note = synthetic [barcode part1]
  source 1..16: mol_type = other DNA
tcactacctgtcctgt

SEQ ID NO: 23383 - DNA, 16 bp, synthetic construct
  misc_feature 1..16: note = synthetic [barcode part1]
  source 1..16: mol_type = other DNA
gagaacggtgatctgc

SEQ ID NO: 23384 - DNA, 16 bp, synthetic construct
  misc_feature 1..16: note = synthetic [barcode part1]
  source 1..16: mol_type = other DNA
cgtattctgagtcgtt

SEQ ID NO: 23385 - DNA, 16 bp, synthetic construct
  misc_feature 1..16: note = synthetic [barcode part1]
  source 1..16: mol_type = other DNA
aggacgttatacctcg

SEQ ID NO: 23386 - DNA, 16 bp, synthetic construct
  misc_feature 1..16: note = synthetic [barcode part1]
  source 1..16: mol_type = other DNA
gcagtacggttgatct

SEQ ID NO: 23387 - DNA, 16 bp, synthetic construct
  misc_feature 1..16: note = synthetic [barcode part1]
  source 1..16: mol_type = other DNA
cggttcgaacaattcg

SEQ ID NO: 23388 - DNA, 16 bp, synthetic construct
  misc_feature 1..16: note = synthetic [barcode part1]
  source 1..16: mol_type = other DNA
tcaagtacgccgtcct

SEQ ID NO: 23389 - DNA, 16 bp, synthetic construct
  misc_feature 1..16: note = synthetic [barcode part1]
  source 1..16: mol_type = other DNA
agtccttgtatccagt

SEQ ID NO: 23390 - DNA, 16 bp, synthetic construct
  misc_feature 1..16: note = synthetic [barcode part1]
  source 1..16: mol_type = other DNA
ccttggtcgtaccaac

SEQ ID NO: 23391 - DNA, 16 bp, synthetic construct
  misc_feature 1..16: note = synthetic [barcode part1]
  source 1..16: mol_type = other DNA
cgacaccttacagtag

SEQ ID NO: 23392 - DNA, 16 bp, synthetic construct
  misc_feature 1..16: note = synthetic [barcode part1]
  source 1..16: mol_type = other DNA
agaggtaggcggtctt

SEQ ID NO: 23393 - DNA, 16 bp, synthetic construct
  misc_feature 1..16: note = synthetic [barcode part1]
  source 1..16: mol_type = other DNA
actctagacacacacg

SEQ ID NO: 23394 - DNA, 16 bp, synthetic construct
  misc_feature 1..16: note = synthetic [barcode part1]
  source 1..16: mol_type = other DNA
taacggcgtacgaggt

SEQ ID NO: 23395 - DNA, 16 bp, synthetic construct
  misc_feature 1..16: note = synthetic [barcode part1]
  source 1..16: mol_type = other DNA
agtccgaacgcgaagt

SEQ ID NO: 23396 - DNA, 16 bp, synthetic construct
  misc_feature 1..16: note = synthetic [barcode part1]
  source 1..16: mol_type = other DNA
tgacctacggattgtg

SEQ ID NO: 23397 - DNA, 16 bp, synthetic construct
  misc_feature 1..16: note = synthetic [barcode part1]
  source 1..16: mol_type = other DNA
ttctatcctgcctcag

SEQ ID NO: 23398 - DNA, 16 bp, synthetic construct
  misc_feature 1..16: note = synthetic [barcode part1]
  source 1..16: mol_type = other DNA
cggagtcactgattac

SEQ ID NO: 23399 - DNA, 16 bp, synthetic construct
  misc_feature 1..16: note = synthetic [barcode part1]
  source 1..16: mol_type = other DNA
ccgagaagatctgcag

SEQ ID NO: 23400 - DNA, 16 bp, synthetic construct
  misc_feature 1..16: note = synthetic [barcode part1]
  source 1..16: mol_type = other DNA
tggattcgtcctattg

SEQ ID NO: 23401 - DNA, 16 bp, synthetic construct
  misc_feature 1..16: note = synthetic [barcode part1]
  source 1..16: mol_type = other DNA
tcgttccaatcacgcg

SEQ ID NO: 23402 - DNA, 16 bp, synthetic construct
  misc_feature 1..16: note = synthetic [barcode part1]
  source 1..16: mol_type = other DNA
aactcaggacttggtc

SEQ ID NO: 23403 - DNA, 16 bp, synthetic construct
  misc_feature 1..16: note = synthetic [barcode part1]
  source 1..16: mol_type = other DNA
caatcagtgtggtacc

SEQ ID NO: 23404 - DNA, 16 bp, synthetic construct
  misc_feature 1..16: note = synthetic [barcode part1]
  source 1..16: mol_type = other DNA
agttcggaaggtgcgt

SEQ ID NO: 23405 - DNA, 16 bp, synthetic construct
  misc_feature 1..16: note = synthetic [barcode part1]
  source 1..16: mol_type = other DNA
acggtagttacgcgag

SEQ ID NO: 23406 - DNA, 16 bp, synthetic construct
  misc_feature 1..16: note = synthetic [barcode part1]
  source 1..16: mol_type = other DNA
taggagacttcggtct

SEQ ID NO: 23407 - DNA, 16 bp, synthetic construct
  misc_feature 1..16: note = synthetic [barcode part1]
  source 1..16: mol_type = other DNA
tcacggagttcgagtt

SEQ ID NO: 23408 - DNA, 16 bp, synthetic construct
  misc_feature 1..16: note = synthetic [barcode part1]
  source 1..16: mol_type = other DNA
caggtagattcgttcg

SEQ ID NO: 23409 - DNA, 16 bp, synthetic construct
  misc_feature 1..16: note = synthetic [barcode part1]
  source 1..16: mol_type = other DNA
gaactgtggtgacttc

SEQ ID NO: 23410 - DNA, 16 bp, synthetic construct
  misc_feature 1..16: note = synthetic [barcode part1]
  source 1..16: mol_type = other DNA
tagaaggccgacttct

SEQ ID NO: 23411 - DNA, 16 bp, synthetic construct
  misc_feature 1..16: note = synthetic [barcode part1]
  source 1..16: mol_type = other DNA
cagtctcgcgttagtc

SEQ ID NO: 23412 - DNA, 16 bp, synthetic construct
  misc_feature 1..16: note = synthetic [barcode part1]
  source 1..16: mol_type = other DNA
acgtcgacaacctcct

SEQ ID NO: 23413 - DNA, 16 bp, synthetic construct
  misc_feature 1..16: note = synthetic [barcode part1]
  source 1..16: mol_type = other DNA
tcgcaccagtgtaagt

SEQ ID NO: 23414 - DNA, 16 bp, synthetic construct
  misc_feature 1..16: note = synthetic [barcode part1]
  source 1..16: mol_type = other DNA
cctgacttaatacacc

SEQ ID NO: 23415 - DNA, 16 bp, synthetic construct
  misc_feature 1..16: note = synthetic [barcode part1]
  source 1..16: mol_type = other DNA
cgtattgaactccttg

SEQ ID NO: 23416 - DNA, 16 bp, synthetic construct
  misc_feature 1..16: note = synthetic [barcode part1]
  source 1..16: mol_type = other DNA
atctgttcctgaagtc

SEQ ID NO: 23417 - DNA, 16 bp, synthetic construct
  misc_feature 1..16: note = synthetic [barcode part1]
  source 1..16: mol_type = other DNA
tcaagaactcctgacg

SEQ ID NO: 23418 - DNA, 16 bp, synthetic construct
  misc_feature 1..16: note = synthetic [barcode part1]
  source 1..16: mol_type = other DNA
tcacagtctgagactg

SEQ ID NO: 23419 - DNA, 16 bp, synthetic construct
  misc_feature 1..16: note = synthetic [barcode part1]
  source 1..16: mol_type = other DNA
actagtagtggccact

SEQ ID NO: 23420 - DNA, 16 bp, synthetic construct
  misc_feature 1..16: note = synthetic [barcode part1]
  source 1..16: mol_type = other DNA
tggtgattacactctc

SEQ ID NO: 23421 - DNA, 16 bp, synthetic construct
  misc_feature 1..16: note = synthetic [barcode part1]
  source 1..16: mol_type = other DNA
cctactacggtaaggt

SEQ ID NO: 23422 - DNA, 16 bp, synthetic construct
  misc_feature 1..16: note = synthetic [barcode part1]
  source 1..16: mol_type = other DNA
aggtaattacgaaccg

SEQ ID NO: 23423 - DNA, 16 bp, synthetic construct
  misc_feature 1..16: note = synthetic [barcode part1]
  source 1..16: mol_type = other DNA
ccgcactactcttact

SEQ ID NO: 23424 - DNA, 16 bp, synthetic construct
  misc_feature 1..16: note = synthetic [barcode part1]
  source 1..16: mol_type = other DNA
gccggattctagtaac

SEQ ID NO: 23425 - DNA, 16 bp, synthetic construct
  misc_feature 1..16: note = synthetic [barcode part1]
  source 1..16: mol_type = other DNA
gtacacgaccgtgatt

SEQ ID NO: 23426 - DNA, 16 bp, synthetic construct
  misc_feature 1..16: note = synthetic [barcode part1]
  source 1..16: mol_type = other DNA
gcgttagaggataact

SEQ ID NO: 23427 - DNA, 16 bp, synthetic construct
  misc_feature 1..16: note = synthetic [barcode part1]
  source 1..16: mol_type = other DNA
gaactcgtctaatcct

SEQ ID NO: 23428 - DNA, 16 bp, synthetic construct
  misc_feature 1..16: note = synthetic [barcode part1]
  source 1..16: mol_type = other DNA
caatcttacacaccac

SEQ ID NO: 23429 - DNA, 16 bp, synthetic construct
  misc_feature 1..16: note = synthetic [barcode part1]
  source 1..16: mol_type = other DNA
caatcaccgttgacag

SEQ ID NO: 23430 - DNA, 16 bp, synthetic construct
  misc_feature 1..16: note = synthetic [barcode part1]
  source 1..16: mol_type = other DNA
tctctaggccgtacgt

SEQ ID NO: 23431 - DNA, 16 bp, synthetic construct
  misc_feature 1..16: note = synthetic [barcode part1]
  source 1..16: mol_type = other DNA
gacactaatactgcgc

SEQ ID NO: 23432 - DNA, 16 bp, synthetic construct
  misc_feature 1..16: note = synthetic [barcode part1]
  source 1..16: mol_type = other DNA
aactctgaacagacag

SEQ ID NO: 23433 - DNA, 16 bp, synthetic construct
  misc_feature 1..16: note = synthetic [barcode part1]
  source 1..16: mol_type = other DNA
tgtcctgtgttactcc

SEQ ID NO: 23434 - DNA, 16 bp, synthetic construct
  misc_feature 1..16: note = synthetic [barcode part1]
  source 1..16: mol_type = other DNA
atctgtccggacaagt

SEQ ID NO: 23435 - DNA, 16 bp, synthetic construct
  misc_feature 1..16: note = synthetic [barcode part1]
  source 1..16: mol_type = other DNA
caagaggtacgactgc

SEQ ID NO: 23436 - DNA, 16 bp, synthetic construct
  misc_feature 1..16: note = synthetic [barcode part1]
  source 1..16: mol_type = other DNA
agagagtccacacggt

SEQ ID NO: 23437 - DNA, 16 bp, synthetic construct
  misc_feature 1..16: note = synthetic [barcode part1]
  source 1..16: mol_type = other DNA
tagatcgcgatccaac

SEQ ID NO: 23438 - DNA, 16 bp, synthetic construct
  misc_feature 1..16: note = synthetic [barcode part1]
  source 1..16: mol_type = other DNA
agttacgcgtagttgc

SEQ ID NO: 23439 - DNA, 16 bp, synthetic construct
  misc_feature 1..16: note = synthetic [barcode part1]
  source 1..16: mol_type = other DNA
tggtcagtgcaacact

SEQ ID NO: 23440 - DNA, 16 bp, synthetic construct
  misc_feature 1..16: note = synthetic [barcode part1]
  source 1..16: mol_type = other DNA
gcaattacggcgtact

SEQ ID NO: 23441 - DNA, 16 bp, synthetic construct
  misc_feature 1..16: note = synthetic [barcode part1]
  source 1..16: mol_type = other DNA
tacgacagtccgttcc

SEQ ID NO: 23442 - DNA, 16 bp, synthetic construct
  misc_feature 1..16: note = synthetic [barcode part1]
  source 1..16: mol_type = other DNA
cgtgtaacgttccgtc

SEQ ID NO: 23443 - DNA, 16 bp, synthetic construct
  misc_feature 1..16: note = synthetic [barcode part1]
  source 1..16: mol_type = other DNA
gtctaggccacagatt

SEQ ID NO: 23444 - DNA, 16 bp, synthetic construct
  misc_feature 1..16: note = synthetic [barcode part1]
  source 1..16: mol_type = other DNA
accaacactactactc

SEQ ID NO: 23445 - DNA, 16 bp, synthetic construct
  misc_feature 1..16: note = synthetic [barcode part1]
  source 1..16: mol_type = other DNA
gtgtacagagatcctc

SEQ ID NO: 23446 - DNA, 16 bp, synthetic construct
  misc_feature 1..16: note = synthetic [barcode part1]
  source 1..16: mol_type = other DNA
gttactctcgtgaact

SEQ ID NO: 23447 - DNA, 16 bp, synthetic construct
  misc_feature 1..16: note = synthetic [barcode part1]
  source 1..16: mol_type = other DNA
cgtcttaattcgtggt

SEQ ID NO: 23448 - DNA, 16 bp, synthetic construct
  misc_feature 1..16: note = synthetic [barcode part1]
  source 1..16: mol_type = other DNA
tatagactcgccttgt

SEQ ID NO: 23449 - DNA, 16 bp, synthetic construct
  misc_feature 1..16: note = synthetic [barcode part1]
  source 1..16: mol_type = other DNA
gtgactgacgtcaact

SEQ ID NO: 23450 - DNA, 16 bp, synthetic construct
  misc_feature 1..16: note = synthetic [barcode part1]
  source 1..16: mol_type = other DNA
ccttgtgtcttcacac

SEQ ID NO: 23451 - DNA, 16 bp, synthetic construct
  misc_feature 1..16: note = synthetic [barcode part1]
  source 1..16: mol_type = other DNA
tgcacttgagttacct

SEQ ID NO: 23452 - DNA, 16 bp, synthetic construct
  misc_feature 1..16: note = synthetic [barcode part1]
  source 1..16: mol_type = other DNA
gcaccgataaccttcc

SEQ ID NO: 23453 - DNA, 16 bp, synthetic construct
  misc_feature 1..16: note = synthetic [barcode part1]
  source 1..16: mol_type = other DNA
tgcctggtcctatcag

SEQ ID NO: 23454 - DNA, 16 bp, synthetic construct
  misc_feature 1..16: note = synthetic [barcode part1]
  source 1..16: mol_type = other DNA
ccgtgaagacggtagt

SEQ ID NO: 23455 - DNA, 16 bp, synthetic construct
  misc_feature 1..16: note = synthetic [barcode part1]
  source 1..16: mol_type = other DNA
agttaattgacgccgc

SEQ ID NO: 23456 - DNA, 16 bp, synthetic construct
  misc_feature 1..16: note = synthetic [barcode part1]
  source 1..16: mol_type = other DNA
gtgagagtcggattgc

SEQ ID NO: 23457 - DNA, 16 bp, synthetic construct
  misc_feature 1..16: note = synthetic [barcode part1]
  source 1..16: mol_type = other DNA
acgtgactacgcaact

SEQ ID NO: 23458 - DNA, 16 bp, synthetic construct
  misc_feature 1..16: note = synthetic [barcode part1]
  source 1..16: mol_type = other DNA
actctgcaacgtattc

SEQ ID NO: 23459 - DNA, 16 bp, synthetic construct
  misc_feature 1..16: note = synthetic [barcode part1]
  source 1..16: mol_type = other DNA
agagagttaggtctgt

SEQ ID NO: 23460 - DNA, 16 bp, synthetic construct
  misc_feature 1..16: note = synthetic [barcode part1]
  source 1..16: mol_type = other DNA
gtgactaagaggattc

SEQ ID NO: 23461 - DNA, 16 bp, synthetic construct
  misc_feature 1..16: note = synthetic [barcode part1]
  source 1..16: mol_type = other DNA
gtggacctaacctctc

SEQ ID NO: 23462 - DNA, 16 bp, synthetic construct
  misc_feature 1..16: note = synthetic [barcode part1]
  source 1..16: mol_type = other DNA
gcggtataggacttct

SEQ ID NO: 23463 - DNA, 16 bp, synthetic construct
  misc_feature 1..16: note = synthetic [barcode part1]
  source 1..16: mol_type = other DNA
agaggtcgttaacgcg

SEQ ID NO: 23464 - DNA, 16 bp, synthetic construct
  misc_feature 1..16: note = synthetic [barcode part1]
  source 1..16: mol_type = other DNA
gtgccttatcactggc

SEQ ID NO: 23465 - DNA, 16 bp, synthetic construct
  misc_feature 1..16: note = synthetic [barcode part1]
  source 1..16: mol_type = other DNA
cgtattgccttctaag

SEQ ID NO: 23466 - DNA, 16 bp, synthetic construct
  misc_feature 1..16: note = synthetic [barcode part1]
  source 1..16: mol_type = other DNA
gactaacaccgtgatc

SEQ ID NO: 23467 - DNA, 16 bp, synthetic construct
  misc_feature 1..16: note = synthetic [barcode part1]
  source 1..16: mol_type = other DNA
gttgttgtacgaagag

SEQ ID NO: 23468 - DNA, 16 bp, synthetic construct
  misc_feature 1..16: note = synthetic [barcode part1]
  source 1..16: mol_type = other DNA
gttctgactgaggttg

SEQ ID NO: 23469 - DNA, 16 bp, synthetic construct
  misc_feature 1..16: note = synthetic [barcode part1]
  source 1..16: mol_type = other DNA
aatcaccagacgcgag

SEQ ID NO: 23470 - DNA, 16 bp, synthetic construct
  misc_feature 1..16: note = synthetic [barcode part1]
  source 1..16: mol_type = other DNA
tggaggttggactacg

SEQ ID NO: 23471 - DNA, 16 bp, synthetic construct
  misc_feature 1..16: note = synthetic [barcode part1]
  source 1..16: mol_type = other DNA
acgacgcactacaatc

SEQ ID NO: 23472 - DNA, 16 bp, synthetic construct
  misc_feature 1..16: note = synthetic [barcode part1]
  source 1..16: mol_type = other DNA
cgtgagtgcggtaagt

SEQ ID NO: 23473 - DNA, 16 bp, synthetic construct
  misc_feature 1..16: note = synthetic [barcode part1]
  source 1..16: mol_type = other DNA
tctattcagacaggcg

SEQ ID NO: 23474 - DNA, 16 bp, synthetic construct
  misc_feature 1..16: note = synthetic [barcode part1]
  source 1..16: mol_type = other DNA
tccgccaccttcaatt

SEQ ID NO: 23475 - DNA, 16 bp, synthetic construct
  misc_feature 1..16: note = synthetic [barcode part1]
  source 1..16: mol_type = other DNA
atccttggtctggcgt

SEQ ID NO: 23476 - DNA, 16 bp, synthetic construct
  misc_feature 1..16: note = synthetic [barcode part1]
  source 1..16: mol_type = other DNA
ttgcaccacttagtac

SEQ ID NO: 23477 - DNA, 16 bp, synthetic construct
  misc_feature 1..16: note = synthetic [barcode part1]
  source 1..16: mol_type = other DNA
ccgtgtgttctgactg

SEQ ID NO: 23478 - DNA, 16 bp, synthetic construct
  misc_feature 1..16: note = synthetic [barcode part1]
  source 1..16: mol_type = other DNA
tataagtccgcgaacc

SEQ ID NO: 23479 - DNA, 16 bp, synthetic construct
  misc_feature 1..16: note = synthetic [barcode part1]
  source 1..16: mol_type = other DNA
gcaggagagtcactgt

SEQ ID NO: 23480 - DNA, 16 bp, synthetic construct
  misc_feature 1..16: note = synthetic [barcode part1]
  source 1..16: mol_type = other DNA
accgttctctgttacc

SEQ ID NO: 23481 - DNA, 16 bp, synthetic construct
  misc_feature 1..16: note = synthetic [barcode part1]
  source 1..16: mol_type = other DNA
tccgtacgactaccac

SEQ ID NO: 23482 - DNA, 16 bp, synthetic construct
  misc_feature 1..16: note = synthetic [barcode part1]
  source 1..16: mol_type = other DNA
ataccggaagaatcgt

SEQ ID NO: 23483 - DNA, 16 bp, synthetic construct
  misc_feature 1..16: note = synthetic [barcode part1]
  source 1..16: mol_type = other DNA
ccgtaatcacagtgtg

SEQ ID NO: 23484 - DNA, 16 bp, synthetic construct
  misc_feature 1..16: note = synthetic [barcode part1]
  source 1..16: mol_type = other DNA
tacacctctactgagt

SEQ ID NO: 23485 - DNA, 16 bp, synthetic construct
  misc_feature 1..16: note = synthetic [barcode part1]
  source 1..16: mol_type = other DNA
tgcgtattcaaccgag

SEQ ID NO: 23486 - DNA, 16 bp, synthetic construct
  misc_feature 1..16: note = synthetic [barcode part1]
  source 1..16: mol_type = other DNA
acttaccggtgagtgt

SEQ ID NO: 23487 - DNA, 16 bp, synthetic construct
  misc_feature 1..16: note = synthetic [barcode part1]
  source 1..16: mol_type = other DNA
tgtctccgtcagactg

SEQ ID NO: 23488 - DNA, 16 bp, synthetic construct
  misc_feature 1..16: note = synthetic [barcode part1]
  source 1..16: mol_type = other DNA
tcactcgattcacctc

SEQ ID NO: 23489 - DNA, 16 bp, synthetic construct
  misc_feature 1..16: note = synthetic [barcode part1]
  source 1..16: mol_type = other DNA
tcaatatcggccacag

SEQ ID NO: 23490 - DNA, 16 bp, synthetic construct
  misc_feature 1..16: note = synthetic [barcode part1]
  source 1..16: mol_type = other DNA
ataatcttgccaggcg

SEQ ID NO: 23491 - DNA, 16 bp, synthetic construct
  misc_feature 1..16: note = synthetic [barcode part1]
  source 1..16: mol_type = other DNA
aacaaggtggcctctt

SEQ ID NO: 23492 - DNA, 16 bp, synthetic construct
  misc_feature 1..16: note = synthetic [barcode part1]
  source 1..16: mol_type = other DNA
attgaagtagtgtgcg

SEQ ID NO: 23493 - DNA, 16 bp, synthetic construct
  misc_feature 1..16: note = synthetic [barcode part1]
  source 1..16: mol_type = other DNA
cgcacctacaagaact

SEQ ID NO: 23494 - DNA, 16 bp, synthetic construct
  misc_feature 1..16: note = synthetic [barcode part1]
  source 1..16: mol_type = other DNA
agataccaagtctgcc

SEQ ID NO: 23495 - DNA, 16 bp, synthetic construct
  misc_feature 1..16: note = synthetic [barcode part1]
  source 1..16: mol_type = other DNA
tattcacagatcctgc

SEQ ID NO: 23496 - DNA, 16 bp, synthetic construct
  misc_feature 1..16: note = synthetic [barcode part1]
  source 1..16: mol_type = other DNA
atcgtaccgtaccaag

SEQ ID NO: 23497 - DNA, 16 bp, synthetic construct
  misc_feature 1..16: note = synthetic [barcode part1]
  source 1..16: mol_type = other DNA
atacggtgagagattc

SEQ ID NO: 23498 - DNA, 16 bp, synthetic construct
  misc_feature 1..16: note = synthetic [barcode part1]
  source 1..16: mol_type = other DNA
tcactactgtccaagt

SEQ ID NO: 23499 - DNA, 16 bp, synthetic construct
  misc_feature 1..16: note = synthetic [barcode part1]
  source 1..16: mol_type = other DNA
gtgattggagatcggc

SEQ ID NO: 23500 - DNA, 16 bp, synthetic construct
  misc_feature 1..16: note = synthetic [barcode part1]
  source 1..16: mol_type = other DNA
caacgacgagaatact

SEQ ID NO: 23501 - DNA, 16 bp, synthetic construct
  misc_feature 1..16: note = synthetic [barcode part1]
  source 1..16: mol_type = other DNA
atcactctacctgagt

SEQ ID NO: 23502 - DNA, 16 bp, synthetic construct
  misc_feature 1..16: note = synthetic [barcode part1]
  source 1..16: mol_type = other DNA
acttacctccaagact

SEQ ID NO: 23503 - DNA, 16 bp, synthetic construct
  misc_feature 1..16: note = synthetic [barcode part1]
  source 1..16: mol_type = other DNA
tcagtcactgaagtcg

SEQ ID NO: 23504 - DNA, 16 bp, synthetic construct
  misc_feature 1..16: note = synthetic [barcode part1]
  source 1..16: mol_type = other DNA
attgtaaccgcctgcc

SEQ ID NO: 23505 - DNA, 16 bp, synthetic construct
  misc_feature 1..16: note = synthetic [barcode part1]
  source 1..16: mol_type = other DNA
caggttaggtcgttac

SEQ ID NO: 23506 - DNA, 16 bp, synthetic construct
  misc_feature 1..16: note = synthetic [barcode part1]
  source 1..16: mol_type = other DNA
cggtgacttcttatac

SEQ ID NO: 23507 - DNA, 16 bp, synthetic construct
  misc_feature 1..16: note = synthetic [barcode part1]
  source 1..16: mol_type = other DNA
ccaacgactatatcct

SEQ ID NO: 23508 - DNA, 16 bp, synthetic construct
  misc_feature 1..16: note = synthetic [barcode part1]
  source 1..16: mol_type = other DNA
cgttgccttgtcactt

SEQ ID NO: 23509 - DNA, 16 bp, synthetic construct
  misc_feature 1..16: note = synthetic [barcode part1]
  source 1..16: mol_type = other DNA
aagactatcggtgtag

SEQ ID NO: 23510 - DNA, 16 bp, synthetic construct
  misc_feature 1..16: note = synthetic [barcode part1]
  source 1..16: mol_type = other DNA
acagtaactgtgtgag

SEQ ID NO: 23511 - DNA, 16 bp, synthetic construct
  misc_feature 1..16: note = synthetic [barcode part1]
  source 1..16: mol_type = other DNA
ccagttagtcgatcag

SEQ ID NO: 23512 - DNA, 16 bp, synthetic construct
  misc_feature 1..16: note = synthetic [barcode part1]
  source 1..16: mol_type = other DNA
gacacagtctacgttg

SEQ ID NO: 23513 - DNA, 16 bp, synthetic construct
  misc_feature 1..16: note = synthetic [barcode part1]
  source 1..16: mol_type = other DNA
agtgaggatatccaac

SEQ ID NO: 23514 - DNA, 16 bp, synthetic construct
  misc_feature 1..16: note = synthetic [barcode part1]
  source 1..16: mol_type = other DNA
tcctccagaatacttg

SEQ ID NO: 23515 - DNA, 16 bp, synthetic construct
  misc_feature 1..16: note = synthetic [barcode part1]
  source 1..16: mol_type = other DNA
gttaggtatctggtgc

SEQ ID NO: 23516 - DNA, 16 bp, synthetic construct
  misc_feature 1..16: note = synthetic [barcode part1]
  source 1..16: mol_type = other DNA
cgccttggtaataggt

SEQ ID NO: 23517 - DNA, 16 bp, synthetic construct
  misc_feature 1..16: note = synthetic [barcode part1]
  source 1..16: mol_type = other DNA
atcaggtcacctccac

SEQ ID NO: 23518 - DNA, 16 bp, synthetic construct
  misc_feature 1..16: note = synthetic [barcode part1]
  source 1..16: mol_type = other DNA
gagattctccgcctac

SEQ ID NO: 23519 - DNA, 16 bp, synthetic construct
  misc_feature 1..16: note = synthetic [barcode part1]
  source 1..16: mol_type = other DNA
tcagacgttgcgagtt

SEQ ID NO: 23520 - DNA, 16 bp, synthetic construct
  misc_feature 1..16: note = synthetic [barcode part1]
  source 1..16: mol_type = other DNA
agatctagtccggact

SEQ ID NO: 23521 - DNA, 16 bp, synthetic construct
  misc_feature 1..16: note = synthetic [barcode part1]
  source 1..16: mol_type = other DNA
gagatagacggattct

SEQ ID NO: 23522 - DNA, 16 bp, synthetic construct
  misc_feature 1..16: note = synthetic [barcode part1]
  source 1..16: mol_type = other DNA
acagatataccgtgag

SEQ ID NO: 23523 - DNA, 16 bp, synthetic construct
  misc_feature 1..16: note = synthetic [barcode part1]
  source 1..16: mol_type = other DNA
tgcacgatatcgacgt

SEQ ID NO: 23524 - DNA, 16 bp, synthetic construct
  misc_feature 1..16: note = synthetic [barcode part1]
  source 1..16: mol_type = other DNA
gcgagtataaggcctg

SEQ ID NO: 23525 - DNA, 16 bp, synthetic construct
  misc_feature 1..16: note = synthetic [barcode part1]
  source 1..16: mol_type = other DNA
gtctcctcgtgactag

SEQ ID NO: 23526 - DNA, 16 bp, synthetic construct
  misc_feature 1..16: note = synthetic [barcode part1]
  source 1..16: mol_type = other DNA
tcacagagtgaagtac

SEQ ID NO: 23527 - DNA, 16 bp, synthetic construct
  misc_feature 1..16: note = synthetic [barcode part1]
  source 1..16: mol_type = other DNA
gccgttgtaataaccg

SEQ ID NO: 23528 - DNA, 16 bp, synthetic construct
  misc_feature 1..16: note = synthetic [barcode part1]
  source 1..16: mol_type = other DNA
tgtgcctggtaacctc

SEQ ID NO: 23529 - DNA, 16 bp, synthetic construct
  misc_feature 1..16: note = synthetic [barcode part1]
  source 1..16: mol_type = other DNA
gaggtcacacagatcg

SEQ ID NO: 23530 - DNA, 16 bp, synthetic construct
  misc_feature 1..16: note = synthetic [barcode part1]
  source 1..16: mol_type = other DNA
gagtgaataaggcctt

SEQ ID NO: 23531 - DNA, 16 bp, synthetic construct
  misc_feature 1..16: note = synthetic [barcode part1]
  source 1..16: mol_type = other DNA
tctgttacgtgaactc

SEQ ID NO: 23532 - DNA, 16 bp, synthetic construct
  misc_feature 1..16: note = synthetic [barcode part1]
  source 1..16: mol_type = other DNA
tcaatccgcagaacgt

SEQ ID NO: 23533 - DNA, 16 bp, synthetic construct
  misc_feature 1..16: note = synthetic [barcode part1]
  source 1..16: mol_type = other DNA
cacttacgagttctgt

SEQ ID NO: 23534 - DNA, 16 bp, synthetic construct
  misc_feature 1..16: note = synthetic [barcode part1]
  source 1..16: mol_type = other DNA
tgtacaagacggcggt

SEQ ID NO: 23535 - DNA, 16 bp, synthetic construct
  misc_feature 1..16: note = synthetic [barcode part1]
  source 1..16: mol_type = other DNA
acagttggtgttggtc

SEQ ID NO: 23536 - DNA, 16 bp, synthetic construct
  misc_feature 1..16: note = synthetic [barcode part1]
  source 1..16: mol_type = other DNA
gtgccggtcttgttgt

SEQ ID NO: 23537 - DNA, 16 bp, synthetic construct
  misc_feature 1..16: note = synthetic [barcode part1]
  source 1..16: mol_type = other DNA
ttcaaccgtcaacgtt

SEQ ID NO: 23538 - DNA, 16 bp, synthetic construct
  misc_feature 1..16: note = synthetic [barcode part1]
  source 1..16: mol_type = other DNA
aacaaggaccgaaggt

SEQ ID NO: 23539 - DNA, 16 bp, synthetic construct
  misc_feature 1..16: note = synthetic [barcode part1]
  source 1..16: mol_type = other DNA
aagagtgcgaactact

SEQ ID NO: 23540 - DNA, 16 bp, synthetic construct
  misc_feature 1..16: note = synthetic [barcode part1]
  source 1..16: mol_type = other DNA
ttgaataccacttcgc

SEQ ID NO: 23541 - DNA, 16 bp, synthetic construct
  misc_feature 1..16: note = synthetic [barcode part1]
  source 1..16: mol_type = other DNA
cgatcaacggtattgc

SEQ ID NO: 23542 - DNA, 16 bp, synthetic construct
  misc_feature 1..16: note = synthetic [barcode part1]
  source 1..16: mol_type = other DNA
cagagttaactctggc

SEQ ID NO: 23543 - DNA, 16 bp, synthetic construct
  misc_feature 1..16: note = synthetic [barcode part1]
  source 1..16: mol_type = other DNA
gaagaatcgttaacgc

SEQ ID NO: 23544 - DNA, 16 bp, synthetic construct
  misc_feature 1..16: note = synthetic [barcode part1]
  source 1..16: mol_type = other DNA
gtacttccacgagagt

SEQ ID NO: 23545 - DNA, 16 bp, synthetic construct
  misc_feature 1..16: note = synthetic [barcode part1]
  source 1..16: mol_type = other DNA
tccgaagtgatcggtt

SEQ ID NO: 23546 - DNA, 16 bp, synthetic construct
  misc_feature 1..16: note = synthetic [barcode part1]
  source 1..16: mol_type = other DNA
tccgttgttggtgcac

SEQ ID NO: 23547 - DNA, 16 bp, synthetic construct
  misc_feature 1..16: note = synthetic [barcode part1]
  source 1..16: mol_type = other DNA
tcagagtagacaagtc

SEQ ID NO: 23548 - DNA, 16 bp, synthetic construct
  misc_feature 1..16: note = synthetic [barcode part1]
  source 1..16: mol_type = other DNA
tagagatcgccagacg

SEQ ID NO: 23549 - DNA, 16 bp, synthetic construct
  misc_feature 1..16: note = synthetic [barcode part1]
  source 1..16: mol_type = other DNA
attctacgtggccgtc

SEQ ID NO: 23550 - DNA, 16 bp, synthetic construct
  misc_feature 1..16: note = synthetic [barcode part1]
  source 1..16: mol_type = other DNA
tgccttggatattcac

SEQ ID NO: 23551 - DNA, 16 bp, synthetic construct
  misc_feature 1..16: note = synthetic [barcode part1]
  source 1..16: mol_type = other DNA
gacactgacactgtgt

SEQ ID NO: 23552 - DNA, 16 bp, synthetic construct
  misc_feature 1..16: note = synthetic [barcode part1]
  source 1..16: mol_type = other DNA
gtaagaggaaggcgtt

SEQ ID NO: 23553 - DNA, 16 bp, synthetic construct
  misc_feature 1..16: note = synthetic [barcode part1]
  source 1..16: mol_type = other DNA
acggattgaagtaacc

SEQ ID NO: 23554 - DNA, 16 bp, synthetic construct
  misc_feature 1..16: note = synthetic [barcode part1]
  source 1..16: mol_type = other DNA
cggagtagtctaggtg

SEQ ID NO: 23555 - DNA, 16 bp, synthetic construct
  misc_feature 1..16: note = synthetic [barcode part1]
  source 1..16: mol_type = other DNA
gtcgacgtcgtataac

SEQ ID NO: 23556 - DNA, 16 bp, synthetic construct
  misc_feature 1..16: note = synthetic [barcode part1]
  source 1..16: mol_type = other DNA
tgagagaggtctctct

SEQ ID NO: 23557 - DNA, 16 bp, synthetic construct
  misc_feature 1..16: note = synthetic [barcode part1]
  source 1..16: mol_type = other DNA
tctcaaggtgaacaag

SEQ ID NO: 23558 - DNA, 16 bp, synthetic construct
  misc_feature 1..16: note = synthetic [barcode part1]
  source 1..16: mol_type = other DNA
aacttcggacggacag

SEQ ID NO: 23559 - DNA, 16 bp, synthetic construct
  misc_feature 1..16: note = synthetic [barcode part1]
  source 1..16: mol_type = other DNA
gattattcgccaggtg

SEQ ID NO: 23560 - DNA, 16 bp, synthetic construct
  misc_feature 1..16: note = synthetic [barcode part1]
  source 1..16: mol_type = other DNA
atccacaactgaagag

SEQ ID NO: 23561 - DNA, 16 bp, synthetic construct
  misc_feature 1..16: note = synthetic [barcode part1]
  source 1..16: mol_type = other DNA
cgcagacgaacagtac

SEQ ID NO: 23562 - DNA, 16 bp, synthetic construct
  misc_feature 1..16: note = synthetic [barcode part1]
  source 1..16: mol_type = other DNA
gtaaccgaatcgaagt

SEQ ID NO: 23563 - DNA, 16 bp, synthetic construct
  misc_feature 1..16: note = synthetic [barcode part1]
  source 1..16: mol_type = other DNA
gtccggtattggattg

SEQ ID NO: 23564 - DNA, 16 bp, synthetic construct
  misc_feature 1..16: note = synthetic [barcode part1]
  source 1..16: mol_type = other DNA
acacaggtaccaggtg

SEQ ID NO: 23565 - DNA, 16 bp, synthetic construct
  misc_feature 1..16: note = synthetic [barcode part1]
  source 1..16: mol_type = other DNA
atacgcggactctagt

SEQ ID NO: 23566 - DNA, 16 bp, synthetic construct
  misc_feature 1..16: note = synthetic [barcode part1]
  source 1..16: mol_type = other DNA
gtgttagtcctatcac

SEQ ID NO: 23567 - DNA, 16 bp, synthetic construct
  misc_feature 1..16: note = synthetic [barcode part1]
  source 1..16: mol_type = other DNA
tcgtagttcctcttcg

SEQ ID NO: 23568 - DNA, 16 bp, synthetic construct
  misc_feature 1..16: note = synthetic [barcode part1]
  source 1..16: mol_type = other DNA
taacttcggtcaaggc

SEQ ID NO: 23569 - DNA, 16 bp, synthetic construct
  misc_feature 1..16: note = synthetic [barcode part1]
  source 1..16: mol_type = other DNA
gaccagaataatcacg

SEQ ID NO: 23570 - DNA, 16 bp, synthetic construct
  misc_feature 1..16: note = synthetic [barcode part1]
  source 1..16: mol_type = other DNA
actagactgccaagtc

SEQ ID NO: 23571 - DNA, 16 bp, synthetic construct
  misc_feature 1..16: note = synthetic [barcode part1]
  source 1..16: mol_type = other DNA
gatctctgtcgttcct

SEQ ID NO: 23572 - DNA, 16 bp, synthetic construct
  misc_feature 1..16: note = synthetic [barcode part1]
  source 1..16: mol_type = other DNA
tcttgtgcggcagtct

SEQ ID NO: 23573 - DNA, 16 bp, synthetic construct
  misc_feature 1..16: note = synthetic [barcode part1]
  source 1..16: mol_type = other DNA
tattgagtgcctctgt

SEQ ID NO: 23574 - DNA, 16 bp, synthetic construct
  misc_feature 1..16: note = synthetic [barcode part1]
  source 1..16: mol_type = other DNA
agagagtcctgcaggt

SEQ ID NO: 23575 - DNA, 16 bp, synthetic construct
  misc_feature 1..16: note = synthetic [barcode part1]
  source 1..16: mol_type = other DNA
ttaggtctgcgaggag

SEQ ID NO: 23576 - DNA, 16 bp, synthetic construct
  misc_feature 1..16: note = synthetic [barcode part1]
  source 1..16: mol_type = other DNA
gagatcggacttatag

SEQ ID NO: 23577 - DNA, 16 bp, synthetic construct
  misc_feature 1..16: note = synthetic [barcode part1]
  source 1..16: mol_type = other DNA
tgtaacctgtgccaag

SEQ ID NO: 23578 - DNA, 16 bp, synthetic construct
  misc_feature 1..16: note = synthetic [barcode part1]
  source 1..16: mol_type = other DNA
actgagtacttggcac

SEQ ID NO: 23579 - DNA, 16 bp, synthetic construct
  misc_feature 1..16: note = synthetic [barcode part1]
  source 1..16: mol_type = other DNA
acgtctctggcagttc

SEQ ID NO: 23580 - DNA, 16 bp, synthetic construct
  misc_feature 1..16: note = synthetic [barcode part1]
  source 1..16: mol_type = other DNA
tcttagtaggacggtc

SEQ ID NO: 23581 - DNA, 16 bp, synthetic construct
  misc_feature 1..16: note = synthetic [barcode part1]
  source 1..16: mol_type = other DNA
gacaatcactatcggc

SEQ ID NO: 23582 - DNA, 16 bp, synthetic construct
  misc_feature 1..16: note = synthetic [barcode part1]
  source 1..16: mol_type = other DNA
agtgtggagtacgaag

SEQ ID NO: 23583 - DNA, 16 bp, synthetic construct
  misc_feature 1..16: note = synthetic [barcode part1]
  source 1..16: mol_type = other DNA
tgaccttcacgtagtt

SEQ ID NO: 23584 - DNA, 16 bp, synthetic construct
  misc_feature 1..16: note = synthetic [barcode part1]
  source 1..16: mol_type = other DNA
agataccagtagaacc

SEQ ID NO: 23585 - DNA, 16 bp, synthetic construct
  misc_feature 1..16: note = synthetic [barcode part1]
  source 1..16: mol_type = other DNA
caacacgatacctggt

SEQ ID NO: 23586 - DNA, 16 bp, synthetic construct
  misc_feature 1..16: note = synthetic [barcode part1]
  source 1..16: mol_type = other DNA
tcaactgcaactggtg

SEQ ID NO: 23587 - DNA, 16 bp, synthetic construct
  misc_feature 1..16: note = synthetic [barcode part1]
  source 1..16: mol_type = other DNA
aaggtgaccacttcgt

SEQ ID NO: 23588 - DNA, 16 bp, synthetic construct
  misc_feature 1..16: note = synthetic [barcode part1]
  source 1..16: mol_type = other DNA
cactggcctaatcctg

SEQ ID NO: 23589 - DNA, 16 bp, synthetic construct
  misc_feature 1..16: note = synthetic [barcode part1]
  source 1..16: mol_type = other DNA
accagtatcacgtgac

SEQ ID NO: 23590 - DNA, 16 bp, synthetic construct
  misc_feature 1..16: note = synthetic [barcode part1]
  source 1..16: mol_type = other DNA
tgacggcaagagtgtc

SEQ ID NO: 23591 - DNA, 16 bp, synthetic construct
  misc_feature 1..16: note = synthetic [barcode part1]
  source 1..16: mol_type = other DNA
gaggtgagaacgatac

SEQ ID NO: 23592 - DNA, 16 bp, synthetic construct
  misc_feature 1..16: note = synthetic [barcode part1]
  source 1..16: mol_type = other DNA
cacagtggagtaagtt

SEQ ID NO: 23593 - DNA, 16 bp, synthetic construct
  misc_feature 1..16: note = synthetic [barcode part1]
  source 1..16: mol_type = other DNA
aattatctggaccgcg

SEQ ID NO: 23594 - DNA, 16 bp, synthetic construct
  misc_feature 1..16: note = synthetic [barcode part1]
  source 1..16: mol_type = other DNA
tctaatcgcgtactac

SEQ ID NO: 23595 - DNA, 16 bp, synthetic construct
  misc_feature 1..16: note = synthetic [barcode part1]
  source 1..16: mol_type = other DNA
ccacttcagagatcag

SEQ ID NO: 23596 - DNA, 16 bp, synthetic construct
  misc_feature 1..16: note = synthetic [barcode part1]
  source 1..16: mol_type = other DNA
tagaccgtgtatctct

SEQ ID NO: 23597 - DNA, 16 bp, synthetic construct
  misc_feature 1..16: note = synthetic [barcode part1]
  source 1..16: mol_type = other DNA
actctgttccacaagt

SEQ ID NO: 23598 - DNA, 16 bp, synthetic construct
  misc_feature 1..16: note = synthetic [barcode part1]
  source 1..16: mol_type = other DNA
cgactattggaggacg

SEQ ID NO: 23599 - DNA, 16 bp, synthetic construct
  misc_feature 1..16: note = synthetic [barcode part1]
  source 1..16: mol_type = other DNA
accggaatagtcgcag

SEQ ID NO: 23600 - DNA, 16 bp, synthetic construct
  misc_feature 1..16: note = synthetic [barcode part1]
  source 1..16: mol_type = other DNA
ccgtctggtaatactt

SEQ ID NO: 23601 - DNA, 16 bp, synthetic construct
  misc_feature 1..16: note = synthetic [barcode part1]
  source 1..16: mol_type = other DNA
cacgtaacaggtctac

SEQ ID NO: 23602 - DNA, 16 bp, synthetic construct
  misc_feature 1..16: note = synthetic [barcode part1]
  source 1..16: mol_type = other DNA
cgagactagtcaacct

SEQ ID NO: 23603 - DNA, 16 bp, synthetic construct
  misc_feature 1..16: note = synthetic [barcode part1]
  source 1..16: mol_type = other DNA
cgtggtctgatcttcg

SEQ ID NO: 23604 - DNA, 16 bp, synthetic construct
  misc_feature 1..16: note = synthetic [barcode part1]
  source 1..16: mol_type = other DNA
tacggtgatccgcctt

SEQ ID NO: 23605 - DNA, 16 bp, synthetic construct
  misc_feature 1..16: note = synthetic [barcode part1]
  source 1..16: mol_type = other DNA
cacttgaacgcagttg

SEQ ID NO: 23606 - DNA, 16 bp, synthetic construct
  misc_feature 1..16: note = synthetic [barcode part1]
  source 1..16: mol_type = other DNA
tacgtagttactgtcc

SEQ ID NO: 23607 - DNA, 16 bp, synthetic construct
  misc_feature 1..16: note = synthetic [barcode part1]
  source 1..16: mol_type = other DNA
gtaccttattggacct

SEQ ID NO: 23608 - DNA, 16 bp, synthetic construct
  misc_feature 1..16: note = synthetic [barcode part1]
  source 1..16: mol_type = other DNA
atctatctccgtctgc

SEQ ID NO: 23609 - DNA, 16 bp, synthetic construct
  misc_feature 1..16: note = synthetic [barcode part1]
  source 1..16: mol_type = other DNA
tcctaatcggcagaac

SEQ ID NO: 23610 - DNA, 16 bp, synthetic construct
  misc_feature 1..16: note = synthetic [barcode part1]
  source 1..16: mol_type = other DNA
ccaatcacggtatcag

SEQ ID NO: 23611 - DNA, 16 bp, synthetic construct
  misc_feature 1..16: note = synthetic [barcode part1]
  source 1..16: mol_type = other DNA
cacgatacggaacttc

SEQ ID NO: 23612 - DNA, 16 bp, synthetic construct
  misc_feature 1..16: note = synthetic [barcode part1]
  source 1..16: mol_type = other DNA
ccaggatcacctacct

SEQ ID NO: 23613 - DNA, 16 bp, synthetic construct
  misc_feature 1..16: note = synthetic [barcode part1]
  source 1..16: mol_type = other DNA
tcgtcgccaagtgtct

SEQ ID NO: 23614 - DNA, 16 bp, synthetic construct
  misc_feature 1..16: note = synthetic [barcode part1]
  source 1..16: mol_type = other DNA
tccaccaagtcacgtc

SEQ ID NO: 23615 - DNA, 16 bp, synthetic construct
  misc_feature 1..16: note = synthetic [barcode part1]
  source 1..16: mol_type = other DNA
gaactacaccttcgcc

SEQ ID NO: 23616 - DNA, 16 bp, synthetic construct
  misc_feature 1..16: note = synthetic [barcode part1]
  source 1..16: mol_type = other DNA
gtactacacggtactg

SEQ ID NO: 23617 - DNA, 16 bp, synthetic construct
  misc_feature 1..16: note = synthetic [barcode part1]
  source 1..16: mol_type = other DNA
atactgcgtaggtaag

SEQ ID NO: 23618 - DNA, 16 bp, synthetic construct
  misc_feature 1..16: note = synthetic [barcode part1]
  source 1..16: mol_type = other DNA
tggagtgtatcagtag

SEQ ID NO: 23619 - DNA, 16 bp, synthetic construct
  misc_feature 1..16: note = synthetic [barcode part1]
  source 1..16: mol_type = other DNA
tggttaggaccaatcc

SEQ ID NO: 23620 - DNA, 16 bp, synthetic construct
  misc_feature 1..16: note = synthetic [barcode part1]
  source 1..16: mol_type = other DNA
tctggtcttagaggac

SEQ ID NO: 23621 - DNA, 16 bp, synthetic construct
  misc_feature 1..16: note = synthetic [barcode part1]
  source 1..16: mol_type = other DNA
gcacgtcttcaatccg

SEQ ID NO: 23622 - DNA, 16 bp, synthetic construct
  misc_feature 1..16: note = synthetic [barcode part1]
  source 1..16: mol_type = other DNA
tgtacgtactgcagtg

SEQ ID NO: 23623 - DNA, 16 bp, synthetic construct
  misc_feature 1..16: note = synthetic [barcode part1]
  source 1..16: mol_type = other DNA
taacggcgactactgt

SEQ ID NO: 23624 - DNA, 16 bp, synthetic construct
  misc_feature 1..16: note = synthetic [barcode part1]
  source 1..16: mol_type = other DNA
aacgatacaggtatcg

SEQ ID NO: 23625 - DNA, 16 bp, synthetic construct
  misc_feature 1..16: note = synthetic [barcode part1]
  source 1..16: mol_type = other DNA
gtgcaaggagtcactg

SEQ ID NO: 23626 - DNA, 16 bp, synthetic construct
  misc_feature 1..16: note = synthetic [barcode part1]
  source 1..16: mol_type = other DNA
ccagaaccagacaggt

SEQ ID NO: 23627 - DNA, 16 bp, synthetic construct
  misc_feature 1..16: note = synthetic [barcode part1]
  source 1..16: mol_type = other DNA
caaggtgagatcgaag

SEQ ID NO: 23628 - DNA, 16 bp, synthetic construct
  misc_feature 1..16: note = synthetic [barcode part1]
  source 1..16: mol_type = other DNA
actgcgagtctcaagt

SEQ ID NO: 23629 - DNA, 16 bp, synthetic construct
  misc_feature 1..16: note = synthetic [barcode part1]
  source 1..16: mol_type = other DNA
attcttcacgcgttag

SEQ ID NO: 23630 - DNA, 16 bp, synthetic construct
  misc_feature 1..16: note = synthetic [barcode part1]
  source 1..16: mol_type = other DNA
tgtgtggcactaacgt

SEQ ID NO: 23631 - DNA, 16 bp, synthetic construct
  misc_feature 1..16: note = synthetic [barcode part1]
  source 1..16: mol_type = other DNA
agattgacggtgtgcg

SEQ ID NO: 23632 - DNA, 16 bp, synthetic construct
  misc_feature 1..16: note = synthetic [barcode part1]
  source 1..16: mol_type = other DNA
attcgaggtaacgaac

SEQ ID NO: 23633 - DNA, 16 bp, synthetic construct
  misc_feature 1..16: note = synthetic [barcode part1]
  source 1..16: mol_type = other DNA
attatccacggtaggc

SEQ ID NO: 23634 - DNA, 16 bp, synthetic construct
  misc_feature 1..16: note = synthetic [barcode part1]
  source 1..16: mol_type = other DNA
gtgcaacttctaacct

SEQ ID NO: 23635 - DNA, 16 bp, synthetic construct
  misc_feature 1..16: note = synthetic [barcode part1]
  source 1..16: mol_type = other DNA
ccgtagatcgtgtagt

SEQ ID NO: 23636 - DNA, 16 bp, synthetic construct
  misc_feature 1..16: note = synthetic [barcode part1]
  source 1..16: mol_type = other DNA
taaggcctggtcaact

SEQ ID NO: 23637 - DNA, 16 bp, synthetic construct
  misc_feature 1..16: note = synthetic [barcode part1]
  source 1..16: mol_type = other DNA
acgaaggtaactcggc

SEQ ID NO: 23638 - DNA, 16 bp, synthetic construct
  misc_feature 1..16: note = synthetic [barcode part1]
  source 1..16: mol_type = other DNA
tacacacggttgatcg

SEQ ID NO: 23639 - DNA, 16 bp, synthetic construct
  misc_feature 1..16: note = synthetic [barcode part1]
  source 1..16: mol_type = other DNA
gtctggatactatcct

SEQ ID NO: 23640 - DNA, 16 bp, synthetic construct
  misc_feature 1..16: note = synthetic [barcode part1]
  source 1..16: mol_type = other DNA
ttctactgcggactcg

SEQ ID NO: 23641 - DNA, 16 bp, synthetic construct
  misc_feature 1..16: note = synthetic [barcode part1]
  source 1..16: mol_type = other DNA
gatcgccacaacttag

SEQ ID NO: 23642 - DNA, 16 bp, synthetic construct
  misc_feature 1..16: note = synthetic [barcode part1]
  source 1..16: mol_type = other DNA
tgtacagtgaggaatc

SEQ ID NO: 23643 - DNA, 16 bp, synthetic construct
  misc_feature 1..16: note = synthetic [barcode part1]
  source 1..16: mol_type = other DNA
cctactaaccgttcct

SEQ ID NO: 23644 - DNA, 16 bp, synthetic construct
  misc_feature 1..16: note = synthetic [barcode part1]
  source 1..16: mol_type = other DNA
gtcggaatcctaactg

SEQ ID NO: 23645 - DNA, 16 bp, synthetic construct
  misc_feature 1..16: note = synthetic [barcode part1]
  source 1..16: mol_type = other DNA
atatacggactggcct

SEQ ID NO: 23646 - DNA, 16 bp, synthetic construct
  misc_feature 1..16: note = synthetic [barcode part1]
  source 1..16: mol_type = other DNA
tgccttgaagtctgcc

SEQ ID NO: 23647 - DNA, 16 bp, synthetic construct
  misc_feature 1..16: note = synthetic [barcode part1]
  source 1..16: mol_type = other DNA
taggcgcacacaattc

SEQ ID NO: 23648 - DNA, 16 bp, synthetic construct
  misc_feature 1..16: note = synthetic [barcode part1]
  source 1..16: mol_type = other DNA
aggataaggatctgtc

SEQ ID NO: 23649 - DNA, 16 bp, synthetic construct
  misc_feature 1..16: note = synthetic [barcode part1]
  source 1..16: mol_type = other DNA
tgactacctacgcaag

SEQ ID NO: 23650 - DNA, 16 bp, synthetic construct
  misc_feature 1..16: note = synthetic [barcode part1]
  source 1..16: mol_type = other DNA
gatcctcttggtgtgc

SEQ ID NO: 23651 - DNA, 16 bp, synthetic construct
  misc_feature 1..16: note = synthetic [barcode part1]
  source 1..16: mol_type = other DNA
acgaacgaggtctcag

SEQ ID NO: 23652 - DNA, 16 bp, synthetic construct
  misc_feature 1..16: note = synthetic [barcode part1]
  source 1..16: mol_type = other DNA
aggttacgcaattcgc

SEQ ID NO: 23653 - DNA, 16 bp, synthetic construct
  misc_feature 1..16: note = synthetic [barcode part1]
  source 1..16: mol_type = other DNA
aatctcttcggcgtgc

SEQ ID NO: 23654 - DNA, 16 bp, synthetic construct
  misc_feature 1..16: note = synthetic [barcode part1]
  source 1..16: mol_type = other DNA
gtactagtcgaacgtc

SEQ ID NO: 23655 - DNA, 16 bp, synthetic construct
  misc_feature 1..16: note = synthetic [barcode part1]
  source 1..16: mol_type = other DNA
aacgatcctccgtgtc

SEQ ID NO: 23656 - DNA, 16 bp, synthetic construct
  misc_feature 1..16: note = synthetic [barcode part1]
  source 1..16: mol_type = other DNA
ttgcgtcgagtcgttc

SEQ ID NO: 23657 - DNA, 16 bp, synthetic construct
  misc_feature 1..16: note = synthetic [barcode part1]
  source 1..16: mol_type = other DNA
gattggtaccaatcgc

SEQ ID NO: 23658 - DNA, 16 bp, synthetic construct
  misc_feature 1..16: note = synthetic [barcode part1]
  source 1..16: mol_type = other DNA
actgacgcctacaagt

SEQ ID NO: 23659 - DNA, 16 bp, synthetic construct
  misc_feature 1..16: note = synthetic [barcode part1]
  source 1..16: mol_type = other DNA
gatctgtcctattacg

SEQ ID NO: 23660 - DNA, 16 bp, synthetic construct
  misc_feature 1..16: note = synthetic [barcode part1]
  source 1..16: mol_type = other DNA
tctctagtgcacagtt

SEQ ID NO: 23661 - DNA, 16 bp, synthetic construct
  misc_feature 1..16: note = synthetic [barcode part1]
  source 1..16: mol_type = other DNA
tcttgacacacaacct

SEQ ID NO: 23662 - DNA, 16 bp, synthetic construct
  misc_feature 1..16: note = synthetic [barcode part1]
  source 1..16: mol_type = other DNA
gtctagataaggcggc

SEQ ID NO: 23663 - DNA, 16 bp, synthetic construct
  misc_feature 1..16: note = synthetic [barcode part1]
  source 1..16: mol_type = other DNA
ataccacacgataccg

SEQ ID NO: 23664 - DNA, 16 bp, synthetic construct
  misc_feature 1..16: note = synthetic [barcode part1]
  source 1..16: mol_type = other DNA
tgactgagttgatcgc

SEQ ID NO: 23665 - DNA, 16 bp, synthetic construct
  misc_feature 1..16: note = synthetic [barcode part1]
  source 1..16: mol_type = other DNA
ttgtgcagttgcacag

SEQ ID NO: 23666 - DNA, 16 bp, synthetic construct
  misc_feature 1..16: note = synthetic [barcode part1]
  source 1..16: mol_type = other DNA
ttccagactgcgatag

SEQ ID NO: 23667 - DNA, 16 bp, synthetic construct
  misc_feature 1..16: note = synthetic [barcode part1]
  source 1..16: mol_type = other DNA
agtgatctcttgtacc

SEQ ID NO: 23668 - DNA, 16 bp, synthetic construct
  misc_feature 1..16: note = synthetic [barcode part1]
  source 1..16: mol_type = other DNA
ccaacgaggatatagt

SEQ ID NO: 23669 - DNA, 16 bp, synthetic construct
  misc_feature 1..16: note = synthetic [barcode part1]
  source 1..16: mol_type = other DNA
tctacgaattcgcgag

SEQ ID NO: 23670 - DNA, 16 bp, synthetic construct
  misc_feature 1..16: note = synthetic [barcode part1]
  source 1..16: mol_type = other DNA
gttgtctacctgtagt

SEQ ID NO: 23671 - DNA, 16 bp, synthetic construct
  misc_feature 1..16: note = synthetic [barcode part1]
  source 1..16: mol_type = other DNA
taagaacgagtgcgag

SEQ ID NO: 23672 - DNA, 16 bp, synthetic construct
  misc_feature 1..16: note = synthetic [barcode part1]
  source 1..16: mol_type = other DNA
accaataggcgacggt

SEQ ID NO: 23673 - DNA, 16 bp, synthetic construct
  misc_feature 1..16: note = synthetic [barcode part1]
  source 1..16: mol_type = other DNA
gactgccacttagtag

SEQ ID NO: 23674 - DNA, 16 bp, synthetic construct
  misc_feature 1..16: note = synthetic [barcode part1]
  source 1..16: mol_type = other DNA
ataccagtaacgagac

SEQ ID NO: 23675 - DNA, 16 bp, synthetic construct
  misc_feature 1..16: note = synthetic [barcode part1]
  source 1..16: mol_type = other DNA
cgcctagtcttaccag

SEQ ID NO: 23676 - DNA, 16 bp, synthetic construct
  misc_feature 1..16: note = synthetic [barcode part1]
  source 1..16: mol_type = other DNA
tcctcggcaatcacgt

SEQ ID NO: 23677 - DNA, 16 bp, synthetic construct
  misc_feature 1..16: note = synthetic [barcode part1]
  source 1..16: mol_type = other DNA
gtacgactgtacggtt

SEQ ID NO: 23678 - DNA, 16 bp, synthetic construct
  misc_feature 1..16: note = synthetic [barcode part1]
  source 1..16: mol_type = other DNA
tagtcggtagtcggtt

SEQ ID NO: 23679 - DNA, 16 bp, synthetic construct
  misc_feature 1..16: note = synthetic [barcode part1]
  source 1..16: mol_type = other DNA
tgtcacaacgtgtgtg

SEQ ID NO: 23680 - DNA, 16 bp, synthetic construct
  misc_feature 1..16: note = synthetic [barcode part1]
  source 1..16: mol_type = other DNA
tcttggatatccgccg

SEQ ID NO: 23681 - DNA, 16 bp, synthetic construct
  misc_feature 1..16: note = synthetic [barcode part1]
  source 1..16: mol_type = other DNA
atcgttgtcttacacg

SEQ ID NO: 23682 - DNA, 16 bp, synthetic construct
  misc_feature 1..16: note = synthetic [barcode part1]
  source 1..16: mol_type = other DNA
tggtggttaatccggt

SEQ ID NO: 23683 - DNA, 16 bp, synthetic construct
  misc_feature 1..16: note = synthetic [barcode part1]
  source 1..16: mol_type = other DNA
tcacaacacgtacgtg

SEQ ID NO: 23684 - DNA, 16 bp, synthetic construct
  misc_feature 1..16: note = synthetic [barcode part1]
  source 1..16: mol_type = other DNA
actagtggtagaacac

SEQ ID NO: 23685 - DNA, 16 bp, synthetic construct
  misc_feature 1..16: note = synthetic [barcode part1]
  source 1..16: mol_type = other DNA
cggatacaccgaaggt

SEQ ID NO: 23686 - DNA, 16 bp, synthetic construct
  misc_feature 1..16: note = synthetic [barcode part1]
  source 1..16: mol_type = other DNA
gatcgataaccttggc

SEQ ID NO: 23687 - DNA, 16 bp, synthetic construct
  misc_feature 1..16: note = synthetic [barcode part1]
  source 1..16: mol_type = other DNA
tgcacttctcgacggt

SEQ ID NO: 23688 - DNA, 16 bp, synthetic construct
  misc_feature 1..16: note = synthetic [barcode part1]
  source 1..16: mol_type = other DNA
gaagtgcaccgttgag

SEQ ID NO: 23689 - DNA, 16 bp, synthetic construct
  misc_feature 1..16: note = synthetic [barcode part1]
  source 1..16: mol_type = other DNA
ccttaccgatacttag

SEQ ID NO: 23690 - DNA, 16 bp, synthetic construct
  misc_feature 1..16: note = synthetic [barcode part1]
  source 1..16: mol_type = other DNA
actctccttggaagag

SEQ ID NO: 23691 - DNA, 16 bp, synthetic construct
  misc_feature 1..16: note = synthetic [barcode part1]
  source 1..16: mol_type = other DNA
gtctgattgcgttccg

SEQ ID NO: 23692 - DNA, 16 bp, synthetic construct
  misc_feature 1..16: note = synthetic [barcode part1]
  source 1..16: mol_type = other DNA
agataggagtgtcact

SEQ ID NO: 23693 - DNA, 16 bp, synthetic construct
  misc_feature 1..16: note = synthetic [barcode part1]
  source 1..16: mol_type = other DNA
tctggtatatcctcag

SEQ ID NO: 23694 - DNA, 16 bp, synthetic construct
  misc_feature 1..16: note = synthetic [barcode part1]
  source 1..16: mol_type = other DNA
gtcgcagtacctatcc

SEQ ID NO: 23695 - DNA, 16 bp, synthetic construct
  misc_feature 1..16: note = synthetic [barcode part1]
  source 1..16: mol_type = other DNA
cgcagtctgtgttaag

SEQ ID NO: 23696 - DNA, 16 bp, synthetic construct
  misc_feature 1..16: note = synthetic [barcode part1]
  source 1..16: mol_type = other DNA
gttgaggaccagtacg

SEQ ID NO: 23697 - DNA, 16 bp, synthetic construct
  misc_feature 1..16: note = synthetic [barcode part1]
  source 1..16: mol_type = other DNA
tccgattggtcaaggt

SEQ ID NO: 23698 - DNA, 16 bp, synthetic construct
  misc_feature 1..16: note = synthetic [barcode part1]
  source 1..16: mol_type = other DNA
gtgaactggaagttac

SEQ ID NO: 23699 - DNA, 16 bp, synthetic construct
  misc_feature 1..16: note = synthetic [barcode part1]
  source 1..16: mol_type = other DNA
ccgcgtccagattatc

SEQ ID NO: 23700 - DNA, 16 bp, synthetic construct
  misc_feature 1..16: note = synthetic [barcode part1]
  source 1..16: mol_type = other DNA
ccaatacgagactaag

SEQ ID NO: 23701 - DNA, 16 bp, synthetic construct
  misc_feature 1..16: note = synthetic [barcode part1]
  source 1..16: mol_type = other DNA
agatattgcgacagac

SEQ ID NO: 23702 - DNA, 16 bp, synthetic construct
  misc_feature 1..16: note = synthetic [barcode part1]
  source 1..16: mol_type = other DNA
aggtcgaactggtgtg

SEQ ID NO: 23703 - DNA, 16 bp, synthetic construct
  misc_feature 1..16: note = synthetic [barcode part1]
  source 1..16: mol_type = other DNA
aactggtactgactgc

SEQ ID NO: 23704 - DNA, 16 bp, synthetic construct
  misc_feature 1..16: note = synthetic [barcode part1]
  source 1..16: mol_type = other DNA
gtacacgcgactaact

SEQ ID NO: 23705 - DNA, 16 bp, synthetic construct
  misc_feature 1..16: note = synthetic [barcode part1]
  source 1..16: mol_type = other DNA
cgtcttggcgaatctc

SEQ ID NO: 23706 - DNA, 16 bp, synthetic construct
  misc_feature 1..16: note = synthetic [barcode part1]
  source 1..16: mol_type = other DNA
atccggatcgtgaact

SEQ ID NO: 23707 - DNA, 16 bp, synthetic construct
  misc_feature 1..16: note = synthetic [barcode part1]
  source 1..16: mol_type = other DNA
gagagtaacggtccgt

SEQ ID NO: 23708 - DNA, 16 bp, synthetic construct
  misc_feature 1..16: note = synthetic [barcode part1]
  source 1..16: mol_type = other DNA
cactcacaacaccgtc

SEQ ID NO: 23709 - DNA, 16 bp, synthetic construct
  misc_feature 1..16: note = synthetic [barcode part1]
  source 1..16: mol_type = other DNA
atccaaccgcgttctg

SEQ ID NO: 23710 - DNA, 16 bp, synthetic construct
  misc_feature 1..16: note = synthetic [barcode part1]
  source 1..16: mol_type = other DNA
ttgaccaggttgatcg

SEQ ID NO: 23711 - DNA, 16 bp, synthetic construct
  misc_feature 1..16: note = synthetic [barcode part1]
  source 1..16: mol_type = other DNA
aggccgtaatagtctc

SEQ ID NO: 23712 - DNA, 16 bp, synthetic construct
  misc_feature 1..16: note = synthetic [barcode part1]
  source 1..16: mol_type = other DNA
tctatcaccttcgacc

SEQ ID NO: 23713 - DNA, 16 bp, synthetic construct
  misc_feature 1..16: note = synthetic [barcode part1]
  source 1..16: mol_type = other DNA
agaggtgttgccagac

SEQ ID NO: 23714 - DNA, 16 bp, synthetic construct
  misc_feature 1..16: note = synthetic [barcode part1]
  source 1..16: mol_type = other DNA
cgtaacaaggcggatc

SEQ ID NO: 23715 - DNA, 16 bp, synthetic construct
  misc_feature 1..16: note = synthetic [barcode part1]
  source 1..16: mol_type = other DNA
tggcacactagacact

SEQ ID NO: 23716 - DNA, 16 bp, synthetic construct
  misc_feature 1..16: note = synthetic [barcode part1]
  source 1..16: mol_type = other DNA
tgcaacacaggtaggc

SEQ ID NO: 23717 - DNA, 16 bp, synthetic construct
  misc_feature 1..16: note = synthetic [barcode part1]
  source 1..16: mol_type = other DNA
gagagatcggagaact

SEQ ID NO: 23718 - DNA, 16 bp, synthetic construct
  misc_feature 1..16: note = synthetic [barcode part1]
  source 1..16: mol_type = other DNA
acgttgacgtggattc

SEQ ID NO: 23719 - DNA, 16 bp, synthetic construct
  misc_feature 1..16: note = synthetic [barcode part1]
  source 1..16: mol_type = other DNA
ttacttcaccgaggag

SEQ ID NO: 23720 - DNA, 16 bp, synthetic construct
  misc_feature 1..16: note = synthetic [barcode part1]
  source 1..16: mol_type = other DNA
gtggcacgttagttac

SEQ ID NO: 23721 - DNA, 16 bp, synthetic construct
  misc_feature 1..16: note = synthetic [barcode part1]
  source 1..16: mol_type = other DNA
gttcgccacggtatct

SEQ ID NO: 23722 - DNA, 16 bp, synthetic construct
  misc_feature 1..16: note = synthetic [barcode part1]
  source 1..16: mol_type = other DNA
tctgcgtgttatcggc

SEQ ID NO: 23723 - DNA, 16 bp, synthetic construct
  misc_feature 1..16: note = synthetic [barcode part1]
  source 1..16: mol_type = other DNA
attaccggcgtaggag

SEQ ID NO: 23724 - DNA, 16 bp, synthetic construct
  misc_feature 1..16: note = synthetic [barcode part1]
  source 1..16: mol_type = other DNA
cacttaccgtcgcagt

SEQ ID NO: 23725 - DNA, 16 bp, synthetic construct
  misc_feature 1..16: note = synthetic [barcode part1]
  source 1..16: mol_type = other DNA
cgaagtgaacgcgttg

SEQ ID NO: 23726 - DNA, 16 bp, synthetic construct
  misc_feature 1..16: note = synthetic [barcode part1]
  source 1..16: mol_type = other DNA
tcacagtgaggaagag

SEQ ID NO: 23727 - DNA, 16 bp, synthetic construct
  misc_feature 1..16: note = synthetic [barcode part1]
  source 1..16: mol_type = other DNA
taaggcgttcagtctg

SEQ ID NO: 23728 - DNA, 16 bp, synthetic construct
  misc_feature 1..16: note = synthetic [barcode part1]
  source 1..16: mol_type = other DNA
aaggacaggcgtaagt

SEQ ID NO: 23729 - DNA, 16 bp, synthetic construct
  misc_feature 1..16: note = synthetic [barcode part1]
  source 1..16: mol_type = other DNA
ttgtaggacttcttgc

SEQ ID NO: 23730 - DNA, 16 bp, synthetic construct
  misc_feature 1..16: note = synthetic [barcode part1]
  source 1..16: mol_type = other DNA
gcgttgcgaattctag

SEQ ID NO: 23731 - DNA, 16 bp, synthetic construct
  misc_feature 1..16: note = synthetic [barcode part1]
  source 1..16: mol_type = other DNA
gttgatctcagagtcg

SEQ ID NO: 23732 - DNA, 16 bp, synthetic construct
  misc_feature 1..16: note = synthetic [barcode part1]
  source 1..16: mol_type = other DNA
actacactacggatcg

SEQ ID NO: 23733 - DNA, 16 bp, synthetic construct
  misc_feature 1..16: note = synthetic [barcode part1]
  source 1..16: mol_type = other DNA
gtgtcggcaatctctc

SEQ ID NO: 23734 - DNA, 16 bp, synthetic construct
  misc_feature 1..16: note = synthetic [barcode part1]
  source 1..16: mol_type = other DNA
caccgccaagtattcc

SEQ ID NO: 23735 - DNA, 16 bp, synthetic construct
  misc_feature 1..16: note = synthetic [barcode part1]
  source 1..16: mol_type = other DNA
gtgagacttactccag

SEQ ID NO: 23736 - DNA, 16 bp, synthetic construct
  misc_feature 1..16: note = synthetic [barcode part1]
  source 1..16: mol_type = other DNA
ccttcgtagtacgaag

SEQ ID NO: 23737 - DNA, 16 bp, synthetic construct
  misc_feature 1..16: note = synthetic [barcode part1]
  source 1..16: mol_type = other DNA
ccagaacacagtgtct

SEQ ID NO: 23738 - DNA, 16 bp, synthetic construct
  misc_feature 1..16: note = synthetic [barcode part1]
  source 1..16: mol_type = other DNA
cgtaaggagttgccag

SEQ ID NO: 23739 - DNA, 16 bp, synthetic construct
  misc_feature 1..16: note = synthetic [barcode part1]
  source 1..16: mol_type = other DNA
aagaccgagagtagtg

SEQ ID NO: 23740 - DNA, 16 bp, synthetic construct
  misc_feature 1..16: note = synthetic [barcode part1]
  source 1..16: mol_type = other DNA
tgatcggtctcagagt

SEQ ID NO: 23741 - DNA, 16 bp, synthetic construct
  misc_feature 1..16: note = synthetic [barcode part1]
  source 1..16: mol_type = other DNA
cctggttctccttaac

SEQ ID NO: 23742 - DNA, 16 bp, synthetic construct
  misc_feature 1..16: note = synthetic [barcode part1]
  source 1..16: mol_type = other DNA
cggaccgactattagt

SEQ ID NO: 23743 - DNA, 16 bp, synthetic construct
  misc_feature 1..16: note = synthetic [barcode part1]
  source 1..16: mol_type = other DNA
attgcgtaaggtagtg

SEQ ID NO: 23744 - DNA, 16 bp, synthetic construct
  misc_feature 1..16: note = synthetic [barcode part1]
  source 1..16: mol_type = other DNA
gaatcacaacacagac

SEQ ID NO: 23745 - DNA, 16 bp, synthetic construct
  misc_feature 1..16: note = synthetic [barcode part1]
  source 1..16: mol_type = other DNA
ataaccgtggcgtatc

SEQ ID NO: 23746 - DNA, 16 bp, synthetic construct
  misc_feature 1..16: note = synthetic [barcode part1]
  source 1..16: mol_type = other DNA
agtacctcgttgacag

SEQ ID NO: 23747 - DNA, 16 bp, synthetic construct
  misc_feature 1..16: note = synthetic [barcode part1]
  source 1..16: mol_type = other DNA
gactcctgtattcggc

SEQ ID NO: 23748 - DNA, 16 bp, synthetic construct
  misc_feature 1..16: note = synthetic [barcode part1]
  source 1..16: mol_type = other DNA
aaggcggttactctgt

SEQ ID NO: 23749 - DNA, 16 bp, synthetic construct
  misc_feature 1..16: note = synthetic [barcode part1]
  source 1..16: mol_type = other DNA
acgagagaatcgtcgc

SEQ ID NO: 23750 - DNA, 16 bp, synthetic construct
  misc_feature 1..16: note = synthetic [barcode part1]
  source 1..16: mol_type = other DNA
gtcagaggattctctg

SEQ ID NO: 23751 - DNA, 16 bp, synthetic construct
  misc_feature 1..16: note = synthetic [barcode part1]
  source 1..16: mol_type = other DNA
agttagtgcgtgcact

SEQ ID NO: 23752 - DNA, 16 bp, synthetic construct
  misc_feature 1..16: note = synthetic [barcode part1]
  source 1..16: mol_type = other DNA
aatacgcctctccgac

SEQ ID NO: 23753 - DNA, 16 bp, synthetic construct
  misc_feature 1..16: note = synthetic [barcode part1]
  source 1..16: mol_type = other DNA
ccttaccgttcgtgag

SEQ ID NO: 23754 - DNA, 16 bp, synthetic construct
  misc_feature 1..16: note = synthetic [barcode part1]
  source 1..16: mol_type = other DNA
tagacgttgtggactc

SEQ ID NO: 23755 - DNA, 16 bp, synthetic construct
  misc_feature 1..16: note = synthetic [barcode part1]
  source 1..16: mol_type = other DNA
acgaataagacggacg

SEQ ID NO: 23756 - DNA, 16 bp, synthetic construct
  misc_feature 1..16: note = synthetic [barcode part1]
  source 1..16: mol_type = other DNA
cactctcaccgaatcg

SEQ ID NO: 23757 - DNA, 16 bp, synthetic construct
  misc_feature 1..16: note = synthetic [barcode part1]
  source 1..16: mol_type = other DNA
ccgtcttcaacaagag

SEQ ID NO: 23758 - DNA, 16 bp, synthetic construct
  misc_feature 1..16: note = synthetic [barcode part1]
  source 1..16: mol_type = other DNA
gagaataggcggttcc

SEQ ID NO: 23759 - DNA, 16 bp, synthetic construct
  misc_feature 1..16: note = synthetic [barcode part1]
  source 1..16: mol_type = other DNA
tcacacttcactgagt

SEQ ID NO: 23760 - DNA, 16 bp, synthetic construct
  misc_feature 1..16: note = synthetic [barcode part1]
  source 1..16: mol_type = other DNA
atatcgaatcgcctct

SEQ ID NO: 23761 - DNA, 16 bp, synthetic construct
  misc_feature 1..16: note = synthetic [barcode part1]
  source 1..16: mol_type = other DNA
gatataggcgagaacg

SEQ ID NO: 23762 - DNA, 16 bp, synthetic construct
  misc_feature 1..16: note = synthetic [barcode part1]
  source 1..16: mol_type = other DNA
caatcagaccagtcac

SEQ ID NO: 23763 - DNA, 16 bp, synthetic construct
  misc_feature 1..16: note = synthetic [barcode part1]
  source 1..16: mol_type = other DNA
aactgactgacgttgc

SEQ ID NO: 23764 - DNA, 16 bp, synthetic construct
  misc_feature 1..16: note = synthetic [barcode part1]
  source 1..16: mol_type = other DNA
cgaagttcgacgttac

SEQ ID NO: 23765 - DNA, 16 bp, synthetic construct
  misc_feature 1..16: note = synthetic [barcode part1]
  source 1..16: mol_type = other DNA
actactgcaacaaccg

SEQ ID NO: 23766 - DNA, 16 bp, synthetic construct
  misc_feature 1..16: note = synthetic [barcode part1]
  source 1..16: mol_type = other DNA
ttgttcggacgagtgt

SEQ ID NO: 23767 - DNA, 16 bp, synthetic construct
  misc_feature 1..16: note = synthetic [barcode part1]
  source 1..16: mol_type = other DNA
agtcagtacaccacac

SEQ ID NO: 23768 - DNA, 16 bp, synthetic construct
  misc_feature 1..16: note = synthetic [barcode part1]
  source 1..16: mol_type = other DNA
acgaaggactattgac

SEQ ID NO: 23769 - DNA, 16 bp, synthetic construct
  misc_feature 1..16: note = synthetic [barcode part1]
  source 1..16: mol_type = other DNA
gtggtcagtcaacact

SEQ ID NO: 23770 - DNA, 16 bp, synthetic construct
  misc_feature 1..16: note = synthetic [barcode part1]
  source 1..16: mol_type = other DNA
taagacacaccaacag

SEQ ID NO: 23771 - DNA, 16 bp, synthetic construct
  misc_feature 1..16: note = synthetic [barcode part1]
  source 1..16: mol_type = other DNA
cacgagactggtaacg

SEQ ID NO: 23772 - DNA, 16 bp, synthetic construct
  misc_feature 1..16: note = synthetic [barcode part1]
  source 1..16: mol_type = other DNA
atcgcaaggattccac

SEQ ID NO: 23773 - DNA, 16 bp, synthetic construct
  misc_feature 1..16: note = synthetic [barcode part1]
  source 1..16: mol_type = other DNA
gttaccttcgtgagtt

SEQ ID NO: 23774 - DNA, 16 bp, synthetic construct
  misc_feature 1..16: note = synthetic [barcode part1]
  source 1..16: mol_type = other DNA
gatacctacctgagtg

SEQ ID NO: 23775 - DNA, 16 bp, synthetic construct
  misc_feature 1..16: note = synthetic [barcode part1]
  source 1..16: mol_type = other DNA
accgtgagagtagatt

SEQ ID NO: 23776 - DNA, 16 bp, synthetic construct
  misc_feature 1..16: note = synthetic [barcode part1]
  source 1..16: mol_type = other DNA
cggactgagtctaatc

SEQ ID NO: 23777 - DNA, 16 bp, synthetic construct
  misc_feature 1..16: note = synthetic [barcode part1]
  source 1..16: mol_type = other DNA
gtccgttgttcacttc

SEQ ID NO: 23778 - DNA, 16 bp, synthetic construct
  misc_feature 1..16: note = synthetic [barcode part1]
  source 1..16: mol_type = other DNA
acggtaggcaagatag

SEQ ID NO: 23779 - DNA, 16 bp, synthetic construct
  misc_feature 1..16: note = synthetic [barcode part1]
  source 1..16: mol_type = other DNA
aggcaagaacgttatc

SEQ ID NO: 23780 - DNA, 16 bp, synthetic construct
  misc_feature 1..16: note = synthetic [barcode part1]
  source 1..16: mol_type = other DNA
tacggttcgtatcgag

SEQ ID NO: 23781 - DNA, 16 bp, synthetic construct
  misc_feature 1..16: note = synthetic [barcode part1]
  source 1..16: mol_type = other DNA
tgtgcaactatcactc

SEQ ID NO: 23782 - DNA, 16 bp, synthetic construct
  misc_feature 1..16: note = synthetic [barcode part1]
  source 1..16: mol_type = other DNA
tgtgccttgagtcacc

SEQ ID NO: 23783 - DNA, 16 bp, synthetic construct
  misc_feature 1..16: note = synthetic [barcode part1]
  source 1..16: mol_type = other DNA
acaactgcctcaattc

SEQ ID NO: 23784 - DNA, 16 bp, synthetic construct
  misc_feature 1..16: note = synthetic [barcode part1]
  source 1..16: mol_type = other DNA
tgtctgtgaatctcgt

SEQ ID NO: 23785 - DNA, 16 bp, synthetic construct
  misc_feature 1..16: note = synthetic [barcode part1]
  source 1..16: mol_type = other DNA
cgtaactgccagagag

SEQ ID NO: 23786 - DNA, 16 bp, synthetic construct
  misc_feature 1..16: note = synthetic [barcode part1]
  source 1..16: mol_type = other DNA
caacgagtgtccagag

SEQ ID NO: 23787 - DNA, 16 bp, synthetic construct
  misc_feature 1..16: note = synthetic [barcode part1]
  source 1..16: mol_type = other DNA
gagacaatcgtgagtt

SEQ ID NO: 23788 - DNA, 16 bp, synthetic construct
  misc_feature 1..16: note = synthetic [barcode part1]
  source 1..16: mol_type = other DNA
gcagagattgagttac

SEQ ID NO: 23789 - DNA, 16 bp, synthetic construct
  misc_feature 1..16: note = synthetic [barcode part1]
  source 1..16: mol_type = other DNA
agataactctccggtg

SEQ ID NO: 23790 - DNA, 16 bp, synthetic construct
  misc_feature 1..16: note = synthetic [barcode part1]
  source 1..16: mol_type = other DNA
gacctgacgatctagt

SEQ ID NO: 23791 - DNA, 16 bp, synthetic construct
  misc_feature 1..16: note = synthetic [barcode part1]
  source 1..16: mol_type = other DNA
tataatctgcggaccg

SEQ ID NO: 23792 - DNA, 16 bp, synthetic construct
  misc_feature 1..16: note = synthetic [barcode part1]
  source 1..16: mol_type = other DNA
atcaccaatcggatcg

SEQ ID NO: 23793 - DNA, 16 bp, synthetic construct
  misc_feature 1..16: note = synthetic [barcode part1]
  source 1..16: mol_type = other DNA
gtcttagtgtaacgcg

SEQ ID NO: 23794 - DNA, 16 bp, synthetic construct
  misc_feature 1..16: note = synthetic [barcode part1]
  source 1..16: mol_type = other DNA
gactcagttggcaact

SEQ ID NO: 23795 - DNA, 16 bp, synthetic construct
  misc_feature 1..16: note = synthetic [barcode part1]
  source 1..16: mol_type = other DNA
cctggtctagtcacgt

SEQ ID NO: 23796 - DNA, 16 bp, synthetic construct
  misc_feature 1..16: note = synthetic [barcode part1]
  source 1..16: mol_type = other DNA
taggccgcgtattctc

SEQ ID NO: 23797 - DNA, 16 bp, synthetic construct
  misc_feature 1..16: note = synthetic [barcode part1]
  source 1..16: mol_type = other DNA
cacgtctctcaacgac

SEQ ID NO: 23798 - DNA, 16 bp, synthetic construct
  misc_feature 1..16: note = synthetic [barcode part1]
  source 1..16: mol_type = other DNA
gccaccagttgttaag

SEQ ID NO: 23799 - DNA, 16 bp, synthetic construct
  misc_feature 1..16: note = synthetic [barcode part1]
  source 1..16: mol_type = other DNA
gcgcaggtgaattacg

SEQ ID NO: 23800 - DNA, 16 bp, synthetic construct
  misc_feature 1..16: note = synthetic [barcode part1]
  source 1..16: mol_type = other DNA
cggatactaacttcct

SEQ ID NO: 23801 - DNA, 16 bp, synthetic construct
  misc_feature 1..16: note = synthetic [barcode part1]
  source 1..16: mol_type = other DNA
gagacaaggtgagact

SEQ ID NO: 23802 - DNA, 16 bp, synthetic construct
  misc_feature 1..16: note = synthetic [barcode part1]
  source 1..16: mol_type = other DNA
tcgactcgaattggac

SEQ ID NO: 23803 - DNA, 16 bp, synthetic construct
  misc_feature 1..16: note = synthetic [barcode part1]
  source 1..16: mol_type = other DNA
ttcacgatactatccg

SEQ ID NO: 23804 - DNA, 16 bp, synthetic construct
  misc_feature 1..16: note = synthetic [barcode part1]
  source 1..16: mol_type = other DNA
cagttccgtcgtacac

SEQ ID NO: 23805 - DNA, 16 bp, synthetic construct
  misc_feature 1..16: note = synthetic [barcode part1]
  source 1..16: mol_type = other DNA
tgtcctgagtgtctgc

SEQ ID NO: 23806 - DNA, 16 bp, synthetic construct
  misc_feature 1..16: note = synthetic [barcode part1]
  source 1..16: mol_type = other DNA
tgcagatcgttcgaac

SEQ ID NO: 23807 - DNA, 16 bp, synthetic construct
  misc_feature 1..16: note = synthetic [barcode part1]
  source 1..16: mol_type = other DNA
taccagtcacaaccag

SEQ ID NO: 23808 - DNA, 16 bp, synthetic construct
  misc_feature 1..16: note = synthetic [barcode part1]
  source 1..16: mol_type = other DNA
aacctctctctaccgt

SEQ ID NO: 23809 - DNA, 16 bp, synthetic construct
  misc_feature 1..16: note = synthetic [barcode part1]
  source 1..16: mol_type = other DNA
aacgagagaaggtcgt

SEQ ID NO: 23810 - DNA, 16 bp, synthetic construct
  misc_feature 1..16: note = synthetic [barcode part1]
  source 1..16: mol_type = other DNA
tactggattcacactc

SEQ ID NO: 23811 - DNA, 16 bp, synthetic construct
  misc_feature 1..16: note = synthetic [barcode part1]
  source 1..16: mol_type = other DNA
aattcaattccgtgcc

SEQ ID NO: 23812 - DNA, 16 bp, synthetic construct
  misc_feature 1..16: note = synthetic [barcode part1]
  source 1..16: mol_type = other DNA
caagattccgaggtct

SEQ ID NO: 23813 - DNA, 16 bp, synthetic construct
  misc_feature 1..16: note = synthetic [barcode part1]
  source 1..16: mol_type = other DNA
cgtaggttgttgtctt

SEQ ID NO: 23814 - DNA, 16 bp, synthetic construct
  misc_feature 1..16: note = synthetic [barcode part1]
  source 1..16: mol_type = other DNA
gttgtacacacgatcg

SEQ ID NO: 23815 - DNA, 16 bp, synthetic construct
  misc_feature 1..16: note = synthetic [barcode part1]
  source 1..16: mol_type = other DNA
actatccggacttgtt

SEQ ID NO: 23816 - DNA, 16 bp, synthetic construct
  misc_feature 1..16: note = synthetic [barcode part1]
  source 1..16: mol_type = other DNA
aacggagtcagtatac

SEQ ID NO: 23817 - DNA, 16 bp, synthetic construct
  misc_feature 1..16: note = synthetic [barcode part1]
  source 1..16: mol_type = other DNA
acctagtaatccgacg

SEQ ID NO: 23818 - DNA, 16 bp, synthetic construct
  misc_feature 1..16: note = synthetic [barcode part1]
  source 1..16: mol_type = other DNA
ttaatccttcggcctc

SEQ ID NO: 23819 - DNA, 16 bp, synthetic construct
  misc_feature 1..16: note = synthetic [barcode part1]
  source 1..16: mol_type = other DNA
agactcagtctcctgc

SEQ ID NO: 23820 - DNA, 16 bp, synthetic construct
  misc_feature 1..16: note = synthetic [barcode part1]
  source 1..16: mol_type = other DNA
gtgtctcgtcgaatcc

SEQ ID NO: 23821 - DNA, 16 bp, synthetic construct
  misc_feature 1..16: note = synthetic [barcode part1]
  source 1..16: mol_type = other DNA
cgacaaggaacttgcg

SEQ ID NO: 23822 - DNA, 16 bp, synthetic construct
  misc_feature 1..16: note = synthetic [barcode part1]
  source 1..16: mol_type = other DNA
tccagtataaggacag

SEQ ID NO: 23823 - DNA, 16 bp, synthetic construct
  misc_feature 1..16: note = synthetic [barcode part1]
  source 1..16: mol_type = other DNA
agaacggtgaagtgac

SEQ ID NO: 23824 - DNA, 16 bp, synthetic construct
  misc_feature 1..16: note = synthetic [barcode part1]
  source 1..16: mol_type = other DNA
tcaggcgcctgttatc

SEQ ID NO: 23825 - DNA, 16 bp, synthetic construct
  misc_feature 1..16: note = synthetic [barcode part1]
  source 1..16: mol_type = other DNA
ttggacgtaccgtcct

SEQ ID NO: 23826 - DNA, 16 bp, synthetic construct
  misc_feature 1..16: note = synthetic [barcode part1]
  source 1..16: mol_type = other DNA
accacaatattcgtcc

SEQ ID NO: 23827 - DNA, 16 bp, synthetic construct
  misc_feature 1..16: note = synthetic [barcode part1]
  source 1..16: mol_type = other DNA
tatccagactatctcg

SEQ ID NO: 23828 - DNA, 16 bp, synthetic construct
  misc_feature 1..16: note = synthetic [barcode part1]
  source 1..16: mol_type = other DNA
aacgataacctcgtcg

SEQ ID NO: 23829 - DNA, 16 bp, synthetic construct
  misc_feature 1..16: note = synthetic [barcode part1]
  source 1..16: mol_type = other DNA
tcctgaccagtagaac

SEQ ID NO: 23830 - DNA, 16 bp, synthetic construct
  misc_feature 1..16: note = synthetic [barcode part1]
  source 1..16: mol_type = other DNA
gtgccaggagaactac

SEQ ID NO: 23831 - DNA, 16 bp, synthetic construct
  misc_feature 1..16: note = synthetic [barcode part1]
  source 1..16: mol_type = other DNA
gtgatcacttcagttc

SEQ ID NO: 23832 - DNA, 16 bp, synthetic construct
  misc_feature 1..16: note = synthetic [barcode part1]
  source 1..16: mol_type = other DNA
ccggatcttctgtgtg

SEQ ID NO: 23833 - DNA, 16 bp, synthetic construct
  misc_feature 1..16: note = synthetic [barcode part1]
  source 1..16: mol_type = other DNA
atctactccacgacgc

SEQ ID NO: 23834 - DNA, 16 bp, synthetic construct
  misc_feature 1..16: note = synthetic [barcode part1]
  source 1..16: mol_type = other DNA
ttccagtccggtacgt

SEQ ID NO: 23835 - DNA, 16 bp, synthetic construct
  misc_feature 1..16: note = synthetic [barcode part1]
  source 1..16: mol_type = other DNA
gccgacgagatatctt

SEQ ID NO: 23836 - DNA, 16 bp, synthetic construct
  misc_feature 1..16: note = synthetic [barcode part1]
  source 1..16: mol_type = other DNA
ccttgcgccagtgatt

SEQ ID NO: 23837 - DNA, 16 bp, synthetic construct
  misc_feature 1..16: note = synthetic [barcode part1]
  source 1..16: mol_type = other DNA
tagtgcgtaacgaagt

SEQ ID NO: 23838 - DNA, 16 bp, synthetic construct
  misc_feature 1..16: note = synthetic [barcode part1]
  source 1..16: mol_type = other DNA
tgtagactgagtgtcc

SEQ ID NO: 23839 - DNA, 16 bp, synthetic construct
  misc_feature 1..16: note = synthetic [barcode part1]
  source 1..16: mol_type = other DNA
gacctagttggcagtt

SEQ ID NO: 23840 - DNA, 16 bp, synthetic construct
  misc_feature 1..16: note = synthetic [barcode part1]
  source 1..16: mol_type = other DNA
cgttagatctggcaac

SEQ ID NO: 23841 - DNA, 16 bp, synthetic construct
  misc_feature 1..16: note = synthetic [barcode part1]
  source 1..16: mol_type = other DNA
atcacctaggcagtgt

SEQ ID NO: 23842 - DNA, 16 bp, synthetic construct
  misc_feature 1..16: note = synthetic [barcode part1]
  source 1..16: mol_type = other DNA
gcgacctgttcttacg

SEQ ID NO: 23843 - DNA, 16 bp, synthetic construct
  misc_feature 1..16: note = synthetic [barcode part1]
  source 1..16: mol_type = other DNA
aggtccactgttgcct

SEQ ID NO: 23844 - DNA, 16 bp, synthetic construct
  misc_feature 1..16: note = synthetic [barcode part1]
  source 1..16: mol_type = other DNA
gacgagttcgcgatag

SEQ ID NO: 23845 - DNA, 16 bp, synthetic construct
  misc_feature 1..16: note = synthetic [barcode part1]
  source 1..16: mol_type = other DNA
tgcaggttgaggcagt

SEQ ID NO: 23846 - DNA, 16 bp, synthetic construct
  misc_feature 1..16: note = synthetic [barcode part1]
  source 1..16: mol_type = other DNA
ttgtcgagtcaagtcg

SEQ ID NO: 23847 - DNA, 16 bp, synthetic construct
  misc_feature 1..16: note = synthetic [barcode part1]
  source 1..16: mol_type = other DNA
acctcggattgatcag

SEQ ID NO: 23848 - DNA, 16 bp, synthetic construct
  misc_feature 1..16: note = synthetic [barcode part1]
  source 1..16: mol_type = other DNA
aggtctgcctaatctt

SEQ ID NO: 23849 - DNA, 16 bp, synthetic construct
  misc_feature 1..16: note = synthetic [barcode part1]
  source 1..16: mol_type = other DNA
cgaaggtgaacacaag

SEQ ID NO: 23850 - DNA, 16 bp, synthetic construct
  misc_feature 1..16: note = synthetic [barcode part1]
  source 1..16: mol_type = other DNA
tcttgtactggatcac

SEQ ID NO: 23851 - DNA, 16 bp, synthetic construct
  misc_feature 1..16: note = synthetic [barcode part1]
  source 1..16: mol_type = other DNA
aacactgcagtcaacc

SEQ ID NO: 23852 - DNA, 16 bp, synthetic construct
  misc_feature 1..16: note = synthetic [barcode part1]
  source 1..16: mol_type = other DNA
cgaaggtattcggcag

SEQ ID NO: 23853 - DNA, 16 bp, synthetic construct
  misc_feature 1..16: note = synthetic [barcode part1]
  source 1..16: mol_type = other DNA
gacgagttaggatccg

SEQ ID NO: 23854 - DNA, 16 bp, synthetic construct
  misc_feature 1..16: note = synthetic [barcode part1]
  source 1..16: mol_type = other DNA
gcgtagttctcggtct

SEQ ID NO: 23855 - DNA, 16 bp, synthetic construct
  misc_feature 1..16: note = synthetic [barcode part1]
  source 1..16: mol_type = other DNA
tgttgccacaggatac

SEQ ID NO: 23856 - DNA, 16 bp, synthetic construct
  misc_feature 1..16: note = synthetic [barcode part1]
  source 1..16: mol_type = other DNA
gcagtcacgcgtaatt

SEQ ID NO: 23857 - DNA, 16 bp, synthetic construct
  misc_feature 1..16: note = synthetic [barcode part1]
  source 1..16: mol_type = other DNA
cactaggcagatcgtt

SEQ ID NO: 23858 - DNA, 16 bp, synthetic construct
  misc_feature 1..16: note = synthetic [barcode part1]
  source 1..16: mol_type = other DNA
tagacgccttcgtcgt

SEQ ID NO: 23859 - DNA, 16 bp, synthetic construct
  misc_feature 1..16: note = synthetic [barcode part1]
  source 1..16: mol_type = other DNA
aaggacaagtggtctt

SEQ ID NO: 23860 - DNA, 16 bp, synthetic construct
  misc_feature 1..16: note = synthetic [barcode part1]
  source 1..16: mol_type = other DNA
tacgcgacactccgtt

SEQ ID NO: 23861 - DNA, 16 bp, synthetic construct
  misc_feature 1..16: note = synthetic [barcode part1]
  source 1..16: mol_type = other DNA
gtcctggttgaagttg

SEQ ID NO: 23862 - DNA, 16 bp, synthetic construct
  misc_feature 1..16: note = synthetic [barcode part1]
  source 1..16: mol_type = other DNA
aagttcgactctccgc

SEQ ID NO: 23863 - DNA, 16 bp, synthetic construct
  misc_feature 1..16: note = synthetic [barcode part1]
  source 1..16: mol_type = other DNA
gagtacgtcgaaccag

SEQ ID NO: 23864 - DNA, 16 bp, synthetic construct
  misc_feature 1..16: note = synthetic [barcode part1]
  source 1..16: mol_type = other DNA
tctgagtaacgacaag

SEQ ID NO: 23865 - DNA, 16 bp, synthetic construct
  misc_feature 1..16: note = synthetic [barcode part1]
  source 1..16: mol_type = other DNA
gtcttgcgtctagacc

SEQ ID NO: 23866 - DNA, 16 bp, synthetic construct
  misc_feature 1..16: note = synthetic [barcode part1]
  source 1..16: mol_type = other DNA
tggtgatccgaactac

SEQ ID NO: 23867 - DNA, 16 bp, synthetic construct
  misc_feature 1..16: note = synthetic [barcode part1]
  source 1..16: mol_type = other DNA
tagtattcaggcgaag

SEQ ID NO: 23868 - DNA, 16 bp, synthetic construct
  misc_feature 1..16: note = synthetic [barcode part1]
  source 1..16: mol_type = other DNA
aaggtattggcaatcg

SEQ ID NO: 23869 - DNA, 16 bp, synthetic construct
  misc_feature 1..16: note = synthetic [barcode part1]
  source 1..16: mol_type = other DNA
gcgaattccggatatc

SEQ ID NO: 23870 - DNA, 16 bp, synthetic construct
  misc_feature 1..16: note = synthetic [barcode part1]
  source 1..16: mol_type = other DNA
tgaactcgttcgtgag

SEQ ID NO: 23871 - DNA, 16 bp, synthetic construct
  misc_feature 1..16: note = synthetic [barcode part1]
  source 1..16: mol_type = other DNA
actgaatcactcctgt

SEQ ID NO: 23872 - DNA, 16 bp, synthetic construct
  misc_feature 1..16: note = synthetic [barcode part1]
  source 1..16: mol_type = other DNA
actctacggaccaagt

SEQ ID NO: 23873 - DNA, 16 bp, synthetic construct
  misc_feature 1..16: note = synthetic [barcode part1]
  source 1..16: mol_type = other DNA
agtactggatctcgac

SEQ ID NO: 23874 - DNA, 16 bp, synthetic construct
  misc_feature 1..16: note = synthetic [barcode part1]
  source 1..16: mol_type = other DNA
gttcgcctattgtagt

SEQ ID NO: 23875 - DNA, 16 bp, synthetic construct
  misc_feature 1..16: note = synthetic [barcode part1]
  source 1..16: mol_type = other DNA
agactcgacgactgtt

SEQ ID NO: 23876 - DNA, 16 bp, synthetic construct
  misc_feature 1..16: note = synthetic [barcode part1]
  source 1..16: mol_type = other DNA
gaatcctcaatcgacg

SEQ ID NO: 23877 - DNA, 16 bp, synthetic construct
  misc_feature 1..16: note = synthetic [barcode part1]
  source 1..16: mol_type = other DNA
gttcctcacgtcaacg

SEQ ID NO: 23878 - DNA, 16 bp, synthetic construct
  misc_feature 1..16: note = synthetic [barcode part1]
  source 1..16: mol_type = other DNA
tggtgccagtgaacag

SEQ ID NO: 23879 - DNA, 16 bp, synthetic construct
  misc_feature 1..16: note = synthetic [barcode part1]
  source 1..16: mol_type = other DNA
acgtggaataacctag

SEQ ID NO: 23880 - DNA, 16 bp, synthetic construct
  misc_feature 1..16: note = synthetic [barcode part1]
  source 1..16: mol_type = other DNA
gttatcgacactcttg

SEQ ID NO: 23881 - DNA, 16 bp, synthetic construct
  misc_feature 1..16: note = synthetic [barcode part1]
  source 1..16: mol_type = other DNA
tctggaatctctctcc

SEQ ID NO: 23882 - DNA, 16 bp, synthetic construct
  misc_feature 1..16: note = synthetic [barcode part1]
  source 1..16: mol_type = other DNA
gacggattctaggacg

SEQ ID NO: 23883 - DNA, 16 bp, synthetic construct
  misc_feature 1..16: note = synthetic [barcode part1]
  source 1..16: mol_type = other DNA
tatactaccgatcctg

SEQ ID NO: 23884 - DNA, 16 bp, synthetic construct
  misc_feature 1..16: note = synthetic [barcode part1]
  source 1..16: mol_type = other DNA
ttacttgtaccgtgac

SEQ ID NO: 23885 - DNA, 16 bp, synthetic construct
  misc_feature 1..16: note = synthetic [barcode part1]
  source 1..16: mol_type = other DNA
gtattgccttgaggtg

SEQ ID NO: 23886 - DNA, 16 bp, synthetic construct
  misc_feature 1..16: note = synthetic [barcode part1]
  source 1..16: mol_type = other DNA
gagtatagaggcgtag

SEQ ID NO: 23887 - DNA, 16 bp, synthetic construct
  misc_feature 1..16: note = synthetic [barcode part1]
  source 1..16: mol_type = other DNA
tataggcctcaagtgc

SEQ ID NO: 23888 - DNA, 16 bp, synthetic construct
  misc_feature 1..16: note = synthetic [barcode part1]
  source 1..16: mol_type = other DNA
aacctagtcgaatcgc

SEQ ID NO: 23889 - DNA, 16 bp, synthetic construct
  misc_feature 1..16: note = synthetic [barcode part1]
  source 1..16: mol_type = other DNA
gttcctagaatcgtct

SEQ ID NO: 23890 - DNA, 16 bp, synthetic construct
  misc_feature 1..16: note = synthetic [barcode part1]
  source 1..16: mol_type = other DNA
acacggtgagatcggt

SEQ ID NO: 23891 - DNA, 16 bp, synthetic construct
  misc_feature 1..16: note = synthetic [barcode part1]
  source 1..16: mol_type = other DNA
aacaacagtctcaccg

SEQ ID NO: 23892 - DNA, 16 bp, synthetic construct
  misc_feature 1..16: note = synthetic [barcode part1]
  source 1..16: mol_type = other DNA
atcaataccgtcactc

SEQ ID NO: 23893 - DNA, 16 bp, synthetic construct
  misc_feature 1..16: note = synthetic [barcode part1]
  source 1..16: mol_type = other DNA
gcaggagttctgtact

SEQ ID NO: 23894 - DNA, 16 bp, synthetic construct
  misc_feature 1..16: note = synthetic [barcode part1]
  source 1..16: mol_type = other DNA
aggcgatagaacagtg

SEQ ID NO: 23895 - DNA, 16 bp, synthetic construct
  misc_feature 1..16: note = synthetic [barcode part1]
  source 1..16: mol_type = other DNA
gaagacgtaagaacgc

SEQ ID NO: 23896 - DNA, 16 bp, synthetic construct
  misc_feature 1..16: note = synthetic [barcode part1]
  source 1..16: mol_type = other DNA
tggccacgtagaacag

SEQ ID NO: 23897 - DNA, 16 bp, synthetic construct
  misc_feature 1..16: note = synthetic [barcode part1]
  source 1..16: mol_type = other DNA
tagactcggcaagacg

SEQ ID NO: 23898 - DNA, 16 bp, synthetic construct
  misc_feature 1..16: note = synthetic [barcode part1]
  source 1..16: mol_type = other DNA
aaccaacgtcagtcac

SEQ ID NO: 23899 - DNA, 16 bp, synthetic construct
  misc_feature 1..16: note = synthetic [barcode part1]
  source 1..16: mol_type = other DNA
gagtgtctcacagact

SEQ ID NO: 23900 - DNA, 16 bp, synthetic construct
  misc_feature 1..16: note = synthetic [barcode part1]
  source 1..16: mol_type = other DNA
gagacgtactgccaag

SEQ ID NO: 23901 - DNA, 16 bp, synthetic construct
  misc_feature 1..16: note = synthetic [barcode part1]
  source 1..16: mol_type = other DNA
gttaacggcggttatc

SEQ ID NO: 23902 - DNA, 16 bp, synthetic construct
  misc_feature 1..16: note = synthetic [barcode part1]
  source 1..16: mol_type = other DNA
acaacgcgaagttcct

SEQ ID NO: 23903 - DNA, 16 bp, synthetic construct
  misc_feature 1..16: note = synthetic [barcode part1]
  source 1..16: mol_type = other DNA
accgcctacaggttct

SEQ ID NO: 23904 - DNA, 16 bp, synthetic construct
  misc_feature 1..16: note = synthetic [barcode part1]
  source 1..16: mol_type = other DNA
agtgcgtggaaccagt

SEQ ID NO: 23905 - DNA, 16 bp, synthetic construct
  misc_feature 1..16: note = synthetic [barcode part1]
  source 1..16: mol_type = other DNA
atatccttctccgcac

SEQ ID NO: 23906 - DNA, 16 bp, synthetic construct
  misc_feature 1..16: note = synthetic [barcode part1]
  source 1..16: mol_type = other DNA
acgtatcaggtgttcg

SEQ ID NO: 23907 - DNA, 16 bp, synthetic construct
  misc_feature 1..16: note = synthetic [barcode part1]
  source 1..16: mol_type = other DNA
cgtcctagaatagtgc

SEQ ID NO: 23908 - DNA, 16 bp, synthetic construct
  misc_feature 1..16: note = synthetic [barcode part1]
  source 1..16: mol_type = other DNA
gcagtacgtacacact

SEQ ID NO: 23909 - DNA, 16 bp, synthetic construct
  misc_feature 1..16: note = synthetic [barcode part1]
  source 1..16: mol_type = other DNA
tcggtatccagtctcg

SEQ ID NO: 23910 - DNA, 16 bp, synthetic construct
  misc_feature 1..16: note = synthetic [barcode part1]
  source 1..16: mol_type = other DNA
gtcagagagagaatcg

SEQ ID NO: 23911 - DNA, 16 bp, synthetic construct
  misc_feature 1..16: note = synthetic [barcode part1]
  source 1..16: mol_type = other DNA
ttgttgtgtgacaggc

SEQ ID NO: 23912 - DNA, 16 bp, synthetic construct
  misc_feature 1..16: note = synthetic [barcode part1]
  source 1..16: mol_type = other DNA
gacgtacagaaggcct

SEQ ID NO: 23913 - DNA, 16 bp, synthetic construct
  misc_feature 1..16: note = synthetic [barcode part1]
  source 1..16: mol_type = other DNA
cgccactaagtgcctt

SEQ ID NO: 23914 - DNA, 16 bp, synthetic construct
  misc_feature 1..16: note = synthetic [barcode part1]
  source 1..16: mol_type = other DNA
tcctgcgttagtagtt

SEQ ID NO: 23915 - DNA, 16 bp, synthetic construct
  misc_feature 1..16: note = synthetic [barcode part1]
  source 1..16: mol_type = other DNA
atagattaccgaaggc

SEQ ID NO: 23916 - DNA, 16 bp, synthetic construct
  misc_feature 1..16: note = synthetic [barcode part1]
  source 1..16: mol_type = other DNA
aggataactgcaagtc

SEQ ID NO: 23917 - DNA, 16 bp, synthetic construct
  misc_feature 1..16: note = synthetic [barcode part1]
  source 1..16: mol_type = other DNA
gaccgactgatactac

SEQ ID NO: 23918 - DNA, 16 bp, synthetic construct
  misc_feature 1..16: note = synthetic [barcode part1]
  source 1..16: mol_type = other DNA
atctaccacctcaagt

SEQ ID NO: 23919 - DNA, 16 bp, synthetic construct
  misc_feature 1..16: note = synthetic [barcode part1]
  source 1..16: mol_type = other DNA
cgactggtagttagtc

SEQ ID NO: 23920 - DNA, 16 bp, synthetic construct
  misc_feature 1..16: note = synthetic [barcode part1]
  source 1..16: mol_type = other DNA
tcagacaacttgtggc

SEQ ID NO: 23921 - DNA, 16 bp, synthetic construct
  misc_feature 1..16: note = synthetic [barcode part1]
  source 1..16: mol_type = other DNA
atcacgtggagtgacg

SEQ ID NO: 23922 - DNA, 16 bp, synthetic construct
  misc_feature 1..16: note = synthetic [barcode part1]
  source 1..16: mol_type = other DNA
tagtgtgacgtgactc

SEQ ID NO: 23923 - DNA, 16 bp, synthetic construct
  misc_feature 1..16: note = synthetic [barcode part1]
  source 1..16: mol_type = other DNA
aggtgactcagacgtg

SEQ ID NO: 23924 - DNA, 16 bp, synthetic construct
  misc_feature 1..16: note = synthetic [barcode part1]
  source 1..16: mol_type = other DNA
tatcaccaacgacggt

SEQ ID NO: 23925 - DNA, 16 bp, synthetic construct
  misc_feature 1..16: note = synthetic [barcode part1]
  source 1..16: mol_type = other DNA
gccttaattggaaccg

SEQ ID NO: 23926 - DNA, 16 bp, synthetic construct
  misc_feature 1..16: note = synthetic [barcode part1]
  source 1..16: mol_type = other DNA
caggtgaggtactacg

SEQ ID NO: 23927 - DNA, 16 bp, synthetic construct
  misc_feature 1..16: note = synthetic [barcode part1]
  source 1..16: mol_type = other DNA
ccgcgtcttcagtaac

SEQ ID NO: 23928 - DNA, 16 bp, synthetic construct
  misc_feature 1..16: note = synthetic [barcode part1]
  source 1..16: mol_type = other DNA
gcacgtgaactgattc

SEQ ID NO: 23929 - DNA, 16 bp, synthetic construct
  misc_feature 1..16: note = synthetic [barcode part1]
  source 1..16: mol_type = other DNA
gcactgaccaagtgtt

SEQ ID NO: 23930 - DNA, 16 bp, synthetic construct
  misc_feature 1..16: note = synthetic [barcode part1]
  source 1..16: mol_type = other DNA
cgttactaggtcgagt

SEQ ID NO: 23931 - DNA, 16 bp, synthetic construct
  misc_feature 1..16: note = synthetic [barcode part1]
  source 1..16: mol_type = other DNA
gcaggtaacttatccg

SEQ ID NO: 23932 - DNA, 16 bp, synthetic construct
  misc_feature 1..16: note = synthetic [barcode part1]
  source 1..16: mol_type = other DNA
tagactatcctcacgt

SEQ ID NO: 23933 - DNA, 16 bp, synthetic construct
  misc_feature 1..16: note = synthetic [barcode part1]
  source 1..16: mol_type = other DNA
tccttggcgattacgc

SEQ ID NO: 23934 - DNA, 16 bp, synthetic construct
  misc_feature 1..16: note = synthetic [barcode part1]
  source 1..16: mol_type = other DNA
cgacgcaaggacaatc

SEQ ID NO: 23935 - DNA, 16 bp, synthetic construct
  misc_feature 1..16: note = synthetic [barcode part1]
  source 1..16: mol_type = other DNA
aagtgcctccgtcgtt

SEQ ID NO: 23936 - DNA, 16 bp, synthetic construct
  misc_feature 1..16: note = synthetic [barcode part1]
  source 1..16: mol_type = other DNA
tcaatcctcaccgtct

SEQ ID NO: 23937 - DNA, 16 bp, synthetic construct
  misc_feature 1..16: note = synthetic [barcode part1]
  source 1..16: mol_type = other DNA
caacttggcgaaggtg

SEQ ID NO: 23938 - DNA, 16 bp, synthetic construct
  misc_feature 1..16: note = synthetic [barcode part1]
  source 1..16: mol_type = other DNA
attggcagttcgagtc

SEQ ID NO: 23939 - DNA, 16 bp, synthetic construct
  misc_feature 1..16: note = synthetic [barcode part1]
  source 1..16: mol_type = other DNA
gtaagattcgtgaacg

SEQ ID NO: 23940 - DNA, 16 bp, synthetic construct
  misc_feature 1..16: note = synthetic [barcode part1]
  source 1..16: mol_type = other DNA
cacgtgccaatatcag

SEQ ID NO: 23941 - DNA, 16 bp, synthetic construct
  misc_feature 1..16: note = synthetic [barcode part1]
  source 1..16: mol_type = other DNA
gttgttgtacgtcttg

SEQ ID NO: 23942 - DNA, 16 bp, synthetic construct
  misc_feature 1..16: note = synthetic [barcode part1]
  source 1..16: mol_type = other DNA
acaccttgcactctct

SEQ ID NO: 23943 - DNA, 16 bp, synthetic construct
  misc_feature 1..16: note = synthetic [barcode part1]
  source 1..16: mol_type = other DNA
aataaggcacgagttc

SEQ ID NO: 23944 - DNA, 16 bp, synthetic construct
  misc_feature 1..16: note = synthetic [barcode part1]
  source 1..16: mol_type = other DNA
caccttaccacagatt

SEQ ID NO: 23945 - DNA, 16 bp, synthetic construct
  misc_feature 1..16: note = synthetic [barcode part1]
  source 1..16: mol_type = other DNA
aggagtccacaattag

SEQ ID NO: 23946 - DNA, 16 bp, synthetic construct
  misc_feature 1..16: note = synthetic [barcode part1]
  source 1..16: mol_type = other DNA
agaactattaggcacg

SEQ ID NO: 23947 - DNA, 16 bp, synthetic construct
  misc_feature 1..16: note = synthetic [barcode part1]
  source 1..16: mol_type = other DNA
gcgagtctcttcgatc

SEQ ID NO: 23948 - DNA, 16 bp, synthetic construct
  misc_feature 1..16: note = synthetic [barcode part1]
  source 1..16: mol_type = other DNA
gttatccacctcgtct

SEQ ID NO: 23949 - DNA, 16 bp, synthetic construct
  misc_feature 1..16: note = synthetic [barcode part1]
  source 1..16: mol_type = other DNA
ttggcgaacggagact

SEQ ID NO: 23950 - DNA, 16 bp, synthetic construct
  misc_feature 1..16: note = synthetic [barcode part1]
  source 1..16: mol_type = other DNA
agagaagaggaccttg

SEQ ID NO: 23951 - DNA, 16 bp, synthetic construct
  misc_feature 1..16: note = synthetic [barcode part1]
  source 1..16: mol_type = other DNA
cgttccggacaagatt

SEQ ID NO: 23952 - DNA, 16 bp, synthetic construct
  misc_feature 1..16: note = synthetic [barcode part1]
  source 1..16: mol_type = other DNA
gtctaaccgtgttccg

SEQ ID NO: 23953 - DNA, 16 bp, synthetic construct
  misc_feature 1..16: note = synthetic [barcode part1]
  source 1..16: mol_type = other DNA
taatcggcggtactac

SEQ ID NO: 23954 - DNA, 16 bp, synthetic construct
  misc_feature 1..16: note = synthetic [barcode part1]
  source 1..16: mol_type = other DNA
ttggcggtgttctcac

SEQ ID NO: 23955 - DNA, 16 bp, synthetic construct
  misc_feature 1..16: note = synthetic [barcode part1]
  source 1..16: mol_type = other DNA
gcgaatcaaggtaact

SEQ ID NO: 23956 - DNA, 16 bp, synthetic construct
  misc_feature 1..16: note = synthetic [barcode part1]
  source 1..16: mol_type = other DNA
tgttcacggtgttact

SEQ ID NO: 23957 - DNA, 16 bp, synthetic construct
  misc_feature 1..16: note = synthetic [barcode part1]
  source 1..16: mol_type = other DNA
cgtaacggtagtacct

SEQ ID NO: 23958 - DNA, 16 bp, synthetic construct
  misc_feature 1..16: note = synthetic [barcode part1]
  source 1..16: mol_type = other DNA
gttcgccgataagtgt

SEQ ID NO: 23959 - DNA, 16 bp, synthetic construct
  misc_feature 1..16: note = synthetic [barcode part1]
  source 1..16: mol_type = other DNA
actacttgtgagtctc

SEQ ID NO: 23960 - DNA, 16 bp, synthetic construct
  misc_feature 1..16: note = synthetic [barcode part1]
  source 1..16: mol_type = other DNA
ttccggttagtccttc

SEQ ID NO: 23961 - DNA, 16 bp, synthetic construct
  misc_feature 1..16: note = synthetic [barcode part1]
  source 1..16: mol_type = other DNA
tgtaggtccacaagtc

SEQ ID NO: 23962 - DNA, 16 bp, synthetic construct
  misc_feature 1..16: note = synthetic [barcode part1]
  source 1..16: mol_type = other DNA
ttctgtactctgcgtc

SEQ ID NO: 23963 - DNA, 16 bp, synthetic construct
  misc_feature 1..16: note = synthetic [barcode part1]
  source 1..16: mol_type = other DNA
taagtcacctccgcgt

SEQ ID NO: 23964 - DNA, 16 bp, synthetic construct
  misc_feature 1..16: note = synthetic [barcode part1]
  source 1..16: mol_type = other DNA
actcagtacacctccg

SEQ ID NO: 23965 - DNA, 16 bp, synthetic construct
  misc_feature 1..16: note = synthetic [barcode part1]
  source 1..16: mol_type = other DNA
attacctgcagatctc

SEQ ID NO: 23966 - DNA, 16 bp, synthetic construct
  misc_feature 1..16: note = synthetic [barcode part1]
  source 1..16: mol_type = other DNA
ttaacctactcgagtc

SEQ ID NO: 23967 - DNA, 16 bp, synthetic construct
  misc_feature 1..16: note = synthetic [barcode part1]
  source 1..16: mol_type = other DNA
gttctactaccaacgt

SEQ ID NO: 23968 - DNA, 16 bp, synthetic construct
  misc_feature 1..16: note = synthetic [barcode part1]
  source 1..16: mol_type = other DNA
aaccgttagtacagag

SEQ ID NO: 23969 - DNA, 16 bp, synthetic construct
  misc_feature 1..16: note = synthetic [barcode part1]
  source 1..16: mol_type = other DNA
ttgacggtaccgagtt

SEQ ID NO: 23970 - DNA, 16 bp, synthetic construct
  misc_feature 1..16: note = synthetic [barcode part1]
  source 1..16: mol_type = other DNA
caagttaggtccggtt

SEQ ID NO: 23971 - DNA, 16 bp, synthetic construct
  misc_feature 1..16: note = synthetic [barcode part1]
  source 1..16: mol_type = other DNA
agtgcgaggactatcg

SEQ ID NO: 23972 - DNA, 16 bp, synthetic construct
  misc_feature 1..16: note = synthetic [barcode part1]
  source 1..16: mol_type = other DNA
acacgaggaatcaccg

SEQ ID NO: 23973 - DNA, 16 bp, synthetic construct
  misc_feature 1..16: note = synthetic [barcode part1]
  source 1..16: mol_type = other DNA
ttatacaccttgaccg

SEQ ID NO: 23974 - DNA, 16 bp, synthetic construct
  misc_feature 1..16: note = synthetic [barcode part1]
  source 1..16: mol_type = other DNA
gagatctagacaagtc

SEQ ID NO: 23975 - DNA, 16 bp, synthetic construct
  misc_feature 1..16: note = synthetic [barcode part1]
  source 1..16: mol_type = other DNA
gatactgcagtatcgc

SEQ ID NO: 23976 - DNA, 16 bp, synthetic construct
  misc_feature 1..16: note = synthetic [barcode part1]
  source 1..16: mol_type = other DNA
ttccttcttgaccgac

SEQ ID NO: 23977 - DNA, 16 bp, synthetic construct
  misc_feature 1..16: note = synthetic [barcode part1]
  source 1..16: mol_type = other DNA
caatctgactcggtag

SEQ ID NO: 23978 - DNA, 16 bp, synthetic construct
  misc_feature 1..16: note = synthetic [barcode part1]
  source 1..16: mol_type = other DNA
aagtctgagtaacgac

SEQ ID NO: 23979 - DNA, 16 bp, synthetic construct
  misc_feature 1..16: note = synthetic [barcode part1]
  source 1..16: mol_type = other DNA
ccaacggtaagttgtc

SEQ ID NO: 23980 - DNA, 16 bp, synthetic construct
  misc_feature 1..16: note = synthetic [barcode part1]
  source 1..16: mol_type = other DNA
gtaccagtgcgaactt

SEQ ID NO: 23981 - DNA, 16 bp, synthetic construct
  misc_feature 1..16: note = synthetic [barcode part1]
  source 1..16: mol_type = other DNA
aagacttgcggcactt

SEQ ID NO: 23982 - DNA, 16 bp, synthetic construct
  misc_feature 1..16: note = synthetic [barcode part1]
  source 1..16: mol_type = other DNA
gactgtgtgacacact

SEQ ID NO: 23983 - DNA, 16 bp, synthetic construct
  misc_feature 1..16: note = synthetic [barcode part1]
  source 1..16: mol_type = other DNA
acggtcgaatcgagac

SEQ ID NO: 23984 - DNA, 16 bp, synthetic construct
  misc_feature 1..16: note = synthetic [barcode part1]
  source 1..16: mol_type = other DNA
acttctgacggtccgt

SEQ ID NO: 23985 - DNA, 16 bp, synthetic construct
  misc_feature 1..16: note = synthetic [barcode part1]
  source 1..16: mol_type = other DNA
ccagagatccttagtg

SEQ ID NO: 23986 - DNA, 16 bp, synthetic construct
  misc_feature 1..16: note = synthetic [barcode part1]
  source 1..16: mol_type = other DNA
tacgcggcaagaagtc

SEQ ID NO: 23987 - DNA, 16 bp, synthetic construct
  misc_feature 1..16: note = synthetic [barcode part1]
  source 1..16: mol_type = other DNA
acttcagacacacgtg

SEQ ID NO: 23988 - DNA, 16 bp, synthetic construct
  misc_feature 1..16: note = synthetic [barcode part1]
  source 1..16: mol_type = other DNA
aagtcctccgatcaag

SEQ ID NO: 23989 - DNA, 16 bp, synthetic construct
  misc_feature 1..16: note = synthetic [barcode part1]
  source 1..16: mol_type = other DNA
atcctagttaaggccg

SEQ ID NO: 23990 - DNA, 16 bp, synthetic construct
  misc_feature 1..16: note = synthetic [barcode part1]
  source 1..16: mol_type = other DNA
ccgataggcagaggtt

SEQ ID NO: 23991 - DNA, 16 bp, synthetic construct
  misc_feature 1..16: note = synthetic [barcode part1]
  source 1..16: mol_type = other DNA
actcaccagtgtcgtc

SEQ ID NO: 23992 - DNA, 16 bp, synthetic construct
  misc_feature 1..16: note = synthetic [barcode part1]
  source 1..16: mol_type = other DNA
gacgttgtggtcagtt

SEQ ID NO: 23993 - DNA, 16 bp, synthetic construct
  misc_feature 1..16: note = synthetic [barcode part1]
  source 1..16: mol_type = other DNA
cgagtgtctgatacgt

SEQ ID NO: 23994 - DNA, 16 bp, synthetic construct
  misc_feature 1..16: note = synthetic [barcode part1]
  source 1..16: mol_type = other DNA
gttgacaggatcggac

SEQ ID NO: 23995 - DNA, 16 bp, synthetic construct
  misc_feature 1..16: note = synthetic [barcode part1]
  source 1..16: mol_type = other DNA
acactcttcaagtcgt

SEQ ID NO: 23996 - DNA, 16 bp, synthetic construct
  misc_feature 1..16: note = synthetic [barcode part1]
  source 1..16: mol_type = other DNA
ccacctataccacgac

SEQ ID NO: 23997 - DNA, 16 bp, synthetic construct
  misc_feature 1..16: note = synthetic [barcode part1]
  source 1..16: mol_type = other DNA
cgcgaggcaacttaag

SEQ ID NO: 23998 - DNA, 16 bp, synthetic construct
  misc_feature 1..16: note = synthetic [barcode part1]
  source 1..16: mol_type = other DNA
tgcgttacgcaatcag

SEQ ID NO: 23999 - DNA, 16 bp, synthetic construct
  misc_feature 1..16: note = synthetic [barcode part1]
  source 1..16: mol_type = other DNA
acgattctaggaacag

SEQ ID NO: 24000 - DNA, 16 bp, synthetic construct
  misc_feature 1..16: note = synthetic [barcode part1]
  source 1..16: mol_type = other DNA
tatctgttaccgtgac

SEQ ID NO: 24001 - DNA, 16 bp, synthetic construct
  misc_feature 1..16: note = synthetic [barcode part1]
  source 1..16: mol_type = other DNA
gcgaatcagttcacgt

SEQ ID NO: 24002 - DNA, 16 bp, synthetic construct
  misc_feature 1..16: note = synthetic [barcode part1]
  source 1..16: mol_type = other DNA
acgtcaactctcgacc

SEQ ID NO: 24003 - DNA, 16 bp, synthetic construct
  misc_feature 1..16: note = synthetic [barcode part1]
  source 1..16: mol_type = other DNA
gccagactacttctgc

SEQ ID NO: 24004 - DNA, 16 bp, synthetic construct
  misc_feature 1..16: note = synthetic [barcode part1]
  source 1..16: mol_type = other DNA
caagttgaacctggtc

SEQ ID NO: 24005 - DNA, 16 bp, synthetic construct
  misc_feature 1..16: note = synthetic [barcode part1]
  source 1..16: mol_type = other DNA
caacggactgtgagtg

SEQ ID NO: 24006 - DNA, 16 bp, synthetic construct
  misc_feature 1..16: note = synthetic [barcode part1]
  source 1..16: mol_type = other DNA
tcactcgaatatcgtc

SEQ ID NO: 24007 - DNA, 16 bp, synthetic construct
  misc_feature 1..16: note = synthetic [barcode part1]
  source 1..16: mol_type = other DNA
taccaagtaggtcgtc

SEQ ID NO: 24008 - DNA, 16 bp, synthetic construct
  misc_feature 1..16: note = synthetic [barcode part1]
  source 1..16: mol_type = other DNA
caagtaccgatcctcc

SEQ ID NO: 24009 - DNA, 16 bp, synthetic construct
  misc_feature 1..16: note = synthetic [barcode part1]
  source 1..16: mol_type = other DNA
ttacgaatccgcgagt

SEQ ID NO: 24010 - DNA, 16 bp, synthetic construct
  misc_feature 1..16: note = synthetic [barcode part1]
  source 1..16: mol_type = other DNA
agttcagtgacagtcc

SEQ ID NO: 24011 - DNA, 16 bp, synthetic construct
  misc_feature 1..16: note = synthetic [barcode part1]
  source 1..16: mol_type = other DNA
tctatacctggtgatc

SEQ ID NO: 24012 - DNA, 16 bp, synthetic construct
  misc_feature 1..16: note = synthetic [barcode part1]
  source 1..16: mol_type = other DNA
agtagagttgacacgt

SEQ ID NO: 24013 - DNA, 16 bp, synthetic construct
  misc_feature 1..16: note = synthetic [barcode part1]
  source 1..16: mol_type = other DNA
gtgcacaggttagtct

SEQ ID NO: 24014 - DNA, 16 bp, synthetic construct
  misc_feature 1..16: note = synthetic [barcode part1]
  source 1..16: mol_type = other DNA
ccttcgagtaccagtc

SEQ ID NO: 24015 - DNA, 16 bp, synthetic construct
  misc_feature 1..16: note = synthetic [barcode part1]
  source 1..16: mol_type = other DNA
gcaggaagtcgaactc

SEQ ID NO: 24016 - DNA, 16 bp, synthetic construct
  misc_feature 1..16: note = synthetic [barcode part1]
  source 1..16: mol_type = other DNA
ttgcaagagtgacaac

SEQ ID NO: 24017 - DNA, 16 bp, synthetic construct
  misc_feature 1..16: note = synthetic [barcode part1]
  source 1..16: mol_type = other DNA
gccagaccaaggatac

SEQ ID NO: 24018 - DNA, 16 bp, synthetic construct
  misc_feature 1..16: note = synthetic [barcode part1]
  source 1..16: mol_type = other DNA
aggccgtgagttattc

SEQ ID NO: 24019 - DNA, 16 bp, synthetic construct
  misc_feature 1..16: note = synthetic [barcode part1]
  source 1..16: mol_type = other DNA
acgtacagtcgattgc

SEQ ID NO: 24020 - DNA, 16 bp, synthetic construct
  misc_feature 1..16: note = synthetic [barcode part1]
  source 1..16: mol_type = other DNA
tctgtattggcagttc

SEQ ID NO: 24021 - DNA, 16 bp, synthetic construct
  misc_feature 1..16: note = synthetic [barcode part1]
  source 1..16: mol_type = other DNA
tccgcgaaccttactg

SEQ ID NO: 24022 - DNA, 16 bp, synthetic construct
  misc_feature 1..16: note = synthetic [barcode part1]
  source 1..16: mol_type = other DNA
cgtagtggtccgttct

SEQ ID NO: 24023 - DNA, 16 bp, synthetic construct
  misc_feature 1..16: note = synthetic [barcode part1]
  source 1..16: mol_type = other DNA
cacttgacttccgacg

SEQ ID NO: 24024 - DNA, 16 bp, synthetic construct
  misc_feature 1..16: note = synthetic [barcode part1]
  source 1..16: mol_type = other DNA
ttggaaccaagacctc

SEQ ID NO: 24025 - DNA, 16 bp, synthetic construct
  misc_feature 1..16: note = synthetic [barcode part1]
  source 1..16: mol_type = other DNA
tgagaggacaccaacc

SEQ ID NO: 24026 - DNA, 16 bp, synthetic construct
  misc_feature 1..16: note = synthetic [barcode part1]
  source 1..16: mol_type = other DNA
ttaccagtggcaactg

SEQ ID NO: 24027 - DNA, 16 bp, synthetic construct
  misc_feature 1..16: note = synthetic [barcode part1]
  source 1..16: mol_type = other DNA
gcctgaactgtaggtt

SEQ ID NO: 24028 - DNA, 16 bp, synthetic construct
  misc_feature 1..16: note = synthetic [barcode part1]
  source 1..16: mol_type = other DNA
atagaacggcgaagtg

SEQ ID NO: 24029 - DNA, 16 bp, synthetic construct
  misc_feature 1..16: note = synthetic [barcode part1]
  source 1..16: mol_type = other DNA
accacgcgttaggaag

SEQ ID NO: 24030 - DNA, 16 bp, synthetic construct
  misc_feature 1..16: note = synthetic [barcode part1]
  source 1..16: mol_type = other DNA
ttgagtgtggaacaac

SEQ ID NO: 24031 - DNA, 16 bp, synthetic construct
  misc_feature 1..16: note = synthetic [barcode part1]
  source 1..16: mol_type = other DNA
ttccttctgcgtacac

SEQ ID NO: 24032 - DNA, 16 bp, synthetic construct
  misc_feature 1..16: note = synthetic [barcode part1]
  source 1..16: mol_type = other DNA
ccagacagtcctgtct

SEQ ID NO: 24033 - DNA, 16 bp, synthetic construct
  misc_feature 1..16: note = synthetic [barcode part1]
  source 1..16: mol_type = other DNA
gactagtccttggaac

SEQ ID NO: 24034 - DNA, 16 bp, synthetic construct
  misc_feature 1..16: note = synthetic [barcode part1]
  source 1..16: mol_type = other DNA
tcaacacggaggactg

SEQ ID NO: 24035 - DNA, 16 bp, synthetic construct
  misc_feature 1..16: note = synthetic [barcode part1]
  source 1..16: mol_type = other DNA
actgtctcgagtgcct

SEQ ID NO: 24036 - DNA, 16 bp, synthetic construct
  misc_feature 1..16: note = synthetic [barcode part1]
  source 1..16: mol_type = other DNA
tgattctccggtcttc

SEQ ID NO: 24037 - DNA, 16 bp, synthetic construct
  misc_feature 1..16: note = synthetic [barcode part1]
  source 1..16: mol_type = other DNA
aggacttgagtctcac

SEQ ID NO: 24038 - DNA, 16 bp, synthetic construct
  misc_feature 1..16: note = synthetic [barcode part1]
  source 1..16: mol_type = other DNA
acttgccgacactgtc

SEQ ID NO: 24039 - DNA, 16 bp, synthetic construct
  misc_feature 1..16: note = synthetic [barcode part1]
  source 1..16: mol_type = other DNA
tagtgactgcaagaac

SEQ ID NO: 24040 - DNA, 16 bp, synthetic construct
  misc_feature 1..16: note = synthetic [barcode part1]
  source 1..16: mol_type = other DNA
gaacgtgtgataatcg

SEQ ID NO: 24041 - DNA, 16 bp, synthetic construct
  misc_feature 1..16: note = synthetic [barcode part1]
  source 1..16: mol_type = other DNA
agagtctaagtagacc

SEQ ID NO: 24042 - DNA, 16 bp, synthetic construct
  misc_feature 1..16: note = synthetic [barcode part1]
  source 1..16: mol_type = other DNA
caccactacaaggtac

SEQ ID NO: 24043 - DNA, 16 bp, synthetic construct
  misc_feature 1..16: note = synthetic [barcode part1]
  source 1..16: mol_type = other DNA
tgaataggacgttgtg

SEQ ID NO: 24044 - DNA, 16 bp, synthetic construct
  misc_feature 1..16: note = synthetic [barcode part1]
  source 1..16: mol_type = other DNA
tccaaccgttgcgtac

SEQ ID NO: 24045 - DNA, 16 bp, synthetic construct
  misc_feature 1..16: note = synthetic [barcode part1]
  source 1..16: mol_type = other DNA
attcctgagtgcaggt

SEQ ID NO: 24046 - DNA, 16 bp, synthetic construct
  misc_feature 1..16: note = synthetic [barcode part1]
  source 1..16: mol_type = other DNA
atagtcaggagaacct

SEQ ID NO: 24047 - DNA, 16 bp, synthetic construct
  misc_feature 1..16: note = synthetic [barcode part1]
  source 1..16: mol_type = other DNA
gtgtcgcctattcgtg

SEQ ID NO: 24048 - DNA, 16 bp, synthetic construct
  misc_feature 1..16: note = synthetic [barcode part1]
  source 1..16: mol_type = other DNA
cagtagtccgaactac

SEQ ID NO: 24049 - DNA, 16 bp, synthetic construct
  misc_feature 1..16: note = synthetic [barcode part1]
  source 1..16: mol_type = other DNA
gactgttccacactcg

SEQ ID NO: 24050 - DNA, 16 bp, synthetic construct
  misc_feature 1..16: note = synthetic [barcode part1]
  source 1..16: mol_type = other DNA
tgtaatagacaccgcc

SEQ ID NO: 24051 - DNA, 16 bp, synthetic construct
  misc_feature 1..16: note = synthetic [barcode part1]
  source 1..16: mol_type = other DNA
gtacagtagaaccaac

SEQ ID NO: 24052 - DNA, 16 bp, synthetic construct
  misc_feature 1..16: note = synthetic [barcode part1]
  source 1..16: mol_type = other DNA
ttcaccgatcactctc

SEQ ID NO: 24053 - DNA, 16 bp, synthetic construct
  misc_feature 1..16: note = synthetic [barcode part1]
  source 1..16: mol_type = other DNA
cgtggtctctcgttag

SEQ ID NO: 24054 - DNA, 16 bp, synthetic construct
  misc_feature 1..16: note = synthetic [barcode part1]
  source 1..16: mol_type = other DNA
tgccagacagactact

SEQ ID NO: 24055 - DNA, 16 bp, synthetic construct
  misc_feature 1..16: note = synthetic [barcode part1]
  source 1..16: mol_type = other DNA
tagacctctgtaggtg

SEQ ID NO: 24056 - DNA, 16 bp, synthetic construct
  misc_feature 1..16: note = synthetic [barcode part1]
  source 1..16: mol_type = other DNA
cgttcgtcgttataac

SEQ ID NO: 24057 - DNA, 16 bp, synthetic construct
  misc_feature 1..16: note = synthetic [barcode part1]
  source 1..16: mol_type = other DNA
gtggcaactcgtgaag

SEQ ID NO: 24058 - DNA, 16 bp, synthetic construct
  misc_feature 1..16: note = synthetic [barcode part1]
  source 1..16: mol_type = other DNA
agttgacacgttgcac

SEQ ID NO: 24059 - DNA, 16 bp, synthetic construct
  misc_feature 1..16: note = synthetic [barcode part1]
  source 1..16: mol_type = other DNA
accacctggtgttcac

SEQ ID NO: 24060 - DNA, 16 bp, synthetic construct
  misc_feature 1..16: note = synthetic [barcode part1]
  source 1..16: mol_type = other DNA
gtcaaggaatctctcg

SEQ ID NO: 24061 - DNA, 16 bp, synthetic construct
  misc_feature 1..16: note = synthetic [barcode part1]
  source 1..16: mol_type = other DNA
tgagaggactgcacac

SEQ ID NO: 24062 - DNA, 16 bp, synthetic construct
  misc_feature 1..16: note = synthetic [barcode part1]
  source 1..16: mol_type = other DNA
caacgatagtcgtcac

SEQ ID NO: 24063 - DNA, 16 bp, synthetic construct
  misc_feature 1..16: note = synthetic [barcode part1]
  source 1..16: mol_type = other DNA
tccggacactcttcag

SEQ ID NO: 24064 - DNA, 16 bp, synthetic construct
  misc_feature 1..16: note = synthetic [barcode part1]
  source 1..16: mol_type = other DNA
atagacctccttggcc

SEQ ID NO: 24065 - DNA, 16 bp, synthetic construct
  misc_feature 1..16: note = synthetic [barcode part1]
  source 1..16: mol_type = other DNA
ccacagattaccactt

SEQ ID NO: 24066 - DNA, 16 bp, synthetic construct
  misc_feature 1..16: note = synthetic [barcode part1]
  source 1..16: mol_type = other DNA
acgatactctccttcc

SEQ ID NO: 24067 - DNA, 16 bp, synthetic construct
  misc_feature 1..16: note = synthetic [barcode part1]
  source 1..16: mol_type = other DNA
tgagaggatcgcgtac

SEQ ID NO: 24068 - DNA, 16 bp, synthetic construct
  misc_feature 1..16: note = synthetic [barcode part1]
  source 1..16: mol_type = other DNA
gacttggttcttacgt

SEQ ID NO: 24069 - DNA, 16 bp, synthetic construct
  misc_feature 1..16: note = synthetic [barcode part1]
  source 1..16: mol_type = other DNA
aagtaggcagagttct

SEQ ID NO: 24070 - DNA, 16 bp, synthetic construct
  misc_feature 1..16: note = synthetic [barcode part1]
  source 1..16: mol_type = other DNA
gttctgtgttcaggtt

SEQ ID NO: 24071 - DNA, 16 bp, synthetic construct
  misc_feature 1..16: note = synthetic [barcode part1]
  source 1..16: mol_type = other DNA
taggttctagacgtcg

SEQ ID NO: 24072 - DNA, 16 bp, synthetic construct
  misc_feature 1..16: note = synthetic [barcode part1]
  source 1..16: mol_type = other DNA
cggtatacagtgaggc

SEQ ID NO: 24073 - DNA, 16 bp, synthetic construct
  misc_feature 1..16: note = synthetic [barcode part1]
  source 1..16: mol_type = other DNA
gagaagatcgactgag

SEQ ID NO: 24074 - DNA, 16 bp, synthetic construct
  misc_feature 1..16: note = synthetic [barcode part1]
  source 1..16: mol_type = other DNA
attccttaccgcgcag

SEQ ID NO: 24075 - DNA, 16 bp, synthetic construct
  misc_feature 1..16: note = synthetic [barcode part1]
  source 1..16: mol_type = other DNA
gaccgcaagttctctc

SEQ ID NO: 24076 - DNA, 16 bp, synthetic construct
  misc_feature 1..16: note = synthetic [barcode part1]
  source 1..16: mol_type = other DNA
cgtattgcgactacag

SEQ ID NO: 24077 - DNA, 16 bp, synthetic construct
  misc_feature 1..16: note = synthetic [barcode part1]
  source 1..16: mol_type = other DNA
tacggatcttatcgtc

SEQ ID NO: 24078 - DNA, 16 bp, synthetic construct
  misc_feature 1..16: note = synthetic [barcode part1]
  source 1..16: mol_type = other DNA
gcgaaggtcaacggtt

SEQ ID NO: 24079 - DNA, 16 bp, synthetic construct
  misc_feature 1..16: note = synthetic [barcode part1]
  source 1..16: mol_type = other DNA
gtccttccacgtagtg

SEQ ID NO: 24080 - DNA, 16 bp, synthetic construct
  misc_feature 1..16: note = synthetic [barcode part1]
  source 1..16: mol_type = other DNA
ccggcagtattagact

SEQ ID NO: 24081 - DNA, 16 bp, synthetic construct
  misc_feature 1..16: note = synthetic [barcode part1]
  source 1..16: mol_type = other DNA
cactgagagtgactct

SEQ ID NO: 24082 - DNA, 16 bp, synthetic construct
  misc_feature 1..16: note = synthetic [barcode part1]
  source 1..16: mol_type = other DNA
gacgtgactattagag

SEQ ID NO: 24083 - DNA, 16 bp, synthetic construct
  misc_feature 1..16: note = synthetic [barcode part1]
  source 1..16: mol_type = other DNA
atcgcgaggacagact

SEQ ID NO: 24084 - DNA, 16 bp, synthetic construct
  misc_feature 1..16: note = synthetic [barcode part1]
  source 1..16: mol_type = other DNA
gcgtctggatagaacg

SEQ ID NO: 24085 - DNA, 16 bp, synthetic construct
  misc_feature 1..16: note = synthetic [barcode part1]
  source 1..16: mol_type = other DNA
atcgaaccacctccac

SEQ ID NO: 24086 - DNA, 16 bp, synthetic construct
  misc_feature 1..16: note = synthetic [barcode part1]
  source 1..16: mol_type = other DNA
gttgacgcctaattct

SEQ ID NO: 24087 - DNA, 16 bp, synthetic construct
  misc_feature 1..16: note = synthetic [barcode part1]
  source 1..16: mol_type = other DNA
taggtgtccaagtacc

SEQ ID NO: 24088 - DNA, 16 bp, synthetic construct
  misc_feature 1..16: note = synthetic [barcode part1]
  source 1..16: mol_type = other DNA
atcaggtcttacactc

SEQ ID NO: 24089 - DNA, 16 bp, synthetic construct
  misc_feature 1..16: note = synthetic [barcode part1]
  source 1..16: mol_type = other DNA
taattaccacctcgtg

SEQ ID NO: 24090 - DNA, 16 bp, synthetic construct
  misc_feature 1..16: note = synthetic [barcode part1]
  source 1..16: mol_type = other DNA
ttcagactgagtccag

SEQ ID NO: 24091 - DNA, 16 bp, synthetic construct
  misc_feature 1..16: note = synthetic [barcode part1]
  source 1..16: mol_type = other DNA
tggccagagttaactc

SEQ ID NO: 24092 - DNA, 16 bp, synthetic construct
  misc_feature 1..16: note = synthetic [barcode part1]
  source 1..16: mol_type = other DNA
tgtgcgagttcgaact

SEQ ID NO: 24093 - DNA, 16 bp, synthetic construct
  misc_feature 1..16: note = synthetic [barcode part1]
  source 1..16: mol_type = other DNA
tcctcagtacgactgc

SEQ ID NO: 24094 - DNA, 16 bp, synthetic construct
  misc_feature 1..16: note = synthetic [barcode part1]
  source 1..16: mol_type = other DNA
ttaacgcaaggagttg

SEQ ID NO: 24095 - DNA, 16 bp, synthetic construct
  misc_feature 1..16: note = synthetic [barcode part1]
  source 1..16: mol_type = other DNA
gtctgccgacactgtt

SEQ ID NO: 24096 - DNA, 16 bp, synthetic construct
  misc_feature 1..16: note = synthetic [barcode part1]
  source 1..16: mol_type = other DNA
aacaagtggcaccacg

SEQ ID NO: 24097 - DNA, 16 bp, synthetic construct
  misc_feature 1..16: note = synthetic [barcode part1]
  source 1..16: mol_type = other DNA
gacgaacgaacctcag

SEQ ID NO: 24098 - DNA, 16 bp, synthetic construct
  misc_feature 1..16: note = synthetic [barcode part1]
  source 1..16: mol_type = other DNA
acttgactatacctcg

SEQ ID NO: 24099 - DNA, 16 bp, synthetic construct
  misc_feature 1..16: note = synthetic [barcode part1]
  source 1..16: mol_type = other DNA
cgagagtgtccgatag

SEQ ID NO: 24100 - DNA, 16 bp, synthetic construct
  misc_feature 1..16: note = synthetic [barcode part1]
  source 1..16: mol_type = other DNA
gatcgcaggaaggtct

SEQ ID NO: 24101 - DNA, 16 bp, synthetic construct
  misc_feature 1..16: note = synthetic [barcode part1]
  source 1..16: mol_type = other DNA
gtctgagagactcact

SEQ ID NO: 24102 - DNA, 16 bp, synthetic construct
  misc_feature 1..16: note = synthetic [barcode part1]
  source 1..16: mol_type = other DNA
acctacagattgtgcg

SEQ ID NO: 24103 - DNA, 16 bp, synthetic construct
  misc_feature 1..16: note = synthetic [barcode part1]
  source 1..16: mol_type = other DNA
gacgcacgagactaac

SEQ ID NO: 24104 - DNA, 16 bp, synthetic construct
  misc_feature 1..16: note = synthetic [barcode part1]
  source 1..16: mol_type = other DNA
gtcgattataccgcag

SEQ ID NO: 24105 - DNA, 16 bp, synthetic construct
  misc_feature 1..16: note = synthetic [barcode part1]
  source 1..16: mol_type = other DNA
gaagataatccggtac

SEQ ID NO: 24106 - DNA, 16 bp, synthetic construct
  misc_feature 1..16: note = synthetic [barcode part1]
  source 1..16: mol_type = other DNA
gtaactgagaattggc

SEQ ID NO: 24107 - DNA, 16 bp, synthetic construct
  misc_feature 1..16: note = synthetic [barcode part1]
  source 1..16: mol_type = other DNA
taatcctgtcgatacc

SEQ ID NO: 24108 - DNA, 16 bp, synthetic construct
  misc_feature 1..16: note = synthetic [barcode part1]
  source 1..16: mol_type = other DNA
atagtcctaggagtag

SEQ ID NO: 24109 - DNA, 16 bp, synthetic construct
  misc_feature 1..16: note = synthetic [barcode part1]
  source 1..16: mol_type = other DNA
cactctaggtatctgt

SEQ ID NO: 24110 - DNA, 16 bp, synthetic construct
  misc_feature 1..16: note = synthetic [barcode part1]
  source 1..16: mol_type = other DNA
gacgatcctagactgt

SEQ ID NO: 24111 - DNA, 16 bp, synthetic construct
  misc_feature 1..16: note = synthetic [barcode part1]
  source 1..16: mol_type = other DNA
aggtaccgtggtgagt

SEQ ID NO: 24112 - DNA, 16 bp, synthetic construct
  misc_feature 1..16: note = synthetic [barcode part1]
  source 1..16: mol_type = other DNA
cacgtatcttccttcg

SEQ ID NO: 24113 - DNA, 16 bp, synthetic construct
  misc_feature 1..16: note = synthetic [barcode part1]
  source 1..16: mol_type = other DNA
tgccggataaggacac

SEQ ID NO: 24114 - DNA, 16 bp, synthetic construct
  misc_feature 1..16: note = synthetic [barcode part1]
  source 1..16: mol_type = other DNA
cgttaagaagtgcggc

SEQ ID NO: 24115 - DNA, 16 bp, synthetic construct
  misc_feature 1..16: note = synthetic [barcode part1]
  source 1..16: mol_type = other DNA
accagtgaggtgtctt

SEQ ID NO: 24116 - DNA, 16 bp, synthetic construct
  misc_feature 1..16: note = synthetic [barcode part1]
  source 1..16: mol_type = other DNA
gttacgtgatcgtgtg

SEQ ID NO: 24117 - DNA, 16 bp, synthetic construct
  misc_feature 1..16: note = synthetic [barcode part1]
  source 1..16: mol_type = other DNA
accaggtacttgacgt

SEQ ID NO: 24118 - DNA, 16 bp, synthetic construct
  misc_feature 1..16: note = synthetic [barcode part1]
  source 1..16: mol_type = other DNA
agtcagtaccaaccac

SEQ ID NO: 24119 - DNA, 16 bp, synthetic construct
  misc_feature 1..16: note = synthetic [barcode part1]
  source 1..16: mol_type = other DNA
ttatctgagtaccgtc

SEQ ID NO: 24120 - DNA, 16 bp, synthetic construct
  misc_feature 1..16: note = synthetic [barcode part1]
  source 1..16: mol_type = other DNA
acaacgcgcgtgtatt

SEQ ID NO: 24121 - DNA, 16 bp, synthetic construct
  misc_feature 1..16: note = synthetic [barcode part1]
  source 1..16: mol_type = other DNA
tagagtctggttgacc

SEQ ID NO: 24122 - DNA, 16 bp, synthetic construct
  misc_feature 1..16: note = synthetic [barcode part1]
  source 1..16: mol_type = other DNA
tactgacggccttctg

SEQ ID NO: 24123 - DNA, 16 bp, synthetic construct
  misc_feature 1..16: note = synthetic [barcode part1]
  source 1..16: mol_type = other DNA
aatcacacgcggttgt

SEQ ID NO: 24124 - DNA, 16 bp, synthetic construct
  misc_feature 1..16: note = synthetic [barcode part1]
  source 1..16: mol_type = other DNA
cgacctcacactgact

SEQ ID NO: 24125 - DNA, 16 bp, synthetic construct
  misc_feature 1..16: note = synthetic [barcode part1]
  source 1..16: mol_type = other DNA
gagtctacgaattcgc

SEQ ID NO: 24126 - DNA, 16 bp, synthetic construct
  misc_feature 1..16: note = synthetic [barcode part1]
  source 1..16: mol_type = other DNA
cacaggagaagtgtag

SEQ ID NO: 24127 - DNA, 16 bp, synthetic construct
  misc_feature 1..16: note = synthetic [barcode part1]
  source 1..16: mol_type = other DNA
agtgttctaaggagtg

SEQ ID NO: 24128 - DNA, 16 bp, synthetic construct
  misc_feature 1..16: note = synthetic [barcode part1]
  source 1..16: mol_type = other DNA
atacagactgcacctg

SEQ ID NO: 24129 - DNA, 16 bp, synthetic construct
  misc_feature 1..16: note = synthetic [barcode part1]
  source 1..16: mol_type = other DNA
acctcgcagactaagt

SEQ ID NO: 24130 - DNA, 16 bp, synthetic construct
  misc_feature 1..16: note = synthetic [barcode part1]
  source 1..16: mol_type = other DNA
gacgtacgtcaacact

SEQ ID NO: 24131 - DNA, 16 bp, synthetic construct
  misc_feature 1..16: note = synthetic [barcode part1]
  source 1..16: mol_type = other DNA
ttaacggcgttctcgc

SEQ ID NO: 24132 - DNA, 16 bp, synthetic construct
  misc_feature 1..16: note = synthetic [barcode part1]
  source 1..16: mol_type = other DNA
cagtaggtccggatag

SEQ ID NO: 24133 - DNA, 16 bp, synthetic construct
  misc_feature 1..16: note = synthetic [barcode part1]
  source 1..16: mol_type = other DNA
taggacgtattccacg

SEQ ID NO: 24134 - DNA, 16 bp, synthetic construct
  misc_feature 1..16: note = synthetic [barcode part1]
  source 1..16: mol_type = other DNA
ttcacttgtccacctg

SEQ ID NO: 24135 - DNA, 16 bp, synthetic construct
  misc_feature 1..16: note = synthetic [barcode part1]
  source 1..16: mol_type = other DNA
gtgtagtgagatcaac

SEQ ID NO: 24136 - DNA, 16 bp, synthetic construct
  misc_feature 1..16: note = synthetic [barcode part1]
  source 1..16: mol_type = other DNA
tgagacgtaagaggtg

SEQ ID NO: 24137 - DNA, 16 bp, synthetic construct
  misc_feature 1..16: note = synthetic [barcode part1]
  source 1..16: mol_type = other DNA
cgtgaactactatcct

SEQ ID NO: 24138 - DNA, 16 bp, synthetic construct
  misc_feature 1..16: note = synthetic [barcode part1]
  source 1..16: mol_type = other DNA
caggtatcgcaagttc

SEQ ID NO: 24139 - DNA, 16 bp, synthetic construct
  misc_feature 1..16: note = synthetic [barcode part1]
  source 1..16: mol_type = other DNA
taggcgtgcgtaactt

SEQ ID NO: 24140 - DNA, 16 bp, synthetic construct
  misc_feature 1..16: note = synthetic [barcode part1]
  source 1..16: mol_type = other DNA
acactgacagtagaac

SEQ ID NO: 24141 - DNA, 16 bp, synthetic construct
  misc_feature 1..16: note = synthetic [barcode part1]
  source 1..16: mol_type = other DNA
gcgccgatctctgatt

SEQ ID NO: 24142 - DNA, 16 bp, synthetic construct
  misc_feature 1..16: note = synthetic [barcode part1]
  source 1..16: mol_type = other DNA
ttgcaagtatcctacc

SEQ ID NO: 24143 - DNA, 16 bp, synthetic construct
  misc_feature 1..16: note = synthetic [barcode part1]
  source 1..16: mol_type = other DNA
aggtgtctaaggtagt

SEQ ID NO: 24144 - DNA, 16 bp, synthetic construct
  misc_feature 1..16: note = synthetic [barcode part1]
  source 1..16: mol_type = other DNA
tcggaacaacgtcgtt

SEQ ID NO: 24145 - DNA, 16 bp, synthetic construct
  misc_feature 1..16: note = synthetic [barcode part1]
  source 1..16: mol_type = other DNA
cgtagtagaatagacc

SEQ ID NO: 24146 - DNA, 16 bp, synthetic construct
  misc_feature 1..16: note = synthetic [barcode part1]
  source 1..16: mol_type = other DNA
cgaatacctctgccac

SEQ ID NO: 24147 - DNA, 16 bp, synthetic construct
  misc_feature 1..16: note = synthetic [barcode part1]
  source 1..16: mol_type = other DNA
acgtcggtcctatcac

SEQ ID NO: 24148 - DNA, 16 bp, synthetic construct
  misc_feature 1..16: note = synthetic [barcode part1]
  source 1..16: mol_type = other DNA
gccggtaatctcctac

SEQ ID NO: 24149 - DNA, 16 bp, synthetic construct
  misc_feature 1..16: note = synthetic [barcode part1]
  source 1..16: mol_type = other DNA
gatagagtgcgtcggt

SEQ ID NO: 24150 - DNA, 16 bp, synthetic construct
  misc_feature 1..16: note = synthetic [barcode part1]
  source 1..16: mol_type = other DNA
gtggcaatctagtctg

SEQ ID NO: 24151 - DNA, 16 bp, synthetic construct
  misc_feature 1..16: note = synthetic [barcode part1]
  source 1..16: mol_type = other DNA
caccttgtcacagacc

SEQ ID NO: 24152 - DNA, 16 bp, synthetic construct
  misc_feature 1..16: note = synthetic [barcode part1]
  source 1..16: mol_type = other DNA
gcagttacttcaactc

SEQ ID NO: 24153 - DNA, 16 bp, synthetic construct
  misc_feature 1..16: note = synthetic [barcode part1]
  source 1..16: mol_type = other DNA
gccgaattgaaggcgt

SEQ ID NO: 24154 - DNA, 16 bp, synthetic construct
  misc_feature 1..16: note = synthetic [barcode part1]
  source 1..16: mol_type = other DNA
gcacttcagttcggtc

SEQ ID NO: 24155 - DNA, 16 bp, synthetic construct
  misc_feature 1..16: note = synthetic [barcode part1]
  source 1..16: mol_type = other DNA
agttggccaatcgact

SEQ ID NO: 24156 - DNA, 16 bp, synthetic construct
  misc_feature 1..16: note = synthetic [barcode part1]
  source 1..16: mol_type = other DNA
agtgtggataggagtg

SEQ ID NO: 24157 - DNA, 16 bp, synthetic construct
  misc_feature 1..16: note = synthetic [barcode part1]
  source 1..16: mol_type = other DNA
gaccagagtaggatag

SEQ ID NO: 24158 - DNA, 16 bp, synthetic construct
  misc_feature 1..16: note = synthetic [barcode part1]
  source 1..16: mol_type = other DNA
gtccaagataacgagt

SEQ ID NO: 24159 - DNA, 16 bp, synthetic construct
  misc_feature 1..16: note = synthetic [barcode part1]
  source 1..16: mol_type = other DNA
agtggacctcagagtg

SEQ ID NO: 24160 - DNA, 16 bp, synthetic construct
  misc_feature 1..16: note = synthetic [barcode part1]
  source 1..16: mol_type = other DNA
tcgttgcaacacctgc

SEQ ID NO: 24161 - DNA, 16 bp, synthetic construct
  misc_feature 1..16: note = synthetic [barcode part1]
  source 1..16: mol_type = other DNA
agaggtcaggactaag

SEQ ID NO: 24162 - DNA, 16 bp, synthetic construct
  misc_feature 1..16: note = synthetic [barcode part1]
  source 1..16: mol_type = other DNA
cgatctcttgaggaac

SEQ ID NO: 24163 - DNA, 16 bp, synthetic construct
  misc_feature 1..16: note = synthetic [barcode part1]
  source 1..16: mol_type = other DNA
cggtaattcgacgatc

SEQ ID NO: 24164 - DNA, 16 bp, synthetic construct
  misc_feature 1..16: note = synthetic [barcode part1]
  source 1..16: mol_type = other DNA
tcgttattaaggcggc

SEQ ID NO: 24165 - DNA, 16 bp, synthetic construct
  misc_feature 1..16: note = synthetic [barcode part1]
  source 1..16: mol_type = other DNA
cctcgtggattattgt

SEQ ID NO: 24166 - DNA, 16 bp, synthetic construct
  misc_feature 1..16: note = synthetic [barcode part1]
  source 1..16: mol_type = other DNA
ttgtgttctgccggac

SEQ ID NO: 24167 - DNA, 16 bp, synthetic construct
  misc_feature 1..16: note = synthetic [barcode part1]
  source 1..16: mol_type = other DNA
aactcgacacaagaac

SEQ ID NO: 24168 - DNA, 16 bp, synthetic construct
  misc_feature 1..16: note = synthetic [barcode part1]
  source 1..16: mol_type = other DNA
acgcgtggtattacac

SEQ ID NO: 24169 - DNA, 16 bp, synthetic construct
  misc_feature 1..16: note = synthetic [barcode part1]
  source 1..16: mol_type = other DNA
tggaatcggaatcctc

SEQ ID NO: 24170 - DNA, 16 bp, synthetic construct
  misc_feature 1..16: note = synthetic [barcode part1]
  source 1..16: mol_type = other DNA
gtgagtggtgaacaag

SEQ ID NO: 24171 - DNA, 16 bp, synthetic construct
  misc_feature 1..16: note = synthetic [barcode part1]
  source 1..16: mol_type = other DNA
gcgccgagaagattgt

SEQ ID NO: 24172 - DNA, 16 bp, synthetic construct
  misc_feature 1..16: note = synthetic [barcode part1]
  source 1..16: mol_type = other DNA
agttgtctctgtgccg

SEQ ID NO: 24173 - DNA, 16 bp, synthetic construct
  misc_feature 1..16: note = synthetic [barcode part1]
  source 1..16: mol_type = other DNA
ccttcgttaccagacg

SEQ ID NO: 24174 - DNA, 16 bp, synthetic construct
  misc_feature 1..16: note = synthetic [barcode part1]
  source 1..16: mol_type = other DNA
ttctgagttgttcacg

SEQ ID NO: 24175 - DNA, 16 bp, synthetic construct
  misc_feature 1..16: note = synthetic [barcode part1]
  source 1..16: mol_type = other DNA
agaccgttgccagatt

SEQ ID NO: 24176 - DNA, 16 bp, synthetic construct
  misc_feature 1..16: note = synthetic [barcode part1]
  source 1..16: mol_type = other DNA
taattctactgcgcgt

SEQ ID NO: 24177 - DNA, 16 bp, synthetic construct
  misc_feature 1..16: note = synthetic [barcode part1]
  source 1..16: mol_type = other DNA
tagtcgtgacgacgag

SEQ ID NO: 24178 - DNA, 16 bp, synthetic construct
  misc_feature 1..16: note = synthetic [barcode part1]
  source 1..16: mol_type = other DNA
tgtcacttcaccacct

SEQ ID NO: 24179 - DNA, 16 bp, synthetic construct
  misc_feature 1..16: note = synthetic [barcode part1]
  source 1..16: mol_type = other DNA
tacagatcctaccact

SEQ ID NO: 24180 - DNA, 16 bp, synthetic construct
  misc_feature 1..16: note = synthetic [barcode part1]
  source 1..16: mol_type = other DNA
agttgactgcaacgtc

SEQ ID NO: 24181 - DNA, 16 bp, synthetic construct
  misc_feature 1..16: note = synthetic [barcode part1]
  source 1..16: mol_type = other DNA
gactgttatcttcacg

SEQ ID NO: 24182 - DNA, 16 bp, synthetic construct
  misc_feature 1..16: note = synthetic [barcode part1]
  source 1..16: mol_type = other DNA
acgcgaccttcaactc

SEQ ID NO: 24183 - DNA, 16 bp, synthetic construct
  misc_feature 1..16: note = synthetic [barcode part1]
  source 1..16: mol_type = other DNA
cctagaggcgtatact

SEQ ID NO: 24184 - DNA, 16 bp, synthetic construct
  misc_feature 1..16: note = synthetic [barcode part1]
  source 1..16: mol_type = other DNA
gtccttcgcgtactag

SEQ ID NO: 24185 - DNA, 16 bp, synthetic construct
  misc_feature 1..16: note = synthetic [barcode part1]
  source 1..16: mol_type = other DNA
gcagattgtcgaggac

SEQ ID NO: 24186 - DNA, 16 bp, synthetic construct
  misc_feature 1..16: note = synthetic [barcode part1]
  source 1..16: mol_type = other DNA
gttgacagacagtaac

SEQ ID NO: 24187 - DNA, 16 bp, synthetic construct
  misc_feature 1..16: note = synthetic [barcode part1]
  source 1..16: mol_type = other DNA
tcaagacggcgagtac

SEQ ID NO: 24188 - DNA, 16 bp, synthetic construct
  misc_feature 1..16: note = synthetic [barcode part1]
  source 1..16: mol_type = other DNA
cctattagactacacc

SEQ ID NO: 24189 - DNA, 16 bp, synthetic construct
  misc_feature 1..16: note = synthetic [barcode part1]
  source 1..16: mol_type = other DNA
cacacttcagagacgt

SEQ ID NO: 24190 - DNA, 16 bp, synthetic construct
  misc_feature 1..16: note = synthetic [barcode part1]
  source 1..16: mol_type = other DNA
caggtcggattattgc

SEQ ID NO: 24191 - DNA, 16 bp, synthetic construct
  misc_feature 1..16: note = synthetic [barcode part1]
  source 1..16: mol_type = other DNA
agttggcctaaggtct

SEQ ID NO: 24192 - DNA, 16 bp, synthetic construct
  misc_feature 1..16: note = synthetic [barcode part1]
  source 1..16: mol_type = other DNA
actgagtacgatccac

SEQ ID NO: 24193 - DNA, 16 bp, synthetic construct
  misc_feature 1..16: note = synthetic [barcode part1]
  source 1..16: mol_type = other DNA
gtacacggattctggt

SEQ ID NO: 24194 - DNA, 16 bp, synthetic construct
  misc_feature 1..16: note = synthetic [barcode part1]
  source 1..16: mol_type = other DNA
gagacggtcgtgaact

SEQ ID NO: 24195 - DNA, 16 bp, synthetic construct
  misc_feature 1..16: note = synthetic [barcode part1]
  source 1..16: mol_type = other DNA
taggtggaacaccacg

SEQ ID NO: 24196 - DNA, 16 bp, synthetic construct
  misc_feature 1..16: note = synthetic [barcode part1]
  source 1..16: mol_type = other DNA
actgatccgtagtgtg

SEQ ID NO: 24197 - DNA, 16 bp, synthetic construct
  misc_feature 1..16: note = synthetic [barcode part1]
  source 1..16: mol_type = other DNA
cgccgagttcgtatct

SEQ ID NO: 24198 - DNA, 16 bp, synthetic construct
  misc_feature 1..16: note = synthetic [barcode part1]
  source 1..16: mol_type = other DNA
tctattggccagagac

SEQ ID NO: 24199 - DNA, 16 bp, synthetic construct
  misc_feature 1..16: note = synthetic [barcode part1]
  source 1..16: mol_type = other DNA
agattaggtatcggtg

SEQ ID NO: 24200 - DNA, 16 bp, synthetic construct
  misc_feature 1..16: note = synthetic [barcode part1]
  source 1..16: mol_type = other DNA
gtccgtcttcagaatt

SEQ ID NO: 24201 - DNA, 16 bp, synthetic construct
  misc_feature 1..16: note = synthetic [barcode part1]
  source 1..16: mol_type = other DNA
taaggcgagacgtctg

SEQ ID NO: 24202 - DNA, 16 bp, synthetic construct
  misc_feature 1..16: note = synthetic [barcode part1]
  source 1..16: mol_type = other DNA
tctgccgtaatctcct

SEQ ID NO: 24203 - DNA, 16 bp, synthetic construct
  misc_feature 1..16: note = synthetic [barcode part1]
  source 1..16: mol_type = other DNA
cctactaaccgagagt

SEQ ID NO: 24204 - DNA, 16 bp, synthetic construct
  misc_feature 1..16: note = synthetic [barcode part1]
  source 1..16: mol_type = other DNA
gtaagaagatccagtc

SEQ ID NO: 24205 - DNA, 16 bp, synthetic construct
  misc_feature 1..16: note = synthetic [barcode part1]
  source 1..16: mol_type = other DNA
taggatcgtgtacgtc

SEQ ID NO: 24206 - DNA, 16 bp, synthetic construct
  misc_feature 1..16: note = synthetic [barcode part1]
  source 1..16: mol_type = other DNA
tcgtattcgaggacac

SEQ ID NO: 24207 - DNA, 16 bp, synthetic construct
  misc_feature 1..16: note = synthetic [barcode part1]
  source 1..16: mol_type = other DNA
atcttacggcggtaac

SEQ ID NO: 24208 - DNA, 16 bp, synthetic construct
  misc_feature 1..16: note = synthetic [barcode part1]
  source 1..16: mol_type = other DNA
acacaacttctggttc

SEQ ID NO: 24209 - DNA, 16 bp, synthetic construct
  misc_feature 1..16: note = synthetic [barcode part1]
  source 1..16: mol_type = other DNA
cgtcttcggtcactag

SEQ ID NO: 24210 - DNA, 16 bp, synthetic construct
  misc_feature 1..16: note = synthetic [barcode part1]
  source 1..16: mol_type = other DNA
gtccagagtgagtctt

SEQ ID NO: 24211 - DNA, 16 bp, synthetic construct
  misc_feature 1..16: note = synthetic [barcode part1]
  source 1..16: mol_type = other DNA
atccaccacttcaggc

SEQ ID NO: 24212 - DNA, 16 bp, synthetic construct
  misc_feature 1..16: note = synthetic [barcode part1]
  source 1..16: mol_type = other DNA
gtaaggcgtaagtccg

SEQ ID NO: 24213 - DNA, 16 bp, synthetic construct
  misc_feature 1..16: note = synthetic [barcode part1]
  source 1..16: mol_type = other DNA
tgcgcagataggacac

SEQ ID NO: 24214 - DNA, 16 bp, synthetic construct
  misc_feature 1..16: note = synthetic [barcode part1]
  source 1..16: mol_type = other DNA
tctccggtggttacgt

SEQ ID NO: 24215 - DNA, 16 bp, synthetic construct
  misc_feature 1..16: note = synthetic [barcode part1]
  source 1..16: mol_type = other DNA
aagaggtagtggtggt

SEQ ID NO: 24216 - DNA, 16 bp, synthetic construct
  misc_feature 1..16: note = synthetic [barcode part1]
  source 1..16: mol_type = other DNA
gcaccgactctatcac

SEQ ID NO: 24217 - DNA, 16 bp, synthetic construct
  misc_feature 1..16: note = synthetic [barcode part1]
  source 1..16: mol_type = other DNA
tggtgattagtggtcc

SEQ ID NO: 24218 - DNA, 16 bp, synthetic construct
  misc_feature 1..16: note = synthetic [barcode part1]
  source 1..16: mol_type = other DNA
ttgaggccgagtgagt

SEQ ID NO: 24219 - DNA, 16 bp, synthetic construct
  misc_feature 1..16: note = synthetic [barcode part1]
  source 1..16: mol_type = other DNA
gagacggatcctatct

SEQ ID NO: 24220 - DNA, 16 bp, synthetic construct
  misc_feature 1..16: note = synthetic [barcode part1]
  source 1..16: mol_type = other DNA
acgttgaactaggaac

SEQ ID NO: 24221 - DNA, 16 bp, synthetic construct
  misc_feature 1..16: note = synthetic [barcode part1]
  source 1..16: mol_type = other DNA
gttactccgcctaggt

SEQ ID NO: 24222 - DNA, 16 bp, synthetic construct
  misc_feature 1..16: note = synthetic [barcode part1]
  source 1..16: mol_type = other DNA
tgtacactgcagtgtg

SEQ ID NO: 24223 - DNA, 16 bp, synthetic construct
  misc_feature 1..16: note = synthetic [barcode part1]
  source 1..16: mol_type = other DNA
cagaggtctatcggag

SEQ ID NO: 24224 - DNA, 16 bp, synthetic construct
  misc_feature 1..16: note = synthetic [barcode part1]
  source 1..16: mol_type = other DNA
gactgagataactgtg

SEQ ID NO: 24225 - DNA, 16 bp, synthetic construct
  misc_feature 1..16: note = synthetic [barcode part1]
  source 1..16: mol_type = other DNA
attgtcgacgcctctg

SEQ ID NO: 24226 - DNA, 16 bp, synthetic construct
  misc_feature 1..16: note = synthetic [barcode part1]
  source 1..16: mol_type = other DNA
cgagttatcggtgatc

SEQ ID NO: 24227 - DNA, 16 bp, synthetic construct
  misc_feature 1..16: note = synthetic [barcode part1]
  source 1..16: mol_type = other DNA
cagtgtagtcgtctcc

SEQ ID NO: 24228 - DNA, 16 bp, synthetic construct
  misc_feature 1..16: note = synthetic [barcode part1]
  source 1..16: mol_type = other DNA
accgtaggtagatagt

SEQ ID NO: 24229 - DNA, 16 bp, synthetic construct
  misc_feature 1..16: note = synthetic [barcode part1]
  source 1..16: mol_type = other DNA
gaagacgacaacctgc

SEQ ID NO: 24230 - DNA, 16 bp, synthetic construct
  misc_feature 1..16: note = synthetic [barcode part1]
  source 1..16: mol_type = other DNA
ccaactccggattcac

SEQ ID NO: 24231 - DNA, 16 bp, synthetic construct
  misc_feature 1..16: note = synthetic [barcode part1]
  source 1..16: mol_type = other DNA
cggtctgaagtgtgag

SEQ ID NO: 24232 - DNA, 16 bp, synthetic construct
  misc_feature 1..16: note = synthetic [barcode part1]
  source 1..16: mol_type = other DNA
acaatccggcacgaag

SEQ ID NO: 24233 - DNA, 16 bp, synthetic construct
  misc_feature 1..16: note = synthetic [barcode part1]
  source 1..16: mol_type = other DNA
tgacgttatccacttg

SEQ ID NO: 24234 - DNA, 16 bp, synthetic construct
  misc_feature 1..16: note = synthetic [barcode part1]
  source 1..16: mol_type = other DNA
attgcgactgttcgcc

SEQ ID NO: 24235 - DNA, 16 bp, synthetic construct
  misc_feature 1..16: note = synthetic [barcode part1]
  source 1..16: mol_type = other DNA
gaggagtgtagttgcc

SEQ ID NO: 24236 - DNA, 16 bp, synthetic construct
  misc_feature 1..16: note = synthetic [barcode part1]
  source 1..16: mol_type = other DNA
gttccacggtatattc

SEQ ID NO: 24237 - DNA, 16 bp, synthetic construct
  misc_feature 1..16: note = synthetic [barcode part1]
  source 1..16: mol_type = other DNA
ttacttcctaacgcag

SEQ ID NO: 24238 - DNA, 16 bp, synthetic construct
  misc_feature 1..16: note = synthetic [barcode part1]
  source 1..16: mol_type = other DNA
cggtaccacctacttg

SEQ ID NO: 24239 - DNA, 16 bp, synthetic construct
  misc_feature 1..16: note = synthetic [barcode part1]
  source 1..16: mol_type = other DNA
atcaagaacacaccag

SEQ ID NO: 24240 - DNA, 16 bp, synthetic construct
  misc_feature 1..16: note = synthetic [barcode part1]
  source 1..16: mol_type = other DNA
aaccacgactacgtgt

SEQ ID NO: 24241 - DNA, 16 bp, synthetic construct
  misc_feature 1..16: note = synthetic [barcode part1]
  source 1..16: mol_type = other DNA
acctaagtgtctaggc

SEQ ID NO: 24242 - DNA, 16 bp, synthetic construct
  misc_feature 1..16: note = synthetic [barcode part1]
  source 1..16: mol_type = other DNA
cacgatactacaacgc

SEQ ID NO: 24243 - DNA, 16 bp, synthetic construct
  misc_feature 1..16: note = synthetic [barcode part1]
  source 1..16: mol_type = other DNA
tgaattgtcctcgtgt

SEQ ID NO: 24244 - DNA, 16 bp, synthetic construct
  misc_feature 1..16: note = synthetic [barcode part1]
  source 1..16: mol_type = other DNA
atccaacaaccaccag

SEQ ID NO: 24245 - DNA, 16 bp, synthetic construct
  misc_feature 1..16: note = synthetic [barcode part1]
  source 1..16: mol_type = other DNA
gatctgtctcaggtag

SEQ ID NO: 24246 - DNA, 16 bp, synthetic construct
  misc_feature 1..16: note = synthetic [barcode part1]
  source 1..16: mol_type = other DNA
agtcaacgtcacaacc

SEQ ID NO: 24247 - DNA, 16 bp, synthetic construct
  misc_feature 1..16: note = synthetic [barcode part1]
  source 1..16: mol_type = other DNA
acggtagtcgcgtaag

SEQ ID NO: 24248 - DNA, 16 bp, synthetic construct
  misc_feature 1..16: note = synthetic [barcode part1]
  source 1..16: mol_type = other DNA
gattcttgaggatcgc

SEQ ID NO: 24249 - DNA, 16 bp, synthetic construct
  misc_feature 1..16: note = synthetic [barcode part1]
  source 1..16: mol_type = other DNA
ccaacttacgagacgt

SEQ ID NO: 24250 - DNA, 16 bp, synthetic construct
  misc_feature 1..16: note = synthetic [barcode part1]
  source 1..16: mol_type = other DNA
actcggcaagacgtag

SEQ ID NO: 24251 - DNA, 16 bp, synthetic construct
  misc_feature 1..16: note = synthetic [barcode part1]
  source 1..16: mol_type = other DNA
ttctccgaacgtattg

SEQ ID NO: 24252 - DNA, 16 bp, synthetic construct
  misc_feature 1..16: note = synthetic [barcode part1]
  source 1..16: mol_type = other DNA
tcgcgttacaatctac

SEQ ID NO: 24253 - DNA, 16 bp, synthetic construct
  misc_feature 1..16: note = synthetic [barcode part1]
  source 1..16: mol_type = other DNA
aagacttgtgacgcct

SEQ ID NO: 24254 - DNA, 16 bp, synthetic construct
  misc_feature 1..16: note = synthetic [barcode part1]
  source 1..16: mol_type = other DNA
cgtgtaagaatcgaac

SEQ ID NO: 24255 - DNA, 16 bp, synthetic construct
  misc_feature 1..16: note = synthetic [barcode part1]
  source 1..16: mol_type = other DNA
atcttctatcgcacag

SEQ ID NO: 24256 - DNA, 16 bp, synthetic construct
  misc_feature 1..16: note = synthetic [barcode part1]
  source 1..16: mol_type = other DNA
taaccgtgtagaacag

SEQ ID NO: 24257 - DNA, 16 bp, synthetic construct
  misc_feature 1..16: note = synthetic [barcode part1]
  source 1..16: mol_type = other DNA
tgactctgtcgcacgt

SEQ ID NO: 24258 - DNA, 16 bp, synthetic construct
  misc_feature 1..16: note = synthetic [barcode part1]
  source 1..16: mol_type = other DNA
cgcactcagattgcct

SEQ ID NO: 24259 - DNA, 16 bp, synthetic construct
  misc_feature 1..16: note = synthetic [barcode part1]
  source 1..16: mol_type = other DNA
tattggcgattcttcg

SEQ ID NO: 24260 - DNA, 16 bp, synthetic construct
  misc_feature 1..16: note = synthetic [barcode part1]
  source 1..16: mol_type = other DNA
gtctgagagacctgtt

SEQ ID NO: 24261 - DNA, 16 bp, synthetic construct
  misc_feature 1..16: note = synthetic [barcode part1]
  source 1..16: mol_type = other DNA
aacacaacggaccgtg

SEQ ID NO: 24262 - DNA, 16 bp, synthetic construct
  misc_feature 1..16: note = synthetic [barcode part1]
  source 1..16: mol_type = other DNA
tcggcagatccttacc

SEQ ID NO: 24263 - DNA, 16 bp, synthetic construct
  misc_feature 1..16: note = synthetic [barcode part1]
  source 1..16: mol_type = other DNA
gcaacgtagaactcct

SEQ ID NO: 24264 - DNA, 16 bp, synthetic construct
  misc_feature 1..16: note = synthetic [barcode part1]
  source 1..16: mol_type = other DNA
cgacgacgtataggac

SEQ ID NO: 24265 - DNA, 16 bp, synthetic construct
  misc_feature 1..16: note = synthetic [barcode part1]
  source 1..16: mol_type = other DNA
actgcaaggatctcac

SEQ ID NO: 24266 - DNA, 16 bp, synthetic construct
  misc_feature 1..16: note = synthetic [barcode part1]
  source 1..16: mol_type = other DNA
caatcggtcaatcggt

SEQ ID NO: 24267 - DNA, 16 bp, synthetic construct
  misc_feature 1..16: note = synthetic [barcode part1]
  source 1..16: mol_type = other DNA
agtctactctgttgtg

SEQ ID NO: 24268 - DNA, 16 bp, synthetic construct
  misc_feature 1..16: note = synthetic [barcode part1]
  source 1..16: mol_type = other DNA
cctgttgcagtaagac

SEQ ID NO: 24269 - DNA, 16 bp, synthetic construct
  misc_feature 1..16: note = synthetic [barcode part1]
  source 1..16: mol_type = other DNA
actcaactcttcacag

SEQ ID NO: 24270 - DNA, 16 bp, synthetic construct
  misc_feature 1..16: note = synthetic [barcode part1]
  source 1..16: mol_type = other DNA
aattctcgaccgtatc

SEQ ID NO: 24271 - DNA, 16 bp, synthetic construct
  misc_feature 1..16: note = synthetic [barcode part1]
  source 1..16: mol_type = other DNA
ttactcgcagagttct

SEQ ID NO: 24272 - DNA, 16 bp, synthetic construct
  misc_feature 1..16: note = synthetic [barcode part1]
  source 1..16: mol_type = other DNA
ttcgccacacgtcaac

SEQ ID NO: 24273 - DNA, 16 bp, synthetic construct
  misc_feature 1..16: note = synthetic [barcode part1]
  source 1..16: mol_type = other DNA
aacgatcacacaagac

SEQ ID NO: 24274 - DNA, 16 bp, synthetic construct
  misc_feature 1..16: note = synthetic [barcode part1]
  source 1..16: mol_type = other DNA
tgatacgccggtatac

SEQ ID NO: 24275 - DNA, 16 bp, synthetic construct
  misc_feature 1..16: note = synthetic [barcode part1]
  source 1..16: mol_type = other DNA
cgcggactgaatatct

SEQ ID NO: 24276 - DNA, 16 bp, synthetic construct
  misc_feature 1..16: note = synthetic [barcode part1]
  source 1..16: mol_type = other DNA
ttcaactggtcctctc

SEQ ID NO: 24277 - DNA, 16 bp, synthetic construct
  misc_feature 1..16: note = synthetic [barcode part1]
  source 1..16: mol_type = other DNA
gttcaagtatcacctc

SEQ ID NO: 24278 - DNA, 16 bp, synthetic construct
  misc_feature 1..16: note = synthetic [barcode part1]
  source 1..16: mol_type = other DNA
caaccgcggcaataag

SEQ ID NO: 24279 - DNA, 16 bp, synthetic construct
  misc_feature 1..16: note = synthetic [barcode part1]
  source 1..16: mol_type = other DNA
gaggtgtatatctccg

SEQ ID NO: 24280 - DNA, 16 bp, synthetic construct
  misc_feature 1..16: note = synthetic [barcode part1]
  source 1..16: mol_type = other DNA
tgattaactgaccggc

SEQ ID NO: 24281 - DNA, 16 bp, synthetic construct
  misc_feature 1..16: note = synthetic [barcode part1]
  source 1..16: mol_type = other DNA
aactcgacctcgtacc

SEQ ID NO: 24282 - DNA, 16 bp, synthetic construct
  misc_feature 1..16: note = synthetic [barcode part1]
  source 1..16: mol_type = other DNA
gcaaggagattactac

SEQ ID NO: 24283 - DNA, 16 bp, synthetic construct
  misc_feature 1..16: note = synthetic [barcode part1]
  source 1..16: mol_type = other DNA
accaggtgtagagatt

SEQ ID NO: 24284 - DNA, 16 bp, synthetic construct
  misc_feature 1..16: note = synthetic [barcode part1]
  source 1..16: mol_type = other DNA
gaggatacgccaggtt

SEQ ID NO: 24285 - DNA, 16 bp, synthetic construct
  misc_feature 1..16: note = synthetic [barcode part1]
  source 1..16: mol_type = other DNA
tcgtagtaccgtaacg

SEQ ID NO: 24286 - DNA, 16 bp, synthetic construct
  misc_feature 1..16: note = synthetic [barcode part1]
  source 1..16: mol_type = other DNA
ccttaccactcacgag

SEQ ID NO: 24287 - DNA, 16 bp, synthetic construct
  misc_feature 1..16: note = synthetic [barcode part1]
  source 1..16: mol_type = other DNA
ttaaccgtacacgcag

SEQ ID NO: 24288 - DNA, 16 bp, synthetic construct
  misc_feature 1..16: note = synthetic [barcode part1]
  source 1..16: mol_type = other DNA
gcgactaggaagacct

SEQ ID NO: 24289 - DNA, 16 bp, synthetic construct
  misc_feature 1..16: note = synthetic [barcode part1]
  source 1..16: mol_type = other DNA
tacaaccacgtgactg

SEQ ID NO: 24290 - DNA, 16 bp, synthetic construct
  misc_feature 1..16: note = synthetic [barcode part1]
  source 1..16: mol_type = other DNA
acctggaacagtaagt

SEQ ID NO: 24291 - DNA, 16 bp, synthetic construct
  misc_feature 1..16: note = synthetic [barcode part1]
  source 1..16: mol_type = other DNA
ttggagtgccttagac

SEQ ID NO: 24292 - DNA, 16 bp, synthetic construct
  misc_feature 1..16: note = synthetic [barcode part1]
  source 1..16: mol_type = other DNA
gtagagagattcgact

SEQ ID NO: 24293 - DNA, 16 bp, synthetic construct
  misc_feature 1..16: note = synthetic [barcode part1]
  source 1..16: mol_type = other DNA
ccacttcgtgcaactg

SEQ ID NO: 24294 - DNA, 16 bp, synthetic construct
  misc_feature 1..16: note = synthetic [barcode part1]
  source 1..16: mol_type = other DNA
tggatcagtcgaactc

SEQ ID NO: 24295 - DNA, 16 bp, synthetic construct
  misc_feature 1..16: note = synthetic [barcode part1]
  source 1..16: mol_type = other DNA
gtatcaggaggcgatc

SEQ ID NO: 24296 - DNA, 16 bp, synthetic construct
  misc_feature 1..16: note = synthetic [barcode part1]
  source 1..16: mol_type = other DNA
accaggtgtccttatt

SEQ ID NO: 24297 - DNA, 16 bp, synthetic construct
  misc_feature 1..16: note = synthetic [barcode part1]
  source 1..16: mol_type = other DNA
cactattgtctaggtc

SEQ ID NO: 24298 - DNA, 16 bp, synthetic construct
  misc_feature 1..16: note = synthetic [barcode part1]
  source 1..16: mol_type = other DNA
acgaaccaaccgtact

SEQ ID NO: 24299 - DNA, 16 bp, synthetic construct
  misc_feature 1..16: note = synthetic [barcode part1]
  source 1..16: mol_type = other DNA
ttgcaactcaggactg

SEQ ID NO: 24300 - DNA, 16 bp, synthetic construct
  misc_feature 1..16: note = synthetic [barcode part1]
  source 1..16: mol_type = other DNA
attcgtcgacactgtt

SEQ ID NO: 24301 - DNA, 16 bp, synthetic construct
  misc_feature 1..16: note = synthetic [barcode part1]
  source 1..16: mol_type = other DNA
gcaagacttcactacg

SEQ ID NO: 24302 - DNA, 16 bp, synthetic construct
  misc_feature 1..16: note = synthetic [barcode part1]
  source 1..16: mol_type = other DNA
cgtcagaaggtcactt

SEQ ID NO: 24303 - DNA, 16 bp, synthetic construct
  misc_feature 1..16: note = synthetic [barcode part1]
  source 1..16: mol_type = other DNA
actgacaagtgcgttc

SEQ ID NO: 24304 - DNA, 16 bp, synthetic construct
  misc_feature 1..16: note = synthetic [barcode part1]
  source 1..16: mol_type = other DNA
acctattcgccacgac

SEQ ID NO: 24305 - DNA, 16 bp, synthetic construct
  misc_feature 1..16: note = synthetic [barcode part1]
  source 1..16: mol_type = other DNA
tgtcgaagagtgcgac

SEQ ID NO: 24306 - DNA, 16 bp, synthetic construct
  misc_feature 1..16: note = synthetic [barcode part1]
  source 1..16: mol_type = other DNA
aacctagttctacgtc

SEQ ID NO: 24307 - DNA, 16 bp, synthetic construct
  misc_feature 1..16: note = synthetic [barcode part1]
  source 1..16: mol_type = other DNA
cgagtgagtagtattg

SEQ ID NO: 24308 - DNA, 16 bp, synthetic construct
  misc_feature 1..16: note = synthetic [barcode part1]
  source 1..16: mol_type = other DNA
atcgcgacactacagt

SEQ ID NO: 24309 - DNA, 16 bp, synthetic construct
  misc_feature 1..16: note = synthetic [barcode part1]
  source 1..16: mol_type = other DNA
ttatctctgtaccgag

SEQ ID NO: 24310 - DNA, 16 bp, synthetic construct
  misc_feature 1..16: note = synthetic [barcode part1]
  source 1..16: mol_type = other DNA
aggacaccgtaagaag

SEQ ID NO: 24311 - DNA, 16 bp, synthetic construct
  misc_feature 1..16: note = synthetic [barcode part1]
  source 1..16: mol_type = other DNA
gcaactgcagtacgtt

SEQ ID NO: 24312 - DNA, 16 bp, synthetic construct
  misc_feature 1..16: note = synthetic [barcode part1]
  source 1..16: mol_type = other DNA
tggtcctgtatcggtc

SEQ ID NO: 24313 - DNA, 16 bp, synthetic construct
  misc_feature 1..16: note = synthetic [barcode part1]
  source 1..16: mol_type = other DNA
atcgtccggtaagatc

SEQ ID NO: 24314 - DNA, 16 bp, synthetic construct
  misc_feature 1..16: note = synthetic [barcode part1]
  source 1..16: mol_type = other DNA
tgtgtacaccaaccag

SEQ ID NO: 24315 - DNA, 16 bp, synthetic construct
  misc_feature 1..16: note = synthetic [barcode part1]
  source 1..16: mol_type = other DNA
gatctgaggagacgtc

SEQ ID NO: 24316 - DNA, 16 bp, synthetic construct
  misc_feature 1..16: note = synthetic [barcode part1]
  source 1..16: mol_type = other DNA
cacggtaatctactct

SEQ ID NO: 24317 - DNA, 16 bp, synthetic construct
  misc_feature 1..16: note = synthetic [barcode part1]
  source 1..16: mol_type = other DNA
tgaaggaccagttcct

SEQ ID NO: 24318 - DNA, 16 bp, synthetic construct
  misc_feature 1..16: note = synthetic [barcode part1]
  source 1..16: mol_type = other DNA
gtgtcgagaggtggtt

SEQ ID NO: 24319 - DNA, 16 bp, synthetic construct
  misc_feature 1..16: note = synthetic [barcode part1]
  source 1..16: mol_type = other DNA
acctattacctgcctc

SEQ ID NO: 24320 - DNA, 16 bp, synthetic construct
  misc_feature 1..16: note = synthetic [barcode part1]
  source 1..16: mol_type = other DNA
agtctgtacctgtgag

SEQ ID NO: 24321 - DNA, 16 bp, synthetic construct
  misc_feature 1..16: note = synthetic [barcode part1]
  source 1..16: mol_type = other DNA
atctcacacctctcgt

SEQ ID NO: 24322 - DNA, 16 bp, synthetic construct
  misc_feature 1..16: note = synthetic [barcode part1]
  source 1..16: mol_type = other DNA
gccaagttaccggatt

SEQ ID NO: 24323 - DNA, 16 bp, synthetic construct
  misc_feature 1..16: note = synthetic [barcode part1]
  source 1..16: mol_type = other DNA
tacacgtactgtggtg

SEQ ID NO: 24324 - DNA, 16 bp, synthetic construct
  misc_feature 1..16: note = synthetic [barcode part1]
  source 1..16: mol_type = other DNA
tctcaatatactcggc

SEQ ID NO: 24325 - DNA, 16 bp, synthetic construct
  misc_feature 1..16: note = synthetic [barcode part1]
  source 1..16: mol_type = other DNA
gtggagtgcaatagag

SEQ ID NO: 24326 - DNA, 16 bp, synthetic construct
  misc_feature 1..16: note = synthetic [barcode part1]
  source 1..16: mol_type = other DNA
ttctgcgattgaactc

SEQ ID NO: 24327 - DNA, 16 bp, synthetic construct
  misc_feature 1..16: note = synthetic [barcode part1]
  source 1..16: mol_type = other DNA
tccttccagagttcct

SEQ ID NO: 24328 - DNA, 16 bp, synthetic construct
  misc_feature 1..16: note = synthetic [barcode part1]
  source 1..16: mol_type = other DNA
gatctgtgtcttactg

SEQ ID NO: 24329 - DNA, 16 bp, synthetic construct
  misc_feature 1..16: note = synthetic [barcode part1]
  source 1..16: mol_type = other DNA
tccttattaccgaacg

SEQ ID NO: 24330 - DNA, 16 bp, synthetic construct
  misc_feature 1..16: note = synthetic [barcode part1]
  source 1..16: mol_type = other DNA
cacggtaattcacctt

SEQ ID NO: 24331 - DNA, 16 bp, synthetic construct
  misc_feature 1..16: note = synthetic [barcode part1]
  source 1..16: mol_type = other DNA
ttagacgtccaccacc

SEQ ID NO: 24332 - DNA, 16 bp, synthetic construct
  misc_feature 1..16: note = synthetic [barcode part1]
  source 1..16: mol_type = other DNA
ttacgtgaatctcctg

SEQ ID NO: 24333 - DNA, 16 bp, synthetic construct
  misc_feature 1..16: note = synthetic [barcode part1]
  source 1..16: mol_type = other DNA
aacttcttacgccggc

SEQ ID NO: 24334 - DNA, 16 bp, synthetic construct
  misc_feature 1..16: note = synthetic [barcode part1]
  source 1..16: mol_type = other DNA
tcttactctgcctcag

SEQ ID NO: 24335 - DNA, 16 bp, synthetic construct
  misc_feature 1..16: note = synthetic [barcode part1]
  source 1..16: mol_type = other DNA
gtacgactctcaatct

SEQ ID NO: 24336 - DNA, 16 bp, synthetic construct
  misc_feature 1..16: note = synthetic [barcode part1]
  source 1..16: mol_type = other DNA
agtctaagtgcaaggt

SEQ ID NO: 24337 - DNA, 16 bp, synthetic construct
  misc_feature 1..16: note = synthetic [barcode part1]
  source 1..16: mol_type = other DNA
cctcggtgaagattgt

SEQ ID NO: 24338 - DNA, 16 bp, synthetic construct
  misc_feature 1..16: note = synthetic [barcode part1]
  source 1..16: mol_type = other DNA
agatacactggtagtg

SEQ ID NO: 24339 - DNA, 16 bp, synthetic construct
  misc_feature 1..16: note = synthetic [barcode part1]
  source 1..16: mol_type = other DNA
gtgcgcaattgtaacc

SEQ ID NO: 24340 - DNA, 16 bp, synthetic construct
  misc_feature 1..16: note = synthetic [barcode part1]
  source 1..16: mol_type = other DNA
tactccacacttgagt

SEQ ID NO: 24341 - DNA, 16 bp, synthetic construct
  misc_feature 1..16: note = synthetic [barcode part1]
  source 1..16: mol_type = other DNA
gagtatcttacctcac

SEQ ID NO: 24342 - DNA, 16 bp, synthetic construct
  misc_feature 1..16: note = synthetic [barcode part1]
  source 1..16: mol_type = other DNA
cggtaccttattcgcg

SEQ ID NO: 24343 - DNA, 16 bp, synthetic construct
  misc_feature 1..16: note = synthetic [barcode part1]
  source 1..16: mol_type = other DNA
cctatcagattgcact

SEQ ID NO: 24344 - DNA, 16 bp, synthetic construct
  misc_feature 1..16: note = synthetic [barcode part1]
  source 1..16: mol_type = other DNA
caactcaacctctgcg

SEQ ID NO: 24345 - DNA, 16 bp, synthetic construct
  misc_feature 1..16: note = synthetic [barcode part1]
  source 1..16: mol_type = other DNA
aggattaggcctatag

SEQ ID NO: 24346 - DNA, 16 bp, synthetic construct
  misc_feature 1..16: note = synthetic [barcode part1]
  source 1..16: mol_type = other DNA
tactgtgcagtaccag

SEQ ID NO: 24347 - DNA, 16 bp, synthetic construct
  misc_feature 1..16: note = synthetic [barcode part1]
  source 1..16: mol_type = other DNA
ccttcagatcgtatac

SEQ ID NO: 24348 - DNA, 16 bp, synthetic construct
  misc_feature 1..16: note = synthetic [barcode part1]
  source 1..16: mol_type = other DNA
caatcgagtcagtcac

SEQ ID NO: 24349 - DNA, 16 bp, synthetic construct
  misc_feature 1..16: note = synthetic [barcode part1]
  source 1..16: mol_type = other DNA
atagaagtcctcacgc

SEQ ID NO: 24350 - DNA, 16 bp, synthetic construct
  misc_feature 1..16: note = synthetic [barcode part1]
  source 1..16: mol_type = other DNA
aattccggagtctcag

SEQ ID NO: 24351 - DNA, 16 bp, synthetic construct
  misc_feature 1..16: note = synthetic [barcode part1]
  source 1..16: mol_type = other DNA
tataacacactgcggc

SEQ ID NO: 24352 - DNA, 16 bp, synthetic construct
  misc_feature 1..16: note = synthetic [barcode part1]
  source 1..16: mol_type = other DNA
gtccggtcaattcaag

SEQ ID NO: 24353 - DNA, 16 bp, synthetic construct
  misc_feature 1..16: note = synthetic [barcode part1]
  source 1..16: mol_type = other DNA
tgttaggcgaagacgc

SEQ ID NO: 24354 - DNA, 16 bp, synthetic construct
  misc_feature 1..16: note = synthetic [barcode part1]
  source 1..16: mol_type = other DNA
tgacaacctcctatac

SEQ ID NO: 24355 - DNA, 16 bp, synthetic construct
  misc_feature 1..16: note = synthetic [barcode part1]
  source 1..16: mol_type = other DNA
tactcgagttgagaag

SEQ ID NO: 24356 - DNA, 16 bp, synthetic construct
  misc_feature 1..16: note = synthetic [barcode part1]
  source 1..16: mol_type = other DNA
cagactgaccagatct

SEQ ID NO: 24357 - DNA, 16 bp, synthetic construct
  misc_feature 1..16: note = synthetic [barcode part1]
  source 1..16: mol_type = other DNA
acaccagaaggtagtt

SEQ ID NO: 24358 - DNA, 16 bp, synthetic construct
  misc_feature 1..16: note = synthetic [barcode part1]
  source 1..16: mol_type = other DNA
gtagtacggccaattc

SEQ ID NO: 24359 - DNA, 16 bp, synthetic construct
  misc_feature 1..16: note = synthetic [barcode part1]
  source 1..16: mol_type = other DNA
caatctgttcgcgtcg

SEQ ID NO: 24360 - DNA, 16 bp, synthetic construct
  misc_feature 1..16: note = synthetic [barcode part1]
  source 1..16: mol_type = other DNA
tgcctctgttattgag

SEQ ID NO: 24361 - DNA, 16 bp, synthetic construct
  misc_feature 1..16: note = synthetic [barcode part1]
  source 1..16: mol_type = other DNA
cactcggaggataacg

SEQ ID NO: 24362 - DNA, 16 bp, synthetic construct
  misc_feature 1..16: note = synthetic [barcode part1]
  source 1..16: mol_type = other DNA
atagacctcaacacgc

SEQ ID NO: 24363 - DNA, 16 bp, synthetic construct
  misc_feature 1..16: note = synthetic [barcode part1]
  source 1..16: mol_type = other DNA
ttcgcacctaagttac

SEQ ID NO: 24364 - DNA, 16 bp, synthetic construct
  misc_feature 1..16: note = synthetic [barcode part1]
  source 1..16: mol_type = other DNA
acaaccagttgacacc

SEQ ID NO: 24365 - DNA, 16 bp, synthetic construct
  misc_feature 1..16: note = synthetic [barcode part1]
  source 1..16: mol_type = other DNA
ccagtccaacgatagt

SEQ ID NO: 24366 - DNA, 16 bp, synthetic construct
  misc_feature 1..16: note = synthetic [barcode part1]
  source 1..16: mol_type = other DNA
attgtattccttggcg

SEQ ID NO: 24367 - DNA, 16 bp, synthetic construct
  misc_feature 1..16: note = synthetic [barcode part1]
  source 1..16: mol_type = other DNA
gaatctgcgccttacc

SEQ ID NO: 24368 - DNA, 16 bp, synthetic construct
  misc_feature 1..16: note = synthetic [barcode part1]
  source 1..16: mol_type = other DNA
ttcgcacgacctaacc

SEQ ID NO: 24369 - DNA, 16 bp, synthetic construct
  misc_feature 1..16: note = synthetic [barcode part1]
  source 1..16: mol_type = other DNA
agtcctctataagtcc

SEQ ID NO: 24370 - DNA, 16 bp, synthetic construct
  misc_feature 1..16: note = synthetic [barcode part1]
  source 1..16: mol_type = other DNA
actcctacctaacagt

SEQ ID NO: 24371 - DNA, 16 bp, synthetic construct
  misc_feature 1..16: note = synthetic [barcode part1]
  source 1..16: mol_type = other DNA
aactgtccgaggacag

SEQ ID NO: 24372 - DNA, 16 bp, synthetic construct
  misc_feature 1..16: note = synthetic [barcode part1]
  source 1..16: mol_type = other DNA
aggtgtcgaatagtgt

SEQ ID NO: 24373 - DNA, 16 bp, synthetic construct
  misc_feature 1..16: note = synthetic [barcode part1]
  source 1..16: mol_type = other DNA
gttgttgcagtgactg

SEQ ID NO: 24374 - DNA, 16 bp, synthetic construct
  misc_feature 1..16: note = synthetic [barcode part1]
  source 1..16: mol_type = other DNA
caagaccggaattcct

SEQ ID NO: 24375 - DNA, 16 bp, synthetic construct
  misc_feature 1..16: note = synthetic [barcode part1]
  source 1..16: mol_type = other DNA
tgcaacacctaagacc

SEQ ID NO: 24376 - DNA, 16 bp, synthetic construct
  misc_feature 1..16: note = synthetic [barcode part1]
  source 1..16: mol_type = other DNA
taggtacgtacgactc

SEQ ID NO: 24377 - DNA, 16 bp, synthetic construct
  misc_feature 1..16: note = synthetic [barcode part1]
  source 1..16: mol_type = other DNA
aacctgtaagtccacg

SEQ ID NO: 24378 - DNA, 16 bp, synthetic construct
  misc_feature 1..16: note = synthetic [barcode part1]
  source 1..16: mol_type = other DNA
gtctccgacaggaatt

SEQ ID NO: 24379 - DNA, 16 bp, synthetic construct
  misc_feature 1..16: note = synthetic [barcode part1]
  source 1..16: mol_type = other DNA
cactgcgtcaatcaag

SEQ ID NO: 24380 - DNA, 16 bp, synthetic construct
  misc_feature 1..16: note = synthetic [barcode part1]
  source 1..16: mol_type = other DNA
caccagactcgatagt

SEQ ID NO: 24381 - DNA, 16 bp, synthetic construct
  misc_feature 1..16: note = synthetic [barcode part1]
  source 1..16: mol_type = other DNA
gtacgttgacgataag

SEQ ID NO: 24382 - DNA, 16 bp, synthetic construct
  misc_feature 1..16: note = synthetic [barcode part1]
  source 1..16: mol_type = other DNA
ccaagttctcttacag

SEQ ID NO: 24383 - DNA, 16 bp, synthetic construct
  misc_feature 1..16: note = synthetic [barcode part1]
  source 1..16: mol_type = other DNA
cggttatctgtgcaag

SEQ ID NO: 24384 - DNA, 16 bp, synthetic construct
  misc_feature 1..16: note = synthetic [barcode part1]
  source 1..16: mol_type = other DNA
ttggcaactgcgtctc

SEQ ID NO: 24385 - DNA, 16 bp, synthetic construct
  misc_feature 1..16: note = synthetic [barcode part1]
  source 1..16: mol_type = other DNA
gttccgcgcgattact

SEQ ID NO: 24386 - DNA, 16 bp, synthetic construct
  misc_feature 1..16: note = synthetic [barcode part1]
  source 1..16: mol_type = other DNA
gttcgagttcgttgtt

SEQ ID NO: 24387 - DNA, 16 bp, synthetic construct
  misc_feature 1..16: note = synthetic [barcode part1]
  source 1..16: mol_type = other DNA
tgttaccggtgtatct

SEQ ID NO: 24388 - DNA, 16 bp, synthetic construct
  misc_feature 1..16: note = synthetic [barcode part1]
  source 1..16: mol_type = other DNA
gcgtaccactctctag

SEQ ID NO: 24389 - DNA, 16 bp, synthetic construct
  misc_feature 1..16: note = synthetic [barcode part1]
  source 1..16: mol_type = other DNA
agtcctatattcaccg

SEQ ID NO: 24390 - DNA, 16 bp, synthetic construct
  misc_feature 1..16: note = synthetic [barcode part1]
  source 1..16: mol_type = other DNA
agtgacgtattgtccg

SEQ ID NO: 24391 - DNA, 16 bp, synthetic construct
  misc_feature 1..16: note = synthetic [barcode part1]
  source 1..16: mol_type = other DNA
caggagacacgatcac

SEQ ID NO: 24392 - DNA, 16 bp, synthetic construct
  misc_feature 1..16: note = synthetic [barcode part1]
  source 1..16: mol_type = other DNA
agtgttgtatacgcgc

SEQ ID NO: 24393 - DNA, 16 bp, synthetic construct
  misc_feature 1..16: note = synthetic [barcode part1]
  source 1..16: mol_type = other DNA
cgtagttgaagactag

SEQ ID NO: 24394 - DNA, 16 bp, synthetic construct
  misc_feature 1..16: note = synthetic [barcode part1]
  source 1..16: mol_type = other DNA
tatcgccttcgtaggc

SEQ ID NO: 24395 - DNA, 16 bp, synthetic construct
  misc_feature 1..16: note = synthetic [barcode part1]
  source 1..16: mol_type = other DNA
gatcgacttccttcct

SEQ ID NO: 24396 - DNA, 16 bp, synthetic construct
  misc_feature 1..16: note = synthetic [barcode part1]
  source 1..16: mol_type = other DNA
acacaacagaatcgac

SEQ ID NO: 24397 - DNA, 16 bp, synthetic construct
  misc_feature 1..16: note = synthetic [barcode part1]
  source 1..16: mol_type = other DNA
aggaacgatctggcac

SEQ ID NO: 24398 - DNA, 16 bp, synthetic construct
  misc_feature 1..16: note = synthetic [barcode part1]
  source 1..16: mol_type = other DNA
cacgagttgagtgtct

SEQ ID NO: 24399 - DNA, 16 bp, synthetic construct
  misc_feature 1..16: note = synthetic [barcode part1]
  source 1..16: mol_type = other DNA
aggatagacaagtcct

SEQ ID NO: 24400 - DNA, 16 bp, synthetic construct
  misc_feature 1..16: note = synthetic [barcode part1]
  source 1..16: mol_type = other DNA
cgtaggcaccttatcc

SEQ ID NO: 24401 - DNA, 16 bp, synthetic construct
  misc_feature 1..16: note = synthetic [barcode part1]
  source 1..16: mol_type = other DNA
gacaccgatacgtatc

SEQ ID NO: 24402 - DNA, 16 bp, synthetic construct
  misc_feature 1..16: note = synthetic [barcode part1]
  source 1..16: mol_type = other DNA
gatatcgcagtactgc

SEQ ID NO: 24403 - DNA, 16 bp, synthetic construct
  misc_feature 1..16: note = synthetic [barcode part1]
  source 1..16: mol_type = other DNA
gcaaccacctctcagt

SEQ ID NO: 24404 - DNA, 16 bp, synthetic construct
  misc_feature 1..16: note = synthetic [barcode part1]
  source 1..16: mol_type = other DNA
ttcactgccggatatt

SEQ ID NO: 24405 - DNA, 16 bp, synthetic construct
  misc_feature 1..16: note = synthetic [barcode part1]
  source 1..16: mol_type = other DNA
taagtatctggcgcac

SEQ ID NO: 24406 - DNA, 16 bp, synthetic construct
  misc_feature 1..16: note = synthetic [barcode part1]
  source 1..16: mol_type = other DNA
gcagagttctaagtag

SEQ ID NO: 24407 - DNA, 16 bp, synthetic construct
  misc_feature 1..16: note = synthetic [barcode part1]
  source 1..16: mol_type = other DNA
gtgtccgcaagtattg

SEQ ID NO: 24408 - DNA, 16 bp, synthetic construct
  misc_feature 1..16: note = synthetic [barcode part1]
  source 1..16: mol_type = other DNA
ttgtcgcgtagtagac

SEQ ID NO: 24409 - DNA, 16 bp, synthetic construct
  misc_feature 1..16: note = synthetic [barcode part1]
  source 1..16: mol_type = other DNA
ttcgaaccacctcacg

SEQ ID NO: 24410 - DNA, 16 bp, synthetic construct
  misc_feature 1..16: note = synthetic [barcode part1]
  source 1..16: mol_type = other DNA
gaacttcaactggtcg

SEQ ID NO: 24411 - DNA, 16 bp, synthetic construct
  misc_feature 1..16: note = synthetic [barcode part1]
  source 1..16: mol_type = other DNA
acgaccaatcggtact

SEQ ID NO: 24412 - DNA, 16 bp, synthetic construct
  misc_feature 1..16: note = synthetic [barcode part1]
  source 1..16: mol_type = other DNA
gcgagagaactgtcgt

SEQ ID NO: 24413 - DNA, 16 bp, synthetic construct
  misc_feature 1..16: note = synthetic [barcode part1]
  source 1..16: mol_type = other DNA
ttaatccgcgaccgtc

SEQ ID NO: 24414 - DNA, 16 bp, synthetic construct
  misc_feature 1..16: note = synthetic [barcode part1]
  source 1..16: mol_type = other DNA
ataggagtggttcagt

SEQ ID NO: 24415 - DNA, 16 bp, synthetic construct
  misc_feature 1..16: note = synthetic [barcode part1]
  source 1..16: mol_type = other DNA
gtactaacgtgtcggt

SEQ ID NO: 24416 - DNA, 16 bp, synthetic construct
  misc_feature 1..16: note = synthetic [barcode part1]
  source 1..16: mol_type = other DNA
taactgcacttcctag

SEQ ID NO: 24417 - DNA, 16 bp, synthetic construct
  misc_feature 1..16: note = synthetic [barcode part1]
  source 1..16: mol_type = other DNA
tcaatctggatcaggc

SEQ ID NO: 24418 - DNA, 16 bp, synthetic construct
  misc_feature 1..16: note = synthetic [barcode part1]
  source 1..16: mol_type = other DNA
agattcgaacagtgac

SEQ ID NO: 24419 - DNA, 16 bp, synthetic construct
  misc_feature 1..16: note = synthetic [barcode part1]
  source 1..16: mol_type = other DNA
gtgtacgtcgactagt

SEQ ID NO: 24420 - DNA, 16 bp, synthetic construct
  misc_feature 1..16: note = synthetic [barcode part1]
  source 1..16: mol_type = other DNA
cgttctggataggatc

SEQ ID NO: 24421 - DNA, 16 bp, synthetic construct
  misc_feature 1..16: note = synthetic [barcode part1]
  source 1..16: mol_type = other DNA
ccagattagaggtgcg

SEQ ID NO: 24422 - DNA, 16 bp, synthetic construct
  misc_feature 1..16: note = synthetic [barcode part1]
  source 1..16: mol_type = other DNA
actggtgtaccagtgt

SEQ ID NO: 24423 - DNA, 16 bp, synthetic construct
  misc_feature 1..16: note = synthetic [barcode part1]
  source 1..16: mol_type = other DNA
tcttctctcggaatcc

SEQ ID NO: 24424 - DNA, 16 bp, synthetic construct
  misc_feature 1..16: note = synthetic [barcode part1]
  source 1..16: mol_type = other DNA
cgtggcagatactatc

SEQ ID NO: 24425 - DNA, 16 bp, synthetic construct
  misc_feature 1..16: note = synthetic [barcode part1]
  source 1..16: mol_type = other DNA
ttagtatcggtgcacg

SEQ ID NO: 24426 - DNA, 16 bp, synthetic construct
  misc_feature 1..16: note = synthetic [barcode part1]
  source 1..16: mol_type = other DNA
ttgtacgtacgtgacg

SEQ ID NO: 24427 - DNA, 16 bp, synthetic construct
  misc_feature 1..16: note = synthetic [barcode part1]
  source 1..16: mol_type = other DNA
agagtcgactatctcg

SEQ ID NO: 24428 - DNA, 16 bp, synthetic construct
  misc_feature 1..16: note = synthetic [barcode part1]
  source 1..16: mol_type = other DNA
cgcgactattatcttg

SEQ ID NO: 24429 - DNA, 16 bp, synthetic construct
  misc_feature 1..16: note = synthetic [barcode part1]
  source 1..16: mol_type = other DNA
tccaacttgcgtgatt

SEQ ID NO: 24430 - DNA, 16 bp, synthetic construct
  misc_feature 1..16: note = synthetic [barcode part1]
  source 1..16: mol_type = other DNA
agtgtacactggtgtc

SEQ ID NO: 24431 - DNA, 16 bp, synthetic construct
  misc_feature 1..16: note = synthetic [barcode part1]
  source 1..16: mol_type = other DNA
tccagaagaggtcttc

SEQ ID NO: 24432 - DNA, 16 bp, synthetic construct
  misc_feature 1..16: note = synthetic [barcode part1]
  source 1..16: mol_type = other DNA
cctgtctgtctattcg

SEQ ID NO: 24433 - DNA, 16 bp, synthetic construct
  misc_feature 1..16: note = synthetic [barcode part1]
  source 1..16: mol_type = other DNA
tagttgcggtggtgag

SEQ ID NO: 24434 - DNA, 16 bp, synthetic construct
  misc_feature 1..16: note = synthetic [barcode part1]
  source 1..16: mol_type = other DNA
atcgtggttcgaggtt

SEQ ID NO: 24435 - DNA, 16 bp, synthetic construct
  misc_feature 1..16: note = synthetic [barcode part1]
  source 1..16: mol_type = other DNA
tctggcctgtgtgact

SEQ ID NO: 24436 - DNA, 16 bp, synthetic construct
  misc_feature 1..16: note = synthetic [barcode part1]
  source 1..16: mol_type = other DNA
gcgttgaccgaatact

SEQ ID NO: 24437 - DNA, 16 bp, synthetic construct
  misc_feature 1..16: note = synthetic [barcode part1]
  source 1..16: mol_type = other DNA
agacctagacggcaac

SEQ ID NO: 24438 - DNA, 16 bp, synthetic construct
  misc_feature 1..16: note = synthetic [barcode part1]
  source 1..16: mol_type = other DNA
tcacagagtccagatc

SEQ ID NO: 24439 - DNA, 16 bp, synthetic construct
  misc_feature 1..16: note = synthetic [barcode part1]
  source 1..16: mol_type = other DNA
gaggagtgaacgttcc

SEQ ID NO: 24440 - DNA, 16 bp, synthetic construct
  misc_feature 1..16: note = synthetic [barcode part1]
  source 1..16: mol_type = other DNA
gagacacaagacgtag

SEQ ID NO: 24441 - DNA, 16 bp, synthetic construct
  misc_feature 1..16: note = synthetic [barcode part1]
  source 1..16: mol_type = other DNA
tgtatcgttaacctcg

SEQ ID NO: 24442 - DNA, 16 bp, synthetic construct
  misc_feature 1..16: note = synthetic [barcode part1]
  source 1..16: mol_type = other DNA
tgatacgtataccggc

SEQ ID NO: 24443 - DNA, 16 bp, synthetic construct
  misc_feature 1..16: note = synthetic [barcode part1]
  source 1..16: mol_type = other DNA
caacgcacgacgaagt

SEQ ID NO: 24444 - DNA, 16 bp, synthetic construct
  misc_feature 1..16: note = synthetic [barcode part1]
  source 1..16: mol_type = other DNA
gcggcgttagttgatt

SEQ ID NO: 24445 - DNA, 16 bp, synthetic construct
  misc_feature 1..16: note = synthetic [barcode part1]
  source 1..16: mol_type = other DNA
actccaagaggttctg

SEQ ID NO: 24446 - DNA, 16 bp, synthetic construct
  misc_feature 1..16: note = synthetic [barcode part1]
  source 1..16: mol_type = other DNA
aagtctaggtaacggt

SEQ ID NO: 24447 - DNA, 16 bp, synthetic construct
  misc_feature 1..16: note = synthetic [barcode part1]
  source 1..16: mol_type = other DNA
acaacgcgtcgtaact

SEQ ID NO: 24448 - DNA, 16 bp, synthetic construct
  misc_feature 1..16: note = synthetic [barcode part1]
  source 1..16: mol_type = other DNA
aggcacttcacggatt

SEQ ID NO: 24449 - DNA, 16 bp, synthetic construct
  misc_feature 1..16: note = synthetic [barcode part1]
  source 1..16: mol_type = other DNA
tcgcctgatctactct

SEQ ID NO: 24450 - DNA, 16 bp, synthetic construct
  misc_feature 1..16: note = synthetic [barcode part1]
  source 1..16: mol_type = other DNA
cgtaggatacaggaag

SEQ ID NO: 24451 - DNA, 16 bp, synthetic construct
  misc_feature 1..16: note = synthetic [barcode part1]
  source 1..16: mol_type = other DNA
ttataggcgtctcgtt

SEQ ID NO: 24452 - DNA, 16 bp, synthetic construct
  misc_feature 1..16: note = synthetic [barcode part1]
  source 1..16: mol_type = other DNA
atagttacgtgcggtc

SEQ ID NO: 24453 - DNA, 16 bp, synthetic construct
  misc_feature 1..16: note = synthetic [barcode part1]
  source 1..16: mol_type = other DNA
tctcggttagtaggac

SEQ ID NO: 24454 - DNA, 16 bp, synthetic construct
  misc_feature 1..16: note = synthetic [barcode part1]
  source 1..16: mol_type = other DNA
tagatcgtggttcgac

SEQ ID NO: 24455 - DNA, 16 bp, synthetic construct
  misc_feature 1..16: note = synthetic [barcode part1]
  source 1..16: mol_type = other DNA
aacctacgtggtggag

SEQ ID NO: 24456 - DNA, 16 bp, synthetic construct
  misc_feature 1..16: note = synthetic [barcode part1]
  source 1..16: mol_type = other DNA
ccagacaaggttcact

SEQ ID NO: 24457 - DNA, 16 bp, synthetic construct
  misc_feature 1..16: note = synthetic [barcode part1]
  source 1..16: mol_type = other DNA
caagaggcctcttaac

SEQ ID NO: 24458 - DNA, 16 bp, synthetic construct
  misc_feature 1..16: note = synthetic [barcode part1]
  source 1..16: mol_type = other DNA
tcgacttggtagtggt

SEQ ID NO: 24459 - DNA, 16 bp, synthetic construct
  misc_feature 1..16: note = synthetic [barcode part1]
  source 1..16: mol_type = other DNA
ccggaatctcaagact

SEQ ID NO: 24460 - DNA, 16 bp, synthetic construct
  misc_feature 1..16: note = synthetic [barcode part1]
  source 1..16: mol_type = other DNA
acaatcaggtcgaagt

SEQ ID NO: 24461 - DNA, 16 bp, synthetic construct
  misc_feature 1..16: note = synthetic [barcode part1]
  source 1..16: mol_type = other DNA
aacggaacgtgttagt

SEQ ID NO: 24462 - DNA, 16 bp, synthetic construct
  misc_feature 1..16: note = synthetic [barcode part1]
  source 1..16: mol_type = other DNA
gttctgtacggccact

SEQ ID NO: 24463 - DNA, 16 bp, synthetic construct
  misc_feature 1..16: note = synthetic [barcode part1]
  source 1..16: mol_type = other DNA
gcgatatacgttgcac

SEQ ID NO: 24464 - DNA, 16 bp, synthetic construct
  misc_feature 1..16: note = synthetic [barcode part1]
  source 1..16: mol_type = other DNA
cgagagactaatcctc

SEQ ID NO: 24465 - DNA, 16 bp, synthetic construct
  misc_feature 1..16: note = synthetic [barcode part1]
  source 1..16: mol_type = other DNA
tctatcgcagtcctct

SEQ ID NO: 24466 - DNA, 16 bp, synthetic construct
  misc_feature 1..16: note = synthetic [barcode part1]
  source 1..16: mol_type = other DNA
tcaacgacagattgcc

SEQ ID NO: 24467 - DNA, 16 bp, synthetic construct
  misc_feature 1..16: note = synthetic [barcode part1]
  source 1..16: mol_type = other DNA
tacgagtctcggatac

SEQ ID NO: 24468 - DNA, 16 bp, synthetic construct
  misc_feature 1..16: note = synthetic [barcode part1]
  source 1..16: mol_type = other DNA
atcagtcggttctgag

SEQ ID NO: 24469 - DNA, 16 bp, synthetic construct
  misc_feature 1..16: note = synthetic [barcode part1]
  source 1..16: mol_type = other DNA
aattacaaccggcacc

SEQ ID NO: 24470 - DNA, 16 bp, synthetic construct
  misc_feature 1..16: note = synthetic [barcode part1]
  source 1..16: mol_type = other DNA
tgtcgccgataacagt

SEQ ID NO: 24471 - DNA, 16 bp, synthetic construct
  misc_feature 1..16: note = synthetic [barcode part1]
  source 1..16: mol_type = other DNA
caggtacgatctgtgt

SEQ ID NO: 24472 - DNA, 16 bp, synthetic construct
  misc_feature 1..16: note = synthetic [barcode part1]
  source 1..16: mol_type = other DNA
atagtacgccggttgt

SEQ ID NO: 24473 - DNA, 16 bp, synthetic construct
  misc_feature 1..16: note = synthetic [barcode part1]
  source 1..16: mol_type = other DNA
acagttctcactggag

SEQ ID NO: 24474 - DNA, 16 bp, synthetic construct
  misc_feature 1..16: note = synthetic [barcode part1]
  source 1..16: mol_type = other DNA
actccgttggactcac

SEQ ID NO: 24475 - DNA, 16 bp, synthetic construct
  misc_feature 1..16: note = synthetic [barcode part1]
  source 1..16: mol_type = other DNA
ccttaactcggtgcgt

SEQ ID NO: 24476 - DNA, 16 bp, synthetic construct
  misc_feature 1..16: note = synthetic [barcode part1]
  source 1..16: mol_type = other DNA
ccttccaactctctag

SEQ ID NO: 24477 - DNA, 16 bp, synthetic construct
  misc_feature 1..16: note = synthetic [barcode part1]
  source 1..16: mol_type = other DNA
atcagaaccggagaag

SEQ ID NO: 24478 - DNA, 16 bp, synthetic construct
  misc_feature 1..16: note = synthetic [barcode part1]
  source 1..16: mol_type = other DNA
attctgtatcctccgc

SEQ ID NO: 24479 - DNA, 16 bp, synthetic construct
  misc_feature 1..16: note = synthetic [barcode part1]
  source 1..16: mol_type = other DNA
caacaatcgacctggt

SEQ ID NO: 24480 - DNA, 16 bp, synthetic construct
  misc_feature 1..16: note = synthetic [barcode part1]
  source 1..16: mol_type = other DNA
gcgtcctccagtgatt

SEQ ID NO: 24481 - DNA, 16 bp, synthetic construct
  misc_feature 1..16: note = synthetic [barcode part1]
  source 1..16: mol_type = other DNA
ttgacttggcgtattc

SEQ ID NO: 24482 - DNA, 16 bp, synthetic construct
  misc_feature 1..16: note = synthetic [barcode part1]
  source 1..16: mol_type = other DNA
cgatcaacttcaggac

SEQ ID NO: 24483 - DNA, 16 bp, synthetic construct
  misc_feature 1..16: note = synthetic [barcode part1]
  source 1..16: mol_type = other DNA
gccgttgtcgaattag

SEQ ID NO: 24484 - DNA, 16 bp, synthetic construct
  misc_feature 1..16: note = synthetic [barcode part1]
  source 1..16: mol_type = other DNA
gtgtaggtaggttgcg

SEQ ID NO: 24485 - DNA, 16 bp, synthetic construct
  misc_feature 1..16: note = synthetic [barcode part1]
  source 1..16: mol_type = other DNA
actagtgtccgactcc

SEQ ID NO: 24486 - DNA, 16 bp, synthetic construct
  misc_feature 1..16: note = synthetic [barcode part1]
  source 1..16: mol_type = other DNA
cggtcctcacgtagtt

SEQ ID NO: 24487 - DNA, 16 bp, synthetic construct
  misc_feature 1..16: note = synthetic [barcode part1]
  source 1..16: mol_type = other DNA
gaattcaggcgtgtct

SEQ ID NO: 24488 - DNA, 16 bp, synthetic construct
  misc_feature 1..16: note = synthetic [barcode part1]
  source 1..16: mol_type = other DNA
gtggtatctaatcggc

SEQ ID NO: 24489 - DNA, 16 bp, synthetic construct
  misc_feature 1..16: note = synthetic [barcode part1]
  source 1..16: mol_type = other DNA
gttggtgaacacgtct

SEQ ID NO: 24490 - DNA, 16 bp, synthetic construct
  misc_feature 1..16: note = synthetic [barcode part1]
  source 1..16: mol_type = other DNA
acttaagtgtcgtcct

SEQ ID NO: 24491 - DNA, 16 bp, synthetic construct
  misc_feature 1..16: note = synthetic [barcode part1]
  source 1..16: mol_type = other DNA
atcgaactgccaagtc

SEQ ID NO: 24492 - DNA, 16 bp, synthetic construct
  misc_feature 1..16: note = synthetic [barcode part1]
  source 1..16: mol_type = other DNA
acctgagtatccaggt

SEQ ID NO: 24493 - DNA, 16 bp, synthetic construct
  misc_feature 1..16: note = synthetic [barcode part1]
  source 1..16: mol_type = other DNA
gacacgaatcttcacg

SEQ ID NO: 24494 - DNA, 16 bp, synthetic construct
  misc_feature 1..16: note = synthetic [barcode part1]
  source 1..16: mol_type = other DNA
ttgcgaatctaacctc

SEQ ID NO: 24495 - DNA, 16 bp, synthetic construct
  misc_feature 1..16: note = synthetic [barcode part1]
  source 1..16: mol_type = other DNA
tgactcttctcgacct

SEQ ID NO: 24496 - DNA, 16 bp, synthetic construct
  misc_feature 1..16: note = synthetic [barcode part1]
  source 1..16: mol_type = other DNA
actgacagtcctccac

SEQ ID NO: 24497 - DNA, 16 bp, synthetic construct
  misc_feature 1..16: note = synthetic [barcode part1]
  source 1..16: mol_type = other DNA
ccaacaattcggcaac

SEQ ID NO: 24498 - DNA, 16 bp, synthetic construct
  misc_feature 1..16: note = synthetic [barcode part1]
  source 1..16: mol_type = other DNA
aataaccgatcgccgt

SEQ ID NO: 24499 - DNA, 16 bp, synthetic construct
  misc_feature 1..16: note = synthetic [barcode part1]
  source 1..16: mol_type = other DNA
atacagtgaggccggt

SEQ ID NO: 24500 - DNA, 16 bp, synthetic construct
  misc_feature 1..16: note = synthetic [barcode part1]
  source 1..16: mol_type = other DNA
gttagattccacacct

SEQ ID NO: 24501 - DNA, 16 bp, synthetic construct
  misc_feature 1..16: note = synthetic [barcode part1]
  source 1..16: mol_type = other DNA
tatcaatccgatctcg

SEQ ID NO: 24502 - DNA, 16 bp, synthetic construct
  misc_feature 1..16: note = synthetic [barcode part1]
  source 1..16: mol_type = other DNA
acagatcgtacctgac

SEQ ID NO: 24503 - DNA, 16 bp, synthetic construct
  misc_feature 1..16: note = synthetic [barcode part1]
  source 1..16: mol_type = other DNA
attggaacgtgcgacg

SEQ ID NO: 24504 - DNA, 16 bp, synthetic construct
  misc_feature 1..16: note = synthetic [barcode part1]
  source 1..16: mol_type = other DNA
gattacgttctctgac

SEQ ID NO: 24505 - DNA, 16 bp, synthetic construct
  misc_feature 1..16: note = synthetic [barcode part1]
  source 1..16: mol_type = other DNA
tgacggatcgtcttag

SEQ ID NO: 24506 - DNA, 16 bp, synthetic construct
  misc_feature 1..16: note = synthetic [barcode part1]
  source 1..16: mol_type = other DNA
accggacgtaagaacc

SEQ ID NO: 24507 - DNA, 16 bp, synthetic construct
  misc_feature 1..16: note = synthetic [barcode part1]
  source 1..16: mol_type = other DNA
cctatagaccttgccg

SEQ ID NO: 24508 - DNA, 16 bp, synthetic construct
  misc_feature 1..16: note = synthetic [barcode part1]
  source 1..16: mol_type = other DNA
agagacactgccgagt

SEQ ID NO: 24509 - DNA, 16 bp, synthetic construct
  misc_feature 1..16: note = synthetic [barcode part1]
  source 1..16: mol_type = other DNA
gagtaaggacgagtgt

SEQ ID NO: 24510 - DNA, 16 bp, synthetic construct
  misc_feature 1..16: note = synthetic [barcode part1]
  source 1..16: mol_type = other DNA
ttgttcgactcgcctt

SEQ ID NO: 24511 - DNA, 16 bp, synthetic construct
  misc_feature 1..16: note = synthetic [barcode part1]
  source 1..16: mol_type = other DNA
agacgaagacactgtt

SEQ ID NO: 24512 - DNA, 16 bp, synthetic construct
  misc_feature 1..16: note = synthetic [barcode part1]
  source 1..16: mol_type = other DNA
agaggtaacgacttgt

SEQ ID NO: 24513 - DNA, 16 bp, synthetic construct
  misc_feature 1..16: note = synthetic [barcode part1]
  source 1..16: mol_type = other DNA
gttcctccacacaacg

SEQ ID NO: 24514 - DNA, 16 bp, synthetic construct
  misc_feature 1..16: note = synthetic [barcode part1]
  source 1..16: mol_type = other DNA
gacactgacacacgtt

SEQ ID NO: 24515 - DNA, 16 bp, synthetic construct
  misc_feature 1..16: note = synthetic [barcode part1]
  source 1..16: mol_type = other DNA
attgcctccacggact

SEQ ID NO: 24516 - DNA, 16 bp, synthetic construct
  misc_feature 1..16: note = synthetic [barcode part1]
  source 1..16: mol_type = other DNA
cggcgactgtatcctt

SEQ ID NO: 24517 - DNA, 16 bp, synthetic construct
  misc_feature 1..16: note = synthetic [barcode part1]
  source 1..16: mol_type = other DNA
gtcgaactggactgtt

SEQ ID NO: 24518 - DNA, 16 bp, synthetic construct
  misc_feature 1..16: note = synthetic [barcode part1]
  source 1..16: mol_type = other DNA
gaccagttcagagtct

SEQ ID NO: 24519 - DNA, 16 bp, synthetic construct
  misc_feature 1..16: note = synthetic [barcode part1]
  source 1..16: mol_type = other DNA
acgtccgtactatccg

SEQ ID NO: 24520 - DNA, 16 bp, synthetic construct
  misc_feature 1..16: note = synthetic [barcode part1]
  source 1..16: mol_type = other DNA
gccgtgaatctgttcc

SEQ ID NO: 24521 - DNA, 16 bp, synthetic construct
  misc_feature 1..16: note = synthetic [barcode part1]
  source 1..16: mol_type = other DNA
tgttcaccttggagtt

SEQ ID NO: 24522 - DNA, 16 bp, synthetic construct
  misc_feature 1..16: note = synthetic [barcode part1]
  source 1..16: mol_type = other DNA
gtcaacgagacacctt

SEQ ID NO: 24523 - DNA, 16 bp, synthetic construct
  misc_feature 1..16: note = synthetic [barcode part1]
  source 1..16: mol_type = other DNA
aacactccgccttgtg

SEQ ID NO: 24524 - DNA, 16 bp, synthetic construct
  misc_feature 1..16: note = synthetic [barcode part1]
  source 1..16: mol_type = other DNA
tgacgccgatattgtg

SEQ ID NO: 24525 - DNA, 16 bp, synthetic construct
  misc_feature 1..16: note = synthetic [barcode part1]
  source 1..16: mol_type = other DNA
accgttagaaggcacg

SEQ ID NO: 24526 - DNA, 16 bp, synthetic construct
  misc_feature 1..16: note = synthetic [barcode part1]
  source 1..16: mol_type = other DNA
aagagtacaggtcgcc

SEQ ID NO: 24527 - DNA, 16 bp, synthetic construct
  misc_feature 1..16: note = synthetic [barcode part1]
  source 1..16: mol_type = other DNA
aggtcagtgtgcagtg

SEQ ID NO: 24528 - DNA, 16 bp, synthetic construct
  misc_feature 1..16: note = synthetic [barcode part1]
  source 1..16: mol_type = other DNA
ccacactaagttgttc

SEQ ID NO: 24529 - DNA, 16 bp, synthetic construct
  misc_feature 1..16: note = synthetic [barcode part1]
  source 1..16: mol_type = other DNA
gttactggatccagtg

SEQ ID NO: 24530 - DNA, 16 bp, synthetic construct
  misc_feature 1..16: note = synthetic [barcode part1]
  source 1..16: mol_type = other DNA
tgtccacttacggtgc

SEQ ID NO: 24531 - DNA, 16 bp, synthetic construct
  misc_feature 1..16: note = synthetic [barcode part1]
  source 1..16: mol_type = other DNA
cgatagtcttcgcgtc

SEQ ID NO: 24532 - DNA, 16 bp, synthetic construct
  misc_feature 1..16: note = synthetic [barcode part1]
  source 1..16: mol_type = other DNA
atcactggaggcgtag

SEQ ID NO: 24533 - DNA, 16 bp, synthetic construct
  misc_feature 1..16: note = synthetic [barcode part1]
  source 1..16: mol_type = other DNA
tcgtaccgatacgaac

SEQ ID NO: 24534 - DNA, 16 bp, synthetic construct
  misc_feature 1..16: note = synthetic [barcode part1]
  source 1..16: mol_type = other DNA
ccacaggtgtcctatc

SEQ ID NO: 24535 - DNA, 16 bp, synthetic construct
  misc_feature 1..16: note = synthetic [barcode part1]
  source 1..16: mol_type = other DNA
tgacggtagttaccgt

SEQ ID NO: 24536 - DNA, 16 bp, synthetic construct
  misc_feature 1..16: note = synthetic [barcode part1]
  source 1..16: mol_type = other DNA
ccttgacacacaattc

SEQ ID NO: 24537 - DNA, 16 bp, synthetic construct
  misc_feature 1..16: note = synthetic [barcode part1]
  source 1..16: mol_type = other DNA
aggttgtctgcacctc

SEQ ID NO: 24538 - DNA, 16 bp, synthetic construct
  misc_feature 1..16: note = synthetic [barcode part1]
  source 1..16: mol_type = other DNA
gcacttcaccgaactc

SEQ ID NO: 24539 - DNA, 16 bp, synthetic construct
  misc_feature 1..16: note = synthetic [barcode part1]
  source 1..16: mol_type = other DNA
gttcgtctgagacctc

SEQ ID NO: 24540 - DNA, 16 bp, synthetic construct
  misc_feature 1..16: note = synthetic [barcode part1]
  source 1..16: mol_type = other DNA
gtctcctgtatatcag

SEQ ID NO: 24541 - DNA, 16 bp, synthetic construct
  misc_feature 1..16: note = synthetic [barcode part1]
  source 1..16: mol_type = other DNA
taaccacgtgactacg

SEQ ID NO: 24542 - DNA, 16 bp, synthetic construct
  misc_feature 1..16: note = synthetic [barcode part1]
  source 1..16: mol_type = other DNA
caagtatcgacaaggt

SEQ ID NO: 24543 - DNA, 16 bp, synthetic construct
  misc_feature 1..16: note = synthetic [barcode part1]
  source 1..16: mol_type = other DNA
actcaccgagttccac

SEQ ID NO: 24544 - DNA, 16 bp, synthetic construct
  misc_feature 1..16: note = synthetic [barcode part1]
  source 1..16: mol_type = other DNA
ttgcctgaatattgcc

SEQ ID NO: 24545 - DNA, 16 bp, synthetic construct
  misc_feature 1..16: note = synthetic [barcode part1]
  source 1..16: mol_type = other DNA
cctcacagtactcttc

SEQ ID NO: 24546 - DNA, 16 bp, synthetic construct
  misc_feature 1..16: note = synthetic [barcode part1]
  source 1..16: mol_type = other DNA
acagttagaccttcct

SEQ ID NO: 24547 - DNA, 16 bp, synthetic construct
  misc_feature 1..16: note = synthetic [barcode part1]
  source 1..16: mol_type = other DNA
gttgcgatctgtccgt

SEQ ID NO: 24548 - DNA, 16 bp, synthetic construct
  misc_feature 1..16: note = synthetic [barcode part1]
  source 1..16: mol_type = other DNA
caagataactcgaacg

SEQ ID NO: 24549 - DNA, 16 bp, synthetic construct
  misc_feature 1..16: note = synthetic [barcode part1]
  source 1..16: mol_type = other DNA
caattcgtagatcgcg

SEQ ID NO: 24550 - DNA, 16 bp, synthetic construct
  misc_feature 1..16: note = synthetic [barcode part1]
  source 1..16: mol_type = other DNA
gattgtctaagtcgcg

SEQ ID NO: 24551 - DNA, 16 bp, synthetic construct
  misc_feature 1..16: note = synthetic [barcode part1]
  source 1..16: mol_type = other DNA
tactgaaggacacagt

SEQ ID NO: 24552 - DNA, 16 bp, synthetic construct
  misc_feature 1..16: note = synthetic [barcode part1]
  source 1..16: mol_type = other DNA
aggccaataattgcag

SEQ ID NO: 24553 - DNA, 16 bp, synthetic construct
  misc_feature 1..16: note = synthetic [barcode part1]
  source 1..16: mol_type = other DNA
gaactactcgttggac

SEQ ID NO: 24554 - DNA, 16 bp, synthetic construct
  misc_feature 1..16: note = synthetic [barcode part1]
  source 1..16: mol_type = other DNA
tgtgcaaccactattc

SEQ ID NO: 24555 - DNA, 16 bp, synthetic construct
  misc_feature 1..16: note = synthetic [barcode part1]
  source 1..16: mol_type = other DNA
tatccgcaagtaggtc

SEQ ID NO: 24556 - DNA, 16 bp, synthetic construct
  misc_feature 1..16: note = synthetic [barcode part1]
  source 1..16: mol_type = other DNA
cctacacaccaggttc

SEQ ID NO: 24557 - DNA, 16 bp, synthetic construct
  misc_feature 1..16: note = synthetic [barcode part1]
  source 1..16: mol_type = other DNA
tgaatccggcacttag

SEQ ID NO: 24558 - DNA, 16 bp, synthetic construct
  misc_feature 1..16: note = synthetic [barcode part1]
  source 1..16: mol_type = other DNA
acaagaacggcgactc

SEQ ID NO: 24559 - DNA, 16 bp, synthetic construct
  misc_feature 1..16: note = synthetic [barcode part1]
  source 1..16: mol_type = other DNA
acggattcgtggattc

SEQ ID NO: 24560 - DNA, 16 bp, synthetic construct
  misc_feature 1..16: note = synthetic [barcode part1]
  source 1..16: mol_type = other DNA
gtagtgtccaagactc

SEQ ID NO: 24561 - DNA, 16 bp, synthetic construct
  misc_feature 1..16: note = synthetic [barcode part1]
  source 1..16: mol_type = other DNA
tcaccgtccacaagtc

SEQ ID NO: 24562 - DNA, 16 bp, synthetic construct
  misc_feature 1..16: note = synthetic [barcode part1]
  source 1..16: mol_type = other DNA
tagtctgtcgtgcctg

SEQ ID NO: 24563 - DNA, 16 bp, synthetic construct
  misc_feature 1..16: note = synthetic [barcode part1]
  source 1..16: mol_type = other DNA
aactgtacttcctggt

SEQ ID NO: 24564 - DNA, 16 bp, synthetic construct
  misc_feature 1..16: note = synthetic [barcode part1]
  source 1..16: mol_type = other DNA
taggttccgttatctg

SEQ ID NO: 24565 - DNA, 16 bp, synthetic construct
  misc_feature 1..16: note = synthetic [barcode part1]
  source 1..16: mol_type = other DNA
actgtaacgttcacct

SEQ ID NO: 24566 - DNA, 16 bp, synthetic construct
  misc_feature 1..16: note = synthetic [barcode part1]
  source 1..16: mol_type = other DNA
agacacgtggcctaag

SEQ ID NO: 24567 - DNA, 16 bp, synthetic construct
  misc_feature 1..16: note = synthetic [barcode part1]
  source 1..16: mol_type = other DNA
cctggcaacaatctag

SEQ ID NO: 24568 - DNA, 16 bp, synthetic construct
  misc_feature 1..16: note = synthetic [barcode part1]
  source 1..16: mol_type = other DNA
gacagaccagaactcg

SEQ ID NO: 24569 - DNA, 16 bp, synthetic construct
  misc_feature 1..16: note = synthetic [barcode part1]
  source 1..16: mol_type = other DNA
tcgtcaacgtgtctcg

SEQ ID NO: 24570 - DNA, 16 bp, synthetic construct
  misc_feature 1..16: note = synthetic [barcode part1]
  source 1..16: mol_type = other DNA
cggtaagtaaggcaag

SEQ ID NO: 24571 - DNA, 16 bp, synthetic construct
  misc_feature 1..16: note = synthetic [barcode part1]
  source 1..16: mol_type = other DNA
tcaggacggtgttgtt

SEQ ID NO: 24572 - DNA, 16 bp, synthetic construct
  misc_feature 1..16: note = synthetic [barcode part1]
  source 1..16: mol_type = other DNA
aagaacttacacgacg

SEQ ID NO: 24573 - DNA, 16 bp, synthetic construct
  misc_feature 1..16: note = synthetic [barcode part1]
  source 1..16: mol_type = other DNA
cgcgtagaacggtaac

SEQ ID NO: 24574 - DNA, 16 bp, synthetic construct
  misc_feature 1..16: note = synthetic [barcode part1]
  source 1..16: mol_type = other DNA
acttcaccgagagact

SEQ ID NO: 24575 - DNA, 16 bp, synthetic construct
  misc_feature 1..16: note = synthetic [barcode part1]
  source 1..16: mol_type = other DNA
tggtcctgttatacac

SEQ ID NO: 24576 - DNA, 16 bp, synthetic construct
  misc_feature 1..16: note = synthetic [barcode part1]
  source 1..16: mol_type = other DNA
caactctctggtcctt

SEQ ID NO: 24577 - DNA, 16 bp, synthetic construct
  misc_feature 1..16: note = synthetic [barcode part1]
  source 1..16: mol_type = other DNA
atcacggttcgcctgt

SEQ ID NO: 24578 - DNA, 16 bp, synthetic construct
  misc_feature 1..16: note = synthetic [barcode part1]
  source 1..16: mol_type = other DNA
cgacggcaagagtact

SEQ ID NO: 24579 - DNA, 16 bp, synthetic construct
  misc_feature 1..16: note = synthetic [barcode part1]
  source 1..16: mol_type = other DNA
agattcaggcgtacct

SEQ ID NO: 24580 - DNA, 16 bp, synthetic construct
  misc_feature 1..16: note = synthetic [barcode part1]
  source 1..16: mol_type = other DNA
aggcacacaacaaccg

SEQ ID NO: 24581 - DNA, 16 bp, synthetic construct
  misc_feature 1..16: note = synthetic [barcode part1]
  source 1..16: mol_type = other DNA
acgacttgtgactcag

SEQ ID NO: 24582 - DNA, 16 bp, synthetic construct
  misc_feature 1..16: note = synthetic [barcode part1]
  source 1..16: mol_type = other DNA
aatcgtggcaccaatc

SEQ ID NO: 24583 - DNA, 16 bp, synthetic construct
  misc_feature 1..16: note = synthetic [barcode part1]
  source 1..16: mol_type = other DNA
agtggagtcgatatac

SEQ ID NO: 24584 - DNA, 16 bp, synthetic construct
  misc_feature 1..16: note = synthetic [barcode part1]
  source 1..16: mol_type = other DNA
agaacaatcgtgagtc

SEQ ID NO: 24585 - DNA, 16 bp, synthetic construct
  misc_feature 1..16: note = synthetic [barcode part1]
  source 1..16: mol_type = other DNA
gactgcgaactctctc

SEQ ID NO: 24586 - DNA, 16 bp, synthetic construct
  misc_feature 1..16: note = synthetic [barcode part1]
  source 1..16: mol_type = other DNA
tggaactctctaaggc

SEQ ID NO: 24587 - DNA, 16 bp, synthetic construct
  misc_feature 1..16: note = synthetic [barcode part1]
  source 1..16: mol_type = other DNA
actacgagtagtgtcc

SEQ ID NO: 24588 - DNA, 16 bp, synthetic construct
  misc_feature 1..16: note = synthetic [barcode part1]
  source 1..16: mol_type = other DNA
aagacgcgccagattg

SEQ ID NO: 24589 - DNA, 16 bp, synthetic construct
  misc_feature 1..16: note = synthetic [barcode part1]
  source 1..16: mol_type = other DNA
agtcagtcagtcagtc

SEQ ID NO: 24590 - DNA, 16 bp, synthetic construct
  misc_feature 1..16: note = synthetic [barcode part1]
  source 1..16: mol_type = other DNA
tgttggagtgacctac

SEQ ID NO: 24591 - DNA, 16 bp, synthetic construct
  misc_feature 1..16: note = synthetic [barcode part1]
  source 1..16: mol_type = other DNA
cgaagaccagagatag

SEQ ID NO: 24592 - DNA, 16 bp, synthetic construct
  misc_feature 1..16: note = synthetic [barcode part1]
  source 1..16: mol_type = other DNA
gaggcaagtagtgaac

SEQ ID NO: 24593 - DNA, 16 bp, synthetic construct
  misc_feature 1..16: note = synthetic [barcode part1]
  source 1..16: mol_type = other DNA
tcgaacgttcactgtt

SEQ ID NO: 24594 - DNA, 16 bp, synthetic construct
  misc_feature 1..16: note = synthetic [barcode part1]
  source 1..16: mol_type = other DNA
atctgaggtgaacctc

SEQ ID NO: 24595 - DNA, 16 bp, synthetic construct
  misc_feature 1..16: note = synthetic [barcode part1]
  source 1..16: mol_type = other DNA
gtcaggtgacacgagt

SEQ ID NO: 24596 - DNA, 16 bp, synthetic construct
  misc_feature 1..16: note = synthetic [barcode part1]
  source 1..16: mol_type = other DNA
aacttggacactcttc

SEQ ID NO: 24597 - DNA, 16 bp, synthetic construct
  misc_feature 1..16: note = synthetic [barcode part1]
  source 1..16: mol_type = other DNA
cgatctccggtatacc

SEQ ID NO: 24598 - DNA, 16 bp, synthetic construct
  misc_feature 1..16: note = synthetic [barcode part1]
  source 1..16: mol_type = other DNA
cgtctgttaccgcaac

SEQ ID NO: 24599 - DNA, 16 bp, synthetic construct
  misc_feature 1..16: note = synthetic [barcode part1]
  source 1..16: mol_type = other DNA
caggacttcttgaggt

SEQ ID NO: 24600 - DNA, 16 bp, synthetic construct
  misc_feature 1..16: note = synthetic [barcode part1]
  source 1..16: mol_type = other DNA
actcgaagaacgacgc

SEQ ID NO: 24601 - DNA, 16 bp, synthetic construct
  misc_feature 1..16: note = synthetic [barcode part1]
  source 1..16: mol_type = other DNA
gaccagataggaagtg

SEQ ID NO: 24602 - DNA, 16 bp, synthetic construct
  misc_feature 1..16: note = synthetic [barcode part1]
  source 1..16: mol_type = other DNA
agtgtacgttgcacac

SEQ ID NO: 24603 - DNA, 16 bp, synthetic construct
  misc_feature 1..16: note = synthetic [barcode part1]
  source 1..16: mol_type = other DNA
caatcggtcaaggtct

SEQ ID NO: 24604 - DNA, 16 bp, synthetic construct
  misc_feature 1..16: note = synthetic [barcode part1]
  source 1..16: mol_type = other DNA
gacactggatcctagt

SEQ ID NO: 24605 - DNA, 16 bp, synthetic construct
  misc_feature 1..16: note = synthetic [barcode part1]
  source 1..16: mol_type = other DNA
gtgttcagagtggcag

SEQ ID NO: 24606 - DNA, 16 bp, synthetic construct
  misc_feature 1..16: note = synthetic [barcode part1]
  source 1..16: mol_type = other DNA
ccggatattattccgt

SEQ ID NO: 24607 - DNA, 16 bp, synthetic construct
  misc_feature 1..16: note = synthetic [barcode part1]
  source 1..16: mol_type = other DNA
cctcctaatagtcgcg

SEQ ID NO: 24608 - DNA, 16 bp, synthetic construct
  misc_feature 1..16: note = synthetic [barcode part1]
  source 1..16: mol_type = other DNA
cctaatccggtgtatt

SEQ ID NO: 24609 - DNA, 16 bp, synthetic construct
  misc_feature 1..16: note = synthetic [barcode part1]
  source 1..16: mol_type = other DNA
ttgattcggcggtaac

SEQ ID NO: 24610 - DNA, 16 bp, synthetic construct
  misc_feature 1..16: note = synthetic [barcode part1]
  source 1..16: mol_type = other DNA
gcgaatccggttctct

SEQ ID NO: 24611 - DNA, 16 bp, synthetic construct
  misc_feature 1..16: note = synthetic [barcode part1]
  source 1..16: mol_type = other DNA
gaaggtaacagttcgt

SEQ ID NO: 24612 - DNA, 16 bp, synthetic construct
  misc_feature 1..16: note = synthetic [barcode part1]
  source 1..16: mol_type = other DNA
cgactcttgtagttac

SEQ ID NO: 24613 - DNA, 16 bp, synthetic construct
  misc_feature 1..16: note = synthetic [barcode part1]
  source 1..16: mol_type = other DNA
gtcgcagttgcctatc

SEQ ID NO: 24614 - DNA, 16 bp, synthetic construct
  misc_feature 1..16: note = synthetic [barcode part1]
  source 1..16: mol_type = other DNA
ttctgtgaccaggcct

SEQ ID NO: 24615 - DNA, 16 bp, synthetic construct
  misc_feature 1..16: note = synthetic [barcode part1]
  source 1..16: mol_type = other DNA
tactgaggcaaggacc

SEQ ID NO: 24616 - DNA, 16 bp, synthetic construct
  misc_feature 1..16: note = synthetic [barcode part1]
  source 1..16: mol_type = other DNA
tcgaatcgaccactag

SEQ ID NO: 24617 - DNA, 16 bp, synthetic construct
  misc_feature 1..16: note = synthetic [barcode part1]
  source 1..16: mol_type = other DNA
atcacagtggagtctc

SEQ ID NO: 24618 - DNA, 16 bp, synthetic construct
  misc_feature 1..16: note = synthetic [barcode part1]
  source 1..16: mol_type = other DNA
cgatagtgtataggac

SEQ ID NO: 24619 - DNA, 16 bp, synthetic construct
  misc_feature 1..16: note = synthetic [barcode part1]
  source 1..16: mol_type = other DNA
gttcgatctccacacg

SEQ ID NO: 24620 - DNA, 16 bp, synthetic construct
  misc_feature 1..16: note = synthetic [barcode part1]
  source 1..16: mol_type = other DNA
cactgttggatcgagt

SEQ ID NO: 24621 - DNA, 16 bp, synthetic construct
  misc_feature 1..16: note = synthetic [barcode part1]
  source 1..16: mol_type = other DNA
gaggatcagtcaagag

SEQ ID NO: 24622 - DNA, 16 bp, synthetic construct
  misc_feature 1..16: note = synthetic [barcode part1]
  source 1..16: mol_type = other DNA
ccaacgatatccttgt

SEQ ID NO: 24623 - DNA, 16 bp, synthetic construct
  misc_feature 1..16: note = synthetic [barcode part1]
  source 1..16: mol_type = other DNA
cctgcgttgtactctt

SEQ ID NO: 24624 - DNA, 16 bp, synthetic construct
  misc_feature 1..16: note = synthetic [barcode part1]
  source 1..16: mol_type = other DNA
ccaaggattccactag

SEQ ID NO: 24625 - DNA, 16 bp, synthetic construct
  misc_feature 1..16: note = synthetic [barcode part1]
  source 1..16: mol_type = other DNA
tctgttgcgtagactt

SEQ ID NO: 24626 - DNA, 16 bp, synthetic construct
  misc_feature 1..16: note = synthetic [barcode part1]
  source 1..16: mol_type = other DNA
gtgttgagattcacgc

SEQ ID NO: 24627 - DNA, 16 bp, synthetic construct
  misc_feature 1..16: note = synthetic [barcode part1]
  source 1..16: mol_type = other DNA
gtgaggaatactctcc

SEQ ID NO: 24628 - DNA, 16 bp, synthetic construct
  misc_feature 1..16: note = synthetic [barcode part1]
  source 1..16: mol_type = other DNA
aggttgcgttcttgtt

SEQ ID NO: 24629 - DNA, 16 bp, synthetic construct
  misc_feature 1..16: note = synthetic [barcode part1]
  source 1..16: mol_type = other DNA
cctgtgttggttcgac

SEQ ID NO: 24630 - DNA, 16 bp, synthetic construct
  misc_feature 1..16: note = synthetic [barcode part1]
  source 1..16: mol_type = other DNA
atccgcggttgttctg

SEQ ID NO: 24631 - DNA, 16 bp, synthetic construct
  misc_feature 1..16: note = synthetic [barcode part1]
  source 1..16: mol_type = other DNA
agtaagtcttgaggtg

SEQ ID NO: 24632 - DNA, 16 bp, synthetic construct
  misc_feature 1..16: note = synthetic [barcode part1]
  source 1..16: mol_type = other DNA
gtctgaagatacctgc

SEQ ID NO: 24633 - DNA, 16 bp, synthetic construct
  misc_feature 1..16: note = synthetic [barcode part1]
  source 1..16: mol_type = other DNA
ttgattagtgtgcgcg

SEQ ID NO: 24634 - DNA, 16 bp, synthetic construct
  misc_feature 1..16: note = synthetic [barcode part1]
  source 1..16: mol_type = other DNA
agagaacaacgtacct

SEQ ID NO: 24635 - DNA, 16 bp, synthetic construct
  misc_feature 1..16: note = synthetic [barcode part1]
  source 1..16: mol_type = other DNA
tctcagttcagtgtgt

SEQ ID NO: 24636 - DNA, 16 bp, synthetic construct
  misc_feature 1..16: note = synthetic [barcode part1]
  source 1..16: mol_type = other DNA
gccacgatctatctgc

SEQ ID NO: 24637 - DNA, 16 bp, synthetic construct
  misc_feature 1..16: note = synthetic [barcode part1]
  source 1..16: mol_type = other DNA
agtctgtggtgagacg

SEQ ID NO: 24638 - DNA, 16 bp, synthetic construct
  misc_feature 1..16: note = synthetic [barcode part1]
  source 1..16: mol_type = other DNA
atcgaggtcgatcttg

SEQ ID NO: 24639 - DNA, 16 bp, synthetic construct
  misc_feature 1..16: note = synthetic [barcode part1]
  source 1..16: mol_type = other DNA
aactgtcggactgttg

SEQ ID NO: 24640 - DNA, 16 bp, synthetic construct
  misc_feature 1..16: note = synthetic [barcode part1]
  source 1..16: mol_type = other DNA
gacgatcggttcagtt

SEQ ID NO: 24641 - DNA, 16 bp, synthetic construct
  misc_feature 1..16: note = synthetic [barcode part1]
  source 1..16: mol_type = other DNA
gcaacgactcgtagag

SEQ ID NO: 24642 - DNA, 16 bp, synthetic construct
  misc_feature 1..16: note = synthetic [barcode part1]
  source 1..16: mol_type = other DNA
aagtcgtctaccgaac

SEQ ID NO: 24643 - DNA, 16 bp, synthetic construct
  misc_feature 1..16: note = synthetic [barcode part1]
  source 1..16: mol_type = other DNA
aagtaagttcgagacc

SEQ ID NO: 24644 - DNA, 16 bp, synthetic construct
  misc_feature 1..16: note = synthetic [barcode part1]
  source 1..16: mol_type = other DNA
cagtactacttactcg

SEQ ID NO: 24645 - DNA, 16 bp, synthetic construct
  misc_feature 1..16: note = synthetic [barcode part1]
  source 1..16: mol_type = other DNA
ttaacctgcgactgcc

SEQ ID NO: 24646 - DNA, 16 bp, synthetic construct
  misc_feature 1..16: note = synthetic [barcode part1]
  source 1..16: mol_type = other DNA
gcacgacgtattgatc

SEQ ID NO: 24647 - DNA, 16 bp, synthetic construct
  misc_feature 1..16: note = synthetic [barcode part1]
  source 1..16: mol_type = other DNA
tctgaagtggcactac

SEQ ID NO: 24648 - DNA, 16 bp, synthetic construct
  misc_feature 1..16: note = synthetic [barcode part1]
  source 1..16: mol_type = other DNA
aattgcgccgacttcc

SEQ ID NO: 24649 - DNA, 16 bp, synthetic construct
  misc_feature 1..16: note = synthetic [barcode part1]
  source 1..16: mol_type = other DNA
aaccgtgtgcgcaatt

SEQ ID NO: 24650 - DNA, 16 bp, synthetic construct
  misc_feature 1..16: note = synthetic [barcode part1]
  source 1..16: mol_type = other DNA
tgtggattccgtcacc

SEQ ID NO: 24651 - DNA, 16 bp, synthetic construct
  misc_feature 1..16: note = synthetic [barcode part1]
  source 1..16: mol_type = other DNA
cacaatcgtcgtcctg

SEQ ID NO: 24652 - DNA, 16 bp, synthetic construct
  misc_feature 1..16: note = synthetic [barcode part1]
  source 1..16: mol_type = other DNA
tcaagataggcgaact

SEQ ID NO: 24653 - DNA, 16 bp, synthetic construct
  misc_feature 1..16: note = synthetic [barcode part1]
  source 1..16: mol_type = other DNA
tggcagatacttagag

SEQ ID NO: 24654 - DNA, 16 bp, synthetic construct
  misc_feature 1..16: note = synthetic [barcode part1]
  source 1..16: mol_type = other DNA
gtcagtacgttaacgc

SEQ ID NO: 24655 - DNA, 16 bp, synthetic construct
  misc_feature 1..16: note = synthetic [barcode part1]
  source 1..16: mol_type = other DNA
aatccagtccttgtac

SEQ ID NO: 24656 - DNA, 16 bp, synthetic construct
  misc_feature 1..16: note = synthetic [barcode part1]
  source 1..16: mol_type = other DNA
ataacacgtgtcgcgt

SEQ ID NO: 24657 - DNA, 16 bp, synthetic construct
  misc_feature 1..16: note = synthetic [barcode part1]
  source 1..16: mol_type = other DNA
gttctgccttagttcc

SEQ ID NO: 24658 - DNA, 16 bp, synthetic construct
  misc_feature 1..16: note = synthetic [barcode part1]
  source 1..16: mol_type = other DNA
ccacttcttgatacag

SEQ ID NO: 24659 - DNA, 16 bp, synthetic construct
  misc_feature 1..16: note = synthetic [barcode part1]
  source 1..16: mol_type = other DNA
gtcggatccgtacctt

SEQ ID NO: 24660 - DNA, 16 bp, synthetic construct
  misc_feature 1..16: note = synthetic [barcode part1]
  source 1..16: mol_type = other DNA
gtacgtggaagttcct

SEQ ID NO: 24661 - DNA, 16 bp, synthetic construct
  misc_feature 1..16: note = synthetic [barcode part1]
  source 1..16: mol_type = other DNA
ccttaatagtcgtgtc

SEQ ID NO: 24662 - DNA, 16 bp, synthetic construct
  misc_feature 1..16: note = synthetic [barcode part1]
  source 1..16: mol_type = other DNA
atccggactacaggtt

SEQ ID NO: 24663 - DNA, 16 bp, synthetic construct
  misc_feature 1..16: note = synthetic [barcode part1]
  source 1..16: mol_type = other DNA
tcacactcgttaggtt

SEQ ID NO: 24664 - DNA, 16 bp, synthetic construct
  misc_feature 1..16: note = synthetic [barcode part1]
  source 1..16: mol_type = other DNA
agtagaagactcgcgc

SEQ ID NO: 24665 - DNA, 16 bp, synthetic construct
  misc_feature 1..16: note = synthetic [barcode part1]
  source 1..16: mol_type = other DNA
gtgtgtgtggttgact

SEQ ID NO: 24666 - DNA, 16 bp, synthetic construct
  misc_feature 1..16: note = synthetic [barcode part1]
  source 1..16: mol_type = other DNA
gatcagtacaccgtac

SEQ ID NO: 24667 - DNA, 16 bp, synthetic construct
  misc_feature 1..16: note = synthetic [barcode part1]
  source 1..16: mol_type = other DNA
ataggatacgagtctg

SEQ ID NO: 24668 - DNA, 16 bp, synthetic construct
  misc_feature 1..16: note = synthetic [barcode part1]
  source 1..16: mol_type = other DNA
cagagaacgattacgt

SEQ ID NO: 24669 - DNA, 16 bp, synthetic construct
  misc_feature 1..16: note = synthetic [barcode part1]
  source 1..16: mol_type = other DNA
tacacagtaggaagtc

SEQ ID NO: 24670 - DNA, 16 bp, synthetic construct
  misc_feature 1..16: note = synthetic [barcode part1]
  source 1..16: mol_type = other DNA
cgtggcaagattctac

SEQ ID NO: 24671 - DNA, 16 bp, synthetic construct
  misc_feature 1..16: note = synthetic [barcode part1]
  source 1..16: mol_type = other DNA
taaggcggagtactcg

SEQ ID NO: 24672 - DNA, 16 bp, synthetic construct
  misc_feature 1..16: note = synthetic [barcode part1]
  source 1..16: mol_type = other DNA
cctcggttgatctctt

SEQ ID NO: 24673 - DNA, 16 bp, synthetic construct
  misc_feature 1..16: note = synthetic [barcode part1]
  source 1..16: mol_type = other DNA
tgcactaccttaactg

SEQ ID NO: 24674 - DNA, 16 bp, synthetic construct
  misc_feature 1..16: note = synthetic [barcode part1]
  source 1..16: mol_type = other DNA
attgtgcactatcctg

SEQ ID NO: 24675 - DNA, 16 bp, synthetic construct
  misc_feature 1..16: note = synthetic [barcode part1]
  source 1..16: mol_type = other DNA
caatcttgtgtgttgc

SEQ ID NO: 24676 - DNA, 16 bp, synthetic construct
  misc_feature 1..16: note = synthetic [barcode part1]
  source 1..16: mol_type = other DNA
tctcgaactattcacg

SEQ ID NO: 24677 - DNA, 16 bp, synthetic construct
  misc_feature 1..16: note = synthetic [barcode part1]
  source 1..16: mol_type = other DNA
atccagaatctgcgac

SEQ ID NO: 24678 - DNA, 16 bp, synthetic construct
  misc_feature 1..16: note = synthetic [barcode part1]
  source 1..16: mol_type = other DNA
ccggttcttgcgtagt

SEQ ID NO: 24679 - DNA, 16 bp, synthetic construct
  misc_feature 1..16: note = synthetic [barcode part1]
  source 1..16: mol_type = other DNA
acgattaggttcctct

SEQ ID NO: 24680 - DNA, 16 bp, synthetic construct
  misc_feature 1..16: note = synthetic [barcode part1]
  source 1..16: mol_type = other DNA
ttgacgaagtggtctc

SEQ ID NO: 24681 - DNA, 16 bp, synthetic construct
  misc_feature 1..16: note = synthetic [barcode part1]
  source 1..16: mol_type = other DNA
cggcaacagaacgtac

SEQ ID NO: 24682 - DNA, 16 bp, synthetic construct
  misc_feature 1..16: note = synthetic [barcode part1]
  source 1..16: mol_type = other DNA
gcctggtcgataattg

SEQ ID NO: 24683 - DNA, 16 bp, synthetic construct
  misc_feature 1..16: note = synthetic [barcode part1]
  source 1..16: mol_type = other DNA
tgaccgaggaactctt

SEQ ID NO: 24684 - DNA, 16 bp, synthetic construct
  misc_feature 1..16: note = synthetic [barcode part1]
  source 1..16: mol_type = other DNA
atctcgtatccgagtt

SEQ ID NO: 24685 - DNA, 16 bp, synthetic construct
  misc_feature 1..16: note = synthetic [barcode part1]
  source 1..16: mol_type = other DNA
agactaacgaccgcag

SEQ ID NO: 24686 - DNA, 16 bp, synthetic construct
  misc_feature 1..16: note = synthetic [barcode part1]
  source 1..16: mol_type = other DNA
aatagacaggtcctag

SEQ ID NO: 24687 - DNA, 16 bp, synthetic construct
  misc_feature 1..16: note = synthetic [barcode part1]
  source 1..16: mol_type = other DNA
cgtgcacgattctaag

SEQ ID NO: 24688 - DNA, 16 bp, synthetic construct
  misc_feature 1..16: note = synthetic [barcode part1]
  source 1..16: mol_type = other DNA
gtaagaagttgccggc

SEQ ID NO: 24689 - DNA, 16 bp, synthetic construct
  misc_feature 1..16: note = synthetic [barcode part1]
  source 1..16: mol_type = other DNA
tgcggatattccgcct

SEQ ID NO: 24690 - DNA, 16 bp, synthetic construct
  misc_feature 1..16: note = synthetic [barcode part1]
  source 1..16: mol_type = other DNA
gcaacgtctagttggt

SEQ ID NO: 24691 - DNA, 16 bp, synthetic construct
  misc_feature 1..16: note = synthetic [barcode part1]
  source 1..16: mol_type = other DNA
gatatcgtcgaccaac

SEQ ID NO: 24692 - DNA, 16 bp, synthetic construct
  misc_feature 1..16: note = synthetic [barcode part1]
  source 1..16: mol_type = other DNA
tccacgttgacgatcc

SEQ ID NO: 24693 - DNA, 16 bp, synthetic construct
  misc_feature 1..16: note = synthetic [barcode part1]
  source 1..16: mol_type = other DNA
ttcggagtgtggtact

SEQ ID NO: 24694 - DNA, 16 bp, synthetic construct
  misc_feature 1..16: note = synthetic [barcode part1]
  source 1..16: mol_type = other DNA
gagtgccgaacgatac

SEQ ID NO: 24695 - DNA, 16 bp, synthetic construct
  misc_feature 1..16: note = synthetic [barcode part1]
  source 1..16: mol_type = other DNA
acaagtagttccgaag

SEQ ID NO: 24696 - DNA, 16 bp, synthetic construct
  misc_feature 1..16: note = synthetic [barcode part1]
  source 1..16: mol_type = other DNA
agaagtggcaaggact

SEQ ID NO: 24697 - DNA, 16 bp, synthetic construct
  misc_feature 1..16: note = synthetic [barcode part1]
  source 1..16: mol_type = other DNA
ccttgtattgaaccgt

SEQ ID NO: 24698 - DNA, 16 bp, synthetic construct
  misc_feature 1..16: note = synthetic [barcode part1]
  source 1..16: mol_type = other DNA
tctcctcagtcgatct

SEQ ID NO: 24699 - DNA, 16 bp, synthetic construct
  misc_feature 1..16: note = synthetic [barcode part1]
  source 1..16: mol_type = other DNA
tagacacgactgtgtc

SEQ ID NO: 24700 - DNA, 16 bp, synthetic construct
  misc_feature 1..16: note = synthetic [barcode part1]
  source 1..16: mol_type = other DNA
agaagttattgacgcg

SEQ ID NO: 24701 - DNA, 16 bp, synthetic construct
  misc_feature 1..16: note = synthetic [barcode part1]
  source 1..16: mol_type = other DNA
tcggaactatcgtggt

SEQ ID NO: 24702 - DNA, 16 bp, synthetic construct
  misc_feature 1..16: note = synthetic [barcode part1]
  source 1..16: mol_type = other DNA
tacctacaccttgagt

SEQ ID NO: 24703 - DNA, 16 bp, synthetic construct
  misc_feature 1..16: note = synthetic [barcode part1]
  source 1..16: mol_type = other DNA
caatcacggtgacgag

SEQ ID NO: 24704 - DNA, 16 bp, synthetic construct
  misc_feature 1..16: note = synthetic [barcode part1]
  source 1..16: mol_type = other DNA
actacgtattacctcg

SEQ ID NO: 24705 - DNA, 16 bp, synthetic construct
  misc_feature 1..16: note = synthetic [barcode part1]
  source 1..16: mol_type = other DNA
tactcgtgcgacgtct

SEQ ID NO: 24706 - DNA, 16 bp, synthetic construct
  misc_feature 1..16: note = synthetic [barcode part1]
  source 1..16: mol_type = other DNA
gtgagtcttctgccgt

SEQ ID NO: 24707 - DNA, 16 bp, synthetic construct
  misc_feature 1..16: note = synthetic [barcode part1]
  source 1..16: mol_type = other DNA
taagtacttggcgcgt

SEQ ID NO: 24708 - DNA, 16 bp, synthetic construct
  misc_feature 1..16: note = synthetic [barcode part1]
  source 1..16: mol_type = other DNA
caaggacgtctggtag

SEQ ID NO: 24709 - DNA, 16 bp, synthetic construct
  misc_feature 1..16: note = synthetic [barcode part1]
  source 1..16: mol_type = other DNA
ccgttcgactccaagt

SEQ ID NO: 24710 - DNA, 16 bp, synthetic construct
  misc_feature 1..16: note = synthetic [barcode part1]
  source 1..16: mol_type = other DNA
gtcacgcaactatacg

SEQ ID NO: 24711 - DNA, 16 bp, synthetic construct
  misc_feature 1..16: note = synthetic [barcode part1]
  source 1..16: mol_type = other DNA
gacacaccacaactgt

SEQ ID NO: 24712 - DNA, 16 bp, synthetic construct
  misc_feature 1..16: note = synthetic [barcode part1]
  source 1..16: mol_type = other DNA
agtctctgattcgtgt

SEQ ID NO: 24713 - DNA, 16 bp, synthetic construct
  misc_feature 1..16: note = synthetic [barcode part1]
  source 1..16: mol_type = other DNA
tgcctgcgaactctgt

SEQ ID NO: 24714 - DNA, 16 bp, synthetic construct
  misc_feature 1..16: note = synthetic [barcode part1]
  source 1..16: mol_type = other DNA
actatctcgtcgttcc

SEQ ID NO: 24715 - DNA, 16 bp, synthetic construct
  misc_feature 1..16: note = synthetic [barcode part1]
  source 1..16: mol_type = other DNA
gcgtgtagaagtcctt

SEQ ID NO: 24716 - DNA, 16 bp, synthetic construct
  misc_feature 1..16: note = synthetic [barcode part1]
  source 1..16: mol_type = other DNA
ccgtaattggttggtg

SEQ ID NO: 24717 - DNA, 16 bp, synthetic construct
  misc_feature 1..16: note = synthetic [barcode part1]
  source 1..16: mol_type = other DNA
acctggacagaatagt

SEQ ID NO: 24718 - DNA, 16 bp, synthetic construct
  misc_feature 1..16: note = synthetic [barcode part1]
  source 1..16: mol_type = other DNA
attcttcctggttccg

SEQ ID NO: 24719 - DNA, 16 bp, synthetic construct
  misc_feature 1..16: note = synthetic [barcode part1]
  source 1..16: mol_type = other DNA
aggcagagaaccttgc

SEQ ID NO: 24720 - DNA, 16 bp, synthetic construct
  misc_feature 1..16: note = synthetic [barcode part1]
  source 1..16: mol_type = other DNA
tccagtctgtgtggtc

SEQ ID NO: 24721 - DNA, 16 bp, synthetic construct
  misc_feature 1..16: note = synthetic [barcode part1]
  source 1..16: mol_type = other DNA
gccttctaaccttctg

SEQ ID NO: 24722 - DNA, 16 bp, synthetic construct
  misc_feature 1..16: note = synthetic [barcode part1]
  source 1..16: mol_type = other DNA
tgcctggatacaactg

SEQ ID NO: 24723 - DNA, 16 bp, synthetic construct
  misc_feature 1..16: note = synthetic [barcode part1]
  source 1..16: mol_type = other DNA
gtattccagaggcact

SEQ ID NO: 24724 - DNA, 16 bp, synthetic construct
  misc_feature 1..16: note = synthetic [barcode part1]
  source 1..16: mol_type = other DNA
agattcgcggaaggtc

SEQ ID NO: 24725 - DNA, 16 bp, synthetic construct
  misc_feature 1..16: note = synthetic [barcode part1]
  source 1..16: mol_type = other DNA
gagaggtagtggtaac

SEQ ID NO: 24726 - DNA, 16 bp, synthetic construct
  misc_feature 1..16: note = synthetic [barcode part1]
  source 1..16: mol_type = other DNA
gacggagtcttcgatt

SEQ ID NO: 24727 - DNA, 16 bp, synthetic construct
  misc_feature 1..16: note = synthetic [barcode part1]
  source 1..16: mol_type = other DNA
agtctacctgtgagtg

SEQ ID NO: 24728 - DNA, 16 bp, synthetic construct
  misc_feature 1..16: note = synthetic [barcode part1]
  source 1..16: mol_type = other DNA
agacgtgttgaactag

SEQ ID NO: 24729 - DNA, 16 bp, synthetic construct
  misc_feature 1..16: note = synthetic [barcode part1]
  source 1..16: mol_type = other DNA
ttaagatataggcggc

SEQ ID NO: 24730 - DNA, 16 bp, synthetic construct
  misc_feature 1..16: note = synthetic [barcode part1]
  source 1..16: mol_type = other DNA
cacaacggtgaatagt

SEQ ID NO: 24731 - DNA, 16 bp, synthetic construct
  misc_feature 1..16: note = synthetic [barcode part1]
  source 1..16: mol_type = other DNA
cactccgattcacggt

SEQ ID NO: 24732 - DNA, 16 bp, synthetic construct
  misc_feature 1..16: note = synthetic [barcode part1]
  source 1..16: mol_type = other DNA
cacagtggtgaacggt

SEQ ID NO: 24733 - DNA, 16 bp, synthetic construct
  misc_feature 1..16: note = synthetic [barcode part1]
  source 1..16: mol_type = other DNA
atcctcgttgtgttcc

SEQ ID NO: 24734 - DNA, 16 bp, synthetic construct
  misc_feature 1..16: note = synthetic [barcode part1]
  source 1..16: mol_type = other DNA
taacggtatacgagac

SEQ ID NO: 24735 - DNA, 16 bp, synthetic construct
  misc_feature 1..16: note = synthetic [barcode part1]
  source 1..16: mol_type = other DNA
agttgcaacaccaacc

SEQ ID NO: 24736 - DNA, 16 bp, synthetic construct
  misc_feature 1..16: note = synthetic [barcode part1]
  source 1..16: mol_type = other DNA
gttgcgacacttactt

SEQ ID NO: 24737 - DNA, 16 bp, synthetic construct
  misc_feature 1..16: note = synthetic [barcode part1]
  source 1..16: mol_type = other DNA
gcacgtcctatacaag

SEQ ID NO: 24738 - DNA, 16 bp, synthetic construct
  misc_feature 1..16: note = synthetic [barcode part1]
  source 1..16: mol_type = other DNA
ttgacgtcctctcgag

SEQ ID NO: 24739 - DNA, 16 bp, synthetic construct
  misc_feature 1..16: note = synthetic [barcode part1]
  source 1..16: mol_type = other DNA
aagaggtagaccaggt

SEQ ID NO: 24740 - DNA, 16 bp, synthetic construct
  misc_feature 1..16: note = synthetic [barcode part1]
  source 1..16: mol_type = other DNA
gtctcacacaactatc

SEQ ID NO: 24741 - DNA, 16 bp, synthetic construct
  misc_feature 1..16: note = synthetic [barcode part1]
  source 1..16: mol_type = other DNA
tctaatctagtacgcc

SEQ ID NO: 24742 - DNA, 16 bp, synthetic construct
  misc_feature 1..16: note = synthetic [barcode part1]
  source 1..16: mol_type = other DNA
gtgccttcaatccgac

SEQ ID NO: 24743 - DNA, 16 bp, synthetic construct
  misc_feature 1..16: note = synthetic [barcode part1]
  source 1..16: mol_type = other DNA
tggaatcgccaactac

SEQ ID NO: 24744 - DNA, 16 bp, synthetic construct
  misc_feature 1..16: note = synthetic [barcode part1]
  source 1..16: mol_type = other DNA
ccggcaacaagagtac

SEQ ID NO: 24745 - DNA, 16 bp, synthetic construct
  misc_feature 1..16: note = synthetic [barcode part1]
  source 1..16: mol_type = other DNA
tgcaaggtagtggtcg

SEQ ID NO: 24746 - DNA, 16 bp, synthetic construct
  misc_feature 1..16: note = synthetic [barcode part1]
  source 1..16: mol_type = other DNA
tattcctcggtaatcg

SEQ ID NO: 24747 - DNA, 16 bp, synthetic construct
  misc_feature 1..16: note = synthetic [barcode part1]
  source 1..16: mol_type = other DNA
gtgtatcacttggacg

SEQ ID NO: 24748 - DNA, 16 bp, synthetic construct
  misc_feature 1..16: note = synthetic [barcode part1]
  source 1..16: mol_type = other DNA
gttggcagtctgagtt

SEQ ID NO: 24749 - DNA, 16 bp, synthetic construct
  misc_feature 1..16: note = synthetic [barcode part1]
  source 1..16: mol_type = other DNA
tcagtggactcctatt

SEQ ID NO: 24750 - DNA, 16 bp, synthetic construct
  misc_feature 1..16: note = synthetic [barcode part1]
  source 1..16: mol_type = other DNA
ccgatagatccttact

SEQ ID NO: 24751 - DNA, 16 bp, synthetic construct
  misc_feature 1..16: note = synthetic [barcode part1]
  source 1..16: mol_type = other DNA
gcactgaagaagttgt

SEQ ID NO: 24752 - DNA, 16 bp, synthetic construct
  misc_feature 1..16: note = synthetic [barcode part1]
  source 1..16: mol_type = other DNA
atagaggcacagaggt

SEQ ID NO: 24753 - DNA, 16 bp, synthetic construct
  misc_feature 1..16: note = synthetic [barcode part1]
  source 1..16: mol_type = other DNA
ccagttcagatcgaac

SEQ ID NO: 24754 - DNA, 16 bp, synthetic construct
  misc_feature 1..16: note = synthetic [barcode part1]
  source 1..16: mol_type = other DNA
caccgtggattaactg

SEQ ID NO: 24755 - DNA, 16 bp, synthetic construct
  misc_feature 1..16: note = synthetic [barcode part1]
  source 1..16: mol_type = other DNA
gttgccgaagagtacg

SEQ ID NO: 24756 - DNA, 16 bp, synthetic construct
  misc_feature 1..16: note = synthetic [barcode part1]
  source 1..16: mol_type = other DNA
gaggtaatcacagact

SEQ ID NO: 24757 - DNA, 16 bp, synthetic construct
  misc_feature 1..16: note = synthetic [barcode part1]
  source 1..16: mol_type = other DNA
cgttggatactggact

SEQ ID NO: 24758 - DNA, 16 bp, synthetic construct
  misc_feature 1..16: note = synthetic [barcode part1]
  source 1..16: mol_type = other DNA
atctcacctaccacct

SEQ ID NO: 24759 - DNA, 16 bp, synthetic construct
  misc_feature 1..16: note = synthetic [barcode part1]
  source 1..16: mol_type = other DNA
tggatcagtataaggc

SEQ ID NO: 24760 - DNA, 16 bp, synthetic construct
  misc_feature 1..16: note = synthetic [barcode part1]
  source 1..16: mol_type = other DNA
tagacgtcacaagtcc

SEQ ID NO: 24761 - DNA, 16 bp, synthetic construct
  misc_feature 1..16: note = synthetic [barcode part1]
  source 1..16: mol_type = other DNA
agaacgcgttaggtcg

SEQ ID NO: 24762 - DNA, 16 bp, synthetic construct
  misc_feature 1..16: note = synthetic [barcode part1]
  source 1..16: mol_type = other DNA
gaggactgttggtacg

SEQ ID NO: 24763 - DNA, 16 bp, synthetic construct
  misc_feature 1..16: note = synthetic [barcode part1]
  source 1..16: mol_type = other DNA
aacgattcggttcggt

SEQ ID NO: 24764 - DNA, 16 bp, synthetic construct
  misc_feature 1..16: note = synthetic [barcode part1]
  source 1..16: mol_type = other DNA
gactcagaattgccgt

SEQ ID NO: 24765 - DNA, 16 bp, synthetic construct
  misc_feature 1..16: note = synthetic [barcode part1]
  source 1..16: mol_type = other DNA
caacttcctggaaggt

SEQ ID NO: 24766 - DNA, 16 bp, synthetic construct
  misc_feature 1..16: note = synthetic [barcode part1]
  source 1..16: mol_type = other DNA
aactgtagtcggcgtt

SEQ ID NO: 24767 - DNA, 16 bp, synthetic construct
  misc_feature 1..16: note = synthetic [barcode part1]
  source 1..16: mol_type = other DNA
gtcaggaccttaactg

SEQ ID NO: 24768 - DNA, 16 bp, synthetic construct
  misc_feature 1..16: note = synthetic [barcode part1]
  source 1..16: mol_type = other DNA
caaccaggcgtatact

SEQ ID NO: 24769 - DNA, 16 bp, synthetic construct
  misc_feature 1..16: note = synthetic [barcode part1]
  source 1..16: mol_type = other DNA
cgtcgtcgagttaagt

SEQ ID NO: 24770 - DNA, 16 bp, synthetic construct
  misc_feature 1..16: note = synthetic [barcode part1]
  source 1..16: mol_type = other DNA
cggttcttaatacgtc

SEQ ID NO: 24771 - DNA, 16 bp, synthetic construct
  misc_feature 1..16: note = synthetic [barcode part1]
  source 1..16: mol_type = other DNA
ttccagagtaggtaag

SEQ ID NO: 24772 - DNA, 16 bp, synthetic construct
  misc_feature 1..16: note = synthetic [barcode part1]
  source 1..16: mol_type = other DNA
cgaaggatacaactac

SEQ ID NO: 24773 - DNA, 16 bp, synthetic construct
  misc_feature 1..16: note = synthetic [barcode part1]
  source 1..16: mol_type = other DNA
atcggtacgtcctgtc

SEQ ID NO: 24774 - DNA, 16 bp, synthetic construct
  misc_feature 1..16: note = synthetic [barcode part1]
  source 1..16: mol_type = other DNA
aggacgtgtgttcttg

SEQ ID NO: 24775 - DNA, 16 bp, synthetic construct
  misc_feature 1..16: note = synthetic [barcode part1]
  source 1..16: mol_type = other DNA
gagaggtccacacaac

SEQ ID NO: 24776 - DNA, 16 bp, synthetic construct
  misc_feature 1..16: note = synthetic [barcode part1]
  source 1..16: mol_type = other DNA
tgtagacagacctacc

SEQ ID NO: 24777 - DNA, 16 bp, synthetic construct
  misc_feature 1..16: note = synthetic [barcode part1]
  source 1..16: mol_type = other DNA
tgtgcggacttctcac

SEQ ID NO: 24778 - DNA, 16 bp, synthetic construct
  misc_feature 1..16: note = synthetic [barcode part1]
  source 1..16: mol_type = other DNA
cgagagatcaatctcc

SEQ ID NO: 24779 - DNA, 16 bp, synthetic construct
  misc_feature 1..16: note = synthetic [barcode part1]
  source 1..16: mol_type = other DNA
tgtcactggacgtcct

SEQ ID NO: 24780 - DNA, 16 bp, synthetic construct
  misc_feature 1..16: note = synthetic [barcode part1]
  source 1..16: mol_type = other DNA
gttctactattggcgt

SEQ ID NO: 24781 - DNA, 16 bp, synthetic construct
  misc_feature 1..16: note = synthetic [barcode part1]
  source 1..16: mol_type = other DNA
ccactacgcagattcc

SEQ ID NO: 24782 - DNA, 16 bp, synthetic construct
  misc_feature 1..16: note = synthetic [barcode part1]
  source 1..16: mol_type = other DNA
agttaatcggcgtcac

SEQ ID NO: 24783 - DNA, 16 bp, synthetic construct
  misc_feature 1..16: note = synthetic [barcode part1]
  source 1..16: mol_type = other DNA
tagacaacaggcagag

SEQ ID NO: 24784 - DNA, 16 bp, synthetic construct
  misc_feature 1..16: note = synthetic [barcode part1]
  source 1..16: mol_type = other DNA
tcgatagtaaggacac

SEQ ID NO: 24785 - DNA, 16 bp, synthetic construct
  misc_feature 1..16: note = synthetic [barcode part1]
  source 1..16: mol_type = other DNA
gaacgtcgccttgtct

SEQ ID NO: 24786 - DNA, 16 bp, synthetic construct
  misc_feature 1..16: note = synthetic [barcode part1]
  source 1..16: mol_type = other DNA
tggtggcaggagtatc

SEQ ID NO: 24787 - DNA, 16 bp, synthetic construct
  misc_feature 1..16: note = synthetic [barcode part1]
  source 1..16: mol_type = other DNA
acaggaccttggacag

SEQ ID NO: 24788 - DNA, 16 bp, synthetic construct
  misc_feature 1..16: note = synthetic [barcode part1]
  source 1..16: mol_type = other DNA
tgaagaacgatcgtac

SEQ ID NO: 24789 - DNA, 16 bp, synthetic construct
  misc_feature 1..16: note = synthetic [barcode part1]
  source 1..16: mol_type = other DNA
tgataccagtaccacg

SEQ ID NO: 24790 - DNA, 16 bp, synthetic construct
  misc_feature 1..16: note = synthetic [barcode part1]
  source 1..16: mol_type = other DNA
tcctgtataacgacct

SEQ ID NO: 24791 - DNA, 16 bp, synthetic construct
  misc_feature 1..16: note = synthetic [barcode part1]
  source 1..16: mol_type = other DNA
cctgaagttgaggtct

SEQ ID NO: 24792 - DNA, 16 bp, synthetic construct
  misc_feature 1..16: note = synthetic [barcode part1]
  source 1..16: mol_type = other DNA
gattcgtcggaacgag

SEQ ID NO: 24793 - DNA, 16 bp, synthetic construct
  misc_feature 1..16: note = synthetic [barcode part1]
  source 1..16: mol_type = other DNA
caacacttattcaccg

SEQ ID NO: 24794 - DNA, 16 bp, synthetic construct
  misc_feature 1..16: note = synthetic [barcode part1]
  source 1..16: mol_type = other DNA
tgtacgtaaccgatcg

SEQ ID NO: 24795 - DNA, 16 bp, synthetic construct
  misc_feature 1..16: note = synthetic [barcode part1]
  source 1..16: mol_type = other DNA
gaatatcctgccttgt

SEQ ID NO: 24796 - DNA, 16 bp, synthetic construct
  misc_feature 1..16: note = synthetic [barcode part1]
  source 1..16: mol_type = other DNA
aacgaccggtctagtt

SEQ ID NO: 24797 - DNA, 16 bp, synthetic construct
  misc_feature 1..16: note = synthetic [barcode part1]
  source 1..16: mol_type = other DNA
aaccactctcaacgag

SEQ ID NO: 24798 - DNA, 16 bp, synthetic construct
  misc_feature 1..16: note = synthetic [barcode part1]
  source 1..16: mol_type = other DNA
gatactcctgtcgtcg

SEQ ID NO: 24799 - DNA, 16 bp, synthetic construct
  misc_feature 1..16: note = synthetic [barcode part1]
  source 1..16: mol_type = other DNA
tcctacggtgttcttc

SEQ ID NO: 24800 - DNA, 16 bp, synthetic construct
  misc_feature 1..16: note = synthetic [barcode part1]
  source 1..16: mol_type = other DNA
tgtcgattcttaaccg

SEQ ID NO: 24801 - DNA, 16 bp, synthetic construct
  misc_feature 1..16: note = synthetic [barcode part1]
  source 1..16: mol_type = other DNA
taggtctcgagtatcg

SEQ ID NO: 24802 - DNA, 16 bp, synthetic construct
  misc_feature 1..16: note = synthetic [barcode part1]
  source 1..16: mol_type = other DNA
cgaacgtagaacaact

SEQ ID NO: 24803 - DNA, 16 bp, synthetic construct
  misc_feature 1..16: note = synthetic [barcode part1]
  source 1..16: mol_type = other DNA
gtgtggagagtgtaag

SEQ ID NO: 24804 - DNA, 16 bp, synthetic construct
  misc_feature 1..16: note = synthetic [barcode part1]
  source 1..16: mol_type = other DNA
gcaagtgacttgtctg

SEQ ID NO: 24805 - DNA, 16 bp, synthetic construct
  misc_feature 1..16: note = synthetic [barcode part1]
  source 1..16: mol_type = other DNA
tggttggaccacgatt

SEQ ID NO: 24806 - DNA, 16 bp, synthetic construct
  misc_feature 1..16: note = synthetic [barcode part1]
  source 1..16: mol_type = other DNA
attggtgtctgatctc

SEQ ID NO: 24807 - DNA, 16 bp, synthetic construct
  misc_feature 1..16: note = synthetic [barcode part1]
  source 1..16: mol_type = other DNA
gttagtgagacgttcc

SEQ ID NO: 24808 - DNA, 16 bp, synthetic construct
  misc_feature 1..16: note = synthetic [barcode part1]
  source 1..16: mol_type = other DNA
tcctgcacggcaattc

SEQ ID NO: 24809 - DNA, 16 bp, synthetic construct
  misc_feature 1..16: note = synthetic [barcode part1]
  source 1..16: mol_type = other DNA
tgaccaacaaccagtc

SEQ ID NO: 24810 - DNA, 16 bp, synthetic construct
  misc_feature 1..16: note = synthetic [barcode part1]
  source 1..16: mol_type = other DNA
agacgacaatcgcgtg

SEQ ID NO: 24811 - DNA, 16 bp, synthetic construct
  misc_feature 1..16: note = synthetic [barcode part1]
  source 1..16: mol_type = other DNA
gtcttgaagagtctcg

SEQ ID NO: 24812 - DNA, 16 bp, synthetic construct
  misc_feature 1..16: note = synthetic [barcode part1]
  source 1..16: mol_type = other DNA
cctgagactaagacct

SEQ ID NO: 24813 - DNA, 16 bp, synthetic construct
  misc_feature 1..16: note = synthetic [barcode part1]
  source 1..16: mol_type = other DNA
cacgattgttattccg

SEQ ID NO: 24814 - DNA, 16 bp, synthetic construct
  misc_feature 1..16: note = synthetic [barcode part1]
  source 1..16: mol_type = other DNA
cgagagaaccgatacc

SEQ ID NO: 24815 - DNA, 16 bp, synthetic construct
  misc_feature 1..16: note = synthetic [barcode part1]
  source 1..16: mol_type = other DNA
tctgtcactaggtgtt

SEQ ID NO: 24816 - DNA, 16 bp, synthetic construct
  misc_feature 1..16: note = synthetic [barcode part1]
  source 1..16: mol_type = other DNA
atctacgactgttctg

SEQ ID NO: 24817 - DNA, 16 bp, synthetic construct
  misc_feature 1..16: note = synthetic [barcode part1]
  source 1..16: mol_type = other DNA
gcaagtccgtagatct

SEQ ID NO: 24818 - DNA, 16 bp, synthetic construct
  misc_feature 1..16: note = synthetic [barcode part1]
  source 1..16: mol_type = other DNA
gtcggtggaattaggc

SEQ ID NO: 24819 - DNA, 16 bp, synthetic construct
  misc_feature 1..16: note = synthetic [barcode part1]
  source 1..16: mol_type = other DNA
tgtcactgttctccgt

SEQ ID NO: 24820 - DNA, 16 bp, synthetic construct
  misc_feature 1..16: note = synthetic [barcode part1]
  source 1..16: mol_type = other DNA
taatcgcgcctctcag

SEQ ID NO: 24821 - DNA, 16 bp, synthetic construct
  misc_feature 1..16: note = synthetic [barcode part1]
  source 1..16: mol_type = other DNA
aagttagtgtacgacg

SEQ ID NO: 24822 - DNA, 16 bp, synthetic construct
  misc_feature 1..16: note = synthetic [barcode part1]
  source 1..16: mol_type = other DNA
agtgttcaccttctag

SEQ ID NO: 24823 - DNA, 16 bp, synthetic construct
  misc_feature 1..16: note = synthetic [barcode part1]
  source 1..16: mol_type = other DNA
gtgacttaggtcactg

SEQ ID NO: 24824 - DNA, 16 bp, synthetic construct
  misc_feature 1..16: note = synthetic [barcode part1]
  source 1..16: mol_type = other DNA
agttgcacagtcacac

SEQ ID NO: 24825 - DNA, 16 bp, synthetic construct
  misc_feature 1..16: note = synthetic [barcode part1]
  source 1..16: mol_type = other DNA
gttgaacaggtgtggc

SEQ ID NO: 24826 - DNA, 16 bp, synthetic construct
  misc_feature 1..16: note = synthetic [barcode part1]
  source 1..16: mol_type = other DNA
agacctgttgtcactt

SEQ ID NO: 24827 - DNA, 16 bp, synthetic construct
  misc_feature 1..16: note = synthetic [barcode part1]
  source 1..16: mol_type = other DNA
cgtctacgcgatactc

SEQ ID NO: 24828 - DNA, 16 bp, synthetic construct
  misc_feature 1..16: note = synthetic [barcode part1]
  source 1..16: mol_type = other DNA
tgaagaaggttgaggc

SEQ ID NO: 24829 - DNA, 16 bp, synthetic construct
  misc_feature 1..16: note = synthetic [barcode part1]
  source 1..16: mol_type = other DNA
acgagagttaggccac

SEQ ID NO: 24830 - DNA, 16 bp, synthetic construct
  misc_feature 1..16: note = synthetic [barcode part1]
  source 1..16: mol_type = other DNA
gtccgaacttactact

SEQ ID NO: 24831 - DNA, 16 bp, synthetic construct
  misc_feature 1..16: note = synthetic [barcode part1]
  source 1..16: mol_type = other DNA
tagtggcgagacgtgt

SEQ ID NO: 24832 - DNA, 16 bp, synthetic construct
  misc_feature 1..16: note = synthetic [barcode part1]
  source 1..16: mol_type = other DNA
gacttgacgtgtctcc

SEQ ID NO: 24833 - DNA, 16 bp, synthetic construct
  misc_feature 1..16: note = synthetic [barcode part1]
  source 1..16: mol_type = other DNA
cggccagtagttagtt

SEQ ID NO: 24834 - DNA, 16 bp, synthetic construct
  misc_feature 1..16: note = synthetic [barcode part1]
  source 1..16: mol_type = other DNA
gtctcacgatatactc

SEQ ID NO: 24835 - DNA, 16 bp, synthetic construct
  misc_feature 1..16: note = synthetic [barcode part1]
  source 1..16: mol_type = other DNA
cgttgcctacttcact

SEQ ID NO: 24836 - DNA, 16 bp, synthetic construct
  misc_feature 1..16: note = synthetic [barcode part1]
  source 1..16: mol_type = other DNA
agaggactgaattcac

SEQ ID NO: 24837 - DNA, 16 bp, synthetic construct
  misc_feature 1..16: note = synthetic [barcode part1]
  source 1..16: mol_type = other DNA
cactggccaattacag

SEQ ID NO: 24838 - DNA, 16 bp, synthetic construct
  misc_feature 1..16: note = synthetic [barcode part1]
  source 1..16: mol_type = other DNA
actcctagtctccact

SEQ ID NO: 24839 - DNA, 16 bp, synthetic construct
  misc_feature 1..16: note = synthetic [barcode part1]
  source 1..16: mol_type = other DNA
gactgttgaacgtaag

SEQ ID NO: 24840 - DNA, 16 bp, synthetic construct
  misc_feature 1..16: note = synthetic [barcode part1]
  source 1..16: mol_type = other DNA
ccgtaagtagacctgt

SEQ ID NO: 24841 - DNA, 16 bp, synthetic construct
  misc_feature 1..16: note = synthetic [barcode part1]
  source 1..16: mol_type = other DNA
tggatcgactgagtct

SEQ ID NO: 24842 - DNA, 16 bp, synthetic construct
  misc_feature 1..16: note = synthetic [barcode part1]
  source 1..16: mol_type = other DNA
cgaaccgaaggtgtac

SEQ ID NO: 24843 - DNA, 16 bp, synthetic construct
  misc_feature 1..16: note = synthetic [barcode part1]
  source 1..16: mol_type = other DNA
aaccacagtgtgttgc

SEQ ID NO: 24844 - DNA, 16 bp, synthetic construct
  misc_feature 1..16: note = synthetic [barcode part1]
  source 1..16: mol_type = other DNA
gaattgcgtctccgtc

SEQ ID NO: 24845 - DNA, 16 bp, synthetic construct
  misc_feature 1..16: note = synthetic [barcode part1]
  source 1..16: mol_type = other DNA
cgatactgtccacctg

SEQ ID NO: 24846 - DNA, 16 bp, synthetic construct
  misc_feature 1..16: note = synthetic [barcode part1]
  source 1..16: mol_type = other DNA
tccaggcagtaataag

SEQ ID NO: 24847 - DNA, 16 bp, synthetic construct
  misc_feature 1..16: note = synthetic [barcode part1]
  source 1..16: mol_type = other DNA
ttaactccgccaatac

SEQ ID NO: 24848 - DNA, 16 bp, synthetic construct
  misc_feature 1..16: note = synthetic [barcode part1]
  source 1..16: mol_type = other DNA
gaacggaactctggac

SEQ ID NO: 24849 - DNA, 16 bp, synthetic construct
  misc_feature 1..16: note = synthetic [barcode part1]
  source 1..16: mol_type = other DNA
atcggacgtctaacgt

SEQ ID NO: 24850 - DNA, 16 bp, synthetic construct
  misc_feature 1..16: note = synthetic [barcode part1]
  source 1..16: mol_type = other DNA
gattctctcctcggtt

SEQ ID NO: 24851 - DNA, 16 bp, synthetic construct
  misc_feature 1..16: note = synthetic [barcode part1]
  source 1..16: mol_type = other DNA
tctcgacgattgcgtc

SEQ ID NO: 24852 - DNA, 16 bp, synthetic construct
  misc_feature 1..16: note = synthetic [barcode part1]
  source 1..16: mol_type = other DNA
tgacctaataggagtg

SEQ ID NO: 24853 - DNA, 16 bp, synthetic construct
  misc_feature 1..16: note = synthetic [barcode part1]
  source 1..16: mol_type = other DNA
ttatctgtcacggcgc

SEQ ID NO: 24854 - DNA, 16 bp, synthetic construct
  misc_feature 1..16: note = synthetic [barcode part1]
  source 1..16: mol_type = other DNA
gccaggttctatattc

SEQ ID NO: 24855 - DNA, 16 bp, synthetic construct
  misc_feature 1..16: note = synthetic [barcode part1]
  source 1..16: mol_type = other DNA
tccacaccaacttggc

SEQ ID NO: 24856 - DNA, 16 bp, synthetic construct
  misc_feature 1..16: note = synthetic [barcode part1]
  source 1..16: mol_type = other DNA
taccagaattcctacc

SEQ ID NO: 24857 - DNA, 16 bp, synthetic construct
  misc_feature 1..16: note = synthetic [barcode part1]
  source 1..16: mol_type = other DNA
ttacgcctattcctgc

SEQ ID NO: 24858 - DNA, 16 bp, synthetic construct
  misc_feature 1..16: note = synthetic [barcode part1]
  source 1..16: mol_type = other DNA
gatcgacggtcaatct

SEQ ID NO: 24859 - DNA, 16 bp, synthetic construct
  misc_feature 1..16: note = synthetic [barcode part1]
  source 1..16: mol_type = other DNA
tccgtaagtggacttg

SEQ ID NO: 24860 - DNA, 16 bp, synthetic construct
  misc_feature 1..16: note = synthetic [barcode part1]
  source 1..16: mol_type = other DNA
acgatcggccgatatt

SEQ ID NO: 24861 - DNA, 16 bp, synthetic construct
  misc_feature 1..16: note = synthetic [barcode part1]
  source 1..16: mol_type = other DNA
taagtccgtagacctg

SEQ ID NO: 24862 - DNA, 16 bp, synthetic construct
  misc_feature 1..16: note = synthetic [barcode part1]
  source 1..16: mol_type = other DNA
gcaattctccgcactg

SEQ ID NO: 24863 - DNA, 16 bp, synthetic construct
  misc_feature 1..16: note = synthetic [barcode part1]
  source 1..16: mol_type = other DNA
tcgataccttcctaag

SEQ ID NO: 24864 - DNA, 16 bp, synthetic construct
  misc_feature 1..16: note = synthetic [barcode part1]
  source 1..16: mol_type = other DNA
gcgatcaagttagagt

SEQ ID NO: 24865 - DNA, 16 bp, synthetic construct
  misc_feature 1..16: note = synthetic [barcode part1]
  source 1..16: mol_type = other DNA
tcaactgtgtgtgcag

SEQ ID NO: 24866 - DNA, 16 bp, synthetic construct
  misc_feature 1..16: note = synthetic [barcode part1]
  source 1..16: mol_type = other DNA
agttagtccgactggt

SEQ ID NO: 24867 - DNA, 16 bp, synthetic construct
  misc_feature 1..16: note = synthetic [barcode part1]
  source 1..16: mol_type = other DNA
acttccggtccagtac

SEQ ID NO: 24868 - DNA, 16 bp, synthetic construct
  misc_feature 1..16: note = synthetic [barcode part1]
  source 1..16: mol_type = other DNA
tctgtcgttgaacgcc

SEQ ID NO: 24869 - DNA, 16 bp, synthetic construct
  misc_feature 1..16: note = synthetic [barcode part1]
  source 1..16: mol_type = other DNA
actacaccacactgag

SEQ ID NO: 24870 - DNA, 16 bp, synthetic construct
  misc_feature 1..16: note = synthetic [barcode part1]
  source 1..16: mol_type = other DNA
tgcagatactctgttc

SEQ ID NO: 24871 - DNA, 16 bp, synthetic construct
  misc_feature 1..16: note = synthetic [barcode part1]
  source 1..16: mol_type = other DNA
aataccgtcggttgac

SEQ ID NO: 24872 - DNA, 16 bp, synthetic construct
  misc_feature 1..16: note = synthetic [barcode part1]
  source 1..16: mol_type = other DNA
tatatacgcacgtgcg

SEQ ID NO: 24873 - DNA, 16 bp, synthetic construct
  misc_feature 1..16: note = synthetic [barcode part1]
  source 1..16: mol_type = other DNA
agagagaaggaaggag

SEQ ID NO: 24874 - DNA, 16 bp, synthetic construct
  misc_feature 1..16: note = synthetic [barcode part1]
  source 1..16: mol_type = other DNA
attctcacgttctcgc

SEQ ID NO: 24875 - DNA, 16 bp, synthetic construct
  misc_feature 1..16: note = synthetic [barcode part1]
  source 1..16: mol_type = other DNA
agacggagataccacc

SEQ ID NO: 24876 - DNA, 16 bp, synthetic construct
  misc_feature 1..16: note = synthetic [barcode part1]
  source 1..16: mol_type = other DNA
ttgcacaacactggtg

SEQ ID NO: 24877 - DNA, 16 bp, synthetic construct
  misc_feature 1..16: note = synthetic [barcode part1]
  source 1..16: mol_type = other DNA
gtgtcgaggagtaatt

SEQ ID NO: 24878 - DNA, 16 bp, synthetic construct
  misc_feature 1..16: note = synthetic [barcode part1]
  source 1..16: mol_type = other DNA
gtgtagtgtataccgc

SEQ ID NO: 24879 - DNA, 16 bp, synthetic construct
  misc_feature 1..16: note = synthetic [barcode part1]
  source 1..16: mol_type = other DNA
cgtattccgtcttcgt

SEQ ID NO: 24880 - DNA, 16 bp, synthetic construct
  misc_feature 1..16: note = synthetic [barcode part1]
  source 1..16: mol_type = other DNA
gcagagtcagacactg

SEQ ID NO: 24881 - DNA, 16 bp, synthetic construct
  misc_feature 1..16: note = synthetic [barcode part1]
  source 1..16: mol_type = other DNA
tccaggaccgattagt

SEQ ID NO: 24882 - DNA, 16 bp, synthetic construct
  misc_feature 1..16: note = synthetic [barcode part1]
  source 1..16: mol_type = other DNA
tgtacgacgtcctgtc

SEQ ID NO: 24883 - DNA, 16 bp, synthetic construct
  misc_feature 1..16: note = synthetic [barcode part1]
  source 1..16: mol_type = other DNA
aatacacgccgtgtgt

SEQ ID NO: 24884 - DNA, 16 bp, synthetic construct
  misc_feature 1..16: note = synthetic [barcode part1]
  source 1..16: mol_type = other DNA
aggagactatcagtac

SEQ ID NO: 24885 - DNA, 16 bp, synthetic construct
  misc_feature 1..16: note = synthetic [barcode part1]
  source 1..16: mol_type = other DNA
caagttgtcgacaacc

SEQ ID NO: 24886 - DNA, 16 bp, synthetic construct
  misc_feature 1..16: note = synthetic [barcode part1]
  source 1..16: mol_type = other DNA
ccgattcgacaacaac

SEQ ID NO: 24887 - DNA, 16 bp, synthetic construct
  misc_feature 1..16: note = synthetic [barcode part1]
  source 1..16: mol_type = other DNA
gacggagtcagtacgt

SEQ ID NO: 24888 - DNA, 16 bp, synthetic construct
  misc_feature 1..16: note = synthetic [barcode part1]
  source 1..16: mol_type = other DNA
ttatccgagtgtcact

SEQ ID NO: 24889 - DNA, 16 bp, synthetic construct
  misc_feature 1..16: note = synthetic [barcode part1]
  source 1..16: mol_type = other DNA
cctatattcgacgatc

SEQ ID NO: 24890 - DNA, 16 bp, synthetic construct
  misc_feature 1..16: note = synthetic [barcode part1]
  source 1..16: mol_type = other DNA
cagtggcaggatacac

SEQ ID NO: 24891 - DNA, 16 bp, synthetic construct
  misc_feature 1..16: note = synthetic [barcode part1]
  source 1..16: mol_type = other DNA
gtgttaattggcgcgt

SEQ ID NO: 24892 - DNA, 16 bp, synthetic construct
  misc_feature 1..16: note = synthetic [barcode part1]
  source 1..16: mol_type = other DNA
atatcggtagtctctc

SEQ ID NO: 24893 - DNA, 16 bp, synthetic construct
  misc_feature 1..16: note = synthetic [barcode part1]
  source 1..16: mol_type = other DNA
ttctgttacaggttcg

SEQ ID NO: 24894 - DNA, 16 bp, synthetic construct
  misc_feature 1..16: note = synthetic [barcode part1]
  source 1..16: mol_type = other DNA
gtaaccttcacgcctg

SEQ ID NO: 24895 - DNA, 16 bp, synthetic construct
  misc_feature 1..16: note = synthetic [barcode part1]
  source 1..16: mol_type = other DNA
agttcctagttcgtgt

SEQ ID NO: 24896 - DNA, 16 bp, synthetic construct
  misc_feature 1..16: note = synthetic [barcode part1]
  source 1..16: mol_type = other DNA
tctccttcaattggcc

SEQ ID NO: 24897 - DNA, 16 bp, synthetic construct
  misc_feature 1..16: note = synthetic [barcode part1]
  source 1..16: mol_type = other DNA
aaggtccgaacagatt

SEQ ID NO: 24898 - DNA, 16 bp, synthetic construct
  misc_feature 1..16: note = synthetic [barcode part1]
  source 1..16: mol_type = other DNA
ttaggtgactctactc

SEQ ID NO: 24899 - DNA, 16 bp, synthetic construct
  misc_feature 1..16: note = synthetic [barcode part1]
  source 1..16: mol_type = other DNA
acacaggtgtccttag

SEQ ID NO: 24900 - DNA, 16 bp, synthetic construct
  misc_feature 1..16: note = synthetic [barcode part1]
  source 1..16: mol_type = other DNA
aggcgttggcagagtt

SEQ ID NO: 24901 - DNA, 16 bp, synthetic construct
  misc_feature 1..16: note = synthetic [barcode part1]
  source 1..16: mol_type = other DNA
taacgatcggcaacct

SEQ ID NO: 24902 - DNA, 16 bp, synthetic construct
  misc_feature 1..16: note = synthetic [barcode part1]
  source 1..16: mol_type = other DNA
aggtacggtcagatcg

SEQ ID NO: 24903 - DNA, 16 bp, synthetic construct
  misc_feature 1..16: note = synthetic [barcode part1]
  source 1..16: mol_type = other DNA
taccgccttgcgtagt

SEQ ID NO: 24904 - DNA, 16 bp, synthetic construct
  misc_feature 1..16: note = synthetic [barcode part1]
  source 1..16: mol_type = other DNA
aactcttgactgtacc

SEQ ID NO: 24905 - DNA, 16 bp, synthetic construct
  misc_feature 1..16: note = synthetic [barcode part1]
  source 1..16: mol_type = other DNA
ttacgccgatacgaac

SEQ ID NO: 24906 - DNA, 16 bp, synthetic construct
  misc_feature 1..16: note = synthetic [barcode part1]
  source 1..16: mol_type = other DNA
cgtctgtatcctaggc

SEQ ID NO: 24907 - DNA, 16 bp, synthetic construct
  misc_feature 1..16: note = synthetic [barcode part1]
  source 1..16: mol_type = other DNA
tccaagaagtcgatcc

SEQ ID NO: 24908 - DNA, 16 bp, synthetic construct
  misc_feature 1..16: note = synthetic [barcode part1]
  source 1..16: mol_type = other DNA
gacgaggtataccggt

SEQ ID NO: 24909 - DNA, 16 bp, synthetic construct
  misc_feature 1..16: note = synthetic [barcode part1]
  source 1..16: mol_type = other DNA
gtcaggtcgtcttcgt

SEQ ID NO: 24910 - DNA, 16 bp, synthetic construct
  misc_feature 1..16: note = synthetic [barcode part1]
  source 1..16: mol_type = other DNA
gtagaccgagaattgt

SEQ ID NO: 24911 - DNA, 16 bp, synthetic construct
  misc_feature 1..16: note = synthetic [barcode part1]
  source 1..16: mol_type = other DNA
taagtcgttagtggcc

SEQ ID NO: 24912 - DNA, 16 bp, synthetic construct
  misc_feature 1..16: note = synthetic [barcode part1]
  source 1..16: mol_type = other DNA
tacgtggtctgtgagt

SEQ ID NO: 24913 - DNA, 16 bp, synthetic construct
  misc_feature 1..16: note = synthetic [barcode part1]
  source 1..16: mol_type = other DNA
aggtcgatacgattag

SEQ ID NO: 24914 - DNA, 16 bp, synthetic construct
  misc_feature 1..16: note = synthetic [barcode part1]
  source 1..16: mol_type = other DNA
cgcgatactcacctgt

SEQ ID NO: 24915 - DNA, 16 bp, synthetic construct
  misc_feature 1..16: note = synthetic [barcode part1]
  source 1..16: mol_type = other DNA
taggcgtaaggtaact

SEQ ID NO: 24916 - DNA, 16 bp, synthetic construct
  misc_feature 1..16: note = synthetic [barcode part1]
  source 1..16: mol_type = other DNA
gaacaatccaggtgcg

SEQ ID NO: 24917 - DNA, 16 bp, synthetic construct
  misc_feature 1..16: note = synthetic [barcode part1]
  source 1..16: mol_type = other DNA
cggtcactagagagtg

SEQ ID NO: 24918 - DNA, 16 bp, synthetic construct
  misc_feature 1..16: note = synthetic [barcode part1]
  source 1..16: mol_type = other DNA
cctgagagttagtcgt

SEQ ID NO: 24919 - DNA, 16 bp, synthetic construct
  misc_feature 1..16: note = synthetic [barcode part1]
  source 1..16: mol_type = other DNA
tcttgcaggaggtact

SEQ ID NO: 24920 - DNA, 16 bp, synthetic construct
  misc_feature 1..16: note = synthetic [barcode part1]
  source 1..16: mol_type = other DNA
aagataggacgttcac

SEQ ID NO: 24921 - DNA, 16 bp, synthetic construct
  misc_feature 1..16: note = synthetic [barcode part1]
  source 1..16: mol_type = other DNA
acgactgttctgatct

SEQ ID NO: 24922 - DNA, 16 bp, synthetic construct
  misc_feature 1..16: note = synthetic [barcode part1]
  source 1..16: mol_type = other DNA
cggtgcaacgtaattc

SEQ ID NO: 24923 - DNA, 16 bp, synthetic construct
  misc_feature 1..16: note = synthetic [barcode part1]
  source 1..16: mol_type = other DNA
attgcgaaggcaggtc

SEQ ID NO: 24924 - DNA, 16 bp, synthetic construct
  misc_feature 1..16: note = synthetic [barcode part1]
  source 1..16: mol_type = other DNA
gagtcgatacgcaacg

SEQ ID NO: 24925 - DNA, 16 bp, synthetic construct
  misc_feature 1..16: note = synthetic [barcode part1]
  source 1..16: mol_type = other DNA
gatctaccttgtcgcg

SEQ ID NO: 24926 - DNA, 16 bp, synthetic construct
  misc_feature 1..16: note = synthetic [barcode part1]
  source 1..16: mol_type = other DNA
aataactgcgtggaac

SEQ ID NO: 24927 - DNA, 16 bp, synthetic construct
  misc_feature 1..16: note = synthetic [barcode part1]
  source 1..16: mol_type = other DNA
actaaccgactggttg

SEQ ID NO: 24928 - DNA, 16 bp, synthetic construct
  misc_feature 1..16: note = synthetic [barcode part1]
  source 1..16: mol_type = other DNA
ttctcgcagtgtgaag

SEQ ID NO: 24929 - DNA, 16 bp, synthetic construct
  misc_feature 1..16: note = synthetic [barcode part1]
  source 1..16: mol_type = other DNA
ttccaaggcggtattg

SEQ ID NO: 24930 - DNA, 16 bp, synthetic construct
  misc_feature 1..16: note = synthetic [barcode part1]
  source 1..16: mol_type = other DNA
atcggagtcttagtcg

SEQ ID NO: 24931 - DNA, 16 bp, synthetic construct
  misc_feature 1..16: note = synthetic [barcode part1]
  source 1..16: mol_type = other DNA
gttaccacaacgatcg

SEQ ID NO: 24932 - DNA, 16 bp, synthetic construct
  misc_feature 1..16: note = synthetic [barcode part1]
  source 1..16: mol_type = other DNA
aaccgtacgtacagtc

SEQ ID NO: 24933 - DNA, 16 bp, synthetic construct
  misc_feature 1..16: note = synthetic [barcode part1]
  source 1..16: mol_type = other DNA
ttgtatcgcctagtac

SEQ ID NO: 24934 - DNA, 16 bp, synthetic construct
  misc_feature 1..16: note = synthetic [barcode part1]
  source 1..16: mol_type = other DNA
acggcctacttagtag

SEQ ID NO: 24935 - DNA, 16 bp, synthetic construct
  misc_feature 1..16: note = synthetic [barcode part1]
  source 1..16: mol_type = other DNA
gtactgaccggtatac

SEQ ID NO: 24936 - DNA, 16 bp, synthetic construct
  misc_feature 1..16: note = synthetic [barcode part1]
  source 1..16: mol_type = other DNA
cgacgcagttaaggac

SEQ ID NO: 24937 - DNA, 16 bp, synthetic construct
  misc_feature 1..16: note = synthetic [barcode part1]
  source 1..16: mol_type = other DNA
tgttggtagaactgag

SEQ ID NO: 24938 - DNA, 16 bp, synthetic construct
  misc_feature 1..16: note = synthetic [barcode part1]
  source 1..16: mol_type = other DNA
caactcaggactgttg

SEQ ID NO: 24939 - DNA, 16 bp, synthetic construct
  misc_feature 1..16: note = synthetic [barcode part1]
  source 1..16: mol_type = other DNA
gttgagtaggtgtaac

SEQ ID NO: 24940 - DNA, 16 bp, synthetic construct
  misc_feature 1..16: note = synthetic [barcode part1]
  source 1..16: mol_type = other DNA
agtcgtgaatcagagt

SEQ ID NO: 24941 - DNA, 16 bp, synthetic construct
  misc_feature 1..16: note = synthetic [barcode part1]
  source 1..16: mol_type = other DNA
gcctcactgtcagtgt

SEQ ID NO: 24942 - DNA, 16 bp, synthetic construct
  misc_feature 1..16: note = synthetic [barcode part1]
  source 1..16: mol_type = other DNA
gtccaatcgacctaag

SEQ ID NO: 24943 - DNA, 16 bp, synthetic construct
  misc_feature 1..16: note = synthetic [barcode part1]
  source 1..16: mol_type = other DNA
actaagtacggtccgt

SEQ ID NO: 24944 - DNA, 16 bp, synthetic construct
  misc_feature 1..16: note = synthetic [barcode part1]
  source 1..16: mol_type = other DNA
tagaacctacgcacac

SEQ ID NO: 24945 - DNA, 16 bp, synthetic construct
  misc_feature 1..16: note = synthetic [barcode part1]
  source 1..16: mol_type = other DNA
gcctagaagtacctgt

SEQ ID NO: 24946 - DNA, 16 bp, synthetic construct
  misc_feature 1..16: note = synthetic [barcode part1]
  source 1..16: mol_type = other DNA
taacggcagtctgact

SEQ ID NO: 24947 - DNA, 16 bp, synthetic construct
  misc_feature 1..16: note = synthetic [barcode part1]
  source 1..16: mol_type = other DNA
ttgttctctaggtacg

SEQ ID NO: 24948 - DNA, 16 bp, synthetic construct
  misc_feature 1..16: note = synthetic [barcode part1]
  source 1..16: mol_type = other DNA
tgtctattggacggac

SEQ ID NO: 24949 - DNA, 16 bp, synthetic construct
  misc_feature 1..16: note = synthetic [barcode part1]
  source 1..16: mol_type = other DNA
gaatcctaactggtcg

SEQ ID NO: 24950 - DNA, 16 bp, synthetic construct
  misc_feature 1..16: note = synthetic [barcode part1]
  source 1..16: mol_type = other DNA
atcacctgcagtgagt

SEQ ID NO: 24951 - DNA, 16 bp, synthetic construct
  misc_feature 1..16: note = synthetic [barcode part1]
  source 1..16: mol_type = other DNA
gtagacctgattcctt

SEQ ID NO: 24952 - DNA, 16 bp, synthetic construct
  misc_feature 1..16: note = synthetic [barcode part1]
  source 1..16: mol_type = other DNA
cgtctctgtcgaatcg

SEQ ID NO: 24953 - DNA, 16 bp, synthetic construct
  misc_feature 1..16: note = synthetic [barcode part1]
  source 1..16: mol_type = other DNA
gtcagtactaccgtcc

SEQ ID NO: 24954 - DNA, 16 bp, synthetic construct
  misc_feature 1..16: note = synthetic [barcode part1]
  source 1..16: mol_type = other DNA
tcgatacgcacactag

SEQ ID NO: 24955 - DNA, 16 bp, synthetic construct
  misc_feature 1..16: note = synthetic [barcode part1]
  source 1..16: mol_type = other DNA
caatacgcctcgtcac

SEQ ID NO: 24956 - DNA, 16 bp, synthetic construct
  misc_feature 1..16: note = synthetic [barcode part1]
  source 1..16: mol_type = other DNA
tgtcgcctcgttactt

SEQ ID NO: 24957 - DNA, 16 bp, synthetic construct
  misc_feature 1..16: note = synthetic [barcode part1]
  source 1..16: mol_type = other DNA
ttcctagtgcagttgt

SEQ ID NO: 24958 - DNA, 16 bp, synthetic construct
  misc_feature 1..16: note = synthetic [barcode part1]
  source 1..16: mol_type = other DNA
cgatcgacgtagtact

SEQ ID NO: 24959 - DNA, 16 bp, synthetic construct
  misc_feature 1..16: note = synthetic [barcode part1]
  source 1..16: mol_type = other DNA
tggatacgtgcaactc

SEQ ID NO: 24960 - DNA, 16 bp, synthetic construct
  misc_feature 1..16: note = synthetic [barcode part1]
  source 1..16: mol_type = other DNA
tgcgtatagagtctcg

SEQ ID NO: 24961 - DNA, 16 bp, synthetic construct
  misc_feature 1..16: note = synthetic [barcode part1]
  source 1..16: mol_type = other DNA
aggccgttatcagatc

SEQ ID NO: 24962 - DNA, 16 bp, synthetic construct
  misc_feature 1..16: note = synthetic [barcode part1]
  source 1..16: mol_type = other DNA
tagtagtgcacaaggt

SEQ ID NO: 24963 - DNA, 16 bp, synthetic construct
  misc_feature 1..16: note = synthetic [barcode part1]
  source 1..16: mol_type = other DNA
tgcactagaagaatcg

SEQ ID NO: 24964 - DNA, 16 bp, synthetic construct
  misc_feature 1..16: note = synthetic [barcode part1]
  source 1..16: mol_type = other DNA
ccagttagtatcgcag

SEQ ID NO: 24965 - DNA, 16 bp, synthetic construct
  misc_feature 1..16: note = synthetic [barcode part1]
  source 1..16: mol_type = other DNA
gtagtgtacactacgc

SEQ ID NO: 24966 - DNA, 16 bp, synthetic construct
  misc_feature 1..16: note = synthetic [barcode part1]
  source 1..16: mol_type = other DNA
ccaagttctaacgacg

SEQ ID NO: 24967 - DNA, 16 bp, synthetic construct
  misc_feature 1..16: note = synthetic [barcode part1]
  source 1..16: mol_type = other DNA
agagttaaccgtctcg

SEQ ID NO: 24968 - DNA, 16 bp, synthetic construct
  misc_feature 1..16: note = synthetic [barcode part1]
  source 1..16: mol_type = other DNA
cggtaattggtgatcc

SEQ ID NO: 24969 - DNA, 16 bp, synthetic construct
  misc_feature 1..16: note = synthetic [barcode part1]
  source 1..16: mol_type = other DNA
gagatctggatcctac

SEQ ID NO: 24970 - DNA, 16 bp, synthetic construct
  misc_feature 1..16: note = synthetic [barcode part1]
  source 1..16: mol_type = other DNA
gcggttgtataactgc

SEQ ID NO: 24971 - DNA, 16 bp, synthetic construct
  misc_feature 1..16: note = synthetic [barcode part1]
  source 1..16: mol_type = other DNA
gtactactaaggtccg

SEQ ID NO: 24972 - DNA, 16 bp, synthetic construct
  misc_feature 1..16: note = synthetic [barcode part1]
  source 1..16: mol_type = other DNA
atccaggcgttgtcct

SEQ ID NO: 24973 - DNA, 16 bp, synthetic construct
  misc_feature 1..16: note = synthetic [barcode part1]
  source 1..16: mol_type = other DNA
actattctaggtgtcc

SEQ ID NO: 24974 - DNA, 16 bp, synthetic construct
  misc_feature 1..16: note = synthetic [barcode part1]
  source 1..16: mol_type = other DNA
acgcctcttctgtgtt

SEQ ID NO: 24975 - DNA, 16 bp, synthetic construct
  misc_feature 1..16: note = synthetic [barcode part1]
  source 1..16: mol_type = other DNA
ataaccgtcaaccttc

SEQ ID NO: 24976 - DNA, 16 bp, synthetic construct
  misc_feature 1..16: note = synthetic [barcode part1]
  source 1..16: mol_type = other DNA
agatctaccactacct

SEQ ID NO: 24977 - DNA, 16 bp, synthetic construct
  misc_feature 1..16: note = synthetic [barcode part1]
  source 1..16: mol_type = other DNA
gagacggtagatatct

SEQ ID NO: 24978 - DNA, 16 bp, synthetic construct
  misc_feature 1..16: note = synthetic [barcode part1]
  source 1..16: mol_type = other DNA
ttaagtattcgtcgcc

SEQ ID NO: 24979 - DNA, 16 bp, synthetic construct
  misc_feature 1..16: note = synthetic [barcode part1]
  source 1..16: mol_type = other DNA
acgatactcctaaggc

SEQ ID NO: 24980 - DNA, 16 bp, synthetic construct
  misc_feature 1..16: note = synthetic [barcode part1]
  source 1..16: mol_type = other DNA
cgactctgtattggcc

SEQ ID NO: 24981 - DNA, 16 bp, synthetic construct
  misc_feature 1..16: note = synthetic [barcode part1]
  source 1..16: mol_type = other DNA
acgattcgagtcactg

SEQ ID NO: 24982 - DNA, 16 bp, synthetic construct
  misc_feature 1..16: note = synthetic [barcode part1]
  source 1..16: mol_type = other DNA
gaagacgtaagtcgcc

SEQ ID NO: 24983 - DNA, 16 bp, synthetic construct
  misc_feature 1..16: note = synthetic [barcode part1]
  source 1..16: mol_type = other DNA
gagtacgtcagtgacg

SEQ ID NO: 24984 - DNA, 16 bp, synthetic construct
  misc_feature 1..16: note = synthetic [barcode part1]
  source 1..16: mol_type = other DNA
ccagaccgttagattg

SEQ ID NO: 24985 - DNA, 16 bp, synthetic construct
  misc_feature 1..16: note = synthetic [barcode part1]
  source 1..16: mol_type = other DNA
agaacaatacctaggc

SEQ ID NO: 24986 - DNA, 16 bp, synthetic construct
  misc_feature 1..16: note = synthetic [barcode part1]
  source 1..16: mol_type = other DNA
gaggacggaatcgtct

SEQ ID NO: 24987 - DNA, 16 bp, synthetic construct
  misc_feature 1..16: note = synthetic [barcode part1]
  source 1..16: mol_type = other DNA
ttggtgaacagagatc

SEQ ID NO: 24988 - DNA, 16 bp, synthetic construct
  misc_feature 1..16: note = synthetic [barcode part1]
  source 1..16: mol_type = other DNA
cagtaggatctgcgag

SEQ ID NO: 24989 - DNA, 16 bp, synthetic construct
  misc_feature 1..16: note = synthetic [barcode part1]
  source 1..16: mol_type = other DNA
ttgaacacactgtcct

SEQ ID NO: 24990 - DNA, 16 bp, synthetic construct
  misc_feature 1..16: note = synthetic [barcode part1]
  source 1..16: mol_type = other DNA
gcgatacactacgact

SEQ ID NO: 24991 - DNA, 16 bp, synthetic construct
  misc_feature 1..16: note = synthetic [barcode part1]
  source 1..16: mol_type = other DNA
cgatcttcgtagttgt

SEQ ID NO: 24992 - DNA, 16 bp, synthetic construct
  misc_feature 1..16: note = synthetic [barcode part1]
  source 1..16: mol_type = other DNA
gttctaggactagtcg

SEQ ID NO: 24993 - DNA, 16 bp, synthetic construct
  misc_feature 1..16: note = synthetic [barcode part1]
  source 1..16: mol_type = other DNA
cctcgagtacctactg

SEQ ID NO: 24994 - DNA, 16 bp, synthetic construct
  misc_feature 1..16: note = synthetic [barcode part1]
  source 1..16: mol_type = other DNA
taacaatctggcggtc

SEQ ID NO: 24995 - DNA, 16 bp, synthetic construct
  misc_feature 1..16: note = synthetic [barcode part1]
  source 1..16: mol_type = other DNA
gacacgttcttgatct

SEQ ID NO: 24996 - DNA, 16 bp, synthetic construct
  misc_feature 1..16: note = synthetic [barcode part1]
  source 1..16: mol_type = other DNA
tggagaattctccggt

SEQ ID NO: 24997 - DNA, 16 bp, synthetic construct
  misc_feature 1..16: note = synthetic [barcode part1]
  source 1..16: mol_type = other DNA
ccgcctgttacttatc

SEQ ID NO: 24998 - DNA, 16 bp, synthetic construct
  misc_feature 1..16: note = synthetic [barcode part1]
  source 1..16: mol_type = other DNA
ccgtactacgacctac

SEQ ID NO: 24999 - DNA, 16 bp, synthetic construct
  misc_feature 1..16: note = synthetic [barcode part1]
  source 1..16: mol_type = other DNA
gcacctgttcactacg

SEQ ID NO: 25000 - DNA, 16 bp, synthetic construct
  misc_feature 1..16: note = synthetic [barcode part1]
  source 1..16: mol_type = other DNA
accttgaagagttccg

SEQ ID NO: 25001 - DNA, 16 bp, synthetic construct
  misc_feature 1..16: note = synthetic [barcode part1]
  source 1..16: mol_type = other DNA
cacaggcacctataac

SEQ ID NO: 25002 - DNA, 16 bp, synthetic construct
  misc_feature 1..16: note = synthetic [barcode part1]
  source 1..16: mol_type = other DNA
cctcgtgccagtaact

SEQ ID NO: 25003 - DNA, 16 bp, synthetic construct
  misc_feature 1..16: note = synthetic [barcode part1]
  source 1..16: mol_type = other DNA
tcagtgtagtctcttg

SEQ ID NO: 25004 - DNA, 16 bp, synthetic construct
  misc_feature 1..16: note = synthetic [barcode part1]
  source 1..16: mol_type = other DNA
agaagatactcggatc

SEQ ID NO: 25005 - DNA, 16 bp, synthetic construct
  misc_feature 1..16: note = synthetic [barcode part1]
  source 1..16: mol_type = other DNA
aagtcaacgtgcggtg

SEQ ID NO: 25006 - DNA, 16 bp, synthetic construct
  misc_feature 1..16: note = synthetic [barcode part1]
  source 1..16: mol_type = other DNA
caagtggacaatatcg

SEQ ID NO: 25007 - DNA, 16 bp, synthetic construct
  misc_feature 1..16: note = synthetic [barcode part1]
  source 1..16: mol_type = other DNA
aagtgtattgacggtg

SEQ ID NO: 25008 - DNA, 16 bp, synthetic construct
  misc_feature 1..16: note = synthetic [barcode part1]
  source 1..16: mol_type = other DNA
aatacgcagttggaac

SEQ ID NO: 25009 - DNA, 16 bp, synthetic construct
  misc_feature 1..16: note = synthetic [barcode part1]
  source 1..16: mol_type = other DNA
gaatagacaggacttc

SEQ ID NO: 25010 - DNA, 16 bp, synthetic construct
  misc_feature 1..16: note = synthetic [barcode part1]
  source 1..16: mol_type = other DNA
cgataggttactccag

SEQ ID NO: 25011 - DNA, 16 bp, synthetic construct
  misc_feature 1..16: note = synthetic [barcode part1]
  source 1..16: mol_type = other DNA
caggaagatcagtgcc

SEQ ID NO: 25012 - DNA, 16 bp, synthetic construct
  misc_feature 1..16: note = synthetic [barcode part1]
  source 1..16: mol_type = other DNA
cgaaggacttcaatcc

SEQ ID NO: 25013 - DNA, 16 bp, synthetic construct
  misc_feature 1..16: note = synthetic [barcode part1]
  source 1..16: mol_type = other DNA
caccaccttcacaggt

SEQ ID NO: 25014 - DNA, 16 bp, synthetic construct
  misc_feature 1..16: note = synthetic [barcode part1]
  source 1..16: mol_type = other DNA
gcgcgcagttatagtt

SEQ ID NO: 25015 - DNA, 16 bp, synthetic construct
  misc_feature 1..16: note = synthetic [barcode part1]
  source 1..16: mol_type = other DNA
acttcgaggttagtcg

SEQ ID NO: 25016 - DNA, 16 bp, synthetic construct
  misc_feature 1..16: note = synthetic [barcode part1]
  source 1..16: mol_type = other DNA
ccgtatctggaagtac

SEQ ID NO: 25017 - DNA, 16 bp, synthetic construct
  misc_feature 1..16: note = synthetic [barcode part1]
  source 1..16: mol_type = other DNA
tcttagtcttctggcc

SEQ ID NO: 25018 - DNA, 16 bp, synthetic construct
  misc_feature 1..16: note = synthetic [barcode part1]
  source 1..16: mol_type = other DNA
atcaattggccgatcg

SEQ ID NO: 25019 - DNA, 16 bp, synthetic construct
  misc_feature 1..16: note = synthetic [barcode part1]
  source 1..16: mol_type = other DNA
ttcgtcgtaactctcc

SEQ ID NO: 25020 - DNA, 16 bp, synthetic construct
  misc_feature 1..16: note = synthetic [barcode part1]
  source 1..16: mol_type = other DNA
cgacgcgagaacgatt

SEQ ID NO: 25021 - DNA, 16 bp, synthetic construct
  misc_feature 1..16: note = synthetic [barcode part1]
  source 1..16: mol_type = other DNA
tgaggttccaagactc

SEQ ID NO: 25022 - DNA, 16 bp, synthetic construct
  misc_feature 1..16: note = synthetic [barcode part1]
  source 1..16: mol_type = other DNA
tcgtccacggaacttc

SEQ ID NO: 25023 - DNA, 16 bp, synthetic construct
  misc_feature 1..16: note = synthetic [barcode part1]
  source 1..16: mol_type = other DNA
cacttgccttgtctac

SEQ ID NO: 25024 - DNA, 16 bp, synthetic construct
  misc_feature 1..16: note = synthetic [barcode part1]
  source 1..16: mol_type = other DNA
gatcgtgaccgatact

SEQ ID NO: 25025 - DNA, 16 bp, synthetic construct
  misc_feature 1..16: note = synthetic [barcode part1]
  source 1..16: mol_type = other DNA
cgatacagagacaatc

SEQ ID NO: 25026 - DNA, 16 bp, synthetic construct
  misc_feature 1..16: note = synthetic [barcode part1]
  source 1..16: mol_type = other DNA
cgttgtctcgttgttc

SEQ ID NO: 25027 - DNA, 16 bp, synthetic construct
  misc_feature 1..16: note = synthetic [barcode part1]
  source 1..16: mol_type = other DNA
caatcttcagtcacac

SEQ ID NO: 25028 - DNA, 16 bp, synthetic construct
  misc_feature 1..16: note = synthetic [barcode part1]
  source 1..16: mol_type = other DNA
gtacacttcactatcg

SEQ ID NO: 25029 - DNA, 16 bp, synthetic construct
  misc_feature 1..16: note = synthetic [barcode part1]
  source 1..16: mol_type = other DNA
acgttcaagacgatag

SEQ ID NO: 25030 - DNA, 16 bp, synthetic construct
  misc_feature 1..16: note = synthetic [barcode part1]
  source 1..16: mol_type = other DNA
aacgtaccagtgtacc

SEQ ID NO: 25031 - DNA, 16 bp, synthetic construct
  misc_feature 1..16: note = synthetic [barcode part1]
  source 1..16: mol_type = other DNA
gaattaggacctcctg

SEQ ID NO: 25032 - DNA, 16 bp, synthetic construct
  misc_feature 1..16: note = synthetic [barcode part1]
  source 1..16: mol_type = other DNA
ttggaggagtccgtag

SEQ ID NO: 25033 - DNA, 16 bp, synthetic construct
  misc_feature 1..16: note = synthetic [barcode part1]
  source 1..16: mol_type = other DNA
agaagtaactcctgcc

SEQ ID NO: 25034 - DNA, 16 bp, synthetic construct
  misc_feature 1..16: note = synthetic [barcode part1]
  source 1..16: mol_type = other DNA
tattcgtctgtctgcc

SEQ ID NO: 25035 - DNA, 16 bp, synthetic construct
  misc_feature 1..16: note = synthetic [barcode part1]
  source 1..16: mol_type = other DNA
ccgtctaacttgttcc

SEQ ID NO: 25036 - DNA, 16 bp, synthetic construct
  misc_feature 1..16: note = synthetic [barcode part1]
  source 1..16: mol_type = other DNA
caatacctctggagtg

SEQ ID NO: 25037 - DNA, 16 bp, synthetic construct
  misc_feature 1..16: note = synthetic [barcode part1]
  source 1..16: mol_type = other DNA
agaacgaggcgaagtt

SEQ ID NO: 25038 - DNA, 16 bp, synthetic construct
  misc_feature 1..16: note = synthetic [barcode part1]
  source 1..16: mol_type = other DNA
gcgcctacgttatctg

SEQ ID NO: 25039 - DNA, 16 bp, synthetic construct
  misc_feature 1..16: note = synthetic [barcode part1]
  source 1..16: mol_type = other DNA
agtggagtcttatcgc

SEQ ID NO: 25040 - DNA, 16 bp, synthetic construct
  misc_feature 1..16: note = synthetic [barcode part1]
  source 1..16: mol_type = other DNA
ttacggagttccttac

SEQ ID NO: 25041 - DNA, 16 bp, synthetic construct
  misc_feature 1..16: note = synthetic [barcode part1]
  source 1..16: mol_type = other DNA
gatcctctatatcgac

SEQ ID NO: 25042 - DNA, 16 bp, synthetic construct
  misc_feature 1..16: note = synthetic [barcode part1]
  source 1..16: mol_type = other DNA
cgaggatcttacactg

SEQ ID NO: 25043 - DNA, 16 bp, synthetic construct
  misc_feature 1..16: note = synthetic [barcode part1]
  source 1..16: mol_type = other DNA
acctaggaacggaatt

SEQ ID NO: 25044 - DNA, 16 bp, synthetic construct
  misc_feature 1..16: note = synthetic [barcode part1]
  source 1..16: mol_type = other DNA
tcttgcgttaggtcgc

SEQ ID NO: 25045 - DNA, 16 bp, synthetic construct
  misc_feature 1..16: note = synthetic [barcode part1]
  source 1..16: mol_type = other DNA
gatagaaccggacacc

SEQ ID NO: 25046 - DNA, 16 bp, synthetic construct
  misc_feature 1..16: note = synthetic [barcode part1]
  source 1..16: mol_type = other DNA
gtgtcggtacaagttc

SEQ ID NO: 25047 - DNA, 16 bp, synthetic construct
  misc_feature 1..16: note = synthetic [barcode part1]
  source 1..16: mol_type = other DNA
gcctaagactctatct

SEQ ID NO: 25048 - DNA, 16 bp, synthetic construct
  misc_feature 1..16: note = synthetic [barcode part1]
  source 1..16: mol_type = other DNA
gagttgtggatcgttc

SEQ ID NO: 25049 - DNA, 16 bp, synthetic construct
  misc_feature 1..16: note = synthetic [barcode part1]
  source 1..16: mol_type = other DNA
ccaagactgttcactt

SEQ ID NO: 25050 - DNA, 16 bp, synthetic construct
  misc_feature 1..16: note = synthetic [barcode part1]
  source 1..16: mol_type = other DNA
gttaacgagtgcgttc

SEQ ID NO: 25051 - DNA, 16 bp, synthetic construct
  misc_feature 1..16: note = synthetic [barcode part1]
  source 1..16: mol_type = other DNA
tgcgagacaataatcg

SEQ ID NO: 25052 - DNA, 16 bp, synthetic construct
  misc_feature 1..16: note = synthetic [barcode part1]
  source 1..16: mol_type = other DNA
tgtgtcactccagtcg

SEQ ID NO: 25053 - DNA, 16 bp, synthetic construct
  misc_feature 1..16: note = synthetic [barcode part1]
  source 1..16: mol_type = other DNA
aacctaaccttcgtgt

SEQ ID NO: 25054 - DNA, 16 bp, synthetic construct
  misc_feature 1..16: note = synthetic [barcode part1]
  source 1..16: mol_type = other DNA
gcagatccgtaagtct

SEQ ID NO: 25055 - DNA, 16 bp, synthetic construct
  misc_feature 1..16: note = synthetic [barcode part1]
  source 1..16: mol_type = other DNA
gcagagatagtctaac

SEQ ID NO: 25056 - DNA, 16 bp, synthetic construct
  misc_feature 1..16: note = synthetic [barcode part1]
  source 1..16: mol_type = other DNA
ttgagtgtccggatac

SEQ ID NO: 25057 - DNA, 16 bp, synthetic construct
  misc_feature 1..16: note = synthetic [barcode part1]
  source 1..16: mol_type = other DNA
tcactcgttcacctac

SEQ ID NO: 25058 - DNA, 16 bp, synthetic construct
  misc_feature 1..16: note = synthetic [barcode part1]
  source 1..16: mol_type = other DNA
caggagaactacgtgc

SEQ ID NO: 25059 - DNA, 16 bp, synthetic construct
  misc_feature 1..16: note = synthetic [barcode part1]
  source 1..16: mol_type = other DNA
gtggtcagtacgttgt

SEQ ID NO: 25060 - DNA, 16 bp, synthetic construct
  misc_feature 1..16: note = synthetic [barcode part1]
  source 1..16: mol_type = other DNA
caattgcgttcgagtg

SEQ ID NO: 25061 - DNA, 16 bp, synthetic construct
  misc_feature 1..16: note = synthetic [barcode part1]
  source 1..16: mol_type = other DNA
tggccaccaagaagtg

SEQ ID NO: 25062 - DNA, 16 bp, synthetic construct
  misc_feature 1..16: note = synthetic [barcode part1]
  source 1..16: mol_type = other DNA
gagtactcaagacggc

SEQ ID NO: 25063 - DNA, 16 bp, synthetic construct
  misc_feature 1..16: note = synthetic [barcode part1]
  source 1..16: mol_type = other DNA
gacactgtgtggtgtt

SEQ ID NO: 25064 - DNA, 16 bp, synthetic construct
  misc_feature 1..16: note = synthetic [barcode part1]
  source 1..16: mol_type = other DNA
aaccagtacgtacgtc

SEQ ID NO: 25065 - DNA, 16 bp, synthetic construct
  misc_feature 1..16: note = synthetic [barcode part1]
  source 1..16: mol_type = other DNA
cacttattcacggtac

SEQ ID NO: 25066 - DNA, 16 bp, synthetic construct
  misc_feature 1..16: note = synthetic [barcode part1]
  source 1..16: mol_type = other DNA
cgagtatcggtgagac

SEQ ID NO: 25067 - DNA, 16 bp, synthetic construct
  misc_feature 1..16: note = synthetic [barcode part1]
  source 1..16: mol_type = other DNA
tcctcactgtcttcag

SEQ ID NO: 25068 - DNA, 16 bp, synthetic construct
  misc_feature 1..16: note = synthetic [barcode part1]
  source 1..16: mol_type = other DNA
gtataagacctctgcg

SEQ ID NO: 25069 - DNA, 16 bp, synthetic construct
  misc_feature 1..16: note = synthetic [barcode part1]
  source 1..16: mol_type = other DNA
aggttgtaacgactcc

SEQ ID NO: 25070 - DNA, 16 bp, synthetic construct
  misc_feature 1..16: note = synthetic [barcode part1]
  source 1..16: mol_type = other DNA
tgtccgtaacggatac

SEQ ID NO: 25071 - DNA, 16 bp, synthetic construct
  misc_feature 1..16: note = synthetic [barcode part1]
  source 1..16: mol_type = other DNA
taacgaccacgtcctc

SEQ ID NO: 25072 - DNA, 16 bp, synthetic construct
  misc_feature 1..16: note = synthetic [barcode part1]
  source 1..16: mol_type = other DNA
cactacctattggtac

SEQ ID NO: 25073 - DNA, 16 bp, synthetic construct
  misc_feature 1..16: note = synthetic [barcode part1]
  source 1..16: mol_type = other DNA
gtattccagttcggtt

SEQ ID NO: 25074 - DNA, 16 bp, synthetic construct
  misc_feature 1..16: note = synthetic [barcode part1]
  source 1..16: mol_type = other DNA
acacacacgtacgtac

SEQ ID NO: 25075 - DNA, 16 bp, synthetic construct
  misc_feature 1..16: note = synthetic [barcode part1]
  source 1..16: mol_type = other DNA
tgattatcgaggagtg

SEQ ID NO: 25076 - DNA, 16 bp, synthetic construct
  misc_feature 1..16: note = synthetic [barcode part1]
  source 1..16: mol_type = other DNA
actgtacgccgttctg

SEQ ID NO: 25077 - DNA, 16 bp, synthetic construct
  misc_feature 1..16: note = synthetic [barcode part1]
  source 1..16: mol_type = other DNA
atctagaacggtgagt

SEQ ID NO: 25078 - DNA, 16 bp, synthetic construct
  misc_feature 1..16: note = synthetic [barcode part1]
  source 1..16: mol_type = other DNA
aacgaccgagacacgt

SEQ ID NO: 25079 - DNA, 16 bp, synthetic construct
  misc_feature 1..16: note = synthetic [barcode part1]
  source 1..16: mol_type = other DNA
tacttcaccacctcac

SEQ ID NO: 25080 - DNA, 16 bp, synthetic construct
  misc_feature 1..16: note = synthetic [barcode part1]
  source 1..16: mol_type = other DNA
aaccgcgtgtgtaatc

SEQ ID NO: 25081 - DNA, 16 bp, synthetic construct
  misc_feature 1..16: note = synthetic [barcode part1]
  source 1..16: mol_type = other DNA
ttcttgaccttctggc

SEQ ID NO: 25082 - DNA, 16 bp, synthetic construct
  misc_feature 1..16: note = synthetic [barcode part1]
  source 1..16: mol_type = other DNA
tctagtggtagtccag

SEQ ID NO: 25083 - DNA, 16 bp, synthetic construct
  misc_feature 1..16: note = synthetic [barcode part1]
  source 1..16: mol_type = other DNA
gattgacctgatcgac

SEQ ID NO: 25084 - DNA, 16 bp, synthetic construct
  misc_feature 1..16: note = synthetic [barcode part1]
  source 1..16: mol_type = other DNA
tataggccaggacgac

SEQ ID NO: 25085 - DNA, 16 bp, synthetic construct
  misc_feature 1..16: note = synthetic [barcode part1]
  source 1..16: mol_type = other DNA
tggaatctcggaactc

SEQ ID NO: 25086 - DNA, 16 bp, synthetic construct
  misc_feature 1..16: note = synthetic [barcode part1]
  source 1..16: mol_type = other DNA
accagattgaactgcc

SEQ ID NO: 25087 - DNA, 16 bp, synthetic construct
  misc_feature 1..16: note = synthetic [barcode part1]
  source 1..16: mol_type = other DNA
gatcgacactacgact

SEQ ID NO: 25088 - DNA, 16 bp, synthetic construct
  misc_feature 1..16: note = synthetic [barcode part1]
  source 1..16: mol_type = other DNA
cgtcagagtgaagatt

SEQ ID NO: 25089 - DNA, 16 bp, synthetic construct
  misc_feature 1..16: note = synthetic [barcode part1]
  source 1..16: mol_type = other DNA
caataccaccttggag

SEQ ID NO: 25090 - DNA, 16 bp, synthetic construct
  misc_feature 1..16: note = synthetic [barcode part1]
  source 1..16: mol_type = other DNA
tgtgtaactcagtcct

SEQ ID NO: 25091 - DNA, 16 bp, synthetic construct
  misc_feature 1..16: note = synthetic [barcode part1]
  source 1..16: mol_type = other DNA
tccttcggtcttctag

SEQ ID NO: 25092 - DNA, 16 bp, synthetic construct
  misc_feature 1..16: note = synthetic [barcode part1]
  source 1..16: mol_type = other DNA
tggatacagagatcac

SEQ ID NO: 25093 - DNA, 16 bp, synthetic construct
  misc_feature 1..16: note = synthetic [barcode part1]
  source 1..16: mol_type = other DNA
cgcagaagactaccag

SEQ ID NO: 25094 - DNA, 16 bp, synthetic construct
  misc_feature 1..16: note = synthetic [barcode part1]
  source 1..16: mol_type = other DNA
gacacaccgattacgt

SEQ ID NO: 25095 - DNA, 16 bp, synthetic construct
  misc_feature 1..16: note = synthetic [barcode part1]
  source 1..16: mol_type = other DNA
tgcgccagttatacag

SEQ ID NO: 25096 - DNA, 16 bp, synthetic construct
  misc_feature 1..16: note = synthetic [barcode part1]
  source 1..16: mol_type = other DNA
tgcagtgataagtggt

SEQ ID NO: 25097 - DNA, 16 bp, synthetic construct
  misc_feature 1..16: note = synthetic [barcode part1]
  source 1..16: mol_type = other DNA
gacttaggattgtcgc

SEQ ID NO: 25098 - DNA, 16 bp, synthetic construct
  misc_feature 1..16: note = synthetic [barcode part1]
  source 1..16: mol_type = other DNA
aggtcgttgtctccgt

SEQ ID NO: 25099 - DNA, 16 bp, synthetic construct
  misc_feature 1..16: note = synthetic [barcode part1]
  source 1..16: mol_type = other DNA
gaagaattcgtgcggc

SEQ ID NO: 25100 - DNA, 16 bp, synthetic construct
  misc_feature 1..16: note = synthetic [barcode part1]
  source 1..16: mol_type = other DNA
tcttggaccgttcgtg

SEQ ID NO: 25101 - DNA, 16 bp, synthetic construct
  misc_feature 1..16: note = synthetic [barcode part1]
  source 1..16: mol_type = other DNA
ttgacacgaggaattg

SEQ ID NO: 25102 - DNA, 16 bp, synthetic construct
  misc_feature 1..16: note = synthetic [barcode part1]
  source 1..16: mol_type = other DNA
cctgtcagactatatc

SEQ ID NO: 25103 - DNA, 16 bp, synthetic construct
  misc_feature 1..16: note = synthetic [barcode part1]
  source 1..16: mol_type = other DNA
ttcactggtgtggcct

SEQ ID NO: 25104 - DNA, 16 bp, synthetic construct
  misc_feature 1..16: note = synthetic [barcode part1]
  source 1..16: mol_type = other DNA
tggtacgttcttgact

SEQ ID NO: 25105 - DNA, 16 bp, synthetic construct
  misc_feature 1..16: note = synthetic [barcode part1]
  source 1..16: mol_type = other DNA
cctcaacacactcgac

SEQ ID NO: 25106 - DNA, 16 bp, synthetic construct
  misc_feature 1..16: note = synthetic [barcode part1]
  source 1..16: mol_type = other DNA
ttgccacggtagaatc

SEQ ID NO: 25107 - DNA, 16 bp, synthetic construct
  misc_feature 1..16: note = synthetic [barcode part1]
  source 1..16: mol_type = other DNA
tgcactcaacacgaac

SEQ ID NO: 25108 - DNA, 16 bp, synthetic construct
  misc_feature 1..16: note = synthetic [barcode part1]
  source 1..16: mol_type = other DNA
tgtagacagactcgtc

SEQ ID NO: 25109 - DNA, 16 bp, synthetic construct
  misc_feature 1..16: note = synthetic [barcode part1]
  source 1..16: mol_type = other DNA
gtgtgattgatcgcac

SEQ ID NO: 25110 - DNA, 16 bp, synthetic construct
  misc_feature 1..16: note = synthetic [barcode part1]
  source 1..16: mol_type = other DNA
accaggtattcctgtt

SEQ ID NO: 25111 - DNA, 16 bp, synthetic construct
  misc_feature 1..16: note = synthetic [barcode part1]
  source 1..16: mol_type = other DNA
gacgaagatacctaac

SEQ ID NO: 25112 - DNA, 16 bp, synthetic construct
  misc_feature 1..16: note = synthetic [barcode part1]
  source 1..16: mol_type = other DNA
cggagatactcttgtg

SEQ ID NO: 25113 - DNA, 16 bp, synthetic construct
  misc_feature 1..16: note = synthetic [barcode part1]
  source 1..16: mol_type = other DNA
gtcgaatcaggagtgc

SEQ ID NO: 25114 - DNA, 16 bp, synthetic construct
  misc_feature 1..16: note = synthetic [barcode part1]
  source 1..16: mol_type = other DNA
acacactcttgacttg

SEQ ID NO: 25115 - DNA, 16 bp, synthetic construct
  misc_feature 1..16: note = synthetic [barcode part1]
  source 1..16: mol_type = other DNA
actgtgtggttacacg

SEQ ID NO: 25116 - DNA, 16 bp, synthetic construct
  misc_feature 1..16: note = synthetic [barcode part1]
  source 1..16: mol_type = other DNA
gaacagagagtggact

SEQ ID NO: 25117 - DNA, 16 bp, synthetic construct
  misc_feature 1..16: note = synthetic [barcode part1]
  source 1..16: mol_type = other DNA
ccacctactcacttac

SEQ ID NO: 25118 - DNA, 16 bp, synthetic construct
  misc_feature 1..16: note = synthetic [barcode part1]
  source 1..16: mol_type = other DNA
aaggtcgagttatacg

SEQ ID NO: 25119 - DNA, 16 bp, synthetic construct
  misc_feature 1..16: note = synthetic [barcode part1]
  source 1..16: mol_type = other DNA
tgatatagactgcgcc

SEQ ID NO: 25120 - DNA, 16 bp, synthetic construct
  misc_feature 1..16: note = synthetic [barcode part1]
  source 1..16: mol_type = other DNA
acgtgacagaagatct

SEQ ID NO: 25121 - DNA, 16 bp, synthetic construct
  misc_feature 1..16: note = synthetic [barcode part1]
  source 1..16: mol_type = other DNA
accaatacctgcgagt

SEQ ID NO: 25122 - DNA, 16 bp, synthetic construct
  misc_feature 1..16: note = synthetic [barcode part1]
  source 1..16: mol_type = other DNA
gcgaagtcactcgaag

SEQ ID NO: 25123 - DNA, 16 bp, synthetic construct
  misc_feature 1..16: note = synthetic [barcode part1]
  source 1..16: mol_type = other DNA
gtactgaacgtctgac

SEQ ID NO: 25124 - DNA, 16 bp, synthetic construct
  misc_feature 1..16: note = synthetic [barcode part1]
  source 1..16: mol_type = other DNA
gacacttcaccttgcg

SEQ ID NO: 25125 - DNA, 16 bp, synthetic construct
  misc_feature 1..16: note = synthetic [barcode part1]
  source 1..16: mol_type = other DNA
ttggacgcctattact

SEQ ID NO: 25126 - DNA, 16 bp, synthetic construct
  misc_feature 1..16: note = synthetic [barcode part1]
  source 1..16: mol_type = other DNA
taactctcggtcacgc

SEQ ID NO: 25127 - DNA, 16 bp, synthetic construct
  misc_feature 1..16: note = synthetic [barcode part1]
  source 1..16: mol_type = other DNA
tcgagacgtgaatagt

SEQ ID NO: 25128 - DNA, 16 bp, synthetic construct
  misc_feature 1..16: note = synthetic [barcode part1]
  source 1..16: mol_type = other DNA
attattgtctcgcacg

SEQ ID NO: 25129 - DNA, 16 bp, synthetic construct
  misc_feature 1..16: note = synthetic [barcode part1]
  source 1..16: mol_type = other DNA
atctctgtctggtagt

SEQ ID NO: 25130 - DNA, 16 bp, synthetic construct
  misc_feature 1..16: note = synthetic [barcode part1]
  source 1..16: mol_type = other DNA
tagtgaaggtggaacg

SEQ ID NO: 25131 - DNA, 16 bp, synthetic construct
  misc_feature 1..16: note = synthetic [barcode part1]
  source 1..16: mol_type = other DNA
cggattacaacttggc

SEQ ID NO: 25132 - DNA, 16 bp, synthetic construct
  misc_feature 1..16: note = synthetic [barcode part1]
  source 1..16: mol_type = other DNA
tggtacgtgacttctt

SEQ ID NO: 25133 - DNA, 16 bp, synthetic construct
  misc_feature 1..16: note = synthetic [barcode part1]
  source 1..16: mol_type = other DNA
aacacggtcactggag

SEQ ID NO: 25134 - DNA, 16 bp, synthetic construct
  misc_feature 1..16: note = synthetic [barcode part1]
  source 1..16: mol_type = other DNA
attcgcagattgtgcg

SEQ ID NO: 25135 - DNA, 16 bp, synthetic construct
  misc_feature 1..16: note = synthetic [barcode part1]
  source 1..16: mol_type = other DNA
tcgtggactattgtct

SEQ ID NO: 25136 - DNA, 16 bp, synthetic construct
  misc_feature 1..16: note = synthetic [barcode part1]
  source 1..16: mol_type = other DNA
agatctctagtcgacg

SEQ ID NO: 25137 - DNA, 16 bp, synthetic construct
  misc_feature 1..16: note = synthetic [barcode part1]
  source 1..16: mol_type = other DNA
tagaaggtgattgcgt

SEQ ID NO: 25138 - DNA, 16 bp, synthetic construct
  misc_feature 1..16: note = synthetic [barcode part1]
  source 1..16: mol_type = other DNA
acaataggacgacgag

SEQ ID NO: 25139 - DNA, 16 bp, synthetic construct
  misc_feature 1..16: note = synthetic [barcode part1]
  source 1..16: mol_type = other DNA
ttgtcacctacgaact

SEQ ID NO: 25140 - DNA, 16 bp, synthetic construct
  misc_feature 1..16: note = synthetic [barcode part1]
  source 1..16: mol_type = other DNA
aatcaagttaccgccg

SEQ ID NO: 25141 - DNA, 16 bp, synthetic construct
  misc_feature 1..16: note = synthetic [barcode part1]
  source 1..16: mol_type = other DNA
taccactcggagagtt

SEQ ID NO: 25142 - DNA, 16 bp, synthetic construct
  misc_feature 1..16: note = synthetic [barcode part1]
  source 1..16: mol_type = other DNA
tggatcgcgtactcct

SEQ ID NO: 25143 - DNA, 16 bp, synthetic construct
  misc_feature 1..16: note = synthetic [barcode part1]
  source 1..16: mol_type = other DNA
tgcaacggccttaagt

SEQ ID NO: 25144 - DNA, 16 bp, synthetic construct
  misc_feature 1..16: note = synthetic [barcode part1]
  source 1..16: mol_type = other DNA
gaccgcgatatactgt

SEQ ID NO: 25145 - DNA, 16 bp, synthetic construct
  misc_feature 1..16: note = synthetic [barcode part1]
  source 1..16: mol_type = other DNA
atcgagtagtgtagac

SEQ ID NO: 25146 - DNA, 16 bp, synthetic construct
  misc_feature 1..16: note = synthetic [barcode part1]
  source 1..16: mol_type = other DNA
atctacgacacagtcg

SEQ ID NO: 25147 - DNA, 16 bp, synthetic construct
  misc_feature 1..16: note = synthetic [barcode part1]
  source 1..16: mol_type = other DNA
agtaagaactgcctcc

SEQ ID NO: 25148 - DNA, 16 bp, synthetic construct
  misc_feature 1..16: note = synthetic [barcode part1]
  source 1..16: mol_type = other DNA
agatagagttcgcctc

SEQ ID NO: 25149 - DNA, 16 bp, synthetic construct
  misc_feature 1..16: note = synthetic [barcode part1]
  source 1..16: mol_type = other DNA
caatacctccaaggtg

SEQ ID NO: 25150 - DNA, 16 bp, synthetic construct
  misc_feature 1..16: note = synthetic [barcode part1]
  source 1..16: mol_type = other DNA
tgagttgtgcacctcc

SEQ ID NO: 25151 - DNA, 16 bp, synthetic construct
  misc_feature 1..16: note = synthetic [barcode part1]
  source 1..16: mol_type = other DNA
tcgttgagattcggtg

SEQ ID NO: 25152 - DNA, 16 bp, synthetic construct
  misc_feature 1..16: note = synthetic [barcode part1]
  source 1..16: mol_type = other DNA
cgtcctagaatccgtc

SEQ ID NO: 25153 - DNA, 16 bp, synthetic construct
  misc_feature 1..16: note = synthetic [barcode part1]
  source 1..16: mol_type = other DNA
gaaggaattgaccgag

SEQ ID NO: 25154 - DNA, 16 bp, synthetic construct
  misc_feature 1..16: note = synthetic [barcode part1]
  source 1..16: mol_type = other DNA
tggcacgatcactctc

SEQ ID NO: 25155 - DNA, 16 bp, synthetic construct
  misc_feature 1..16: note = synthetic [barcode part1]
  source 1..16: mol_type = other DNA
agtcgtagtgtatcgc

SEQ ID NO: 25156 - DNA, 16 bp, synthetic construct
  misc_feature 1..16: note = synthetic [barcode part1]
  source 1..16: mol_type = other DNA
acgagtgattctgaag

SEQ ID NO: 25157 - DNA, 16 bp, synthetic construct
  misc_feature 1..16: note = synthetic [barcode part1]
  source 1..16: mol_type = other DNA
cgtgacaacaggtggt

SEQ ID NO: 25158 - DNA, 16 bp, synthetic construct
  misc_feature 1..16: note = synthetic [barcode part1]
  source 1..16: mol_type = other DNA
tacgatctgcaggttg

SEQ ID NO: 25159 - DNA, 16 bp, synthetic construct
  misc_feature 1..16: note = synthetic [barcode part1]
  source 1..16: mol_type = other DNA
gtacgatacaccagtc

SEQ ID NO: 25160 - DNA, 16 bp, synthetic construct
  misc_feature 1..16: note = synthetic [barcode part1]
  source 1..16: mol_type = other DNA
ttcaacgcgaatcgtg

SEQ ID NO: 25161 - DNA, 16 bp, synthetic construct
  misc_feature 1..16: note = synthetic [barcode part1]
  source 1..16: mol_type = other DNA
atactcctcagtggtt

SEQ ID NO: 25162 - DNA, 16 bp, synthetic construct
  misc_feature 1..16: note = synthetic [barcode part1]
  source 1..16: mol_type = other DNA
tctccacagtgatccg

SEQ ID NO: 25163 - DNA, 16 bp, synthetic construct
  misc_feature 1..16: note = synthetic [barcode part1]
  source 1..16: mol_type = other DNA
aatcgcaactacgcac

SEQ ID NO: 25164 - DNA, 16 bp, synthetic construct
  misc_feature 1..16: note = synthetic [barcode part1]
  source 1..16: mol_type = other DNA
tgttgtcgatacgtct

SEQ ID NO: 25165 - DNA, 16 bp, synthetic construct
  misc_feature 1..16: note = synthetic [barcode part1]
  source 1..16: mol_type = other DNA
gtgcctcaattcagtt

SEQ ID NO: 25166 - DNA, 16 bp, synthetic construct
  misc_feature 1..16: note = synthetic [barcode part1]
  source 1..16: mol_type = other DNA
ttctgagaggtctcag

SEQ ID NO: 25167 - DNA, 16 bp, synthetic construct
  misc_feature 1..16: note = synthetic [barcode part1]
  source 1..16: mol_type = other DNA
tagtcgattaaccggc

SEQ ID NO: 25168 - DNA, 16 bp, synthetic construct
  misc_feature 1..16: note = synthetic [barcode part1]
  source 1..16: mol_type = other DNA
tggcgcgtaatctcct

SEQ ID NO: 25169 - DNA, 16 bp, synthetic construct
  misc_feature 1..16: note = synthetic [barcode part1]
  source 1..16: mol_type = other DNA
tgcagtacctactcgc

SEQ ID NO: 25170 - DNA, 16 bp, synthetic construct
  misc_feature 1..16: note = synthetic [barcode part1]
  source 1..16: mol_type = other DNA
tgtcaccaggtacctc

SEQ ID NO: 25171 - DNA, 16 bp, synthetic construct
  misc_feature 1..16: note = synthetic [barcode part1]
  source 1..16: mol_type = other DNA
gcgtcactacctgttg

SEQ ID NO: 25172 - DNA, 16 bp, synthetic construct
  misc_feature 1..16: note = synthetic [barcode part1]
  source 1..16: mol_type = other DNA
aggactcgataccgtt

SEQ ID NO: 25173 - DNA, 16 bp, synthetic construct
  misc_feature 1..16: note = synthetic [barcode part1]
  source 1..16: mol_type = other DNA
cgtacttaggttgtct

SEQ ID NO: 25174 - DNA, 16 bp, synthetic construct
  misc_feature 1..16: note = synthetic [barcode part1]
  source 1..16: mol_type = other DNA
ataggtcacgcgattc

SEQ ID NO: 25175 - DNA, 16 bp, synthetic construct
  misc_feature 1..16: note = synthetic [barcode part1]
  source 1..16: mol_type = other DNA
aactcttgaggtggtc

SEQ ID NO: 25176 - DNA, 16 bp, synthetic construct
  misc_feature 1..16: note = synthetic [barcode part1]
  source 1..16: mol_type = other DNA
tgtaggtgaacaacac

SEQ ID NO: 25177 - DNA, 16 bp, synthetic construct
  misc_feature 1..16: note = synthetic [barcode part1]
  source 1..16: mol_type = other DNA
tggattggttatcggc

SEQ ID NO: 25178 - DNA, 16 bp, synthetic construct
  misc_feature 1..16: note = synthetic [barcode part1]
  source 1..16: mol_type = other DNA
agatctactgccactt

SEQ ID NO: 25179 - DNA, 16 bp, synthetic construct
  misc_feature 1..16: note = synthetic [barcode part1]
  source 1..16: mol_type = other DNA
acttacttcgcggtgc

SEQ ID NO: 25180 - DNA, 16 bp, synthetic construct
  misc_feature 1..16: note = synthetic [barcode part1]
  source 1..16: mol_type = other DNA
agtaattcctccacac

SEQ ID NO: 25181 - DNA, 16 bp, synthetic construct
  misc_feature 1..16: note = synthetic [barcode part1]
  source 1..16: mol_type = other DNA
cgaagttgtatcgtgc

SEQ ID NO: 25182 - DNA, 16 bp, synthetic construct
  misc_feature 1..16: note = synthetic [barcode part1]
  source 1..16: mol_type = other DNA
tcaacaacgccgaact

SEQ ID NO: 25183 - DNA, 16 bp, synthetic construct
  misc_feature 1..16: note = synthetic [barcode part1]
  source 1..16: mol_type = other DNA
attggtgtcgtgcaac

SEQ ID NO: 25184 - DNA, 16 bp, synthetic construct
  misc_feature 1..16: note = synthetic [barcode part1]
  source 1..16: mol_type = other DNA
gactacgcgtacaact

SEQ ID NO: 25185 - DNA, 16 bp, synthetic construct
  misc_feature 1..16: note = synthetic [barcode part1]
  source 1..16: mol_type = other DNA
aagtccaatccggatc

SEQ ID NO: 25186 - DNA, 16 bp, synthetic construct
  misc_feature 1..16: note = synthetic [barcode part1]
  source 1..16: mol_type = other DNA
atcctcgacgaagatc

SEQ ID NO: 25187 - DNA, 16 bp, synthetic construct
  misc_feature 1..16: note = synthetic [barcode part1]
  source 1..16: mol_type = other DNA
gaggagttctatagac

SEQ ID NO: 25188 - DNA, 16 bp, synthetic construct
  misc_feature 1..16: note = synthetic [barcode part1]
  source 1..16: mol_type = other DNA
cgataggttcactgtg

SEQ ID NO: 25189 - DNA, 16 bp, synthetic construct
  misc_feature 1..16: note = synthetic [barcode part1]
  source 1..16: mol_type = other DNA
gtagaagtggcaatct

SEQ ID NO: 25190 - DNA, 16 bp, synthetic construct
  misc_feature 1..16: note = synthetic [barcode part1]
  source 1..16: mol_type = other DNA
attcacgccttcgacg

SEQ ID NO: 25191 - DNA, 16 bp, synthetic construct
  misc_feature 1..16: note = synthetic [barcode part1]
  source 1..16: mol_type = other DNA
acagttcactctcgcg

SEQ ID NO: 25192 - DNA, 16 bp, synthetic construct
  misc_feature 1..16: note = synthetic [barcode part1]
  source 1..16: mol_type = other DNA
agtatcagtcggtcgt

SEQ ID NO: 25193 - DNA, 16 bp, synthetic construct
  misc_feature 1..16: note = synthetic [barcode part1]
  source 1..16: mol_type = other DNA
cagatacctctcgacc

SEQ ID NO: 25194 - DNA, 16 bp, synthetic construct
  misc_feature 1..16: note = synthetic [barcode part1]
  source 1..16: mol_type = other DNA
cggtagatcacgagtg

SEQ ID NO: 25195 - DNA, 16 bp, synthetic construct
  misc_feature 1..16: note = synthetic [barcode part1]
  source 1..16: mol_type = other DNA
tatacggaggcacttc

SEQ ID NO: 25196 - DNA, 16 bp, synthetic construct
  misc_feature 1..16: note = synthetic [barcode part1]
  source 1..16: mol_type = other DNA
tgtgtcaagtcaagag

SEQ ID NO: 25197 - DNA, 16 bp, synthetic construct
  misc_feature 1..16: note = synthetic [barcode part1]
  source 1..16: mol_type = other DNA
acaatccacaagagtg

SEQ ID NO: 25198 - DNA, 16 bp, synthetic construct
  misc_feature 1..16: note = synthetic [barcode part1]
  source 1..16: mol_type = other DNA
tgcgccagttaatacg

SEQ ID NO: 25199 - DNA, 16 bp, synthetic construct
  misc_feature 1..16: note = synthetic [barcode part1]
  source 1..16: mol_type = other DNA
gttgcaaccacctacc

SEQ ID NO: 25200 - DNA, 16 bp, synthetic construct
  misc_feature 1..16: note = synthetic [barcode part1]
  source 1..16: mol_type = other DNA
acaggttggttcgtac

SEQ ID NO: 25201 - DNA, 16 bp, synthetic construct
  misc_feature 1..16: note = synthetic [barcode part1]
  source 1..16: mol_type = other DNA
ataggttcagtctcct

SEQ ID NO: 25202 - DNA, 16 bp, synthetic construct
  misc_feature 1..16: note = synthetic [barcode part1]
  source 1..16: mol_type = other DNA
cactcggattgaggag

SEQ ID NO: 25203 - DNA, 16 bp, synthetic construct
  misc_feature 1..16: note = synthetic [barcode part1]
  source 1..16: mol_type = other DNA
acgattccgtcaagtg

SEQ ID NO: 25204 - DNA, 16 bp, synthetic construct
  misc_feature 1..16: note = synthetic [barcode part1]
  source 1..16: mol_type = other DNA
ccagttagattccgag

SEQ ID NO: 25205 - DNA, 16 bp, synthetic construct
  misc_feature 1..16: note = synthetic [barcode part1]
  source 1..16: mol_type = other DNA
cctgtgtgtgtaagac

SEQ ID NO: 25206 - DNA, 16 bp, synthetic construct
  misc_feature 1..16: note = synthetic [barcode part1]
  source 1..16: mol_type = other DNA
cctgagactctgaagt

SEQ ID NO: 25207 - DNA, 16 bp, synthetic construct
  misc_feature 1..16: note = synthetic [barcode part1]
  source 1..16: mol_type = other DNA
gcagtattcaatcggc

SEQ ID NO: 25208 - DNA, 16 bp, synthetic construct
  misc_feature 1..16: note = synthetic [barcode part1]
  source 1..16: mol_type = other DNA
ccaggaatacaagttg

SEQ ID NO: 25209 - DNA, 16 bp, synthetic construct
  misc_feature 1..16: note = synthetic [barcode part1]
  source 1..16: mol_type = other DNA
tgttaggccgttagac

SEQ ID NO: 25210 - DNA, 16 bp, synthetic construct
  misc_feature 1..16: note = synthetic [barcode part1]
  source 1..16: mol_type = other DNA
gttatctccacaagtc

SEQ ID NO: 25211 - DNA, 16 bp, synthetic construct
  misc_feature 1..16: note = synthetic [barcode part1]
  source 1..16: mol_type = other DNA
gtgtccggagtagtag

SEQ ID NO: 25212 - DNA, 16 bp, synthetic construct
  misc_feature 1..16: note = synthetic [barcode part1]
  source 1..16: mol_type = other DNA
ttagtgcgcactagtg

SEQ ID NO: 25213 - DNA, 16 bp, synthetic construct
  misc_feature 1..16: note = synthetic [barcode part1]
  source 1..16: mol_type = other DNA
taacgtcctgcctgtg

SEQ ID NO: 25214 - DNA, 16 bp, synthetic construct
  misc_feature 1..16: note = synthetic [barcode part1]
  source 1..16: mol_type = other DNA
gtcgcaatatccactt

SEQ ID NO: 25215 - DNA, 16 bp, synthetic construct
  misc_feature 1..16: note = synthetic [barcode part1]
  source 1..16: mol_type = other DNA
tgtgtggcgttccgtt

SEQ ID NO: 25216 - DNA, 16 bp, synthetic construct
  misc_feature 1..16: note = synthetic [barcode part1]
  source 1..16: mol_type = other DNA
gattcggtacacttct

SEQ ID NO: 25217 - DNA, 16 bp, synthetic construct
  misc_feature 1..16: note = synthetic [barcode part1]
  source 1..16: mol_type = other DNA
acagacctagttcctt

SEQ ID NO: 25218 - DNA, 16 bp, synthetic construct
  misc_feature 1..16: note = synthetic [barcode part1]
  source 1..16: mol_type = other DNA
agttcgtgcagatctg

SEQ ID NO: 25219 - DNA, 16 bp, synthetic construct
  misc_feature 1..16: note = synthetic [barcode part1]
  source 1..16: mol_type = other DNA
gtgcacagttgactgt

SEQ ID NO: 25220 - DNA, 16 bp, synthetic construct
  misc_feature 1..16: note = synthetic [barcode part1]
  source 1..16: mol_type = other DNA
gttaggttccgtattc

SEQ ID NO: 25221 - DNA, 16 bp, synthetic construct
  misc_feature 1..16: note = synthetic [barcode part1]
  source 1..16: mol_type = other DNA
gcgtgacagaattaac

SEQ ID NO: 25222 - DNA, 16 bp, synthetic construct
  misc_feature 1..16: note = synthetic [barcode part1]
  source 1..16: mol_type = other DNA
gaacttgtagaaggtc

SEQ ID NO: 25223 - DNA, 16 bp, synthetic construct
  misc_feature 1..16: note = synthetic [barcode part1]
  source 1..16: mol_type = other DNA
ataggaacgacctaac

SEQ ID NO: 25224 - DNA, 16 bp, synthetic construct
  misc_feature 1..16: note = synthetic [barcode part1]
  source 1..16: mol_type = other DNA
cgcctcgaatattcgc

SEQ ID NO: 25225 - DNA, 16 bp, synthetic construct
  misc_feature 1..16: note = synthetic [barcode part1]
  source 1..16: mol_type = other DNA
atctcacgcgaagtgt

SEQ ID NO: 25226 - DNA, 16 bp, synthetic construct
  misc_feature 1..16: note = synthetic [barcode part1]
  source 1..16: mol_type = other DNA
ccttaatacacgactc

SEQ ID NO: 25227 - DNA, 16 bp, synthetic construct
  misc_feature 1..16: note = synthetic [barcode part1]
  source 1..16: mol_type = other DNA
agtaggagaaggtcgt

SEQ ID NO: 25228 - DNA, 16 bp, synthetic construct
  misc_feature 1..16: note = synthetic [barcode part1]
  source 1..16: mol_type = other DNA
cacttcctgatagttg

SEQ ID NO: 25229 - DNA, 16 bp, synthetic construct
  misc_feature 1..16: note = synthetic [barcode part1]
  source 1..16: mol_type = other DNA
tcttgccggatagtag

SEQ ID NO: 25230 - DNA, 16 bp, synthetic construct
  misc_feature 1..16: note = synthetic [barcode part1]
  source 1..16: mol_type = other DNA
acttgttggtaccgcc

SEQ ID NO: 25231 - DNA, 16 bp, synthetic construct
  misc_feature 1..16: note = synthetic [barcode part1]
  source 1..16: mol_type = other DNA
attcgttgcagtgttc

SEQ ID NO: 25232 - DNA, 16 bp, synthetic construct
  misc_feature 1..16: note = synthetic [barcode part1]
  source 1..16: mol_type = other DNA
tgttggttcagagaag

SEQ ID NO: 25233 - DNA, 16 bp, synthetic construct
  misc_feature 1..16: note = synthetic [barcode part1]
  source 1..16: mol_type = other DNA
cgttgagagtggttct

SEQ ID NO: 25234 - DNA, 16 bp, synthetic construct
  misc_feature 1..16: note = synthetic [barcode part1]
  source 1..16: mol_type = other DNA
caatcgtgtaactgcg

SEQ ID NO: 25235 - DNA, 16 bp, synthetic construct
  misc_feature 1..16: note = synthetic [barcode part1]
  source 1..16: mol_type = other DNA
taagtcggtgcgagac

SEQ ID NO: 25236 - DNA, 16 bp, synthetic construct
  misc_feature 1..16: note = synthetic [barcode part1]
  source 1..16: mol_type = other DNA
tccgtgtcgattcgac

SEQ ID NO: 25237 - DNA, 16 bp, synthetic construct
  misc_feature 1..16: note = synthetic [barcode part1]
  source 1..16: mol_type = other DNA
tgagtctctcagacag

SEQ ID NO: 25238 - DNA, 16 bp, synthetic construct
  misc_feature 1..16: note = synthetic [barcode part1]
  source 1..16: mol_type = other DNA
aaccgttactcttacg

SEQ ID NO: 25239 - DNA, 16 bp, synthetic construct
  misc_feature 1..16: note = synthetic [barcode part1]
  source 1..16: mol_type = other DNA
gtgacaggaacacctg

SEQ ID NO: 25240 - DNA, 16 bp, synthetic construct
  misc_feature 1..16: note = synthetic [barcode part1]
  source 1..16: mol_type = other DNA
atctggtatcgccaag

SEQ ID NO: 25241 - DNA, 16 bp, synthetic construct
  misc_feature 1..16: note = synthetic [barcode part1]
  source 1..16: mol_type = other DNA
acttggtaaccgtcag

SEQ ID NO: 25242 - DNA, 16 bp, synthetic construct
  misc_feature 1..16: note = synthetic [barcode part1]
  source 1..16: mol_type = other DNA
ccgactcttcgcaagt

SEQ ID NO: 25243 - DNA, 16 bp, synthetic construct
  misc_feature 1..16: note = synthetic [barcode part1]
  source 1..16: mol_type = other DNA
cgattggacactgtgt

SEQ ID NO: 25244 - DNA, 16 bp, synthetic construct
  misc_feature 1..16: note = synthetic [barcode part1]
  source 1..16: mol_type = other DNA
gtactcttgcgttcct

SEQ ID NO: 25245 - DNA, 16 bp, synthetic construct
  misc_feature 1..16: note = synthetic [barcode part1]
  source 1..16: mol_type = other DNA
atataggccacgttcg

SEQ ID NO: 25246 - DNA, 16 bp, synthetic construct
  misc_feature 1..16: note = synthetic [barcode part1]
  source 1..16: mol_type = other DNA
tgactagtacgacacc

SEQ ID NO: 25247 - DNA, 16 bp, synthetic construct
  misc_feature 1..16: note = synthetic [barcode part1]
  source 1..16: mol_type = other DNA
agttcctccaggcact

SEQ ID NO: 25248 - DNA, 16 bp, synthetic construct
  misc_feature 1..16: note = synthetic [barcode part1]
  source 1..16: mol_type = other DNA
gcgtctgcaggataag

SEQ ID NO: 25249 - DNA, 16 bp, synthetic construct
  misc_feature 1..16: note = synthetic [barcode part1]
  source 1..16: mol_type = other DNA
gataatctcggcgact

SEQ ID NO: 25250 - DNA, 16 bp, synthetic construct
  misc_feature 1..16: note = synthetic [barcode part1]
  source 1..16: mol_type = other DNA
acaacgcaacttcggt

SEQ ID NO: 25251 - DNA, 16 bp, synthetic construct
  misc_feature 1..16: note = synthetic [barcode part1]
  source 1..16: mol_type = other DNA
tatctgcctcgagatt

SEQ ID NO: 25252 - DNA, 16 bp, synthetic construct
  misc_feature 1..16: note = synthetic [barcode part1]
  source 1..16: mol_type = other DNA
gtacctcagtcaccac

SEQ ID NO: 25253 - DNA, 16 bp, synthetic construct
  misc_feature 1..16: note = synthetic [barcode part1]
  source 1..16: mol_type = other DNA
ccgtgacgtcaattag

SEQ ID NO: 25254 - DNA, 16 bp, synthetic construct
  misc_feature 1..16: note = synthetic [barcode part1]
  source 1..16: mol_type = other DNA
tctgcctaataggcag

SEQ ID NO: 25255 - DNA, 16 bp, synthetic construct
  misc_feature 1..16: note = synthetic [barcode part1]
  source 1..16: mol_type = other DNA
caagattccgatcggt

SEQ ID NO: 25256 - DNA, 16 bp, synthetic construct
  misc_feature 1..16: note = synthetic [barcode part1]
  source 1..16: mol_type = other DNA
acttgccacagtgtcc

SEQ ID NO: 25257 - DNA, 16 bp, synthetic construct
  misc_feature 1..16: note = synthetic [barcode part1]
  source 1..16: mol_type = other DNA
tagaccaacgtgaggc

SEQ ID NO: 25258 - DNA, 16 bp, synthetic construct
  misc_feature 1..16: note = synthetic [barcode part1]
  source 1..16: mol_type = other DNA
tctgaaggaagtctcc

SEQ ID NO: 25259 - DNA, 16 bp, synthetic construct
  misc_feature 1..16: note = synthetic [barcode part1]
  source 1..16: mol_type = other DNA
gcgttagaccgtcctt

SEQ ID NO: 25260 - DNA, 16 bp, synthetic construct
  misc_feature 1..16: note = synthetic [barcode part1]
  source 1..16: mol_type = other DNA
gagatctgagtggacc

SEQ ID NO: 25261 - DNA, 16 bp, synthetic construct
  misc_feature 1..16: note = synthetic [barcode part1]
  source 1..16: mol_type = other DNA
tgcaaggatcaggtcg

SEQ ID NO: 25262 - DNA, 16 bp, synthetic construct
  misc_feature 1..16: note = synthetic [barcode part1]
  source 1..16: mol_type = other DNA
tgacgataagaacgtc

SEQ ID NO: 25263 - DNA, 16 bp, synthetic construct
  misc_feature 1..16: note = synthetic [barcode part1]
  source 1..16: mol_type = other DNA
aataatccgcaggaac

SEQ ID NO: 25264 - DNA, 16 bp, synthetic construct
  misc_feature 1..16: note = synthetic [barcode part1]
  source 1..16: mol_type = other DNA
cacgattgccactctg

SEQ ID NO: 25265 - DNA, 16 bp, synthetic construct
  misc_feature 1..16: note = synthetic [barcode part1]
  source 1..16: mol_type = other DNA
gagttcaattctccac

SEQ ID NO: 25266 - DNA, 16 bp, synthetic construct
  misc_feature 1..16: note = synthetic [barcode part1]
  source 1..16: mol_type = other DNA
gactactggtagttcg

SEQ ID NO: 25267 - DNA, 16 bp, synthetic construct
  misc_feature 1..16: note = synthetic [barcode part1]
  source 1..16: mol_type = other DNA
tgccgaactcgtacct

SEQ ID NO: 25268 - DNA, 16 bp, synthetic construct
  misc_feature 1..16: note = synthetic [barcode part1]
  source 1..16: mol_type = other DNA
gtcttacaacgtgtct

SEQ ID NO: 25269 - DNA, 16 bp, synthetic construct
  misc_feature 1..16: note = synthetic [barcode part1]
  source 1..16: mol_type = other DNA
accggactattctcgc

SEQ ID NO: 25270 - DNA, 16 bp, synthetic construct
  misc_feature 1..16: note = synthetic [barcode part1]
  source 1..16: mol_type = other DNA
ttaactcgcgactatc

SEQ ID NO: 25271 - DNA, 16 bp, synthetic construct
  misc_feature 1..16: note = synthetic [barcode part1]
  source 1..16: mol_type = other DNA
acactagacacttggc

SEQ ID NO: 25272 - DNA, 16 bp, synthetic construct
  misc_feature 1..16: note = synthetic [barcode part1]
  source 1..16: mol_type = other DNA
gagtgtccaggacagt

SEQ ID NO: 25273 - DNA, 16 bp, synthetic construct
  misc_feature 1..16: note = synthetic [barcode part1]
  source 1..16: mol_type = other DNA
gattgtcgatacagag

SEQ ID NO: 25274 - DNA, 16 bp, synthetic construct
  misc_feature 1..16: note = synthetic [barcode part1]
  source 1..16: mol_type = other DNA
atcggtgtagacctgt

SEQ ID NO: 25275 - DNA, 16 bp, synthetic construct
  misc_feature 1..16: note = synthetic [barcode part1]
  source 1..16: mol_type = other DNA
tcgaatcaatcgccag

SEQ ID NO: 25276 - DNA, 16 bp, synthetic construct
  misc_feature 1..16: note = synthetic [barcode part1]
  source 1..16: mol_type = other DNA
tcgtaccacaactcgc

SEQ ID NO: 25277 - DNA, 16 bp, synthetic construct
  misc_feature 1..16: note = synthetic [barcode part1]
  source 1..16: mol_type = other DNA
ataccactacttgtcg

SEQ ID NO: 25278 - DNA, 16 bp, synthetic construct
  misc_feature 1..16: note = synthetic [barcode part1]
  source 1..16: mol_type = other DNA
agagtgataggtgtct

SEQ ID NO: 25279 - DNA, 16 bp, synthetic construct
  misc_feature 1..16: note = synthetic [barcode part1]
  source 1..16: mol_type = other DNA
gatactacggtcggtt

SEQ ID NO: 25280 - DNA, 16 bp, synthetic construct
  misc_feature 1..16: note = synthetic [barcode part1]
  source 1..16: mol_type = other DNA
aagtgagtatcgtggt

SEQ ID NO: 25281 - DNA, 16 bp, synthetic construct
  misc_feature 1..16: note = synthetic [barcode part1]
  source 1..16: mol_type = other DNA
tgaagaacacagtcac

SEQ ID NO: 25282 - DNA, 16 bp, synthetic construct
  misc_feature 1..16: note = synthetic [barcode part1]
  source 1..16: mol_type = other DNA
attgattcacggcgtg

SEQ ID NO: 25283 - DNA, 16 bp, synthetic construct
  misc_feature 1..16: note = synthetic [barcode part1]
  source 1..16: mol_type = other DNA
caggtataaggtgatc

SEQ ID NO: 25284 - DNA, 16 bp, synthetic construct
  misc_feature 1..16: note = synthetic [barcode part1]
  source 1..16: mol_type = other DNA
tggcacgtcctattgc

SEQ ID NO: 25285 - DNA, 16 bp, synthetic construct
  misc_feature 1..16: note = synthetic [barcode part1]
  source 1..16: mol_type = other DNA
tgacgcggactatatc

SEQ ID NO: 25286 - DNA, 16 bp, synthetic construct
  misc_feature 1..16: note = synthetic [barcode part1]
  source 1..16: mol_type = other DNA
tcggattatacttccg

SEQ ID NO: 25287 - DNA, 16 bp, synthetic construct
  misc_feature 1..16: note = synthetic [barcode part1]
  source 1..16: mol_type = other DNA
cagactatctccacgc

SEQ ID NO: 25288 - DNA, 16 bp, synthetic construct
  misc_feature 1..16: note = synthetic [barcode part1]
  source 1..16: mol_type = other DNA
aactcagagtcgttgc

SEQ ID NO: 25289 - DNA, 16 bp, synthetic construct
  misc_feature 1..16: note = synthetic [barcode part1]
  source 1..16: mol_type = other DNA
ataaccgcacggttac

SEQ ID NO: 25290 - DNA, 16 bp, synthetic construct
  misc_feature 1..16: note = synthetic [barcode part1]
  source 1..16: mol_type = other DNA
tcaaggttactgcgac

SEQ ID NO: 25291 - DNA, 16 bp, synthetic construct
  misc_feature 1..16: note = synthetic [barcode part1]
  source 1..16: mol_type = other DNA
agacaatccttcggtg

SEQ ID NO: 25292 - DNA, 16 bp, synthetic construct
  misc_feature 1..16: note = synthetic [barcode part1]
  source 1..16: mol_type = other DNA
tggttaccttaacctg

SEQ ID NO: 25293 - DNA, 16 bp, synthetic construct
  misc_feature 1..16: note = synthetic [barcode part1]
  source 1..16: mol_type = other DNA
acgaacgttgtctgtg

SEQ ID NO: 25294 - DNA, 16 bp, synthetic construct
  misc_feature 1..16: note = synthetic [barcode part1]
  source 1..16: mol_type = other DNA
caagaggtatagttgc

SEQ ID NO: 25295 - DNA, 16 bp, synthetic construct
  misc_feature 1..16: note = synthetic [barcode part1]
  source 1..16: mol_type = other DNA
ttcttacctcgcactg

SEQ ID NO: 25296 - DNA, 16 bp, synthetic construct
  misc_feature 1..16: note = synthetic [barcode part1]
  source 1..16: mol_type = other DNA
agactctggtcttgag

SEQ ID NO: 25297 - DNA, 16 bp, synthetic construct
  misc_feature 1..16: note = synthetic [barcode part1]
  source 1..16: mol_type = other DNA
tcagtctactcggatt

SEQ ID NO: 25298 - DNA, 16 bp, synthetic construct
  misc_feature 1..16: note = synthetic [barcode part1]
  source 1..16: mol_type = other DNA
tccgccgtataccaac

SEQ ID NO: 25299 - DNA, 16 bp, synthetic construct
  misc_feature 1..16: note = synthetic [barcode part1]
  source 1..16: mol_type = other DNA
agtccaggtcgttagt

SEQ ID NO: 25300 - DNA, 16 bp, synthetic construct
  misc_feature 1..16: note = synthetic [barcode part1]
  source 1..16: mol_type = other DNA
aatcagtctgaggcct

SEQ ID NO: 25301 - DNA, 16 bp, synthetic construct
  misc_feature 1..16: note = synthetic [barcode part1]
  source 1..16: mol_type = other DNA
acaccagtccttaact

SEQ ID NO: 25302 - DNA, 16 bp, synthetic construct
  misc_feature 1..16: note = synthetic [barcode part1]
  source 1..16: mol_type = other DNA
tcttccgataatcgtg

SEQ ID NO: 25303 - DNA, 16 bp, synthetic construct
  misc_feature 1..16: note = synthetic [barcode part1]
  source 1..16: mol_type = other DNA
tcgactactctgagag

SEQ ID NO: 25304 - DNA, 16 bp, synthetic construct
  misc_feature 1..16: note = synthetic [barcode part1]
  source 1..16: mol_type = other DNA
gacctgacgtaggagt

SEQ ID NO: 25305 - DNA, 16 bp, synthetic construct
  misc_feature 1..16: note = synthetic [barcode part1]
  source 1..16: mol_type = other DNA
gtcaacgtactctact

SEQ ID NO: 25306 - DNA, 16 bp, synthetic construct
  misc_feature 1..16: note = synthetic [barcode part1]
  source 1..16: mol_type = other DNA
tggactaacgcgagac

SEQ ID NO: 25307 - DNA, 16 bp, synthetic construct
  misc_feature 1..16: note = synthetic [barcode part1]
  source 1..16: mol_type = other DNA
acctcgtatagaacgc

SEQ ID NO: 25308 - DNA, 16 bp, synthetic construct
  misc_feature 1..16: note = synthetic [barcode part1]
  source 1..16: mol_type = other DNA
aaggacaatctggtgt

SEQ ID NO: 25309 - DNA, 16 bp, synthetic construct
  misc_feature 1..16: note = synthetic [barcode part1]
  source 1..16: mol_type = other DNA
tagtgcagtcagaggc

SEQ ID NO: 25310 - DNA, 16 bp, synthetic construct
  misc_feature 1..16: note = synthetic [barcode part1]
  source 1..16: mol_type = other DNA
acacgtgtagtcggtt

SEQ ID NO: 25311 - DNA, 16 bp, synthetic construct
  misc_feature 1..16: note = synthetic [barcode part1]
  source 1..16: mol_type = other DNA
acactctgaaggcgtt

SEQ ID NO: 25312 - DNA, 16 bp, synthetic construct
  misc_feature 1..16: note = synthetic [barcode part1]
  source 1..16: mol_type = other DNA
tcacgagagtaacagt

SEQ ID NO: 25313 - DNA, 16 bp, synthetic construct
  misc_feature 1..16: note = synthetic [barcode part1]
  source 1..16: mol_type = other DNA
tcctcgtaacaattcg

SEQ ID NO: 25314 - DNA, 16 bp, synthetic construct
  misc_feature 1..16: note = synthetic [barcode part1]
  source 1..16: mol_type = other DNA
ccacgaaggtaacggt

SEQ ID NO: 25315 - DNA, 16 bp, synthetic construct
  misc_feature 1..16: note = synthetic [barcode part1]
  source 1..16: mol_type = other DNA
actgtctccgcaggtt

SEQ ID NO: 25316 - DNA, 16 bp, synthetic construct
  misc_feature 1..16: note = synthetic [barcode part1]
  source 1..16: mol_type = other DNA
tctggcgttactgaag

SEQ ID NO: 25317 - DNA, 16 bp, synthetic construct
  misc_feature 1..16: note = synthetic [barcode part1]
  source 1..16: mol_type = other DNA
aacctcaacggtgttg

SEQ ID NO: 25318 - DNA, 16 bp, synthetic construct
  misc_feature 1..16: note = synthetic [barcode part1]
  source 1..16: mol_type = other DNA
ccgacactcagtcttg

SEQ ID NO: 25319 - DNA, 16 bp, synthetic construct
  misc_feature 1..16: note = synthetic [barcode part1]
  source 1..16: mol_type = other DNA
tgtattcaacgacctc

SEQ ID NO: 25320 - DNA, 16 bp, synthetic construct
  misc_feature 1..16: note = synthetic [barcode part1]
  source 1..16: mol_type = other DNA
acttactctgcctgtc

SEQ ID NO: 25321 - DNA, 16 bp, synthetic construct
  misc_feature 1..16: note = synthetic [barcode part1]
  source 1..16: mol_type = other DNA
ttagtgcaccgtgtag

SEQ ID NO: 25322 - DNA, 16 bp, synthetic construct
  misc_feature 1..16: note = synthetic [barcode part1]
  source 1..16: mol_type = other DNA
aggcgaactcgaagtc

SEQ ID NO: 25323 - DNA, 16 bp, synthetic construct
  misc_feature 1..16: note = synthetic [barcode part1]
  source 1..16: mol_type = other DNA
gtaatagtgtctcgcg

SEQ ID NO: 25324 - DNA, 16 bp, synthetic construct
  misc_feature 1..16: note = synthetic [barcode part1]
  source 1..16: mol_type = other DNA
ttggagtccgtctacc

SEQ ID NO: 25325 - DNA, 16 bp, synthetic construct
  misc_feature 1..16: note = synthetic [barcode part1]
  source 1..16: mol_type = other DNA
cgacttaacgactcag

SEQ ID NO: 25326 - DNA, 16 bp, synthetic construct
  misc_feature 1..16: note = synthetic [barcode part1]
  source 1..16: mol_type = other DNA
attgcagacggtactc

SEQ ID NO: 25327 - DNA, 16 bp, synthetic construct
  misc_feature 1..16: note = synthetic [barcode part1]
  source 1..16: mol_type = other DNA
cgaggtaacgatcgtg

SEQ ID NO: 25328 - DNA, 16 bp, synthetic construct
  misc_feature 1..16: note = synthetic [barcode part1]
  source 1..16: mol_type = other DNA
attctgtactcgaacc

SEQ ID NO: 25329 - DNA, 16 bp, synthetic construct
  misc_feature 1..16: note = synthetic [barcode part1]
  source 1..16: mol_type = other DNA
gttggatcagaggcac

SEQ ID NO: 25330 - DNA, 16 bp, synthetic construct
  misc_feature 1..16: note = synthetic [barcode part1]
  source 1..16: mol_type = other DNA
aggataggtcttgcct

SEQ ID NO: 25331 - DNA, 16 bp, synthetic construct
  misc_feature 1..16: note = synthetic [barcode part1]
  source 1..16: mol_type = other DNA
gcgtagagataattcg

SEQ ID NO: 25332 - DNA, 16 bp, synthetic construct
  misc_feature 1..16: note = synthetic [barcode part1]
  source 1..16: mol_type = other DNA
agtacacacaccaacc

SEQ ID NO: 25333 - DNA, 16 bp, synthetic construct
  misc_feature 1..16: note = synthetic [barcode part1]
  source 1..16: mol_type = other DNA
ccgcaagtgttctgtc

SEQ ID NO: 25334 - DNA, 16 bp, synthetic construct
  misc_feature 1..16: note = synthetic [barcode part1]
  source 1..16: mol_type = other DNA
tgtgcagacctagact

SEQ ID NO: 25335 - DNA, 16 bp, synthetic construct
  misc_feature 1..16: note = synthetic [barcode part1]
  source 1..16: mol_type = other DNA
aggcgttaacagaact

SEQ ID NO: 25336 - DNA, 16 bp, synthetic construct
  misc_feature 1..16: note = synthetic [barcode part1]
  source 1..16: mol_type = other DNA
caccagacctgtgtct

SEQ ID NO: 25337 - DNA, 16 bp, synthetic construct
  misc_feature 1..16: note = synthetic [barcode part1]
  source 1..16: mol_type = other DNA
ttctgttgtaggtctg

SEQ ID NO: 25338 - DNA, 16 bp, synthetic construct
  misc_feature 1..16: note = synthetic [barcode part1]
  source 1..16: mol_type = other DNA
atacgtgtagtgtcgc

SEQ ID NO: 25339 - DNA, 16 bp, synthetic construct
  misc_feature 1..16: note = synthetic [barcode part1]
  source 1..16: mol_type = other DNA
tcttcaatcggaaggc

SEQ ID NO: 25340 - DNA, 16 bp, synthetic construct
  misc_feature 1..16: note = synthetic [barcode part1]
  source 1..16: mol_type = other DNA
aaggttctccaaggtc

SEQ ID NO: 25341 - DNA, 16 bp, synthetic construct
  misc_feature 1..16: note = synthetic [barcode part1]
  source 1..16: mol_type = other DNA
acgcacactgatcagt

SEQ ID NO: 25342 - DNA, 16 bp, synthetic construct
  misc_feature 1..16: note = synthetic [barcode part1]
  source 1..16: mol_type = other DNA
actctcagtaatccgt

SEQ ID NO: 25343 - DNA, 16 bp, synthetic construct
  misc_feature 1..16: note = synthetic [barcode part1]
  source 1..16: mol_type = other DNA
gaattattagaggcgc

SEQ ID NO: 25344 - DNA, 16 bp, synthetic construct
  misc_feature 1..16: note = synthetic [barcode part1]
  source 1..16: mol_type = other DNA
cggaagtctgtacttg

SEQ ID NO: 25345 - DNA, 16 bp, synthetic construct
  misc_feature 1..16: note = synthetic [barcode part1]
  source 1..16: mol_type = other DNA
ccaactcaccttctac

SEQ ID NO: 25346 - DNA, 16 bp, synthetic construct
  misc_feature 1..16: note = synthetic [barcode part1]
  source 1..16: mol_type = other DNA
atagacaggcgtcgtg

SEQ ID NO: 25347 - DNA, 16 bp, synthetic construct
  misc_feature 1..16: note = synthetic [barcode part1]
  source 1..16: mol_type = other DNA
cacttcctcggtagtg

SEQ ID NO: 25348 - DNA, 16 bp, synthetic construct
  misc_feature 1..16: note = synthetic [barcode part1]
  source 1..16: mol_type = other DNA
taactcttagttgcgc

SEQ ID NO: 25349 - DNA, 16 bp, synthetic construct
  misc_feature 1..16: note = synthetic [barcode part1]
  source 1..16: mol_type = other DNA
cgaataaggataggcg

SEQ ID NO: 25350 - DNA, 16 bp, synthetic construct
  misc_feature 1..16: note = synthetic [barcode part1]
  source 1..16: mol_type = other DNA
tcgaggttccgaagtt

SEQ ID NO: 25351 - DNA, 16 bp, synthetic construct
  misc_feature 1..16: note = synthetic [barcode part1]
  source 1..16: mol_type = other DNA
aaggaccgaaggattg

SEQ ID NO: 25352 - DNA, 16 bp, synthetic construct
  misc_feature 1..16: note = synthetic [barcode part1]
  source 1..16: mol_type = other DNA
tggtgataaggatacc

SEQ ID NO: 25353 - DNA, 16 bp, synthetic construct
  misc_feature 1..16: note = synthetic [barcode part1]
  source 1..16: mol_type = other DNA
attgtctagattcgcc

SEQ ID NO: 25354 - DNA, 16 bp, synthetic construct
  misc_feature 1..16: note = synthetic [barcode part1]
  source 1..16: mol_type = other DNA
acctaccacaatatcc

SEQ ID NO: 25355 - DNA, 16 bp, synthetic construct
  misc_feature 1..16: note = synthetic [barcode part1]
  source 1..16: mol_type = other DNA
acttgtgaaccacgtg

SEQ ID NO: 25356 - DNA, 16 bp, synthetic construct
  misc_feature 1..16: note = synthetic [barcode part1]
  source 1..16: mol_type = other DNA
caggtgcctctcaatc

SEQ ID NO: 25357 - DNA, 16 bp, synthetic construct
  misc_feature 1..16: note = synthetic [barcode part1]
  source 1..16: mol_type = other DNA
tatcggagtctctatc

SEQ ID NO: 25358 - DNA, 16 bp, synthetic construct
  misc_feature 1..16: note = synthetic [barcode part1]
  source 1..16: mol_type = other DNA
cacgccttgttcttgt

SEQ ID NO: 25359 - DNA, 16 bp, synthetic construct
  misc_feature 1..16: note = synthetic [barcode part1]
  source 1..16: mol_type = other DNA
aaccacaccggaagac

SEQ ID NO: 25360 - DNA, 16 bp, synthetic construct
  misc_feature 1..16: note = synthetic [barcode part1]
  source 1..16: mol_type = other DNA
actcaccaggtaagtc

SEQ ID NO: 25361 - DNA, 16 bp, synthetic construct
  misc_feature 1..16: note = synthetic [barcode part1]
  source 1..16: mol_type = other DNA
tgactccaacctcttc

SEQ ID NO: 25362 - DNA, 16 bp, synthetic construct
  misc_feature 1..16: note = synthetic [barcode part1]
  source 1..16: mol_type = other DNA
ttctacttgagtaccg

SEQ ID NO: 25363 - DNA, 16 bp, synthetic construct
  misc_feature 1..16: note = synthetic [barcode part1]
  source 1..16: mol_type = other DNA
tcttcctgcgtgtatc

SEQ ID NO: 25364 - DNA, 16 bp, synthetic construct
  misc_feature 1..16: note = synthetic [barcode part1]
  source 1..16: mol_type = other DNA
gtacttgcgttacttg

SEQ ID NO: 25365 - DNA, 16 bp, synthetic construct
  misc_feature 1..16: note = synthetic [barcode part1]
  source 1..16: mol_type = other DNA
aacaagaccaagtgtc

SEQ ID NO: 25366 - DNA, 16 bp, synthetic construct
  misc_feature 1..16: note = synthetic [barcode part1]
  source 1..16: mol_type = other DNA
taaggaacacggccac

SEQ ID NO: 25367 - DNA, 16 bp, synthetic construct
  misc_feature 1..16: note = synthetic [barcode part1]
  source 1..16: mol_type = other DNA
cctctgacacacaacc

SEQ ID NO: 25368 - DNA, 16 bp, synthetic construct
  misc_feature 1..16: note = synthetic [barcode part1]
  source 1..16: mol_type = other DNA
gaacctgacgatcact

SEQ ID NO: 25369 - DNA, 16 bp, synthetic construct
  misc_feature 1..16: note = synthetic [barcode part1]
  source 1..16: mol_type = other DNA
ttcgaacggattgaag

SEQ ID NO: 25370 - DNA, 16 bp, synthetic construct
  misc_feature 1..16: note = synthetic [barcode part1]
  source 1..16: mol_type = other DNA
aacacggagatcgtcg

SEQ ID NO: 25371 - DNA, 16 bp, synthetic construct
  misc_feature 1..16: note = synthetic [barcode part1]
  source 1..16: mol_type = other DNA
tggatcagattgccac

SEQ ID NO: 25372 - DNA, 16 bp, synthetic construct
  misc_feature 1..16: note = synthetic [barcode part1]
  source 1..16: mol_type = other DNA
gtacggtctctaactt

SEQ ID NO: 25373 - DNA, 16 bp, synthetic construct
  misc_feature 1..16: note = synthetic [barcode part1]
  source 1..16: mol_type = other DNA
gaatctccggtgttag

SEQ ID NO: 25374 - DNA, 16 bp, synthetic construct
  misc_feature 1..16: note = synthetic [barcode part1]
  source 1..16: mol_type = other DNA
tgcgacgtctgttcac

SEQ ID NO: 25375 - DNA, 16 bp, synthetic construct
  misc_feature 1..16: note = synthetic [barcode part1]
  source 1..16: mol_type = other DNA
agaacgacttaggtgt

SEQ ID NO: 25376 - DNA, 16 bp, synthetic construct
  misc_feature 1..16: note = synthetic [barcode part1]
  source 1..16: mol_type = other DNA
aatccacgccttgtcg

SEQ ID NO: 25377 - DNA, 16 bp, synthetic construct
  misc_feature 1..16: note = synthetic [barcode part1]
  source 1..16: mol_type = other DNA
cgagtccaggtagtag

SEQ ID NO: 25378 - DNA, 16 bp, synthetic construct
  misc_feature 1..16: note = synthetic [barcode part1]
  source 1..16: mol_type = other DNA
attgtctggtgcctgc

SEQ ID NO: 25379 - DNA, 16 bp, synthetic construct
  misc_feature 1..16: note = synthetic [barcode part1]
  source 1..16: mol_type = other DNA
cgcgtaattgcacagt

SEQ ID NO: 25380 - DNA, 16 bp, synthetic construct
  misc_feature 1..16: note = synthetic [barcode part1]
  source 1..16: mol_type = other DNA
agttctccacgaatct

SEQ ID NO: 25381 - DNA, 16 bp, synthetic construct
  misc_feature 1..16: note = synthetic [barcode part1]
  source 1..16: mol_type = other DNA
attgtccggtaggact

SEQ ID NO: 25382 - DNA, 16 bp, synthetic construct
  misc_feature 1..16: note = synthetic [barcode part1]
  source 1..16: mol_type = other DNA
aggtggaggtaagtac

SEQ ID NO: 25383 - DNA, 16 bp, synthetic construct
  misc_feature 1..16: note = synthetic [barcode part1]
  source 1..16: mol_type = other DNA
atccggattgcctcgt

SEQ ID NO: 25384 - DNA, 16 bp, synthetic construct
  misc_feature 1..16: note = synthetic [barcode part1]
  source 1..16: mol_type = other DNA
tggttcttcgaggagt

SEQ ID NO: 25385 - DNA, 16 bp, synthetic construct
  misc_feature 1..16: note = synthetic [barcode part1]
  source 1..16: mol_type = other DNA
gttacaggaacgaatc

SEQ ID NO: 25386 - DNA, 16 bp, synthetic construct
  misc_feature 1..16: note = synthetic [barcode part1]
  source 1..16: mol_type = other DNA
caggcacgaagtgatc

SEQ ID NO: 25387 - DNA, 16 bp, synthetic construct
  misc_feature 1..16: note = synthetic [barcode part1]
  source 1..16: mol_type = other DNA
gcactggaaggcaatc

SEQ ID NO: 25388 - DNA, 16 bp, synthetic construct
  misc_feature 1..16: note = synthetic [barcode part1]
  source 1..16: mol_type = other DNA
ttcgccacgcaagttc

SEQ ID NO: 25389 - DNA, 16 bp, synthetic construct
  misc_feature 1..16: note = synthetic [barcode part1]
  source 1..16: mol_type = other DNA
gttattatacgcctcg

SEQ ID NO: 25390 - DNA, 16 bp, synthetic construct
  misc_feature 1..16: note = synthetic [barcode part1]
  source 1..16: mol_type = other DNA
gtagtaccgatcaacc

SEQ ID NO: 25391 - DNA, 16 bp, synthetic construct
  misc_feature 1..16: note = synthetic [barcode part1]
  source 1..16: mol_type = other DNA
tgaggtgtctgcgaag

SEQ ID NO: 25392 - DNA, 16 bp, synthetic construct
  misc_feature 1..16: note = synthetic [barcode part1]
  source 1..16: mol_type = other DNA
ttctgagtactcgttg

SEQ ID NO: 25393 - DNA, 16 bp, synthetic construct
  misc_feature 1..16: note = synthetic [barcode part1]
  source 1..16: mol_type = other DNA
acctctatctagtggt

SEQ ID NO: 25394 - DNA, 16 bp, synthetic construct
  misc_feature 1..16: note = synthetic [barcode part1]
  source 1..16: mol_type = other DNA
ccacgtggagactaag

SEQ ID NO: 25395 - DNA, 16 bp, synthetic construct
  misc_feature 1..16: note = synthetic [barcode part1]
  source 1..16: mol_type = other DNA
taggaccgaccttagt

SEQ ID NO: 25396 - DNA, 16 bp, synthetic construct
  misc_feature 1..16: note = synthetic [barcode part1]
  source 1..16: mol_type = other DNA
aagagtggacacaggt

SEQ ID NO: 25397 - DNA, 16 bp, synthetic construct
  misc_feature 1..16: note = synthetic [barcode part1]
  source 1..16: mol_type = other DNA
caggaggcagtgtact

SEQ ID NO: 25398 - DNA, 16 bp, synthetic construct
  misc_feature 1..16: note = synthetic [barcode part1]
  source 1..16: mol_type = other DNA
tgaggcagatagtgag

SEQ ID NO: 25399 - DNA, 16 bp, synthetic construct
  misc_feature 1..16: note = synthetic [barcode part1]
  source 1..16: mol_type = other DNA
ataggcgtgttgtaag

SEQ ID NO: 25400 - DNA, 16 bp, synthetic construct
  misc_feature 1..16: note = synthetic [barcode part1]
  source 1..16: mol_type = other DNA
gtaagtcgaggaccac

SEQ ID NO: 25401 - DNA, 16 bp, synthetic construct
  misc_feature 1..16: note = synthetic [barcode part1]
  source 1..16: mol_type = other DNA
tgcagatcgagataac

SEQ ID NO: 25402 - DNA, 16 bp, synthetic construct
  misc_feature 1..16: note = synthetic [barcode part1]
  source 1..16: mol_type = other DNA
tgacgatctagtgacc

SEQ ID NO: 25403 - DNA, 16 bp, synthetic construct
  misc_feature 1..16: note = synthetic [barcode part1]
  source 1..16: mol_type = other DNA
gaggtagaacgtccac

SEQ ID NO: 25404 - DNA, 16 bp, synthetic construct
  misc_feature 1..16: note = synthetic [barcode part1]
  source 1..16: mol_type = other DNA
ttgttctggcctgcag

SEQ ID NO: 25405 - DNA, 16 bp, synthetic construct
  misc_feature 1..16: note = synthetic [barcode part1]
  source 1..16: mol_type = other DNA
gttagtgccgttgtcc

SEQ ID NO: 25406 - DNA, 16 bp, synthetic construct
  misc_feature 1..16: note = synthetic [barcode part1]
  source 1..16: mol_type = other DNA
gatcgcaattgtgcgt

SEQ ID NO: 25407 - DNA, 16 bp, synthetic construct
  misc_feature 1..16: note = synthetic [barcode part1]
  source 1..16: mol_type = other DNA
tgtgaacttgttctgc

SEQ ID NO: 25408 - DNA, 16 bp, synthetic construct
  misc_feature 1..16: note = synthetic [barcode part1]
  source 1..16: mol_type = other DNA
gtctgcgtagttctcg

SEQ ID NO: 25409 - DNA, 16 bp, synthetic construct
  misc_feature 1..16: note = synthetic [barcode part1]
  source 1..16: mol_type = other DNA
ttcacgtgactatcgt

SEQ ID NO: 25410 - DNA, 16 bp, synthetic construct
  misc_feature 1..16: note = synthetic [barcode part1]
  source 1..16: mol_type = other DNA
gcggtatccagaactt

SEQ ID NO: 25411 - DNA, 16 bp, synthetic construct
  misc_feature 1..16: note = synthetic [barcode part1]
  source 1..16: mol_type = other DNA
tggaaggtgtacgacc

SEQ ID NO: 25412 - DNA, 16 bp, synthetic construct
  misc_feature 1..16: note = synthetic [barcode part1]
  source 1..16: mol_type = other DNA
acaaccggtcgatact

SEQ ID NO: 25413 - DNA, 16 bp, synthetic construct
  misc_feature 1..16: note = synthetic [barcode part1]
  source 1..16: mol_type = other DNA
agtcgaggtggttacg

SEQ ID NO: 25414 - DNA, 16 bp, synthetic construct
  misc_feature 1..16: note = synthetic [barcode part1]
  source 1..16: mol_type = other DNA
gaccttacacctaccg

SEQ ID NO: 25415 - DNA, 16 bp, synthetic construct
  misc_feature 1..16: note = synthetic [barcode part1]
  source 1..16: mol_type = other DNA
ttgtccaggtgccact

SEQ ID NO: 25416 - DNA, 16 bp, synthetic construct
  misc_feature 1..16: note = synthetic [barcode part1]
  source 1..16: mol_type = other DNA
ttcgccaccagtacac

SEQ ID NO: 25417 - DNA, 16 bp, synthetic construct
  misc_feature 1..16: note = synthetic [barcode part1]
  source 1..16: mol_type = other DNA
taattcctagtgcacc

SEQ ID NO: 25418 - DNA, 16 bp, synthetic construct
  misc_feature 1..16: note = synthetic [barcode part1]
  source 1..16: mol_type = other DNA
cgtagtgttacctact

SEQ ID NO: 25419 - DNA, 16 bp, synthetic construct
  misc_feature 1..16: note = synthetic [barcode part1]
  source 1..16: mol_type = other DNA
tagtcactgaagagtg

SEQ ID NO: 25420 - DNA, 16 bp, synthetic construct
  misc_feature 1..16: note = synthetic [barcode part1]
  source 1..16: mol_type = other DNA
agactacacaagagtc

SEQ ID NO: 25421 - DNA, 16 bp, synthetic construct
  misc_feature 1..16: note = synthetic [barcode part1]
  source 1..16: mol_type = other DNA
tcacgcgtcttaaccg

SEQ ID NO: 25422 - DNA, 16 bp, synthetic construct
  misc_feature 1..16: note = synthetic [barcode part1]
  source 1..16: mol_type = other DNA
tctgattggaaccgac

SEQ ID NO: 25423 - DNA, 16 bp, synthetic construct
  misc_feature 1..16: note = synthetic [barcode part1]
  source 1..16: mol_type = other DNA
tgtgtgttgtgcacag

SEQ ID NO: 25424 - DNA, 16 bp, synthetic construct
  misc_feature 1..16: note = synthetic [barcode part1]
  source 1..16: mol_type = other DNA
taggtgtgatctgtgc

SEQ ID NO: 25425 - DNA, 16 bp, synthetic construct
  misc_feature 1..16: note = synthetic [barcode part1]
  source 1..16: mol_type = other DNA
attgtgatcgcggtgt

SEQ ID NO: 25426 - DNA, 16 bp, synthetic construct
  misc_feature 1..16: note = synthetic [barcode part1]
  source 1..16: mol_type = other DNA
aggccgtattcagtac

SEQ ID NO: 25427 - DNA, 16 bp, synthetic construct
  misc_feature 1..16: note = synthetic [barcode part1]
  source 1..16: mol_type = other DNA
ttaggaacgaccttcg

SEQ ID NO: 25428 - DNA, 16 bp, synthetic construct
  misc_feature 1..16: note = synthetic [barcode part1]
  source 1..16: mol_type = other DNA
agtgtcagaggaagac

SEQ ID NO: 25429 - DNA, 16 bp, synthetic construct
  misc_feature 1..16: note = synthetic [barcode part1]
  source 1..16: mol_type = other DNA
gaagtctgataagtgc

SEQ ID NO: 25430 - DNA, 16 bp, synthetic construct
  misc_feature 1..16: note = synthetic [barcode part1]
  source 1..16: mol_type = other DNA
caccacctctaatcct

SEQ ID NO: 25431 - DNA, 16 bp, synthetic construct
  misc_feature 1..16: note = synthetic [barcode part1]
  source 1..16: mol_type = other DNA
caataagacggtggag

SEQ ID NO: 25432 - DNA, 16 bp, synthetic construct
  misc_feature 1..16: note = synthetic [barcode part1]
  source 1..16: mol_type = other DNA
tcgtcgtagtaaggtc

SEQ ID NO: 25433 - DNA, 16 bp, synthetic construct
  misc_feature 1..16: note = synthetic [barcode part1]
  source 1..16: mol_type = other DNA
ccggtacgttgtatag

SEQ ID NO: 25434 - DNA, 16 bp, synthetic construct
  misc_feature 1..16: note = synthetic [barcode part1]
  source 1..16: mol_type = other DNA
cactaacttgaggaag

SEQ ID NO: 25435 - DNA, 16 bp, synthetic construct
  misc_feature 1..16: note = synthetic [barcode part1]
  source 1..16: mol_type = other DNA
gtaagtcttctcaacc

SEQ ID NO: 25436 - DNA, 16 bp, synthetic construct
  misc_feature 1..16: note = synthetic [barcode part1]
  source 1..16: mol_type = other DNA
atagaagactactggc

SEQ ID NO: 25437 - DNA, 16 bp, synthetic construct
  misc_feature 1..16: note = synthetic [barcode part1]
  source 1..16: mol_type = other DNA
attctgttcgtgcggc

SEQ ID NO: 25438 - DNA, 16 bp, synthetic construct
  misc_feature 1..16: note = synthetic [barcode part1]
  source 1..16: mol_type = other DNA
acgcaagtactcctag

SEQ ID NO: 25439 - DNA, 16 bp, synthetic construct
  misc_feature 1..16: note = synthetic [barcode part1]
  source 1..16: mol_type = other DNA
gcacagtctagttctt

SEQ ID NO: 25440 - DNA, 16 bp, synthetic construct
  misc_feature 1..16: note = synthetic [barcode part1]
  source 1..16: mol_type = other DNA
cagatctcaagacaag

SEQ ID NO: 25441 - DNA, 16 bp, synthetic construct
  misc_feature 1..16: note = synthetic [barcode part1]
  source 1..16: mol_type = other DNA
gttggagtatagtcag

SEQ ID NO: 25442 - DNA, 16 bp, synthetic construct
  misc_feature 1..16: note = synthetic [barcode part1]
  source 1..16: mol_type = other DNA
cgacacgatacagttc

SEQ ID NO: 25443 - DNA, 16 bp, synthetic construct
  misc_feature 1..16: note = synthetic [barcode part1]
  source 1..16: mol_type = other DNA
gcgtatatcgaagtcc

SEQ ID NO: 25444 - DNA, 16 bp, synthetic construct
  misc_feature 1..16: note = synthetic [barcode part1]
  source 1..16: mol_type = other DNA
agtacgtcacagttgc

SEQ ID NO: 25445 - DNA, 16 bp, synthetic construct
  misc_feature 1..16: note = synthetic [barcode part1]
  source 1..16: mol_type = other DNA
ttcacgttggttcagt

SEQ ID NO: 25446 - DNA, 16 bp, synthetic construct
  misc_feature 1..16: note = synthetic [barcode part1]
  source 1..16: mol_type = other DNA
cctcagtcgtattaac

SEQ ID NO: 25447 - DNA, 16 bp, synthetic construct
  misc_feature 1..16: note = synthetic [barcode part1]
  source 1..16: mol_type = other DNA
cctggacagtaataag

SEQ ID NO: 25448 - DNA, 16 bp, synthetic construct
  misc_feature 1..16: note = synthetic [barcode part1]
  source 1..16: mol_type = other DNA
cgtagatcgaggtgac

SEQ ID NO: 25449 - DNA, 16 bp, synthetic construct
  misc_feature 1..16: note = synthetic [barcode part1]
  source 1..16: mol_type = other DNA
atcggactgtcctcgt

SEQ ID NO: 25450 - DNA, 16 bp, synthetic construct
  misc_feature 1..16: note = synthetic [barcode part1]
  source 1..16: mol_type = other DNA
tggaaggcgtgtgatc

SEQ ID NO: 25451 - DNA, 16 bp, synthetic construct
  misc_feature 1..16: note = synthetic [barcode part1]
  source 1..16: mol_type = other DNA
tcaacctctgtacagt

SEQ ID NO: 25452 - DNA, 16 bp, synthetic construct
  misc_feature 1..16: note = synthetic [barcode part1]
  source 1..16: mol_type = other DNA
agaatctggcggacgt

SEQ ID NO: 25453 - DNA, 16 bp, synthetic construct
  misc_feature 1..16: note = synthetic [barcode part1]
  source 1..16: mol_type = other DNA
gtggttaagttgagac

SEQ ID NO: 25454 - DNA, 16 bp, synthetic construct
  misc_feature 1..16: note = synthetic [barcode part1]
  source 1..16: mol_type = other DNA
ccttacactaagtcgt

SEQ ID NO: 25455 - DNA, 16 bp, synthetic construct
  misc_feature 1..16: note = synthetic [barcode part1]
  source 1..16: mol_type = other DNA
ttgttctcacaggttg

SEQ ID NO: 25456 - DNA, 16 bp, synthetic construct
  misc_feature 1..16: note = synthetic [barcode part1]
  source 1..16: mol_type = other DNA
agtgtgcctggtcctt

SEQ ID NO: 25457 - DNA, 16 bp, synthetic construct
  misc_feature 1..16: note = synthetic [barcode part1]
  source 1..16: mol_type = other DNA
tggcgtggagaatcac

SEQ ID NO: 25458 - DNA, 16 bp, synthetic construct
  misc_feature 1..16: note = synthetic [barcode part1]
  source 1..16: mol_type = other DNA
tactgcagttgtggtg

SEQ ID NO: 25459 - DNA, 16 bp, synthetic construct
  misc_feature 1..16: note = synthetic [barcode part1]
  source 1..16: mol_type = other DNA
aaccacaggagttaac

SEQ ID NO: 25460 - DNA, 16 bp, synthetic construct
  misc_feature 1..16: note = synthetic [barcode part1]
  source 1..16: mol_type = other DNA
taagtgcactagagac

SEQ ID NO: 25461 - DNA, 16 bp, synthetic construct
  misc_feature 1..16: note = synthetic [barcode part1]
  source 1..16: mol_type = other DNA
accaggattaggagag

SEQ ID NO: 25462 - DNA, 16 bp, synthetic construct
  misc_feature 1..16: note = synthetic [barcode part1]
  source 1..16: mol_type = other DNA
tgccgagtgtctctac

SEQ ID NO: 25463 - DNA, 16 bp, synthetic construct
  misc_feature 1..16: note = synthetic [barcode part1]
  source 1..16: mol_type = other DNA
cagaccagatccagtt

SEQ ID NO: 25464 - DNA, 16 bp, synthetic construct
  misc_feature 1..16: note = synthetic [barcode part1]
  source 1..16: mol_type = other DNA
ttgtccacttggaact

SEQ ID NO: 25465 - DNA, 16 bp, synthetic construct
  misc_feature 1..16: note = synthetic [barcode part1]
  source 1..16: mol_type = other DNA
acacgcggttgtaatc

SEQ ID NO: 25466 - DNA, 16 bp, synthetic construct
  misc_feature 1..16: note = synthetic [barcode part1]
  source 1..16: mol_type = other DNA
ttatcctgcacaactg

SEQ ID NO: 25467 - DNA, 16 bp, synthetic construct
  misc_feature 1..16: note = synthetic [barcode part1]
  source 1..16: mol_type = other DNA
cacgagtcctgtcgtt

SEQ ID NO: 25468 - DNA, 16 bp, synthetic construct
  misc_feature 1..16: note = synthetic [barcode part1]
  source 1..16: mol_type = other DNA
gtcaccgagagtgtag

SEQ ID NO: 25469 - DNA, 16 bp, synthetic construct
  misc_feature 1..16: note = synthetic [barcode part1]
  source 1..16: mol_type = other DNA
tctatcgcgtaggcct

SEQ ID NO: 25470 - DNA, 16 bp, synthetic construct
  misc_feature 1..16: note = synthetic [barcode part1]
  source 1..16: mol_type = other DNA
tctagttaccggtatc

SEQ ID NO: 25471 - DNA, 16 bp, synthetic construct
  misc_feature 1..16: note = synthetic [barcode part1]
  source 1..16: mol_type = other DNA
accggataggttacct

SEQ ID NO: 25472 - DNA, 16 bp, synthetic construct
  misc_feature 1..16: note = synthetic [barcode part1]
  source 1..16: mol_type = other DNA
cggttgatctcagagt

SEQ ID NO: 25473 - DNA, 16 bp, synthetic construct
  misc_feature 1..16: note = synthetic [barcode part1]
  source 1..16: mol_type = other DNA
cgtgaacgcaataagt

SEQ ID NO: 25474 - DNA, 16 bp, synthetic construct
  misc_feature 1..16: note = synthetic [barcode part1]
  source 1..16: mol_type = other DNA
gtgttgagagagtcgc

SEQ ID NO: 25475 - DNA, 16 bp, synthetic construct
  misc_feature 1..16: note = synthetic [barcode part1]
  source 1..16: mol_type = other DNA
cagatcaaccggattc

SEQ ID NO: 25476 - DNA, 16 bp, synthetic construct
  misc_feature 1..16: note = synthetic [barcode part1]
  source 1..16: mol_type = other DNA
atagtgccacgtgtac

SEQ ID NO: 25477 - DNA, 16 bp, synthetic construct
  misc_feature 1..16: note = synthetic [barcode part1]
  source 1..16: mol_type = other DNA
cacacgcgattagttg

SEQ ID NO: 25478 - DNA, 16 bp, synthetic construct
  misc_feature 1..16: note = synthetic [barcode part1]
  source 1..16: mol_type = other DNA
gtatagacgccgagtg

SEQ ID NO: 25479 - DNA, 16 bp, synthetic construct
  misc_feature 1..16: note = synthetic [barcode part1]
  source 1..16: mol_type = other DNA
ccttgtcttatagacg

SEQ ID NO: 25480 - DNA, 16 bp, synthetic construct
  misc_feature 1..16: note = synthetic [barcode part1]
  source 1..16: mol_type = other DNA
ccgactgtcagaattg

SEQ ID NO: 25481 - DNA, 16 bp, synthetic construct
  misc_feature 1..16: note = synthetic [barcode part1]
  source 1..16: mol_type = other DNA
caacagttcagaccac

SEQ ID NO: 25482 - DNA, 16 bp, synthetic construct
  misc_feature 1..16: note = synthetic [barcode part1]
  source 1..16: mol_type = other DNA
aacagtagacggagtg

SEQ ID NO: 25483 - DNA, 16 bp, synthetic construct
  misc_feature 1..16: note = synthetic [barcode part1]
  source 1..16: mol_type = other DNA
tgtacgatactctgtc

SEQ ID NO: 25484 - DNA, 16 bp, synthetic construct
  misc_feature 1..16: note = synthetic [barcode part1]
  source 1..16: mol_type = other DNA
tgttgtgtggtcaacg

SEQ ID NO: 25485 - DNA, 16 bp, synthetic construct
  misc_feature 1..16: note = synthetic [barcode part1]
  source 1..16: mol_type = other DNA
gagactgccaagtacg

SEQ ID NO: 25486 - DNA, 16 bp, synthetic construct
  misc_feature 1..16: note = synthetic [barcode part1]
  source 1..16: mol_type = other DNA
tgccttcttgaactag

SEQ ID NO: 25487 - DNA, 16 bp, synthetic construct
  misc_feature 1..16: note = synthetic [barcode part1]
  source 1..16: mol_type = other DNA
caaggtcgtcgtagtt

SEQ ID NO: 25488 - DNA, 16 bp, synthetic construct
  misc_feature 1..16: note = synthetic [barcode part1]
  source 1..16: mol_type = other DNA
gaagtgagtaggtctt

SEQ ID NO: 25489 - DNA, 16 bp, synthetic construct
  misc_feature 1..16: note = synthetic [barcode part1]
  source 1..16: mol_type = other DNA
tcggtatcgcaatcag

SEQ ID NO: 25490 - DNA, 16 bp, synthetic construct
  misc_feature 1..16: note = synthetic [barcode part1]
  source 1..16: mol_type = other DNA
ttgccgtgtccgtaac

SEQ ID NO: 25491 - DNA, 16 bp, synthetic construct
  misc_feature 1..16: note = synthetic [barcode part1]
  source 1..16: mol_type = other DNA
gaagtcgatacaatcg

SEQ ID NO: 25492 - DNA, 16 bp, synthetic construct
  misc_feature 1..16: note = synthetic [barcode part1]
  source 1..16: mol_type = other DNA
attctaagtgcacgcg

SEQ ID NO: 25493 - DNA, 16 bp, synthetic construct
  misc_feature 1..16: note = synthetic [barcode part1]
  source 1..16: mol_type = other DNA
aacgaccacgcagagt

SEQ ID NO: 25494 - DNA, 16 bp, synthetic construct
  misc_feature 1..16: note = synthetic [barcode part1]
  source 1..16: mol_type = other DNA
acctctaggcggtctt

SEQ ID NO: 25495 - DNA, 16 bp, synthetic construct
  misc_feature 1..16: note = synthetic [barcode part1]
  source 1..16: mol_type = other DNA
gcggagaccagtaact

SEQ ID NO: 25496 - DNA, 16 bp, synthetic construct
  misc_feature 1..16: note = synthetic [barcode part1]
  source 1..16: mol_type = other DNA
aagagtagttcctgcc

SEQ ID NO: 25497 - DNA, 16 bp, synthetic construct
  misc_feature 1..16: note = synthetic [barcode part1]
  source 1..16: mol_type = other DNA
gatagaacgcgtcgac

SEQ ID NO: 25498 - DNA, 16 bp, synthetic construct
  misc_feature 1..16: note = synthetic [barcode part1]
  source 1..16: mol_type = other DNA
aaccagtacgtgtacc

SEQ ID NO: 25499 - DNA, 16 bp, synthetic construct
  misc_feature 1..16: note = synthetic [barcode part1]
  source 1..16: mol_type = other DNA
gtagaatcttgccacg

SEQ ID NO: 25500 - DNA, 16 bp, synthetic construct
  misc_feature 1..16: note = synthetic [barcode part1]
  source 1..16: mol_type = other DNA
gcctctgaagtcgtct

SEQ ID NO: 25501 - DNA, 16 bp, synthetic construct
  misc_feature 1..16: note = synthetic [barcode part1]
  source 1..16: mol_type = other DNA
tagtgtaaggacgact

SEQ ID NO: 25502 - DNA, 16 bp, synthetic construct
  misc_feature 1..16: note = synthetic [barcode part1]
  source 1..16: mol_type = other DNA
tgcggtgacaatactc

SEQ ID NO: 25503 - DNA, 16 bp, synthetic construct
  misc_feature 1..16: note = synthetic [barcode part1]
  source 1..16: mol_type = other DNA
acggccgttaactcct

SEQ ID NO: 25504 - DNA, 16 bp, synthetic construct
  misc_feature 1..16: note = synthetic [barcode part1]
  source 1..16: mol_type = other DNA
cgttattgtaaccacc

SEQ ID NO: 25505 - DNA, 16 bp, synthetic construct
  misc_feature 1..16: note = synthetic [barcode part1]
  source 1..16: mol_type = other DNA
cgcggttgtgtaattg

SEQ ID NO: 25506 - DNA, 16 bp, synthetic construct
  misc_feature 1..16: note = synthetic [barcode part1]
  source 1..16: mol_type = other DNA
agacctgagacgtctt

SEQ ID NO: 25507 - DNA, 16 bp, synthetic construct
  misc_feature 1..16: note = synthetic [barcode part1]
  source 1..16: mol_type = other DNA
ccagattggaacgcag

SEQ ID NO: 25508 - DNA, 16 bp, synthetic construct
  misc_feature 1..16: note = synthetic [barcode part1]
  source 1..16: mol_type = other DNA
tggttgagagatcctc

SEQ ID NO: 25509 - DNA, 16 bp, synthetic construct
  misc_feature 1..16: note = synthetic [barcode part1]
  source 1..16: mol_type = other DNA
acctcactagatctac

SEQ ID NO: 25510 - DNA, 16 bp, synthetic construct
  misc_feature 1..16: note = synthetic [barcode part1]
  source 1..16: mol_type = other DNA
aacggaacacgaactt

SEQ ID NO: 25511 - DNA, 16 bp, synthetic construct
  misc_feature 1..16: note = synthetic [barcode part1]
  source 1..16: mol_type = other DNA
acttgaggagtctgtc

SEQ ID NO: 25512 - DNA, 16 bp, synthetic construct
  misc_feature 1..16: note = synthetic [barcode part1]
  source 1..16: mol_type = other DNA
aaggatacggagacac

SEQ ID NO: 25513 - DNA, 16 bp, synthetic construct
  misc_feature 1..16: note = synthetic [barcode part1]
  source 1..16: mol_type = other DNA
ttaagtggagtgacgt

SEQ ID NO: 25514 - DNA, 16 bp, synthetic construct
  misc_feature 1..16: note = synthetic [barcode part1]
  source 1..16: mol_type = other DNA
ttgaacaggtggagtt

SEQ ID NO: 25515 - DNA, 16 bp, synthetic construct
  misc_feature 1..16: note = synthetic [barcode part1]
  source 1..16: mol_type = other DNA
cacaagtggtgttcac

SEQ ID NO: 25516 - DNA, 16 bp, synthetic construct
  misc_feature 1..16: note = synthetic [barcode part1]
  source 1..16: mol_type = other DNA
gagatctaacgttgcc

SEQ ID NO: 25517 - DNA, 16 bp, synthetic construct
  misc_feature 1..16: note = synthetic [barcode part1]
  source 1..16: mol_type = other DNA
tgcgaagattgagttg

SEQ ID NO: 25518 - DNA, 16 bp, synthetic construct
  misc_feature 1..16: note = synthetic [barcode part1]
  source 1..16: mol_type = other DNA
tcaacgagacagttcc

SEQ ID NO: 25519 - DNA, 16 bp, synthetic construct
  misc_feature 1..16: note = synthetic [barcode part1]
  source 1..16: mol_type = other DNA
ccttcagttctctgac

SEQ ID NO: 25520 - DNA, 16 bp, synthetic construct
  misc_feature 1..16: note = synthetic [barcode part1]
  source 1..16: mol_type = other DNA
tcgtggaggatacctt

SEQ ID NO: 25521 - DNA, 16 bp, synthetic construct
  misc_feature 1..16: note = synthetic [barcode part1]
  source 1..16: mol_type = other DNA
cagaatcaggaggaac

SEQ ID NO: 25522 - DNA, 16 bp, synthetic construct
  misc_feature 1..16: note = synthetic [barcode part1]
  source 1..16: mol_type = other DNA
gcacgatagtcgaggt

SEQ ID NO: 25523 - DNA, 16 bp, synthetic construct
  misc_feature 1..16: note = synthetic [barcode part1]
  source 1..16: mol_type = other DNA
actacttagacctgtc

SEQ ID NO: 25524 - DNA, 16 bp, synthetic construct
  misc_feature 1..16: note = synthetic [barcode part1]
  source 1..16: mol_type = other DNA
ttctcaatagttgcgc

SEQ ID NO: 25525 - DNA, 16 bp, synthetic construct
  misc_feature 1..16: note = synthetic [barcode part1]
  source 1..16: mol_type = other DNA
tgtgtaggacagtggc

SEQ ID NO: 25526 - DNA, 16 bp, synthetic construct
  misc_feature 1..16: note = synthetic [barcode part1]
  source 1..16: mol_type = other DNA
cgatcctgtgccaatc

SEQ ID NO: 25527 - DNA, 16 bp, synthetic construct
  misc_feature 1..16: note = synthetic [barcode part1]
  source 1..16: mol_type = other DNA
ttggaggtcaggtgtg

SEQ ID NO: 25528 - DNA, 16 bp, synthetic construct
  misc_feature 1..16: note = synthetic [barcode part1]
  source 1..16: mol_type = other DNA
ataacgaacgaggcag

SEQ ID NO: 25529 - DNA, 16 bp, synthetic construct
  misc_feature 1..16: note = synthetic [barcode part1]
  source 1..16: mol_type = other DNA
atctcgccgaatctgc

SEQ ID NO: 25530 - DNA, 16 bp, synthetic construct
  misc_feature 1..16: note = synthetic [barcode part1]
  source 1..16: mol_type = other DNA
tctggtctaaccacgc

SEQ ID NO: 25531 - DNA, 16 bp, synthetic construct
  misc_feature 1..16: note = synthetic [barcode part1]
  source 1..16: mol_type = other DNA
aggtggacttacctac

SEQ ID NO: 25532 - DNA, 16 bp, synthetic construct
  misc_feature 1..16: note = synthetic [barcode part1]
  source 1..16: mol_type = other DNA
cctaactatcacacgt

SEQ ID NO: 25533 - DNA, 16 bp, synthetic construct
  misc_feature 1..16: note = synthetic [barcode part1]
  source 1..16: mol_type = other DNA
gaagaaggagacttcg

SEQ ID NO: 25534 - DNA, 16 bp, synthetic construct
  misc_feature 1..16: note = synthetic [barcode part1]
  source 1..16: mol_type = other DNA
cgaacgtcgtactagt

SEQ ID NO: 25535 - DNA, 16 bp, synthetic construct
  misc_feature 1..16: note = synthetic [barcode part1]
  source 1..16: mol_type = other DNA
gttccgttccgtagac

SEQ ID NO: 25536 - DNA, 16 bp, synthetic construct
  misc_feature 1..16: note = synthetic [barcode part1]
  source 1..16: mol_type = other DNA
tgcacggtattaacgc

SEQ ID NO: 25537 - DNA, 16 bp, synthetic construct
  misc_feature 1..16: note = synthetic [barcode part1]
  source 1..16: mol_type = other DNA
ttggtagagactgtcc

SEQ ID NO: 25538 - DNA, 16 bp, synthetic construct
  misc_feature 1..16: note = synthetic [barcode part1]
  source 1..16: mol_type = other DNA
tgcaactgcacaactg

SEQ ID NO: 25539 - DNA, 16 bp, synthetic construct
  misc_feature 1..16: note = synthetic [barcode part1]
  source 1..16: mol_type = other DNA
ttcggtaagtggtctg

SEQ ID NO: 25540 - DNA, 16 bp, synthetic construct
  misc_feature 1..16: note = synthetic [barcode part1]
  source 1..16: mol_type = other DNA
taccgcgtaattggtg

SEQ ID NO: 25541 - DNA, 16 bp, synthetic construct
  misc_feature 1..16: note = synthetic [barcode part1]
  source 1..16: mol_type = other DNA
agatcactgtcttcac

SEQ ID NO: 25542 - DNA, 16 bp, synthetic construct
  misc_feature 1..16: note = synthetic [barcode part1]
  source 1..16: mol_type = other DNA
tgcaaggtgtattccg

SEQ ID NO: 25543 - DNA, 16 bp, synthetic construct
  misc_feature 1..16: note = synthetic [barcode part1]
  source 1..16: mol_type = other DNA
acaattgtcctccagt

SEQ ID NO: 25544 - DNA, 16 bp, synthetic construct
  misc_feature 1..16: note = synthetic [barcode part1]
  source 1..16: mol_type = other DNA
tctccgattgaggaac

SEQ ID NO: 25545 - DNA, 16 bp, synthetic construct
  misc_feature 1..16: note = synthetic [barcode part1]
  source 1..16: mol_type = other DNA
gagtaccgcgacaagt

SEQ ID NO: 25546 - DNA, 16 bp, synthetic construct
  misc_feature 1..16: note = synthetic [barcode part1]
  source 1..16: mol_type = other DNA
cggaagttattagacg

SEQ ID NO: 25547 - DNA, 16 bp, synthetic construct
  misc_feature 1..16: note = synthetic [barcode part1]
  source 1..16: mol_type = other DNA
aacagtcgaggatatc

SEQ ID NO: 25548 - DNA, 16 bp, synthetic construct
  misc_feature 1..16: note = synthetic [barcode part1]
  source 1..16: mol_type = other DNA
aattcagacacggagt

SEQ ID NO: 25549 - DNA, 16 bp, synthetic construct
  misc_feature 1..16: note = synthetic [barcode part1]
  source 1..16: mol_type = other DNA
tggacacaacctgtgt

SEQ ID NO: 25550 - DNA, 16 bp, synthetic construct
  misc_feature 1..16: note = synthetic [barcode part1]
  source 1..16: mol_type = other DNA
cctgacctagtcgtgt

SEQ ID NO: 25551 - DNA, 16 bp, synthetic construct
  misc_feature 1..16: note = synthetic [barcode part1]
  source 1..16: mol_type = other DNA
tcttaatctgacgcgt

SEQ ID NO: 25552 - DNA, 16 bp, synthetic construct
  misc_feature 1..16: note = synthetic [barcode part1]
  source 1..16: mol_type = other DNA
tcgttccgtgcaactg

SEQ ID NO: 25553 - DNA, 16 bp, synthetic construct
  misc_feature 1..16: note = synthetic [barcode part1]
  source 1..16: mol_type = other DNA
acaagtagataccacg

SEQ ID NO: 25554 - DNA, 16 bp, synthetic construct
  misc_feature 1..16: note = synthetic [barcode part1]
  source 1..16: mol_type = other DNA
atcacaccgtaagtcg

SEQ ID NO: 25555 - DNA, 16 bp, synthetic construct
  misc_feature 1..16: note = synthetic [barcode part1]
  source 1..16: mol_type = other DNA
aacttctggagtggtc

SEQ ID NO: 25556 - DNA, 16 bp, synthetic construct
  misc_feature 1..16: note = synthetic [barcode part1]
  source 1..16: mol_type = other DNA
cctccgaagttaaggt

SEQ ID NO: 25557 - DNA, 16 bp, synthetic construct
  misc_feature 1..16: note = synthetic [barcode part1]
  source 1..16: mol_type = other DNA
gtctcctgaagttgag

SEQ ID NO: 25558 - DNA, 16 bp, synthetic construct
  misc_feature 1..16: note = synthetic [barcode part1]
  source 1..16: mol_type = other DNA
cgcgatctatatcgag

SEQ ID NO: 25559 - DNA, 16 bp, synthetic construct
  misc_feature 1..16: note = synthetic [barcode part1]
  source 1..16: mol_type = other DNA
gaccaacgtgtgtgtt

SEQ ID NO: 25560 - DNA, 16 bp, synthetic construct
  misc_feature 1..16: note = synthetic [barcode part1]
  source 1..16: mol_type = other DNA
taggattccaggacct

SEQ ID NO: 25561 - DNA, 16 bp, synthetic construct
  misc_feature 1..16: note = synthetic [barcode part1]
  source 1..16: mol_type = other DNA
aacgttgcgatcgatc

SEQ ID NO: 25562 - DNA, 16 bp, synthetic construct
  misc_feature 1..16: note = synthetic [barcode part1]
  source 1..16: mol_type = other DNA
cacaacaggcaagtgc

SEQ ID NO: 25563 - DNA, 16 bp, synthetic construct
  misc_feature 1..16: note = synthetic [barcode part1]
  source 1..16: mol_type = other DNA
actagaagaggccaag

SEQ ID NO: 25564 - DNA, 16 bp, synthetic construct
  misc_feature 1..16: note = synthetic [barcode part1]
  source 1..16: mol_type = other DNA
aactattaggccaccg

SEQ ID NO: 25565 - DNA, 16 bp, synthetic construct
  misc_feature 1..16: note = synthetic [barcode part1]
  source 1..16: mol_type = other DNA
cgtcaagacaggaatt

SEQ ID NO: 25566 - DNA, 16 bp, synthetic construct
  misc_feature 1..16: note = synthetic [barcode part1]
  source 1..16: mol_type = other DNA
ttcgattccttctggc

SEQ ID NO: 25567 - DNA, 16 bp, synthetic construct
  misc_feature 1..16: note = synthetic [barcode part1]
  source 1..16: mol_type = other DNA
tctgacctcctagttc

SEQ ID NO: 25568 - DNA, 16 bp, synthetic construct
  misc_feature 1..16: note = synthetic [barcode part1]
  source 1..16: mol_type = other DNA
cctacgtaagaacgtc

SEQ ID NO: 25569 - DNA, 16 bp, synthetic construct
  misc_feature 1..16: note = synthetic [barcode part1]
  source 1..16: mol_type = other DNA
gaagttaaccggagag

SEQ ID NO: 25570 - DNA, 16 bp, synthetic construct
  misc_feature 1..16: note = synthetic [barcode part1]
  source 1..16: mol_type = other DNA
tgtctcgaacgtctgc

SEQ ID NO: 25571 - DNA, 16 bp, synthetic construct
  misc_feature 1..16: note = synthetic [barcode part1]
  source 1..16: mol_type = other DNA
cagtcgccttaacctg

SEQ ID NO: 25572 - DNA, 16 bp, synthetic construct
  misc_feature 1..16: note = synthetic [barcode part1]
  source 1..16: mol_type = other DNA
tagttcggcaggagtg

SEQ ID NO: 25573 - DNA, 16 bp, synthetic construct
  misc_feature 1..16: note = synthetic [barcode part1]
  source 1..16: mol_type = other DNA
gaaggtcctctaatcg

SEQ ID NO: 25574 - DNA, 16 bp, synthetic construct
  misc_feature 1..16: note = synthetic [barcode part1]
  source 1..16: mol_type = other DNA
tatcgtgcgtgtgtag

SEQ ID NO: 25575 - DNA, 16 bp, synthetic construct
  misc_feature 1..16: note = synthetic [barcode part1]
  source 1..16: mol_type = other DNA
tgaaccaactggatcc

SEQ ID NO: 25576 - DNA, 16 bp, synthetic construct
  misc_feature 1..16: note = synthetic [barcode part1]
  source 1..16: mol_type = other DNA
attccgcacggaatac

SEQ ID NO: 25577 - DNA, 16 bp, synthetic construct
  misc_feature 1..16: note = synthetic [barcode part1]
  source 1..16: mol_type = other DNA
tgagtacgtgtagtcc

SEQ ID NO: 25578 - DNA, 16 bp, synthetic construct
  misc_feature 1..16: note = synthetic [barcode part1]
  source 1..16: mol_type = other DNA
gaagtgcgaccactag

SEQ ID NO: 25579 - DNA, 16 bp, synthetic construct
  misc_feature 1..16: note = synthetic [barcode part1]
  source 1..16: mol_type = other DNA
tcaagaccaagacctc

SEQ ID NO: 25580 - DNA, 16 bp, synthetic construct
  misc_feature 1..16: note = synthetic [barcode part1]
  source 1..16: mol_type = other DNA
ttcgagtctcggttcg

SEQ ID NO: 25581 - DNA, 16 bp, synthetic construct
  misc_feature 1..16: note = synthetic [barcode part1]
  source 1..16: mol_type = other DNA
accacgcagttatacg

SEQ ID NO: 25582 - DNA, 16 bp, synthetic construct
  misc_feature 1..16: note = synthetic [barcode part1]
  source 1..16: mol_type = other DNA
ttaagtaaggcctgcc

SEQ ID NO: 25583 - DNA, 16 bp, synthetic construct
  misc_feature 1..16: note = synthetic [barcode part1]
  source 1..16: mol_type = other DNA
tgtatcttgttggacc

SEQ ID NO: 25584 - DNA, 16 bp, synthetic construct
  misc_feature 1..16: note = synthetic [barcode part1]
  source 1..16: mol_type = other DNA
cggattgccttgcgtt

SEQ ID NO: 25585 - DNA, 16 bp, synthetic construct
  misc_feature 1..16: note = synthetic [barcode part1]
  source 1..16: mol_type = other DNA
tcctcttacaccgtac

SEQ ID NO: 25586 - DNA, 16 bp, synthetic construct
  misc_feature 1..16: note = synthetic [barcode part1]
  source 1..16: mol_type = other DNA
actctccgtgtcagtg

SEQ ID NO: 25587 - DNA, 16 bp, synthetic construct
  misc_feature 1..16: note = synthetic [barcode part1]
  source 1..16: mol_type = other DNA
ttctggagagtaagtg

SEQ ID NO: 25588 - DNA, 16 bp, synthetic construct
  misc_feature 1..16: note = synthetic [barcode part1]
  source 1..16: mol_type = other DNA
aattccttcggcgcac

SEQ ID NO: 25589 - DNA, 16 bp, synthetic construct
  misc_feature 1..16: note = synthetic [barcode part1]
  source 1..16: mol_type = other DNA
gttctgtgtggttact

SEQ ID NO: 25590 - DNA, 16 bp, synthetic construct
  misc_feature 1..16: note = synthetic [barcode part1]
  source 1..16: mol_type = other DNA
agaacagtctaggtgt

SEQ ID NO: 25591 - DNA, 16 bp, synthetic construct
  misc_feature 1..16: note = synthetic [barcode part1]
  source 1..16: mol_type = other DNA
ttagtatctctgaccg

SEQ ID NO: 25592 - DNA, 16 bp, synthetic construct
  misc_feature 1..16: note = synthetic [barcode part1]
  source 1..16: mol_type = other DNA
ccggttcgtctagact

SEQ ID NO: 25593 - DNA, 16 bp, synthetic construct
  misc_feature 1..16: note = synthetic [barcode part1]
  source 1..16: mol_type = other DNA
gagttcgcgccttact

SEQ ID NO: 25594 - DNA, 16 bp, synthetic construct
  misc_feature 1..16: note = synthetic [barcode part1]
  source 1..16: mol_type = other DNA
cacgcggttgtatagt

SEQ ID NO: 25595 - DNA, 16 bp, synthetic construct
  misc_feature 1..16: note = synthetic [barcode part1]
  source 1..16: mol_type = other DNA
acttccgttgtacctc

SEQ ID NO: 25596 - DNA, 16 bp, synthetic construct
  misc_feature 1..16: note = synthetic [barcode part1]
  source 1..16: mol_type = other DNA
ttccgacctctgttac

SEQ ID NO: 25597 - DNA, 16 bp, synthetic construct
  misc_feature 1..16: note = synthetic [barcode part1]
  source 1..16: mol_type = other DNA
accactcgatactcgc

SEQ ID NO: 25598 - DNA, 16 bp, synthetic construct
  misc_feature 1..16: note = synthetic [barcode part1]
  source 1..16: mol_type = other DNA
atcaagagttgacacg

SEQ ID NO: 25599 - DNA, 16 bp, synthetic construct
  misc_feature 1..16: note = synthetic [barcode part1]
  source 1..16: mol_type = other DNA
tcttgccgagttcgtg

SEQ ID NO: 25600 - DNA, 16 bp, synthetic construct
  misc_feature 1..16: note = synthetic [barcode part1]
  source 1..16: mol_type = other DNA
gtgtctcaactcaatc

SEQ ID NO: 25601 - DNA, 16 bp, synthetic construct
  misc_feature 1..16: note = synthetic [barcode part1]
  source 1..16: mol_type = other DNA
agaggcgccactaagt

SEQ ID NO: 25602 - DNA, 16 bp, synthetic construct
  misc_feature 1..16: note = synthetic [barcode part1]
  source 1..16: mol_type = other DNA
gtcaccgtagtaactg

SEQ ID NO: 25603 - DNA, 16 bp, synthetic construct
  misc_feature 1..16: note = synthetic [barcode part1]
  source 1..16: mol_type = other DNA
aactcggatacttcct

SEQ ID NO: 25604 - DNA, 16 bp, synthetic construct
  misc_feature 1..16: note = synthetic [barcode part1]
  source 1..16: mol_type = other DNA
cagaacttaaccggtc

SEQ ID NO: 25605 - DNA, 16 bp, synthetic construct
  misc_feature 1..16: note = synthetic [barcode part1]
  source 1..16: mol_type = other DNA
aaggacgagattactc

SEQ ID NO: 25606 - DNA, 16 bp, synthetic construct
  misc_feature 1..16: note = synthetic [barcode part1]
  source 1..16: mol_type = other DNA
gagagacgtccagatc

SEQ ID NO: 25607 - DNA, 16 bp, synthetic construct
  misc_feature 1..16: note = synthetic [barcode part1]
  source 1..16: mol_type = other DNA
gccaacgttgtcgttc

SEQ ID NO: 25608 - DNA, 16 bp, synthetic construct
  misc_feature 1..16: note = synthetic [barcode part1]
  source 1..16: mol_type = other DNA
gcctcagtataacacg

SEQ ID NO: 25609 - DNA, 16 bp, synthetic construct
  misc_feature 1..16: note = synthetic [barcode part1]
  source 1..16: mol_type = other DNA
cgtaagtggcagagtc

SEQ ID NO: 25610 - DNA, 16 bp, synthetic construct
  misc_feature 1..16: note = synthetic [barcode part1]
  source 1..16: mol_type = other DNA
cggaactataccacgt

SEQ ID NO: 25611 - DNA, 16 bp, synthetic construct
  misc_feature 1..16: note = synthetic [barcode part1]
  source 1..16: mol_type = other DNA
aaccagtctagagtcc

SEQ ID NO: 25612 - DNA, 16 bp, synthetic construct
  misc_feature 1..16: note = synthetic [barcode part1]
  source 1..16: mol_type = other DNA
acactggtgattctct

SEQ ID NO: 25613 - DNA, 16 bp, synthetic construct
  misc_feature 1..16: note = synthetic [barcode part1]
  source 1..16: mol_type = other DNA
actatctctgcaagtc

SEQ ID NO: 25614 - DNA, 16 bp, synthetic construct
  misc_feature 1..16: note = synthetic [barcode part1]
  source 1..16: mol_type = other DNA
ttccacgagaggtatc

SEQ ID NO: 25615 - DNA, 16 bp, synthetic construct
  misc_feature 1..16: note = synthetic [barcode part1]
  source 1..16: mol_type = other DNA
caattgccttgcgaag

SEQ ID NO: 25616 - DNA, 16 bp, synthetic construct
  misc_feature 1..16: note = synthetic [barcode part1]
  source 1..16: mol_type = other DNA
aatacgaagacgcgag

SEQ ID NO: 25617 - DNA, 16 bp, synthetic construct
  misc_feature 1..16: note = synthetic [barcode part1]
  source 1..16: mol_type = other DNA
agacgagagatagacc

SEQ ID NO: 25618 - DNA, 16 bp, synthetic construct
  misc_feature 1..16: note = synthetic [barcode part1]
  source 1..16: mol_type = other DNA
gacttagatactcctc

SEQ ID NO: 25619 - DNA, 16 bp, synthetic construct
  misc_feature 1..16: note = synthetic [barcode part1]
  source 1..16: mol_type = other DNA
cgagtgacgtcacaag

SEQ ID NO: 25620 - DNA, 16 bp, synthetic construct
  misc_feature 1..16: note = synthetic [barcode part1]
  source 1..16: mol_type = other DNA
aaggttaccaggcgtg

SEQ ID NO: 25621 - DNA, 16 bp, synthetic construct
  misc_feature 1..16: note = synthetic [barcode part1]
  source 1..16: mol_type = other DNA
attccacaggtgtctt

SEQ ID NO: 25622 - DNA, 16 bp, synthetic construct
  misc_feature 1..16: note = synthetic [barcode part1]
  source 1..16: mol_type = other DNA
aacttcctacaggtct

SEQ ID NO: 25623 - DNA, 16 bp, synthetic construct
  misc_feature 1..16: note = synthetic [barcode part1]
  source 1..16: mol_type = other DNA
tctgactatcggtgtt

SEQ ID NO: 25624 - DNA, 16 bp, synthetic construct
  misc_feature 1..16: note = synthetic [barcode part1]
  source 1..16: mol_type = other DNA
gtcacgaaggtggact

SEQ ID NO: 25625 - DNA, 16 bp, synthetic construct
  misc_feature 1..16: note = synthetic [barcode part1]
  source 1..16: mol_type = other DNA
cggttaggaccaactt

SEQ ID NO: 25626 - DNA, 16 bp, synthetic construct
  misc_feature 1..16: note = synthetic [barcode part1]
  source 1..16: mol_type = other DNA
tggtcggttgaagttc

SEQ ID NO: 25627 - DNA, 16 bp, synthetic construct
  misc_feature 1..16: note = synthetic [barcode part1]
  source 1..16: mol_type = other DNA
ccaactagttacgacg

SEQ ID NO: 25628 - DNA, 16 bp, synthetic construct
  misc_feature 1..16: note = synthetic [barcode part1]
  source 1..16: mol_type = other DNA
agtacgtgttggtacc

SEQ ID NO: 25629 - DNA, 16 bp, synthetic construct
  misc_feature 1..16: note = synthetic [barcode part1]
  source 1..16: mol_type = other DNA
tccagaagtgtacgtc

SEQ ID NO: 25630 - DNA, 16 bp, synthetic construct
  misc_feature 1..16: note = synthetic [barcode part1]
  source 1..16: mol_type = other DNA
gacacgtcaacgtact

SEQ ID NO: 25631 - DNA, 16 bp, synthetic construct
  misc_feature 1..16: note = synthetic [barcode part1]
  source 1..16: mol_type = other DNA
ttggacgcactatctt

SEQ ID NO: 25632 - DNA, 16 bp, synthetic construct
  misc_feature 1..16: note = synthetic [barcode part1]
  source 1..16: mol_type = other DNA
tccactctaccgcaag

SEQ ID NO: 25633 - DNA, 16 bp, synthetic construct
  misc_feature 1..16: note = synthetic [barcode part1]
  source 1..16: mol_type = other DNA
tgactcactaccgaag

SEQ ID NO: 25634 - DNA, 16 bp, synthetic construct
  misc_feature 1..16: note = synthetic [barcode part1]
  source 1..16: mol_type = other DNA
cctaattgccgtacgc

SEQ ID NO: 25635 - DNA, 16 bp, synthetic construct
  misc_feature 1..16: note = synthetic [barcode part1]
  source 1..16: mol_type = other DNA
gatcacaccaattctc

SEQ ID NO: 25636 - DNA, 16 bp, synthetic construct
  misc_feature 1..16: note = synthetic [barcode part1]
  source 1..16: mol_type = other DNA
gacgactatcgttggt

SEQ ID NO: 25637 - DNA, 16 bp, synthetic construct
  misc_feature 1..16: note = synthetic [barcode part1]
  source 1..16: mol_type = other DNA
gcaagttgaagtggcc

SEQ ID NO: 25638 - DNA, 16 bp, synthetic construct
  misc_feature 1..16: note = synthetic [barcode part1]
  source 1..16: mol_type = other DNA
cacacctatccttgtc

SEQ ID NO: 25639 - DNA, 16 bp, synthetic construct
  misc_feature 1..16: note = synthetic [barcode part1]
  source 1..16: mol_type = other DNA
agtacgtacactgacc

SEQ ID NO: 25640 - DNA, 16 bp, synthetic construct
  misc_feature 1..16: note = synthetic [barcode part1]
  source 1..16: mol_type = other DNA
caggtcaatcgaacct

SEQ ID NO: 25641 - DNA, 16 bp, synthetic construct
  misc_feature 1..16: note = synthetic [barcode part1]
  source 1..16: mol_type = other DNA
tgtctaggtgtgactg

SEQ ID NO: 25642 - DNA, 16 bp, synthetic construct
  misc_feature 1..16: note = synthetic [barcode part1]
  source 1..16: mol_type = other DNA
tgcaagtctacctcgc

SEQ ID NO: 25643 - DNA, 16 bp, synthetic construct
  misc_feature 1..16: note = synthetic [barcode part1]
  source 1..16: mol_type = other DNA
ttcactatctcgccac

SEQ ID NO: 25644 - DNA, 16 bp, synthetic construct
  misc_feature 1..16: note = synthetic [barcode part1]
  source 1..16: mol_type = other DNA
ccttgacgttgaagac

SEQ ID NO: 25645 - DNA, 16 bp, synthetic construct
  misc_feature 1..16: note = synthetic [barcode part1]
  source 1..16: mol_type = other DNA
tccgatcacgtgtcac

SEQ ID NO: 25646 - DNA, 16 bp, synthetic construct
  misc_feature 1..16: note = synthetic [barcode part1]
  source 1..16: mol_type = other DNA
gtctagacgaggcaac

SEQ ID NO: 25647 - DNA, 16 bp, synthetic construct
  misc_feature 1..16: note = synthetic [barcode part1]
  source 1..16: mol_type = other DNA
gtgcgactgtagttac

SEQ ID NO: 25648 - DNA, 16 bp, synthetic construct
  misc_feature 1..16: note = synthetic [barcode part1]
  source 1..16: mol_type = other DNA
agatcaaccttggtcg

SEQ ID NO: 25649 - DNA, 16 bp, synthetic construct
  misc_feature 1..16: note = synthetic [barcode part1]
  source 1..16: mol_type = other DNA
cagtgcgatcaaggac

SEQ ID NO: 25650 - DNA, 16 bp, synthetic construct
  misc_feature 1..16: note = synthetic [barcode part1]
  source 1..16: mol_type = other DNA
aatcgaccacgatacc

SEQ ID NO: 25651 - DNA, 16 bp, synthetic construct
  misc_feature 1..16: note = synthetic [barcode part1]
  source 1..16: mol_type = other DNA
gtgttggcgtattggt

SEQ ID NO: 25652 - DNA, 16 bp, synthetic construct
  misc_feature 1..16: note = synthetic [barcode part1]
  source 1..16: mol_type = other DNA
aacaccaggttgatcc

SEQ ID NO: 25653 - DNA, 16 bp, synthetic construct
  misc_feature 1..16: note = synthetic [barcode part1]
  source 1..16: mol_type = other DNA
acttacggaggtggtg

SEQ ID NO: 25654 - DNA, 16 bp, synthetic construct
  misc_feature 1..16: note = synthetic [barcode part1]
  source 1..16: mol_type = other DNA
acttgcctggagttcc

SEQ ID NO: 25655 - DNA, 16 bp, synthetic construct
  misc_feature 1..16: note = synthetic [barcode part1]
  source 1..16: mol_type = other DNA
tgcagacgtgataagt

SEQ ID NO: 25656 - DNA, 16 bp, synthetic construct
  misc_feature 1..16: note = synthetic [barcode part1]
  source 1..16: mol_type = other DNA
acgttgaagttcgcac

SEQ ID NO: 25657 - DNA, 16 bp, synthetic construct
  misc_feature 1..16: note = synthetic [barcode part1]
  source 1..16: mol_type = other DNA
acgttgactctgtcgc

SEQ ID NO: 25658 - DNA, 16 bp, synthetic construct
  misc_feature 1..16: note = synthetic [barcode part1]
  source 1..16: mol_type = other DNA
gtcgttaaggagtgcg

SEQ ID NO: 25659 - DNA, 16 bp, synthetic construct
  misc_feature 1..16: note = synthetic [barcode part1]
  source 1..16: mol_type = other DNA
gtcctcacgagttgtc

SEQ ID NO: 25660 - DNA, 16 bp, synthetic construct
  misc_feature 1..16: note = synthetic [barcode part1]
  source 1..16: mol_type = other DNA
atctgagttgtcttgc

SEQ ID NO: 25661 - DNA, 16 bp, synthetic construct
  misc_feature 1..16: note = synthetic [barcode part1]
  source 1..16: mol_type = other DNA
tatcctaaggcaacgc

SEQ ID NO: 25662 - DNA, 16 bp, synthetic construct
  misc_feature 1..16: note = synthetic [barcode part1]
  source 1..16: mol_type = other DNA
aggaattctccgactg

SEQ ID NO: 25663 - DNA, 16 bp, synthetic construct
  misc_feature 1..16: note = synthetic [barcode part1]
  source 1..16: mol_type = other DNA
ccgtacgaaccttctg

SEQ ID NO: 25664 - DNA, 16 bp, synthetic construct
  misc_feature 1..16: note = synthetic [barcode part1]
  source 1..16: mol_type = other DNA
acgtcctcgacaactc

SEQ ID NO: 25665 - DNA, 16 bp, synthetic construct
  misc_feature 1..16: note = synthetic [barcode part1]
  source 1..16: mol_type = other DNA
agtggaattaggcact

SEQ ID NO: 25666 - DNA, 16 bp, synthetic construct
  misc_feature 1..16: note = synthetic [barcode part1]
  source 1..16: mol_type = other DNA
cacgtaatattccgtc

SEQ ID NO: 25667 - DNA, 16 bp, synthetic construct
  misc_feature 1..16: note = synthetic [barcode part1]
  source 1..16: mol_type = other DNA
agataacctctgccag

SEQ ID NO: 25668 - DNA, 16 bp, synthetic construct
  misc_feature 1..16: note = synthetic [barcode part1]
  source 1..16: mol_type = other DNA
tcgccgagttactaag

SEQ ID NO: 25669 - DNA, 16 bp, synthetic construct
  misc_feature 1..16: note = synthetic [barcode part1]
  source 1..16: mol_type = other DNA
gtcggaataactgtag

SEQ ID NO: 25670 - DNA, 16 bp, synthetic construct
  misc_feature 1..16: note = synthetic [barcode part1]
  source 1..16: mol_type = other DNA
actcttgtagaccgtt

SEQ ID NO: 25671 - DNA, 16 bp, synthetic construct
  misc_feature 1..16: note = synthetic [barcode part1]
  source 1..16: mol_type = other DNA
gttctcacaggccact

SEQ ID NO: 25672 - DNA, 16 bp, synthetic construct
  misc_feature 1..16: note = synthetic [barcode part1]
  source 1..16: mol_type = other DNA
caaggtgtaagaggtg

SEQ ID NO: 25673 - DNA, 16 bp, synthetic construct
  misc_feature 1..16: note = synthetic [barcode part1]
  source 1..16: mol_type = other DNA
agtcaacgtgtgtgtc

SEQ ID NO: 25674 - DNA, 16 bp, synthetic construct
  misc_feature 1..16: note = synthetic [barcode part1]
  source 1..16: mol_type = other DNA
cctatacctctcacgt

SEQ ID NO: 25675 - DNA, 16 bp, synthetic construct
  misc_feature 1..16: note = synthetic [barcode part1]
  source 1..16: mol_type = other DNA
taccgagtctgtatct

SEQ ID NO: 25676 - DNA, 16 bp, synthetic construct
  misc_feature 1..16: note = synthetic [barcode part1]
  source 1..16: mol_type = other DNA
gccaataagtgcgttc

SEQ ID NO: 25677 - DNA, 16 bp, synthetic construct
  misc_feature 1..16: note = synthetic [barcode part1]
  source 1..16: mol_type = other DNA
tctgttaggaacggtc

SEQ ID NO: 25678 - DNA, 16 bp, synthetic construct
  misc_feature 1..16: note = synthetic [barcode part1]
  source 1..16: mol_type = other DNA
gactctcgaagattgc

SEQ ID NO: 25679 - DNA, 16 bp, synthetic construct
  misc_feature 1..16: note = synthetic [barcode part1]
  source 1..16: mol_type = other DNA
tgatcgtgtctgagtg

SEQ ID NO: 25680 - DNA, 16 bp, synthetic construct
  misc_feature 1..16: note = synthetic [barcode part1]
  source 1..16: mol_type = other DNA
aggtcaggtaccagtg

SEQ ID NO: 25681 - DNA, 16 bp, synthetic construct
  misc_feature 1..16: note = synthetic [barcode part1]
  source 1..16: mol_type = other DNA
cacagttaaggatcag

SEQ ID NO: 25682 - DNA, 16 bp, synthetic construct
  misc_feature 1..16: note = synthetic [barcode part1]
  source 1..16: mol_type = other DNA
accgtgccttcgttag

SEQ ID NO: 25683 - DNA, 16 bp, synthetic construct
  misc_feature 1..16: note = synthetic [barcode part1]
  source 1..16: mol_type = other DNA
gatactgactgatcgc

SEQ ID NO: 25684 - DNA, 16 bp, synthetic construct
  misc_feature 1..16: note = synthetic [barcode part1]
  source 1..16: mol_type = other DNA
tgtctgagaggaccag

SEQ ID NO: 25685 - DNA, 16 bp, synthetic construct
  misc_feature 1..16: note = synthetic [barcode part1]
  source 1..16: mol_type = other DNA
tcagtgaccgtactcc

SEQ ID NO: 25686 - DNA, 16 bp, synthetic construct
  misc_feature 1..16: note = synthetic [barcode part1]
  source 1..16: mol_type = other DNA
cctcacgttaggtcgt

SEQ ID NO: 25687 - DNA, 16 bp, synthetic construct
  misc_feature 1..16: note = synthetic [barcode part1]
  source 1..16: mol_type = other DNA
gcagtcaagaactagt

SEQ ID NO: 25688 - DNA, 16 bp, synthetic construct
  misc_feature 1..16: note = synthetic [barcode part1]
  source 1..16: mol_type = other DNA
atcaacgatctctcac

SEQ ID NO: 25689 - DNA, 16 bp, synthetic construct
  misc_feature 1..16: note = synthetic [barcode part1]
  source 1..16: mol_type = other DNA
gaggtagtactgttcc

SEQ ID NO: 25690 - DNA, 16 bp, synthetic construct
  misc_feature 1..16: note = synthetic [barcode part1]
  source 1..16: mol_type = other DNA
cgactattaggaggcg

SEQ ID NO: 25691 - DNA, 16 bp, synthetic construct
  misc_feature 1..16: note = synthetic [barcode part1]
  source 1..16: mol_type = other DNA
accaggttacttctgt

SEQ ID NO: 25692 - DNA, 16 bp, synthetic construct
  misc_feature 1..16: note = synthetic [barcode part1]
  source 1..16: mol_type = other DNA
cgacttaagaccgttg

SEQ ID NO: 25693 - DNA, 16 bp, synthetic construct
  misc_feature 1..16: note = synthetic [barcode part1]
  source 1..16: mol_type = other DNA
atacctcgttggatct

SEQ ID NO: 25694 - DNA, 16 bp, synthetic construct
  misc_feature 1..16: note = synthetic [barcode part1]
  source 1..16: mol_type = other DNA
gtgcgatctgactcct

SEQ ID NO: 25695 - DNA, 16 bp, synthetic construct
  misc_feature 1..16: note = synthetic [barcode part1]
  source 1..16: mol_type = other DNA
actagaattggcctcg

SEQ ID NO: 25696 - DNA, 16 bp, synthetic construct
  misc_feature 1..16: note = synthetic [barcode part1]
  source 1..16: mol_type = other DNA
tctagtggaacgcgag

SEQ ID NO: 25697 - DNA, 16 bp, synthetic construct
  misc_feature 1..16: note = synthetic [barcode part1]
  source 1..16: mol_type = other DNA
acctggcctcttgtag

SEQ ID NO: 25698 - DNA, 16 bp, synthetic construct
  misc_feature 1..16: note = synthetic [barcode part1]
  source 1..16: mol_type = other DNA
gtggttggtcaacgtt

SEQ ID NO: 25699 - DNA, 16 bp, synthetic construct
  misc_feature 1..16: note = synthetic [barcode part1]
  source 1..16: mol_type = other DNA
aggtccgattctctgc

SEQ ID NO: 25700 - DNA, 16 bp, synthetic construct
  misc_feature 1..16: note = synthetic [barcode part1]
  source 1..16: mol_type = other DNA
ttgaagatacgaaccg

SEQ ID NO: 25701 - DNA, 16 bp, synthetic construct
  misc_feature 1..16: note = synthetic [barcode part1]
  source 1..16: mol_type = other DNA
gtatcgattctcggcc

SEQ ID NO: 25702 - DNA, 16 bp, synthetic construct
  misc_feature 1..16: note = synthetic [barcode part1]
  source 1..16: mol_type = other DNA
tcgttgaagttcgacg

SEQ ID NO: 25703 - DNA, 16 bp, synthetic construct
  misc_feature 1..16: note = synthetic [barcode part1]
  source 1..16: mol_type = other DNA
tctcgaacgtcacaag

SEQ ID NO: 25704 - DNA, 16 bp, synthetic construct
  misc_feature 1..16: note = synthetic [barcode part1]
  source 1..16: mol_type = other DNA
tgtgagtacttcactc

SEQ ID NO: 25705 - DNA, 16 bp, synthetic construct
  misc_feature 1..16: note = synthetic [barcode part1]
  source 1..16: mol_type = other DNA
gtgtgcgttagttgac

SEQ ID NO: 25706 - DNA, 16 bp, synthetic construct
  misc_feature 1..16: note = synthetic [barcode part1]
  source 1..16: mol_type = other DNA
tggttgagtcgcaatc

SEQ ID NO: 25707 - DNA, 16 bp, synthetic construct
  misc_feature 1..16: note = synthetic [barcode part1]
  source 1..16: mol_type = other DNA
gttcggcaagagtacg

SEQ ID NO: 25708 - DNA, 16 bp, synthetic construct
  misc_feature 1..16: note = synthetic [barcode part1]
  source 1..16: mol_type = other DNA
acttgtgcggcagaag

SEQ ID NO: 25709 - DNA, 16 bp, synthetic construct
  misc_feature 1..16: note = synthetic [barcode part1]
  source 1..16: mol_type = other DNA
gtgccggtatagatct

SEQ ID NO: 25710 - DNA, 16 bp, synthetic construct
  misc_feature 1..16: note = synthetic [barcode part1]
  source 1..16: mol_type = other DNA
ttatctgtgtcgcggc

SEQ ID NO: 25711 - DNA, 16 bp, synthetic construct
  misc_feature 1..16: note = synthetic [barcode part1]
  source 1..16: mol_type = other DNA
caactaagtgcgcgtt

SEQ ID NO: 25712 - DNA, 16 bp, synthetic construct
  misc_feature 1..16: note = synthetic [barcode part1]
  source 1..16: mol_type = other DNA
gcgccaattctaccac

SEQ ID NO: 25713 - DNA, 16 bp, synthetic construct
  misc_feature 1..16: note = synthetic [barcode part1]
  source 1..16: mol_type = other DNA
caaggtctcggaatct

SEQ ID NO: 25714 - DNA, 16 bp, synthetic construct
  misc_feature 1..16: note = synthetic [barcode part1]
  source 1..16: mol_type = other DNA
aggtgcaagaacgtag

SEQ ID NO: 25715 - DNA, 16 bp, synthetic construct
  misc_feature 1..16: note = synthetic [barcode part1]
  source 1..16: mol_type = other DNA
gcgagaagatctggtc

SEQ ID NO: 25716 - DNA, 16 bp, synthetic construct
  misc_feature 1..16: note = synthetic [barcode part1]
  source 1..16: mol_type = other DNA
ttcctagaccaacact

SEQ ID NO: 25717 - DNA, 16 bp, synthetic construct
  misc_feature 1..16: note = synthetic [barcode part1]
  source 1..16: mol_type = other DNA
taggtaagtggtgccg

SEQ ID NO: 25718 - DNA, 16 bp, synthetic construct
  misc_feature 1..16: note = synthetic [barcode part1]
  source 1..16: mol_type = other DNA
ttatcggatacctctg

SEQ ID NO: 25719 - DNA, 16 bp, synthetic construct
  misc_feature 1..16: note = synthetic [barcode part1]
  source 1..16: mol_type = other DNA
cgtcaggactcaatac

SEQ ID NO: 25720 - DNA, 16 bp, synthetic construct
  misc_feature 1..16: note = synthetic [barcode part1]
  source 1..16: mol_type = other DNA
gcaggttcagtgaggt

SEQ ID NO: 25721 - DNA, 16 bp, synthetic construct
  misc_feature 1..16: note = synthetic [barcode part1]
  source 1..16: mol_type = other DNA
acagtcggagaccagt

SEQ ID NO: 25722 - DNA, 16 bp, synthetic construct
  misc_feature 1..16: note = synthetic [barcode part1]
  source 1..16: mol_type = other DNA
agtacgcgagaccagt

SEQ ID NO: 25723 - DNA, 16 bp, synthetic construct
  misc_feature 1..16: note = synthetic [barcode part1]
  source 1..16: mol_type = other DNA
tcctaatagtctacgc

SEQ ID NO: 25724 - DNA, 16 bp, synthetic construct
  misc_feature 1..16: note = synthetic [barcode part1]
  source 1..16: mol_type = other DNA
tgcggatagtgtctgt

SEQ ID NO: 25725 - DNA, 16 bp, synthetic construct
  misc_feature 1..16: note = synthetic [barcode part1]
  source 1..16: mol_type = other DNA
agtacgtcaactgtgc

SEQ ID NO: 25726 - DNA, 16 bp, synthetic construct
  misc_feature 1..16: note = synthetic [barcode part1]
  source 1..16: mol_type = other DNA
tggacgtgtactcagt

SEQ ID NO: 25727 - DNA, 16 bp, synthetic construct
  misc_feature 1..16: note = synthetic [barcode part1]
  source 1..16: mol_type = other DNA
tacgcctaacggtctc

SEQ ID NO: 25728 - DNA, 16 bp, synthetic construct
  misc_feature 1..16: note = synthetic [barcode part1]
  source 1..16: mol_type = other DNA
gcacagtcgtaatcgt

SEQ ID NO: 25729 - DNA, 16 bp, synthetic construct
  misc_feature 1..16: note = synthetic [barcode part1]
  source 1..16: mol_type = other DNA
tgtctgcctattcgtc

SEQ ID NO: 25730 - DNA, 16 bp, synthetic construct
  misc_feature 1..16: note = synthetic [barcode part1]
  source 1..16: mol_type = other DNA
agtgatcctcctgtgc

SEQ ID NO: 25731 - DNA, 16 bp, synthetic construct
  misc_feature 1..16: note = synthetic [barcode part1]
  source 1..16: mol_type = other DNA
tccgaagaactggtct

SEQ ID NO: 25732 - DNA, 16 bp, synthetic construct
  misc_feature 1..16: note = synthetic [barcode part1]
  source 1..16: mol_type = other DNA
gcgagatcactcagag

SEQ ID NO: 25733 - DNA, 16 bp, synthetic construct
  misc_feature 1..16: note = synthetic [barcode part1]
  source 1..16: mol_type = other DNA
cggagaactgatcttc

SEQ ID NO: 25734 - DNA, 16 bp, synthetic construct
  misc_feature 1..16: note = synthetic [barcode part1]
  source 1..16: mol_type = other DNA
cacgcacagttaactg

SEQ ID NO: 25735 - DNA, 16 bp, synthetic construct
  misc_feature 1..16: note = synthetic [barcode part1]
  source 1..16: mol_type = other DNA
tggaacgtactctgtg

SEQ ID NO: 25736 - DNA, 16 bp, synthetic construct
  misc_feature 1..16: note = synthetic [barcode part1]
  source 1..16: mol_type = other DNA
aagtgttacgacgagt

SEQ ID NO: 25737 - DNA, 16 bp, synthetic construct
  misc_feature 1..16: note = synthetic [barcode part1]
  source 1..16: mol_type = other DNA
gactcctgtataactc

SEQ ID NO: 25738 - DNA, 16 bp, synthetic construct
  misc_feature 1..16: note = synthetic [barcode part1]
  source 1..16: mol_type = other DNA
gccgtgtggagattag

SEQ ID NO: 25739 - DNA, 16 bp, synthetic construct
  misc_feature 1..16: note = synthetic [barcode part1]
  source 1..16: mol_type = other DNA
atctgaacgaggtagt

SEQ ID NO: 25740 - DNA, 16 bp, synthetic construct
  misc_feature 1..16: note = synthetic [barcode part1]
  source 1..16: mol_type = other DNA
tccgccggatctatac

SEQ ID NO: 25741 - DNA, 16 bp, synthetic construct
  misc_feature 1..16: note = synthetic [barcode part1]
  source 1..16: mol_type = other DNA
tcttggtgtacctagt

SEQ ID NO: 25742 - DNA, 16 bp, synthetic construct
  misc_feature 1..16: note = synthetic [barcode part1]
  source 1..16: mol_type = other DNA
aacctgtacaacagag

SEQ ID NO: 25743 - DNA, 16 bp, synthetic construct
  misc_feature 1..16: note = synthetic [barcode part1]
  source 1..16: mol_type = other DNA
tctgactgccgtgtgt

SEQ ID NO: 25744 - DNA, 16 bp, synthetic construct
  misc_feature 1..16: note = synthetic [barcode part1]
  source 1..16: mol_type = other DNA
caacttccacgattgt

SEQ ID NO: 25745 - DNA, 16 bp, synthetic construct
  misc_feature 1..16: note = synthetic [barcode part1]
  source 1..16: mol_type = other DNA
caactcaagtacgaag

SEQ ID NO: 25746 - DNA, 16 bp, synthetic construct
  misc_feature 1..16: note = synthetic [barcode part1]
  source 1..16: mol_type = other DNA
tgcctcaggtgtctac

SEQ ID NO: 25747 - DNA, 16 bp, synthetic construct
  misc_feature 1..16: note = synthetic [barcode part1]
  source 1..16: mol_type = other DNA
ccaggtattacttcgt

SEQ ID NO: 25748 - DNA, 16 bp, synthetic construct
  misc_feature 1..16: note = synthetic [barcode part1]
  source 1..16: mol_type = other DNA
cctctagacaccaacc

SEQ ID NO: 25749 - DNA, 16 bp, synthetic construct
  misc_feature 1..16: note = synthetic [barcode part1]
  source 1..16: mol_type = other DNA
ttgagaccgaacggac

SEQ ID NO: 25750 - DNA, 16 bp, synthetic construct
  misc_feature 1..16: note = synthetic [barcode part1]
  source 1..16: mol_type = other DNA
tcgttaggaagatacg

SEQ ID NO: 25751 - DNA, 16 bp, synthetic construct
  misc_feature 1..16: note = synthetic [barcode part1]
  source 1..16: mol_type = other DNA
tactcgagaggaccag

SEQ ID NO: 25752 - DNA, 16 bp, synthetic construct
  misc_feature 1..16: note = synthetic [barcode part1]
  source 1..16: mol_type = other DNA
aggagtgattcgacgc

SEQ ID NO: 25753 - DNA, 16 bp, synthetic construct
  misc_feature 1..16: note = synthetic [barcode part1]
  source 1..16: mol_type = other DNA
cactctgcgagataac

SEQ ID NO: 25754 - DNA, 16 bp, synthetic construct
  misc_feature 1..16: note = synthetic [barcode part1]
  source 1..16: mol_type = other DNA
tctgtattaactcggc

SEQ ID NO: 25755 - DNA, 16 bp, synthetic construct
  misc_feature 1..16: note = synthetic [barcode part1]
  source 1..16: mol_type = other DNA
accgaaggtcgatacg

SEQ ID NO: 25756 - DNA, 16 bp, synthetic construct
  misc_feature 1..16: note = synthetic [barcode part1]
  source 1..16: mol_type = other DNA
ccgtctgtaaggtcct

SEQ ID NO: 25757 - DNA, 16 bp, synthetic construct
  misc_feature 1..16: note = synthetic [barcode part1]
  source 1..16: mol_type = other DNA
caccgaccttcttgag

SEQ ID NO: 25758 - DNA, 16 bp, synthetic construct
  misc_feature 1..16: note = synthetic [barcode part1]
  source 1..16: mol_type = other DNA
agacaggagatctcgc

SEQ ID NO: 25759 - DNA, 16 bp, synthetic construct
  misc_feature 1..16: note = synthetic [barcode part1]
  source 1..16: mol_type = other DNA
acgaaggagttgttac

SEQ ID NO: 25760 - DNA, 16 bp, synthetic construct
  misc_feature 1..16: note = synthetic [barcode part1]
  source 1..16: mol_type = other DNA
ttgtgttcaccttcgc

SEQ ID NO: 25761 - DNA, 16 bp, synthetic construct
  misc_feature 1..16: note = synthetic [barcode part1]
  source 1..16: mol_type = other DNA
gcaactggtcaacgtt

SEQ ID NO: 25762 - DNA, 16 bp, synthetic construct
  misc_feature 1..16: note = synthetic [barcode part1]
  source 1..16: mol_type = other DNA
tgtagtacaggtaggt

SEQ ID NO: 25763 - DNA, 16 bp, synthetic construct
  misc_feature 1..16: note = synthetic [barcode part1]
  source 1..16: mol_type = other DNA
acgactaattggcgtc

SEQ ID NO: 25764 - DNA, 16 bp, synthetic construct
  misc_feature 1..16: note = synthetic [barcode part1]
  source 1..16: mol_type = other DNA
ttccgtagttgttggt

SEQ ID NO: 25765 - DNA, 16 bp, synthetic construct
  misc_feature 1..16: note = synthetic [barcode part1]
  source 1..16: mol_type = other DNA
cctaagtactccttag

SEQ ID NO: 25766 - DNA, 16 bp, synthetic construct
  misc_feature 1..16: note = synthetic [barcode part1]
  source 1..16: mol_type = other DNA
tcctggtgactgtacc

SEQ ID NO: 25767 - DNA, 16 bp, synthetic construct
  misc_feature 1..16: note = synthetic [barcode part1]
  source 1..16: mol_type = other DNA
gtgtcggttcctaacc

SEQ ID NO: 25768 - DNA, 16 bp, synthetic construct
  misc_feature 1..16: note = synthetic [barcode part1]
  source 1..16: mol_type = other DNA
tcacaggtctgtgagt

SEQ ID NO: 25769 - DNA, 16 bp, synthetic construct
  misc_feature 1..16: note = synthetic [barcode part1]
  source 1..16: mol_type = other DNA
taccaccgcaatcacc

SEQ ID NO: 25770 - DNA, 16 bp, synthetic construct
  misc_feature 1..16: note = synthetic [barcode part1]
  source 1..16: mol_type = other DNA
agaagactcgcgcagt

SEQ ID NO: 25771 - DNA, 16 bp, synthetic construct
  misc_feature 1..16: note = synthetic [barcode part1]
  source 1..16: mol_type = other DNA
aggacacgtactcttg

SEQ ID NO: 25772 - DNA, 16 bp, synthetic construct
  misc_feature 1..16: note = synthetic [barcode part1]
  source 1..16: mol_type = other DNA
atcctgttcactgcct

SEQ ID NO: 25773 - DNA, 16 bp, synthetic construct
  misc_feature 1..16: note = synthetic [barcode part1]
  source 1..16: mol_type = other DNA
tgcagtggcctacctt

SEQ ID NO: 25774 - DNA, 16 bp, synthetic construct
  misc_feature 1..16: note = synthetic [barcode part1]
  source 1..16: mol_type = other DNA
ttgatctcacctcgtc

SEQ ID NO: 25775 - DNA, 16 bp, synthetic construct
  misc_feature 1..16: note = synthetic [barcode part1]
  source 1..16: mol_type = other DNA
aacactagaccgacct

SEQ ID NO: 25776 - DNA, 16 bp, synthetic construct
  misc_feature 1..16: note = synthetic [barcode part1]
  source 1..16: mol_type = other DNA
aggcgagaagtgagtt

SEQ ID NO: 25777 - DNA, 16 bp, synthetic construct
  misc_feature 1..16: note = synthetic [barcode part1]
  source 1..16: mol_type = other DNA
taattcctgattgcgc

SEQ ID NO: 25778 - DNA, 16 bp, synthetic construct
  misc_feature 1..16: note = synthetic [barcode part1]
  source 1..16: mol_type = other DNA
aataggtggtaggcag

SEQ ID NO: 25779 - DNA, 16 bp, synthetic construct
  misc_feature 1..16: note = synthetic [barcode part1]
  source 1..16: mol_type = other DNA
aacggttccaagttgc

SEQ ID NO: 25780 - DNA, 16 bp, synthetic construct
  misc_feature 1..16: note = synthetic [barcode part1]
  source 1..16: mol_type = other DNA
gtctgagacgagttct

SEQ ID NO: 25781 - DNA, 16 bp, synthetic construct
  misc_feature 1..16: note = synthetic [barcode part1]
  source 1..16: mol_type = other DNA
cgttaggaatacaggt

SEQ ID NO: 25782 - DNA, 16 bp, synthetic construct
  misc_feature 1..16: note = synthetic [barcode part1]
  source 1..16: mol_type = other DNA
gtcacttccacggact

SEQ ID NO: 25783 - DNA, 16 bp, synthetic construct
  misc_feature 1..16: note = synthetic [barcode part1]
  source 1..16: mol_type = other DNA
ttcctggcaatcgtgc

SEQ ID NO: 25784 - DNA, 16 bp, synthetic construct
  misc_feature 1..16: note = synthetic [barcode part1]
  source 1..16: mol_type = other DNA
cgagtaccacaagtct

SEQ ID NO: 25785 - DNA, 16 bp, synthetic construct
  misc_feature 1..16: note = synthetic [barcode part1]
  source 1..16: mol_type = other DNA
tcgaggattagatacg

SEQ ID NO: 25786 - DNA, 16 bp, synthetic construct
  misc_feature 1..16: note = synthetic [barcode part1]
  source 1..16: mol_type = other DNA
actcttgtcgtgtcct

SEQ ID NO: 25787 - DNA, 16 bp, synthetic construct
  misc_feature 1..16: note = synthetic [barcode part1]
  source 1..16: mol_type = other DNA
attgtattggccttcg

SEQ ID NO: 25788 - DNA, 16 bp, synthetic construct
  misc_feature 1..16: note = synthetic [barcode part1]
  source 1..16: mol_type = other DNA
tcagagtcaagacctc

SEQ ID NO: 25789 - DNA, 16 bp, synthetic construct
  misc_feature 1..16: note = synthetic [barcode part1]
  source 1..16: mol_type = other DNA
ccagtcgtgattaacg

SEQ ID NO: 25790 - DNA, 16 bp, synthetic construct
  misc_feature 1..16: note = synthetic [barcode part1]
  source 1..16: mol_type = other DNA
tgtaatactcgtccac

SEQ ID NO: 25791 - DNA, 16 bp, synthetic construct
  misc_feature 1..16: note = synthetic [barcode part1]
  source 1..16: mol_type = other DNA
acttgttcgaacggac

SEQ ID NO: 25792 - DNA, 16 bp, synthetic construct
  misc_feature 1..16: note = synthetic [barcode part1]
  source 1..16: mol_type = other DNA
caatcttacgtgtcac

SEQ ID NO: 25793 - DNA, 16 bp, synthetic construct
  misc_feature 1..16: note = synthetic [barcode part1]
  source 1..16: mol_type = other DNA
gtggatctcagacgtt

SEQ ID NO: 25794 - DNA, 16 bp, synthetic construct
  misc_feature 1..16: note = synthetic [barcode part1]
  source 1..16: mol_type = other DNA
acactctgacctaact

SEQ ID NO: 25795 - DNA, 16 bp, synthetic construct
  misc_feature 1..16: note = synthetic [barcode part1]
  source 1..16: mol_type = other DNA
tgtgcgcaattggttg

SEQ ID NO: 25796 - DNA, 16 bp, synthetic construct
  misc_feature 1..16: note = synthetic [barcode part1]
  source 1..16: mol_type = other DNA
cgacaatccttgcgtc

SEQ ID NO: 25797 - DNA, 16 bp, synthetic construct
  misc_feature 1..16: note = synthetic [barcode part1]
  source 1..16: mol_type = other DNA
tcctacacggttcggt

SEQ ID NO: 25798 - DNA, 16 bp, synthetic construct
  misc_feature 1..16: note = synthetic [barcode part1]
  source 1..16: mol_type = other DNA
tggtatcagtgagtag

SEQ ID NO: 25799 - DNA, 16 bp, synthetic construct
  misc_feature 1..16: note = synthetic [barcode part1]
  source 1..16: mol_type = other DNA
attagtaggtggtgac

SEQ ID NO: 25800 - DNA, 16 bp, synthetic construct
  misc_feature 1..16: note = synthetic [barcode part1]
  source 1..16: mol_type = other DNA
atcggactaccagact

SEQ ID NO: 25801 - DNA, 16 bp, synthetic construct
  misc_feature 1..16: note = synthetic [barcode part1]
  source 1..16: mol_type = other DNA
gccgacagtgattatc

SEQ ID NO: 25802 - DNA, 16 bp, synthetic construct
  misc_feature 1..16: note = synthetic [barcode part1]
  source 1..16: mol_type = other DNA
tacctccgttgttaag

SEQ ID NO: 25803 - DNA, 16 bp, synthetic construct
  misc_feature 1..16: note = synthetic [barcode part1]
  source 1..16: mol_type = other DNA
gtcaatcaccgtaacg

SEQ ID NO: 25804 - DNA, 16 bp, synthetic construct
  misc_feature 1..16: note = synthetic [barcode part1]
  source 1..16: mol_type = other DNA
tcctaccgataagacg

SEQ ID NO: 25805 - DNA, 16 bp, synthetic construct
  misc_feature 1..16: note = synthetic [barcode part1]
  source 1..16: mol_type = other DNA
acctgatctggactag

SEQ ID NO: 25806 - DNA, 16 bp, synthetic construct
  misc_feature 1..16: note = synthetic [barcode part1]
  source 1..16: mol_type = other DNA
gataaggtctccgact

SEQ ID NO: 25807 - DNA, 16 bp, synthetic construct
  misc_feature 1..16: note = synthetic [barcode part1]
  source 1..16: mol_type = other DNA
ttacggtctctggaag

SEQ ID NO: 25808 - DNA, 16 bp, synthetic construct
  misc_feature 1..16: note = synthetic [barcode part1]
  source 1..16: mol_type = other DNA
gagatctgacactgtc

SEQ ID NO: 25809 - DNA, 16 bp, synthetic construct
  misc_feature 1..16: note = synthetic [barcode part1]
  source 1..16: mol_type = other DNA
tcacgcctcgttaggt

SEQ ID NO: 25810 - DNA, 16 bp, synthetic construct
  misc_feature 1..16: note = synthetic [barcode part1]
  source 1..16: mol_type = other DNA
gacctctatcaccttc

SEQ ID NO: 25811 - DNA, 16 bp, synthetic construct
  misc_feature 1..16: note = synthetic [barcode part1]
  source 1..16: mol_type = other DNA
ttggttctctgtgagt

SEQ ID NO: 25812 - DNA, 16 bp, synthetic construct
  misc_feature 1..16: note = synthetic [barcode part1]
  source 1..16: mol_type = other DNA
aaccaactcagagtcc

SEQ ID NO: 25813 - DNA, 16 bp, synthetic construct
  misc_feature 1..16: note = synthetic [barcode part1]
  source 1..16: mol_type = other DNA
agtcacaacacgtcac

SEQ ID NO: 25814 - DNA, 16 bp, synthetic construct
  misc_feature 1..16: note = synthetic [barcode part1]
  source 1..16: mol_type = other DNA
gattgaatcaccgtcg

SEQ ID NO: 25815 - DNA, 16 bp, synthetic construct
  misc_feature 1..16: note = synthetic [barcode part1]
  source 1..16: mol_type = other DNA
tctgaagttgactggc

SEQ ID NO: 25816 - DNA, 16 bp, synthetic construct
  misc_feature 1..16: note = synthetic [barcode part1]
  source 1..16: mol_type = other DNA
ttgtatcgcaattcgc

SEQ ID NO: 25817 - DNA, 16 bp, synthetic construct
  misc_feature 1..16: note = synthetic [barcode part1]
  source 1..16: mol_type = other DNA
acgaggagtatctctc

SEQ ID NO: 25818 - DNA, 16 bp, synthetic construct
  misc_feature 1..16: note = synthetic [barcode part1]
  source 1..16: mol_type = other DNA
gtattccactactggt

SEQ ID NO: 25819 - DNA, 16 bp, synthetic construct
  misc_feature 1..16: note = synthetic [barcode part1]
  source 1..16: mol_type = other DNA
gtcgtgaacagtgtct

SEQ ID NO: 25820 - DNA, 16 bp, synthetic construct
  misc_feature 1..16: note = synthetic [barcode part1]
  source 1..16: mol_type = other DNA
gataatcgaagtgcgt

SEQ ID NO: 25821 - DNA, 16 bp, synthetic construct
  misc_feature 1..16: note = synthetic [barcode part1]
  source 1..16: mol_type = other DNA
gtgcgcgaattaacct

SEQ ID NO: 25822 - DNA, 16 bp, synthetic construct
  misc_feature 1..16: note = synthetic [barcode part1]
  source 1..16: mol_type = other DNA
tcacgcgtcttggttg

SEQ ID NO: 25823 - DNA, 16 bp, synthetic construct
  misc_feature 1..16: note = synthetic [barcode part1]
  source 1..16: mol_type = other DNA
tatatcacggtacgcg

SEQ ID NO: 25824 - DNA, 16 bp, synthetic construct
  misc_feature 1..16: note = synthetic [barcode part1]
  source 1..16: mol_type = other DNA
gcaagtgcagaactcg

SEQ ID NO: 25825 - DNA, 16 bp, synthetic construct
  misc_feature 1..16: note = synthetic [barcode part1]
  source 1..16: mol_type = other DNA
gtcgatagtctgagtc

SEQ ID NO: 25826 - DNA, 16 bp, synthetic construct
  misc_feature 1..16: note = synthetic [barcode part1]
  source 1..16: mol_type = other DNA
tcgagagttgaatacg

SEQ ID NO: 25827 - DNA, 16 bp, synthetic construct
  misc_feature 1..16: note = synthetic [barcode part1]
  source 1..16: mol_type = other DNA
caaccggatattgcac

SEQ ID NO: 25828 - DNA, 16 bp, synthetic construct
  misc_feature 1..16: note = synthetic [barcode part1]
  source 1..16: mol_type = other DNA
tctcgtactgaatcgt

SEQ ID NO: 25829 - DNA, 16 bp, synthetic construct
  misc_feature 1..16: note = synthetic [barcode part1]
  source 1..16: mol_type = other DNA
actcagaggcgagatc

SEQ ID NO: 25830 - DNA, 16 bp, synthetic construct
  misc_feature 1..16: note = synthetic [barcode part1]
  source 1..16: mol_type = other DNA
accacaacctatctac

SEQ ID NO: 25831 - DNA, 16 bp, synthetic construct
  misc_feature 1..16: note = synthetic [barcode part1]
  source 1..16: mol_type = other DNA
tccgccacgtgaactt

SEQ ID NO: 25832 - DNA, 16 bp, synthetic construct
  misc_feature 1..16: note = synthetic [barcode part1]
  source 1..16: mol_type = other DNA
cgatataagtccgcgt

SEQ ID NO: 25833 - DNA, 16 bp, synthetic construct
  misc_feature 1..16: note = synthetic [barcode part1]
  source 1..16: mol_type = other DNA
caacaatccaggtcgt

SEQ ID NO: 25834 - DNA, 16 bp, synthetic construct
  misc_feature 1..16: note = synthetic [barcode part1]
  source 1..16: mol_type = other DNA
tcttatagtcaccggt

SEQ ID NO: 25835 - DNA, 16 bp, synthetic construct
  misc_feature 1..16: note = synthetic [barcode part1]
  source 1..16: mol_type = other DNA
aagatcacgtgaactg

SEQ ID NO: 25836 - DNA, 16 bp, synthetic construct
  misc_feature 1..16: note = synthetic [barcode part1]
  source 1..16: mol_type = other DNA
cggcaatatacctctt

SEQ ID NO: 25837 - DNA, 16 bp, synthetic construct
  misc_feature 1..16: note = synthetic [barcode part1]
  source 1..16: mol_type = other DNA
aattcgagatcgccgt

SEQ ID NO: 25838 - DNA, 16 bp, synthetic construct
  misc_feature 1..16: note = synthetic [barcode part1]
  source 1..16: mol_type = other DNA
tacacgacctggttcc

SEQ ID NO: 25839 - DNA, 16 bp, synthetic construct
  misc_feature 1..16: note = synthetic [barcode part1]
  source 1..16: mol_type = other DNA
caatccactcagtgag

SEQ ID NO: 25840 - DNA, 16 bp, synthetic construct
  misc_feature 1..16: note = synthetic [barcode part1]
  source 1..16: mol_type = other DNA
gcgaagataatccaac

SEQ ID NO: 25841 - DNA, 16 bp, synthetic construct
  misc_feature 1..16: note = synthetic [barcode part1]
  source 1..16: mol_type = other DNA
cgcaggtaggtgatac

SEQ ID NO: 25842 - DNA, 16 bp, synthetic construct
  misc_feature 1..16: note = synthetic [barcode part1]
  source 1..16: mol_type = other DNA
gtgacgtgttgactgt

SEQ ID NO: 25843 - DNA, 16 bp, synthetic construct
  misc_feature 1..16: note = synthetic [barcode part1]
  source 1..16: mol_type = other DNA
gttgacgacctggatt

SEQ ID NO: 25844 - DNA, 16 bp, synthetic construct
  misc_feature 1..16: note = synthetic [barcode part1]
  source 1..16: mol_type = other DNA
caagttatcctcgtgt

SEQ ID NO: 25845 - DNA, 16 bp, synthetic construct
  misc_feature 1..16: note = synthetic [barcode part1]
  source 1..16: mol_type = other DNA
attcttccgcaatcag

SEQ ID NO: 25846 - DNA, 16 bp, synthetic construct
  misc_feature 1..16: note = synthetic [barcode part1]
  source 1..16: mol_type = other DNA
tgtacacaaccgactg

SEQ ID NO: 25847 - DNA, 16 bp, synthetic construct
  misc_feature 1..16: note = synthetic [barcode part1]
  source 1..16: mol_type = other DNA
aattcctctggcgtgc

SEQ ID NO: 25848 - DNA, 16 bp, synthetic construct
  misc_feature 1..16: note = synthetic [barcode part1]
  source 1..16: mol_type = other DNA
tatctgtctgtggtac

SEQ ID NO: 25849 - DNA, 16 bp, synthetic construct
  misc_feature 1..16: note = synthetic [barcode part1]
  source 1..16: mol_type = other DNA
tgtgtcacaacacacg

SEQ ID NO: 25850 - DNA, 16 bp, synthetic construct
  misc_feature 1..16: note = synthetic [barcode part1]
  source 1..16: mol_type = other DNA
acctctgcggactatc

SEQ ID NO: 25851 - DNA, 16 bp, synthetic construct
  misc_feature 1..16: note = synthetic [barcode part1]
  source 1..16: mol_type = other DNA
actggttctagagtcg

SEQ ID NO: 25852 - DNA, 16 bp, synthetic construct
  misc_feature 1..16: note = synthetic [barcode part1]
  source 1..16: mol_type = other DNA
gccaacgtgagaagtc

SEQ ID NO: 25853 - DNA, 16 bp, synthetic construct
  misc_feature 1..16: note = synthetic [barcode part1]
  source 1..16: mol_type = other DNA
cgattcaccactgaag

SEQ ID NO: 25854 - DNA, 16 bp, synthetic construct
  misc_feature 1..16: note = synthetic [barcode part1]
  source 1..16: mol_type = other DNA
gccgtgatactcactc

SEQ ID NO: 25855 - DNA, 16 bp, synthetic construct
  misc_feature 1..16: note = synthetic [barcode part1]
  source 1..16: mol_type = other DNA
tgttgttgccttccac

SEQ ID NO: 25856 - DNA, 16 bp, synthetic construct
  misc_feature 1..16: note = synthetic [barcode part1]
  source 1..16: mol_type = other DNA
cctaaggcaatcgact

SEQ ID NO: 25857 - DNA, 16 bp, synthetic construct
  misc_feature 1..16: note = synthetic [barcode part1]
  source 1..16: mol_type = other DNA
tcctatatcgagtcac

SEQ ID NO: 25858 - DNA, 16 bp, synthetic construct
  misc_feature 1..16: note = synthetic [barcode part1]
  source 1..16: mol_type = other DNA
tattggcaggatcaag

SEQ ID NO: 25859 - DNA, 16 bp, synthetic construct
  misc_feature 1..16: note = synthetic [barcode part1]
  source 1..16: mol_type = other DNA
agacgaaccactcgtt

SEQ ID NO: 25860 - DNA, 16 bp, synthetic construct
  misc_feature 1..16: note = synthetic [barcode part1]
  source 1..16: mol_type = other DNA
gtaatcggccgatatc

SEQ ID NO: 25861 - DNA, 16 bp, synthetic construct
  misc_feature 1..16: note = synthetic [barcode part1]
  source 1..16: mol_type = other DNA
ccagacgactctactc

SEQ ID NO: 25862 - DNA, 16 bp, synthetic construct
  misc_feature 1..16: note = synthetic [barcode part1]
  source 1..16: mol_type = other DNA
cgtattcgcggttcgt

SEQ ID NO: 25863 - DNA, 16 bp, synthetic construct
  misc_feature 1..16: note = synthetic [barcode part1]
  source 1..16: mol_type = other DNA
cacttcgagatagtgc

SEQ ID NO: 25864 - DNA, 16 bp, synthetic construct
  misc_feature 1..16: note = synthetic [barcode part1]
  source 1..16: mol_type = other DNA
aggtagaatcctaggt

SEQ ID NO: 25865 - DNA, 16 bp, synthetic construct
  misc_feature 1..16: note = synthetic [barcode part1]
  source 1..16: mol_type = other DNA
tgcaggagtatcttcg

SEQ ID NO: 25866 - DNA, 16 bp, synthetic construct
  misc_feature 1..16: note = synthetic [barcode part1]
  source 1..16: mol_type = other DNA
tggagttctctccttc

SEQ ID NO: 25867 - DNA, 16 bp, synthetic construct
  misc_feature 1..16: note = synthetic [barcode part1]
  source 1..16: mol_type = other DNA
gactcgactgacgatt

SEQ ID NO: 25868 - DNA, 16 bp, synthetic construct
  misc_feature 1..16: note = synthetic [barcode part1]
  source 1..16: mol_type = other DNA
tgcggtctaaccttcg

SEQ ID NO: 25869 - DNA, 16 bp, synthetic construct
  misc_feature 1..16: note = synthetic [barcode part1]
  source 1..16: mol_type = other DNA
attccaggaagttccg

SEQ ID NO: 25870 - DNA, 16 bp, synthetic construct
  misc_feature 1..16: note = synthetic [barcode part1]
  source 1..16: mol_type = other DNA
ttcgccaagttcgcac

SEQ ID NO: 25871 - DNA, 16 bp, synthetic construct
  misc_feature 1..16: note = synthetic [barcode part1]
  source 1..16: mol_type = other DNA
tgtcagtgaggtcgag

SEQ ID NO: 25872 - DNA, 16 bp, synthetic construct
  misc_feature 1..16: note = synthetic [barcode part1]
  source 1..16: mol_type = other DNA
ccgtggtccaattaag

SEQ ID NO: 25873 - DNA, 16 bp, synthetic construct
  misc_feature 1..16: note = synthetic [barcode part1]
  source 1..16: mol_type = other DNA
tctggagtgaccagtt

SEQ ID NO: 25874 - DNA, 16 bp, synthetic construct
  misc_feature 1..16: note = synthetic [barcode part1]
  source 1..16: mol_type = other DNA
tgaccttcgacgtatt

SEQ ID NO: 25875 - DNA, 16 bp, synthetic construct
  misc_feature 1..16: note = synthetic [barcode part1]
  source 1..16: mol_type = other DNA
gcgttatcacttgccg

SEQ ID NO: 25876 - DNA, 16 bp, synthetic construct
  misc_feature 1..16: note = synthetic [barcode part1]
  source 1..16: mol_type = other DNA
acctagtaaggcgcag

SEQ ID NO: 25877 - DNA, 16 bp, synthetic construct
  misc_feature 1..16: note = synthetic [barcode part1]
  source 1..16: mol_type = other DNA
caccaaggcaatctgt

SEQ ID NO: 25878 - DNA, 16 bp, synthetic construct
  misc_feature 1..16: note = synthetic [barcode part1]
  source 1..16: mol_type = other DNA
aggtacgtatactccg

SEQ ID NO: 25879 - DNA, 16 bp, synthetic construct
  misc_feature 1..16: note = synthetic [barcode part1]
  source 1..16: mol_type = other DNA
tgtcactcttgcaagt

SEQ ID NO: 25880 - DNA, 16 bp, synthetic construct
  misc_feature 1..16: note = synthetic [barcode part1]
  source 1..16: mol_type = other DNA
tatcctggtgacgagt

SEQ ID NO: 25881 - DNA, 16 bp, synthetic construct
  misc_feature 1..16: note = synthetic [barcode part1]
  source 1..16: mol_type = other DNA
gacgtacggccttctt

SEQ ID NO: 25882 - DNA, 16 bp, synthetic construct
  misc_feature 1..16: note = synthetic [barcode part1]
  source 1..16: mol_type = other DNA
taaccgttcgccactg

SEQ ID NO: 25883 - DNA, 16 bp, synthetic construct
  misc_feature 1..16: note = synthetic [barcode part1]
  source 1..16: mol_type = other DNA
ttggaggtacgttaag

SEQ ID NO: 25884 - DNA, 16 bp, synthetic construct
  misc_feature 1..16: note = synthetic [barcode part1]
  source 1..16: mol_type = other DNA
gacaacttggcaactc

SEQ ID NO: 25885 - DNA, 16 bp, synthetic construct
  misc_feature 1..16: note = synthetic [barcode part1]
  source 1..16: mol_type = other DNA
cagtgtacttcgttac

SEQ ID NO: 25886 - DNA, 16 bp, synthetic construct
  misc_feature 1..16: note = synthetic [barcode part1]
  source 1..16: mol_type = other DNA
cgttcgccagataagt

SEQ ID NO: 25887 - DNA, 16 bp, synthetic construct
  misc_feature 1..16: note = synthetic [barcode part1]
  source 1..16: mol_type = other DNA
taacgcacttcgttac

SEQ ID NO: 25888 - DNA, 16 bp, synthetic construct
  misc_feature 1..16: note = synthetic [barcode part1]
  source 1..16: mol_type = other DNA
agtcggacgccaatag

SEQ ID NO: 25889 - DNA, 16 bp, synthetic construct
  misc_feature 1..16: note = synthetic [barcode part1]
  source 1..16: mol_type = other DNA
tgattggtgtggtacc

SEQ ID NO: 25890 - DNA, 16 bp, synthetic construct
  misc_feature 1..16: note = synthetic [barcode part1]
  source 1..16: mol_type = other DNA
gacgtagtaggtcacg

SEQ ID NO: 25891 - DNA, 16 bp, synthetic construct
  misc_feature 1..16: note = synthetic [barcode part1]
  source 1..16: mol_type = other DNA
cgattggaccagttgt

SEQ ID NO: 25892 - DNA, 16 bp, synthetic construct
  misc_feature 1..16: note = synthetic [barcode part1]
  source 1..16: mol_type = other DNA
cgacagtgttgagtct

SEQ ID NO: 25893 - DNA, 16 bp, synthetic construct
  misc_feature 1..16: note = synthetic [barcode part1]
  source 1..16: mol_type = other DNA
actaagtcggaagtgt

SEQ ID NO: 25894 - DNA, 16 bp, synthetic construct
  misc_feature 1..16: note = synthetic [barcode part1]
  source 1..16: mol_type = other DNA
caacacaccaacgtac

SEQ ID NO: 25895 - DNA, 16 bp, synthetic construct
  misc_feature 1..16: note = synthetic [barcode part1]
  source 1..16: mol_type = other DNA
atacgtcacagagtag

SEQ ID NO: 25896 - DNA, 16 bp, synthetic construct
  misc_feature 1..16: note = synthetic [barcode part1]
  source 1..16: mol_type = other DNA
ccggacagtagtagac

SEQ ID NO: 25897 - DNA, 16 bp, synthetic construct
  misc_feature 1..16: note = synthetic [barcode part1]
  source 1..16: mol_type = other DNA
aacaagtctacgacag

SEQ ID NO: 25898 - DNA, 16 bp, synthetic construct
  misc_feature 1..16: note = synthetic [barcode part1]
  source 1..16: mol_type = other DNA
gtgagacaggtctacg

SEQ ID NO: 25899 - DNA, 16 bp, synthetic construct
  misc_feature 1..16: note = synthetic [barcode part1]
  source 1..16: mol_type = other DNA
gattgcgccgactctt

SEQ ID NO: 25900 - DNA, 16 bp, synthetic construct
  misc_feature 1..16: note = synthetic [barcode part1]
  source 1..16: mol_type = other DNA
gtctctggaattactc

SEQ ID NO: 25901 - DNA, 16 bp, synthetic construct
  misc_feature 1..16: note = synthetic [barcode part1]
  source 1..16: mol_type = other DNA
gttatccacggattct

SEQ ID NO: 25902 - DNA, 16 bp, synthetic construct
  misc_feature 1..16: note = synthetic [barcode part1]
  source 1..16: mol_type = other DNA
gagaagattctcctcg

SEQ ID NO: 25903 - DNA, 16 bp, synthetic construct
  misc_feature 1..16: note = synthetic [barcode part1]
  source 1..16: mol_type = other DNA
ttcagagtaaccgacc

SEQ ID NO: 25904 - DNA, 16 bp, synthetic construct
  misc_feature 1..16: note = synthetic [barcode part1]
  source 1..16: mol_type = other DNA
gacaactccgataacc

SEQ ID NO: 25905 - DNA, 16 bp, synthetic construct
  misc_feature 1..16: note = synthetic [barcode part1]
  source 1..16: mol_type = other DNA
agatacttccggacgt

SEQ ID NO: 25906 - DNA, 16 bp, synthetic construct
  misc_feature 1..16: note = synthetic [barcode part1]
  source 1..16: mol_type = other DNA
tggtgataccgttgac

SEQ ID NO: 25907 - DNA, 16 bp, synthetic construct
  misc_feature 1..16: note = synthetic [barcode part1]
  source 1..16: mol_type = other DNA
actggagtgcacagtg

SEQ ID NO: 25908 - DNA, 16 bp, synthetic construct
  misc_feature 1..16: note = synthetic [barcode part1]
  source 1..16: mol_type = other DNA
attaggtagacgtggt

SEQ ID NO: 25909 - DNA, 16 bp, synthetic construct
  misc_feature 1..16: note = synthetic [barcode part1]
  source 1..16: mol_type = other DNA
accagtaggactggac

SEQ ID NO: 25910 - DNA, 16 bp, synthetic construct
  misc_feature 1..16: note = synthetic [barcode part1]
  source 1..16: mol_type = other DNA
aaggaccgtatcgacg

SEQ ID NO: 25911 - DNA, 16 bp, synthetic construct
  misc_feature 1..16: note = synthetic [barcode part1]
  source 1..16: mol_type = other DNA
attgcagttcgaggtc

SEQ ID NO: 25912 - DNA, 16 bp, synthetic construct
  misc_feature 1..16: note = synthetic [barcode part1]
  source 1..16: mol_type = other DNA
ttcgattatacgccac

SEQ ID NO: 25913 - DNA, 16 bp, synthetic construct
  misc_feature 1..16: note = synthetic [barcode part1]
  source 1..16: mol_type = other DNA
gacgacaaggtctacg

SEQ ID NO: 25914 - DNA, 16 bp, synthetic construct
  misc_feature 1..16: note = synthetic [barcode part1]
  source 1..16: mol_type = other DNA
taactgatacgcgcgt

SEQ ID NO: 25915 - DNA, 16 bp, synthetic construct
  misc_feature 1..16: note = synthetic [barcode part1]
  source 1..16: mol_type = other DNA
gtgcgatagaagatct

SEQ ID NO: 25916 - DNA, 16 bp, synthetic construct
  misc_feature 1..16: note = synthetic [barcode part1]
  source 1..16: mol_type = other DNA
gttggatccactagac

SEQ ID NO: 25917 - DNA, 16 bp, synthetic construct
  misc_feature 1..16: note = synthetic [barcode part1]
  source 1..16: mol_type = other DNA
gttgcggtatctattc

SEQ ID NO: 25918 - DNA, 16 bp, synthetic construct
  misc_feature 1..16: note = synthetic [barcode part1]
  source 1..16: mol_type = other DNA
tatccagattgaggag

SEQ ID NO: 25919 - DNA, 16 bp, synthetic construct
  misc_feature 1..16: note = synthetic [barcode part1]
  source 1..16: mol_type = other DNA
tgtccaaggttgtacg

SEQ ID NO: 25920 - DNA, 16 bp, synthetic construct
  misc_feature 1..16: note = synthetic [barcode part1]
  source 1..16: mol_type = other DNA
tcctcggcggtatact

SEQ ID NO: 25921 - DNA, 16 bp, synthetic construct
  misc_feature 1..16: note = synthetic [barcode part1]
  source 1..16: mol_type = other DNA
acctattactccgaac

SEQ ID NO: 25922 - DNA, 16 bp, synthetic construct
  misc_feature 1..16: note = synthetic [barcode part1]
  source 1..16: mol_type = other DNA
gtactgaagaacgatc

SEQ ID NO: 25923 - DNA, 16 bp, synthetic construct
  misc_feature 1..16: note = synthetic [barcode part1]
  source 1..16: mol_type = other DNA
agaaccgtgcgaatcg

SEQ ID NO: 25924 - DNA, 16 bp, synthetic construct
  misc_feature 1..16: note = synthetic [barcode part1]
  source 1..16: mol_type = other DNA
agataggcgtcgcagt

SEQ ID NO: 25925 - DNA, 16 bp, synthetic construct
  misc_feature 1..16: note = synthetic [barcode part1]
  source 1..16: mol_type = other DNA
gcgtcctgattgtcgt

SEQ ID NO: 25926 - DNA, 16 bp, synthetic construct
  misc_feature 1..16: note = synthetic [barcode part1]
  source 1..16: mol_type = other DNA
ataccttccagtaacc

SEQ ID NO: 25927 - DNA, 16 bp, synthetic construct
  misc_feature 1..16: note = synthetic [barcode part1]
  source 1..16: mol_type = other DNA
gacgtataggaccgac

SEQ ID NO: 25928 - DNA, 16 bp, synthetic construct
  misc_feature 1..16: note = synthetic [barcode part1]
  source 1..16: mol_type = other DNA
gttcaacttggaccag

SEQ ID NO: 25929 - DNA, 16 bp, synthetic construct
  misc_feature 1..16: note = synthetic [barcode part1]
  source 1..16: mol_type = other DNA
tctactggcgcgatct

SEQ ID NO: 25930 - DNA, 16 bp, synthetic construct
  misc_feature 1..16: note = synthetic [barcode part1]
  source 1..16: mol_type = other DNA
tggcgattgacagtct

SEQ ID NO: 25931 - DNA, 16 bp, synthetic construct
  misc_feature 1..16: note = synthetic [barcode part1]
  source 1..16: mol_type = other DNA
gtctgttgcggatagt

SEQ ID NO: 25932 - DNA, 16 bp, synthetic construct
  misc_feature 1..16: note = synthetic [barcode part1]
  source 1..16: mol_type = other DNA
cggaagttagaccacg

SEQ ID NO: 25933 - DNA, 16 bp, synthetic construct
  misc_feature 1..16: note = synthetic [barcode part1]
  source 1..16: mol_type = other DNA
ttgtctaggtaggtgc

SEQ ID NO: 25934 - DNA, 16 bp, synthetic construct
  misc_feature 1..16: note = synthetic [barcode part1]
  source 1..16: mol_type = other DNA
agtctcctgcagactc

SEQ ID NO: 25935 - DNA, 16 bp, synthetic construct
  misc_feature 1..16: note = synthetic [barcode part1]
  source 1..16: mol_type = other DNA
tgtatctacgatctgc

SEQ ID NO: 25936 - DNA, 16 bp, synthetic construct
  misc_feature 1..16: note = synthetic [barcode part1]
  source 1..16: mol_type = other DNA
cgcagtaggacgaact

SEQ ID NO: 25937 - DNA, 16 bp, synthetic construct
  misc_feature 1..16: note = synthetic [barcode part1]
  source 1..16: mol_type = other DNA
actacgagaactctgc

SEQ ID NO: 25938 - DNA, 16 bp, synthetic construct
  misc_feature 1..16: note = synthetic [barcode part1]
  source 1..16: mol_type = other DNA
atcctaggttgaccag

SEQ ID NO: 25939 - DNA, 16 bp, synthetic construct
  misc_feature 1..16: note = synthetic [barcode part1]
  source 1..16: mol_type = other DNA
tccggaaggaattcct

SEQ ID NO: 25940 - DNA, 16 bp, synthetic construct
  misc_feature 1..16: note = synthetic [barcode part1]
  source 1..16: mol_type = other DNA
agacgaggtaatatcc

SEQ ID NO: 25941 - DNA, 16 bp, synthetic construct
  misc_feature 1..16: note = synthetic [barcode part1]
  source 1..16: mol_type = other DNA
tagtgtggactgtacc

SEQ ID NO: 25942 - DNA, 16 bp, synthetic construct
  misc_feature 1..16: note = synthetic [barcode part1]
  source 1..16: mol_type = other DNA
gagtcgtctgtatctt

SEQ ID NO: 25943 - DNA, 16 bp, synthetic construct
  misc_feature 1..16: note = synthetic [barcode part1]
  source 1..16: mol_type = other DNA
tccacaacggatatcg

SEQ ID NO: 25944 - DNA, 16 bp, synthetic construct
  misc_feature 1..16: note = synthetic [barcode part1]
  source 1..16: mol_type = other DNA
cactaccgttcaggtc

SEQ ID NO: 25945 - DNA, 16 bp, synthetic construct
  misc_feature 1..16: note = synthetic [barcode part1]
  source 1..16: mol_type = other DNA
ttggttcactcggatt

SEQ ID NO: 25946 - DNA, 16 bp, synthetic construct
  misc_feature 1..16: note = synthetic [barcode part1]
  source 1..16: mol_type = other DNA
gttagtccacacacag

SEQ ID NO: 25947 - DNA, 16 bp, synthetic construct
  misc_feature 1..16: note = synthetic [barcode part1]
  source 1..16: mol_type = other DNA
gtgcggttagtatacc

SEQ ID NO: 25948 - DNA, 16 bp, synthetic construct
  misc_feature 1..16: note = synthetic [barcode part1]
  source 1..16: mol_type = other DNA
caccgttacctgaacc

SEQ ID NO: 25949 - DNA, 16 bp, synthetic construct
  misc_feature 1..16: note = synthetic [barcode part1]
  source 1..16: mol_type = other DNA
attcctgcgaaggtgt

SEQ ID NO: 25950 - DNA, 16 bp, synthetic construct
  misc_feature 1..16: note = synthetic [barcode part1]
  source 1..16: mol_type = other DNA
acacaattcggaaggt

SEQ ID NO: 25951 - DNA, 16 bp, synthetic construct
  misc_feature 1..16: note = synthetic [barcode part1]
  source 1..16: mol_type = other DNA
gtgaggtaacgcctag

SEQ ID NO: 25952 - DNA, 16 bp, synthetic construct
  misc_feature 1..16: note = synthetic [barcode part1]
  source 1..16: mol_type = other DNA
tcggcgttaactgtag

SEQ ID NO: 25953 - DNA, 16 bp, synthetic construct
  misc_feature 1..16: note = synthetic [barcode part1]
  source 1..16: mol_type = other DNA
tctagttgtcgtgcgc

SEQ ID NO: 25954 - DNA, 16 bp, synthetic construct
  misc_feature 1..16: note = synthetic [barcode part1]
  source 1..16: mol_type = other DNA
agactgttagatcgcc

SEQ ID NO: 25955 - DNA, 16 bp, synthetic construct
  misc_feature 1..16: note = synthetic [barcode part1]
  source 1..16: mol_type = other DNA
tattcctacgcgagag

SEQ ID NO: 25956 - DNA, 16 bp, synthetic construct
  misc_feature 1..16: note = synthetic [barcode part1]
  source 1..16: mol_type = other DNA
cgagaagtgtatagtc

SEQ ID NO: 25957 - DNA, 16 bp, synthetic construct
  misc_feature 1..16: note = synthetic [barcode part1]
  source 1..16: mol_type = other DNA
gttacttctcgtcacc

SEQ ID NO: 25958 - DNA, 16 bp, synthetic construct
  misc_feature 1..16: note = synthetic [barcode part1]
  source 1..16: mol_type = other DNA
tcgattcttacacggt

SEQ ID NO: 25959 - DNA, 16 bp, synthetic construct
  misc_feature 1..16: note = synthetic [barcode part1]
  source 1..16: mol_type = other DNA
tcgaatacaccactct

SEQ ID NO: 25960 - DNA, 16 bp, synthetic construct
  misc_feature 1..16: note = synthetic [barcode part1]
  source 1..16: mol_type = other DNA
ttaggcgtgttgttct

SEQ ID NO: 25961 - DNA, 16 bp, synthetic construct
  misc_feature 1..16: note = synthetic [barcode part1]
  source 1..16: mol_type = other DNA
tcgccgcgaatctatc

SEQ ID NO: 25962 - DNA, 16 bp, synthetic construct
  misc_feature 1..16: note = synthetic [barcode part1]
  source 1..16: mol_type = other DNA
gatcgtaacactgacc

SEQ ID NO: 25963 - DNA, 16 bp, synthetic construct
  misc_feature 1..16: note = synthetic [barcode part1]
  source 1..16: mol_type = other DNA
tcgtgaacctacagac

SEQ ID NO: 25964 - DNA, 16 bp, synthetic construct
  misc_feature 1..16: note = synthetic [barcode part1]
  source 1..16: mol_type = other DNA
ccaggacgttcacttc

SEQ ID NO: 25965 - DNA, 16 bp, synthetic construct
  misc_feature 1..16: note = synthetic [barcode part1]
  source 1..16: mol_type = other DNA
gccgataacctggatt

SEQ ID NO: 25966 - DNA, 16 bp, synthetic construct
  misc_feature 1..16: note = synthetic [barcode part1]
  source 1..16: mol_type = other DNA
cgccaacaaccaagag

SEQ ID NO: 25967 - DNA, 16 bp, synthetic construct
  misc_feature 1..16: note = synthetic [barcode part1]
  source 1..16: mol_type = other DNA
caattcctgcgcaatt

SEQ ID NO: 25968 - DNA, 16 bp, synthetic construct
  misc_feature 1..16: note = synthetic [barcode part1]
  source 1..16: mol_type = other DNA
gttgactcacacacag

SEQ ID NO: 25969 - DNA, 16 bp, synthetic construct
  misc_feature 1..16: note = synthetic [barcode part1]
  source 1..16: mol_type = other DNA
cctatcggtacagtcc

SEQ ID NO: 25970 - DNA, 16 bp, synthetic construct
  misc_feature 1..16: note = synthetic [barcode part1]
  source 1..16: mol_type = other DNA
gtccacggttagagag

SEQ ID NO: 25971 - DNA, 16 bp, synthetic construct
  misc_feature 1..16: note = synthetic [barcode part1]
  source 1..16: mol_type = other DNA
ttcaaccgaggaacct

SEQ ID NO: 25972 - DNA, 16 bp, synthetic construct
  misc_feature 1..16: note = synthetic [barcode part1]
  source 1..16: mol_type = other DNA
tattgataccgacgcg

SEQ ID NO: 25973 - DNA, 16 bp, synthetic construct
  misc_feature 1..16: note = synthetic [barcode part1]
  source 1..16: mol_type = other DNA
tggagaccttaacaag

SEQ ID NO: 25974 - DNA, 16 bp, synthetic construct
  misc_feature 1..16: note = synthetic [barcode part1]
  source 1..16: mol_type = other DNA
acgtcggtgataggac

SEQ ID NO: 25975 - DNA, 16 bp, synthetic construct
  misc_feature 1..16: note = synthetic [barcode part1]
  source 1..16: mol_type = other DNA
tacggtatactcactc

SEQ ID NO: 25976 - DNA, 16 bp, synthetic construct
  misc_feature 1..16: note = synthetic [barcode part1]
  source 1..16: mol_type = other DNA
gacgtataactcttcc

SEQ ID NO: 25977 - DNA, 16 bp, synthetic construct
  misc_feature 1..16: note = synthetic [barcode part1]
  source 1..16: mol_type = other DNA
acgacttaggtgcgag

SEQ ID NO: 25978 - DNA, 16 bp, synthetic construct
  misc_feature 1..16: note = synthetic [barcode part1]
  source 1..16: mol_type = other DNA
tagtgtgttctaccac

SEQ ID NO: 25979 - DNA, 16 bp, synthetic construct
  misc_feature 1..16: note = synthetic [barcode part1]
  source 1..16: mol_type = other DNA
taagactactggccgt

SEQ ID NO: 25980 - DNA, 16 bp, synthetic construct
  misc_feature 1..16: note = synthetic [barcode part1]
  source 1..16: mol_type = other DNA
gtataacggaaggtct

SEQ ID NO: 25981 - DNA, 16 bp, synthetic construct
  misc_feature 1..16: note = synthetic [barcode part1]
  source 1..16: mol_type = other DNA
ttggtgtgtgttgacg

SEQ ID NO: 25982 - DNA, 16 bp, synthetic construct
  misc_feature 1..16: note = synthetic [barcode part1]
  source 1..16: mol_type = other DNA
gacctgagatctggtt

SEQ ID NO: 25983 - DNA, 16 bp, synthetic construct
  misc_feature 1..16: note = synthetic [barcode part1]
  source 1..16: mol_type = other DNA
cacgtgacgaacttgt

SEQ ID NO: 25984 - DNA, 16 bp, synthetic construct
  misc_feature 1..16: note = synthetic [barcode part1]
  source 1..16: mol_type = other DNA
tagatccgtggcgaag

SEQ ID NO: 25985 - DNA, 16 bp, synthetic construct
  misc_feature 1..16: note = synthetic [barcode part1]
  source 1..16: mol_type = other DNA
taccagatacttccac

SEQ ID NO: 25986 - DNA, 16 bp, synthetic construct
  misc_feature 1..16: note = synthetic [barcode part1]
  source 1..16: mol_type = other DNA
acctgtcagtatcgcc

SEQ ID NO: 25987 - DNA, 16 bp, synthetic construct
  misc_feature 1..16: note = synthetic [barcode part1]
  source 1..16: mol_type = other DNA
ttaggtgaacaggatc

SEQ ID NO: 25988 - DNA, 16 bp, synthetic construct
  misc_feature 1..16: note = synthetic [barcode part1]
  source 1..16: mol_type = other DNA
taactcttgcgatcac

SEQ ID NO: 25989 - DNA, 16 bp, synthetic construct
  misc_feature 1..16: note = synthetic [barcode part1]
  source 1..16: mol_type = other DNA
tagttgcctgtcaccg

SEQ ID NO: 25990 - DNA, 16 bp, synthetic construct
  misc_feature 1..16: note = synthetic [barcode part1]
  source 1..16: mol_type = other DNA
gtgccgtaggtaagtg

SEQ ID NO: 25991 - DNA, 16 bp, synthetic construct
  misc_feature 1..16: note = synthetic [barcode part1]
  source 1..16: mol_type = other DNA
attccgagtcgatcag

SEQ ID NO: 25992 - DNA, 16 bp, synthetic construct
  misc_feature 1..16: note = synthetic [barcode part1]
  source 1..16: mol_type = other DNA
accgaatatccgacac

SEQ ID NO: 25993 - DNA, 16 bp, synthetic construct
  misc_feature 1..16: note = synthetic [barcode part1]
  source 1..16: mol_type = other DNA
ttatctcgtcgaggag

SEQ ID NO: 25994 - DNA, 16 bp, synthetic construct
  misc_feature 1..16: note = synthetic [barcode part1]
  source 1..16: mol_type = other DNA
ccttggtacactcgac

SEQ ID NO: 25995 - DNA, 16 bp, synthetic construct
  misc_feature 1..16: note = synthetic [barcode part1]
  source 1..16: mol_type = other DNA
actcacaacgtggttg

SEQ ID NO: 25996 - DNA, 16 bp, synthetic construct
  misc_feature 1..16: note = synthetic [barcode part1]
  source 1..16: mol_type = other DNA
ttcggtccgtgactac

SEQ ID NO: 25997 - DNA, 16 bp, synthetic construct
  misc_feature 1..16: note = synthetic [barcode part1]
  source 1..16: mol_type = other DNA
tgcggaataactcaag

SEQ ID NO: 25998 - DNA, 16 bp, synthetic construct
  misc_feature 1..16: note = synthetic [barcode part1]
  source 1..16: mol_type = other DNA
cgagtatccttgccac

SEQ ID NO: 25999 - DNA, 16 bp, synthetic construct
  misc_feature 1..16: note = synthetic [barcode part1]
  source 1..16: mol_type = other DNA
tctggccacacgttgt

SEQ ID NO: 26000 - DNA, 16 bp, synthetic construct
  misc_feature 1..16: note = synthetic [barcode part1]
  source 1..16: mol_type = other DNA
cctaaccggttagaac

SEQ ID NO: 26001 - DNA, 16 bp, synthetic construct
  misc_feature 1..16: note = synthetic [barcode part1]
  source 1..16: mol_type = other DNA
gcgttgattaggcgtt

SEQ ID NO: 26002 - DNA, 16 bp, synthetic construct
  misc_feature 1..16: note = synthetic [barcode part1]
  source 1..16: mol_type = other DNA
ttacttcgtcgttccg

SEQ ID NO: 26003 - DNA, 16 bp, synthetic construct
  misc_feature 1..16: note = synthetic [barcode part1]
  source 1..16: mol_type = other DNA
tatctcactgtctcgc

SEQ ID NO: 26004 - DNA, 16 bp, synthetic construct
  misc_feature 1..16: note = synthetic [barcode part1]
  source 1..16: mol_type = other DNA
tggtctctgtatagtc

SEQ ID NO: 26005 - DNA, 16 bp, synthetic construct
  misc_feature 1..16: note = synthetic [barcode part1]
  source 1..16: mol_type = other DNA
gcaaggtcaaggtaag

SEQ ID NO: 26006 - DNA, 16 bp, synthetic construct
  misc_feature 1..16: note = synthetic [barcode part1]
  source 1..16: mol_type = other DNA
cggactgacactcttc

SEQ ID NO: 26007 - DNA, 16 bp, synthetic construct
  misc_feature 1..16: note = synthetic [barcode part1]
  source 1..16: mol_type = other DNA
gagattcacgacactc

SEQ ID NO: 26008 - DNA, 16 bp, synthetic construct
  misc_feature 1..16: note = synthetic [barcode part1]
  source 1..16: mol_type = other DNA
tgttctaagacgacgc

SEQ ID NO: 26009 - DNA, 16 bp, synthetic construct
  misc_feature 1..16: note = synthetic [barcode part1]
  source 1..16: mol_type = other DNA
gccagtgtatcaacac

SEQ ID NO: 26010 - DNA, 16 bp, synthetic construct
  misc_feature 1..16: note = synthetic [barcode part1]
  source 1..16: mol_type = other DNA
aaccgacacgcgtatt

SEQ ID NO: 26011 - DNA, 16 bp, synthetic construct
  misc_feature 1..16: note = synthetic [barcode part1]
  source 1..16: mol_type = other DNA
actctatcgtcaacac

SEQ ID NO: 26012 - DNA, 16 bp, synthetic construct
  misc_feature 1..16: note = synthetic [barcode part1]
  source 1..16: mol_type = other DNA
tagtgacgtgtgaggc

SEQ ID NO: 26013 - DNA, 16 bp, synthetic construct
  misc_feature 1..16: note = synthetic [barcode part1]
  source 1..16: mol_type = other DNA
tctactaaggaaccgc

SEQ ID NO: 26014 - DNA, 16 bp, synthetic construct
  misc_feature 1..16: note = synthetic [barcode part1]
  source 1..16: mol_type = other DNA
agtagtagacgaggtg

SEQ ID NO: 26015 - DNA, 16 bp, synthetic construct
  misc_feature 1..16: note = synthetic [barcode part1]
  source 1..16: mol_type = other DNA
tggttcctgcggttac

SEQ ID NO: 26016 - DNA, 16 bp, synthetic construct
  misc_feature 1..16: note = synthetic [barcode part1]
  source 1..16: mol_type = other DNA
actaacgtatctcacc

SEQ ID NO: 26017 - DNA, 16 bp, synthetic construct
  misc_feature 1..16: note = synthetic [barcode part1]
  source 1..16: mol_type = other DNA
tgagatattcggcctg

SEQ ID NO: 26018 - DNA, 16 bp, synthetic construct
  misc_feature 1..16: note = synthetic [barcode part1]
  source 1..16: mol_type = other DNA
gaacgtgatacaggag

SEQ ID NO: 26019 - DNA, 16 bp, synthetic construct
  misc_feature 1..16: note = synthetic [barcode part1]
  source 1..16: mol_type = other DNA
tgtgtgtgtaccacag

SEQ ID NO: 26020 - DNA, 16 bp, synthetic construct
  misc_feature 1..16: note = synthetic [barcode part1]
  source 1..16: mol_type = other DNA
tgacctactgttggag

SEQ ID NO: 26021 - DNA, 16 bp, synthetic construct
  misc_feature 1..16: note = synthetic [barcode part1]
  source 1..16: mol_type = other DNA
ttgagtgttgtcttgc

SEQ ID NO: 26022 - DNA, 16 bp, synthetic construct
  misc_feature 1..16: note = synthetic [barcode part1]
  source 1..16: mol_type = other DNA
ttacaatcggtgccag

SEQ ID NO: 26023 - DNA, 16 bp, synthetic construct
  misc_feature 1..16: note = synthetic [barcode part1]
  source 1..16: mol_type = other DNA
tccgttgttggacacc

SEQ ID NO: 26024 - DNA, 16 bp, synthetic construct
  misc_feature 1..16: note = synthetic [barcode part1]
  source 1..16: mol_type = other DNA
tgttacgttggagtcg

SEQ ID NO: 26025 - DNA, 16 bp, synthetic construct
  misc_feature 1..16: note = synthetic [barcode part1]
  source 1..16: mol_type = other DNA
atctgttgtaggtggc

SEQ ID NO: 26026 - DNA, 16 bp, synthetic construct
  misc_feature 1..16: note = synthetic [barcode part1]
  source 1..16: mol_type = other DNA
gagaagttcaccgtct

SEQ ID NO: 26027 - DNA, 16 bp, synthetic construct
  misc_feature 1..16: note = synthetic [barcode part1]
  source 1..16: mol_type = other DNA
ttcgcaacaagtaccg

SEQ ID NO: 26028 - DNA, 16 bp, synthetic construct
  misc_feature 1..16: note = synthetic [barcode part1]
  source 1..16: mol_type = other DNA
taagaaggtcgtgtac

SEQ ID NO: 26029 - DNA, 16 bp, synthetic construct
  misc_feature 1..16: note = synthetic [barcode part1]
  source 1..16: mol_type = other DNA
gaccaagtactctacg

SEQ ID NO: 26030 - DNA, 16 bp, synthetic construct
  misc_feature 1..16: note = synthetic [barcode part1]
  source 1..16: mol_type = other DNA
tggtctaattcggcag

SEQ ID NO: 26031 - DNA, 16 bp, synthetic construct
  misc_feature 1..16: note = synthetic [barcode part1]
  source 1..16: mol_type = other DNA
gtcttccgattctctg

SEQ ID NO: 26032 - DNA, 16 bp, synthetic construct
  misc_feature 1..16: note = synthetic [barcode part1]
  source 1..16: mol_type = other DNA
actagtgtgttggtgc

SEQ ID NO: 26033 - DNA, 16 bp, synthetic construct
  misc_feature 1..16: note = synthetic [barcode part1]
  source 1..16: mol_type = other DNA
ttgtgttgcggaagtc

SEQ ID NO: 26034 - DNA, 16 bp, synthetic construct
  misc_feature 1..16: note = synthetic [barcode part1]
  source 1..16: mol_type = other DNA
gcgcggtgtatattgt

SEQ ID NO: 26035 - DNA, 16 bp, synthetic construct
  misc_feature 1..16: note = synthetic [barcode part1]
  source 1..16: mol_type = other DNA
tatccgcctcaaggtc

SEQ ID NO: 26036 - DNA, 16 bp, synthetic construct
  misc_feature 1..16: note = synthetic [barcode part1]
  source 1..16: mol_type = other DNA
gccgtctcgagtactt

SEQ ID NO: 26037 - DNA, 16 bp, synthetic construct
  misc_feature 1..16: note = synthetic [barcode part1]
  source 1..16: mol_type = other DNA
acaggccagaacagtc

SEQ ID NO: 26038 - DNA, 16 bp, synthetic construct
  misc_feature 1..16: note = synthetic [barcode part1]
  source 1..16: mol_type = other DNA
tgtgatcgtgtctgag

SEQ ID NO: 26039 - DNA, 16 bp, synthetic construct
  misc_feature 1..16: note = synthetic [barcode part1]
  source 1..16: mol_type = other DNA
tccgccaggaataact

SEQ ID NO: 26040 - DNA, 16 bp, synthetic construct
  misc_feature 1..16: note = synthetic [barcode part1]
  source 1..16: mol_type = other DNA
actctataggtcaggc

SEQ ID NO: 26041 - DNA, 16 bp, synthetic construct
  misc_feature 1..16: note = synthetic [barcode part1]
  source 1..16: mol_type = other DNA
tccagttgccacacgt

SEQ ID NO: 26042 - DNA, 16 bp, synthetic construct
  misc_feature 1..16: note = synthetic [barcode part1]
  source 1..16: mol_type = other DNA
gaacagacgtcgcagt

SEQ ID NO: 26043 - DNA, 16 bp, synthetic construct
  misc_feature 1..16: note = synthetic [barcode part1]
  source 1..16: mol_type = other DNA
cgacaactggtgatct

SEQ ID NO: 26044 - DNA, 16 bp, synthetic construct
  misc_feature 1..16: note = synthetic [barcode part1]
  source 1..16: mol_type = other DNA
cacagtgcagacaggt

SEQ ID NO: 26045 - DNA, 16 bp, synthetic construct
  misc_feature 1..16: note = synthetic [barcode part1]
  source 1..16: mol_type = other DNA
gaactggtagttgtag

SEQ ID NO: 26046 - DNA, 16 bp, synthetic construct
  misc_feature 1..16: note = synthetic [barcode part1]
  source 1..16: mol_type = other DNA
acaacctgttcctgcg

SEQ ID NO: 26047 - DNA, 16 bp, synthetic construct
  misc_feature 1..16: note = synthetic [barcode part1]
  source 1..16: mol_type = other DNA
cgattgagagagagac

SEQ ID NO: 26048 - DNA, 16 bp, synthetic construct
  misc_feature 1..16: note = synthetic [barcode part1]
  source 1..16: mol_type = other DNA
acaggagtcgataatc

SEQ ID NO: 26049 - DNA, 16 bp, synthetic construct
  misc_feature 1..16: note = synthetic [barcode part1]
  source 1..16: mol_type = other DNA
gtctaacgattgccag

SEQ ID NO: 26050 - DNA, 16 bp, synthetic construct
  misc_feature 1..16: note = synthetic [barcode part1]
  source 1..16: mol_type = other DNA
cacactcagtaatctc

SEQ ID NO: 26051 - DNA, 16 bp, synthetic construct
  misc_feature 1..16: note = synthetic [barcode part1]
  source 1..16: mol_type = other DNA
gcaccttattgaatcc

SEQ ID NO: 26052 - DNA, 16 bp, synthetic construct
  misc_feature 1..16: note = synthetic [barcode part1]
  source 1..16: mol_type = other DNA
aacggactgtcacgag

SEQ ID NO: 26053 - DNA, 16 bp, synthetic construct
  misc_feature 1..16: note = synthetic [barcode part1]
  source 1..16: mol_type = other DNA
cgtgcggatctgaatt

SEQ ID NO: 26054 - DNA, 16 bp, synthetic construct
  misc_feature 1..16: note = synthetic [barcode part1]
  source 1..16: mol_type = other DNA
cggacacaagaactgc

SEQ ID NO: 26055 - DNA, 16 bp, synthetic construct
  misc_feature 1..16: note = synthetic [barcode part1]
  source 1..16: mol_type = other DNA
acacgaggatagtccg

SEQ ID NO: 26056 - DNA, 16 bp, synthetic construct
  misc_feature 1..16: note = synthetic [barcode part1]
  source 1..16: mol_type = other DNA
cggatcgcgataattc

SEQ ID NO: 26057 - DNA, 16 bp, synthetic construct
  misc_feature 1..16: note = synthetic [barcode part1]
  source 1..16: mol_type = other DNA
aacactgtcgaagtcc

SEQ ID NO: 26058 - DNA, 16 bp, synthetic construct
  misc_feature 1..16: note = synthetic [barcode part1]
  source 1..16: mol_type = other DNA
aaggtaactcaccgtc

SEQ ID NO: 26059 - DNA, 16 bp, synthetic construct
  misc_feature 1..16: note = synthetic [barcode part1]
  source 1..16: mol_type = other DNA
gttcctaggcagtcct

SEQ ID NO: 26060 - DNA, 16 bp, synthetic construct
  misc_feature 1..16: note = synthetic [barcode part1]
  source 1..16: mol_type = other DNA
ttgataatcgcgtctc

SEQ ID NO: 26061 - DNA, 16 bp, synthetic construct
  misc_feature 1..16: note = synthetic [barcode part1]
  source 1..16: mol_type = other DNA
gcagagagtatccttc

SEQ ID NO: 26062 - DNA, 16 bp, synthetic construct
  misc_feature 1..16: note = synthetic [barcode part1]
  source 1..16: mol_type = other DNA
tccgaatatccaggtg

SEQ ID NO: 26063 - DNA, 16 bp, synthetic construct
  misc_feature 1..16: note = synthetic [barcode part1]
  source 1..16: mol_type = other DNA
gttactcgttcgtagt

SEQ ID NO: 26064 - DNA, 16 bp, synthetic construct
  misc_feature 1..16: note = synthetic [barcode part1]
  source 1..16: mol_type = other DNA
tagaacctcgaggttc

SEQ ID NO: 26065 - DNA, 16 bp, synthetic construct
  misc_feature 1..16: note = synthetic [barcode part1]
  source 1..16: mol_type = other DNA
aacctacggacgacag

SEQ ID NO: 26066 - DNA, 16 bp, synthetic construct
  misc_feature 1..16: note = synthetic [barcode part1]
  source 1..16: mol_type = other DNA
tcgagtaaccttgttc

SEQ ID NO: 26067 - DNA, 16 bp, synthetic construct
  misc_feature 1..16: note = synthetic [barcode part1]
  source 1..16: mol_type = other DNA
tacacgatctacggac

SEQ ID NO: 26068 - DNA, 16 bp, synthetic construct
  misc_feature 1..16: note = synthetic [barcode part1]
  source 1..16: mol_type = other DNA
tacaggtcacctgaac

SEQ ID NO: 26069 - DNA, 16 bp, synthetic construct
  misc_feature 1..16: note = synthetic [barcode part1]
  source 1..16: mol_type = other DNA
gtccgtggttactctg

SEQ ID NO: 26070 - DNA, 16 bp, synthetic construct
  misc_feature 1..16: note = synthetic [barcode part1]
  source 1..16: mol_type = other DNA
atctaagactctgcct

SEQ ID NO: 26071 - DNA, 16 bp, synthetic construct
  misc_feature 1..16: note = synthetic [barcode part1]
  source 1..16: mol_type = other DNA
cgcgaatctacgagtt

SEQ ID NO: 26072 - DNA, 16 bp, synthetic construct
  misc_feature 1..16: note = synthetic [barcode part1]
  source 1..16: mol_type = other DNA
tgaaggactctctggt

SEQ ID NO: 26073 - DNA, 16 bp, synthetic construct
  misc_feature 1..16: note = synthetic [barcode part1]
  source 1..16: mol_type = other DNA
cgcctatacgagtaac

SEQ ID NO: 26074 - DNA, 16 bp, synthetic construct
  misc_feature 1..16: note = synthetic [barcode part1]
  source 1..16: mol_type = other DNA
ataggtcaatcgcgtc

SEQ ID NO: 26075 - DNA, 16 bp, synthetic construct
  misc_feature 1..16: note = synthetic [barcode part1]
  source 1..16: mol_type = other DNA
tcagaggaacctgcag

SEQ ID NO: 26076 - DNA, 16 bp, synthetic construct
  misc_feature 1..16: note = synthetic [barcode part1]
  source 1..16: mol_type = other DNA
gagtacttcgcgaatc

SEQ ID NO: 26077 - DNA, 16 bp, synthetic construct
  misc_feature 1..16: note = synthetic [barcode part1]
  source 1..16: mol_type = other DNA
tcttacagttatcggc

SEQ ID NO: 26078 - DNA, 16 bp, synthetic construct
  misc_feature 1..16: note = synthetic [barcode part1]
  source 1..16: mol_type = other DNA
aataatcagagtgcgc

SEQ ID NO: 26079 - DNA, 16 bp, synthetic construct
  misc_feature 1..16: note = synthetic [barcode part1]
  source 1..16: mol_type = other DNA
agacgcaagagtgtag

SEQ ID NO: 26080 - DNA, 16 bp, synthetic construct
  misc_feature 1..16: note = synthetic [barcode part1]
  source 1..16: mol_type = other DNA
ccaattgaccggttag

SEQ ID NO: 26081 - DNA, 16 bp, synthetic construct
  misc_feature 1..16: note = synthetic [barcode part1]
  source 1..16: mol_type = other DNA
aggtcacggcacaagt

SEQ ID NO: 26082 - DNA, 16 bp, synthetic construct
  misc_feature 1..16: note = synthetic [barcode part1]
  source 1..16: mol_type = other DNA
taccgttacctagact

SEQ ID NO: 26083 - DNA, 16 bp, synthetic construct
  misc_feature 1..16: note = synthetic [barcode part1]
  source 1..16: mol_type = other DNA
tctggcgattcctgtg

SEQ ID NO: 26084 - DNA, 16 bp, synthetic construct
  misc_feature 1..16: note = synthetic [barcode part1]
  source 1..16: mol_type = other DNA
tgcaatcgccactctg

SEQ ID NO: 26085 - DNA, 16 bp, synthetic construct
  misc_feature 1..16: note = synthetic [barcode part1]
  source 1..16: mol_type = other DNA
aggcctcgtactatag

SEQ ID NO: 26086 - DNA, 16 bp, synthetic construct
  misc_feature 1..16: note = synthetic [barcode part1]
  source 1..16: mol_type = other DNA
tccaggatcggaactt

SEQ ID NO: 26087 - DNA, 16 bp, synthetic construct
  misc_feature 1..16: note = synthetic [barcode part1]
  source 1..16: mol_type = other DNA
gacgtgtactgtgtgt

SEQ ID NO: 26088 - DNA, 16 bp, synthetic construct
  misc_feature 1..16: note = synthetic [barcode part1]
  source 1..16: mol_type = other DNA
cctgaagtctcagagt

SEQ ID NO: 26089 - DNA, 16 bp, synthetic construct
  misc_feature 1..16: note = synthetic [barcode part1]
  source 1..16: mol_type = other DNA
tctaattcgcggccgt

SEQ ID NO: 26090 - DNA, 16 bp, synthetic construct
  misc_feature 1..16: note = synthetic [barcode part1]
  source 1..16: mol_type = other DNA
tcggttccgttggtac

SEQ ID NO: 26091 - DNA, 16 bp, synthetic construct
  misc_feature 1..16: note = synthetic [barcode part1]
  source 1..16: mol_type = other DNA
gtcttgcggtgtatcc

SEQ ID NO: 26092 - DNA, 16 bp, synthetic construct
  misc_feature 1..16: note = synthetic [barcode part1]
  source 1..16: mol_type = other DNA
tggttactccgacctg

SEQ ID NO: 26093 - DNA, 16 bp, synthetic construct
  misc_feature 1..16: note = synthetic [barcode part1]
  source 1..16: mol_type = other DNA
cagtctccgtgatcac

SEQ ID NO: 26094 - DNA, 16 bp, synthetic construct
  misc_feature 1..16: note = synthetic [barcode part1]
  source 1..16: mol_type = other DNA
tctgtaggaacaacag

SEQ ID NO: 26095 - DNA, 16 bp, synthetic construct
  misc_feature 1..16: note = synthetic [barcode part1]
  source 1..16: mol_type = other DNA
tatacctcgagtcgcc

SEQ ID NO: 26096 - DNA, 16 bp, synthetic construct
  misc_feature 1..16: note = synthetic [barcode part1]
  source 1..16: mol_type = other DNA
gtcgtcttgaatatcc

SEQ ID NO: 26097 - DNA, 16 bp, synthetic construct
  misc_feature 1..16: note = synthetic [barcode part1]
  source 1..16: mol_type = other DNA
acggagaccagtagtc

SEQ ID NO: 26098 - DNA, 16 bp, synthetic construct
  misc_feature 1..16: note = synthetic [barcode part1]
  source 1..16: mol_type = other DNA
gtgtgccagactgaag

SEQ ID NO: 26099 - DNA, 16 bp, synthetic construct
  misc_feature 1..16: note = synthetic [barcode part1]
  source 1..16: mol_type = other DNA
aaggcctagacggact

SEQ ID NO: 26100 - DNA, 16 bp, synthetic construct
  misc_feature 1..16: note = synthetic [barcode part1]
  source 1..16: mol_type = other DNA
gagtaccgtcttatct

SEQ ID NO: 26101 - DNA, 16 bp, synthetic construct
  misc_feature 1..16: note = synthetic [barcode part1]
  source 1..16: mol_type = other DNA
gttcgaggttctactt

SEQ ID NO: 26102 - DNA, 16 bp, synthetic construct
  misc_feature 1..16: note = synthetic [barcode part1]
  source 1..16: mol_type = other DNA
ttgttactgttcaggc

SEQ ID NO: 26103 - DNA, 16 bp, synthetic construct
  misc_feature 1..16: note = synthetic [barcode part1]
  source 1..16: mol_type = other DNA
tatcactacaaccacc

SEQ ID NO: 26104 - DNA, 16 bp, synthetic construct
  misc_feature 1..16: note = synthetic [barcode part1]
  source 1..16: mol_type = other DNA
agttctccggtgaagt

SEQ ID NO: 26105 - DNA, 16 bp, synthetic construct
  misc_feature 1..16: note = synthetic [barcode part1]
  source 1..16: mol_type = other DNA
cacagtgtccggaatt

SEQ ID NO: 26106 - DNA, 16 bp, synthetic construct
  misc_feature 1..16: note = synthetic [barcode part1]
  source 1..16: mol_type = other DNA
tgattggaccaactgc

SEQ ID NO: 26107 - DNA, 16 bp, synthetic construct
  misc_feature 1..16: note = synthetic [barcode part1]
  source 1..16: mol_type = other DNA
agaatacaactcggtg

SEQ ID NO: 26108 - DNA, 16 bp, synthetic construct
  misc_feature 1..16: note = synthetic [barcode part1]
  source 1..16: mol_type = other DNA
ccgcaacagaattctg

SEQ ID NO: 26109 - DNA, 16 bp, synthetic construct
  misc_feature 1..16: note = synthetic [barcode part1]
  source 1..16: mol_type = other DNA
cgcacgttaattgacg

SEQ ID NO: 26110 - DNA, 16 bp, synthetic construct
  misc_feature 1..16: note = synthetic [barcode part1]
  source 1..16: mol_type = other DNA
aaccggacgttaatag

SEQ ID NO: 26111 - DNA, 16 bp, synthetic construct
  misc_feature 1..16: note = synthetic [barcode part1]
  source 1..16: mol_type = other DNA
gattcagactgtcgac

SEQ ID NO: 26112 - DNA, 16 bp, synthetic construct
  misc_feature 1..16: note = synthetic [barcode part1]
  source 1..16: mol_type = other DNA
actgtggactctaggt

SEQ ID NO: 26113 - DNA, 16 bp, synthetic construct
  misc_feature 1..16: note = synthetic [barcode part1]
  source 1..16: mol_type = other DNA
aggaggtcgtcttatc

SEQ ID NO: 26114 - DNA, 16 bp, synthetic construct
  misc_feature 1..16: note = synthetic [barcode part1]
  source 1..16: mol_type = other DNA
tatcgagactcctgcc

SEQ ID NO: 26115 - DNA, 16 bp, synthetic construct
  misc_feature 1..16: note = synthetic [barcode part1]
  source 1..16: mol_type = other DNA
cgttcaagtgcctaag

SEQ ID NO: 26116 - DNA, 16 bp, synthetic construct
  misc_feature 1..16: note = synthetic [barcode part1]
  source 1..16: mol_type = other DNA
attggaatacacgacg

SEQ ID NO: 26117 - DNA, 16 bp, synthetic construct
  misc_feature 1..16: note = synthetic [barcode part1]
  source 1..16: mol_type = other DNA
agtcgtattggagaac

SEQ ID NO: 26118 - DNA, 16 bp, synthetic construct
  misc_feature 1..16: note = synthetic [barcode part1]
  source 1..16: mol_type = other DNA
ttatctcgtatccgag

SEQ ID NO: 26119 - DNA, 16 bp, synthetic construct
  misc_feature 1..16: note = synthetic [barcode part1]
  source 1..16: mol_type = other DNA
actacagtaggtagac

SEQ ID NO: 26120 - DNA, 16 bp, synthetic construct
  misc_feature 1..16: note = synthetic [barcode part1]
  source 1..16: mol_type = other DNA
agtattaacaccgcgc

SEQ ID NO: 26121 - DNA, 16 bp, synthetic construct
  misc_feature 1..16: note = synthetic [barcode part1]
  source 1..16: mol_type = other DNA
attcctactcaacgac

SEQ ID NO: 26122 - DNA, 16 bp, synthetic construct
  misc_feature 1..16: note = synthetic [barcode part1]
  source 1..16: mol_type = other DNA
tgaggacaacaatctg

SEQ ID NO: 26123 - DNA, 16 bp, synthetic construct
  misc_feature 1..16: note = synthetic [barcode part1]
  source 1..16: mol_type = other DNA
atagaagaccgtcggc

SEQ ID NO: 26124 - DNA, 16 bp, synthetic construct
  misc_feature 1..16: note = synthetic [barcode part1]
  source 1..16: mol_type = other DNA
cagtctcgcactaacc

SEQ ID NO: 26125 - DNA, 16 bp, synthetic construct
  misc_feature 1..16: note = synthetic [barcode part1]
  source 1..16: mol_type = other DNA
gagtccggcaagatac

SEQ ID NO: 26126 - DNA, 16 bp, synthetic construct
  misc_feature 1..16: note = synthetic [barcode part1]
  source 1..16: mol_type = other DNA
agtatcctccaattcg

SEQ ID NO: 26127 - DNA, 16 bp, synthetic construct
  misc_feature 1..16: note = synthetic [barcode part1]
  source 1..16: mol_type = other DNA
tactcagttggcacag

SEQ ID NO: 26128 - DNA, 16 bp, synthetic construct
  misc_feature 1..16: note = synthetic [barcode part1]
  source 1..16: mol_type = other DNA
gtaatccgcagagacg

SEQ ID NO: 26129 - DNA, 16 bp, synthetic construct
  misc_feature 1..16: note = synthetic [barcode part1]
  source 1..16: mol_type = other DNA
gatcacgtacacggtt

SEQ ID NO: 26130 - DNA, 16 bp, synthetic construct
  misc_feature 1..16: note = synthetic [barcode part1]
  source 1..16: mol_type = other DNA
tggtgtataactcctc

SEQ ID NO: 26131 - DNA, 16 bp, synthetic construct
  misc_feature 1..16: note = synthetic [barcode part1]
  source 1..16: mol_type = other DNA
gtcacctctactctac

SEQ ID NO: 26132 - DNA, 16 bp, synthetic construct
  misc_feature 1..16: note = synthetic [barcode part1]
  source 1..16: mol_type = other DNA
tcgtacagaccaggag

SEQ ID NO: 26133 - DNA, 16 bp, synthetic construct
  misc_feature 1..16: note = synthetic [barcode part1]
  source 1..16: mol_type = other DNA
gagtgcaagaacacag

SEQ ID NO: 26134 - DNA, 16 bp, synthetic construct
  misc_feature 1..16: note = synthetic [barcode part1]
  source 1..16: mol_type = other DNA
atacaccggattgaag

SEQ ID NO: 26135 - DNA, 16 bp, synthetic construct
  misc_feature 1..16: note = synthetic [barcode part1]
  source 1..16: mol_type = other DNA
gaggaacgtgagatac

SEQ ID NO: 26136 - DNA, 16 bp, synthetic construct
  misc_feature 1..16: note = synthetic [barcode part1]
  source 1..16: mol_type = other DNA
agagtctggacttcac

SEQ ID NO: 26137 - DNA, 16 bp, synthetic construct
  misc_feature 1..16: note = synthetic [barcode part1]
  source 1..16: mol_type = other DNA
tcaagtagacgaggtt

SEQ ID NO: 26138 - DNA, 16 bp, synthetic construct
  misc_feature 1..16: note = synthetic [barcode part1]
  source 1..16: mol_type = other DNA
gacttacgtgaactcg

SEQ ID NO: 26139 - DNA, 16 bp, synthetic construct
  misc_feature 1..16: note = synthetic [barcode part1]
  source 1..16: mol_type = other DNA
tggtcctaactcttcc

SEQ ID NO: 26140 - DNA, 16 bp, synthetic construct
  misc_feature 1..16: note = synthetic [barcode part1]
  source 1..16: mol_type = other DNA
cagatacgtcgccttc

SEQ ID NO: 26141 - DNA, 16 bp, synthetic construct
  misc_feature 1..16: note = synthetic [barcode part1]
  source 1..16: mol_type = other DNA
tcaacacacacaccag

SEQ ID NO: 26142 - DNA, 16 bp, synthetic construct
  misc_feature 1..16: note = synthetic [barcode part1]
  source 1..16: mol_type = other DNA
acggatcacacgactt

SEQ ID NO: 26143 - DNA, 16 bp, synthetic construct
  misc_feature 1..16: note = synthetic [barcode part1]
  source 1..16: mol_type = other DNA
taatcctgtatcgacc

SEQ ID NO: 26144 - DNA, 16 bp, synthetic construct
  misc_feature 1..16: note = synthetic [barcode part1]
  source 1..16: mol_type = other DNA
tgaacacacacgatcc

SEQ ID NO: 26145 - DNA, 16 bp, synthetic construct
  misc_feature 1..16: note = synthetic [barcode part1]
  source 1..16: mol_type = other DNA
cggtacaagttgcgtt

SEQ ID NO: 26146 - DNA, 16 bp, synthetic construct
  misc_feature 1..16: note = synthetic [barcode part1]
  source 1..16: mol_type = other DNA
tacgagtccgttccac

SEQ ID NO: 26147 - DNA, 16 bp, synthetic construct
  misc_feature 1..16: note = synthetic [barcode part1]
  source 1..16: mol_type = other DNA
cgatacagttaccttc

SEQ ID NO: 26148 - DNA, 16 bp, synthetic construct
  misc_feature 1..16: note = synthetic [barcode part1]
  source 1..16: mol_type = other DNA
acagtcttgaactgcg

SEQ ID NO: 26149 - DNA, 16 bp, synthetic construct
  misc_feature 1..16: note = synthetic [barcode part1]
  source 1..16: mol_type = other DNA
aggcagaacttgtctc

SEQ ID NO: 26150 - DNA, 16 bp, synthetic construct
  misc_feature 1..16: note = synthetic [barcode part1]
  source 1..16: mol_type = other DNA
tgtgtagagacgtctc

SEQ ID NO: 26151 - DNA, 16 bp, synthetic construct
  misc_feature 1..16: note = synthetic [barcode part1]
  source 1..16: mol_type = other DNA
gttatcgacacaagag

SEQ ID NO: 26152 - DNA, 16 bp, synthetic construct
  misc_feature 1..16: note = synthetic [barcode part1]
  source 1..16: mol_type = other DNA
gacgacagtgagtctg

SEQ ID NO: 26153 - DNA, 16 bp, synthetic construct
  misc_feature 1..16: note = synthetic [barcode part1]
  source 1..16: mol_type = other DNA
gtctcctagttgagag

SEQ ID NO: 26154 - DNA, 16 bp, synthetic construct
  misc_feature 1..16: note = synthetic [barcode part1]
  source 1..16: mol_type = other DNA
ttgaacgcgtcactcc

SEQ ID NO: 26155 - DNA, 16 bp, synthetic construct
  misc_feature 1..16: note = synthetic [barcode part1]
  source 1..16: mol_type = other DNA
gaagtagaggtggtgt

SEQ ID NO: 26156 - DNA, 16 bp, synthetic construct
  misc_feature 1..16: note = synthetic [barcode part1]
  source 1..16: mol_type = other DNA
tacaggtcaagacaac

SEQ ID NO: 26157 - DNA, 16 bp, synthetic construct
  misc_feature 1..16: note = synthetic [barcode part1]
  source 1..16: mol_type = other DNA
cgtattcgaacgcagt

SEQ ID NO: 26158 - DNA, 16 bp, synthetic construct
  misc_feature 1..16: note = synthetic [barcode part1]
  source 1..16: mol_type = other DNA
gtagatccgtactgac

SEQ ID NO: 26159 - DNA, 16 bp, synthetic construct
  misc_feature 1..16: note = synthetic [barcode part1]
  source 1..16: mol_type = other DNA
gacgtgttcttgactt

SEQ ID NO: 26160 - DNA, 16 bp, synthetic construct
  misc_feature 1..16: note = synthetic [barcode part1]
  source 1..16: mol_type = other DNA
gcctaattgcactccg

SEQ ID NO: 26161 - DNA, 16 bp, synthetic construct
  misc_feature 1..16: note = synthetic [barcode part1]
  source 1..16: mol_type = other DNA
tccagtcttctctgac

SEQ ID NO: 26162 - DNA, 16 bp, synthetic construct
  misc_feature 1..16: note = synthetic [barcode part1]
  source 1..16: mol_type = other DNA
acgtcgatcagacact

SEQ ID NO: 26163 - DNA, 16 bp, synthetic construct
  misc_feature 1..16: note = synthetic [barcode part1]
  source 1..16: mol_type = other DNA
ccgcaagtgagaagtc

SEQ ID NO: 26164 - DNA, 16 bp, synthetic construct
  misc_feature 1..16: note = synthetic [barcode part1]
  source 1..16: mol_type = other DNA
aggtattaggcggcgt

SEQ ID NO: 26165 - DNA, 16 bp, synthetic construct
  misc_feature 1..16: note = synthetic [barcode part1]
  source 1..16: mol_type = other DNA
tcactacacctcacct

SEQ ID NO: 26166 - DNA, 16 bp, synthetic construct
  misc_feature 1..16: note = synthetic [barcode part1]
  source 1..16: mol_type = other DNA
actcaggtcacggatt

SEQ ID NO: 26167 - DNA, 16 bp, synthetic construct
  misc_feature 1..16: note = synthetic [barcode part1]
  source 1..16: mol_type = other DNA
cgacaataatctggcc

SEQ ID NO: 26168 - DNA, 16 bp, synthetic construct
  misc_feature 1..16: note = synthetic [barcode part1]
  source 1..16: mol_type = other DNA
taagacacgtcagtag

SEQ ID NO: 26169 - DNA, 16 bp, synthetic construct
  misc_feature 1..16: note = synthetic [barcode part1]
  source 1..16: mol_type = other DNA
ttcttagtagtcgtgc

SEQ ID NO: 26170 - DNA, 16 bp, synthetic construct
  misc_feature 1..16: note = synthetic [barcode part1]
  source 1..16: mol_type = other DNA
aagtctggttcttcac

SEQ ID NO: 26171 - DNA, 16 bp, synthetic construct
  misc_feature 1..16: note = synthetic [barcode part1]
  source 1..16: mol_type = other DNA
gttcacaaccaagaag

SEQ ID NO: 26172 - DNA, 16 bp, synthetic construct
  misc_feature 1..16: note = synthetic [barcode part1]
  source 1..16: mol_type = other DNA
gcgcaacgtactaatc

SEQ ID NO: 26173 - DNA, 16 bp, synthetic construct
  misc_feature 1..16: note = synthetic [barcode part1]
  source 1..16: mol_type = other DNA
gaatcctgccaactag

SEQ ID NO: 26174 - DNA, 16 bp, synthetic construct
  misc_feature 1..16: note = synthetic [barcode part1]
  source 1..16: mol_type = other DNA
caacgtgtgataaggt

SEQ ID NO: 26175 - DNA, 16 bp, synthetic construct
  misc_feature 1..16: note = synthetic [barcode part1]
  source 1..16: mol_type = other DNA
tgtcctctggtctgag

SEQ ID NO: 26176 - DNA, 16 bp, synthetic construct
  misc_feature 1..16: note = synthetic [barcode part1]
  source 1..16: mol_type = other DNA
gtgaatcactactctc

SEQ ID NO: 26177 - DNA, 16 bp, synthetic construct
  misc_feature 1..16: note = synthetic [barcode part1]
  source 1..16: mol_type = other DNA
gaatcggtctctcaag

SEQ ID NO: 26178 - DNA, 16 bp, synthetic construct
  misc_feature 1..16: note = synthetic [barcode part1]
  source 1..16: mol_type = other DNA
atcgaactgagtcacc

SEQ ID NO: 26179 - DNA, 16 bp, synthetic construct
  misc_feature 1..16: note = synthetic [barcode part1]
  source 1..16: mol_type = other DNA
ccaagtggaactcact

SEQ ID NO: 26180 - DNA, 16 bp, synthetic construct
  misc_feature 1..16: note = synthetic [barcode part1]
  source 1..16: mol_type = other DNA
atcgtccgaactcacc

SEQ ID NO: 26181 - DNA, 16 bp, synthetic construct
  misc_feature 1..16: note = synthetic [barcode part1]
  source 1..16: mol_type = other DNA
taatctcgccacacgc

SEQ ID NO: 26182 - DNA, 16 bp, synthetic construct
  misc_feature 1..16: note = synthetic [barcode part1]
  source 1..16: mol_type = other DNA
ttccacgaaggatacc

SEQ ID NO: 26183 - DNA, 16 bp, synthetic construct
  misc_feature 1..16: note = synthetic [barcode part1]
  source 1..16: mol_type = other DNA
tgaggaatcggttcct

SEQ ID NO: 26184 - DNA, 16 bp, synthetic construct
  misc_feature 1..16: note = synthetic [barcode part1]
  source 1..16: mol_type = other DNA
cgtactaccgaaggag

SEQ ID NO: 26185 - DNA, 16 bp, synthetic construct
  misc_feature 1..16: note = synthetic [barcode part1]
  source 1..16: mol_type = other DNA
gttgatcggagttctg

SEQ ID NO: 26186 - DNA, 16 bp, synthetic construct
  misc_feature 1..16: note = synthetic [barcode part1]
  source 1..16: mol_type = other DNA
tgaaggaggtccttct

SEQ ID NO: 26187 - DNA, 16 bp, synthetic construct
  misc_feature 1..16: note = synthetic [barcode part1]
  source 1..16: mol_type = other DNA
atcagacggatacggc

SEQ ID NO: 26188 - DNA, 16 bp, synthetic construct
  misc_feature 1..16: note = synthetic [barcode part1]
  source 1..16: mol_type = other DNA
gataagtactccgaag

SEQ ID NO: 26189 - DNA, 16 bp, synthetic construct
  misc_feature 1..16: note = synthetic [barcode part1]
  source 1..16: mol_type = other DNA
tggtgcaacgtctagt

SEQ ID NO: 26190 - DNA, 16 bp, synthetic construct
  misc_feature 1..16: note = synthetic [barcode part1]
  source 1..16: mol_type = other DNA
gaatctctcggaatcg

SEQ ID NO: 26191 - DNA, 16 bp, synthetic construct
  misc_feature 1..16: note = synthetic [barcode part1]
  source 1..16: mol_type = other DNA
aacctcctgcaccaac

SEQ ID NO: 26192 - DNA, 16 bp, synthetic construct
  misc_feature 1..16: note = synthetic [barcode part1]
  source 1..16: mol_type = other DNA
tacaccaccggaagag

SEQ ID NO: 26193 - DNA, 16 bp, synthetic construct
  misc_feature 1..16: note = synthetic [barcode part1]
  source 1..16: mol_type = other DNA
aatcgaccggttgatc

SEQ ID NO: 26194 - DNA, 16 bp, synthetic construct
  misc_feature 1..16: note = synthetic [barcode part1]
  source 1..16: mol_type = other DNA
gcctggttgcaagaag

SEQ ID NO: 26195 - DNA, 16 bp, synthetic construct
  misc_feature 1..16: note = synthetic [barcode part1]
  source 1..16: mol_type = other DNA
tctcacaagtcgccgt

SEQ ID NO: 26196 - DNA, 16 bp, synthetic construct
  misc_feature 1..16: note = synthetic [barcode part1]
  source 1..16: mol_type = other DNA
ttgcgaactatcactc

SEQ ID NO: 26197 - DNA, 16 bp, synthetic construct
  misc_feature 1..16: note = synthetic [barcode part1]
  source 1..16: mol_type = other DNA
cctaaggccttgaagt

SEQ ID NO: 26198 - DNA, 16 bp, synthetic construct
  misc_feature 1..16: note = synthetic [barcode part1]
  source 1..16: mol_type = other DNA
cagtcctaactaggac

SEQ ID NO: 26199 - DNA, 16 bp, synthetic construct
  misc_feature 1..16: note = synthetic [barcode part1]
  source 1..16: mol_type = other DNA
cctgagaattgcgact

SEQ ID NO: 26200 - DNA, 16 bp, synthetic construct
  misc_feature 1..16: note = synthetic [barcode part1]
  source 1..16: mol_type = other DNA
ccgataagagtgtaac

SEQ ID NO: 26201 - DNA, 16 bp, synthetic construct
  misc_feature 1..16: note = synthetic [barcode part1]
  source 1..16: mol_type = other DNA
cacaacgacagtacct

SEQ ID NO: 26202 - DNA, 16 bp, synthetic construct
  misc_feature 1..16: note = synthetic [barcode part1]
  source 1..16: mol_type = other DNA
gtgtgcacacagtgtt

SEQ ID NO: 26203 - DNA, 16 bp, synthetic construct
  misc_feature 1..16: note = synthetic [barcode part1]
  source 1..16: mol_type = other DNA
tacagatctgtctcgt

SEQ ID NO: 26204 - DNA, 16 bp, synthetic construct
  misc_feature 1..16: note = synthetic [barcode part1]
  source 1..16: mol_type = other DNA
ttcttcctgtaacgcc

SEQ ID NO: 26205 - DNA, 16 bp, synthetic construct
  misc_feature 1..16: note = synthetic [barcode part1]
  source 1..16: mol_type = other DNA
tgccgccttatataac

SEQ ID NO: 26206 - DNA, 16 bp, synthetic construct
  misc_feature 1..16: note = synthetic [barcode part1]
  source 1..16: mol_type = other DNA
aaggaagttgagaccg

SEQ ID NO: 26207 - DNA, 16 bp, synthetic construct
  misc_feature 1..16: note = synthetic [barcode part1]
  source 1..16: mol_type = other DNA
aaggacgtattgaacc

SEQ ID NO: 26208 - DNA, 16 bp, synthetic construct
  misc_feature 1..16: note = synthetic [barcode part1]
  source 1..16: mol_type = other DNA
tcaactgcagttgacg

SEQ ID NO: 26209 - DNA, 16 bp, synthetic construct
  misc_feature 1..16: note = synthetic [barcode part1]
  source 1..16: mol_type = other DNA
tgtcaggaacagtcct

SEQ ID NO: 26210 - DNA, 16 bp, synthetic construct
  misc_feature 1..16: note = synthetic [barcode part1]
  source 1..16: mol_type = other DNA
tgacgtgaatccgtgt

SEQ ID NO: 26211 - DNA, 16 bp, synthetic construct
  misc_feature 1..16: note = synthetic [barcode part1]
  source 1..16: mol_type = other DNA
gtgaactgttatctcc

SEQ ID NO: 26212 - DNA, 16 bp, synthetic construct
  misc_feature 1..16: note = synthetic [barcode part1]
  source 1..16: mol_type = other DNA
aacaccagatctcgac

SEQ ID NO: 26213 - DNA, 16 bp, synthetic construct
  misc_feature 1..16: note = synthetic [barcode part1]
  source 1..16: mol_type = other DNA
agaattcacaggtggt

SEQ ID NO: 26214 - DNA, 16 bp, synthetic construct
  misc_feature 1..16: note = synthetic [barcode part1]
  source 1..16: mol_type = other DNA
gatacggttgccagag

SEQ ID NO: 26215 - DNA, 16 bp, synthetic construct
  misc_feature 1..16: note = synthetic [barcode part1]
  source 1..16: mol_type = other DNA
ttcctctgttacgacc

SEQ ID NO: 26216 - DNA, 16 bp, synthetic construct
  misc_feature 1..16: note = synthetic [barcode part1]
  source 1..16: mol_type = other DNA
tctcgtctgagtattg

SEQ ID NO: 26217 - DNA, 16 bp, synthetic construct
  misc_feature 1..16: note = synthetic [barcode part1]
  source 1..16: mol_type = other DNA
tactaccttgcacagt

SEQ ID NO: 26218 - DNA, 16 bp, synthetic construct
  misc_feature 1..16: note = synthetic [barcode part1]
  source 1..16: mol_type = other DNA
aactaccttcgtgttg

SEQ ID NO: 26219 - DNA, 16 bp, synthetic construct
  misc_feature 1..16: note = synthetic [barcode part1]
  source 1..16: mol_type = other DNA
ccgcgtatcgaagaag

SEQ ID NO: 26220 - DNA, 16 bp, synthetic construct
  misc_feature 1..16: note = synthetic [barcode part1]
  source 1..16: mol_type = other DNA
taagtccaacgaggcg

SEQ ID NO: 26221 - DNA, 16 bp, synthetic construct
  misc_feature 1..16: note = synthetic [barcode part1]
  source 1..16: mol_type = other DNA
gaagtccggcgttatt

SEQ ID NO: 26222 - DNA, 16 bp, synthetic construct
  misc_feature 1..16: note = synthetic [barcode part1]
  source 1..16: mol_type = other DNA
tggcgaacttaggcag

SEQ ID NO: 26223 - DNA, 16 bp, synthetic construct
  misc_feature 1..16: note = synthetic [barcode part1]
  source 1..16: mol_type = other DNA
gaggtctctacttgtt

SEQ ID NO: 26224 - DNA, 16 bp, synthetic construct
  misc_feature 1..16: note = synthetic [barcode part1]
  source 1..16: mol_type = other DNA
ttgccgtgagttcgtc

SEQ ID NO: 26225 - DNA, 16 bp, synthetic construct
  misc_feature 1..16: note = synthetic [barcode part1]
  source 1..16: mol_type = other DNA
aactgtggactaagac

SEQ ID NO: 26226 - DNA, 16 bp, synthetic construct
  misc_feature 1..16: note = synthetic [barcode part1]
  source 1..16: mol_type = other DNA
tcacttgtcgtccgtt

SEQ ID NO: 26227 - DNA, 16 bp, synthetic construct
  misc_feature 1..16: note = synthetic [barcode part1]
  source 1..16: mol_type = other DNA
acctagttcggtaacg

SEQ ID NO: 26228 - DNA, 16 bp, synthetic construct
  misc_feature 1..16: note = synthetic [barcode part1]
  source 1..16: mol_type = other DNA
acctcggttagaactg

SEQ ID NO: 26229 - DNA, 16 bp, synthetic construct
  misc_feature 1..16: note = synthetic [barcode part1]
  source 1..16: mol_type = other DNA
taactccacgttggtt

SEQ ID NO: 26230 - DNA, 16 bp, synthetic construct
  misc_feature 1..16: note = synthetic [barcode part1]
  source 1..16: mol_type = other DNA
attccgatcggaatcg

SEQ ID NO: 26231 - DNA, 16 bp, synthetic construct
  misc_feature 1..16: note = synthetic [barcode part1]
  source 1..16: mol_type = other DNA
ttggtgtgtcagtgtg

SEQ ID NO: 26232 - DNA, 16 bp, synthetic construct
  misc_feature 1..16: note = synthetic [barcode part1]
  source 1..16: mol_type = other DNA
cgactgacgtagtgtt

SEQ ID NO: 26233 - DNA, 16 bp, synthetic construct
  misc_feature 1..16: note = synthetic [barcode part1]
  source 1..16: mol_type = other DNA
tcgaataccaccttgt

SEQ ID NO: 26234 - DNA, 16 bp, synthetic construct
  misc_feature 1..16: note = synthetic [barcode part1]
  source 1..16: mol_type = other DNA
gttaggccaggaacgt

SEQ ID NO: 26235 - DNA, 16 bp, synthetic construct
  misc_feature 1..16: note = synthetic [barcode part1]
  source 1..16: mol_type = other DNA
tggtcgcggattagag

SEQ ID NO: 26236 - DNA, 16 bp, synthetic construct
  misc_feature 1..16: note = synthetic [barcode part1]
  source 1..16: mol_type = other DNA
gattagtaccgcggtt

SEQ ID NO: 26237 - DNA, 16 bp, synthetic construct
  misc_feature 1..16: note = synthetic [barcode part1]
  source 1..16: mol_type = other DNA
gataggcaacagacag

SEQ ID NO: 26238 - DNA, 16 bp, synthetic construct
  misc_feature 1..16: note = synthetic [barcode part1]
  source 1..16: mol_type = other DNA
cctacgtattaccaac

SEQ ID NO: 26239 - DNA, 16 bp, synthetic construct
  misc_feature 1..16: note = synthetic [barcode part1]
  source 1..16: mol_type = other DNA
taagaacagtgatccg

SEQ ID NO: 26240 - DNA, 16 bp, synthetic construct
  misc_feature 1..16: note = synthetic [barcode part1]
  source 1..16: mol_type = other DNA
cctgcacagttcggtt

SEQ ID NO: 26241 - DNA, 16 bp, synthetic construct
  misc_feature 1..16: note = synthetic [barcode part1]
  source 1..16: mol_type = other DNA
aggacttacaggtaac

SEQ ID NO: 26242 - DNA, 16 bp, synthetic construct
  misc_feature 1..16: note = synthetic [barcode part1]
  source 1..16: mol_type = other DNA
aacctctgaccgcgtt

SEQ ID NO: 26243 - DNA, 16 bp, synthetic construct
  misc_feature 1..16: note = synthetic [barcode part1]
  source 1..16: mol_type = other DNA
agtccttcgacaaggt

SEQ ID NO: 26244 - DNA, 16 bp, synthetic construct
  misc_feature 1..16: note = synthetic [barcode part1]
  source 1..16: mol_type = other DNA
tgcggacaacaggatc

SEQ ID NO: 26245 - DNA, 16 bp, synthetic construct
  misc_feature 1..16: note = synthetic [barcode part1]
  source 1..16: mol_type = other DNA
gaaggcgtctaatagt

SEQ ID NO: 26246 - DNA, 16 bp, synthetic construct
  misc_feature 1..16: note = synthetic [barcode part1]
  source 1..16: mol_type = other DNA
gtgacgtcagtgttgt

SEQ ID NO: 26247 - DNA, 16 bp, synthetic construct
  misc_feature 1..16: note = synthetic [barcode part1]
  source 1..16: mol_type = other DNA
aagacggaagtagtgc

SEQ ID NO: 26248 - DNA, 16 bp, synthetic construct
  misc_feature 1..16: note = synthetic [barcode part1]
  source 1..16: mol_type = other DNA
ttcggtcagttccttc

SEQ ID NO: 26249 - DNA, 16 bp, synthetic construct
  misc_feature 1..16: note = synthetic [barcode part1]
  source 1..16: mol_type = other DNA
tcactaccgagtatct

SEQ ID NO: 26250 - DNA, 16 bp, synthetic construct
  misc_feature 1..16: note = synthetic [barcode part1]
  source 1..16: mol_type = other DNA
cctcacgcggtaatct

SEQ ID NO: 26251 - DNA, 16 bp, synthetic construct
  misc_feature 1..16: note = synthetic [barcode part1]
  source 1..16: mol_type = other DNA
cgccactctgttatct

SEQ ID NO: 26252 - DNA, 16 bp, synthetic construct
  misc_feature 1..16: note = synthetic [barcode part1]
  source 1..16: mol_type = other DNA
taccggacctacacct

SEQ ID NO: 26253 - DNA, 16 bp, synthetic construct
  misc_feature 1..16: note = synthetic [barcode part1]
  source 1..16: mol_type = other DNA
cgagtattctcgttac

SEQ ID NO: 26254 - DNA, 16 bp, synthetic construct
  misc_feature 1..16: note = synthetic [barcode part1]
  source 1..16: mol_type = other DNA
cggcgatatcgaattc

SEQ ID NO: 26255 - DNA, 16 bp, synthetic construct
  misc_feature 1..16: note = synthetic [barcode part1]
  source 1..16: mol_type = other DNA
cagtacagagaactac

SEQ ID NO: 26256 - DNA, 16 bp, synthetic construct
  misc_feature 1..16: note = synthetic [barcode part1]
  source 1..16: mol_type = other DNA
gagttggtggtgtgtg

SEQ ID NO: 26257 - DNA, 16 bp, synthetic construct
  misc_feature 1..16: note = synthetic [barcode part1]
  source 1..16: mol_type = other DNA
tagtctctgattgcgt

SEQ ID NO: 26258 - DNA, 16 bp, synthetic construct
  misc_feature 1..16: note = synthetic [barcode part1]
  source 1..16: mol_type = other DNA
gacctgccttatcacg

SEQ ID NO: 26259 - DNA, 16 bp, synthetic construct
  misc_feature 1..16: note = synthetic [barcode part1]
  source 1..16: mol_type = other DNA
taattaggtcgaccgc

SEQ ID NO: 26260 - DNA, 16 bp, synthetic construct
  misc_feature 1..16: note = synthetic [barcode part1]
  source 1..16: mol_type = other DNA
ttaacggacaagaacc

SEQ ID NO: 26261 - DNA, 16 bp, synthetic construct
  misc_feature 1..16: note = synthetic [barcode part1]
  source 1..16: mol_type = other DNA
gacgcaatctagtaag

SEQ ID NO: 26262 - DNA, 16 bp, synthetic construct
  misc_feature 1..16: note = synthetic [barcode part1]
  source 1..16: mol_type = other DNA
cgtgtaggaacactct

SEQ ID NO: 26263 - DNA, 16 bp, synthetic construct
  misc_feature 1..16: note = synthetic [barcode part1]
  source 1..16: mol_type = other DNA
tctgaagaggactctc

SEQ ID NO: 26264 - DNA, 16 bp, synthetic construct
  misc_feature 1..16: note = synthetic [barcode part1]
  source 1..16: mol_type = other DNA
caggttgtcttcgcgt

SEQ ID NO: 26265 - DNA, 16 bp, synthetic construct
  misc_feature 1..16: note = synthetic [barcode part1]
  source 1..16: mol_type = other DNA
cgtaccggaaggattg

SEQ ID NO: 26266 - DNA, 16 bp, synthetic construct
  misc_feature 1..16: note = synthetic [barcode part1]
  source 1..16: mol_type = other DNA
actgtgactcgttcgc

SEQ ID NO: 26267 - DNA, 16 bp, synthetic construct
  misc_feature 1..16: note = synthetic [barcode part1]
  source 1..16: mol_type = other DNA
tctgtagtctattgcg

SEQ ID NO: 26268 - DNA, 16 bp, synthetic construct
  misc_feature 1..16: note = synthetic [barcode part1]
  source 1..16: mol_type = other DNA
gcaaggagaccgttac

SEQ ID NO: 26269 - DNA, 16 bp, synthetic construct
  misc_feature 1..16: note = synthetic [barcode part1]
  source 1..16: mol_type = other DNA
ttctggcgcgtaatcc

SEQ ID NO: 26270 - DNA, 16 bp, synthetic construct
  misc_feature 1..16: note = synthetic [barcode part1]
  source 1..16: mol_type = other DNA
aactgatcacgcgtgt

SEQ ID NO: 26271 - DNA, 16 bp, synthetic construct
  misc_feature 1..16: note = synthetic [barcode part1]
  source 1..16: mol_type = other DNA
tgcaggaaccgaactg

SEQ ID NO: 26272 - DNA, 16 bp, synthetic construct
  misc_feature 1..16: note = synthetic [barcode part1]
  source 1..16: mol_type = other DNA
aggcacagttgtcgag

SEQ ID NO: 26273 - DNA, 16 bp, synthetic construct
  misc_feature 1..16: note = synthetic [barcode part1]
  source 1..16: mol_type = other DNA
cctcgactagtgaagt

SEQ ID NO: 26274 - DNA, 16 bp, synthetic construct
  misc_feature 1..16: note = synthetic [barcode part1]
  source 1..16: mol_type = other DNA
tgtacgttcaggactg

SEQ ID NO: 26275 - DNA, 16 bp, synthetic construct
  misc_feature 1..16: note = synthetic [barcode part1]
  source 1..16: mol_type = other DNA
aacgagaggtccgtgt

SEQ ID NO: 26276 - DNA, 16 bp, synthetic construct
  misc_feature 1..16: note = synthetic [barcode part1]
  source 1..16: mol_type = other DNA
ccggtaaggtgtaggt

SEQ ID NO: 26277 - DNA, 16 bp, synthetic construct
  misc_feature 1..16: note = synthetic [barcode part1]
  source 1..16: mol_type = other DNA
cacaggcagtagaacc

SEQ ID NO: 26278 - DNA, 16 bp, synthetic construct
  misc_feature 1..16: note = synthetic [barcode part1]
  source 1..16: mol_type = other DNA
gtatcacggtgaatag

SEQ ID NO: 26279 - DNA, 16 bp, synthetic construct
  misc_feature 1..16: note = synthetic [barcode part1]
  source 1..16: mol_type = other DNA
cgactaagtatcacgc

SEQ ID NO: 26280 - DNA, 16 bp, synthetic construct
  misc_feature 1..16: note = synthetic [barcode part1]
  source 1..16: mol_type = other DNA
atcttcacacctctgc

SEQ ID NO: 26281 - DNA, 16 bp, synthetic construct
  misc_feature 1..16: note = synthetic [barcode part1]
  source 1..16: mol_type = other DNA
gacaccaacacgtgtt

SEQ ID NO: 26282 - DNA, 16 bp, synthetic construct
  misc_feature 1..16: note = synthetic [barcode part1]
  source 1..16: mol_type = other DNA
gtatcgtactcgcctg

SEQ ID NO: 26283 - DNA, 16 bp, synthetic construct
  misc_feature 1..16: note = synthetic [barcode part1]
  source 1..16: mol_type = other DNA
gaaggcaatagagacc

SEQ ID NO: 26284 - DNA, 16 bp, synthetic construct
  misc_feature 1..16: note = synthetic [barcode part1]
  source 1..16: mol_type = other DNA
tctagttaccgcacgc

SEQ ID NO: 26285 - DNA, 16 bp, synthetic construct
  misc_feature 1..16: note = synthetic [barcode part1]
  source 1..16: mol_type = other DNA
agaccgtacagttcgt

SEQ ID NO: 26286 - DNA, 16 bp, synthetic construct
  misc_feature 1..16: note = synthetic [barcode part1]
  source 1..16: mol_type = other DNA
taccacctgaggaatc

SEQ ID NO: 26287 - DNA, 16 bp, synthetic construct
  misc_feature 1..16: note = synthetic [barcode part1]
  source 1..16: mol_type = other DNA
gtcttatcggaggatc

SEQ ID NO: 26288 - DNA, 16 bp, synthetic construct
  misc_feature 1..16: note = synthetic [barcode part1]
  source 1..16: mol_type = other DNA
ccggagtcttatctgc

SEQ ID NO: 26289 - DNA, 16 bp, synthetic construct
  misc_feature 1..16: note = synthetic [barcode part1]
  source 1..16: mol_type = other DNA
tcacagtactggtcag

SEQ ID NO: 26290 - DNA, 16 bp, synthetic construct
  misc_feature 1..16: note = synthetic [barcode part1]
  source 1..16: mol_type = other DNA
gactgacgtgtgtact

SEQ ID NO: 26291 - DNA, 16 bp, synthetic construct
  misc_feature 1..16: note = synthetic [barcode part1]
  source 1..16: mol_type = other DNA
atatcctgttaccgac

SEQ ID NO: 26292 - DNA, 16 bp, synthetic construct
  misc_feature 1..16: note = synthetic [barcode part1]
  source 1..16: mol_type = other DNA
cctaatcaccgatact

SEQ ID NO: 26293 - DNA, 16 bp, synthetic construct
  misc_feature 1..16: note = synthetic [barcode part1]
  source 1..16: mol_type = other DNA
aaccgtaacgtcgatc

SEQ ID NO: 26294 - DNA, 16 bp, synthetic construct
  misc_feature 1..16: note = synthetic [barcode part1]
  source 1..16: mol_type = other DNA
aacaagtaacaccgtg

SEQ ID NO: 26295 - DNA, 16 bp, synthetic construct
  misc_feature 1..16: note = synthetic [barcode part1]
  source 1..16: mol_type = other DNA
cctcagttcaggtgtc

SEQ ID NO: 26296 - DNA, 16 bp, synthetic construct
  misc_feature 1..16: note = synthetic [barcode part1]
  source 1..16: mol_type = other DNA
tccactcaagtgagtg

SEQ ID NO: 26297 - DNA, 16 bp, synthetic construct
  misc_feature 1..16: note = synthetic [barcode part1]
  source 1..16: mol_type = other DNA
acactgaacacgactc

SEQ ID NO: 26298 - DNA, 16 bp, synthetic construct
  misc_feature 1..16: note = synthetic [barcode part1]
  source 1..16: mol_type = other DNA
ccggagtgagtgaatc

SEQ ID NO: 26299 - DNA, 16 bp, synthetic construct
  misc_feature 1..16: note = synthetic [barcode part1]
  source 1..16: mol_type = other DNA
gagatcgacacggttg

SEQ ID NO: 26300 - DNA, 16 bp, synthetic construct
  misc_feature 1..16: note = synthetic [barcode part1]
  source 1..16: mol_type = other DNA
ttcttgtcgaattgcg

SEQ ID NO: 26301 - DNA, 16 bp, synthetic construct
  misc_feature 1..16: note = synthetic [barcode part1]
  source 1..16: mol_type = other DNA
atagagtagtgcctag

SEQ ID NO: 26302 - DNA, 16 bp, synthetic construct
  misc_feature 1..16: note = synthetic [barcode part1]
  source 1..16: mol_type = other DNA
cgttccacactacttc

SEQ ID NO: 26303 - DNA, 16 bp, synthetic construct
  misc_feature 1..16: note = synthetic [barcode part1]
  source 1..16: mol_type = other DNA
aatataatccgcgccg

SEQ ID NO: 26304 - DNA, 16 bp, synthetic construct
  misc_feature 1..16: note = synthetic [barcode part1]
  source 1..16: mol_type = other DNA
tcgtcctgcgtctaag

SEQ ID NO: 26305 - DNA, 16 bp, synthetic construct
  misc_feature 1..16: note = synthetic [barcode part1]
  source 1..16: mol_type = other DNA
cgattcacgaactgtg

SEQ ID NO: 26306 - DNA, 16 bp, synthetic construct
  misc_feature 1..16: note = synthetic [barcode part1]
  source 1..16: mol_type = other DNA
agatccagttcagacc

SEQ ID NO: 26307 - DNA, 16 bp, synthetic construct
  misc_feature 1..16: note = synthetic [barcode part1]
  source 1..16: mol_type = other DNA
tgtctatccacgacgc

SEQ ID NO: 26308 - DNA, 16 bp, synthetic construct
  misc_feature 1..16: note = synthetic [barcode part1]
  source 1..16: mol_type = other DNA
caacagtgaggcgtac

SEQ ID NO: 26309 - DNA, 16 bp, synthetic construct
  misc_feature 1..16: note = synthetic [barcode part1]
  source 1..16: mol_type = other DNA
acacagtgtgtcagtc

SEQ ID NO: 26310 - DNA, 16 bp, synthetic construct
  misc_feature 1..16: note = synthetic [barcode part1]
  source 1..16: mol_type = other DNA
tccttggcagttgtgc

SEQ ID NO: 26311 - DNA, 16 bp, synthetic construct
  misc_feature 1..16: note = synthetic [barcode part1]
  source 1..16: mol_type = other DNA
attgacctgtacgcag

SEQ ID NO: 26312 - DNA, 16 bp, synthetic construct
  misc_feature 1..16: note = synthetic [barcode part1]
  source 1..16: mol_type = other DNA
acgttgtgcggacaag

SEQ ID NO: 26313 - DNA, 16 bp, synthetic construct
  misc_feature 1..16: note = synthetic [barcode part1]
  source 1..16: mol_type = other DNA
gccaacagacgacagt

SEQ ID NO: 26314 - DNA, 16 bp, synthetic construct
  misc_feature 1..16: note = synthetic [barcode part1]
  source 1..16: mol_type = other DNA
gcaacgagagtactcg

SEQ ID NO: 26315 - DNA, 16 bp, synthetic construct
  misc_feature 1..16: note = synthetic [barcode part1]
  source 1..16: mol_type = other DNA
caaccaactagtcgac

SEQ ID NO: 26316 - DNA, 16 bp, synthetic construct
  misc_feature 1..16: note = synthetic [barcode part1]
  source 1..16: mol_type = other DNA
agattcgcgagagacc

SEQ ID NO: 26317 - DNA, 16 bp, synthetic construct
  misc_feature 1..16: note = synthetic [barcode part1]
  source 1..16: mol_type = other DNA
caggcaattgttcacg

SEQ ID NO: 26318 - DNA, 16 bp, synthetic construct
  misc_feature 1..16: note = synthetic [barcode part1]
  source 1..16: mol_type = other DNA
gttgtgtcagtagaag

SEQ ID NO: 26319 - DNA, 16 bp, synthetic construct
  misc_feature 1..16: note = synthetic [barcode part1]
  source 1..16: mol_type = other DNA
cagattgagaggtgcc

SEQ ID NO: 26320 - DNA, 16 bp, synthetic construct
  misc_feature 1..16: note = synthetic [barcode part1]
  source 1..16: mol_type = other DNA
cgataatctccgtact

SEQ ID NO: 26321 - DNA, 16 bp, synthetic construct
  misc_feature 1..16: note = synthetic [barcode part1]
  source 1..16: mol_type = other DNA
cagtgtaagttcgcac

SEQ ID NO: 26322 - DNA, 16 bp, synthetic construct
  misc_feature 1..16: note = synthetic [barcode part1]
  source 1..16: mol_type = other DNA
tggtgagtaggtaccg

SEQ ID NO: 26323 - DNA, 16 bp, synthetic construct
  misc_feature 1..16: note = synthetic [barcode part1]
  source 1..16: mol_type = other DNA
cctgtgtaaccgttgc

SEQ ID NO: 26324 - DNA, 16 bp, synthetic construct
  misc_feature 1..16: note = synthetic [barcode part1]
  source 1..16: mol_type = other DNA
cgatacgtacggactt

SEQ ID NO: 26325 - DNA, 16 bp, synthetic construct
  misc_feature 1..16: note = synthetic [barcode part1]
  source 1..16: mol_type = other DNA
aagtgatccgatacag

SEQ ID NO: 26326 - DNA, 16 bp, synthetic construct
  misc_feature 1..16: note = synthetic [barcode part1]
  source 1..16: mol_type = other DNA
ttctcctctctggaac

SEQ ID NO: 26327 - DNA, 16 bp, synthetic construct
  misc_feature 1..16: note = synthetic [barcode part1]
  source 1..16: mol_type = other DNA
gccacagttacagtac

SEQ ID NO: 26328 - DNA, 16 bp, synthetic construct
  misc_feature 1..16: note = synthetic [barcode part1]
  source 1..16: mol_type = other DNA
ttgtgcagtcagtgtg

SEQ ID NO: 26329 - DNA, 16 bp, synthetic construct
  misc_feature 1..16: note = synthetic [barcode part1]
  source 1..16: mol_type = other DNA
taccgttggacgcctt

SEQ ID NO: 26330 - DNA, 16 bp, synthetic construct
  misc_feature 1..16: note = synthetic [barcode part1]
  source 1..16: mol_type = other DNA
cagtgtggaggcagtt

SEQ ID NO: 26331 - DNA, 16 bp, synthetic construct
  misc_feature 1..16: note = synthetic [barcode part1]
  source 1..16: mol_type = other DNA
cctatagtctggacag

SEQ ID NO: 26332 - DNA, 16 bp, synthetic construct
  misc_feature 1..16: note = synthetic [barcode part1]
  source 1..16: mol_type = other DNA
tccagtctacgtaatc

SEQ ID NO: 26333 - DNA, 16 bp, synthetic construct
  misc_feature 1..16: note = synthetic [barcode part1]
  source 1..16: mol_type = other DNA
tacgacgaccttaggt

SEQ ID NO: 26334 - DNA, 16 bp, synthetic construct
  misc_feature 1..16: note = synthetic [barcode part1]
  source 1..16: mol_type = other DNA
tacctacgacgaacgt

SEQ ID NO: 26335 - DNA, 16 bp, synthetic construct
  misc_feature 1..16: note = synthetic [barcode part1]
  source 1..16: mol_type = other DNA
gtccgcagagaatcag

SEQ ID NO: 26336 - DNA, 16 bp, synthetic construct
  misc_feature 1..16: note = synthetic [barcode part1]
  source 1..16: mol_type = other DNA
cggagattagactgcg

SEQ ID NO: 26337 - DNA, 16 bp, synthetic construct
  misc_feature 1..16: note = synthetic [barcode part1]
  source 1..16: mol_type = other DNA
acgtcgacgtagactt

SEQ ID NO: 26338 - DNA, 16 bp, synthetic construct
  misc_feature 1..16: note = synthetic [barcode part1]
  source 1..16: mol_type = other DNA
ccaactcgatatatcc

SEQ ID NO: 26339 - DNA, 16 bp, synthetic construct
  misc_feature 1..16: note = synthetic [barcode part1]
  source 1..16: mol_type = other DNA
acttggatcgcagatc

SEQ ID NO: 26340 - DNA, 16 bp, synthetic construct
  misc_feature 1..16: note = synthetic [barcode part1]
  source 1..16: mol_type = other DNA
tgttgttgcaaggtgc

SEQ ID NO: 26341 - DNA, 16 bp, synthetic construct
  misc_feature 1..16: note = synthetic [barcode part1]
  source 1..16: mol_type = other DNA
aagttccgttacgacg

SEQ ID NO: 26342 - DNA, 16 bp, synthetic construct
  misc_feature 1..16: note = synthetic [barcode part1]
  source 1..16: mol_type = other DNA
tcaagtgattcgcgac

SEQ ID NO: 26343 - DNA, 16 bp, synthetic construct
  misc_feature 1..16: note = synthetic [barcode part1]
  source 1..16: mol_type = other DNA
gtgactacaatcgtgc

SEQ ID NO: 26344 - DNA, 16 bp, synthetic construct
  misc_feature 1..16: note = synthetic [barcode part1]
  source 1..16: mol_type = other DNA
gtgttggtgacggagt

SEQ ID NO: 26345 - DNA, 16 bp, synthetic construct
  misc_feature 1..16: note = synthetic [barcode part1]
  source 1..16: mol_type = other DNA
atctcgtcggaaggtt

SEQ ID NO: 26346 - DNA, 16 bp, synthetic construct
  misc_feature 1..16: note = synthetic [barcode part1]
  source 1..16: mol_type = other DNA
agtgtcaaccaaccac

SEQ ID NO: 26347 - DNA, 16 bp, synthetic construct
  misc_feature 1..16: note = synthetic [barcode part1]
  source 1..16: mol_type = other DNA
gtagtaactaccgtcg

SEQ ID NO: 26348 - DNA, 16 bp, synthetic construct
  misc_feature 1..16: note = synthetic [barcode part1]
  source 1..16: mol_type = other DNA
tgacagtggcctaatc

SEQ ID NO: 26349 - DNA, 16 bp, synthetic construct
  misc_feature 1..16: note = synthetic [barcode part1]
  source 1..16: mol_type = other DNA
gtatcttccggattac

SEQ ID NO: 26350 - DNA, 16 bp, synthetic construct
  misc_feature 1..16: note = synthetic [barcode part1]
  source 1..16: mol_type = other DNA
cctctcttaacgtcgt

SEQ ID NO: 26351 - DNA, 16 bp, synthetic construct
  misc_feature 1..16: note = synthetic [barcode part1]
  source 1..16: mol_type = other DNA
ttagacaagacgacgt

SEQ ID NO: 26352 - DNA, 16 bp, synthetic construct
  misc_feature 1..16: note = synthetic [barcode part1]
  source 1..16: mol_type = other DNA
gccaagttcgtatctt

SEQ ID NO: 26353 - DNA, 16 bp, synthetic construct
  misc_feature 1..16: note = synthetic [barcode part1]
  source 1..16: mol_type = other DNA
tctcgtggaagtacac

SEQ ID NO: 26354 - DNA, 16 bp, synthetic construct
  misc_feature 1..16: note = synthetic [barcode part1]
  source 1..16: mol_type = other DNA
tctggcgtatctccag

SEQ ID NO: 26355 - DNA, 16 bp, synthetic construct
  misc_feature 1..16: note = synthetic [barcode part1]
  source 1..16: mol_type = other DNA
cggacaataccgtgag

SEQ ID NO: 26356 - DNA, 16 bp, synthetic construct
  misc_feature 1..16: note = synthetic [barcode part1]
  source 1..16: mol_type = other DNA
taagtgcgccacttcc

SEQ ID NO: 26357 - DNA, 16 bp, synthetic construct
  misc_feature 1..16: note = synthetic [barcode part1]
  source 1..16: mol_type = other DNA
aatctgactccgtgtt

SEQ ID NO: 26358 - DNA, 16 bp, synthetic construct
  misc_feature 1..16: note = synthetic [barcode part1]
  source 1..16: mol_type = other DNA
aagtgccacttgcagt

SEQ ID NO: 26359 - DNA, 16 bp, synthetic construct
  misc_feature 1..16: note = synthetic [barcode part1]
  source 1..16: mol_type = other DNA
caactcctgcagttgc

SEQ ID NO: 26360 - DNA, 16 bp, synthetic construct
  misc_feature 1..16: note = synthetic [barcode part1]
  source 1..16: mol_type = other DNA
ccgaagatcgacacag

SEQ ID NO: 26361 - DNA, 16 bp, synthetic construct
  misc_feature 1..16: note = synthetic [barcode part1]
  source 1..16: mol_type = other DNA
ccgattcgtagttgcc

SEQ ID NO: 26362 - DNA, 16 bp, synthetic construct
  misc_feature 1..16: note = synthetic [barcode part1]
  source 1..16: mol_type = other DNA
gatcaacagtcagtcc

SEQ ID NO: 26363 - DNA, 16 bp, synthetic construct
  misc_feature 1..16: note = synthetic [barcode part1]
  source 1..16: mol_type = other DNA
gccgtggtaagtaggt

SEQ ID NO: 26364 - DNA, 16 bp, synthetic construct
  misc_feature 1..16: note = synthetic [barcode part1]
  source 1..16: mol_type = other DNA
cgcgatagaattccgt

SEQ ID NO: 26365 - DNA, 16 bp, synthetic construct
  misc_feature 1..16: note = synthetic [barcode part1]
  source 1..16: mol_type = other DNA
gtggagtataacggag

SEQ ID NO: 26366 - DNA, 16 bp, synthetic construct
  misc_feature 1..16: note = synthetic [barcode part1]
  source 1..16: mol_type = other DNA
acaagaatcagactgc

SEQ ID NO: 26367 - DNA, 16 bp, synthetic construct
  misc_feature 1..16: note = synthetic [barcode part1]
  source 1..16: mol_type = other DNA
tccgtcagtacttggc

SEQ ID NO: 26368 - DNA, 16 bp, synthetic construct
  misc_feature 1..16: note = synthetic [barcode part1]
  source 1..16: mol_type = other DNA
tgtgttcaagttgcct

SEQ ID NO: 26369 - DNA, 16 bp, synthetic construct
  misc_feature 1..16: note = synthetic [barcode part1]
  source 1..16: mol_type = other DNA
cgcgaggtaataaccg

SEQ ID NO: 26370 - DNA, 16 bp, synthetic construct
  misc_feature 1..16: note = synthetic [barcode part1]
  source 1..16: mol_type = other DNA
acgtgacctgactcct

SEQ ID NO: 26371 - DNA, 16 bp, synthetic construct
  misc_feature 1..16: note = synthetic [barcode part1]
  source 1..16: mol_type = other DNA
gaatccaacctctcgc

SEQ ID NO: 26372 - DNA, 16 bp, synthetic construct
  misc_feature 1..16: note = synthetic [barcode part1]
  source 1..16: mol_type = other DNA
cggtattaagtagacg

SEQ ID NO: 26373 - DNA, 16 bp, synthetic construct
  misc_feature 1..16: note = synthetic [barcode part1]
  source 1..16: mol_type = other DNA
actgaggttggttctg

SEQ ID NO: 26374 - DNA, 16 bp, synthetic construct
  misc_feature 1..16: note = synthetic [barcode part1]
  source 1..16: mol_type = other DNA
tgagtctggtgttcag

SEQ ID NO: 26375 - DNA, 16 bp, synthetic construct
  misc_feature 1..16: note = synthetic [barcode part1]
  source 1..16: mol_type = other DNA
agtcctcggttgtgtc

SEQ ID NO: 26376 - DNA, 16 bp, synthetic construct
  misc_feature 1..16: note = synthetic [barcode part1]
  source 1..16: mol_type = other DNA
cagatatatcggaggt

SEQ ID NO: 26377 - DNA, 16 bp, synthetic construct
  misc_feature 1..16: note = synthetic [barcode part1]
  source 1..16: mol_type = other DNA
gcacaactgcacagtt

SEQ ID NO: 26378 - DNA, 16 bp, synthetic construct
  misc_feature 1..16: note = synthetic [barcode part1]
  source 1..16: mol_type = other DNA
gcaaccggattgagac

SEQ ID NO: 26379 - DNA, 16 bp, synthetic construct
  misc_feature 1..16: note = synthetic [barcode part1]
  source 1..16: mol_type = other DNA
ttgcaagttcaactcc

SEQ ID NO: 26380 - DNA, 16 bp, synthetic construct
  misc_feature 1..16: note = synthetic [barcode part1]
  source 1..16: mol_type = other DNA
tcctgacaattcgtac

SEQ ID NO: 26381 - DNA, 16 bp, synthetic construct
  misc_feature 1..16: note = synthetic [barcode part1]
  source 1..16: mol_type = other DNA
attctctggtcttccg

SEQ ID NO: 26382 - DNA, 16 bp, synthetic construct
  misc_feature 1..16: note = synthetic [barcode part1]
  source 1..16: mol_type = other DNA
taatcaacgtgtgcgc

SEQ ID NO: 26383 - DNA, 16 bp, synthetic construct
  misc_feature 1..16: note = synthetic [barcode part1]
  source 1..16: mol_type = other DNA
tacactgcaaccacag

SEQ ID NO: 26384 - DNA, 16 bp, synthetic construct
  misc_feature 1..16: note = synthetic [barcode part1]
  source 1..16: mol_type = other DNA
ttggaatcaggtaggt

SEQ ID NO: 26385 - DNA, 16 bp, synthetic construct
  misc_feature 1..16: note = synthetic [barcode part1]
  source 1..16: mol_type = other DNA
aaggagtccgtacggt

SEQ ID NO: 26386 - DNA, 16 bp, synthetic construct
  misc_feature 1..16: note = synthetic [barcode part1]
  source 1..16: mol_type = other DNA
tctaaggccgattgac

SEQ ID NO: 26387 - DNA, 16 bp, synthetic construct
  misc_feature 1..16: note = synthetic [barcode part1]
  source 1..16: mol_type = other DNA
acgattggtcgatacc

SEQ ID NO: 26388 - DNA, 16 bp, synthetic construct
  misc_feature 1..16: note = synthetic [barcode part1]
  source 1..16: mol_type = other DNA
actaagagtgtgtcag

SEQ ID NO: 26389 - DNA, 16 bp, synthetic construct
  misc_feature 1..16: note = synthetic [barcode part1]
  source 1..16: mol_type = other DNA
acctcacctgttactc

SEQ ID NO: 26390 - DNA, 16 bp, synthetic construct
  misc_feature 1..16: note = synthetic [barcode part1]
  source 1..16: mol_type = other DNA
cgttcaccgagatctc

SEQ ID NO: 26391 - DNA, 16 bp, synthetic construct
  misc_feature 1..16: note = synthetic [barcode part1]
  source 1..16: mol_type = other DNA
caacgtggcacttagt

SEQ ID NO: 26392 - DNA, 16 bp, synthetic construct
  misc_feature 1..16: note = synthetic [barcode part1]
  source 1..16: mol_type = other DNA
cactgtaaggaaggag

SEQ ID NO: 26393 - DNA, 16 bp, synthetic construct
  misc_feature 1..16: note = synthetic [barcode part1]
  source 1..16: mol_type = other DNA
attatccacggcgaac

SEQ ID NO: 26394 - DNA, 16 bp, synthetic construct
  misc_feature 1..16: note = synthetic [barcode part1]
  source 1..16: mol_type = other DNA
tctgtatcttcgcgtc

SEQ ID NO: 26395 - DNA, 16 bp, synthetic construct
  misc_feature 1..16: note = synthetic [barcode part1]
  source 1..16: mol_type = other DNA
tggactaaggagtgcc

SEQ ID NO: 26396 - DNA, 16 bp, synthetic construct
  misc_feature 1..16: note = synthetic [barcode part1]
  source 1..16: mol_type = other DNA
tggcctggaactattg

SEQ ID NO: 26397 - DNA, 16 bp, synthetic construct
  misc_feature 1..16: note = synthetic [barcode part1]
  source 1..16: mol_type = other DNA
gttgactgtaccacag

SEQ ID NO: 26398 - DNA, 16 bp, synthetic construct
  misc_feature 1..16: note = synthetic [barcode part1]
  source 1..16: mol_type = other DNA
cctgactcaactatac

SEQ ID NO: 26399 - DNA, 16 bp, synthetic construct
  misc_feature 1..16: note = synthetic [barcode part1]
  source 1..16: mol_type = other DNA
tgttgcaaccagtcag

SEQ ID NO: 26400 - DNA, 16 bp, synthetic construct
  misc_feature 1..16: note = synthetic [barcode part1]
  source 1..16: mol_type = other DNA
gcggttactaagaagt

SEQ ID NO: 26401 - DNA, 16 bp, synthetic construct
  misc_feature 1..16: note = synthetic [barcode part1]
  source 1..16: mol_type = other DNA
ccgatctaacgcgttc

SEQ ID NO: 26402 - DNA, 16 bp, synthetic construct
  misc_feature 1..16: note = synthetic [barcode part1]
  source 1..16: mol_type = other DNA
atcgatactaccgtct

SEQ ID NO: 26403 - DNA, 16 bp, synthetic construct
  misc_feature 1..16: note = synthetic [barcode part1]
  source 1..16: mol_type = other DNA
tgagaccgagattcct

SEQ ID NO: 26404 - DNA, 16 bp, synthetic construct
  misc_feature 1..16: note = synthetic [barcode part1]
  source 1..16: mol_type = other DNA
ttccacaggaggtact

SEQ ID NO: 26405 - DNA, 16 bp, synthetic construct
  misc_feature 1..16: note = synthetic [barcode part1]
  source 1..16: mol_type = other DNA
cacacgatatcctact

SEQ ID NO: 26406 - DNA, 16 bp, synthetic construct
  misc_feature 1..16: note = synthetic [barcode part1]
  source 1..16: mol_type = other DNA
gagttaaccaactccg

SEQ ID NO: 26407 - DNA, 16 bp, synthetic construct
  misc_feature 1..16: note = synthetic [barcode part1]
  source 1..16: mol_type = other DNA
tcttacggtgtgaggt

SEQ ID NO: 26408 - DNA, 16 bp, synthetic construct
  misc_feature 1..16: note = synthetic [barcode part1]
  source 1..16: mol_type = other DNA
aggcgaggcagtactt

SEQ ID NO: 26409 - DNA, 16 bp, synthetic construct
  misc_feature 1..16: note = synthetic [barcode part1]
  source 1..16: mol_type = other DNA
gcaagtgcagagtctg

SEQ ID NO: 26410 - DNA, 16 bp, synthetic construct
  misc_feature 1..16: note = synthetic [barcode part1]
  source 1..16: mol_type = other DNA
atcacaatctgtccgt

SEQ ID NO: 26411 - DNA, 16 bp, synthetic construct
  misc_feature 1..16: note = synthetic [barcode part1]
  source 1..16: mol_type = other DNA
acgaccggagactaac

SEQ ID NO: 26412 - DNA, 16 bp, synthetic construct
  misc_feature 1..16: note = synthetic [barcode part1]
  source 1..16: mol_type = other DNA
gactgacttctctcct

SEQ ID NO: 26413 - DNA, 16 bp, synthetic construct
  misc_feature 1..16: note = synthetic [barcode part1]
  source 1..16: mol_type = other DNA
acacacgaaggtcctt

SEQ ID NO: 26414 - DNA, 16 bp, synthetic construct
  misc_feature 1..16: note = synthetic [barcode part1]
  source 1..16: mol_type = other DNA
gacagagaatcgcgtc

SEQ ID NO: 26415 - DNA, 16 bp, synthetic construct
  misc_feature 1..16: note = synthetic [barcode part1]
  source 1..16: mol_type = other DNA
gtgactaattgacgcc

SEQ ID NO: 26416 - DNA, 16 bp, synthetic construct
  misc_feature 1..16: note = synthetic [barcode part1]
  source 1..16: mol_type = other DNA
cagacaccacagactt

SEQ ID NO: 26417 - DNA, 16 bp, synthetic construct
  misc_feature 1..16: note = synthetic [barcode part1]
  source 1..16: mol_type = other DNA
gttatagtcacggcgt

SEQ ID NO: 26418 - DNA, 16 bp, synthetic construct
  misc_feature 1..16: note = synthetic [barcode part1]
  source 1..16: mol_type = other DNA
gaactacgatataggc

SEQ ID NO: 26419 - DNA, 16 bp, synthetic construct
  misc_feature 1..16: note = synthetic [barcode part1]
  source 1..16: mol_type = other DNA
ttgacaacggaccgtt

SEQ ID NO: 26420 - DNA, 16 bp, synthetic construct
  misc_feature 1..16: note = synthetic [barcode part1]
  source 1..16: mol_type = other DNA
aattccgcctgaagtg

SEQ ID NO: 26421 - DNA, 16 bp, synthetic construct
  misc_feature 1..16: note = synthetic [barcode part1]
  source 1..16: mol_type = other DNA
agtctgaggttcgatc

SEQ ID NO: 26422 - DNA, 16 bp, synthetic construct
  misc_feature 1..16: note = synthetic [barcode part1]
  source 1..16: mol_type = other DNA
aagaggacttctcctg

SEQ ID NO: 26423 - DNA, 16 bp, synthetic construct
  misc_feature 1..16: note = synthetic [barcode part1]
  source 1..16: mol_type = other DNA
ccaccttaacttacag

SEQ ID NO: 26424 - DNA, 16 bp, synthetic construct
  misc_feature 1..16: note = synthetic [barcode part1]
  source 1..16: mol_type = other DNA
aacacctggacacttg

SEQ ID NO: 26425 - DNA, 16 bp, synthetic construct
  misc_feature 1..16: note = synthetic [barcode part1]
  source 1..16: mol_type = other DNA
tcggcaggtaatctac

SEQ ID NO: 26426 - DNA, 16 bp, synthetic construct
  misc_feature 1..16: note = synthetic [barcode part1]
  source 1..16: mol_type = other DNA
caacgacctctcacgt

SEQ ID NO: 26427 - DNA, 16 bp, synthetic construct
  misc_feature 1..16: note = synthetic [barcode part1]
  source 1..16: mol_type = other DNA
tgcgaccgtattcaag

SEQ ID NO: 26428 - DNA, 16 bp, synthetic construct
  misc_feature 1..16: note = synthetic [barcode part1]
  source 1..16: mol_type = other DNA
aggagactgttggcac

SEQ ID NO: 26429 - DNA, 16 bp, synthetic construct
  misc_feature 1..16: note = synthetic [barcode part1]
  source 1..16: mol_type = other DNA
tcgcgaactcgatcct

SEQ ID NO: 26430 - DNA, 16 bp, synthetic construct
  misc_feature 1..16: note = synthetic [barcode part1]
  source 1..16: mol_type = other DNA
gagtctggtctcctgt

SEQ ID NO: 26431 - DNA, 16 bp, synthetic construct
  misc_feature 1..16: note = synthetic [barcode part1]
  source 1..16: mol_type = other DNA
aatagaccaccgcgag

SEQ ID NO: 26432 - DNA, 16 bp, synthetic construct
  misc_feature 1..16: note = synthetic [barcode part1]
  source 1..16: mol_type = other DNA
tggtgatatcaggtcc

SEQ ID NO: 26433 - DNA, 16 bp, synthetic construct
  misc_feature 1..16: note = synthetic [barcode part1]
  source 1..16: mol_type = other DNA
tgagtcgtccttgcgt

SEQ ID NO: 26434 - DNA, 16 bp, synthetic construct
  misc_feature 1..16: note = synthetic [barcode part1]
  source 1..16: mol_type = other DNA
aaggcgaagtaagacc

SEQ ID NO: 26435 - DNA, 16 bp, synthetic construct
  misc_feature 1..16: note = synthetic [barcode part1]
  source 1..16: mol_type = other DNA
gtgcctcaagaacact

SEQ ID NO: 26436 - DNA, 16 bp, synthetic construct
  misc_feature 1..16: note = synthetic [barcode part1]
  source 1..16: mol_type = other DNA
tcggtctcgagtctac

SEQ ID NO: 26437 - DNA, 16 bp, synthetic construct
  misc_feature 1..16: note = synthetic [barcode part1]
  source 1..16: mol_type = other DNA
cgaggccaattaacct

SEQ ID NO: 26438 - DNA, 16 bp, synthetic construct
  misc_feature 1..16: note = synthetic [barcode part1]
  source 1..16: mol_type = other DNA
tcctcacacaagaacg

SEQ ID NO: 26439 - DNA, 16 bp, synthetic construct
  misc_feature 1..16: note = synthetic [barcode part1]
  source 1..16: mol_type = other DNA
cgtcttgcactcagac

SEQ ID NO: 26440 - DNA, 16 bp, synthetic construct
  misc_feature 1..16: note = synthetic [barcode part1]
  source 1..16: mol_type = other DNA
agaactaccagtacag

SEQ ID NO: 26441 - DNA, 16 bp, synthetic construct
  misc_feature 1..16: note = synthetic [barcode part1]
  source 1..16: mol_type = other DNA
tctggcctcttagtct

SEQ ID NO: 26442 - DNA, 16 bp, synthetic construct
  misc_feature 1..16: note = synthetic [barcode part1]
  source 1..16: mol_type = other DNA
attaggtgaacacggt

SEQ ID NO: 26443 - DNA, 16 bp, synthetic construct
  misc_feature 1..16: note = synthetic [barcode part1]
  source 1..16: mol_type = other DNA
ccagagtacaggtggt

SEQ ID NO: 26444 - DNA, 16 bp, synthetic construct
  misc_feature 1..16: note = synthetic [barcode part1]
  source 1..16: mol_type = other DNA
cgtcaccgaacgtctt

SEQ ID NO: 26445 - DNA, 16 bp, synthetic construct
  misc_feature 1..16: note = synthetic [barcode part1]
  source 1..16: mol_type = other DNA
tataggcctcaccgtc

SEQ ID NO: 26446 - DNA, 16 bp, synthetic construct
  misc_feature 1..16: note = synthetic [barcode part1]
  source 1..16: mol_type = other DNA
gtggtgttggtcaact

SEQ ID NO: 26447 - DNA, 16 bp, synthetic construct
  misc_feature 1..16: note = synthetic [barcode part1]
  source 1..16: mol_type = other DNA
gtgcaacactgacgtt

SEQ ID NO: 26448 - DNA, 16 bp, synthetic construct
  misc_feature 1..16: note = synthetic [barcode part1]
  source 1..16: mol_type = other DNA
aatcggcctccttctt

SEQ ID NO: 26449 - DNA, 16 bp, synthetic construct
  misc_feature 1..16: note = synthetic [barcode part1]
  source 1..16: mol_type = other DNA
ccttgatcgactcctt

SEQ ID NO: 26450 - DNA, 16 bp, synthetic construct
  misc_feature 1..16: note = synthetic [barcode part1]
  source 1..16: mol_type = other DNA
gtctctcctaatcctg

SEQ ID NO: 26451 - DNA, 16 bp, synthetic construct
  misc_feature 1..16: note = synthetic [barcode part1]
  source 1..16: mol_type = other DNA
taccgagactcttgtt

SEQ ID NO: 26452 - DNA, 16 bp, synthetic construct
  misc_feature 1..16: note = synthetic [barcode part1]
  source 1..16: mol_type = other DNA
gaggtctaacaccact

SEQ ID NO: 26453 - DNA, 16 bp, synthetic construct
  misc_feature 1..16: note = synthetic [barcode part1]
  source 1..16: mol_type = other DNA
cgagtagtgttgcgag

SEQ ID NO: 26454 - DNA, 16 bp, synthetic construct
  misc_feature 1..16: note = synthetic [barcode part1]
  source 1..16: mol_type = other DNA
tcgtacttctacgcct

SEQ ID NO: 26455 - DNA, 16 bp, synthetic construct
  misc_feature 1..16: note = synthetic [barcode part1]
  source 1..16: mol_type = other DNA
tagaattaccacggcc

SEQ ID NO: 26456 - DNA, 16 bp, synthetic construct
  misc_feature 1..16: note = synthetic [barcode part1]
  source 1..16: mol_type = other DNA
attccacgaacactct

SEQ ID NO: 26457 - DNA, 16 bp, synthetic construct
  misc_feature 1..16: note = synthetic [barcode part1]
  source 1..16: mol_type = other DNA
aactacagaccaaggt

SEQ ID NO: 26458 - DNA, 16 bp, synthetic construct
  misc_feature 1..16: note = synthetic [barcode part1]
  source 1..16: mol_type = other DNA
tgtaagtgttctgcct

SEQ ID NO: 26459 - DNA, 16 bp, synthetic construct
  misc_feature 1..16: note = synthetic [barcode part1]
  source 1..16: mol_type = other DNA
aggcaaggccttagac

SEQ ID NO: 26460 - DNA, 16 bp, synthetic construct
  misc_feature 1..16: note = synthetic [barcode part1]
  source 1..16: mol_type = other DNA
aggataagaacgacgc

SEQ ID NO: 26461 - DNA, 16 bp, synthetic construct
  misc_feature 1..16: note = synthetic [barcode part1]
  source 1..16: mol_type = other DNA
atacttagagtggcag

SEQ ID NO: 26462 - DNA, 16 bp, synthetic construct
  misc_feature 1..16: note = synthetic [barcode part1]
  source 1..16: mol_type = other DNA
tagactacttccacgt

SEQ ID NO: 26463 - DNA, 16 bp, synthetic construct
  misc_feature 1..16: note = synthetic [barcode part1]
  source 1..16: mol_type = other DNA
ttggtacgtcagtacg

SEQ ID NO: 26464 - DNA, 16 bp, synthetic construct
  misc_feature 1..16: note = synthetic [barcode part1]
  source 1..16: mol_type = other DNA
caaccggattagttgc

SEQ ID NO: 26465 - DNA, 16 bp, synthetic construct
  misc_feature 1..16: note = synthetic [barcode part1]
  source 1..16: mol_type = other DNA
tggtacggatctgtgt

SEQ ID NO: 26466 - DNA, 16 bp, synthetic construct
  misc_feature 1..16: note = synthetic [barcode part1]
  source 1..16: mol_type = other DNA
taccacctactaacac

SEQ ID NO: 26467 - DNA, 16 bp, synthetic construct
  misc_feature 1..16: note = synthetic [barcode part1]
  source 1..16: mol_type = other DNA
gaggacttgacgtgtg

SEQ ID NO: 26468 - DNA, 16 bp, synthetic construct
  misc_feature 1..16: note = synthetic [barcode part1]
  source 1..16: mol_type = other DNA
atcctagtcgaccaag

SEQ ID NO: 26469 - DNA, 16 bp, synthetic construct
  misc_feature 1..16: note = synthetic [barcode part1]
  source 1..16: mol_type = other DNA
tcgcaataactccgag

SEQ ID NO: 26470 - DNA, 16 bp, synthetic construct
  misc_feature 1..16: note = synthetic [barcode part1]
  source 1..16: mol_type = other DNA
agattgcgcgattcac

SEQ ID NO: 26471 - DNA, 16 bp, synthetic construct
  misc_feature 1..16: note = synthetic [barcode part1]
  source 1..16: mol_type = other DNA
tgtgtgaacgagacgc

SEQ ID NO: 26472 - DNA, 16 bp, synthetic construct
  misc_feature 1..16: note = synthetic [barcode part1]
  source 1..16: mol_type = other DNA
agatcctccttcttcg

SEQ ID NO: 26473 - DNA, 16 bp, synthetic construct
  misc_feature 1..16: note = synthetic [barcode part1]
  source 1..16: mol_type = other DNA
agatctgtgaacctgc

SEQ ID NO: 26474 - DNA, 16 bp, synthetic construct
  misc_feature 1..16: note = synthetic [barcode part1]
  source 1..16: mol_type = other DNA
gcgagtaacaacaccg

SEQ ID NO: 26475 - DNA, 16 bp, synthetic construct
  misc_feature 1..16: note = synthetic [barcode part1]
  source 1..16: mol_type = other DNA
tctgccgtcgatacgt

SEQ ID NO: 26476 - DNA, 16 bp, synthetic construct
  misc_feature 1..16: note = synthetic [barcode part1]
  source 1..16: mol_type = other DNA
tcgactaccgatcaag

SEQ ID NO: 26477 - DNA, 16 bp, synthetic construct
  misc_feature 1..16: note = synthetic [barcode part1]
  source 1..16: mol_type = other DNA
gaactactcacacttc

SEQ ID NO: 26478 - DNA, 16 bp, synthetic construct
  misc_feature 1..16: note = synthetic [barcode part1]
  source 1..16: mol_type = other DNA
gtacttcaatccggtt

SEQ ID NO: 26479 - DNA, 16 bp, synthetic construct
  misc_feature 1..16: note = synthetic [barcode part1]
  source 1..16: mol_type = other DNA
cgagttgtgtgcctct

SEQ ID NO: 26480 - DNA, 16 bp, synthetic construct
  misc_feature 1..16: note = synthetic [barcode part1]
  source 1..16: mol_type = other DNA
tacttggcgtaccaag

SEQ ID NO: 26481 - DNA, 16 bp, synthetic construct
  misc_feature 1..16: note = synthetic [barcode part1]
  source 1..16: mol_type = other DNA
ttgtgttgcctggcac

SEQ ID NO: 26482 - DNA, 16 bp, synthetic construct
  misc_feature 1..16: note = synthetic [barcode part1]
  source 1..16: mol_type = other DNA
tggaccactccacact

SEQ ID NO: 26483 - DNA, 16 bp, synthetic construct
  misc_feature 1..16: note = synthetic [barcode part1]
  source 1..16: mol_type = other DNA
atcgttgttaacggcg

SEQ ID NO: 26484 - DNA, 16 bp, synthetic construct
  misc_feature 1..16: note = synthetic [barcode part1]
  source 1..16: mol_type = other DNA
cgatcgaatcgtggtt

SEQ ID NO: 26485 - DNA, 16 bp, synthetic construct
  misc_feature 1..16: note = synthetic [barcode part1]
  source 1..16: mol_type = other DNA
aactcttccaagtgtc

SEQ ID NO: 26486 - DNA, 16 bp, synthetic construct
  misc_feature 1..16: note = synthetic [barcode part1]
  source 1..16: mol_type = other DNA
tggtaacctggactac

SEQ ID NO: 26487 - DNA, 16 bp, synthetic construct
  misc_feature 1..16: note = synthetic [barcode part1]
  source 1..16: mol_type = other DNA
tcttgacgtcaggagt

SEQ ID NO: 26488 - DNA, 16 bp, synthetic construct
  misc_feature 1..16: note = synthetic [barcode part1]
  source 1..16: mol_type = other DNA
acagatcggaggtcac

SEQ ID NO: 26489 - DNA, 16 bp, synthetic construct
  misc_feature 1..16: note = synthetic [barcode part1]
  source 1..16: mol_type = other DNA
agagtcttccaaggtc

SEQ ID NO: 26490 - DNA, 16 bp, synthetic construct
  misc_feature 1..16: note = synthetic [barcode part1]
  source 1..16: mol_type = other DNA
agtgattccagaccgt

SEQ ID NO: 26491 - DNA, 16 bp, synthetic construct
  misc_feature 1..16: note = synthetic [barcode part1]
  source 1..16: mol_type = other DNA
tgttccgattcgtaac

SEQ ID NO: 26492 - DNA, 16 bp, synthetic construct
  misc_feature 1..16: note = synthetic [barcode part1]
  source 1..16: mol_type = other DNA
tcgacgactgcactct

SEQ ID NO: 26493 - DNA, 16 bp, synthetic construct
  misc_feature 1..16: note = synthetic [barcode part1]
  source 1..16: mol_type = other DNA
tatactccttggcggc

SEQ ID NO: 26494 - DNA, 16 bp, synthetic construct
  misc_feature 1..16: note = synthetic [barcode part1]
  source 1..16: mol_type = other DNA
attctcacgagaacgc

SEQ ID NO: 26495 - DNA, 16 bp, synthetic construct
  misc_feature 1..16: note = synthetic [barcode part1]
  source 1..16: mol_type = other DNA
gatctaaccaggtcgt

SEQ ID NO: 26496 - DNA, 16 bp, synthetic construct
  misc_feature 1..16: note = synthetic [barcode part1]
  source 1..16: mol_type = other DNA
cctcaataaggcgact

SEQ ID NO: 26497 - DNA, 16 bp, synthetic construct
  misc_feature 1..16: note = synthetic [barcode part1]
  source 1..16: mol_type = other DNA
atatatctgccttgcg

SEQ ID NO: 26498 - DNA, 16 bp, synthetic construct
  misc_feature 1..16: note = synthetic [barcode part1]
  source 1..16: mol_type = other DNA
ttgttacggatccgcc

SEQ ID NO: 26499 - DNA, 16 bp, synthetic construct
  misc_feature 1..16: note = synthetic [barcode part1]
  source 1..16: mol_type = other DNA
gtatctccggttcggt

SEQ ID NO: 26500 - DNA, 16 bp, synthetic construct
  misc_feature 1..16: note = synthetic [barcode part1]
  source 1..16: mol_type = other DNA
gactacggtgtcgatt

SEQ ID NO: 26501 - DNA, 16 bp, synthetic construct
  misc_feature 1..16: note = synthetic [barcode part1]
  source 1..16: mol_type = other DNA
gacttggatcgagtct

SEQ ID NO: 26502 - DNA, 16 bp, synthetic construct
  misc_feature 1..16: note = synthetic [barcode part1]
  source 1..16: mol_type = other DNA
cctagatctaccgtcg

SEQ ID NO: 26503 - DNA, 16 bp, synthetic construct
  misc_feature 1..16: note = synthetic [barcode part1]
  source 1..16: mol_type = other DNA
ttgtaaggacgtgcct

SEQ ID NO: 26504 - DNA, 16 bp, synthetic construct
  misc_feature 1..16: note = synthetic [barcode part1]
  source 1..16: mol_type = other DNA
ttgtatcgtccggcac

SEQ ID NO: 26505 - DNA, 16 bp, synthetic construct
  misc_feature 1..16: note = synthetic [barcode part1]
  source 1..16: mol_type = other DNA
accgacaagtgcactt

SEQ ID NO: 26506 - DNA, 16 bp, synthetic construct
  misc_feature 1..16: note = synthetic [barcode part1]
  source 1..16: mol_type = other DNA
aaccggtatcacgact

SEQ ID NO: 26507 - DNA, 16 bp, synthetic construct
  misc_feature 1..16: note = synthetic [barcode part1]
  source 1..16: mol_type = other DNA
gtctgttgtgagtggt

SEQ ID NO: 26508 - DNA, 16 bp, synthetic construct
  misc_feature 1..16: note = synthetic [barcode part1]
  source 1..16: mol_type = other DNA
ccagagtgcctatcct

SEQ ID NO: 26509 - DNA, 16 bp, synthetic construct
  misc_feature 1..16: note = synthetic [barcode part1]
  source 1..16: mol_type = other DNA
aggacaatacctgagt

SEQ ID NO: 26510 - DNA, 16 bp, synthetic construct
  misc_feature 1..16: note = synthetic [barcode part1]
  source 1..16: mol_type = other DNA
aggtcgagttgacgtg

SEQ ID NO: 26511 - DNA, 16 bp, synthetic construct
  misc_feature 1..16: note = synthetic [barcode part1]
  source 1..16: mol_type = other DNA
acggagttactgttcg

SEQ ID NO: 26512 - DNA, 16 bp, synthetic construct
  misc_feature 1..16: note = synthetic [barcode part1]
  source 1..16: mol_type = other DNA
gacgtacacgtcaact

SEQ ID NO: 26513 - DNA, 16 bp, synthetic construct
  misc_feature 1..16: note = synthetic [barcode part1]
  source 1..16: mol_type = other DNA
ttacactctactaggc

SEQ ID NO: 26514 - DNA, 16 bp, synthetic construct
  misc_feature 1..16: note = synthetic [barcode part1]
  source 1..16: mol_type = other DNA
acgtacgagtcctagt

SEQ ID NO: 26515 - DNA, 16 bp, synthetic construct
  misc_feature 1..16: note = synthetic [barcode part1]
  source 1..16: mol_type = other DNA
cgtctctgtattcctg

SEQ ID NO: 26516 - DNA, 16 bp, synthetic construct
  misc_feature 1..16: note = synthetic [barcode part1]
  source 1..16: mol_type = other DNA
ttatctcgcactcaag

SEQ ID NO: 26517 - DNA, 16 bp, synthetic construct
  misc_feature 1..16: note = synthetic [barcode part1]
  source 1..16: mol_type = other DNA
caagtcttgaacgtcg

SEQ ID NO: 26518 - DNA, 16 bp, synthetic construct
  misc_feature 1..16: note = synthetic [barcode part1]
  source 1..16: mol_type = other DNA
caacggtgaagatact

SEQ ID NO: 26519 - DNA, 16 bp, synthetic construct
  misc_feature 1..16: note = synthetic [barcode part1]
  source 1..16: mol_type = other DNA
actccgcgtggttgtt

SEQ ID NO: 26520 - DNA, 16 bp, synthetic construct
  misc_feature 1..16: note = synthetic [barcode part1]
  source 1..16: mol_type = other DNA
ttgtccacctactcgt

SEQ ID NO: 26521 - DNA, 16 bp, synthetic construct
  misc_feature 1..16: note = synthetic [barcode part1]
  source 1..16: mol_type = other DNA
tccgatcgtgttggtc

SEQ ID NO: 26522 - DNA, 16 bp, synthetic construct
  misc_feature 1..16: note = synthetic [barcode part1]
  source 1..16: mol_type = other DNA
tcaggtaccgtgaatc

SEQ ID NO: 26523 - DNA, 16 bp, synthetic construct
  misc_feature 1..16: note = synthetic [barcode part1]
  source 1..16: mol_type = other DNA
tagtcactgtcttgtg

SEQ ID NO: 26524 - DNA, 16 bp, synthetic construct
  misc_feature 1..16: note = synthetic [barcode part1]
  source 1..16: mol_type = other DNA
cggatcctagatatcg

SEQ ID NO: 26525 - DNA, 16 bp, synthetic construct
  misc_feature 1..16: note = synthetic [barcode part1]
  source 1..16: mol_type = other DNA
tcggagtcctgttcgt

SEQ ID NO: 26526 - DNA, 16 bp, synthetic construct
  misc_feature 1..16: note = synthetic [barcode part1]
  source 1..16: mol_type = other DNA
ttctaacctaagtgcc

SEQ ID NO: 26527 - DNA, 16 bp, synthetic construct
  misc_feature 1..16: note = synthetic [barcode part1]
  source 1..16: mol_type = other DNA
cacctcacaggtgttc

SEQ ID NO: 26528 - DNA, 16 bp, synthetic construct
  misc_feature 1..16: note = synthetic [barcode part1]
  source 1..16: mol_type = other DNA
tcgttccgattgcgtg

SEQ ID NO: 26529 - DNA, 16 bp, synthetic construct
  misc_feature 1..16: note = synthetic [barcode part1]
  source 1..16: mol_type = other DNA
actcactcctaaggtt

SEQ ID NO: 26530 - DNA, 16 bp, synthetic construct
  misc_feature 1..16: note = synthetic [barcode part1]
  source 1..16: mol_type = other DNA
tcgcacggaagaactg

SEQ ID NO: 26531 - DNA, 16 bp, synthetic construct
  misc_feature 1..16: note = synthetic [barcode part1]
  source 1..16: mol_type = other DNA
cacttactactgcagt

SEQ ID NO: 26532 - DNA, 16 bp, synthetic construct
  misc_feature 1..16: note = synthetic [barcode part1]
  source 1..16: mol_type = other DNA
gagtaaggtggtatct

SEQ ID NO: 26533 - DNA, 16 bp, synthetic construct
  misc_feature 1..16: note = synthetic [barcode part1]
  source 1..16: mol_type = other DNA
actctcagacgattct

SEQ ID NO: 26534 - DNA, 16 bp, synthetic construct
  misc_feature 1..16: note = synthetic [barcode part1]
  source 1..16: mol_type = other DNA
ccgcagttatagtgtg

SEQ ID NO: 26535 - DNA, 16 bp, synthetic construct
  misc_feature 1..16: note = synthetic [barcode part1]
  source 1..16: mol_type = other DNA
tcagtgaacttgacgc

SEQ ID NO: 26536 - DNA, 16 bp, synthetic construct
  misc_feature 1..16: note = synthetic [barcode part1]
  source 1..16: mol_type = other DNA
agttcttgtgtgactc

SEQ ID NO: 26537 - DNA, 16 bp, synthetic construct
  misc_feature 1..16: note = synthetic [barcode part1]
  source 1..16: mol_type = other DNA
tacaattactgcctcg

SEQ ID NO: 26538 - DNA, 16 bp, synthetic construct
  misc_feature 1..16: note = synthetic [barcode part1]
  source 1..16: mol_type = other DNA
atatcctcggtctaac

SEQ ID NO: 26539 - DNA, 16 bp, synthetic construct
  misc_feature 1..16: note = synthetic [barcode part1]
  source 1..16: mol_type = other DNA
tgaagaaggagagtcc

SEQ ID NO: 26540 - DNA, 16 bp, synthetic construct
  misc_feature 1..16: note = synthetic [barcode part1]
  source 1..16: mol_type = other DNA
atcgagtcagatcgtc

SEQ ID NO: 26541 - DNA, 16 bp, synthetic construct
  misc_feature 1..16: note = synthetic [barcode part1]
  source 1..16: mol_type = other DNA
tgtagactggaacaac

SEQ ID NO: 26542 - DNA, 16 bp, synthetic construct
  misc_feature 1..16: note = synthetic [barcode part1]
  source 1..16: mol_type = other DNA
ttccggtatacttgac

SEQ ID NO: 26543 - DNA, 16 bp, synthetic construct
  misc_feature 1..16: note = synthetic [barcode part1]
  source 1..16: mol_type = other DNA
atacgcaattggtcgc

SEQ ID NO: 26544 - DNA, 16 bp, synthetic construct
  misc_feature 1..16: note = synthetic [barcode part1]
  source 1..16: mol_type = other DNA
attattctaggcgcct

SEQ ID NO: 26545 - DNA, 16 bp, synthetic construct
  misc_feature 1..16: note = synthetic [barcode part1]
  source 1..16: mol_type = other DNA
tcggtgatcgcgtctt

SEQ ID NO: 26546 - DNA, 16 bp, synthetic construct
  misc_feature 1..16: note = synthetic [barcode part1]
  source 1..16: mol_type = other DNA
acgaccgagagaactc

SEQ ID NO: 26547 - DNA, 16 bp, synthetic construct
  misc_feature 1..16: note = synthetic [barcode part1]
  source 1..16: mol_type = other DNA
ttctactccacaggcg

SEQ ID NO: 26548 - DNA, 16 bp, synthetic construct
  misc_feature 1..16: note = synthetic [barcode part1]
  source 1..16: mol_type = other DNA
attgcgtaggagttag

SEQ ID NO: 26549 - DNA, 16 bp, synthetic construct
  misc_feature 1..16: note = synthetic [barcode part1]
  source 1..16: mol_type = other DNA
ttgcactacaatccgt

SEQ ID NO: 26550 - DNA, 16 bp, synthetic construct
  misc_feature 1..16: note = synthetic [barcode part1]
  source 1..16: mol_type = other DNA
tgtacagattcggacc

SEQ ID NO: 26551 - DNA, 16 bp, synthetic construct
  misc_feature 1..16: note = synthetic [barcode part1]
  source 1..16: mol_type = other DNA
tcctacacggtaactt

SEQ ID NO: 26552 - DNA, 16 bp, synthetic construct
  misc_feature 1..16: note = synthetic [barcode part1]
  source 1..16: mol_type = other DNA
atcttggagtcagtcg

SEQ ID NO: 26553 - DNA, 16 bp, synthetic construct
  misc_feature 1..16: note = synthetic [barcode part1]
  source 1..16: mol_type = other DNA
tagtgtggatcgtgtc

SEQ ID NO: 26554 - DNA, 16 bp, synthetic construct
  misc_feature 1..16: note = synthetic [barcode part1]
  source 1..16: mol_type = other DNA
cgactggttagtcaac

SEQ ID NO: 26555 - DNA, 16 bp, synthetic construct
  misc_feature 1..16: note = synthetic [barcode part1]
  source 1..16: mol_type = other DNA
ccttaaggcagataag

SEQ ID NO: 26556 - DNA, 16 bp, synthetic construct
  misc_feature 1..16: note = synthetic [barcode part1]
  source 1..16: mol_type = other DNA
cgtagagaatctagtg

SEQ ID NO: 26557 - DNA, 16 bp, synthetic construct
  misc_feature 1..16: note = synthetic [barcode part1]
  source 1..16: mol_type = other DNA
gtcagtgcacctcgtt

SEQ ID NO: 26558 - DNA, 16 bp, synthetic construct
  misc_feature 1..16: note = synthetic [barcode part1]
  source 1..16: mol_type = other DNA
tgcctacacggtatcc

SEQ ID NO: 26559 - DNA, 16 bp, synthetic construct
  misc_feature 1..16: note = synthetic [barcode part1]
  source 1..16: mol_type = other DNA
tccgattcgcacaatt

SEQ ID NO: 26560 - DNA, 16 bp, synthetic construct
  misc_feature 1..16: note = synthetic [barcode part1]
  source 1..16: mol_type = other DNA
cgcaattcgtagatcg

SEQ ID NO: 26561 - DNA, 16 bp, synthetic construct
  misc_feature 1..16: note = synthetic [barcode part1]
  source 1..16: mol_type = other DNA
caacaacctaggttgc

SEQ ID NO: 26562 - DNA, 16 bp, synthetic construct
  misc_feature 1..16: note = synthetic [barcode part1]
  source 1..16: mol_type = other DNA
agagagtaacggcagt

SEQ ID NO: 26563 - DNA, 16 bp, synthetic construct
  misc_feature 1..16: note = synthetic [barcode part1]
  source 1..16: mol_type = other DNA
gacgtcaagtctcagt

SEQ ID NO: 26564 - DNA, 16 bp, synthetic construct
  misc_feature 1..16: note = synthetic [barcode part1]
  source 1..16: mol_type = other DNA
accgtaactacagtgc

SEQ ID NO: 26565 - DNA, 16 bp, synthetic construct
  misc_feature 1..16: note = synthetic [barcode part1]
  source 1..16: mol_type = other DNA
tgcgacactgcctact

SEQ ID NO: 26566 - DNA, 16 bp, synthetic construct
  misc_feature 1..16: note = synthetic [barcode part1]
  source 1..16: mol_type = other DNA
actgtcctactcggac

SEQ ID NO: 26567 - DNA, 16 bp, synthetic construct
  misc_feature 1..16: note = synthetic [barcode part1]
  source 1..16: mol_type = other DNA
tcgtcacacggatctc

SEQ ID NO: 26568 - DNA, 16 bp, synthetic construct
  misc_feature 1..16: note = synthetic [barcode part1]
  source 1..16: mol_type = other DNA
gcaattcaggttaccg

SEQ ID NO: 26569 - DNA, 16 bp, synthetic construct
  misc_feature 1..16: note = synthetic [barcode part1]
  source 1..16: mol_type = other DNA
gagaggtcgaacttgc

SEQ ID NO: 26570 - DNA, 16 bp, synthetic construct
  misc_feature 1..16: note = synthetic [barcode part1]
  source 1..16: mol_type = other DNA
ccgagaaggcctatag

SEQ ID NO: 26571 - DNA, 16 bp, synthetic construct
  misc_feature 1..16: note = synthetic [barcode part1]
  source 1..16: mol_type = other DNA
tcgtgtaccgatcctg

SEQ ID NO: 26572 - DNA, 16 bp, synthetic construct
  misc_feature 1..16: note = synthetic [barcode part1]
  source 1..16: mol_type = other DNA
ttcgagattgactggc

SEQ ID NO: 26573 - DNA, 16 bp, synthetic construct
  misc_feature 1..16: note = synthetic [barcode part1]
  source 1..16: mol_type = other DNA
agatacacggtggtcg

SEQ ID NO: 26574 - DNA, 16 bp, synthetic construct
  misc_feature 1..16: note = synthetic [barcode part1]
  source 1..16: mol_type = other DNA
tcaataaggcggtctc

SEQ ID NO: 26575 - DNA, 16 bp, synthetic construct
  misc_feature 1..16: note = synthetic [barcode part1]
  source 1..16: mol_type = other DNA
ttcgtaggccttattg

SEQ ID NO: 26576 - DNA, 16 bp, synthetic construct
  misc_feature 1..16: note = synthetic [barcode part1]
  source 1..16: mol_type = other DNA
gaatccggccttctgt

SEQ ID NO: 26577 - DNA, 16 bp, synthetic construct
  misc_feature 1..16: note = synthetic [barcode part1]
  source 1..16: mol_type = other DNA
taggtcggttatcggt

SEQ ID NO: 26578 - DNA, 16 bp, synthetic construct
  misc_feature 1..16: note = synthetic [barcode part1]
  source 1..16: mol_type = other DNA
gatagaagaggcagtc

SEQ ID NO: 26579 - DNA, 16 bp, synthetic construct
  misc_feature 1..16: note = synthetic [barcode part1]
  source 1..16: mol_type = other DNA
aacacgtcctcggttc

SEQ ID NO: 26580 - DNA, 16 bp, synthetic construct
  misc_feature 1..16: note = synthetic [barcode part1]
  source 1..16: mol_type = other DNA
ttcgtcgaactatacc

SEQ ID NO: 26581 - DNA, 16 bp, synthetic construct
  misc_feature 1..16: note = synthetic [barcode part1]
  source 1..16: mol_type = other DNA
gccgacttacgtatag

SEQ ID NO: 26582 - DNA, 16 bp, synthetic construct
  misc_feature 1..16: note = synthetic [barcode part1]
  source 1..16: mol_type = other DNA
tgacgacaaggatact

SEQ ID NO: 26583 - DNA, 16 bp, synthetic construct
  misc_feature 1..16: note = synthetic [barcode part1]
  source 1..16: mol_type = other DNA
cgaccttcgtggttac

SEQ ID NO: 26584 - DNA, 16 bp, synthetic construct
  misc_feature 1..16: note = synthetic [barcode part1]
  source 1..16: mol_type = other DNA
cagacgtcacagatct

SEQ ID NO: 26585 - DNA, 16 bp, synthetic construct
  misc_feature 1..16: note = synthetic [barcode part1]
  source 1..16: mol_type = other DNA
gatcactctgtcgaag

SEQ ID NO: 26586 - DNA, 16 bp, synthetic construct
  misc_feature 1..16: note = synthetic [barcode part1]
  source 1..16: mol_type = other DNA
actctgaccggaattg

SEQ ID NO: 26587 - DNA, 16 bp, synthetic construct
  misc_feature 1..16: note = synthetic [barcode part1]
  source 1..16: mol_type = other DNA
taaggccgtcaactgt

SEQ ID NO: 26588 - DNA, 16 bp, synthetic construct
  misc_feature 1..16: note = synthetic [barcode part1]
  source 1..16: mol_type = other DNA
acaatacctggccagt

SEQ ID NO: 26589 - DNA, 16 bp, synthetic construct
  misc_feature 1..16: note = synthetic [barcode part1]
  source 1..16: mol_type = other DNA
ttcgccgcacagatct

SEQ ID NO: 26590 - DNA, 16 bp, synthetic construct
  misc_feature 1..16: note = synthetic [barcode part1]
  source 1..16: mol_type = other DNA
tagtaccgtctattcg

SEQ ID NO: 26591 - DNA, 16 bp, synthetic construct
  misc_feature 1..16: note = synthetic [barcode part1]
  source 1..16: mol_type = other DNA
gatcgttggcaacttg

SEQ ID NO: 26592 - DNA, 16 bp, synthetic construct
  misc_feature 1..16: note = synthetic [barcode part1]
  source 1..16: mol_type = other DNA
ttcgttggaggatcgt

SEQ ID NO: 26593 - DNA, 16 bp, synthetic construct
  misc_feature 1..16: note = synthetic [barcode part1]
  source 1..16: mol_type = other DNA
tgacgtacgtaccaac

SEQ ID NO: 26594 - DNA, 16 bp, synthetic construct
  misc_feature 1..16: note = synthetic [barcode part1]
  source 1..16: mol_type = other DNA
gcaacgttcttcctct

SEQ ID NO: 26595 - DNA, 16 bp, synthetic construct
  misc_feature 1..16: note = synthetic [barcode part1]
  source 1..16: mol_type = other DNA
tggatcttgagtaccg

SEQ ID NO: 26596 - DNA, 16 bp, synthetic construct
  misc_feature 1..16: note = synthetic [barcode part1]
  source 1..16: mol_type = other DNA
tatccgattcctaacg

SEQ ID NO: 26597 - DNA, 16 bp, synthetic construct
  misc_feature 1..16: note = synthetic [barcode part1]
  source 1..16: mol_type = other DNA
gtctccttccttcaag

SEQ ID NO: 26598 - DNA, 16 bp, synthetic construct
  misc_feature 1..16: note = synthetic [barcode part1]
  source 1..16: mol_type = other DNA
cgtaggacgacctaag

SEQ ID NO: 26599 - DNA, 16 bp, synthetic construct
  misc_feature 1..16: note = synthetic [barcode part1]
  source 1..16: mol_type = other DNA
ttactctgcactcaag

SEQ ID NO: 26600 - DNA, 16 bp, synthetic construct
  misc_feature 1..16: note = synthetic [barcode part1]
  source 1..16: mol_type = other DNA
gacttgtagactcgtg

SEQ ID NO: 26601 - DNA, 16 bp, synthetic construct
  misc_feature 1..16: note = synthetic [barcode part1]
  source 1..16: mol_type = other DNA
ttcctccgactctagt

SEQ ID NO: 26602 - DNA, 16 bp, synthetic construct
  misc_feature 1..16: note = synthetic [barcode part1]
  source 1..16: mol_type = other DNA
acaagagttgagtcgt

SEQ ID NO: 26603 - DNA, 16 bp, synthetic construct
  misc_feature 1..16: note = synthetic [barcode part1]
  source 1..16: mol_type = other DNA
cgcacaaggtgtatct

SEQ ID NO: 26604 - DNA, 16 bp, synthetic construct
  misc_feature 1..16: note = synthetic [barcode part1]
  source 1..16: mol_type = other DNA
cagttggcagttggtt

SEQ ID NO: 26605 - DNA, 16 bp, synthetic construct
  misc_feature 1..16: note = synthetic [barcode part1]
  source 1..16: mol_type = other DNA
gatccaggtcgaactt

SEQ ID NO: 26606 - DNA, 16 bp, synthetic construct
  misc_feature 1..16: note = synthetic [barcode part1]
  source 1..16: mol_type = other DNA
gcaagacttgttccag

SEQ ID NO: 26607 - DNA, 16 bp, synthetic construct
  misc_feature 1..16: note = synthetic [barcode part1]
  source 1..16: mol_type = other DNA
aacgttgtgtgacacc

SEQ ID NO: 26608 - DNA, 16 bp, synthetic construct
  misc_feature 1..16: note = synthetic [barcode part1]
  source 1..16: mol_type = other DNA
tcgaatcgtgcaggag

SEQ ID NO: 26609 - DNA, 16 bp, synthetic construct
  misc_feature 1..16: note = synthetic [barcode part1]
  source 1..16: mol_type = other DNA
tctccgaacgccaatc

SEQ ID NO: 26610 - DNA, 16 bp, synthetic construct
  misc_feature 1..16: note = synthetic [barcode part1]
  source 1..16: mol_type = other DNA
tgactacgataacgag

SEQ ID NO: 26611 - DNA, 16 bp, synthetic construct
  misc_feature 1..16: note = synthetic [barcode part1]
  source 1..16: mol_type = other DNA
caagatccacacgtac

SEQ ID NO: 26612 - DNA, 16 bp, synthetic construct
  misc_feature 1..16: note = synthetic [barcode part1]
  source 1..16: mol_type = other DNA
ccaacaagatataggc

SEQ ID NO: 26613 - DNA, 16 bp, synthetic construct
  misc_feature 1..16: note = synthetic [barcode part1]
  source 1..16: mol_type = other DNA
gtgttctctagtggtt

SEQ ID NO: 26614 - DNA, 16 bp, synthetic construct
  misc_feature 1..16: note = synthetic [barcode part1]
  source 1..16: mol_type = other DNA
tcaccacggtaagatc

SEQ ID NO: 26615 - DNA, 16 bp, synthetic construct
  misc_feature 1..16: note = synthetic [barcode part1]
  source 1..16: mol_type = other DNA
caacaactatagaggc

SEQ ID NO: 26616 - DNA, 16 bp, synthetic construct
  misc_feature 1..16: note = synthetic [barcode part1]
  source 1..16: mol_type = other DNA
gtgtactgtcctccag

SEQ ID NO: 26617 - DNA, 16 bp, synthetic construct
  misc_feature 1..16: note = synthetic [barcode part1]
  source 1..16: mol_type = other DNA
atctgagtgagtgtcc

SEQ ID NO: 26618 - DNA, 16 bp, synthetic construct
  misc_feature 1..16: note = synthetic [barcode part1]
  source 1..16: mol_type = other DNA
tagttgagtgccgtgt

SEQ ID NO: 26619 - DNA, 16 bp, synthetic construct
  misc_feature 1..16: note = synthetic [barcode part1]
  source 1..16: mol_type = other DNA
tactcactccaaggtt

SEQ ID NO: 26620 - DNA, 16 bp, synthetic construct
  misc_feature 1..16: note = synthetic [barcode part1]
  source 1..16: mol_type = other DNA
tcctggcagttatact

SEQ ID NO: 26621 - DNA, 16 bp, synthetic construct
  misc_feature 1..16: note = synthetic [barcode part1]
  source 1..16: mol_type = other DNA
cgcacaagttcgaact

SEQ ID NO: 26622 - DNA, 16 bp, synthetic construct
  misc_feature 1..16: note = synthetic [barcode part1]
  source 1..16: mol_type = other DNA
atcgcagtctggaact

SEQ ID NO: 26623 - DNA, 16 bp, synthetic construct
  misc_feature 1..16: note = synthetic [barcode part1]
  source 1..16: mol_type = other DNA
gcctcgaaccaattag

SEQ ID NO: 26624 - DNA, 16 bp, synthetic construct
  misc_feature 1..16: note = synthetic [barcode part1]
  source 1..16: mol_type = other DNA
aactgtctctgtgttg

SEQ ID NO: 26625 - DNA, 16 bp, synthetic construct
  misc_feature 1..16: note = synthetic [barcode part1]
  source 1..16: mol_type = other DNA
acgccaagatcgtact

SEQ ID NO: 26626 - DNA, 16 bp, synthetic construct
  misc_feature 1..16: note = synthetic [barcode part1]
  source 1..16: mol_type = other DNA
cacgcaacacctcgtt

SEQ ID NO: 26627 - DNA, 16 bp, synthetic construct
  misc_feature 1..16: note = synthetic [barcode part1]
  source 1..16: mol_type = other DNA
attctggtctcaggag

SEQ ID NO: 26628 - DNA, 16 bp, synthetic construct
  misc_feature 1..16: note = synthetic [barcode part1]
  source 1..16: mol_type = other DNA
caccgcctcgtataac

SEQ ID NO: 26629 - DNA, 16 bp, synthetic construct
  misc_feature 1..16: note = synthetic [barcode part1]
  source 1..16: mol_type = other DNA
ccaagttactaccgag

SEQ ID NO: 26630 - DNA, 16 bp, synthetic construct
  misc_feature 1..16: note = synthetic [barcode part1]
  source 1..16: mol_type = other DNA
tctaatctgcggccac

SEQ ID NO: 26631 - DNA, 16 bp, synthetic construct
  misc_feature 1..16: note = synthetic [barcode part1]
  source 1..16: mol_type = other DNA
aataggacgcaagttc

SEQ ID NO: 26632 - DNA, 16 bp, synthetic construct
  misc_feature 1..16: note = synthetic [barcode part1]
  source 1..16: mol_type = other DNA
tggtctccaatcgcac

SEQ ID NO: 26633 - DNA, 16 bp, synthetic construct
  misc_feature 1..16: note = synthetic [barcode part1]
  source 1..16: mol_type = other DNA
ttactctgcgtctaag

SEQ ID NO: 26634 - DNA, 16 bp, synthetic construct
  misc_feature 1..16: note = synthetic [barcode part1]
  source 1..16: mol_type = other DNA
gccttacacgattgcc

SEQ ID NO: 26635 - DNA, 16 bp, synthetic construct
  misc_feature 1..16: note = synthetic [barcode part1]
  source 1..16: mol_type = other DNA
cctaagtctactgttg

SEQ ID NO: 26636 - DNA, 16 bp, synthetic construct
  misc_feature 1..16: note = synthetic [barcode part1]
  source 1..16: mol_type = other DNA
gttggtaagtgcgttc

SEQ ID NO: 26637 - DNA, 16 bp, synthetic construct
  misc_feature 1..16: note = synthetic [barcode part1]
  source 1..16: mol_type = other DNA
ttgatcgccggttaag

SEQ ID NO: 26638 - DNA, 16 bp, synthetic construct
  misc_feature 1..16: note = synthetic [barcode part1]
  source 1..16: mol_type = other DNA
ttgaagaacgtagtcg

SEQ ID NO: 26639 - DNA, 16 bp, synthetic construct
  misc_feature 1..16: note = synthetic [barcode part1]
  source 1..16: mol_type = other DNA
tggattaccggcaact

SEQ ID NO: 26640 - DNA, 16 bp, synthetic construct
  misc_feature 1..16: note = synthetic [barcode part1]
  source 1..16: mol_type = other DNA
attaacgagaccgagt

SEQ ID NO: 26641 - DNA, 16 bp, synthetic construct
  misc_feature 1..16: note = synthetic [barcode part1]
  source 1..16: mol_type = other DNA
aatccgaacgcaaggc

SEQ ID NO: 26642 - DNA, 16 bp, synthetic construct
  misc_feature 1..16: note = synthetic [barcode part1]
  source 1..16: mol_type = other DNA
gcacgtagactgatct

SEQ ID NO: 26643 - DNA, 16 bp, synthetic construct
  misc_feature 1..16: note = synthetic [barcode part1]
  source 1..16: mol_type = other DNA
gcgtacctcactgttg

SEQ ID NO: 26644 - DNA, 16 bp, synthetic construct
  misc_feature 1..16: note = synthetic [barcode part1]
  source 1..16: mol_type = other DNA
cacttgcgttctaggc

SEQ ID NO: 26645 - DNA, 16 bp, synthetic construct
  misc_feature 1..16: note = synthetic [barcode part1]
  source 1..16: mol_type = other DNA
gtctgttccgtctact

SEQ ID NO: 26646 - DNA, 16 bp, synthetic construct
  misc_feature 1..16: note = synthetic [barcode part1]
  source 1..16: mol_type = other DNA
cacgtcgttgaaggag

SEQ ID NO: 26647 - DNA, 16 bp, synthetic construct
  misc_feature 1..16: note = synthetic [barcode part1]
  source 1..16: mol_type = other DNA
cgcggtgtattacagt

SEQ ID NO: 26648 - DNA, 16 bp, synthetic construct
  misc_feature 1..16: note = synthetic [barcode part1]
  source 1..16: mol_type = other DNA
atcgcgagttccaagt

SEQ ID NO: 26649 - DNA, 16 bp, synthetic construct
  misc_feature 1..16: note = synthetic [barcode part1]
  source 1..16: mol_type = other DNA
acaatccggcaatctg

SEQ ID NO: 26650 - DNA, 16 bp, synthetic construct
  misc_feature 1..16: note = synthetic [barcode part1]
  source 1..16: mol_type = other DNA
tccagttctggaaggt

SEQ ID NO: 26651 - DNA, 16 bp, synthetic construct
  misc_feature 1..16: note = synthetic [barcode part1]
  source 1..16: mol_type = other DNA
gcaactatcaacttcc

SEQ ID NO: 26652 - DNA, 16 bp, synthetic construct
  misc_feature 1..16: note = synthetic [barcode part1]
  source 1..16: mol_type = other DNA
cggattgcaatctggt

SEQ ID NO: 26653 - DNA, 16 bp, synthetic construct
  misc_feature 1..16: note = synthetic [barcode part1]
  source 1..16: mol_type = other DNA
taggtacgtacagtcc

SEQ ID NO: 26654 - DNA, 16 bp, synthetic construct
  misc_feature 1..16: note = synthetic [barcode part1]
  source 1..16: mol_type = other DNA
cacgtcctgttagatt

SEQ ID NO: 26655 - DNA, 16 bp, synthetic construct
  misc_feature 1..16: note = synthetic [barcode part1]
  source 1..16: mol_type = other DNA
agacctacaggtctac

SEQ ID NO: 26656 - DNA, 16 bp, synthetic construct
  misc_feature 1..16: note = synthetic [barcode part1]
  source 1..16: mol_type = other DNA
ccgttctcgcgaattg

SEQ ID NO: 26657 - DNA, 16 bp, synthetic construct
  misc_feature 1..16: note = synthetic [barcode part1]
  source 1..16: mol_type = other DNA
cgacctcgtgttgact

SEQ ID NO: 26658 - DNA, 16 bp, synthetic construct
  misc_feature 1..16: note = synthetic [barcode part1]
  source 1..16: mol_type = other DNA
cgtatccgttcgacac

SEQ ID NO: 26659 - DNA, 16 bp, synthetic construct
  misc_feature 1..16: note = synthetic [barcode part1]
  source 1..16: mol_type = other DNA
tgtggatcctgagtac

SEQ ID NO: 26660 - DNA, 16 bp, synthetic construct
  misc_feature 1..16: note = synthetic [barcode part1]
  source 1..16: mol_type = other DNA
gacgagaccaggtatc

SEQ ID NO: 26661 - DNA, 16 bp, synthetic construct
  misc_feature 1..16: note = synthetic [barcode part1]
  source 1..16: mol_type = other DNA
tcagaactgagacctc

SEQ ID NO: 26662 - DNA, 16 bp, synthetic construct
  misc_feature 1..16: note = synthetic [barcode part1]
  source 1..16: mol_type = other DNA
ccgaacctggtaattg

SEQ ID NO: 26663 - DNA, 16 bp, synthetic construct
  misc_feature 1..16: note = synthetic [barcode part1]
  source 1..16: mol_type = other DNA
ttaggaaggtcgcgtg

SEQ ID NO: 26664 - DNA, 16 bp, synthetic construct
  misc_feature 1..16: note = synthetic [barcode part1]
  source 1..16: mol_type = other DNA
tcggtctaagttaggc

SEQ ID NO: 26665 - DNA, 16 bp, synthetic construct
  misc_feature 1..16: note = synthetic [barcode part1]
  source 1..16: mol_type = other DNA
gtcgaaccgtcttcgt

SEQ ID NO: 26666 - DNA, 16 bp, synthetic construct
  misc_feature 1..16: note = synthetic [barcode part1]
  source 1..16: mol_type = other DNA
tacgacaacgacactc

SEQ ID NO: 26667 - DNA, 16 bp, synthetic construct
  misc_feature 1..16: note = synthetic [barcode part1]
  source 1..16: mol_type = other DNA
cctcttccgactgatt

SEQ ID NO: 26668 - DNA, 16 bp, synthetic construct
  misc_feature 1..16: note = synthetic [barcode part1]
  source 1..16: mol_type = other DNA
gaccagtcagtcagtt

SEQ ID NO: 26669 - DNA, 16 bp, synthetic construct
  misc_feature 1..16: note = synthetic [barcode part1]
  source 1..16: mol_type = other DNA
ttactaatcctcgcag

SEQ ID NO: 26670 - DNA, 16 bp, synthetic construct
  misc_feature 1..16: note = synthetic [barcode part1]
  source 1..16: mol_type = other DNA
ttctacgttggcaact

SEQ ID NO: 26671 - DNA, 16 bp, synthetic construct
  misc_feature 1..16: note = synthetic [barcode part1]
  source 1..16: mol_type = other DNA
gtcgtggcctattcac

SEQ ID NO: 26672 - DNA, 16 bp, synthetic construct
  misc_feature 1..16: note = synthetic [barcode part1]
  source 1..16: mol_type = other DNA
taggatccagtcagtc

SEQ ID NO: 26673 - DNA, 16 bp, synthetic construct
  misc_feature 1..16: note = synthetic [barcode part1]
  source 1..16: mol_type = other DNA
gtcacaataagtggac

SEQ ID NO: 26674 - DNA, 16 bp, synthetic construct
  misc_feature 1..16: note = synthetic [barcode part1]
  source 1..16: mol_type = other DNA
cgaattcttacctcag

SEQ ID NO: 26675 - DNA, 16 bp, synthetic construct
  misc_feature 1..16: note = synthetic [barcode part1]
  source 1..16: mol_type = other DNA
aattgtacgtgcgacc

SEQ ID NO: 26676 - DNA, 16 bp, synthetic construct
  misc_feature 1..16: note = synthetic [barcode part1]
  source 1..16: mol_type = other DNA
aataggtgaacaggcg

SEQ ID NO: 26677 - DNA, 16 bp, synthetic construct
  misc_feature 1..16: note = synthetic [barcode part1]
  source 1..16: mol_type = other DNA
acgtgttcacctcgtg

SEQ ID NO: 26678 - DNA, 16 bp, synthetic construct
  misc_feature 1..16: note = synthetic [barcode part1]
  source 1..16: mol_type = other DNA
ttctcgcagacgtaag

SEQ ID NO: 26679 - DNA, 16 bp, synthetic construct
  misc_feature 1..16: note = synthetic [barcode part1]
  source 1..16: mol_type = other DNA
gaagttccggacagac

SEQ ID NO: 26680 - DNA, 16 bp, synthetic construct
  misc_feature 1..16: note = synthetic [barcode part1]
  source 1..16: mol_type = other DNA
acgtactaggtgtctg

SEQ ID NO: 26681 - DNA, 16 bp, synthetic construct
  misc_feature 1..16: note = synthetic [barcode part1]
  source 1..16: mol_type = other DNA
tcgttagtgtatcctg

SEQ ID NO: 26682 - DNA, 16 bp, synthetic construct
  misc_feature 1..16: note = synthetic [barcode part1]
  source 1..16: mol_type = other DNA
taacaagtgccacctg

SEQ ID NO: 26683 - DNA, 16 bp, synthetic construct
  misc_feature 1..16: note = synthetic [barcode part1]
  source 1..16: mol_type = other DNA
tgtgagtccaccttgc

SEQ ID NO: 26684 - DNA, 16 bp, synthetic construct
  misc_feature 1..16: note = synthetic [barcode part1]
  source 1..16: mol_type = other DNA
gccttcagtgagaatc

SEQ ID NO: 26685 - DNA, 16 bp, synthetic construct
  misc_feature 1..16: note = synthetic [barcode part1]
  source 1..16: mol_type = other DNA
gacagtctcgacaact

SEQ ID NO: 26686 - DNA, 16 bp, synthetic construct
  misc_feature 1..16: note = synthetic [barcode part1]
  source 1..16: mol_type = other DNA
tgtgcggagactagac

SEQ ID NO: 26687 - DNA, 16 bp, synthetic construct
  misc_feature 1..16: note = synthetic [barcode part1]
  source 1..16: mol_type = other DNA
aacagtatccactgcg

SEQ ID NO: 26688 - DNA, 16 bp, synthetic construct
  misc_feature 1..16: note = synthetic [barcode part1]
  source 1..16: mol_type = other DNA
gcgttaggttatcctt

SEQ ID NO: 26689 - DNA, 16 bp, synthetic construct
  misc_feature 1..16: note = synthetic [barcode part1]
  source 1..16: mol_type = other DNA
acacgatccaagaggc

SEQ ID NO: 26690 - DNA, 16 bp, synthetic construct
  misc_feature 1..16: note = synthetic [barcode part1]
  source 1..16: mol_type = other DNA
aagaccgacgcaatcg

SEQ ID NO: 26691 - DNA, 16 bp, synthetic construct
  misc_feature 1..16: note = synthetic [barcode part1]
  source 1..16: mol_type = other DNA
caagactccaagactc

SEQ ID NO: 26692 - DNA, 16 bp, synthetic construct
  misc_feature 1..16: note = synthetic [barcode part1]
  source 1..16: mol_type = other DNA
tgcgacaggataagtt

SEQ ID NO: 26693 - DNA, 16 bp, synthetic construct
  misc_feature 1..16: note = synthetic [barcode part1]
  source 1..16: mol_type = other DNA
tattcggtccttagtg

SEQ ID NO: 26694 - DNA, 16 bp, synthetic construct
  misc_feature 1..16: note = synthetic [barcode part1]
  source 1..16: mol_type = other DNA
actgcggcaagtagac

SEQ ID NO: 26695 - DNA, 16 bp, synthetic construct
  misc_feature 1..16: note = synthetic [barcode part1]
  source 1..16: mol_type = other DNA
tgtgactctgagtacg

SEQ ID NO: 26696 - DNA, 16 bp, synthetic construct
  misc_feature 1..16: note = synthetic [barcode part1]
  source 1..16: mol_type = other DNA
gaagaaggcgtatacg

SEQ ID NO: 26697 - DNA, 16 bp, synthetic construct
  misc_feature 1..16: note = synthetic [barcode part1]
  source 1..16: mol_type = other DNA
cgattgaggaatctcc

SEQ ID NO: 26698 - DNA, 16 bp, synthetic construct
  misc_feature 1..16: note = synthetic [barcode part1]
  source 1..16: mol_type = other DNA
gttatatcgcgccaag

SEQ ID NO: 26699 - DNA, 16 bp, synthetic construct
  misc_feature 1..16: note = synthetic [barcode part1]
  source 1..16: mol_type = other DNA
gcacttactgcctcag

SEQ ID NO: 26700 - DNA, 16 bp, synthetic construct
  misc_feature 1..16: note = synthetic [barcode part1]
  source 1..16: mol_type = other DNA
agtcgttcaggttgtg

SEQ ID NO: 26701 - DNA, 16 bp, synthetic construct
  misc_feature 1..16: note = synthetic [barcode part1]
  source 1..16: mol_type = other DNA
cacgattacgcagttg

SEQ ID NO: 26702 - DNA, 16 bp, synthetic construct
  misc_feature 1..16: note = synthetic [barcode part1]
  source 1..16: mol_type = other DNA
gagttgccttgacagt

SEQ ID NO: 26703 - DNA, 16 bp, synthetic construct
  misc_feature 1..16: note = synthetic [barcode part1]
  source 1..16: mol_type = other DNA
aaggttctgtcgtgac

SEQ ID NO: 26704 - DNA, 16 bp, synthetic construct
  misc_feature 1..16: note = synthetic [barcode part1]
  source 1..16: mol_type = other DNA
tcttaaccttcgtcgc

SEQ ID NO: 26705 - DNA, 16 bp, synthetic construct
  misc_feature 1..16: note = synthetic [barcode part1]
  source 1..16: mol_type = other DNA
actggattatcctcac

SEQ ID NO: 26706 - DNA, 16 bp, synthetic construct
  misc_feature 1..16: note = synthetic [barcode part1]
  source 1..16: mol_type = other DNA
tctgttatcctcgacc

SEQ ID NO: 26707 - DNA, 16 bp, synthetic construct
  misc_feature 1..16: note = synthetic [barcode part1]
  source 1..16: mol_type = other DNA
taatagtaaggtgcgc

SEQ ID NO: 26708 - DNA, 16 bp, synthetic construct
  misc_feature 1..16: note = synthetic [barcode part1]
  source 1..16: mol_type = other DNA
gtagttcaacacgaag

SEQ ID NO: 26709 - DNA, 16 bp, synthetic construct
  misc_feature 1..16: note = synthetic [barcode part1]
  source 1..16: mol_type = other DNA
aggtaatcgtatcgag

SEQ ID NO: 26710 - DNA, 16 bp, synthetic construct
  misc_feature 1..16: note = synthetic [barcode part1]
  source 1..16: mol_type = other DNA
tggttaccacctcacg

SEQ ID NO: 26711 - DNA, 16 bp, synthetic construct
  misc_feature 1..16: note = synthetic [barcode part1]
  source 1..16: mol_type = other DNA
tagaacaactcaggtg

SEQ ID NO: 26712 - DNA, 16 bp, synthetic construct
  misc_feature 1..16: note = synthetic [barcode part1]
  source 1..16: mol_type = other DNA
agaggattaggttcgt

SEQ ID NO: 26713 - DNA, 16 bp, synthetic construct
  misc_feature 1..16: note = synthetic [barcode part1]
  source 1..16: mol_type = other DNA
atcagaacggcacacg

SEQ ID NO: 26714 - DNA, 16 bp, synthetic construct
  misc_feature 1..16: note = synthetic [barcode part1]
  source 1..16: mol_type = other DNA
gaacagatactcgcct

SEQ ID NO: 26715 - DNA, 16 bp, synthetic construct
  misc_feature 1..16: note = synthetic [barcode part1]
  source 1..16: mol_type = other DNA
ccgttcgtccaagact

SEQ ID NO: 26716 - DNA, 16 bp, synthetic construct
  misc_feature 1..16: note = synthetic [barcode part1]
  source 1..16: mol_type = other DNA
actcctccgattgcag

SEQ ID NO: 26717 - DNA, 16 bp, synthetic construct
  misc_feature 1..16: note = synthetic [barcode part1]
  source 1..16: mol_type = other DNA
gtgaccagtgtgttgt

SEQ ID NO: 26718 - DNA, 16 bp, synthetic construct
  misc_feature 1..16: note = synthetic [barcode part1]
  source 1..16: mol_type = other DNA
gtactgaggttgtgtc

SEQ ID NO: 26719 - DNA, 16 bp, synthetic construct
  misc_feature 1..16: note = synthetic [barcode part1]
  source 1..16: mol_type = other DNA
taagtgtcagtctcct

SEQ ID NO: 26720 - DNA, 16 bp, synthetic construct
  misc_feature 1..16: note = synthetic [barcode part1]
  source 1..16: mol_type = other DNA
ccttcacactcaatag

SEQ ID NO: 26721 - DNA, 16 bp, synthetic construct
  misc_feature 1..16: note = synthetic [barcode part1]
  source 1..16: mol_type = other DNA
tacctacctcaaggtt

SEQ ID NO: 26722 - DNA, 16 bp, synthetic construct
  misc_feature 1..16: note = synthetic [barcode part1]
  source 1..16: mol_type = other DNA
ttaggtcgagaacgcg

SEQ ID NO: 26723 - DNA, 16 bp, synthetic construct
  misc_feature 1..16: note = synthetic [barcode part1]
  source 1..16: mol_type = other DNA
gttgtgaataagtggc

SEQ ID NO: 26724 - DNA, 16 bp, synthetic construct
  misc_feature 1..16: note = synthetic [barcode part1]
  source 1..16: mol_type = other DNA
taccttgatccgcggt

SEQ ID NO: 26725 - DNA, 16 bp, synthetic construct
  misc_feature 1..16: note = synthetic [barcode part1]
  source 1..16: mol_type = other DNA
aattcggaccgttgac

SEQ ID NO: 26726 - DNA, 16 bp, synthetic construct
  misc_feature 1..16: note = synthetic [barcode part1]
  source 1..16: mol_type = other DNA
gtgtggaagacgtaag

SEQ ID NO: 26727 - DNA, 16 bp, synthetic construct
  misc_feature 1..16: note = synthetic [barcode part1]
  source 1..16: mol_type = other DNA
tccgtctgtctacttg

SEQ ID NO: 26728 - DNA, 16 bp, synthetic construct
  misc_feature 1..16: note = synthetic [barcode part1]
  source 1..16: mol_type = other DNA
tcgcgtcaacgtaagt

SEQ ID NO: 26729 - DNA, 16 bp, synthetic construct
  misc_feature 1..16: note = synthetic [barcode part1]
  source 1..16: mol_type = other DNA
gagttcagtgagacgc

SEQ ID NO: 26730 - DNA, 16 bp, synthetic construct
  misc_feature 1..16: note = synthetic [barcode part1]
  source 1..16: mol_type = other DNA
cctgatctgcaatcgc

SEQ ID NO: 26731 - DNA, 16 bp, synthetic construct
  misc_feature 1..16: note = synthetic [barcode part1]
  source 1..16: mol_type = other DNA
tagtcgtgttcagacg

SEQ ID NO: 26732 - DNA, 16 bp, synthetic construct
  misc_feature 1..16: note = synthetic [barcode part1]
  source 1..16: mol_type = other DNA
aggatctggtatcacc

SEQ ID NO: 26733 - DNA, 16 bp, synthetic construct
  misc_feature 1..16: note = synthetic [barcode part1]
  source 1..16: mol_type = other DNA
tgcgttactctgattg

SEQ ID NO: 26734 - DNA, 16 bp, synthetic construct
  misc_feature 1..16: note = synthetic [barcode part1]
  source 1..16: mol_type = other DNA
gataggagtcgtcctt

SEQ ID NO: 26735 - DNA, 16 bp, synthetic construct
  misc_feature 1..16: note = synthetic [barcode part1]
  source 1..16: mol_type = other DNA
cctctgttaaggacag

SEQ ID NO: 26736 - DNA, 16 bp, synthetic construct
  misc_feature 1..16: note = synthetic [barcode part1]
  source 1..16: mol_type = other DNA
gattcgttgtcgcctg

SEQ ID NO: 26737 - DNA, 16 bp, synthetic construct
  misc_feature 1..16: note = synthetic [barcode part1]
  source 1..16: mol_type = other DNA
acgatcgtgtggttgt

SEQ ID NO: 26738 - DNA, 16 bp, synthetic construct
  misc_feature 1..16: note = synthetic [barcode part1]
  source 1..16: mol_type = other DNA
tgagtctcaggacgag

SEQ ID NO: 26739 - DNA, 16 bp, synthetic construct
  misc_feature 1..16: note = synthetic [barcode part1]
  source 1..16: mol_type = other DNA
acggttggactgaggt

SEQ ID NO: 26740 - DNA, 16 bp, synthetic construct
  misc_feature 1..16: note = synthetic [barcode part1]
  source 1..16: mol_type = other DNA
aggaagtcactggcgt

SEQ ID NO: 26741 - DNA, 16 bp, synthetic construct
  misc_feature 1..16: note = synthetic [barcode part1]
  source 1..16: mol_type = other DNA
gcgtaaggttcggtag

SEQ ID NO: 26742 - DNA, 16 bp, synthetic construct
  misc_feature 1..16: note = synthetic [barcode part1]
  source 1..16: mol_type = other DNA
tcgtggactcgacctt

SEQ ID NO: 26743 - DNA, 16 bp, synthetic construct
  misc_feature 1..16: note = synthetic [barcode part1]
  source 1..16: mol_type = other DNA
cgttccttgatctaag

SEQ ID NO: 26744 - DNA, 16 bp, synthetic construct
  misc_feature 1..16: note = synthetic [barcode part1]
  source 1..16: mol_type = other DNA
attataggttcgcctc

SEQ ID NO: 26745 - DNA, 16 bp, synthetic construct
  misc_feature 1..16: note = synthetic [barcode part1]
  source 1..16: mol_type = other DNA
acaactctcacacttg

SEQ ID NO: 26746 - DNA, 16 bp, synthetic construct
  misc_feature 1..16: note = synthetic [barcode part1]
  source 1..16: mol_type = other DNA
acgatacggaatcctc

SEQ ID NO: 26747 - DNA, 16 bp, synthetic construct
  misc_feature 1..16: note = synthetic [barcode part1]
  source 1..16: mol_type = other DNA
tagtcggttagtcggt

SEQ ID NO: 26748 - DNA, 16 bp, synthetic construct
  misc_feature 1..16: note = synthetic [barcode part1]
  source 1..16: mol_type = other DNA
aggaaccaccacacag

SEQ ID NO: 26749 - DNA, 16 bp, synthetic construct
  misc_feature 1..16: note = synthetic [barcode part1]
  source 1..16: mol_type = other DNA
caggacaaggtgttcg

SEQ ID NO: 26750 - DNA, 16 bp, synthetic construct
  misc_feature 1..16: note = synthetic [barcode part1]
  source 1..16: mol_type = other DNA
tgtctcactacagact

SEQ ID NO: 26751 - DNA, 16 bp, synthetic construct
  misc_feature 1..16: note = synthetic [barcode part1]
  source 1..16: mol_type = other DNA
gtcgacactattgtct

SEQ ID NO: 26752 - DNA, 16 bp, synthetic construct
  misc_feature 1..16: note = synthetic [barcode part1]
  source 1..16: mol_type = other DNA
acgagtcgacttgtgt

SEQ ID NO: 26753 - DNA, 16 bp, synthetic construct
  misc_feature 1..16: note = synthetic [barcode part1]
  source 1..16: mol_type = other DNA
gagttaaggaggatcg

SEQ ID NO: 26754 - DNA, 16 bp, synthetic construct
  misc_feature 1..16: note = synthetic [barcode part1]
  source 1..16: mol_type = other DNA
acgagtctgtgagtct

SEQ ID NO: 26755 - DNA, 16 bp, synthetic construct
  misc_feature 1..16: note = synthetic [barcode part1]
  source 1..16: mol_type = other DNA
accttccaaggtcaag

SEQ ID NO: 26756 - DNA, 16 bp, synthetic construct
  misc_feature 1..16: note = synthetic [barcode part1]
  source 1..16: mol_type = other DNA
acaggcacttgaggtg

SEQ ID NO: 26757 - DNA, 16 bp, synthetic construct
  misc_feature 1..16: note = synthetic [barcode part1]
  source 1..16: mol_type = other DNA
ccaacctgatacgtcc

SEQ ID NO: 26758 - DNA, 16 bp, synthetic construct
  misc_feature 1..16: note = synthetic [barcode part1]
  source 1..16: mol_type = other DNA
cagtcaacgactaacc

SEQ ID NO: 26759 - DNA, 16 bp, synthetic construct
  misc_feature 1..16: note = synthetic [barcode part1]
  source 1..16: mol_type = other DNA
ttaaccgtctcttccg

SEQ ID NO: 26760 - DNA, 16 bp, synthetic construct
  misc_feature 1..16: note = synthetic [barcode part1]
  source 1..16: mol_type = other DNA
agtaactccgacggtt

SEQ ID NO: 26761 - DNA, 16 bp, synthetic construct
  misc_feature 1..16: note = synthetic [barcode part1]
  source 1..16: mol_type = other DNA
gcagtcagtcaacgtt

SEQ ID NO: 26762 - DNA, 16 bp, synthetic construct
  misc_feature 1..16: note = synthetic [barcode part1]
  source 1..16: mol_type = other DNA
gtcaccttaccacttc

SEQ ID NO: 26763 - DNA, 16 bp, synthetic construct
  misc_feature 1..16: note = synthetic [barcode part1]
  source 1..16: mol_type = other DNA
cctcgttgcagattcg

SEQ ID NO: 26764 - DNA, 16 bp, synthetic construct
  misc_feature 1..16: note = synthetic [barcode part1]
  source 1..16: mol_type = other DNA
aacaacaacctgtgag

SEQ ID NO: 26765 - DNA, 16 bp, synthetic construct
  misc_feature 1..16: note = synthetic [barcode part1]
  source 1..16: mol_type = other DNA
agtggtgatccgcaag

SEQ ID NO: 26766 - DNA, 16 bp, synthetic construct
  misc_feature 1..16: note = synthetic [barcode part1]
  source 1..16: mol_type = other DNA
tgttccaagtatccgt

SEQ ID NO: 26767 - DNA, 16 bp, synthetic construct
  misc_feature 1..16: note = synthetic [barcode part1]
  source 1..16: mol_type = other DNA
ataggcgcaaggtctg

SEQ ID NO: 26768 - DNA, 16 bp, synthetic construct
  misc_feature 1..16: note = synthetic [barcode part1]
  source 1..16: mol_type = other DNA
tgtccgtggtattgcc

SEQ ID NO: 26769 - DNA, 16 bp, synthetic construct
  misc_feature 1..16: note = synthetic [barcode part1]
  source 1..16: mol_type = other DNA
cgttacctccaatctc

SEQ ID NO: 26770 - DNA, 16 bp, synthetic construct
  misc_feature 1..16: note = synthetic [barcode part1]
  source 1..16: mol_type = other DNA
gattcgaggagacacc

SEQ ID NO: 26771 - DNA, 16 bp, synthetic construct
  misc_feature 1..16: note = synthetic [barcode part1]
  source 1..16: mol_type = other DNA
tcttcctcggtactac

SEQ ID NO: 26772 - DNA, 16 bp, synthetic construct
  misc_feature 1..16: note = synthetic [barcode part1]
  source 1..16: mol_type = other DNA
tatcggtattggtgcg

SEQ ID NO: 26773 - DNA, 16 bp, synthetic construct
  misc_feature 1..16: note = synthetic [barcode part1]
  source 1..16: mol_type = other DNA
tgtcgaacacctctgc

SEQ ID NO: 26774 - DNA, 16 bp, synthetic construct
  misc_feature 1..16: note = synthetic [barcode part1]
  source 1..16: mol_type = other DNA
cgcctgtgtcttaggt

SEQ ID NO: 26775 - DNA, 16 bp, synthetic construct
  misc_feature 1..16: note = synthetic [barcode part1]
  source 1..16: mol_type = other DNA
tcgtgattgtagtgcg

SEQ ID NO: 26776 - DNA, 16 bp, synthetic construct
  misc_feature 1..16: note = synthetic [barcode part1]
  source 1..16: mol_type = other DNA
acgcaactgactacgt

SEQ ID NO: 26777 - DNA, 16 bp, synthetic construct
  misc_feature 1..16: note = synthetic [barcode part1]
  source 1..16: mol_type = other DNA
acggtatcacggtatc

SEQ ID NO: 26778 - DNA, 16 bp, synthetic construct
  misc_feature 1..16: note = synthetic [barcode part1]
  source 1..16: mol_type = other DNA
ttgtaagaggccaagt

SEQ ID NO: 26779 - DNA, 16 bp, synthetic construct
  misc_feature 1..16: note = synthetic [barcode part1]
  source 1..16: mol_type = other DNA
aacacctctactgccg

SEQ ID NO: 26780 - DNA, 16 bp, synthetic construct
  misc_feature 1..16: note = synthetic [barcode part1]
  source 1..16: mol_type = other DNA
ttgagataggcagact

SEQ ID NO: 26781 - DNA, 16 bp, synthetic construct
  misc_feature 1..16: note = synthetic [barcode part1]
  source 1..16: mol_type = other DNA
gccgtagtatctgtcc

SEQ ID NO: 26782 - DNA, 16 bp, synthetic construct
  misc_feature 1..16: note = synthetic [barcode part1]
  source 1..16: mol_type = other DNA
cgcggacgataagact

SEQ ID NO: 26783 - DNA, 16 bp, synthetic construct
  misc_feature 1..16: note = synthetic [barcode part1]
  source 1..16: mol_type = other DNA
tcttatcgagtccgcg

SEQ ID NO: 26784 - DNA, 16 bp, synthetic construct
  misc_feature 1..16: note = synthetic [barcode part1]
  source 1..16: mol_type = other DNA
caacagtcgtaagaac

SEQ ID NO: 26785 - DNA, 16 bp, synthetic construct
  misc_feature 1..16: note = synthetic [barcode part1]
  source 1..16: mol_type = other DNA
acggtattggcactac

SEQ ID NO: 26786 - DNA, 16 bp, synthetic construct
  misc_feature 1..16: note = synthetic [barcode part1]
  source 1..16: mol_type = other DNA
tctagacgaaccggag

SEQ ID NO: 26787 - DNA, 16 bp, synthetic construct
  misc_feature 1..16: note = synthetic [barcode part1]
  source 1..16: mol_type = other DNA
tcgtgagttcaatcct

SEQ ID NO: 26788 - DNA, 16 bp, synthetic construct
  misc_feature 1..16: note = synthetic [barcode part1]
  source 1..16: mol_type = other DNA
ccggaactgagtagac

SEQ ID NO: 26789 - DNA, 16 bp, synthetic construct
  misc_feature 1..16: note = synthetic [barcode part1]
  source 1..16: mol_type = other DNA
tagtcttatcgtgcac

SEQ ID NO: 26790 - DNA, 16 bp, synthetic construct
  misc_feature 1..16: note = synthetic [barcode part1]
  source 1..16: mol_type = other DNA
acgtagttgtacggtc

SEQ ID NO: 26791 - DNA, 16 bp, synthetic construct
  misc_feature 1..16: note = synthetic [barcode part1]
  source 1..16: mol_type = other DNA
acttcaccggaaggtt

SEQ ID NO: 26792 - DNA, 16 bp, synthetic construct
  misc_feature 1..16: note = synthetic [barcode part1]
  source 1..16: mol_type = other DNA
caaggttaaccttggc

SEQ ID NO: 26793 - DNA, 16 bp, synthetic construct
  misc_feature 1..16: note = synthetic [barcode part1]
  source 1..16: mol_type = other DNA
agttccaacaagtgag

SEQ ID NO: 26794 - DNA, 16 bp, synthetic construct
  misc_feature 1..16: note = synthetic [barcode part1]
  source 1..16: mol_type = other DNA
gaacggtgtgcaatcg

SEQ ID NO: 26795 - DNA, 16 bp, synthetic construct
  misc_feature 1..16: note = synthetic [barcode part1]
  source 1..16: mol_type = other DNA
ttgcgaacaccaacac

SEQ ID NO: 26796 - DNA, 16 bp, synthetic construct
  misc_feature 1..16: note = synthetic [barcode part1]
  source 1..16: mol_type = other DNA
tacgttggactctccg

SEQ ID NO: 26797 - DNA, 16 bp, synthetic construct
  misc_feature 1..16: note = synthetic [barcode part1]
  source 1..16: mol_type = other DNA
aacgttctctggtccg

SEQ ID NO: 26798 - DNA, 16 bp, synthetic construct
  misc_feature 1..16: note = synthetic [barcode part1]
  source 1..16: mol_type = other DNA
cgccaagagtgtagac

SEQ ID NO: 26799 - DNA, 16 bp, synthetic construct
  misc_feature 1..16: note = synthetic [barcode part1]
  source 1..16: mol_type = other DNA
atagagttgaggcgag

SEQ ID NO: 26800 - DNA, 16 bp, synthetic construct
  misc_feature 1..16: note = synthetic [barcode part1]
  source 1..16: mol_type = other DNA
gagaggcagatattct

SEQ ID NO: 26801 - DNA, 16 bp, synthetic construct
  misc_feature 1..16: note = synthetic [barcode part1]
  source 1..16: mol_type = other DNA
gtccagacagagtggt

SEQ ID NO: 26802 - DNA, 16 bp, synthetic construct
  misc_feature 1..16: note = synthetic [barcode part1]
  source 1..16: mol_type = other DNA
agtggttcagtgatcc

SEQ ID NO: 26803 - DNA, 16 bp, synthetic construct
  misc_feature 1..16: note = synthetic [barcode part1]
  source 1..16: mol_type = other DNA
tgttgcctggacctac

SEQ ID NO: 26804 - DNA, 16 bp, synthetic construct
  misc_feature 1..16: note = synthetic [barcode part1]
  source 1..16: mol_type = other DNA
caatctctgcgattgt

SEQ ID NO: 26805 - DNA, 16 bp, synthetic construct
  misc_feature 1..16: note = synthetic [barcode part1]
  source 1..16: mol_type = other DNA
ttggtcagtgttgcag

SEQ ID NO: 26806 - DNA, 16 bp, synthetic construct
  misc_feature 1..16: note = synthetic [barcode part1]
  source 1..16: mol_type = other DNA
gccttactatcctacc

SEQ ID NO: 26807 - DNA, 16 bp, synthetic construct
  misc_feature 1..16: note = synthetic [barcode part1]
  source 1..16: mol_type = other DNA
gacgagtgtgacactg

SEQ ID NO: 26808 - DNA, 16 bp, synthetic construct
  misc_feature 1..16: note = synthetic [barcode part1]
  source 1..16: mol_type = other DNA
ttaccgaccgatagtg

SEQ ID NO: 26809 - DNA, 16 bp, synthetic construct
  misc_feature 1..16: note = synthetic [barcode part1]
  source 1..16: mol_type = other DNA
ttgacgagacagtctc

SEQ ID NO: 26810 - DNA, 16 bp, synthetic construct
  misc_feature 1..16: note = synthetic [barcode part1]
  source 1..16: mol_type = other DNA
atctcgttctgtgagt

SEQ ID NO: 26811 - DNA, 16 bp, synthetic construct
  misc_feature 1..16: note = synthetic [barcode part1]
  source 1..16: mol_type = other DNA
cacaagttctgttacc

SEQ ID NO: 26812 - DNA, 16 bp, synthetic construct
  misc_feature 1..16: note = synthetic [barcode part1]
  source 1..16: mol_type = other DNA
gtacctcttggtgacc

SEQ ID NO: 26813 - DNA, 16 bp, synthetic construct
  misc_feature 1..16: note = synthetic [barcode part1]
  source 1..16: mol_type = other DNA
gtgaactgagataacc

SEQ ID NO: 26814 - DNA, 16 bp, synthetic construct
  misc_feature 1..16: note = synthetic [barcode part1]
  source 1..16: mol_type = other DNA
caacgattcgacgatc

SEQ ID NO: 26815 - DNA, 16 bp, synthetic construct
  misc_feature 1..16: note = synthetic [barcode part1]
  source 1..16: mol_type = other DNA
gactatcggtaactcg

SEQ ID NO: 26816 - DNA, 16 bp, synthetic construct
  misc_feature 1..16: note = synthetic [barcode part1]
  source 1..16: mol_type = other DNA
agtcgagacaaccgtg

SEQ ID NO: 26817 - DNA, 16 bp, synthetic construct
  misc_feature 1..16: note = synthetic [barcode part1]
  source 1..16: mol_type = other DNA
ccgatattgtgcagtg

SEQ ID NO: 26818 - DNA, 16 bp, synthetic construct
  misc_feature 1..16: note = synthetic [barcode part1]
  source 1..16: mol_type = other DNA
ttggtacgtcacacag

SEQ ID NO: 26819 - DNA, 16 bp, synthetic construct
  misc_feature 1..16: note = synthetic [barcode part1]
  source 1..16: mol_type = other DNA
tgtcgttgcagaacgt

SEQ ID NO: 26820 - DNA, 16 bp, synthetic construct
  misc_feature 1..16: note = synthetic [barcode part1]
  source 1..16: mol_type = other DNA
ataacttctcgcactg

SEQ ID NO: 26821 - DNA, 16 bp, synthetic construct
  misc_feature 1..16: note = synthetic [barcode part1]
  source 1..16: mol_type = other DNA
gttctgacgtagtgtg

SEQ ID NO: 26822 - DNA, 16 bp, synthetic construct
  misc_feature 1..16: note = synthetic [barcode part1]
  source 1..16: mol_type = other DNA
cacaataacaggcagt

SEQ ID NO: 26823 - DNA, 16 bp, synthetic construct
  misc_feature 1..16: note = synthetic [barcode part1]
  source 1..16: mol_type = other DNA
gtacctcttctgtgtc

SEQ ID NO: 26824 - DNA, 16 bp, synthetic construct
  misc_feature 1..16: note = synthetic [barcode part1]
  source 1..16: mol_type = other DNA
gcctgagataacaggc

SEQ ID NO: 26825 - DNA, 16 bp, synthetic construct
  misc_feature 1..16: note = synthetic [barcode part1]
  source 1..16: mol_type = other DNA
cgcaccaagtcagaag

SEQ ID NO: 26826 - DNA, 16 bp, synthetic construct
  misc_feature 1..16: note = synthetic [barcode part1]
  source 1..16: mol_type = other DNA
aggtccggtagagtac

SEQ ID NO: 26827 - DNA, 16 bp, synthetic construct
  misc_feature 1..16: note = synthetic [barcode part1]
  source 1..16: mol_type = other DNA
tacgtggatccgagtt

SEQ ID NO: 26828 - DNA, 16 bp, synthetic construct
  misc_feature 1..16: note = synthetic [barcode part1]
  source 1..16: mol_type = other DNA
tgtgtcaacactggtg

SEQ ID NO: 26829 - DNA, 16 bp, synthetic construct
  misc_feature 1..16: note = synthetic [barcode part1]
  source 1..16: mol_type = other DNA
gtctatcctgcggtgt

SEQ ID NO: 26830 - DNA, 16 bp, synthetic construct
  misc_feature 1..16: note = synthetic [barcode part1]
  source 1..16: mol_type = other DNA
taacaccgtaggtaag

SEQ ID NO: 26831 - DNA, 16 bp, synthetic construct
  misc_feature 1..16: note = synthetic [barcode part1]
  source 1..16: mol_type = other DNA
gcactagaagacgatt

SEQ ID NO: 26832 - DNA, 16 bp, synthetic construct
  misc_feature 1..16: note = synthetic [barcode part1]
  source 1..16: mol_type = other DNA
attgtcttccaccacc

SEQ ID NO: 26833 - DNA, 16 bp, synthetic construct
  misc_feature 1..16: note = synthetic [barcode part1]
  source 1..16: mol_type = other DNA
cacacttcgaaggtgt

SEQ ID NO: 26834 - DNA, 16 bp, synthetic construct
  misc_feature 1..16: note = synthetic [barcode part1]
  source 1..16: mol_type = other DNA
caggttgagtccaact

SEQ ID NO: 26835 - DNA, 16 bp, synthetic construct
  misc_feature 1..16: note = synthetic [barcode part1]
  source 1..16: mol_type = other DNA
ataaggagaaggcgtc

SEQ ID NO: 26836 - DNA, 16 bp, synthetic construct
  misc_feature 1..16: note = synthetic [barcode part1]
  source 1..16: mol_type = other DNA
acgtagtcttcaactc

SEQ ID NO: 26837 - DNA, 16 bp, synthetic construct
  misc_feature 1..16: note = synthetic [barcode part1]
  source 1..16: mol_type = other DNA
cgtggcagtaagtgac

SEQ ID NO: 26838 - DNA, 16 bp, synthetic construct
  misc_feature 1..16: note = synthetic [barcode part1]
  source 1..16: mol_type = other DNA
tacgatccagtctccg

SEQ ID NO: 26839 - DNA, 16 bp, synthetic construct
  misc_feature 1..16: note = synthetic [barcode part1]
  source 1..16: mol_type = other DNA
ttgcagtctaggactg

SEQ ID NO: 26840 - DNA, 16 bp, synthetic construct
  misc_feature 1..16: note = synthetic [barcode part1]
  source 1..16: mol_type = other DNA
gcaattcggatacaag

SEQ ID NO: 26841 - DNA, 16 bp, synthetic construct
  misc_feature 1..16: note = synthetic [barcode part1]
  source 1..16: mol_type = other DNA
tatccttcgcaccttg

SEQ ID NO: 26842 - DNA, 16 bp, synthetic construct
  misc_feature 1..16: note = synthetic [barcode part1]
  source 1..16: mol_type = other DNA
actatagacggcacct

SEQ ID NO: 26843 - DNA, 16 bp, synthetic construct
  misc_feature 1..16: note = synthetic [barcode part1]
  source 1..16: mol_type = other DNA
tagtcttactgcgcgc

SEQ ID NO: 26844 - DNA, 16 bp, synthetic construct
  misc_feature 1..16: note = synthetic [barcode part1]
  source 1..16: mol_type = other DNA
ccacactcctatactc

SEQ ID NO: 26845 - DNA, 16 bp, synthetic construct
  misc_feature 1..16: note = synthetic [barcode part1]
  source 1..16: mol_type = other DNA
caggttagtatcttcc

SEQ ID NO: 26846 - DNA, 16 bp, synthetic construct
  misc_feature 1..16: note = synthetic [barcode part1]
  source 1..16: mol_type = other DNA
tgaccgaggtcaatct

SEQ ID NO: 26847 - DNA, 16 bp, synthetic construct
  misc_feature 1..16: note = synthetic [barcode part1]
  source 1..16: mol_type = other DNA
cgtataccggtatcag

SEQ ID NO: 26848 - DNA, 16 bp, synthetic construct
  misc_feature 1..16: note = synthetic [barcode part1]
  source 1..16: mol_type = other DNA
ttgtacgcgatcacag

SEQ ID NO: 26849 - DNA, 16 bp, synthetic construct
  misc_feature 1..16: note = synthetic [barcode part1]
  source 1..16: mol_type = other DNA
gcagtaggtaggatag

SEQ ID NO: 26850 - DNA, 16 bp, synthetic construct
  misc_feature 1..16: note = synthetic [barcode part1]
  source 1..16: mol_type = other DNA
cacaatctaacttccg

SEQ ID NO: 26851 - DNA, 16 bp, synthetic construct
  misc_feature 1..16: note = synthetic [barcode part1]
  source 1..16: mol_type = other DNA
ccagaattgtctatcc

SEQ ID NO: 26852 - DNA, 16 bp, synthetic construct
  misc_feature 1..16: note = synthetic [barcode part1]
  source 1..16: mol_type = other DNA
acgtcgattctgccgt

SEQ ID NO: 26853 - DNA, 16 bp, synthetic construct
  misc_feature 1..16: note = synthetic [barcode part1]
  source 1..16: mol_type = other DNA
ttaatctggcgcgcct

SEQ ID NO: 26854 - DNA, 16 bp, synthetic construct
  misc_feature 1..16: note = synthetic [barcode part1]
  source 1..16: mol_type = other DNA
gcagtatcgacactac

SEQ ID NO: 26855 - DNA, 16 bp, synthetic construct
  misc_feature 1..16: note = synthetic [barcode part1]
  source 1..16: mol_type = other DNA
gtctctgcaggaatac

SEQ ID NO: 26856 - DNA, 16 bp, synthetic construct
  misc_feature 1..16: note = synthetic [barcode part1]
  source 1..16: mol_type = other DNA
ttgtgtgagtcaagag

SEQ ID NO: 26857 - DNA, 16 bp, synthetic construct
  misc_feature 1..16: note = synthetic [barcode part1]
  source 1..16: mol_type = other DNA
atcaagtacctggcgt

SEQ ID NO: 26858 - DNA, 16 bp, synthetic construct
  misc_feature 1..16: note = synthetic [barcode part1]
  source 1..16: mol_type = other DNA
aaccggtgattggtct

SEQ ID NO: 26859 - DNA, 16 bp, synthetic construct
  misc_feature 1..16: note = synthetic [barcode part1]
  source 1..16: mol_type = other DNA
attagtacgagagacc

SEQ ID NO: 26860 - DNA, 16 bp, synthetic construct
  misc_feature 1..16: note = synthetic [barcode part1]
  source 1..16: mol_type = other DNA
gactaggcgaacctag

SEQ ID NO: 26861 - DNA, 16 bp, synthetic construct
  misc_feature 1..16: note = synthetic [barcode part1]
  source 1..16: mol_type = other DNA
aaccgtacctcgactc

SEQ ID NO: 26862 - DNA, 16 bp, synthetic construct
  misc_feature 1..16: note = synthetic [barcode part1]
  source 1..16: mol_type = other DNA
gcagaaggaagtgtac

SEQ ID NO: 26863 - DNA, 16 bp, synthetic construct
  misc_feature 1..16: note = synthetic [barcode part1]
  source 1..16: mol_type = other DNA
acactgtcctatctag

SEQ ID NO: 26864 - DNA, 16 bp, synthetic construct
  misc_feature 1..16: note = synthetic [barcode part1]
  source 1..16: mol_type = other DNA
agtcggcgtcaattac

SEQ ID NO: 26865 - DNA, 16 bp, synthetic construct
  misc_feature 1..16: note = synthetic [barcode part1]
  source 1..16: mol_type = other DNA
cggattagactcagtc

SEQ ID NO: 26866 - DNA, 16 bp, synthetic construct
  misc_feature 1..16: note = synthetic [barcode part1]
  source 1..16: mol_type = other DNA
agtcagttgtgacacc

SEQ ID NO: 26867 - DNA, 16 bp, synthetic construct
  misc_feature 1..16: note = synthetic [barcode part1]
  source 1..16: mol_type = other DNA
acgttgattgacgtgc

SEQ ID NO: 26868 - DNA, 16 bp, synthetic construct
  misc_feature 1..16: note = synthetic [barcode part1]
  source 1..16: mol_type = other DNA
attgtgcctctgttag

SEQ ID NO: 26869 - DNA, 16 bp, synthetic construct
  misc_feature 1..16: note = synthetic [barcode part1]
  source 1..16: mol_type = other DNA
ttattatccgcggatc

SEQ ID NO: 26870 - DNA, 16 bp, synthetic construct
  misc_feature 1..16: note = synthetic [barcode part1]
  source 1..16: mol_type = other DNA
tggactgtacgcctct

SEQ ID NO: 26871 - DNA, 16 bp, synthetic construct
  misc_feature 1..16: note = synthetic [barcode part1]
  source 1..16: mol_type = other DNA
ccaagttcttccgcag

SEQ ID NO: 26872 - DNA, 16 bp, synthetic construct
  misc_feature 1..16: note = synthetic [barcode part1]
  source 1..16: mol_type = other DNA
tcacagattgttgtcc

SEQ ID NO: 26873 - DNA, 16 bp, synthetic construct
  misc_feature 1..16: note = synthetic [barcode part1]
  source 1..16: mol_type = other DNA
atacctccaacttggt

SEQ ID NO: 26874 - DNA, 16 bp, synthetic construct
  misc_feature 1..16: note = synthetic [barcode part1]
  source 1..16: mol_type = other DNA
tacgacgtccaggatt

SEQ ID NO: 26875 - DNA, 16 bp, synthetic construct
  misc_feature 1..16: note = synthetic [barcode part1]
  source 1..16: mol_type = other DNA
tgaagtacggagaacg

SEQ ID NO: 26876 - DNA, 16 bp, synthetic construct
  misc_feature 1..16: note = synthetic [barcode part1]
  source 1..16: mol_type = other DNA
ccaagacacgacactt

SEQ ID NO: 26877 - DNA, 16 bp, synthetic construct
  misc_feature 1..16: note = synthetic [barcode part1]
  source 1..16: mol_type = other DNA
tattcggtctcgccag

SEQ ID NO: 26878 - DNA, 16 bp, synthetic construct
  misc_feature 1..16: note = synthetic [barcode part1]
  source 1..16: mol_type = other DNA
atcctgcggtacgttc

SEQ ID NO: 26879 - DNA, 16 bp, synthetic construct
  misc_feature 1..16: note = synthetic [barcode part1]
  source 1..16: mol_type = other DNA
gtagtcttctggcaag

SEQ ID NO: 26880 - DNA, 16 bp, synthetic construct
  misc_feature 1..16: note = synthetic [barcode part1]
  source 1..16: mol_type = other DNA
tagaccagtcagactc

SEQ ID NO: 26881 - DNA, 16 bp, synthetic construct
  misc_feature 1..16: note = synthetic [barcode part1]
  source 1..16: mol_type = other DNA
gtagtgtactgcgatc

SEQ ID NO: 26882 - DNA, 16 bp, synthetic construct
  misc_feature 1..16: note = synthetic [barcode part1]
  source 1..16: mol_type = other DNA
acacactcggattcag

SEQ ID NO: 26883 - DNA, 16 bp, synthetic construct
  misc_feature 1..16: note = synthetic [barcode part1]
  source 1..16: mol_type = other DNA
tctaacgccacactcg

SEQ ID NO: 26884 - DNA, 16 bp, synthetic construct
  misc_feature 1..16: note = synthetic [barcode part1]
  source 1..16: mol_type = other DNA
tctgtactgacggcct

SEQ ID NO: 26885 - DNA, 16 bp, synthetic construct
  misc_feature 1..16: note = synthetic [barcode part1]
  source 1..16: mol_type = other DNA
ttgccgcactctactt

SEQ ID NO: 26886 - DNA, 16 bp, synthetic construct
  misc_feature 1..16: note = synthetic [barcode part1]
  source 1..16: mol_type = other DNA
gagactgaacctatag

SEQ ID NO: 26887 - DNA, 16 bp, synthetic construct
  misc_feature 1..16: note = synthetic [barcode part1]
  source 1..16: mol_type = other DNA
gccttgtgtccgaatc

SEQ ID NO: 26888 - DNA, 16 bp, synthetic construct
  misc_feature 1..16: note = synthetic [barcode part1]
  source 1..16: mol_type = other DNA
tcttggcgcacaatcc

SEQ ID NO: 26889 - DNA, 16 bp, synthetic construct
  misc_feature 1..16: note = synthetic [barcode part1]
  source 1..16: mol_type = other DNA
gcagtgcctaactaac

SEQ ID NO: 26890 - DNA, 16 bp, synthetic construct
  misc_feature 1..16: note = synthetic [barcode part1]
  source 1..16: mol_type = other DNA
cggaagtaagttgccg

SEQ ID NO: 26891 - DNA, 16 bp, synthetic construct
  misc_feature 1..16: note = synthetic [barcode part1]
  source 1..16: mol_type = other DNA
gtccttcttagttccg

SEQ ID NO: 26892 - DNA, 16 bp, synthetic construct
  misc_feature 1..16: note = synthetic [barcode part1]
  source 1..16: mol_type = other DNA
tgaattgcggttcggt

SEQ ID NO: 26893 - DNA, 16 bp, synthetic construct
  misc_feature 1..16: note = synthetic [barcode part1]
  source 1..16: mol_type = other DNA
tgttggttggtacgtg

SEQ ID NO: 26894 - DNA, 16 bp, synthetic construct
  misc_feature 1..16: note = synthetic [barcode part1]
  source 1..16: mol_type = other DNA
agtctcaccgcaatag

SEQ ID NO: 26895 - DNA, 16 bp, synthetic construct
  misc_feature 1..16: note = synthetic [barcode part1]
  source 1..16: mol_type = other DNA
gtcgttctcgttctac

SEQ ID NO: 26896 - DNA, 16 bp, synthetic construct
  misc_feature 1..16: note = synthetic [barcode part1]
  source 1..16: mol_type = other DNA
agacggttaactctcg

SEQ ID NO: 26897 - DNA, 16 bp, synthetic construct
  misc_feature 1..16: note = synthetic [barcode part1]
  source 1..16: mol_type = other DNA
aggccacctatactcc

SEQ ID NO: 26898 - DNA, 16 bp, synthetic construct
  misc_feature 1..16: note = synthetic [barcode part1]
  source 1..16: mol_type = other DNA
taagagtctcgacaag

SEQ ID NO: 26899 - DNA, 16 bp, synthetic construct
  misc_feature 1..16: note = synthetic [barcode part1]
  source 1..16: mol_type = other DNA
acggccactaactctc

SEQ ID NO: 26900 - DNA, 16 bp, synthetic construct
  misc_feature 1..16: note = synthetic [barcode part1]
  source 1..16: mol_type = other DNA
agacactctacgaacc

SEQ ID NO: 26901 - DNA, 16 bp, synthetic construct
  misc_feature 1..16: note = synthetic [barcode part1]
  source 1..16: mol_type = other DNA
tccaccggagataact

SEQ ID NO: 26902 - DNA, 16 bp, synthetic construct
  misc_feature 1..16: note = synthetic [barcode part1]
  source 1..16: mol_type = other DNA
atcactcttgcaggtt

SEQ ID NO: 26903 - DNA, 16 bp, synthetic construct
  misc_feature 1..16: note = synthetic [barcode part1]
  source 1..16: mol_type = other DNA
gccagacacttagtac

SEQ ID NO: 26904 - DNA, 16 bp, synthetic construct
  misc_feature 1..16: note = synthetic [barcode part1]
  source 1..16: mol_type = other DNA
caggcacttaggtatc

SEQ ID NO: 26905 - DNA, 16 bp, synthetic construct
  misc_feature 1..16: note = synthetic [barcode part1]
  source 1..16: mol_type = other DNA
actctcgagtggttcc

SEQ ID NO: 26906 - DNA, 16 bp, synthetic construct
  misc_feature 1..16: note = synthetic [barcode part1]
  source 1..16: mol_type = other DNA
atcgagtccgttagac

SEQ ID NO: 26907 - DNA, 16 bp, synthetic construct
  misc_feature 1..16: note = synthetic [barcode part1]
  source 1..16: mol_type = other DNA
gactgtgacgttggtt

SEQ ID NO: 26908 - DNA, 16 bp, synthetic construct
  misc_feature 1..16: note = synthetic [barcode part1]
  source 1..16: mol_type = other DNA
caacctactcacgtcg

SEQ ID NO: 26909 - DNA, 16 bp, synthetic construct
  misc_feature 1..16: note = synthetic [barcode part1]
  source 1..16: mol_type = other DNA
ccaacagatctctgtt

SEQ ID NO: 26910 - DNA, 16 bp, synthetic construct
  misc_feature 1..16: note = synthetic [barcode part1]
  source 1..16: mol_type = other DNA
ttctgttcaccactcg

SEQ ID NO: 26911 - DNA, 16 bp, synthetic construct
  misc_feature 1..16: note = synthetic [barcode part1]
  source 1..16: mol_type = other DNA
cacctattactgtggt

SEQ ID NO: 26912 - DNA, 16 bp, synthetic construct
  misc_feature 1..16: note = synthetic [barcode part1]
  source 1..16: mol_type = other DNA
aacgcacagttcttct

SEQ ID NO: 26913 - DNA, 16 bp, synthetic construct
  misc_feature 1..16: note = synthetic [barcode part1]
  source 1..16: mol_type = other DNA
gacgccaattgatcac

SEQ ID NO: 26914 - DNA, 16 bp, synthetic construct
  misc_feature 1..16: note = synthetic [barcode part1]
  source 1..16: mol_type = other DNA
cacaccttaccaggtc

SEQ ID NO: 26915 - DNA, 16 bp, synthetic construct
  misc_feature 1..16: note = synthetic [barcode part1]
  source 1..16: mol_type = other DNA
actggttctgagatcg

SEQ ID NO: 26916 - DNA, 16 bp, synthetic construct
  misc_feature 1..16: note = synthetic [barcode part1]
  source 1..16: mol_type = other DNA
gtaagattcacagacg

SEQ ID NO: 26917 - DNA, 16 bp, synthetic construct
  misc_feature 1..16: note = synthetic [barcode part1]
  source 1..16: mol_type = other DNA
tccaacctggttacgc

SEQ ID NO: 26918 - DNA, 16 bp, synthetic construct
  misc_feature 1..16: note = synthetic [barcode part1]
  source 1..16: mol_type = other DNA
acgttactccgaagtg

SEQ ID NO: 26919 - DNA, 16 bp, synthetic construct
  misc_feature 1..16: note = synthetic [barcode part1]
  source 1..16: mol_type = other DNA
aacgccacggttaact

SEQ ID NO: 26920 - DNA, 16 bp, synthetic construct
  misc_feature 1..16: note = synthetic [barcode part1]
  source 1..16: mol_type = other DNA
gttgtgtgtgtgactg

SEQ ID NO: 26921 - DNA, 16 bp, synthetic construct
  misc_feature 1..16: note = synthetic [barcode part1]
  source 1..16: mol_type = other DNA
aaccactggacacgag

SEQ ID NO: 26922 - DNA, 16 bp, synthetic construct
  misc_feature 1..16: note = synthetic [barcode part1]
  source 1..16: mol_type = other DNA
acacaacaaccagaac

SEQ ID NO: 26923 - DNA, 16 bp, synthetic construct
  misc_feature 1..16: note = synthetic [barcode part1]
  source 1..16: mol_type = other DNA
gtgatacgtcgcaatc

SEQ ID NO: 26924 - DNA, 16 bp, synthetic construct
  misc_feature 1..16: note = synthetic [barcode part1]
  source 1..16: mol_type = other DNA
acttaggtaggacaac

SEQ ID NO: 26925 - DNA, 16 bp, synthetic construct
  misc_feature 1..16: note = synthetic [barcode part1]
  source 1..16: mol_type = other DNA
cgtactcgataatctc

SEQ ID NO: 26926 - DNA, 16 bp, synthetic construct
  misc_feature 1..16: note = synthetic [barcode part1]
  source 1..16: mol_type = other DNA
aaccttgtaccgcaag

SEQ ID NO: 26927 - DNA, 16 bp, synthetic construct
  misc_feature 1..16: note = synthetic [barcode part1]
  source 1..16: mol_type = other DNA
attggactacctctac

SEQ ID NO: 26928 - DNA, 16 bp, synthetic construct
  misc_feature 1..16: note = synthetic [barcode part1]
  source 1..16: mol_type = other DNA
cgaatcggttgaacct

SEQ ID NO: 26929 - DNA, 16 bp, synthetic construct
  misc_feature 1..16: note = synthetic [barcode part1]
  source 1..16: mol_type = other DNA
gttcaaggcctacaac

SEQ ID NO: 26930 - DNA, 16 bp, synthetic construct
  misc_feature 1..16: note = synthetic [barcode part1]
  source 1..16: mol_type = other DNA
cactcaagattcgcag

SEQ ID NO: 26931 - DNA, 16 bp, synthetic construct
  misc_feature 1..16: note = synthetic [barcode part1]
  source 1..16: mol_type = other DNA
tcaacctgtcttccgt

SEQ ID NO: 26932 - DNA, 16 bp, synthetic construct
  misc_feature 1..16: note = synthetic [barcode part1]
  source 1..16: mol_type = other DNA
attcggttcggtaacg

SEQ ID NO: 26933 - DNA, 16 bp, synthetic construct
  misc_feature 1..16: note = synthetic [barcode part1]
  source 1..16: mol_type = other DNA
cgaagacttacgttcg

SEQ ID NO: 26934 - DNA, 16 bp, synthetic construct
  misc_feature 1..16: note = synthetic [barcode part1]
  source 1..16: mol_type = other DNA
attgttcgcgaattcc

SEQ ID NO: 26935 - DNA, 16 bp, synthetic construct
  misc_feature 1..16: note = synthetic [barcode part1]
  source 1..16: mol_type = other DNA
gacctgatcgacgatt

SEQ ID NO: 26936 - DNA, 16 bp, synthetic construct
  misc_feature 1..16: note = synthetic [barcode part1]
  source 1..16: mol_type = other DNA
acggttaattggcacc

SEQ ID NO: 26937 - DNA, 16 bp, synthetic construct
  misc_feature 1..16: note = synthetic [barcode part1]
  source 1..16: mol_type = other DNA
tcgtacaaccgtacag

SEQ ID NO: 26938 - DNA, 16 bp, synthetic construct
  misc_feature 1..16: note = synthetic [barcode part1]
  source 1..16: mol_type = other DNA
acctaccttatagtgc

SEQ ID NO: 26939 - DNA, 16 bp, synthetic construct
  misc_feature 1..16: note = synthetic [barcode part1]
  source 1..16: mol_type = other DNA
gatcgcctaagttgtg

SEQ ID NO: 26940 - DNA, 16 bp, synthetic construct
  misc_feature 1..16: note = synthetic [barcode part1]
  source 1..16: mol_type = other DNA
gatctacgacggaacg

SEQ ID NO: 26941 - DNA, 16 bp, synthetic construct
  misc_feature 1..16: note = synthetic [barcode part1]
  source 1..16: mol_type = other DNA
gtgtatctgagaagtg

SEQ ID NO: 26942 - DNA, 16 bp, synthetic construct
  misc_feature 1..16: note = synthetic [barcode part1]
  source 1..16: mol_type = other DNA
gatcttcgcacctggt

SEQ ID NO: 26943 - DNA, 16 bp, synthetic construct
  misc_feature 1..16: note = synthetic [barcode part1]
  source 1..16: mol_type = other DNA
aacctaggactactgc

SEQ ID NO: 26944 - DNA, 16 bp, synthetic construct
  misc_feature 1..16: note = synthetic [barcode part1]
  source 1..16: mol_type = other DNA
tactatcgtagtcacc

SEQ ID NO: 26945 - DNA, 16 bp, synthetic construct
  misc_feature 1..16: note = synthetic [barcode part1]
  source 1..16: mol_type = other DNA
ttccttcgtcgatcac

SEQ ID NO: 26946 - DNA, 16 bp, synthetic construct
  misc_feature 1..16: note = synthetic [barcode part1]
  source 1..16: mol_type = other DNA
tctataccggtagttc

SEQ ID NO: 26947 - DNA, 16 bp, synthetic construct
  misc_feature 1..16: note = synthetic [barcode part1]
  source 1..16: mol_type = other DNA
tacaagtggcaagact

SEQ ID NO: 26948 - DNA, 16 bp, synthetic construct
  misc_feature 1..16: note = synthetic [barcode part1]
  source 1..16: mol_type = other DNA
cgccttatccggatac

SEQ ID NO: 26949 - DNA, 16 bp, synthetic construct
  misc_feature 1..16: note = synthetic [barcode part1]
  source 1..16: mol_type = other DNA
ttgcagaacttaggcc

SEQ ID NO: 26950 - DNA, 16 bp, synthetic construct
  misc_feature 1..16: note = synthetic [barcode part1]
  source 1..16: mol_type = other DNA
tcgagttccagtagtg

SEQ ID NO: 26951 - DNA, 16 bp, synthetic construct
  misc_feature 1..16: note = synthetic [barcode part1]
  source 1..16: mol_type = other DNA
gtcgatagtggttacc

SEQ ID NO: 26952 - DNA, 16 bp, synthetic construct
  misc_feature 1..16: note = synthetic [barcode part1]
  source 1..16: mol_type = other DNA
actcggatctgttact

SEQ ID NO: 26953 - DNA, 16 bp, synthetic construct
  misc_feature 1..16: note = synthetic [barcode part1]
  source 1..16: mol_type = other DNA
accacttctgcaagtt

SEQ ID NO: 26954 - DNA, 16 bp, synthetic construct
  misc_feature 1..16: note = synthetic [barcode part1]
  source 1..16: mol_type = other DNA
cgtaacaacctcagac

SEQ ID NO: 26955 - DNA, 16 bp, synthetic construct
  misc_feature 1..16: note = synthetic [barcode part1]
  source 1..16: mol_type = other DNA
ataccaccttactcag

SEQ ID NO: 26956 - DNA, 16 bp, synthetic construct
  misc_feature 1..16: note = synthetic [barcode part1]
  source 1..16: mol_type = other DNA
cctctacctgttggag

SEQ ID NO: 26957 - DNA, 16 bp, synthetic construct
  misc_feature 1..16: note = synthetic [barcode part1]
  source 1..16: mol_type = other DNA
ataaccggtataccgc

SEQ ID NO: 26958 - DNA, 16 bp, synthetic construct
  misc_feature 1..16: note = synthetic [barcode part1]
  source 1..16: mol_type = other DNA
gtgaagaatcgtcagt

SEQ ID NO: 26959 - DNA, 16 bp, synthetic construct
  misc_feature 1..16: note = synthetic [barcode part1]
  source 1..16: mol_type = other DNA
cgacctgattcaacag

SEQ ID NO: 26960 - DNA, 16 bp, synthetic construct
  misc_feature 1..16: note = synthetic [barcode part1]
  source 1..16: mol_type = other DNA
agacaagtggaatcct

SEQ ID NO: 26961 - DNA, 16 bp, synthetic construct
  misc_feature 1..16: note = synthetic [barcode part1]
  source 1..16: mol_type = other DNA
gtgcagaagtggttcg

SEQ ID NO: 26962 - DNA, 16 bp, synthetic construct
  misc_feature 1..16: note = synthetic [barcode part1]
  source 1..16: mol_type = other DNA
tgtagacctatcctac

SEQ ID NO: 26963 - DNA, 16 bp, synthetic construct
  misc_feature 1..16: note = synthetic [barcode part1]
  source 1..16: mol_type = other DNA
cgtctacgcgaataac

SEQ ID NO: 26964 - DNA, 16 bp, synthetic construct
  misc_feature 1..16: note = synthetic [barcode part1]
  source 1..16: mol_type = other DNA
agaccagtccttcaag

SEQ ID NO: 26965 - DNA, 16 bp, synthetic construct
  misc_feature 1..16: note = synthetic [barcode part1]
  source 1..16: mol_type = other DNA
attacggttgcggtac

SEQ ID NO: 26966 - DNA, 16 bp, synthetic construct
  misc_feature 1..16: note = synthetic [barcode part1]
  source 1..16: mol_type = other DNA
cctagtaagatcaccg

SEQ ID NO: 26967 - DNA, 16 bp, synthetic construct
  misc_feature 1..16: note = synthetic [barcode part1]
  source 1..16: mol_type = other DNA
tatcgaatctacgcct

SEQ ID NO: 26968 - DNA, 16 bp, synthetic construct
  misc_feature 1..16: note = synthetic [barcode part1]
  source 1..16: mol_type = other DNA
tccacaacactgtccg

SEQ ID NO: 26969 - DNA, 16 bp, synthetic construct
  misc_feature 1..16: note = synthetic [barcode part1]
  source 1..16: mol_type = other DNA
gaatccgtggattcgt

SEQ ID NO: 26970 - DNA, 16 bp, synthetic construct
  misc_feature 1..16: note = synthetic [barcode part1]
  source 1..16: mol_type = other DNA
tgagagaatcacacgt

SEQ ID NO: 26971 - DNA, 16 bp, synthetic construct
  misc_feature 1..16: note = synthetic [barcode part1]
  source 1..16: mol_type = other DNA
gaactcgccaccactt

SEQ ID NO: 26972 - DNA, 16 bp, synthetic construct
  misc_feature 1..16: note = synthetic [barcode part1]
  source 1..16: mol_type = other DNA
tggttgagaagtctcc

SEQ ID NO: 26973 - DNA, 16 bp, synthetic construct
  misc_feature 1..16: note = synthetic [barcode part1]
  source 1..16: mol_type = other DNA
cgattgaccgagattc

SEQ ID NO: 26974 - DNA, 16 bp, synthetic construct
  misc_feature 1..16: note = synthetic [barcode part1]
  source 1..16: mol_type = other DNA
ttgtcgcagtgagatc

SEQ ID NO: 26975 - DNA, 16 bp, synthetic construct
  misc_feature 1..16: note = synthetic [barcode part1]
  source 1..16: mol_type = other DNA
taacttctgtacgacc

SEQ ID NO: 26976 - DNA, 16 bp, synthetic construct
  misc_feature 1..16: note = synthetic [barcode part1]
  source 1..16: mol_type = other DNA
tgagtctaccttgccg

SEQ ID NO: 26977 - DNA, 16 bp, synthetic construct
  misc_feature 1..16: note = synthetic [barcode part1]
  source 1..16: mol_type = other DNA
gatcgtgaacttcctt

SEQ ID NO: 26978 - DNA, 16 bp, synthetic construct
  misc_feature 1..16: note = synthetic [barcode part1]
  source 1..16: mol_type = other DNA
tctctccacacacgtt

SEQ ID NO: 26979 - DNA, 16 bp, synthetic construct
  misc_feature 1..16: note = synthetic [barcode part1]
  source 1..16: mol_type = other DNA
cgagttgtcgacgatt

SEQ ID NO: 26980 - DNA, 16 bp, synthetic construct
  misc_feature 1..16: note = synthetic [barcode part1]
  source 1..16: mol_type = other DNA
gaatctggcagttacc

SEQ ID NO: 26981 - DNA, 16 bp, synthetic construct
  misc_feature 1..16: note = synthetic [barcode part1]
  source 1..16: mol_type = other DNA
gataccacgatcaacc

SEQ ID NO: 26982 - DNA, 16 bp, synthetic construct
  misc_feature 1..16: note = synthetic [barcode part1]
  source 1..16: mol_type = other DNA
tcctagtgacctgcgt

SEQ ID NO: 26983 - DNA, 16 bp, synthetic construct
  misc_feature 1..16: note = synthetic [barcode part1]
  source 1..16: mol_type = other DNA
tccttatcgccagacg

SEQ ID NO: 26984 - DNA, 16 bp, synthetic construct
  misc_feature 1..16: note = synthetic [barcode part1]
  source 1..16: mol_type = other DNA
tatcggagttcctgcc

SEQ ID NO: 26985 - DNA, 16 bp, synthetic construct
  misc_feature 1..16: note = synthetic [barcode part1]
  source 1..16: mol_type = other DNA
gcgtacctagaagacg

SEQ ID NO: 26986 - DNA, 16 bp, synthetic construct
  misc_feature 1..16: note = synthetic [barcode part1]
  source 1..16: mol_type = other DNA
tcaaccactaggactg

SEQ ID NO: 26987 - DNA, 16 bp, synthetic construct
  misc_feature 1..16: note = synthetic [barcode part1]
  source 1..16: mol_type = other DNA
gcgaccaactgtatac

SEQ ID NO: 26988 - DNA, 16 bp, synthetic construct
  misc_feature 1..16: note = synthetic [barcode part1]
  source 1..16: mol_type = other DNA
tcacagtgttgcaacg

SEQ ID NO: 26989 - DNA, 16 bp, synthetic construct
  misc_feature 1..16: note = synthetic [barcode part1]
  source 1..16: mol_type = other DNA
caagaagaaggccagt

SEQ ID NO: 26990 - DNA, 16 bp, synthetic construct
  misc_feature 1..16: note = synthetic [barcode part1]
  source 1..16: mol_type = other DNA
ttcgccagagaatcac

SEQ ID NO: 26991 - DNA, 16 bp, synthetic construct
  misc_feature 1..16: note = synthetic [barcode part1]
  source 1..16: mol_type = other DNA
gtaccgaactacttct

SEQ ID NO: 26992 - DNA, 16 bp, synthetic construct
  misc_feature 1..16: note = synthetic [barcode part1]
  source 1..16: mol_type = other DNA
atcgacactcgtgaac

SEQ ID NO: 26993 - DNA, 16 bp, synthetic construct
  misc_feature 1..16: note = synthetic [barcode part1]
  source 1..16: mol_type = other DNA
cagtgcctactgtaag

SEQ ID NO: 26994 - DNA, 16 bp, synthetic construct
  misc_feature 1..16: note = synthetic [barcode part1]
  source 1..16: mol_type = other DNA
cagatcaagttgtcgc

SEQ ID NO: 26995 - DNA, 16 bp, synthetic construct
  misc_feature 1..16: note = synthetic [barcode part1]
  source 1..16: mol_type = other DNA
gaagtaatacctggac

SEQ ID NO: 26996 - DNA, 16 bp, synthetic construct
  misc_feature 1..16: note = synthetic [barcode part1]
  source 1..16: mol_type = other DNA
gttaggtcctggtaac

SEQ ID NO: 26997 - DNA, 16 bp, synthetic construct
  misc_feature 1..16: note = synthetic [barcode part1]
  source 1..16: mol_type = other DNA
actgaacacgatctgc

SEQ ID NO: 26998 - DNA, 16 bp, synthetic construct
  misc_feature 1..16: note = synthetic [barcode part1]
  source 1..16: mol_type = other DNA
aggaacactgttgagt

SEQ ID NO: 26999 - DNA, 16 bp, synthetic construct
  misc_feature 1..16: note = synthetic [barcode part1]
  source 1..16: mol_type = other DNA
actaatacgtcggcac

SEQ ID NO: 27000 - DNA, 16 bp, synthetic construct
  misc_feature 1..16: note = synthetic [barcode part1]
  source 1..16: mol_type = other DNA
aacgtctggtgtgttg

SEQ ID NO: 27001 - DNA, 16 bp, synthetic construct
  misc_feature 1..16: note = synthetic [barcode part1]
  source 1..16: mol_type = other DNA
ccacacttgaaggtac

SEQ ID NO: 27002 - DNA, 16 bp, synthetic construct
  misc_feature 1..16: note = synthetic [barcode part1]
  source 1..16: mol_type = other DNA
ttctactcgtctgaag

SEQ ID NO: 27003 - DNA, 16 bp, synthetic construct
  misc_feature 1..16: note = synthetic [barcode part1]
  source 1..16: mol_type = other DNA
gaacttggcagttgtc

SEQ ID NO: 27004 - DNA, 16 bp, synthetic construct
  misc_feature 1..16: note = synthetic [barcode part1]
  source 1..16: mol_type = other DNA
actacactgcaggttg

SEQ ID NO: 27005 - DNA, 16 bp, synthetic construct
  misc_feature 1..16: note = synthetic [barcode part1]
  source 1..16: mol_type = other DNA
agttgcacgtacgatc

SEQ ID NO: 27006 - DNA, 16 bp, synthetic construct
  misc_feature 1..16: note = synthetic [barcode part1]
  source 1..16: mol_type = other DNA
atctcgcgacaacaac

SEQ ID NO: 27007 - DNA, 16 bp, synthetic construct
  misc_feature 1..16: note = synthetic [barcode part1]
  source 1..16: mol_type = other DNA
gcgttaaccaagtacc

SEQ ID NO: 27008 - DNA, 16 bp, synthetic construct
  misc_feature 1..16: note = synthetic [barcode part1]
  source 1..16: mol_type = other DNA
gtggaactgaggtaag

SEQ ID NO: 27009 - DNA, 16 bp, synthetic construct
  misc_feature 1..16: note = synthetic [barcode part1]
  source 1..16: mol_type = other DNA
gtagagatcggcaatt

SEQ ID NO: 27010 - DNA, 16 bp, synthetic construct
  misc_feature 1..16: note = synthetic [barcode part1]
  source 1..16: mol_type = other DNA
gatcacgaccggtatt

SEQ ID NO: 27011 - DNA, 16 bp, synthetic construct
  misc_feature 1..16: note = synthetic [barcode part1]
  source 1..16: mol_type = other DNA
agtaaccgactcaacc

SEQ ID NO: 27012 - DNA, 16 bp, synthetic construct
  misc_feature 1..16: note = synthetic [barcode part1]
  source 1..16: mol_type = other DNA
actagactcgcgttcc

SEQ ID NO: 27013 - DNA, 16 bp, synthetic construct
  misc_feature 1..16: note = synthetic [barcode part1]
  source 1..16: mol_type = other DNA
gcaggtcaaggtgatc

SEQ ID NO: 27014 - DNA, 16 bp, synthetic construct
  misc_feature 1..16: note = synthetic [barcode part1]
  source 1..16: mol_type = other DNA
caagatcacgtcgtac

SEQ ID NO: 27015 - DNA, 16 bp, synthetic construct
  misc_feature 1..16: note = synthetic [barcode part1]
  source 1..16: mol_type = other DNA
ccggatcacacttctg

SEQ ID NO: 27016 - DNA, 16 bp, synthetic construct
  misc_feature 1..16: note = synthetic [barcode part1]
  source 1..16: mol_type = other DNA
gagagtccagttgcag

SEQ ID NO: 27017 - DNA, 16 bp, synthetic construct
  misc_feature 1..16: note = synthetic [barcode part1]
  source 1..16: mol_type = other DNA
gactgtactcttcaac

SEQ ID NO: 27018 - DNA, 16 bp, synthetic construct
  misc_feature 1..16: note = synthetic [barcode part1]
  source 1..16: mol_type = other DNA
gactaaccttcgagac

SEQ ID NO: 27019 - DNA, 16 bp, synthetic construct
  misc_feature 1..16: note = synthetic [barcode part1]
  source 1..16: mol_type = other DNA
aggagtgacagaagtc

SEQ ID NO: 27020 - DNA, 16 bp, synthetic construct
  misc_feature 1..16: note = synthetic [barcode part1]
  source 1..16: mol_type = other DNA
ccgacacagaagatcg

SEQ ID NO: 27021 - DNA, 16 bp, synthetic construct
  misc_feature 1..16: note = synthetic [barcode part1]
  source 1..16: mol_type = other DNA
acacgaggatacagag

SEQ ID NO: 27022 - DNA, 16 bp, synthetic construct
  misc_feature 1..16: note = synthetic [barcode part1]
  source 1..16: mol_type = other DNA
cagatctcctgtcgtg

SEQ ID NO: 27023 - DNA, 16 bp, synthetic construct
  misc_feature 1..16: note = synthetic [barcode part1]
  source 1..16: mol_type = other DNA
ttcggtctgtacgacc

SEQ ID NO: 27024 - DNA, 16 bp, synthetic construct
  misc_feature 1..16: note = synthetic [barcode part1]
  source 1..16: mol_type = other DNA
acaacactcttgaggc

SEQ ID NO: 27025 - DNA, 16 bp, synthetic construct
  misc_feature 1..16: note = synthetic [barcode part1]
  source 1..16: mol_type = other DNA
caggaagtacacaatc

SEQ ID NO: 27026 - DNA, 16 bp, synthetic construct
  misc_feature 1..16: note = synthetic [barcode part1]
  source 1..16: mol_type = other DNA
tcgtactgccttcgtt

SEQ ID NO: 27027 - DNA, 16 bp, synthetic construct
  misc_feature 1..16: note = synthetic [barcode part1]
  source 1..16: mol_type = other DNA
tagtgtccttggagtg

SEQ ID NO: 27028 - DNA, 16 bp, synthetic construct
  misc_feature 1..16: note = synthetic [barcode part1]
  source 1..16: mol_type = other DNA
tccaccgtagtgaagt

SEQ ID NO: 27029 - DNA, 16 bp, synthetic construct
  misc_feature 1..16: note = synthetic [barcode part1]
  source 1..16: mol_type = other DNA
tggtgcgattgtctcc

SEQ ID NO: 27030 - DNA, 16 bp, synthetic construct
  misc_feature 1..16: note = synthetic [barcode part1]
  source 1..16: mol_type = other DNA
ataccactgcctattg

SEQ ID NO: 27031 - DNA, 16 bp, synthetic construct
  misc_feature 1..16: note = synthetic [barcode part1]
  source 1..16: mol_type = other DNA
aaccgcgagaattggc

SEQ ID NO: 27032 - DNA, 16 bp, synthetic construct
  misc_feature 1..16: note = synthetic [barcode part1]
  source 1..16: mol_type = other DNA
ttgagtagacggagtt

SEQ ID NO: 27033 - DNA, 16 bp, synthetic construct
  misc_feature 1..16: note = synthetic [barcode part1]
  source 1..16: mol_type = other DNA
actggcacggaaggtt

SEQ ID NO: 27034 - DNA, 16 bp, synthetic construct
  misc_feature 1..16: note = synthetic [barcode part1]
  source 1..16: mol_type = other DNA
acctcacctcaatctc

SEQ ID NO: 27035 - DNA, 16 bp, synthetic construct
  misc_feature 1..16: note = synthetic [barcode part1]
  source 1..16: mol_type = other DNA
gtcggtagaacgtctt

SEQ ID NO: 27036 - DNA, 16 bp, synthetic construct
  misc_feature 1..16: note = synthetic [barcode part1]
  source 1..16: mol_type = other DNA
aaggagtaatacgcct

SEQ ID NO: 27037 - DNA, 16 bp, synthetic construct
  misc_feature 1..16: note = synthetic [barcode part1]
  source 1..16: mol_type = other DNA
gtagacttggtcctcc

SEQ ID NO: 27038 - DNA, 16 bp, synthetic construct
  misc_feature 1..16: note = synthetic [barcode part1]
  source 1..16: mol_type = other DNA
agagagactggaactg

SEQ ID NO: 27039 - DNA, 16 bp, synthetic construct
  misc_feature 1..16: note = synthetic [barcode part1]
  source 1..16: mol_type = other DNA
tatacaaggcacgtcc

SEQ ID NO: 27040 - DNA, 16 bp, synthetic construct
  misc_feature 1..16: note = synthetic [barcode part1]
  source 1..16: mol_type = other DNA
gtcgtctcctattgtc

SEQ ID NO: 27041 - DNA, 16 bp, synthetic construct
  misc_feature 1..16: note = synthetic [barcode part1]
  source 1..16: mol_type = other DNA
aggacacgttgaattg

SEQ ID NO: 27042 - DNA, 16 bp, synthetic construct
  misc_feature 1..16: note = synthetic [barcode part1]
  source 1..16: mol_type = other DNA
cgttagagtctccacc

SEQ ID NO: 27043 - DNA, 16 bp, synthetic construct
  misc_feature 1..16: note = synthetic [barcode part1]
  source 1..16: mol_type = other DNA
atctctagagtcactc

SEQ ID NO: 27044 - DNA, 16 bp, synthetic construct
  misc_feature 1..16: note = synthetic [barcode part1]
  source 1..16: mol_type = other DNA
gtcgataacctgaacc

SEQ ID NO: 27045 - DNA, 16 bp, synthetic construct
  misc_feature 1..16: note = synthetic [barcode part1]
  source 1..16: mol_type = other DNA
tgaccgagagaagagt

SEQ ID NO: 27046 - DNA, 16 bp, synthetic construct
  misc_feature 1..16: note = synthetic [barcode part1]
  source 1..16: mol_type = other DNA
tgactgtctaccgtcg

SEQ ID NO: 27047 - DNA, 16 bp, synthetic construct
  misc_feature 1..16: note = synthetic [barcode part1]
  source 1..16: mol_type = other DNA
tatacggacctcctgc

SEQ ID NO: 27048 - DNA, 16 bp, synthetic construct
  misc_feature 1..16: note = synthetic [barcode part1]
  source 1..16: mol_type = other DNA
gacacgtagaatcagt

SEQ ID NO: 27049 - DNA, 16 bp, synthetic construct
  misc_feature 1..16: note = synthetic [barcode part1]
  source 1..16: mol_type = other DNA
taaggcgttcaactcg

SEQ ID NO: 27050 - DNA, 16 bp, synthetic construct
  misc_feature 1..16: note = synthetic [barcode part1]
  source 1..16: mol_type = other DNA
cgtagtaagtaagtgc

SEQ ID NO: 27051 - DNA, 16 bp, synthetic construct
  misc_feature 1..16: note = synthetic [barcode part1]
  source 1..16: mol_type = other DNA
gtgttctgtgtggagt

SEQ ID NO: 27052 - DNA, 16 bp, synthetic construct
  misc_feature 1..16: note = synthetic [barcode part1]
  source 1..16: mol_type = other DNA
accagagttgattccg

SEQ ID NO: 27053 - DNA, 16 bp, synthetic construct
  misc_feature 1..16: note = synthetic [barcode part1]
  source 1..16: mol_type = other DNA
tgcaccggaagaactg

SEQ ID NO: 27054 - DNA, 16 bp, synthetic construct
  misc_feature 1..16: note = synthetic [barcode part1]
  source 1..16: mol_type = other DNA
aggaagtctcagtcct

SEQ ID NO: 27055 - DNA, 16 bp, synthetic construct
  misc_feature 1..16: note = synthetic [barcode part1]
  source 1..16: mol_type = other DNA
tagaacctacgtgtgc

SEQ ID NO: 27056 - DNA, 16 bp, synthetic construct
  misc_feature 1..16: note = synthetic [barcode part1]
  source 1..16: mol_type = other DNA
atcggcacactaacgt

SEQ ID NO: 27057 - DNA, 16 bp, synthetic construct
  misc_feature 1..16: note = synthetic [barcode part1]
  source 1..16: mol_type = other DNA
ttactgcgccttacct

SEQ ID NO: 27058 - DNA, 16 bp, synthetic construct
  misc_feature 1..16: note = synthetic [barcode part1]
  source 1..16: mol_type = other DNA
ttaccgttaggcactt

SEQ ID NO: 27059 - DNA, 16 bp, synthetic construct
  misc_feature 1..16: note = synthetic [barcode part1]
  source 1..16: mol_type = other DNA
aagagtgcgtctctgt

SEQ ID NO: 27060 - DNA, 16 bp, synthetic construct
  misc_feature 1..16: note = synthetic [barcode part1]
  source 1..16: mol_type = other DNA
gacagtggtccacaag

SEQ ID NO: 27061 - DNA, 16 bp, synthetic construct
  misc_feature 1..16: note = synthetic [barcode part1]
  source 1..16: mol_type = other DNA
tcttcgccagattgcg

SEQ ID NO: 27062 - DNA, 16 bp, synthetic construct
  misc_feature 1..16: note = synthetic [barcode part1]
  source 1..16: mol_type = other DNA
aggaaccgtgtcagtg

SEQ ID NO: 27063 - DNA, 16 bp, synthetic construct
  misc_feature 1..16: note = synthetic [barcode part1]
  source 1..16: mol_type = other DNA
tggaggaggaagattc

SEQ ID NO: 27064 - DNA, 16 bp, synthetic construct
  misc_feature 1..16: note = synthetic [barcode part1]
  source 1..16: mol_type = other DNA
ttaggaacacgagttg

SEQ ID NO: 27065 - DNA, 16 bp, synthetic construct
  misc_feature 1..16: note = synthetic [barcode part1]
  source 1..16: mol_type = other DNA
tcgaagttgtctatcc

SEQ ID NO: 27066 - DNA, 16 bp, synthetic construct
  misc_feature 1..16: note = synthetic [barcode part1]
  source 1..16: mol_type = other DNA
ttagtggacaagagtc

SEQ ID NO: 27067 - DNA, 16 bp, synthetic construct
  misc_feature 1..16: note = synthetic [barcode part1]
  source 1..16: mol_type = other DNA
aggactccttgtccgt

SEQ ID NO: 27068 - DNA, 16 bp, synthetic construct
  misc_feature 1..16: note = synthetic [barcode part1]
  source 1..16: mol_type = other DNA
gcaatcttggaggcag

SEQ ID NO: 27069 - DNA, 16 bp, synthetic construct
  misc_feature 1..16: note = synthetic [barcode part1]
  source 1..16: mol_type = other DNA
taccaacacactggtg

SEQ ID NO: 27070 - DNA, 16 bp, synthetic construct
  misc_feature 1..16: note = synthetic [barcode part1]
  source 1..16: mol_type = other DNA
tacttcttgacggccg

SEQ ID NO: 27071 - DNA, 16 bp, synthetic construct
  misc_feature 1..16: note = synthetic [barcode part1]
  source 1..16: mol_type = other DNA
cacaacaagtactgcc

SEQ ID NO: 27072 - DNA, 16 bp, synthetic construct
  misc_feature 1..16: note = synthetic [barcode part1]
  source 1..16: mol_type = other DNA
aacacgttgaccacac

SEQ ID NO: 27073 - DNA, 16 bp, synthetic construct
  misc_feature 1..16: note = synthetic [barcode part1]
  source 1..16: mol_type = other DNA
actaagagtcaacacg

SEQ ID NO: 27074 - DNA, 16 bp, synthetic construct
  misc_feature 1..16: note = synthetic [barcode part1]
  source 1..16: mol_type = other DNA
ccttgacttaacgtac

SEQ ID NO: 27075 - DNA, 16 bp, synthetic construct
  misc_feature 1..16: note = synthetic [barcode part1]
  source 1..16: mol_type = other DNA
gcgccgagaagtaact

SEQ ID NO: 27076 - DNA, 16 bp, synthetic construct
  misc_feature 1..16: note = synthetic [barcode part1]
  source 1..16: mol_type = other DNA
gaatctgagatcgaac

SEQ ID NO: 27077 - DNA, 16 bp, synthetic construct
  misc_feature 1..16: note = synthetic [barcode part1]
  source 1..16: mol_type = other DNA
aattggcctggagttc

SEQ ID NO: 27078 - DNA, 16 bp, synthetic construct
  misc_feature 1..16: note = synthetic [barcode part1]
  source 1..16: mol_type = other DNA
atcttctcgtagtcag

SEQ ID NO: 27079 - DNA, 16 bp, synthetic construct
  misc_feature 1..16: note = synthetic [barcode part1]
  source 1..16: mol_type = other DNA
gtgtgtacaatcgacc

SEQ ID NO: 27080 - DNA, 16 bp, synthetic construct
  misc_feature 1..16: note = synthetic [barcode part1]
  source 1..16: mol_type = other DNA
tccttggcgatatatc

SEQ ID NO: 27081 - DNA, 16 bp, synthetic construct
  misc_feature 1..16: note = synthetic [barcode part1]
  source 1..16: mol_type = other DNA
ttagtcgtcctgagag

SEQ ID NO: 27082 - DNA, 16 bp, synthetic construct
  misc_feature 1..16: note = synthetic [barcode part1]
  source 1..16: mol_type = other DNA
tactgttgagtacctc

SEQ ID NO: 27083 - DNA, 16 bp, synthetic construct
  misc_feature 1..16: note = synthetic [barcode part1]
  source 1..16: mol_type = other DNA
aggtattctcaccgtt

SEQ ID NO: 27084 - DNA, 16 bp, synthetic construct
  misc_feature 1..16: note = synthetic [barcode part1]
  source 1..16: mol_type = other DNA
gaagaataggcacttc

SEQ ID NO: 27085 - DNA, 16 bp, synthetic construct
  misc_feature 1..16: note = synthetic [barcode part1]
  source 1..16: mol_type = other DNA
atagaggtcgaatcgt

SEQ ID NO: 27086 - DNA, 16 bp, synthetic construct
  misc_feature 1..16: note = synthetic [barcode part1]
  source 1..16: mol_type = other DNA
gccggtaacagaacac

SEQ ID NO: 27087 - DNA, 16 bp, synthetic construct
  misc_feature 1..16: note = synthetic [barcode part1]
  source 1..16: mol_type = other DNA
acctgccacttcgagt

SEQ ID NO: 27088 - DNA, 16 bp, synthetic construct
  misc_feature 1..16: note = synthetic [barcode part1]
  source 1..16: mol_type = other DNA
tctaactcgactgcgc

SEQ ID NO: 27089 - DNA, 16 bp, synthetic construct
  misc_feature 1..16: note = synthetic [barcode part1]
  source 1..16: mol_type = other DNA
gagtctagtccaagtc

SEQ ID NO: 27090 - DNA, 16 bp, synthetic construct
  misc_feature 1..16: note = synthetic [barcode part1]
  source 1..16: mol_type = other DNA
actgttgtcagaccag

SEQ ID NO: 27091 - DNA, 16 bp, synthetic construct
  misc_feature 1..16: note = synthetic [barcode part1]
  source 1..16: mol_type = other DNA
gattggttgtgtacgc

SEQ ID NO: 27092 - DNA, 16 bp, synthetic construct
  misc_feature 1..16: note = synthetic [barcode part1]
  source 1..16: mol_type = other DNA
tgtgatccacaggttg

SEQ ID NO: 27093 - DNA, 16 bp, synthetic construct
  misc_feature 1..16: note = synthetic [barcode part1]
  source 1..16: mol_type = other DNA
aggaagatcgagatcg

SEQ ID NO: 27094 - DNA, 16 bp, synthetic construct
  misc_feature 1..16: note = synthetic [barcode part1]
  source 1..16: mol_type = other DNA
ccgaacacgaggtagt

SEQ ID NO: 27095 - DNA, 16 bp, synthetic construct
  misc_feature 1..16: note = synthetic [barcode part1]
  source 1..16: mol_type = other DNA
tatactcgacgtggac

SEQ ID NO: 27096 - DNA, 16 bp, synthetic construct
  misc_feature 1..16: note = synthetic [barcode part1]
  source 1..16: mol_type = other DNA
atacgactcaacttcc

SEQ ID NO: 27097 - DNA, 16 bp, synthetic construct
  misc_feature 1..16: note = synthetic [barcode part1]
  source 1..16: mol_type = other DNA
cagaaggtaaccgcac

SEQ ID NO: 27098 - DNA, 16 bp, synthetic construct
  misc_feature 1..16: note = synthetic [barcode part1]
  source 1..16: mol_type = other DNA
ccttgaactacggtag

SEQ ID NO: 27099 - DNA, 16 bp, synthetic construct
  misc_feature 1..16: note = synthetic [barcode part1]
  source 1..16: mol_type = other DNA
cgtctgcctattcact

SEQ ID NO: 27100 - DNA, 16 bp, synthetic construct
  misc_feature 1..16: note = synthetic [barcode part1]
  source 1..16: mol_type = other DNA
agaagatctgtacgac

SEQ ID NO: 27101 - DNA, 16 bp, synthetic construct
  misc_feature 1..16: note = synthetic [barcode part1]
  source 1..16: mol_type = other DNA
gtcctgttgaactcgc

SEQ ID NO: 27102 - DNA, 16 bp, synthetic construct
  misc_feature 1..16: note = synthetic [barcode part1]
  source 1..16: mol_type = other DNA
gaccaattccttctcc

SEQ ID NO: 27103 - DNA, 16 bp, synthetic construct
  misc_feature 1..16: note = synthetic [barcode part1]
  source 1..16: mol_type = other DNA
agtagaggcgtaatct

SEQ ID NO: 27104 - DNA, 16 bp, synthetic construct
  misc_feature 1..16: note = synthetic [barcode part1]
  source 1..16: mol_type = other DNA
tacacggtaccttact

SEQ ID NO: 27105 - DNA, 16 bp, synthetic construct
  misc_feature 1..16: note = synthetic [barcode part1]
  source 1..16: mol_type = other DNA
gtcgtattccttagtg

SEQ ID NO: 27106 - DNA, 16 bp, synthetic construct
  misc_feature 1..16: note = synthetic [barcode part1]
  source 1..16: mol_type = other DNA
cgtattcggattgtct

SEQ ID NO: 27107 - DNA, 16 bp, synthetic construct
  misc_feature 1..16: note = synthetic [barcode part1]
  source 1..16: mol_type = other DNA
cgtcaagtgaggacgt

SEQ ID NO: 27108 - DNA, 16 bp, synthetic construct
  misc_feature 1..16: note = synthetic [barcode part1]
  source 1..16: mol_type = other DNA
ccaataagaaccgcct

SEQ ID NO: 27109 - DNA, 16 bp, synthetic construct
  misc_feature 1..16: note = synthetic [barcode part1]
  source 1..16: mol_type = other DNA
tcgtatcctcgtacct

SEQ ID NO: 27110 - DNA, 16 bp, synthetic construct
  misc_feature 1..16: note = synthetic [barcode part1]
  source 1..16: mol_type = other DNA
gtagatagtggcaccg

SEQ ID NO: 27111 - DNA, 16 bp, synthetic construct
  misc_feature 1..16: note = synthetic [barcode part1]
  source 1..16: mol_type = other DNA
aatcggtattgaccgc

SEQ ID NO: 27112 - DNA, 16 bp, synthetic construct
  misc_feature 1..16: note = synthetic [barcode part1]
  source 1..16: mol_type = other DNA
gaatctcgaagaggag

SEQ ID NO: 27113 - DNA, 16 bp, synthetic construct
  misc_feature 1..16: note = synthetic [barcode part1]
  source 1..16: mol_type = other DNA
cacctaacttctggcg

SEQ ID NO: 27114 - DNA, 16 bp, synthetic construct
  misc_feature 1..16: note = synthetic [barcode part1]
  source 1..16: mol_type = other DNA
cgatctctgtacaatc

SEQ ID NO: 27115 - DNA, 16 bp, synthetic construct
  misc_feature 1..16: note = synthetic [barcode part1]
  source 1..16: mol_type = other DNA
gtcacctaacactcgc

SEQ ID NO: 27116 - DNA, 16 bp, synthetic construct
  misc_feature 1..16: note = synthetic [barcode part1]
  source 1..16: mol_type = other DNA
tgtgtcaacgttgacg

SEQ ID NO: 27117 - DNA, 16 bp, synthetic construct
  misc_feature 1..16: note = synthetic [barcode part1]
  source 1..16: mol_type = other DNA
ttcaaggataccacgc

SEQ ID NO: 27118 - DNA, 16 bp, synthetic construct
  misc_feature 1..16: note = synthetic [barcode part1]
  source 1..16: mol_type = other DNA
tggtaacgttaggtcc

SEQ ID NO: 27119 - DNA, 16 bp, synthetic construct
  misc_feature 1..16: note = synthetic [barcode part1]
  source 1..16: mol_type = other DNA
aacgactcgtacctcc

SEQ ID NO: 27120 - DNA, 16 bp, synthetic construct
  misc_feature 1..16: note = synthetic [barcode part1]
  source 1..16: mol_type = other DNA
acactacacaagtgag

SEQ ID NO: 27121 - DNA, 16 bp, synthetic construct
  misc_feature 1..16: note = synthetic [barcode part1]
  source 1..16: mol_type = other DNA
gcacaattcctaactc

SEQ ID NO: 27122 - DNA, 16 bp, synthetic construct
  misc_feature 1..16: note = synthetic [barcode part1]
  source 1..16: mol_type = other DNA
ataattgcacggccac

SEQ ID NO: 27123 - DNA, 16 bp, synthetic construct
  misc_feature 1..16: note = synthetic [barcode part1]
  source 1..16: mol_type = other DNA
tctgccagttactctc

SEQ ID NO: 27124 - DNA, 16 bp, synthetic construct
  misc_feature 1..16: note = synthetic [barcode part1]
  source 1..16: mol_type = other DNA
aaggcaccgacaatcg

SEQ ID NO: 27125 - DNA, 16 bp, synthetic construct
  misc_feature 1..16: note = synthetic [barcode part1]
  source 1..16: mol_type = other DNA
gagttctcaaccaacg

SEQ ID NO: 27126 - DNA, 16 bp, synthetic construct
  misc_feature 1..16: note = synthetic [barcode part1]
  source 1..16: mol_type = other DNA
aacctggtaacgacct

SEQ ID NO: 27127 - DNA, 16 bp, synthetic construct
  misc_feature 1..16: note = synthetic [barcode part1]
  source 1..16: mol_type = other DNA
aacacgcctctaactt

SEQ ID NO: 27128 - DNA, 16 bp, synthetic construct
  misc_feature 1..16: note = synthetic [barcode part1]
  source 1..16: mol_type = other DNA
gtcgcctgtgataagt

SEQ ID NO: 27129 - DNA, 16 bp, synthetic construct
  misc_feature 1..16: note = synthetic [barcode part1]
  source 1..16: mol_type = other DNA
agtctgttcacgaacg

SEQ ID NO: 27130 - DNA, 16 bp, synthetic construct
  misc_feature 1..16: note = synthetic [barcode part1]
  source 1..16: mol_type = other DNA
gaggatacactctcgt

SEQ ID NO: 27131 - DNA, 16 bp, synthetic construct
  misc_feature 1..16: note = synthetic [barcode part1]
  source 1..16: mol_type = other DNA
aggcacacgatccaag

SEQ ID NO: 27132 - DNA, 16 bp, synthetic construct
  misc_feature 1..16: note = synthetic [barcode part1]
  source 1..16: mol_type = other DNA
agaccagaggattgag

SEQ ID NO: 27133 - DNA, 16 bp, synthetic construct
  misc_feature 1..16: note = synthetic [barcode part1]
  source 1..16: mol_type = other DNA
gtgtaattcgaggagt

SEQ ID NO: 27134 - DNA, 16 bp, synthetic construct
  misc_feature 1..16: note = synthetic [barcode part1]
  source 1..16: mol_type = other DNA
cactccgcaagatagt

SEQ ID NO: 27135 - DNA, 16 bp, synthetic construct
  misc_feature 1..16: note = synthetic [barcode part1]
  source 1..16: mol_type = other DNA
atagttgtgtggccgt

SEQ ID NO: 27136 - DNA, 16 bp, synthetic construct
  misc_feature 1..16: note = synthetic [barcode part1]
  source 1..16: mol_type = other DNA
tactgttaacggcgac

SEQ ID NO: 27137 - DNA, 16 bp, synthetic construct
  misc_feature 1..16: note = synthetic [barcode part1]
  source 1..16: mol_type = other DNA
gaataggacgacgcct

SEQ ID NO: 27138 - DNA, 16 bp, synthetic construct
  misc_feature 1..16: note = synthetic [barcode part1]
  source 1..16: mol_type = other DNA
gatcgtactccttggc

SEQ ID NO: 27139 - DNA, 16 bp, synthetic construct
  misc_feature 1..16: note = synthetic [barcode part1]
  source 1..16: mol_type = other DNA
tgtcctgagacaacac

SEQ ID NO: 27140 - DNA, 16 bp, synthetic construct
  misc_feature 1..16: note = synthetic [barcode part1]
  source 1..16: mol_type = other DNA
tccttggcaactgcac

SEQ ID NO: 27141 - DNA, 16 bp, synthetic construct
  misc_feature 1..16: note = synthetic [barcode part1]
  source 1..16: mol_type = other DNA
gtattcctggcaactt

SEQ ID NO: 27142 - DNA, 16 bp, synthetic construct
  misc_feature 1..16: note = synthetic [barcode part1]
  source 1..16: mol_type = other DNA
cgaggtagaactagag

SEQ ID NO: 27143 - DNA, 16 bp, synthetic construct
  misc_feature 1..16: note = synthetic [barcode part1]
  source 1..16: mol_type = other DNA
aggtggttatagatcg

SEQ ID NO: 27144 - DNA, 16 bp, synthetic construct
  misc_feature 1..16: note = synthetic [barcode part1]
  source 1..16: mol_type = other DNA
cagatcgactgaacct

SEQ ID NO: 27145 - DNA, 16 bp, synthetic construct
  misc_feature 1..16: note = synthetic [barcode part1]
  source 1..16: mol_type = other DNA
agtgtcgtctctctct

SEQ ID NO: 27146 - DNA, 16 bp, synthetic construct
  misc_feature 1..16: note = synthetic [barcode part1]
  source 1..16: mol_type = other DNA
agaggtcagttcttcg

SEQ ID NO: 27147 - DNA, 16 bp, synthetic construct
  misc_feature 1..16: note = synthetic [barcode part1]
  source 1..16: mol_type = other DNA
tagatcacgcactctt

SEQ ID NO: 27148 - DNA, 16 bp, synthetic construct
  misc_feature 1..16: note = synthetic [barcode part1]
  source 1..16: mol_type = other DNA
aggtaggataagtggc

SEQ ID NO: 27149 - DNA, 16 bp, synthetic construct
  misc_feature 1..16: note = synthetic [barcode part1]
  source 1..16: mol_type = other DNA
tgtgccgcacaattag

SEQ ID NO: 27150 - DNA, 16 bp, synthetic construct
  misc_feature 1..16: note = synthetic [barcode part1]
  source 1..16: mol_type = other DNA
tgatcctgtgcgtcgt

SEQ ID NO: 27151 - DNA, 16 bp, synthetic construct
  misc_feature 1..16: note = synthetic [barcode part1]
  source 1..16: mol_type = other DNA
tcttggaccgtctacg

SEQ ID NO: 27152 - DNA, 16 bp, synthetic construct
  misc_feature 1..16: note = synthetic [barcode part1]
  source 1..16: mol_type = other DNA
acaattgcgaccgtgt

SEQ ID NO: 27153 - DNA, 16 bp, synthetic construct
  misc_feature 1..16: note = synthetic [barcode part1]
  source 1..16: mol_type = other DNA
tgcactccgttggatc

SEQ ID NO: 27154 - DNA, 16 bp, synthetic construct
  misc_feature 1..16: note = synthetic [barcode part1]
  source 1..16: mol_type = other DNA
acacgcagttaaccgt

SEQ ID NO: 27155 - DNA, 16 bp, synthetic construct
  misc_feature 1..16: note = synthetic [barcode part1]
  source 1..16: mol_type = other DNA
acgaagattctcgcgt

SEQ ID NO: 27156 - DNA, 16 bp, synthetic construct
  misc_feature 1..16: note = synthetic [barcode part1]
  source 1..16: mol_type = other DNA
agttacaacgcaccgt

SEQ ID NO: 27157 - DNA, 16 bp, synthetic construct
  misc_feature 1..16: note = synthetic [barcode part1]
  source 1..16: mol_type = other DNA
ccaagaccgtctacct

SEQ ID NO: 27158 - DNA, 16 bp, synthetic construct
  misc_feature 1..16: note = synthetic [barcode part1]
  source 1..16: mol_type = other DNA
tcaagtgcagagtggc

SEQ ID NO: 27159 - DNA, 16 bp, synthetic construct
  misc_feature 1..16: note = synthetic [barcode part1]
  source 1..16: mol_type = other DNA
cgagtactaatctcct

SEQ ID NO: 27160 - DNA, 16 bp, synthetic construct
  misc_feature 1..16: note = synthetic [barcode part1]
  source 1..16: mol_type = other DNA
cacgtccacaggaatt

SEQ ID NO: 27161 - DNA, 16 bp, synthetic construct
  misc_feature 1..16: note = synthetic [barcode part1]
  source 1..16: mol_type = other DNA
cgtgtaataccagtgc

SEQ ID NO: 27162 - DNA, 16 bp, synthetic construct
  misc_feature 1..16: note = synthetic [barcode part1]
  source 1..16: mol_type = other DNA
tgttgcctctacggac

SEQ ID NO: 27163 - DNA, 16 bp, synthetic construct
  misc_feature 1..16: note = synthetic [barcode part1]
  source 1..16: mol_type = other DNA
gcggaggatataagac

SEQ ID NO: 27164 - DNA, 16 bp, synthetic construct
  misc_feature 1..16: note = synthetic [barcode part1]
  source 1..16: mol_type = other DNA
ccactcagaatctcgc

SEQ ID NO: 27165 - DNA, 16 bp, synthetic construct
  misc_feature 1..16: note = synthetic [barcode part1]
  source 1..16: mol_type = other DNA
agacgaagtccactct

SEQ ID NO: 27166 - DNA, 16 bp, synthetic construct
  misc_feature 1..16: note = synthetic [barcode part1]
  source 1..16: mol_type = other DNA
cgagtgtacacgactt

SEQ ID NO: 27167 - DNA, 16 bp, synthetic construct
  misc_feature 1..16: note = synthetic [barcode part1]
  source 1..16: mol_type = other DNA
agtagtctatagaggc

SEQ ID NO: 27168 - DNA, 16 bp, synthetic construct
  misc_feature 1..16: note = synthetic [barcode part1]
  source 1..16: mol_type = other DNA
tcaacgaggtacggac

SEQ ID NO: 27169 - DNA, 16 bp, synthetic construct
  misc_feature 1..16: note = synthetic [barcode part1]
  source 1..16: mol_type = other DNA
agtagaacgcgttaac

SEQ ID NO: 27170 - DNA, 16 bp, synthetic construct
  misc_feature 1..16: note = synthetic [barcode part1]
  source 1..16: mol_type = other DNA
ttccgcgactgttggt

SEQ ID NO: 27171 - DNA, 16 bp, synthetic construct
  misc_feature 1..16: note = synthetic [barcode part1]
  source 1..16: mol_type = other DNA
aggccggtatacagtg

SEQ ID NO: 27172 - DNA, 16 bp, synthetic construct
  misc_feature 1..16: note = synthetic [barcode part1]
  source 1..16: mol_type = other DNA
taagtcgtcggattgc

SEQ ID NO: 27173 - DNA, 16 bp, synthetic construct
  misc_feature 1..16: note = synthetic [barcode part1]
  source 1..16: mol_type = other DNA
cgactctagttcttcc

SEQ ID NO: 27174 - DNA, 16 bp, synthetic construct
  misc_feature 1..16: note = synthetic [barcode part1]
  source 1..16: mol_type = other DNA
ttgacagacgagaatc

SEQ ID NO: 27175 - DNA, 16 bp, synthetic construct
  misc_feature 1..16: note = synthetic [barcode part1]
  source 1..16: mol_type = other DNA
attcgtggcacaactg

SEQ ID NO: 27176 - DNA, 16 bp, synthetic construct
  misc_feature 1..16: note = synthetic [barcode part1]
  source 1..16: mol_type = other DNA
tcctgcggtattctct

SEQ ID NO: 27177 - DNA, 16 bp, synthetic construct
  misc_feature 1..16: note = synthetic [barcode part1]
  source 1..16: mol_type = other DNA
aaccaactgactgacc

SEQ ID NO: 27178 - DNA, 16 bp, synthetic construct
  misc_feature 1..16: note = synthetic [barcode part1]
  source 1..16: mol_type = other DNA
gaacaagtccgagatt

SEQ ID NO: 27179 - DNA, 16 bp, synthetic construct
  misc_feature 1..16: note = synthetic [barcode part1]
  source 1..16: mol_type = other DNA
tgacctacacttctag

SEQ ID NO: 27180 - DNA, 16 bp, synthetic construct
  misc_feature 1..16: note = synthetic [barcode part1]
  source 1..16: mol_type = other DNA
aagtccaagtagtgac

SEQ ID NO: 27181 - DNA, 16 bp, synthetic construct
  misc_feature 1..16: note = synthetic [barcode part1]
  source 1..16: mol_type = other DNA
gagattcgtccgttcc

SEQ ID NO: 27182 - DNA, 16 bp, synthetic construct
  misc_feature 1..16: note = synthetic [barcode part1]
  source 1..16: mol_type = other DNA
cggcgccttataatag

SEQ ID NO: 27183 - DNA, 16 bp, synthetic construct
  misc_feature 1..16: note = synthetic [barcode part1]
  source 1..16: mol_type = other DNA
atcgtgacaagtgaac

SEQ ID NO: 27184 - DNA, 16 bp, synthetic construct
  misc_feature 1..16: note = synthetic [barcode part1]
  source 1..16: mol_type = other DNA
ccggacaacttcgttc

SEQ ID NO: 27185 - DNA, 16 bp, synthetic construct
  misc_feature 1..16: note = synthetic [barcode part1]
  source 1..16: mol_type = other DNA
gatcgaccttccttct

SEQ ID NO: 27186 - DNA, 16 bp, synthetic construct
  misc_feature 1..16: note = synthetic [barcode part1]
  source 1..16: mol_type = other DNA
cgacggtgtatccttc

SEQ ID NO: 27187 - DNA, 16 bp, synthetic construct
  misc_feature 1..16: note = synthetic [barcode part1]
  source 1..16: mol_type = other DNA
cggcgattcgataatc

SEQ ID NO: 27188 - DNA, 16 bp, synthetic construct
  misc_feature 1..16: note = synthetic [barcode part1]
  source 1..16: mol_type = other DNA
ttctaacagttgcacc

SEQ ID NO: 27189 - DNA, 16 bp, synthetic construct
  misc_feature 1..16: note = synthetic [barcode part1]
  source 1..16: mol_type = other DNA
gtgttcaccacctcag

SEQ ID NO: 27190 - DNA, 16 bp, synthetic construct
  misc_feature 1..16: note = synthetic [barcode part1]
  source 1..16: mol_type = other DNA
cactattacggagtgc

SEQ ID NO: 27191 - DNA, 16 bp, synthetic construct
  misc_feature 1..16: note = synthetic [barcode part1]
  source 1..16: mol_type = other DNA
tattctgtgtcgcctc

SEQ ID NO: 27192 - DNA, 16 bp, synthetic construct
  misc_feature 1..16: note = synthetic [barcode part1]
  source 1..16: mol_type = other DNA
cgaatcaccgacaatc

SEQ ID NO: 27193 - DNA, 16 bp, synthetic construct
  misc_feature 1..16: note = synthetic [barcode part1]
  source 1..16: mol_type = other DNA
cgtgaatctacggatc

SEQ ID NO: 27194 - DNA, 16 bp, synthetic construct
  misc_feature 1..16: note = synthetic [barcode part1]
  source 1..16: mol_type = other DNA
ttcgcggtctatcgtg

SEQ ID NO: 27195 - DNA, 16 bp, synthetic construct
  misc_feature 1..16: note = synthetic [barcode part1]
  source 1..16: mol_type = other DNA
ccgtggtgtactatag

SEQ ID NO: 27196 - DNA, 16 bp, synthetic construct
  misc_feature 1..16: note = synthetic [barcode part1]
  source 1..16: mol_type = other DNA
ccactgttcgtaggtc

SEQ ID NO: 27197 - DNA, 16 bp, synthetic construct
  misc_feature 1..16: note = synthetic [barcode part1]
  source 1..16: mol_type = other DNA
gagtgtctctgttgtt

SEQ ID NO: 27198 - DNA, 16 bp, synthetic construct
  misc_feature 1..16: note = synthetic [barcode part1]
  source 1..16: mol_type = other DNA
gtataagtaccgagtg

SEQ ID NO: 27199 - DNA, 16 bp, synthetic construct
  misc_feature 1..16: note = synthetic [barcode part1]
  source 1..16: mol_type = other DNA
ccaatcctattggcgc

SEQ ID NO: 27200 - DNA, 16 bp, synthetic construct
  misc_feature 1..16: note = synthetic [barcode part1]
  source 1..16: mol_type = other DNA
tgtgtcctaggtcgtc

SEQ ID NO: 27201 - DNA, 16 bp, synthetic construct
  misc_feature 1..16: note = synthetic [barcode part1]
  source 1..16: mol_type = other DNA
tattgccggcgcactt

SEQ ID NO: 27202 - DNA, 16 bp, synthetic construct
  misc_feature 1..16: note = synthetic [barcode part1]
  source 1..16: mol_type = other DNA
cgtacctaagtacgac

SEQ ID NO: 27203 - DNA, 16 bp, synthetic construct
  misc_feature 1..16: note = synthetic [barcode part1]
  source 1..16: mol_type = other DNA
gtaggccaattcacac

SEQ ID NO: 27204 - DNA, 16 bp, synthetic construct
  misc_feature 1..16: note = synthetic [barcode part1]
  source 1..16: mol_type = other DNA
aagactaaggacgacg

SEQ ID NO: 27205 - DNA, 16 bp, synthetic construct
  misc_feature 1..16: note = synthetic [barcode part1]
  source 1..16: mol_type = other DNA
ttacgtggagaagttg

SEQ ID NO: 27206 - DNA, 16 bp, synthetic construct
  misc_feature 1..16: note = synthetic [barcode part1]
  source 1..16: mol_type = other DNA
agtgccacgactaact

SEQ ID NO: 27207 - DNA, 16 bp, synthetic construct
  misc_feature 1..16: note = synthetic [barcode part1]
  source 1..16: mol_type = other DNA
agactaagtattggcg

SEQ ID NO: 27208 - DNA, 16 bp, synthetic construct
  misc_feature 1..16: note = synthetic [barcode part1]
  source 1..16: mol_type = other DNA
gacgcctctatcactg

SEQ ID NO: 27209 - DNA, 16 bp, synthetic construct
  misc_feature 1..16: note = synthetic [barcode part1]
  source 1..16: mol_type = other DNA
tgtaacgaggtaggcc

SEQ ID NO: 27210 - DNA, 16 bp, synthetic construct
  misc_feature 1..16: note = synthetic [barcode part1]
  source 1..16: mol_type = other DNA
gagaatacgaagacgc

SEQ ID NO: 27211 - DNA, 16 bp, synthetic construct
  misc_feature 1..16: note = synthetic [barcode part1]
  source 1..16: mol_type = other DNA
ccacacctatccttgt

SEQ ID NO: 27212 - DNA, 16 bp, synthetic construct
  misc_feature 1..16: note = synthetic [barcode part1]
  source 1..16: mol_type = other DNA
atcgacgactcgagtt

SEQ ID NO: 27213 - DNA, 16 bp, synthetic construct
  misc_feature 1..16: note = synthetic [barcode part1]
  source 1..16: mol_type = other DNA
aggtaggccacagtac

SEQ ID NO: 27214 - DNA, 16 bp, synthetic construct
  misc_feature 1..16: note = synthetic [barcode part1]
  source 1..16: mol_type = other DNA
ttcggattgccgatag

SEQ ID NO: 27215 - DNA, 16 bp, synthetic construct
  misc_feature 1..16: note = synthetic [barcode part1]
  source 1..16: mol_type = other DNA
aattaaccacggcacc

SEQ ID NO: 27216 - DNA, 16 bp, synthetic construct
  misc_feature 1..16: note = synthetic [barcode part1]
  source 1..16: mol_type = other DNA
tgtaattgaggcaacg

SEQ ID NO: 27217 - DNA, 16 bp, synthetic construct
  misc_feature 1..16: note = synthetic [barcode part1]
  source 1..16: mol_type = other DNA
cgagtaggccttgaag

SEQ ID NO: 27218 - DNA, 16 bp, synthetic construct
  misc_feature 1..16: note = synthetic [barcode part1]
  source 1..16: mol_type = other DNA
tcttgtagtcgttgac

SEQ ID NO: 27219 - DNA, 16 bp, synthetic construct
  misc_feature 1..16: note = synthetic [barcode part1]
  source 1..16: mol_type = other DNA
ccaaggtataacgcct

SEQ ID NO: 27220 - DNA, 16 bp, synthetic construct
  misc_feature 1..16: note = synthetic [barcode part1]
  source 1..16: mol_type = other DNA
tataccggacctctcg

SEQ ID NO: 27221 - DNA, 16 bp, synthetic construct
  misc_feature 1..16: note = synthetic [barcode part1]
  source 1..16: mol_type = other DNA
attgacgcggaaggtc

SEQ ID NO: 27222 - DNA, 16 bp, synthetic construct
  misc_feature 1..16: note = synthetic [barcode part1]
  source 1..16: mol_type = other DNA
tgttgtggttgaccag

SEQ ID NO: 27223 - DNA, 16 bp, synthetic construct
  misc_feature 1..16: note = synthetic [barcode part1]
  source 1..16: mol_type = other DNA
cgtattccacctctgt

SEQ ID NO: 27224 - DNA, 16 bp, synthetic construct
  misc_feature 1..16: note = synthetic [barcode part1]
  source 1..16: mol_type = other DNA
aatccacgcctcactg

SEQ ID NO: 27225 - DNA, 16 bp, synthetic construct
  misc_feature 1..16: note = synthetic [barcode part1]
  source 1..16: mol_type = other DNA
tgagactaattccggc

SEQ ID NO: 27226 - DNA, 16 bp, synthetic construct
  misc_feature 1..16: note = synthetic [barcode part1]
  source 1..16: mol_type = other DNA
taagaggcgatacact

SEQ ID NO: 27227 - DNA, 16 bp, synthetic construct
  misc_feature 1..16: note = synthetic [barcode part1]
  source 1..16: mol_type = other DNA
acttccgtggattgcc

SEQ ID NO: 27228 - DNA, 16 bp, synthetic construct
  misc_feature 1..16: note = synthetic [barcode part1]
  source 1..16: mol_type = other DNA
gactgtgtgtgcaact

SEQ ID NO: 27229 - DNA, 16 bp, synthetic construct
  misc_feature 1..16: note = synthetic [barcode part1]
  source 1..16: mol_type = other DNA
caccttcttgacgacg

SEQ ID NO: 27230 - DNA, 16 bp, synthetic construct
  misc_feature 1..16: note = synthetic [barcode part1]
  source 1..16: mol_type = other DNA
ccacttactcgtctgt

SEQ ID NO: 27231 - DNA, 16 bp, synthetic construct
  misc_feature 1..16: note = synthetic [barcode part1]
  source 1..16: mol_type = other DNA
gacctcttgattctcc

SEQ ID NO: 27232 - DNA, 16 bp, synthetic construct
  misc_feature 1..16: note = synthetic [barcode part1]
  source 1..16: mol_type = other DNA
actgaggagaagatcg

SEQ ID NO: 27233 - DNA, 16 bp, synthetic construct
  misc_feature 1..16: note = synthetic [barcode part1]
  source 1..16: mol_type = other DNA
gtgacactcgagatct

SEQ ID NO: 27234 - DNA, 16 bp, synthetic construct
  misc_feature 1..16: note = synthetic [barcode part1]
  source 1..16: mol_type = other DNA
ccgtattcggaagtgt

SEQ ID NO: 27235 - DNA, 16 bp, synthetic construct
  misc_feature 1..16: note = synthetic [barcode part1]
  source 1..16: mol_type = other DNA
cctaagtggcagtgag

SEQ ID NO: 27236 - DNA, 16 bp, synthetic construct
  misc_feature 1..16: note = synthetic [barcode part1]
  source 1..16: mol_type = other DNA
cgatcgaggttaacct

SEQ ID NO: 27237 - DNA, 16 bp, synthetic construct
  misc_feature 1..16: note = synthetic [barcode part1]
  source 1..16: mol_type = other DNA
cctaacttctctcggt

SEQ ID NO: 27238 - DNA, 16 bp, synthetic construct
  misc_feature 1..16: note = synthetic [barcode part1]
  source 1..16: mol_type = other DNA
ttaggcaactctatcc

SEQ ID NO: 27239 - DNA, 16 bp, synthetic construct
  misc_feature 1..16: note = synthetic [barcode part1]
  source 1..16: mol_type = other DNA
actgtccaatacctac

SEQ ID NO: 27240 - DNA, 16 bp, synthetic construct
  misc_feature 1..16: note = synthetic [barcode part1]
  source 1..16: mol_type = other DNA
tacttctctccgtgtg

SEQ ID NO: 27241 - DNA, 16 bp, synthetic construct
  misc_feature 1..16: note = synthetic [barcode part1]
  source 1..16: mol_type = other DNA
ttacgcaaccgtacag

SEQ ID NO: 27242 - DNA, 16 bp, synthetic construct
  misc_feature 1..16: note = synthetic [barcode part1]
  source 1..16: mol_type = other DNA
tcaatcgtcgactgag

SEQ ID NO: 27243 - DNA, 16 bp, synthetic construct
  misc_feature 1..16: note = synthetic [barcode part1]
  source 1..16: mol_type = other DNA
gactgtaatcagtgcc

SEQ ID NO: 27244 - DNA, 16 bp, synthetic construct
  misc_feature 1..16: note = synthetic [barcode part1]
  source 1..16: mol_type = other DNA
cgttgtctaccagtgc

SEQ ID NO: 27245 - DNA, 16 bp, synthetic construct
  misc_feature 1..16: note = synthetic [barcode part1]
  source 1..16: mol_type = other DNA
cggtcacactctctag

SEQ ID NO: 27246 - DNA, 16 bp, synthetic construct
  misc_feature 1..16: note = synthetic [barcode part1]
  source 1..16: mol_type = other DNA
aggtcactaccagact

SEQ ID NO: 27247 - DNA, 16 bp, synthetic construct
  misc_feature 1..16: note = synthetic [barcode part1]
  source 1..16: mol_type = other DNA
cctgatctgcacgatc

SEQ ID NO: 27248 - DNA, 16 bp, synthetic construct
  misc_feature 1..16: note = synthetic [barcode part1]
  source 1..16: mol_type = other DNA
cgtctgtctcaagacc

SEQ ID NO: 27249 - DNA, 16 bp, synthetic construct
  misc_feature 1..16: note = synthetic [barcode part1]
  source 1..16: mol_type = other DNA
gcaagttctggatacc

SEQ ID NO: 27250 - DNA, 16 bp, synthetic construct
  misc_feature 1..16: note = synthetic [barcode part1]
  source 1..16: mol_type = other DNA
aactctgtcacttgtg

SEQ ID NO: 27251 - DNA, 16 bp, synthetic construct
  misc_feature 1..16: note = synthetic [barcode part1]
  source 1..16: mol_type = other DNA
gtactaagaaggtcgt

SEQ ID NO: 27252 - DNA, 16 bp, synthetic construct
  misc_feature 1..16: note = synthetic [barcode part1]
  source 1..16: mol_type = other DNA
ttatctctctccggtg

SEQ ID NO: 27253 - DNA, 16 bp, synthetic construct
  misc_feature 1..16: note = synthetic [barcode part1]
  source 1..16: mol_type = other DNA
cgaccactacttcacg

SEQ ID NO: 27254 - DNA, 16 bp, synthetic construct
  misc_feature 1..16: note = synthetic [barcode part1]
  source 1..16: mol_type = other DNA
tccggtggatacagag

SEQ ID NO: 27255 - DNA, 16 bp, synthetic construct
  misc_feature 1..16: note = synthetic [barcode part1]
  source 1..16: mol_type = other DNA
aacgaaggtcgagagt

SEQ ID NO: 27256 - DNA, 16 bp, synthetic construct
  misc_feature 1..16: note = synthetic [barcode part1]
  source 1..16: mol_type = other DNA
gagttgtaggtacaac

SEQ ID NO: 27257 - DNA, 16 bp, synthetic construct
  misc_feature 1..16: note = synthetic [barcode part1]
  source 1..16: mol_type = other DNA
acacacttcgttgttg

SEQ ID NO: 27258 - DNA, 16 bp, synthetic construct
  misc_feature 1..16: note = synthetic [barcode part1]
  source 1..16: mol_type = other DNA
tctgacctacaattgc

SEQ ID NO: 27259 - DNA, 16 bp, synthetic construct
  misc_feature 1..16: note = synthetic [barcode part1]
  source 1..16: mol_type = other DNA
gtctcacagattaggc

SEQ ID NO: 27260 - DNA, 16 bp, synthetic construct
  misc_feature 1..16: note = synthetic [barcode part1]
  source 1..16: mol_type = other DNA
gacgtgttgcacaact

SEQ ID NO: 27261 - DNA, 16 bp, synthetic construct
  misc_feature 1..16: note = synthetic [barcode part1]
  source 1..16: mol_type = other DNA
ccgtatcgtgaagatc

SEQ ID NO: 27262 - DNA, 16 bp, synthetic construct
  misc_feature 1..16: note = synthetic [barcode part1]
  source 1..16: mol_type = other DNA
agagtcttctggagtc

SEQ ID NO: 27263 - DNA, 16 bp, synthetic construct
  misc_feature 1..16: note = synthetic [barcode part1]
  source 1..16: mol_type = other DNA
atagacttgacgaggt

SEQ ID NO: 27264 - DNA, 16 bp, synthetic construct
  misc_feature 1..16: note = synthetic [barcode part1]
  source 1..16: mol_type = other DNA
gtcgtcgttaggttag

SEQ ID NO: 27265 - DNA, 16 bp, synthetic construct
  misc_feature 1..16: note = synthetic [barcode part1]
  source 1..16: mol_type = other DNA
ttaccttccgaatacg

SEQ ID NO: 27266 - DNA, 16 bp, synthetic construct
  misc_feature 1..16: note = synthetic [barcode part1]
  source 1..16: mol_type = other DNA
tgtcggcaattaagag

SEQ ID NO: 27267 - DNA, 16 bp, synthetic construct
  misc_feature 1..16: note = synthetic [barcode part1]
  source 1..16: mol_type = other DNA
gattacactggaaggt

SEQ ID NO: 27268 - DNA, 16 bp, synthetic construct
  misc_feature 1..16: note = synthetic [barcode part1]
  source 1..16: mol_type = other DNA
tactgcaacacacgtg

SEQ ID NO: 27269 - DNA, 16 bp, synthetic construct
  misc_feature 1..16: note = synthetic [barcode part1]
  source 1..16: mol_type = other DNA
acaaggacgactcggt

SEQ ID NO: 27270 - DNA, 16 bp, synthetic construct
  misc_feature 1..16: note = synthetic [barcode part1]
  source 1..16: mol_type = other DNA
acgagtgagtgagtag

SEQ ID NO: 27271 - DNA, 16 bp, synthetic construct
  misc_feature 1..16: note = synthetic [barcode part1]
  source 1..16: mol_type = other DNA
gtactgatcagtgtgc

SEQ ID NO: 27272 - DNA, 16 bp, synthetic construct
  misc_feature 1..16: note = synthetic [barcode part1]
  source 1..16: mol_type = other DNA
tgagtctgttctgccg

SEQ ID NO: 27273 - DNA, 16 bp, synthetic construct
  misc_feature 1..16: note = synthetic [barcode part1]
  source 1..16: mol_type = other DNA
ttgtcttggcctatag

SEQ ID NO: 27274 - DNA, 16 bp, synthetic construct
  misc_feature 1..16: note = synthetic [barcode part1]
  source 1..16: mol_type = other DNA
gcagtcactagttctt

SEQ ID NO: 27275 - DNA, 16 bp, synthetic construct
  misc_feature 1..16: note = synthetic [barcode part1]
  source 1..16: mol_type = other DNA
gtgaactaaggtggcc

SEQ ID NO: 27276 - DNA, 16 bp, synthetic construct
  misc_feature 1..16: note = synthetic [barcode part1]
  source 1..16: mol_type = other DNA
cactaaccacggttag

SEQ ID NO: 27277 - DNA, 16 bp, synthetic construct
  misc_feature 1..16: note = synthetic [barcode part1]
  source 1..16: mol_type = other DNA
tgcgcaacagagaatt

SEQ ID NO: 27278 - DNA, 16 bp, synthetic construct
  misc_feature 1..16: note = synthetic [barcode part1]
  source 1..16: mol_type = other DNA
tggcacaacacctagt

SEQ ID NO: 27279 - DNA, 16 bp, synthetic construct
  misc_feature 1..16: note = synthetic [barcode part1]
  source 1..16: mol_type = other DNA
tgtgtgaagacgttcc

SEQ ID NO: 27280 - DNA, 16 bp, synthetic construct
  misc_feature 1..16: note = synthetic [barcode part1]
  source 1..16: mol_type = other DNA
attctgcggtacactt

SEQ ID NO: 27281 - DNA, 16 bp, synthetic construct
  misc_feature 1..16: note = synthetic [barcode part1]
  source 1..16: mol_type = other DNA
cagtatctctaaggcg

SEQ ID NO: 27282 - DNA, 16 bp, synthetic construct
  misc_feature 1..16: note = synthetic [barcode part1]
  source 1..16: mol_type = other DNA
tggcctcagaagactt

SEQ ID NO: 27283 - DNA, 16 bp, synthetic construct
  misc_feature 1..16: note = synthetic [barcode part1]
  source 1..16: mol_type = other DNA
acttcgacagttggtg

SEQ ID NO: 27284 - DNA, 16 bp, synthetic construct
  misc_feature 1..16: note = synthetic [barcode part1]
  source 1..16: mol_type = other DNA
gagtgcagatcaccag

SEQ ID NO: 27285 - DNA, 16 bp, synthetic construct
  misc_feature 1..16: note = synthetic [barcode part1]
  source 1..16: mol_type = other DNA
gccacacggagattag

SEQ ID NO: 27286 - DNA, 16 bp, synthetic construct
  misc_feature 1..16: note = synthetic [barcode part1]
  source 1..16: mol_type = other DNA
ccacttagtgatacct

SEQ ID NO: 27287 - DNA, 16 bp, synthetic construct
  misc_feature 1..16: note = synthetic [barcode part1]
  source 1..16: mol_type = other DNA
cagtataggagtggtt

SEQ ID NO: 27288 - DNA, 16 bp, synthetic construct
  misc_feature 1..16: note = synthetic [barcode part1]
  source 1..16: mol_type = other DNA
cgttcctccgatagtg

SEQ ID NO: 27289 - DNA, 16 bp, synthetic construct
  misc_feature 1..16: note = synthetic [barcode part1]
  source 1..16: mol_type = other DNA
acaggttacgtagtcc

SEQ ID NO: 27290 - DNA, 16 bp, synthetic construct
  misc_feature 1..16: note = synthetic [barcode part1]
  source 1..16: mol_type = other DNA
gcctgaatctgttact

SEQ ID NO: 27291 - DNA, 16 bp, synthetic construct
  misc_feature 1..16: note = synthetic [barcode part1]
  source 1..16: mol_type = other DNA
cgaacttgcctgtaag

SEQ ID NO: 27292 - DNA, 16 bp, synthetic construct
  misc_feature 1..16: note = synthetic [barcode part1]
  source 1..16: mol_type = other DNA
agttggtgtgttgcac

SEQ ID NO: 27293 - DNA, 16 bp, synthetic construct
  misc_feature 1..16: note = synthetic [barcode part1]
  source 1..16: mol_type = other DNA
atcaccagtgtaagag

SEQ ID NO: 27294 - DNA, 16 bp, synthetic construct
  misc_feature 1..16: note = synthetic [barcode part1]
  source 1..16: mol_type = other DNA
taacctggaactaccg

SEQ ID NO: 27295 - DNA, 16 bp, synthetic construct
  misc_feature 1..16: note = synthetic [barcode part1]
  source 1..16: mol_type = other DNA
taacagtctccgtgtt

SEQ ID NO: 27296 - DNA, 16 bp, synthetic construct
  misc_feature 1..16: note = synthetic [barcode part1]
  source 1..16: mol_type = other DNA
gacctatcctgttgcg

SEQ ID NO: 27297 - DNA, 16 bp, synthetic construct
  misc_feature 1..16: note = synthetic [barcode part1]
  source 1..16: mol_type = other DNA
aataccgactagtcgc

SEQ ID NO: 27298 - DNA, 16 bp, synthetic construct
  misc_feature 1..16: note = synthetic [barcode part1]
  source 1..16: mol_type = other DNA
cgatatcgagtctcag

SEQ ID NO: 27299 - DNA, 16 bp, synthetic construct
  misc_feature 1..16: note = synthetic [barcode part1]
  source 1..16: mol_type = other DNA
ttgcacagtgtaccag

SEQ ID NO: 27300 - DNA, 16 bp, synthetic construct
  misc_feature 1..16: note = synthetic [barcode part1]
  source 1..16: mol_type = other DNA
aactgtaggaaggtct

SEQ ID NO: 27301 - DNA, 16 bp, synthetic construct
  misc_feature 1..16: note = synthetic [barcode part1]
  source 1..16: mol_type = other DNA
tggccacaggttagag

SEQ ID NO: 27302 - DNA, 16 bp, synthetic construct
  misc_feature 1..16: note = synthetic [barcode part1]
  source 1..16: mol_type = other DNA
accgacacttaatcct

SEQ ID NO: 27303 - DNA, 16 bp, synthetic construct
  misc_feature 1..16: note = synthetic [barcode part1]
  source 1..16: mol_type = other DNA
tctccgtgagttattg

SEQ ID NO: 27304 - DNA, 16 bp, synthetic construct
  misc_feature 1..16: note = synthetic [barcode part1]
  source 1..16: mol_type = other DNA
ttgttgtgtaggttcc

SEQ ID NO: 27305 - DNA, 16 bp, synthetic construct
  misc_feature 1..16: note = synthetic [barcode part1]
  source 1..16: mol_type = other DNA
tcaaggtaacggacgc

SEQ ID NO: 27306 - DNA, 16 bp, synthetic construct
  misc_feature 1..16: note = synthetic [barcode part1]
  source 1..16: mol_type = other DNA
acgaccgatactagtc

SEQ ID NO: 27307 - DNA, 16 bp, synthetic construct
  misc_feature 1..16: note = synthetic [barcode part1]
  source 1..16: mol_type = other DNA
taacggtacgcggaac

SEQ ID NO: 27308 - DNA, 16 bp, synthetic construct
  misc_feature 1..16: note = synthetic [barcode part1]
  source 1..16: mol_type = other DNA
gtacgatctgacctcc

SEQ ID NO: 27309 - DNA, 16 bp, synthetic construct
  misc_feature 1..16: note = synthetic [barcode part1]
  source 1..16: mol_type = other DNA
tggtctcctaatctcc

SEQ ID NO: 27310 - DNA, 16 bp, synthetic construct
  misc_feature 1..16: note = synthetic [barcode part1]
  source 1..16: mol_type = other DNA
gtactaacggtaaggt

SEQ ID NO: 27311 - DNA, 16 bp, synthetic construct
  misc_feature 1..16: note = synthetic [barcode part1]
  source 1..16: mol_type = other DNA
gtcaggtggatcactt

SEQ ID NO: 27312 - DNA, 16 bp, synthetic construct
  misc_feature 1..16: note = synthetic [barcode part1]
  source 1..16: mol_type = other DNA
aactcttgactacgtc

SEQ ID NO: 27313 - DNA, 16 bp, synthetic construct
  misc_feature 1..16: note = synthetic [barcode part1]
  source 1..16: mol_type = other DNA
tgtgactgatccgtag

SEQ ID NO: 27314 - DNA, 16 bp, synthetic construct
  misc_feature 1..16: note = synthetic [barcode part1]
  source 1..16: mol_type = other DNA
acgcacgaactagttc

SEQ ID NO: 27315 - DNA, 16 bp, synthetic construct
  misc_feature 1..16: note = synthetic [barcode part1]
  source 1..16: mol_type = other DNA
ccaggtaagtgagatt

SEQ ID NO: 27316 - DNA, 16 bp, synthetic construct
  misc_feature 1..16: note = synthetic [barcode part1]
  source 1..16: mol_type = other DNA
gttgtgataggcaggc

SEQ ID NO: 27317 - DNA, 16 bp, synthetic construct
  misc_feature 1..16: note = synthetic [barcode part1]
  source 1..16: mol_type = other DNA
agtgcgactgtatctg

SEQ ID NO: 27318 - DNA, 16 bp, synthetic construct
  misc_feature 1..16: note = synthetic [barcode part1]
  source 1..16: mol_type = other DNA
gacacgcaaggaatcc

SEQ ID NO: 27319 - DNA, 16 bp, synthetic construct
  misc_feature 1..16: note = synthetic [barcode part1]
  source 1..16: mol_type = other DNA
ccgacctctactatct

SEQ ID NO: 27320 - DNA, 16 bp, synthetic construct
  misc_feature 1..16: note = synthetic [barcode part1]
  source 1..16: mol_type = other DNA
taagtattggcgagac

SEQ ID NO: 27321 - DNA, 16 bp, synthetic construct
  misc_feature 1..16: note = synthetic [barcode part1]
  source 1..16: mol_type = other DNA
tagttccacgccggtt

SEQ ID NO: 27322 - DNA, 16 bp, synthetic construct
  misc_feature 1..16: note = synthetic [barcode part1]
  source 1..16: mol_type = other DNA
cgtcctagtctgcaac

SEQ ID NO: 27323 - DNA, 16 bp, synthetic construct
  misc_feature 1..16: note = synthetic [barcode part1]
  source 1..16: mol_type = other DNA
cagactggaggtgtgt

SEQ ID NO: 27324 - DNA, 16 bp, synthetic construct
  misc_feature 1..16: note = synthetic [barcode part1]
  source 1..16: mol_type = other DNA
aagttcaccgtcactt

SEQ ID NO: 27325 - DNA, 16 bp, synthetic construct
  misc_feature 1..16: note = synthetic [barcode part1]
  source 1..16: mol_type = other DNA
agtgactgccgttaac

SEQ ID NO: 27326 - DNA, 16 bp, synthetic construct
  misc_feature 1..16: note = synthetic [barcode part1]
  source 1..16: mol_type = other DNA
atatcggaatccgtgc

SEQ ID NO: 27327 - DNA, 16 bp, synthetic construct
  misc_feature 1..16: note = synthetic [barcode part1]
  source 1..16: mol_type = other DNA
gtgccaggttaaggac

SEQ ID NO: 27328 - DNA, 16 bp, synthetic construct
  misc_feature 1..16: note = synthetic [barcode part1]
  source 1..16: mol_type = other DNA
ttcagactccggtctg

SEQ ID NO: 27329 - DNA, 16 bp, synthetic construct
  misc_feature 1..16: note = synthetic [barcode part1]
  source 1..16: mol_type = other DNA
gttgtgagtgacgttc

SEQ ID NO: 27330 - DNA, 16 bp, synthetic construct
  misc_feature 1..16: note = synthetic [barcode part1]
  source 1..16: mol_type = other DNA
tgcagatcactcagac

SEQ ID NO: 27331 - DNA, 16 bp, synthetic construct
  misc_feature 1..16: note = synthetic [barcode part1]
  source 1..16: mol_type = other DNA
gaggttgacacgatcg

SEQ ID NO: 27332 - DNA, 16 bp, synthetic construct
  misc_feature 1..16: note = synthetic [barcode part1]
  source 1..16: mol_type = other DNA
ccaattctccggttct

SEQ ID NO: 27333 - DNA, 16 bp, synthetic construct
  misc_feature 1..16: note = synthetic [barcode part1]
  source 1..16: mol_type = other DNA
atccgatcgtactccg

SEQ ID NO: 27334 - DNA, 16 bp, synthetic construct
  misc_feature 1..16: note = synthetic [barcode part1]
  source 1..16: mol_type = other DNA
gcctgttctgcaacac

SEQ ID NO: 27335 - DNA, 16 bp, synthetic construct
  misc_feature 1..16: note = synthetic [barcode part1]
  source 1..16: mol_type = other DNA
ttgattccacctcacc

SEQ ID NO: 27336 - DNA, 16 bp, synthetic construct
  misc_feature 1..16: note = synthetic [barcode part1]
  source 1..16: mol_type = other DNA
tgcagatatcctactc

SEQ ID NO: 27337 - DNA, 16 bp, synthetic construct
  misc_feature 1..16: note = synthetic [barcode part1]
  source 1..16: mol_type = other DNA
tgatacgcgatagaac

SEQ ID NO: 27338 - DNA, 16 bp, synthetic construct
  misc_feature 1..16: note = synthetic [barcode part1]
  source 1..16: mol_type = other DNA
agtattgcacgcacgt

SEQ ID NO: 27339 - DNA, 16 bp, synthetic construct
  misc_feature 1..16: note = synthetic [barcode part1]
  source 1..16: mol_type = other DNA
acctatcgtgacactt

SEQ ID NO: 27340 - DNA, 16 bp, synthetic construct
  misc_feature 1..16: note = synthetic [barcode part1]
  source 1..16: mol_type = other DNA
gatacacactgtacgc

SEQ ID NO: 27341 - DNA, 16 bp, synthetic construct
  misc_feature 1..16: note = synthetic [barcode part1]
  source 1..16: mol_type = other DNA
tacgtactgtgcacag

SEQ ID NO: 27342 - DNA, 16 bp, synthetic construct
  misc_feature 1..16: note = synthetic [barcode part1]
  source 1..16: mol_type = other DNA
gtatcagttggtacgc

SEQ ID NO: 27343 - DNA, 16 bp, synthetic construct
  misc_feature 1..16: note = synthetic [barcode part1]
  source 1..16: mol_type = other DNA
tcaagatcgccgtagt

SEQ ID NO: 27344 - DNA, 16 bp, synthetic construct
  misc_feature 1..16: note = synthetic [barcode part1]
  source 1..16: mol_type = other DNA
tggcacactccactgt

SEQ ID NO: 27345 - DNA, 16 bp, synthetic construct
  misc_feature 1..16: note = synthetic [barcode part1]
  source 1..16: mol_type = other DNA
cctataccgacgacct

SEQ ID NO: 27346 - DNA, 16 bp, synthetic construct
  misc_feature 1..16: note = synthetic [barcode part1]
  source 1..16: mol_type = other DNA
tgcgagacgacagttg

SEQ ID NO: 27347 - DNA, 16 bp, synthetic construct
  misc_feature 1..16: note = synthetic [barcode part1]
  source 1..16: mol_type = other DNA
tgtacgttgcacacag

SEQ ID NO: 27348 - DNA, 16 bp, synthetic construct
  misc_feature 1..16: note = synthetic [barcode part1]
  source 1..16: mol_type = other DNA
gtaacgcaggatctct

SEQ ID NO: 27349 - DNA, 16 bp, synthetic construct
  misc_feature 1..16: note = synthetic [barcode part1]
  source 1..16: mol_type = other DNA
gacttggtcttacgtt

SEQ ID NO: 27350 - DNA, 16 bp, synthetic construct
  misc_feature 1..16: note = synthetic [barcode part1]
  source 1..16: mol_type = other DNA
cgtcactgttctctac

SEQ ID NO: 27351 - DNA, 16 bp, synthetic construct
  misc_feature 1..16: note = synthetic [barcode part1]
  source 1..16: mol_type = other DNA
gcgaacaagatagacg

SEQ ID NO: 27352 - DNA, 16 bp, synthetic construct
  misc_feature 1..16: note = synthetic [barcode part1]
  source 1..16: mol_type = other DNA
acctcaatcaaccgag

SEQ ID NO: 27353 - DNA, 16 bp, synthetic construct
  misc_feature 1..16: note = synthetic [barcode part1]
  source 1..16: mol_type = other DNA
agatcgttattctcgc

SEQ ID NO: 27354 - DNA, 16 bp, synthetic construct
  misc_feature 1..16: note = synthetic [barcode part1]
  source 1..16: mol_type = other DNA
tagactgactgccaac

SEQ ID NO: 27355 - DNA, 16 bp, synthetic construct
  misc_feature 1..16: note = synthetic [barcode part1]
  source 1..16: mol_type = other DNA
gactggaaggtgtctg

SEQ ID NO: 27356 - DNA, 16 bp, synthetic construct
  misc_feature 1..16: note = synthetic [barcode part1]
  source 1..16: mol_type = other DNA
ataacgacacctcacg

SEQ ID NO: 27357 - DNA, 16 bp, synthetic construct
  misc_feature 1..16: note = synthetic [barcode part1]
  source 1..16: mol_type = other DNA
tcgtcctgttattccg

SEQ ID NO: 27358 - DNA, 16 bp, synthetic construct
  misc_feature 1..16: note = synthetic [barcode part1]
  source 1..16: mol_type = other DNA
cgtgccaatcaatacg

SEQ ID NO: 27359 - DNA, 16 bp, synthetic construct
  misc_feature 1..16: note = synthetic [barcode part1]
  source 1..16: mol_type = other DNA
cctgtaccgtattctc

SEQ ID NO: 27360 - DNA, 16 bp, synthetic construct
  misc_feature 1..16: note = synthetic [barcode part1]
  source 1..16: mol_type = other DNA
tcgcacgttccaatcg

SEQ ID NO: 27361 - DNA, 16 bp, synthetic construct
  misc_feature 1..16: note = synthetic [barcode part1]
  source 1..16: mol_type = other DNA
cgtgaacgtgaacctt

SEQ ID NO: 27362 - DNA, 16 bp, synthetic construct
  misc_feature 1..16: note = synthetic [barcode part1]
  source 1..16: mol_type = other DNA
aacgacctcggtagtt

SEQ ID NO: 27363 - DNA, 16 bp, synthetic construct
  misc_feature 1..16: note = synthetic [barcode part1]
  source 1..16: mol_type = other DNA
gcgtggtaccaatatc

SEQ ID NO: 27364 - DNA, 16 bp, synthetic construct
  misc_feature 1..16: note = synthetic [barcode part1]
  source 1..16: mol_type = other DNA
ccagagataacggaag

SEQ ID NO: 27365 - DNA, 16 bp, synthetic construct
  misc_feature 1..16: note = synthetic [barcode part1]
  source 1..16: mol_type = other DNA
ccgcagtgtcaattag

SEQ ID NO: 27366 - DNA, 16 bp, synthetic construct
  misc_feature 1..16: note = synthetic [barcode part1]
  source 1..16: mol_type = other DNA
ttgcgcctgtcaggtt

SEQ ID NO: 27367 - DNA, 16 bp, synthetic construct
  misc_feature 1..16: note = synthetic [barcode part1]
  source 1..16: mol_type = other DNA
ttacgcaagagttgag

SEQ ID NO: 27368 - DNA, 16 bp, synthetic construct
  misc_feature 1..16: note = synthetic [barcode part1]
  source 1..16: mol_type = other DNA
aagtattcggaacgac

SEQ ID NO: 27369 - DNA, 16 bp, synthetic construct
  misc_feature 1..16: note = synthetic [barcode part1]
  source 1..16: mol_type = other DNA
gtcaggtaacgcaggt

SEQ ID NO: 27370 - DNA, 16 bp, synthetic construct
  misc_feature 1..16: note = synthetic [barcode part1]
  source 1..16: mol_type = other DNA
tggagagtgcgcaatc

SEQ ID NO: 27371 - DNA, 16 bp, synthetic construct
  misc_feature 1..16: note = synthetic [barcode part1]
  source 1..16: mol_type = other DNA
cgagttaccgatagtc

SEQ ID NO: 27372 - DNA, 16 bp, synthetic construct
  misc_feature 1..16: note = synthetic [barcode part1]
  source 1..16: mol_type = other DNA
tctgccaactatcctc

SEQ ID NO: 27373 - DNA, 16 bp, synthetic construct
  misc_feature 1..16: note = synthetic [barcode part1]
  source 1..16: mol_type = other DNA
agaccaggtcgatacg

SEQ ID NO: 27374 - DNA, 16 bp, synthetic construct
  misc_feature 1..16: note = synthetic [barcode part1]
  source 1..16: mol_type = other DNA
cagtgacagtcactgt

SEQ ID NO: 27375 - DNA, 16 bp, synthetic construct
  misc_feature 1..16: note = synthetic [barcode part1]
  source 1..16: mol_type = other DNA
atccgatcgtatcttg

SEQ ID NO: 27376 - DNA, 16 bp, synthetic construct
  misc_feature 1..16: note = synthetic [barcode part1]
  source 1..16: mol_type = other DNA
gcaacaccaacactgt

SEQ ID NO: 27377 - DNA, 16 bp, synthetic construct
  misc_feature 1..16: note = synthetic [barcode part1]
  source 1..16: mol_type = other DNA
atactccgttgtcagt

SEQ ID NO: 27378 - DNA, 16 bp, synthetic construct
  misc_feature 1..16: note = synthetic [barcode part1]
  source 1..16: mol_type = other DNA
gtgcaatcaatcgcac

SEQ ID NO: 27379 - DNA, 16 bp, synthetic construct
  misc_feature 1..16: note = synthetic [barcode part1]
  source 1..16: mol_type = other DNA
atcttactcgcgtggc

SEQ ID NO: 27380 - DNA, 16 bp, synthetic construct
  misc_feature 1..16: note = synthetic [barcode part1]
  source 1..16: mol_type = other DNA
caggtcgcaataatcc

SEQ ID NO: 27381 - DNA, 16 bp, synthetic construct
  misc_feature 1..16: note = synthetic [barcode part1]
  source 1..16: mol_type = other DNA
cgaagttgcgttgtac

SEQ ID NO: 27382 - DNA, 16 bp, synthetic construct
  misc_feature 1..16: note = synthetic [barcode part1]
  source 1..16: mol_type = other DNA
tgagactcacaacacc

SEQ ID NO: 27383 - DNA, 16 bp, synthetic construct
  misc_feature 1..16: note = synthetic [barcode part1]
  source 1..16: mol_type = other DNA
gtattctgtcaccaac

SEQ ID NO: 27384 - DNA, 16 bp, synthetic construct
  misc_feature 1..16: note = synthetic [barcode part1]
  source 1..16: mol_type = other DNA
gattaagatccaggtg

SEQ ID NO: 27385 - DNA, 16 bp, synthetic construct
  misc_feature 1..16: note = synthetic [barcode part1]
  source 1..16: mol_type = other DNA
gcctctactatcaggc

SEQ ID NO: 27386 - DNA, 16 bp, synthetic construct
  misc_feature 1..16: note = synthetic [barcode part1]
  source 1..16: mol_type = other DNA
gaccgcgttaattctt

SEQ ID NO: 27387 - DNA, 16 bp, synthetic construct
  misc_feature 1..16: note = synthetic [barcode part1]
  source 1..16: mol_type = other DNA
aattctagtccacctg

SEQ ID NO: 27388 - DNA, 16 bp, synthetic construct
  misc_feature 1..16: note = synthetic [barcode part1]
  source 1..16: mol_type = other DNA
tctgattgtgcgttac

SEQ ID NO: 27389 - DNA, 16 bp, synthetic construct
  misc_feature 1..16: note = synthetic [barcode part1]
  source 1..16: mol_type = other DNA
gaacgtggtattcctg

SEQ ID NO: 27390 - DNA, 16 bp, synthetic construct
  misc_feature 1..16: note = synthetic [barcode part1]
  source 1..16: mol_type = other DNA
tctcaacaccactcct

SEQ ID NO: 27391 - DNA, 16 bp, synthetic construct
  misc_feature 1..16: note = synthetic [barcode part1]
  source 1..16: mol_type = other DNA
ttaggtcgcactcctg

SEQ ID NO: 27392 - DNA, 16 bp, synthetic construct
  misc_feature 1..16: note = synthetic [barcode part1]
  source 1..16: mol_type = other DNA
tcgcaattcggagttg

SEQ ID NO: 27393 - DNA, 16 bp, synthetic construct
  misc_feature 1..16: note = synthetic [barcode part1]
  source 1..16: mol_type = other DNA
gacgtccacgagatag

SEQ ID NO: 27394 - DNA, 16 bp, synthetic construct
  misc_feature 1..16: note = synthetic [barcode part1]
  source 1..16: mol_type = other DNA
tcaagtgttgtctcac

SEQ ID NO: 27395 - DNA, 16 bp, synthetic construct
  misc_feature 1..16: note = synthetic [barcode part1]
  source 1..16: mol_type = other DNA
acttcgagttgcagtg

SEQ ID NO: 27396 - DNA, 16 bp, synthetic construct
  misc_feature 1..16: note = synthetic [barcode part1]
  source 1..16: mol_type = other DNA
gcgccaggagaattgt

SEQ ID NO: 27397 - DNA, 16 bp, synthetic construct
  misc_feature 1..16: note = synthetic [barcode part1]
  source 1..16: mol_type = other DNA
tacgttcacctggcgt

SEQ ID NO: 27398 - DNA, 16 bp, synthetic construct
  misc_feature 1..16: note = synthetic [barcode part1]
  source 1..16: mol_type = other DNA
tctactatctccgacc

SEQ ID NO: 27399 - DNA, 16 bp, synthetic construct
  misc_feature 1..16: note = synthetic [barcode part1]
  source 1..16: mol_type = other DNA
gtgattcggattgtcg

SEQ ID NO: 27400 - DNA, 16 bp, synthetic construct
  misc_feature 1..16: note = synthetic [barcode part1]
  source 1..16: mol_type = other DNA
tcgcgagtattccgtc

SEQ ID NO: 27401 - DNA, 16 bp, synthetic construct
  misc_feature 1..16: note = synthetic [barcode part1]
  source 1..16: mol_type = other DNA
caccaggacaacttac

SEQ ID NO: 27402 - DNA, 16 bp, synthetic construct
  misc_feature 1..16: note = synthetic [barcode part1]
  source 1..16: mol_type = other DNA
tcaagatctcactcgt

SEQ ID NO: 27403 - DNA, 16 bp, synthetic construct
  misc_feature 1..16: note = synthetic [barcode part1]
  source 1..16: mol_type = other DNA
tctaccaagtctacgt

SEQ ID NO: 27404 - DNA, 16 bp, synthetic construct
  misc_feature 1..16: note = synthetic [barcode part1]
  source 1..16: mol_type = other DNA
aagatcaccgaacgcg

SEQ ID NO: 27405 - DNA, 16 bp, synthetic construct
  misc_feature 1..16: note = synthetic [barcode part1]
  source 1..16: mol_type = other DNA
tgcgatacttgttcac

SEQ ID NO: 27406 - DNA, 16 bp, synthetic construct
  misc_feature 1..16: note = synthetic [barcode part1]
  source 1..16: mol_type = other DNA
tcagtgttgaccacag

SEQ ID NO: 27407 - DNA, 16 bp, synthetic construct
  misc_feature 1..16: note = synthetic [barcode part1]
  source 1..16: mol_type = other DNA
tccgtaaggacttgtg

SEQ ID NO: 27408 - DNA, 16 bp, synthetic construct
  misc_feature 1..16: note = synthetic [barcode part1]
  source 1..16: mol_type = other DNA
tgtagtcggagtgacg

SEQ ID NO: 27409 - DNA, 16 bp, synthetic construct
  misc_feature 1..16: note = synthetic [barcode part1]
  source 1..16: mol_type = other DNA
gttaattcgcgcacag

SEQ ID NO: 27410 - DNA, 16 bp, synthetic construct
  misc_feature 1..16: note = synthetic [barcode part1]
  source 1..16: mol_type = other DNA
ccacctaacctcgaac

SEQ ID NO: 27411 - DNA, 16 bp, synthetic construct
  misc_feature 1..16: note = synthetic [barcode part1]
  source 1..16: mol_type = other DNA
cgtccactgttgtggt

SEQ ID NO: 27412 - DNA, 16 bp, synthetic construct
  misc_feature 1..16: note = synthetic [barcode part1]
  source 1..16: mol_type = other DNA
ttacacttctggcggc

SEQ ID NO: 27413 - DNA, 16 bp, synthetic construct
  misc_feature 1..16: note = synthetic [barcode part1]
  source 1..16: mol_type = other DNA
aactcgatcttgcgcc

SEQ ID NO: 27414 - DNA, 16 bp, synthetic construct
  misc_feature 1..16: note = synthetic [barcode part1]
  source 1..16: mol_type = other DNA
tgttcactccagagtt

SEQ ID NO: 27415 - DNA, 16 bp, synthetic construct
  misc_feature 1..16: note = synthetic [barcode part1]
  source 1..16: mol_type = other DNA
tcgtaaccgacgttag

SEQ ID NO: 27416 - DNA, 16 bp, synthetic construct
  misc_feature 1..16: note = synthetic [barcode part1]
  source 1..16: mol_type = other DNA
atcttgccactagtgt

SEQ ID NO: 27417 - DNA, 16 bp, synthetic construct
  misc_feature 1..16: note = synthetic [barcode part1]
  source 1..16: mol_type = other DNA
cggatcagtgcaaggt

SEQ ID NO: 27418 - DNA, 16 bp, synthetic construct
  misc_feature 1..16: note = synthetic [barcode part1]
  source 1..16: mol_type = other DNA
tcaacagttcaacggc

SEQ ID NO: 27419 - DNA, 16 bp, synthetic construct
  misc_feature 1..16: note = synthetic [barcode part1]
  source 1..16: mol_type = other DNA
agaggtcttcctcaag

SEQ ID NO: 27420 - DNA, 16 bp, synthetic construct
  misc_feature 1..16: note = synthetic [barcode part1]
  source 1..16: mol_type = other DNA
actagaatcttggccg

SEQ ID NO: 27421 - DNA, 16 bp, synthetic construct
  misc_feature 1..16: note = synthetic [barcode part1]
  source 1..16: mol_type = other DNA
cggcactacctatctg

SEQ ID NO: 27422 - DNA, 16 bp, synthetic construct
  misc_feature 1..16: note = synthetic [barcode part1]
  source 1..16: mol_type = other DNA
tgtagtgccacaacac

SEQ ID NO: 27423 - DNA, 16 bp, synthetic construct
  misc_feature 1..16: note = synthetic [barcode part1]
  source 1..16: mol_type = other DNA
gttaataacgaggcac

SEQ ID NO: 27424 - DNA, 16 bp, synthetic construct
  misc_feature 1..16: note = synthetic [barcode part1]
  source 1..16: mol_type = other DNA
gaactaagtatcggtg

SEQ ID NO: 27425 - DNA, 16 bp, synthetic construct
  misc_feature 1..16: note = synthetic [barcode part1]
  source 1..16: mol_type = other DNA
agtaccttaccttacg

SEQ ID NO: 27426 - DNA, 16 bp, synthetic construct
  misc_feature 1..16: note = synthetic [barcode part1]
  source 1..16: mol_type = other DNA
gcggcagagtatactg

SEQ ID NO: 27427 - DNA, 16 bp, synthetic construct
  misc_feature 1..16: note = synthetic [barcode part1]
  source 1..16: mol_type = other DNA
tcgagatctacttgtc

SEQ ID NO: 27428 - DNA, 16 bp, synthetic construct
  misc_feature 1..16: note = synthetic [barcode part1]
  source 1..16: mol_type = other DNA
cctatcgttcttggtc

SEQ ID NO: 27429 - DNA, 16 bp, synthetic construct
  misc_feature 1..16: note = synthetic [barcode part1]
  source 1..16: mol_type = other DNA
atcgccgtaataaccg

SEQ ID NO: 27430 - DNA, 16 bp, synthetic construct
  misc_feature 1..16: note = synthetic [barcode part1]
  source 1..16: mol_type = other DNA
gacgttggactctagt

SEQ ID NO: 27431 - DNA, 16 bp, synthetic construct
  misc_feature 1..16: note = synthetic [barcode part1]
  source 1..16: mol_type = other DNA
tccgatcgtaccagtc

SEQ ID NO: 27432 - DNA, 16 bp, synthetic construct
  misc_feature 1..16: note = synthetic [barcode part1]
  source 1..16: mol_type = other DNA
taggaggtgtggttgc

SEQ ID NO: 27433 - DNA, 16 bp, synthetic construct
  misc_feature 1..16: note = synthetic [barcode part1]
  source 1..16: mol_type = other DNA
ttgtccagtcttgagt

SEQ ID NO: 27434 - DNA, 16 bp, synthetic construct
  misc_feature 1..16: note = synthetic [barcode part1]
  source 1..16: mol_type = other DNA
ttccgtgttgaattgc

SEQ ID NO: 27435 - DNA, 16 bp, synthetic construct
  misc_feature 1..16: note = synthetic [barcode part1]
  source 1..16: mol_type = other DNA
tggaaccgccgtaatt

SEQ ID NO: 27436 - DNA, 16 bp, synthetic construct
  misc_feature 1..16: note = synthetic [barcode part1]
  source 1..16: mol_type = other DNA
tggttgtgtgaggcag

SEQ ID NO: 27437 - DNA, 16 bp, synthetic construct
  misc_feature 1..16: note = synthetic [barcode part1]
  source 1..16: mol_type = other DNA
tgtgtcaacgtgtcag

SEQ ID NO: 27438 - DNA, 16 bp, synthetic construct
  misc_feature 1..16: note = synthetic [barcode part1]
  source 1..16: mol_type = other DNA
cggagagtaacgcgtt

SEQ ID NO: 27439 - DNA, 16 bp, synthetic construct
  misc_feature 1..16: note = synthetic [barcode part1]
  source 1..16: mol_type = other DNA
gttaggtgaacgtggc

SEQ ID NO: 27440 - DNA, 16 bp, synthetic construct
  misc_feature 1..16: note = synthetic [barcode part1]
  source 1..16: mol_type = other DNA
accagtggtaggacgt

SEQ ID NO: 27441 - DNA, 16 bp, synthetic construct
  misc_feature 1..16: note = synthetic [barcode part1]
  source 1..16: mol_type = other DNA
ttggcagacctccgtt

SEQ ID NO: 27442 - DNA, 16 bp, synthetic construct
  misc_feature 1..16: note = synthetic [barcode part1]
  source 1..16: mol_type = other DNA
atcctagtggttggtg

SEQ ID NO: 27443 - DNA, 16 bp, synthetic construct
  misc_feature 1..16: note = synthetic [barcode part1]
  source 1..16: mol_type = other DNA
gacgtactgtgtggtt

SEQ ID NO: 27444 - DNA, 16 bp, synthetic construct
  misc_feature 1..16: note = synthetic [barcode part1]
  source 1..16: mol_type = other DNA
aggtggatcgcagtac

SEQ ID NO: 27445 - DNA, 16 bp, synthetic construct
  misc_feature 1..16: note = synthetic [barcode part1]
  source 1..16: mol_type = other DNA
cgtggtaggtactact

SEQ ID NO: 27446 - DNA, 16 bp, synthetic construct
  misc_feature 1..16: note = synthetic [barcode part1]
  source 1..16: mol_type = other DNA
tggtcttcgtaatcgt

SEQ ID NO: 27447 - DNA, 16 bp, synthetic construct
  misc_feature 1..16: note = synthetic [barcode part1]
  source 1..16: mol_type = other DNA
acgccttattgccgac

SEQ ID NO: 27448 - DNA, 16 bp, synthetic construct
  misc_feature 1..16: note = synthetic [barcode part1]
  source 1..16: mol_type = other DNA
tggaatcgcgttgtac

SEQ ID NO: 27449 - DNA, 16 bp, synthetic construct
  misc_feature 1..16: note = synthetic [barcode part1]
  source 1..16: mol_type = other DNA
tgtcagttgcacaacg

SEQ ID NO: 27450 - DNA, 16 bp, synthetic construct
  misc_feature 1..16: note = synthetic [barcode part1]
  source 1..16: mol_type = other DNA
actgacggtctaggtt

SEQ ID NO: 27451 - DNA, 16 bp, synthetic construct
  misc_feature 1..16: note = synthetic [barcode part1]
  source 1..16: mol_type = other DNA
tcacagtacacacgtg

SEQ ID NO: 27452 - DNA, 16 bp, synthetic construct
  misc_feature 1..16: note = synthetic [barcode part1]
  source 1..16: mol_type = other DNA
ttgtgtgcacacagtg

SEQ ID NO: 27453 - DNA, 16 bp, synthetic construct
  misc_feature 1..16: note = synthetic [barcode part1]
  source 1..16: mol_type = other DNA
acaacgccttcaaggt

SEQ ID NO: 27454 - DNA, 16 bp, synthetic construct
  misc_feature 1..16: note = synthetic [barcode part1]
  source 1..16: mol_type = other DNA
tctactggtgtaacct

SEQ ID NO: 27455 - DNA, 16 bp, synthetic construct
  misc_feature 1..16: note = synthetic [barcode part1]
  source 1..16: mol_type = other DNA
cggagattctgtatcg

SEQ ID NO: 27456 - DNA, 16 bp, synthetic construct
  misc_feature 1..16: note = synthetic [barcode part1]
  source 1..16: mol_type = other DNA
acaacggataggacag

SEQ ID NO: 27457 - DNA, 16 bp, synthetic construct
  misc_feature 1..16: note = synthetic [barcode part1]
  source 1..16: mol_type = other DNA
attcacgtaacaggag

SEQ ID NO: 27458 - DNA, 16 bp, synthetic construct
  misc_feature 1..16: note = synthetic [barcode part1]
  source 1..16: mol_type = other DNA
cgaagttaggaccttc

SEQ ID NO: 27459 - DNA, 16 bp, synthetic construct
  misc_feature 1..16: note = synthetic [barcode part1]
  source 1..16: mol_type = other DNA
actaattcgcgcgtag

SEQ ID NO: 27460 - DNA, 16 bp, synthetic construct
  misc_feature 1..16: note = synthetic [barcode part1]
  source 1..16: mol_type = other DNA
ttagttcggtgtatcc

SEQ ID NO: 27461 - DNA, 16 bp, synthetic construct
  misc_feature 1..16: note = synthetic [barcode part1]
  source 1..16: mol_type = other DNA
tacgtcagatcctccg

SEQ ID NO: 27462 - DNA, 16 bp, synthetic construct
  source 1..16: mol_type = other DNA
agtcttcctaacacgt

SEQ ID NO: 27463 - DNA, 16 bp, synthetic construct
  misc_feature 1..16: note = synthetic [barcode part1]
  source 1..16: mol_type = other DNA
tatctctgttaccgag

SEQ ID NO: 27464 - DNA, 16 bp, synthetic construct
  misc_feature 1..16: note = synthetic [barcode part1]
  source 1..16: mol_type = other DNA
tgcggatcgaatacct

SEQ ID NO: 27465 - DNA, 16 bp, synthetic construct
  misc_feature 1..16: note = synthetic [barcode part1]
  source 1..16: mol_type = other DNA
gataattgccgccaac

SEQ ID NO: 27466 - DNA, 16 bp, synthetic construct
  misc_feature 1..16: note = synthetic [barcode part1]
  source 1..16: mol_type = other DNA
gaacacttaagacgac

SEQ ID NO: 27467 - DNA, 16 bp, synthetic construct
  misc_feature 1..16: note = synthetic [barcode part1]
  source 1..16: mol_type = other DNA
gtcagaccagatcact

SEQ ID NO: 27468 - DNA, 16 bp, synthetic construct
  misc_feature 1..16: note = synthetic [barcode part1]
  source 1..16: mol_type = other DNA
tcgagatcggaattcc

SEQ ID NO: 27469 - DNA, 16 bp, synthetic construct
  misc_feature 1..16: note = synthetic [barcode part1]
  source 1..16: mol_type = other DNA
tcgcactgtggttcac

SEQ ID NO: 27470 - DNA, 16 bp, synthetic construct
  misc_feature 1..16: note = synthetic [barcode part1]
  source 1..16: mol_type = other DNA
cactcgcacagtacct

SEQ ID NO: 27471 - DNA, 16 bp, synthetic construct
  misc_feature 1..16: note = synthetic [barcode part1]
  source 1..16: mol_type = other DNA
tacgaacgcaacggac

SEQ ID NO: 27472 - DNA, 16 bp, synthetic construct
  misc_feature 1..16: note = synthetic [barcode part1]
  source 1..16: mol_type = other DNA
tggcgtgtctcactac

SEQ ID NO: 27473 - DNA, 16 bp, synthetic construct
  misc_feature 1..16: note = synthetic [barcode part1]
  source 1..16: mol_type = other DNA
acactgtctgtccgtg

SEQ ID NO: 27474 - DNA, 16 bp, synthetic construct
  misc_feature 1..16: note = synthetic [barcode part1]
  source 1..16: mol_type = other DNA
accaggagattaggag

SEQ ID NO: 27475 - DNA, 16 bp, synthetic construct
  misc_feature 1..16: note = synthetic [barcode part1]
  source 1..16: mol_type = other DNA
ttcttccgtcggttac

SEQ ID NO: 27476 - DNA, 16 bp, synthetic construct
  misc_feature 1..16: note = synthetic [barcode part1]
  source 1..16: mol_type = other DNA
cctctggcacgattgt

SEQ ID NO: 27477 - DNA, 16 bp, synthetic construct
  misc_feature 1..16: note = synthetic [barcode part1]
  source 1..16: mol_type = other DNA
aattcctaactgcacc

SEQ ID NO: 27478 - DNA, 16 bp, synthetic construct
  misc_feature 1..16: note = synthetic [barcode part1]
  source 1..16: mol_type = other DNA
tcgtaaccttcggaag

SEQ ID NO: 27479 - DNA, 16 bp, synthetic construct
  misc_feature 1..16: note = synthetic [barcode part1]
  source 1..16: mol_type = other DNA
agaccgtggtataagt

SEQ ID NO: 27480 - DNA, 16 bp, synthetic construct
  misc_feature 1..16: note = synthetic [barcode part1]
  source 1..16: mol_type = other DNA
gcaaccgataccaatc

SEQ ID NO: 27481 - DNA, 16 bp, synthetic construct
  misc_feature 1..16: note = synthetic [barcode part1]
  source 1..16: mol_type = other DNA
attgcgtgattacgcg

SEQ ID NO: 27482 - DNA, 16 bp, synthetic construct
  misc_feature 1..16: note = synthetic [barcode part1]
  source 1..16: mol_type = other DNA
aactcagagtccaacc

SEQ ID NO: 27483 - DNA, 16 bp, synthetic construct
  misc_feature 1..16: note = synthetic [barcode part1]
  source 1..16: mol_type = other DNA
gcgcgactgatatact

SEQ ID NO: 27484 - DNA, 16 bp, synthetic construct
  misc_feature 1..16: note = synthetic [barcode part1]
  source 1..16: mol_type = other DNA
tcctatactagtgacc

SEQ ID NO: 27485 - DNA, 16 bp, synthetic construct
  misc_feature 1..16: note = synthetic [barcode part1]
  source 1..16: mol_type = other DNA
aataactccagaccgc

SEQ ID NO: 27486 - DNA, 16 bp, synthetic construct
  misc_feature 1..16: note = synthetic [barcode part1]
  source 1..16: mol_type = other DNA
gacgtatatactggcc

SEQ ID NO: 27487 - DNA, 16 bp, synthetic construct
  misc_feature 1..16: note = synthetic [barcode part1]
  source 1..16: mol_type = other DNA
ccgtagacgagaggtt

SEQ ID NO: 27488 - DNA, 16 bp, synthetic construct
  misc_feature 1..16: note = synthetic [barcode part1]
  source 1..16: mol_type = other DNA
attatacgtcgccttg

SEQ ID NO: 27489 - DNA, 16 bp, synthetic construct
  misc_feature 1..16: note = synthetic [barcode part1]
  source 1..16: mol_type = other DNA
tggtgttgtcctgaag

SEQ ID NO: 27490 - DNA, 16 bp, synthetic construct
  misc_feature 1..16: note = synthetic [barcode part1]
  source 1..16: mol_type = other DNA
gtaatcctctgtgccg

SEQ ID NO: 27491 - DNA, 16 bp, synthetic construct
  misc_feature 1..16: note = synthetic [barcode part1]
  source 1..16: mol_type = other DNA
ttgcagtcacacacag

SEQ ID NO: 27492 - DNA, 16 bp, synthetic construct
  misc_feature 1..16: note = synthetic [barcode part1]
  source 1..16: mol_type = other DNA
tggtatccaagatccg

SEQ ID NO: 27493 - DNA, 16 bp, synthetic construct
  misc_feature 1..16: note = synthetic [barcode part1]
  source 1..16: mol_type = other DNA
tactcttccggcaacg

SEQ ID NO: 27494 - DNA, 16 bp, synthetic construct
  misc_feature 1..16: note = synthetic [barcode part1]
  source 1..16: mol_type = other DNA
acaagtcgtgtctgac

SEQ ID NO: 27495 - DNA, 16 bp, synthetic construct
  misc_feature 1..16: note = synthetic [barcode part1]
  source 1..16: mol_type = other DNA
aaggtggtctgttgtc

SEQ ID NO: 27496 - DNA, 16 bp, synthetic construct
  misc_feature 1..16: note = synthetic [barcode part1]
  source 1..16: mol_type = other DNA
tcagttgcgcgtatag

SEQ ID NO: 27497 - DNA, 16 bp, synthetic construct
  misc_feature 1..16: note = synthetic [barcode part1]
  source 1..16: mol_type = other DNA
gcacgatagtcttctt

SEQ ID NO: 27498 - DNA, 16 bp, synthetic construct
  misc_feature 1..16: note = synthetic [barcode part1]
  source 1..16: mol_type = other DNA
aacggacgcgatactg

SEQ ID NO: 27499 - DNA, 16 bp, synthetic construct
  misc_feature 1..16: note = synthetic [barcode part1]
  source 1..16: mol_type = other DNA
agaggtcttgatctcg

SEQ ID NO: 27500 - DNA, 16 bp, synthetic construct
  misc_feature 1..16: note = synthetic [barcode part1]
  source 1..16: mol_type = other DNA
aggtgtcttcgccact

SEQ ID NO: 27501 - DNA, 16 bp, synthetic construct
  misc_feature 1..16: note = synthetic [barcode part1]
  source 1..16: mol_type = other DNA
caccttgaggcctatc

SEQ ID NO: 27502 - DNA, 16 bp, synthetic construct
  misc_feature 1..16: note = synthetic [barcode part1]
  source 1..16: mol_type = other DNA
tctcgacgtattcaac

SEQ ID NO: 27503 - DNA, 16 bp, synthetic construct
  misc_feature 1..16: note = synthetic [barcode part1]
  source 1..16: mol_type = other DNA
agtgtggtcgtcagag

SEQ ID NO: 27504 - DNA, 16 bp, synthetic construct
  misc_feature 1..16: note = synthetic [barcode part1]
  source 1..16: mol_type = other DNA
aggttgtggtagtctc

SEQ ID NO: 27505 - DNA, 16 bp, synthetic construct
  misc_feature 1..16: note = synthetic [barcode part1]
  source 1..16: mol_type = other DNA
acagtaacgagaggtg

SEQ ID NO: 27506 - DNA, 16 bp, synthetic construct
  misc_feature 1..16: note = synthetic [barcode part1]
  source 1..16: mol_type = other DNA
ttcaggtccaccgttg

SEQ ID NO: 27507 - DNA, 16 bp, synthetic construct
  misc_feature 1..16: note = synthetic [barcode part1]
  source 1..16: mol_type = other DNA
accgtaacgcctatcc

SEQ ID NO: 27508 - DNA, 16 bp, synthetic construct
  misc_feature 1..16: note = synthetic [barcode part1]
  source 1..16: mol_type = other DNA
atccaccttacctgtc

SEQ ID NO: 27509 - DNA, 16 bp, synthetic construct
  misc_feature 1..16: note = synthetic [barcode part1]
  source 1..16: mol_type = other DNA
cgcctacttatccgtt

SEQ ID NO: 27510 - DNA, 16 bp, synthetic construct
  misc_feature 1..16: note = synthetic [barcode part1]
  source 1..16: mol_type = other DNA
aggattccagacggac

SEQ ID NO: 27511 - DNA, 16 bp, synthetic construct
  misc_feature 1..16: note = synthetic [barcode part1]
  source 1..16: mol_type = other DNA
ccgttctctgatatag

SEQ ID NO: 27512 - DNA, 16 bp, synthetic construct
  misc_feature 1..16: note = synthetic [barcode part1]
  source 1..16: mol_type = other DNA
tgtagacgacaggacc

SEQ ID NO: 27513 - DNA, 16 bp, synthetic construct
  misc_feature 1..16: note = synthetic [barcode part1]
  source 1..16: mol_type = other DNA
agtgatataccgtccg

SEQ ID NO: 27514 - DNA, 16 bp, synthetic construct
  misc_feature 1..16: note = synthetic [barcode part1]
  source 1..16: mol_type = other DNA
gacacactgcagttgt

SEQ ID NO: 27515 - DNA, 16 bp, synthetic construct
  misc_feature 1..16: note = synthetic [barcode part1]
  source 1..16: mol_type = other DNA
tgcagttagagatcag

SEQ ID NO: 27516 - DNA, 16 bp, synthetic construct
  misc_feature 1..16: note = synthetic [barcode part1]
  source 1..16: mol_type = other DNA
agaagtagacgattcc

SEQ ID NO: 27517 - DNA, 16 bp, synthetic construct
  misc_feature 1..16: note = synthetic [barcode part1]
  source 1..16: mol_type = other DNA
aagtccgtccgacctt

SEQ ID NO: 27518 - DNA, 16 bp, synthetic construct
  misc_feature 1..16: note = synthetic [barcode part1]
  source 1..16: mol_type = other DNA
acgccaacctccagtt

SEQ ID NO: 27519 - DNA, 16 bp, synthetic construct
  misc_feature 1..16: note = synthetic [barcode part1]
  source 1..16: mol_type = other DNA
taaggcctggtgttgt

SEQ ID NO: 27520 - DNA, 16 bp, synthetic construct
  misc_feature 1..16: note = synthetic [barcode part1]
  source 1..16: mol_type = other DNA
cgcgttccaggttact

SEQ ID NO: 27521 - DNA, 16 bp, synthetic construct
  misc_feature 1..16: note = synthetic [barcode part1]
  source 1..16: mol_type = other DNA
gtgttagaaggattgc

SEQ ID NO: 27522 - DNA, 16 bp, synthetic construct
  misc_feature 1..16: note = synthetic [barcode part1]
  source 1..16: mol_type = other DNA
ttacgcctaagttacc

SEQ ID NO: 27523 - DNA, 16 bp, synthetic construct
  misc_feature 1..16: note = synthetic [barcode part1]
  source 1..16: mol_type = other DNA
caccagagtagagatt

SEQ ID NO: 27524 - DNA, 16 bp, synthetic construct
  misc_feature 1..16: note = synthetic [barcode part1]
  source 1..16: mol_type = other DNA
attgtggagattccgc

SEQ ID NO: 27525 - DNA, 16 bp, synthetic construct
  misc_feature 1..16: note = synthetic [barcode part1]
  source 1..16: mol_type = other DNA
tgttggtaagaccaag

SEQ ID NO: 27526 - DNA, 16 bp, synthetic construct
  misc_feature 1..16: note = synthetic [barcode part1]
  source 1..16: mol_type = other DNA
cctgtggtattgtccg

SEQ ID NO: 27527 - DNA, 16 bp, synthetic construct
  misc_feature 1..16: note = synthetic [barcode part1]
  source 1..16: mol_type = other DNA
caggtataaggactac

SEQ ID NO: 27528 - DNA, 16 bp, synthetic construct
  misc_feature 1..16: note = synthetic [barcode part1]
  source 1..16: mol_type = other DNA
tcagtagtgccttcgc

SEQ ID NO: 27529 - DNA, 16 bp, synthetic construct
  misc_feature 1..16: note = synthetic [barcode part1]
  source 1..16: mol_type = other DNA
tgtgcctaatagtctc

SEQ ID NO: 27530 - DNA, 16 bp, synthetic construct
  misc_feature 1..16: note = synthetic [barcode part1]
  source 1..16: mol_type = other DNA
gtacggaggtgacttg

SEQ ID NO: 27531 - DNA, 16 bp, synthetic construct
  misc_feature 1..16: note = synthetic [barcode part1]
  source 1..16: mol_type = other DNA
agaccgtgaactgtct

SEQ ID NO: 27532 - DNA, 16 bp, synthetic construct
  misc_feature 1..16: note = synthetic [barcode part1]
  source 1..16: mol_type = other DNA
gttcgcctagagtcct

SEQ ID NO: 27533 - DNA, 16 bp, synthetic construct
  misc_feature 1..16: note = synthetic [barcode part1]
  source 1..16: mol_type = other DNA
aatcagtgccgtgact

SEQ ID NO: 27534 - DNA, 16 bp, synthetic construct
  misc_feature 1..16: note = synthetic [barcode part1]
  source 1..16: mol_type = other DNA
gttcttagtcctcgtc

SEQ ID NO: 27535 - DNA, 16 bp, synthetic construct
  misc_feature 1..16: note = synthetic [barcode part1]
  source 1..16: mol_type = other DNA
aaccacgtcaacttct

SEQ ID NO: 27536 - DNA, 16 bp, synthetic construct
  misc_feature 1..16: note = synthetic [barcode part1]
  source 1..16: mol_type = other DNA
tagagaggcgtaccgt

SEQ ID NO: 27537 - DNA, 16 bp, synthetic construct
  misc_feature 1..16: note = synthetic [barcode part1]
  source 1..16: mol_type = other DNA
ataggcctaatcctct

SEQ ID NO: 27538 - DNA, 16 bp, synthetic construct
  misc_feature 1..16: note = synthetic [barcode part1]
  source 1..16: mol_type = other DNA
aggagtgtgttcttgc

SEQ ID NO: 27539 - DNA, 16 bp, synthetic construct
  misc_feature 1..16: note = synthetic [barcode part1]
  source 1..16: mol_type = other DNA
attcctgccacgttct

SEQ ID NO: 27540 - DNA, 16 bp, synthetic construct
  misc_feature 1..16: note = synthetic [barcode part1]
  source 1..16: mol_type = other DNA
tactggatactggacc

SEQ ID NO: 27541 - DNA, 16 bp, synthetic construct
  misc_feature 1..16: note = synthetic [barcode part1]
  source 1..16: mol_type = other DNA
agatagacaggatctc

SEQ ID NO: 27542 - DNA, 16 bp, synthetic construct
  misc_feature 1..16: note = synthetic [barcode part1]
  source 1..16: mol_type = other DNA
tctagtcctgactcct

SEQ ID NO: 27543 - DNA, 16 bp, synthetic construct
  misc_feature 1..16: note = synthetic [barcode part1]
  source 1..16: mol_type = other DNA
cggtaacacgcaaggt

SEQ ID NO: 27544 - DNA, 16 bp, synthetic construct
  misc_feature 1..16: note = synthetic [barcode part1]
  source 1..16: mol_type = other DNA
caacagtgcgcagaac

SEQ ID NO: 27545 - DNA, 16 bp, synthetic construct
  misc_feature 1..16: note = synthetic [barcode part1]
  source 1..16: mol_type = other DNA
ttgaacgtcgcctcac

SEQ ID NO: 27546 - DNA, 16 bp, synthetic construct
  misc_feature 1..16: note = synthetic [barcode part1]
  source 1..16: mol_type = other DNA
taaggccttctctcct

SEQ ID NO: 27547 - DNA, 16 bp, synthetic construct
  misc_feature 1..16: note = synthetic [barcode part1]
  source 1..16: mol_type = other DNA
atcggtggtaaggcgt

SEQ ID NO: 27548 - DNA, 16 bp, synthetic construct
  misc_feature 1..16: note = synthetic [barcode part1]
  source 1..16: mol_type = other DNA
ttcctctgagaaggac

SEQ ID NO: 27549 - DNA, 16 bp, synthetic construct
  misc_feature 1..16: note = synthetic [barcode part1]
  source 1..16: mol_type = other DNA
gttacaccacagatcg

SEQ ID NO: 27550 - DNA, 16 bp, synthetic construct
  misc_feature 1..16: note = synthetic [barcode part1]
  source 1..16: mol_type = other DNA
atctctacgtctctgc

SEQ ID NO: 27551 - DNA, 16 bp, synthetic construct
  misc_feature 1..16: note = synthetic [barcode part1]
  source 1..16: mol_type = other DNA
tggccttagttaaggc

SEQ ID NO: 27552 - DNA, 16 bp, synthetic construct
  misc_feature 1..16: note = synthetic [barcode part1]
  source 1..16: mol_type = other DNA
tggacgcaggagttac

SEQ ID NO: 27553 - DNA, 16 bp, synthetic construct
  misc_feature 1..16: note = synthetic [barcode part1]
  source 1..16: mol_type = other DNA
aatcgaaccgtgtaag

SEQ ID NO: 27554 - DNA, 16 bp, synthetic construct
  misc_feature 1..16: note = synthetic [barcode part1]
  source 1..16: mol_type = other DNA
tgttcgcgtcctagac

SEQ ID NO: 27555 - DNA, 16 bp, synthetic construct
  misc_feature 1..16: note = synthetic [barcode part1]
  source 1..16: mol_type = other DNA
ataccttgattcggtc

SEQ ID NO: 27556 - DNA, 16 bp, synthetic construct
  misc_feature 1..16: note = synthetic [barcode part1]
  source 1..16: mol_type = other DNA
agatacactggatcag

SEQ ID NO: 27557 - DNA, 16 bp, synthetic construct
  misc_feature 1..16: note = synthetic [barcode part1]
  source 1..16: mol_type = other DNA
atcacgactgcagtac

SEQ ID NO: 27558 - DNA, 16 bp, synthetic construct
  misc_feature 1..16: note = synthetic [barcode part1]
  source 1..16: mol_type = other DNA
gcacagattacgtctg

SEQ ID NO: 27559 - DNA, 16 bp, synthetic construct
  misc_feature 1..16: note = synthetic [barcode part1]
  source 1..16: mol_type = other DNA
cctgtaatctgtcgcg

SEQ ID NO: 27560 - DNA, 16 bp, synthetic construct
  misc_feature 1..16: note = synthetic [barcode part1]
  source 1..16: mol_type = other DNA
gtcttcctgcgactag

SEQ ID NO: 27561 - DNA, 16 bp, synthetic construct
  misc_feature 1..16: note = synthetic [barcode part1]
  source 1..16: mol_type = other DNA
atatctcgagaacgcc

SEQ ID NO: 27562 - DNA, 16 bp, synthetic construct
  misc_feature 1..16: note = synthetic [barcode part1]
  source 1..16: mol_type = other DNA
atccaggagtagagtt

SEQ ID NO: 27563 - DNA, 16 bp, synthetic construct
  misc_feature 1..16: note = synthetic [barcode part1]
  source 1..16: mol_type = other DNA
ataatctgcctctgtg

SEQ ID NO: 27564 - DNA, 16 bp, synthetic construct
  misc_feature 1..16: note = synthetic [barcode part1]
  source 1..16: mol_type = other DNA
cagagtcgtgtacgtt

SEQ ID NO: 27565 - DNA, 16 bp, synthetic construct
  misc_feature 1..16: note = synthetic [barcode part1]
  source 1..16: mol_type = other DNA
gcgaacttggcgaagt

SEQ ID NO: 27566 - DNA, 16 bp, synthetic construct
  misc_feature 1..16: note = synthetic [barcode part1]
  source 1..16: mol_type = other DNA
caacctattcgcaccg

SEQ ID NO: 27567 - DNA, 16 bp, synthetic construct
  misc_feature 1..16: note = synthetic [barcode part1]
  source 1..16: mol_type = other DNA
acagagacgacaatct

SEQ ID NO: 27568 - DNA, 16 bp, synthetic construct
  misc_feature 1..16: note = synthetic [barcode part1]
  source 1..16: mol_type = other DNA
aatccactctaggcag

SEQ ID NO: 27569 - DNA, 16 bp, synthetic construct
  misc_feature 1..16: note = synthetic [barcode part1]
  source 1..16: mol_type = other DNA
gcactaagaagattgc

SEQ ID NO: 27570 - DNA, 16 bp, synthetic construct
  misc_feature 1..16: note = synthetic [barcode part1]
  source 1..16: mol_type = other DNA
gtgcaacaaccgaggt

SEQ ID NO: 27571 - DNA, 16 bp, synthetic construct
  misc_feature 1..16: note = synthetic [barcode part1]
  source 1..16: mol_type = other DNA
gagtcagactgcgtag

SEQ ID NO: 27572 - DNA, 16 bp, synthetic construct
  misc_feature 1..16: note = synthetic [barcode part1]
  source 1..16: mol_type = other DNA
gtatccttagttcggt

SEQ ID NO: 27573 - DNA, 16 bp, synthetic construct
  misc_feature 1..16: note = synthetic [barcode part1]
  source 1..16: mol_type = other DNA
acaatccactcttgtg

SEQ ID NO: 27574 - DNA, 16 bp, synthetic construct
  misc_feature 1..16: note = synthetic [barcode part1]
  source 1..16: mol_type = other DNA
attggtggtctagacc

SEQ ID NO: 27575 - DNA, 16 bp, synthetic construct
  misc_feature 1..16: note = synthetic [barcode part1]
  source 1..16: mol_type = other DNA
gtagtctggcacgaag

SEQ ID NO: 27576 - DNA, 16 bp, synthetic construct
  misc_feature 1..16: note = synthetic [barcode part1]
  source 1..16: mol_type = other DNA
gtaggccagaacgatc

SEQ ID NO: 27577 - DNA, 16 bp, synthetic construct
  misc_feature 1..16: note = synthetic [barcode part1]
  source 1..16: mol_type = other DNA
gatctaacttccgtgt

SEQ ID NO: 27578 - DNA, 16 bp, synthetic construct
  misc_feature 1..16: note = synthetic [barcode part1]
  source 1..16: mol_type = other DNA
gtcaacggtccgaatt

SEQ ID NO: 27579 - DNA, 16 bp, synthetic construct
  misc_feature 1..16: note = synthetic [barcode part1]
  source 1..16: mol_type = other DNA
gcgtagtctaactctt

SEQ ID NO: 27580 - DNA, 16 bp, synthetic construct
  misc_feature 1..16: note = synthetic [barcode part1]
  source 1..16: mol_type = other DNA
tacagacacaggtctc

SEQ ID NO: 27581 - DNA, 16 bp, synthetic construct
  misc_feature 1..16: note = synthetic [barcode part1]
  source 1..16: mol_type = other DNA
gaactgcaggtgtggt

SEQ ID NO: 27582 - DNA, 16 bp, synthetic construct
  misc_feature 1..16: note = synthetic [barcode part1]
  source 1..16: mol_type = other DNA
taacgactggcaactc

SEQ ID NO: 27583 - DNA, 16 bp, synthetic construct
  misc_feature 1..16: note = synthetic [barcode part1]
  source 1..16: mol_type = other DNA
tgcaccgttcctcaag

SEQ ID NO: 27584 - DNA, 16 bp, synthetic construct
  misc_feature 1..16: note = synthetic [barcode part1]
  source 1..16: mol_type = other DNA
aacgatcgaggtatac

SEQ ID NO: 27585 - DNA, 16 bp, synthetic construct
  misc_feature 1..16: note = synthetic [barcode part1]
  source 1..16: mol_type = other DNA
gttacctgatatccgt

SEQ ID NO: 27586 - DNA, 16 bp, synthetic construct
  misc_feature 1..16: note = synthetic [barcode part1]
  source 1..16: mol_type = other DNA
gtcgcacgagaatcag

SEQ ID NO: 27587 - DNA, 16 bp, synthetic construct
  misc_feature 1..16: note = synthetic [barcode part1]
  source 1..16: mol_type = other DNA
actaatactgccgttc

SEQ ID NO: 27588 - DNA, 16 bp, synthetic construct
  misc_feature 1..16: note = synthetic [barcode part1]
  source 1..16: mol_type = other DNA
tgcgtaagttcgaacc

SEQ ID NO: 27589 - DNA, 16 bp, synthetic construct
  misc_feature 1..16: note = synthetic [barcode part1]
  source 1..16: mol_type = other DNA
caagtcaggaggtacc

SEQ ID NO: 27590 - DNA, 16 bp, synthetic construct
  misc_feature 1..16: note = synthetic [barcode part1]
  source 1..16: mol_type = other DNA
gcaatcttggactgtg

SEQ ID NO: 27591 - DNA, 16 bp, synthetic construct
  misc_feature 1..16: note = synthetic [barcode part1]
  source 1..16: mol_type = other DNA
gcgcgagtattgaacg

SEQ ID NO: 27592 - DNA, 16 bp, synthetic construct
  misc_feature 1..16: note = synthetic [barcode part1]
  source 1..16: mol_type = other DNA
gaccttagagtaggcg

SEQ ID NO: 27593 - DNA, 16 bp, synthetic construct
  misc_feature 1..16: note = synthetic [barcode part1]
  source 1..16: mol_type = other DNA
gttgtaacggataggt

SEQ ID NO: 27594 - DNA, 16 bp, synthetic construct
  misc_feature 1..16: note = synthetic [barcode part1]
  source 1..16: mol_type = other DNA
ttggagttgagacctc

SEQ ID NO: 27595 - DNA, 16 bp, synthetic construct
  misc_feature 1..16: note = synthetic [barcode part1]
  source 1..16: mol_type = other DNA
tacgcaataggcctac

SEQ ID NO: 27596 - DNA, 16 bp, synthetic construct
  misc_feature 1..16: note = synthetic [barcode part1]
  source 1..16: mol_type = other DNA
cgcgcagtaaggaact

SEQ ID NO: 27597 - DNA, 16 bp, synthetic construct
  misc_feature 1..16: note = synthetic [barcode part1]
  source 1..16: mol_type = other DNA
actctcgattctcgtc

SEQ ID NO: 27598 - DNA, 16 bp, synthetic construct
  misc_feature 1..16: note = synthetic [barcode part1]
  source 1..16: mol_type = other DNA
ccacacttagattacc

SEQ ID NO: 27599 - DNA, 16 bp, synthetic construct
  misc_feature 1..16: note = synthetic [barcode part1]
  source 1..16: mol_type = other DNA
ttctcctctcttctcc

SEQ ID NO: 27600 - DNA, 16 bp, synthetic construct
  misc_feature 1..16: note = synthetic [barcode part1]
  source 1..16: mol_type = other DNA
ttcgcgtgtataaggc

SEQ ID NO: 27601 - DNA, 16 bp, synthetic construct
  misc_feature 1..16: note = synthetic [barcode part1]
  source 1..16: mol_type = other DNA
tactattgtggccgtt

SEQ ID NO: 27602 - DNA, 16 bp, synthetic construct
  misc_feature 1..16: note = synthetic [barcode part1]
  source 1..16: mol_type = other DNA
gtgtcaacgcaagttc

SEQ ID NO: 27603 - DNA, 16 bp, synthetic construct
  misc_feature 1..16: note = synthetic [barcode part1]
  source 1..16: mol_type = other DNA
tgttgcctactctacc

SEQ ID NO: 27604 - DNA, 16 bp, synthetic construct
  misc_feature 1..16: note = synthetic [barcode part1]
  source 1..16: mol_type = other DNA
gacaatattcaccgcg

SEQ ID NO: 27605 - DNA, 16 bp, synthetic construct
  misc_feature 1..16: note = synthetic [barcode part1]
  source 1..16: mol_type = other DNA
tggcgtagatctgtgt

SEQ ID NO: 27606 - DNA, 16 bp, synthetic construct
  misc_feature 1..16: note = synthetic [barcode part1]
  source 1..16: mol_type = other DNA
gttgatatctggtcct

SEQ ID NO: 27607 - DNA, 16 bp, synthetic construct
  misc_feature 1..16: note = synthetic [barcode part1]
  source 1..16: mol_type = other DNA
tccaattgtgtgccgc

SEQ ID NO: 27608 - DNA, 16 bp, synthetic construct
  misc_feature 1..16: note = synthetic [barcode part1]
  source 1..16: mol_type = other DNA
gacagacaacggatag

SEQ ID NO: 27609 - DNA, 16 bp, synthetic construct
  misc_feature 1..16: note = synthetic [barcode part1]
  source 1..16: mol_type = other DNA
ccacagattcagttct

SEQ ID NO: 27610 - DNA, 16 bp, synthetic construct
  misc_feature 1..16: note = synthetic [barcode part1]
  source 1..16: mol_type = other DNA
tgaagttgcaccacgt

SEQ ID NO: 27611 - DNA, 16 bp, synthetic construct
  misc_feature 1..16: note = synthetic [barcode part1]
  source 1..16: mol_type = other DNA
gaaggtggacgattcc

SEQ ID NO: 27612 - DNA, 16 bp, synthetic construct
  misc_feature 1..16: note = synthetic [barcode part1]
  source 1..16: mol_type = other DNA
acagactagaacggcc

SEQ ID NO: 27613 - DNA, 16 bp, synthetic construct
  misc_feature 1..16: note = synthetic [barcode part1]
  source 1..16: mol_type = other DNA
gcggatacttgttcag

SEQ ID NO: 27614 - DNA, 16 bp, synthetic construct
  misc_feature 1..16: note = synthetic [barcode part1]
  source 1..16: mol_type = other DNA
tgagtggactctggag

SEQ ID NO: 27615 - DNA, 16 bp, synthetic construct
  misc_feature 1..16: note = synthetic [barcode part1]
  source 1..16: mol_type = other DNA
acaacctcgttagacg

SEQ ID NO: 27616 - DNA, 16 bp, synthetic construct
  misc_feature 1..16: note = synthetic [barcode part1]
  source 1..16: mol_type = other DNA
gtggcacaatcagttc

SEQ ID NO: 27617 - DNA, 16 bp, synthetic construct
  misc_feature 1..16: note = synthetic [barcode part1]
  source 1..16: mol_type = other DNA
tgcgagtcagatacct

SEQ ID NO: 27618 - DNA, 16 bp, synthetic construct
  misc_feature 1..16: note = synthetic [barcode part1]
  source 1..16: mol_type = other DNA
gtattggacgtgatcc

SEQ ID NO: 27619 - DNA, 16 bp, synthetic construct
  misc_feature 1..16: note = synthetic [barcode part1]
  source 1..16: mol_type = other DNA
agactgtcaggagtgc

SEQ ID NO: 27620 - DNA, 16 bp, synthetic construct
  misc_feature 1..16: note = synthetic [barcode part1]
  source 1..16: mol_type = other DNA
gattccttcctcgact

SEQ ID NO: 27621 - DNA, 16 bp, synthetic construct
  misc_feature 1..16: note = synthetic [barcode part1]
  source 1..16: mol_type = other DNA
ttcctaacgtgtgatc

SEQ ID NO: 27622 - DNA, 16 bp, synthetic construct
  misc_feature 1..16: note = synthetic [barcode part1]
  source 1..16: mol_type = other DNA
aggtattcgccgcctt

SEQ ID NO: 27623 - DNA, 16 bp, synthetic construct
  misc_feature 1..16: note = synthetic [barcode part1]
  source 1..16: mol_type = other DNA
ccaagagttgagtgcg

SEQ ID NO: 27624 - DNA, 16 bp, synthetic construct
  misc_feature 1..16: note = synthetic [barcode part1]
  source 1..16: mol_type = other DNA
ttctgtagaccactac

SEQ ID NO: 27625 - DNA, 16 bp, synthetic construct
  misc_feature 1..16: note = synthetic [barcode part1]
  source 1..16: mol_type = other DNA
ttaccactgaggcagt

SEQ ID NO: 27626 - DNA, 16 bp, synthetic construct
  misc_feature 1..16: note = synthetic [barcode part1]
  source 1..16: mol_type = other DNA
attaaggtcggttccg

SEQ ID NO: 27627 - DNA, 16 bp, synthetic construct
  misc_feature 1..16: note = synthetic [barcode part1]
  source 1..16: mol_type = other DNA
tgacagttacgaagac

SEQ ID NO: 27628 - DNA, 16 bp, synthetic construct
  misc_feature 1..16: note = synthetic [barcode part1]
  source 1..16: mol_type = other DNA
aacggagtgcagatcc

SEQ ID NO: 27629 - DNA, 16 bp, synthetic construct
  misc_feature 1..16: note = synthetic [barcode part1]
  source 1..16: mol_type = other DNA
gagatctacttcaggc

SEQ ID NO: 27630 - DNA, 16 bp, synthetic construct
  misc_feature 1..16: note = synthetic [barcode part1]
  source 1..16: mol_type = other DNA
acacgaggaattgttg

SEQ ID NO: 27631 - DNA, 16 bp, synthetic construct
  misc_feature 1..16: note = synthetic [barcode part1]
  source 1..16: mol_type = other DNA
gattagaggacgtccg

SEQ ID NO: 27632 - DNA, 16 bp, synthetic construct
  misc_feature 1..16: note = synthetic [barcode part1]
  source 1..16: mol_type = other DNA
cagttcaccgtactcg

SEQ ID NO: 27633 - DNA, 16 bp, synthetic construct
  misc_feature 1..16: note = synthetic [barcode part1]
  source 1..16: mol_type = other DNA
aagatcctcgtggtac

SEQ ID NO: 27634 - DNA, 16 bp, synthetic construct
  misc_feature 1..16: note = synthetic [barcode part1]
  source 1..16: mol_type = other DNA
tatctaaggtcgcgtg

SEQ ID NO: 27635 - DNA, 16 bp, synthetic construct
  misc_feature 1..16: note = synthetic [barcode part1]
  source 1..16: mol_type = other DNA
ttctgccgtgagtctg

SEQ ID NO: 27636 - DNA, 16 bp, synthetic construct
  misc_feature 1..16: note = synthetic [barcode part1]
  source 1..16: mol_type = other DNA
agacaggttgcggtac

SEQ ID NO: 27637 - DNA, 16 bp, synthetic construct
  misc_feature 1..16: note = synthetic [barcode part1]
  source 1..16: mol_type = other DNA
acaatccgcgacttag

SEQ ID NO: 27638 - DNA, 16 bp, synthetic construct
  misc_feature 1..16: note = synthetic [barcode part1]
  source 1..16: mol_type = other DNA
tagagtcgtcagttgc

SEQ ID NO: 27639 - DNA, 16 bp, synthetic construct
  misc_feature 1..16: note = synthetic [barcode part1]
  source 1..16: mol_type = other DNA
ccttggtggttgtgtc

SEQ ID NO: 27640 - DNA, 16 bp, synthetic construct
  misc_feature 1..16: note = synthetic [barcode part1]
  source 1..16: mol_type = other DNA
cgccgaatatctctgc

SEQ ID NO: 27641 - DNA, 16 bp, synthetic construct
  misc_feature 1..16: note = synthetic [barcode part1]
  source 1..16: mol_type = other DNA
caccgaaggattgtct

SEQ ID NO: 27642 - DNA, 16 bp, synthetic construct
  misc_feature 1..16: note = synthetic [barcode part1]
  source 1..16: mol_type = other DNA
caggagtcgtcaagtg

SEQ ID NO: 27643 - DNA, 16 bp, synthetic construct
  misc_feature 1..16: note = synthetic [barcode part1]
  source 1..16: mol_type = other DNA
aatacagtggatcgtg

SEQ ID NO: 27644 - DNA, 16 bp, synthetic construct
  misc_feature 1..16: note = synthetic [barcode part1]
  source 1..16: mol_type = other DNA
tcacagtgtgtgtacg

SEQ ID NO: 27645 - DNA, 16 bp, synthetic construct
  misc_feature 1..16: note = synthetic [barcode part1]
  source 1..16: mol_type = other DNA
ttgcctagacgagtgt

SEQ ID NO: 27646 - DNA, 16 bp, synthetic construct
  misc_feature 1..16: note = synthetic [barcode part1]
  source 1..16: mol_type = other DNA
cgacgtctgttgtaag

SEQ ID NO: 27647 - DNA, 16 bp, synthetic construct
  misc_feature 1..16: note = synthetic [barcode part1]
  source 1..16: mol_type = other DNA
atcgtctacggatctt

SEQ ID NO: 27648 - DNA, 16 bp, synthetic construct
  misc_feature 1..16: note = synthetic [barcode part1]
  source 1..16: mol_type = other DNA
acgcaaccgatacgtt

SEQ ID NO: 27649 - DNA, 16 bp, synthetic construct
  misc_feature 1..16: note = synthetic [barcode part1]
  source 1..16: mol_type = other DNA
gtggtgaagacgtctg

SEQ ID NO: 27650 - DNA, 16 bp, synthetic construct
  misc_feature 1..16: note = synthetic [barcode part1]
  source 1..16: mol_type = other DNA
aggcgttacctcacct

SEQ ID NO: 27651 - DNA, 16 bp, synthetic construct
  misc_feature 1..16: note = synthetic [barcode part1]
  source 1..16: mol_type = other DNA
gcgtagttagtcacgt

SEQ ID NO: 27652 - DNA, 16 bp, synthetic construct
  misc_feature 1..16: note = synthetic [barcode part1]
  source 1..16: mol_type = other DNA
taggaccaatcctggt

SEQ ID NO: 27653 - DNA, 16 bp, synthetic construct
  misc_feature 1..16: note = synthetic [barcode part1]
  source 1..16: mol_type = other DNA
tcaccaccgtctagac

SEQ ID NO: 27654 - DNA, 16 bp, synthetic construct
  misc_feature 1..16: note = synthetic [barcode part1]
  source 1..16: mol_type = other DNA
gttctgtcgttggcgt

SEQ ID NO: 27655 - DNA, 16 bp, synthetic construct
  misc_feature 1..16: note = synthetic [barcode part1]
  source 1..16: mol_type = other DNA
gcgaacttcaacgtgt

SEQ ID NO: 27656 - DNA, 16 bp, synthetic construct
  misc_feature 1..16: note = synthetic [barcode part1]
  source 1..16: mol_type = other DNA
atactctagagacgcc

SEQ ID NO: 27657 - DNA, 16 bp, synthetic construct
  misc_feature 1..16: note = synthetic [barcode part1]
  source 1..16: mol_type = other DNA
tatcttggtctgcggc

SEQ ID NO: 27658 - DNA, 16 bp, synthetic construct
  misc_feature 1..16: note = synthetic [barcode part1]
  source 1..16: mol_type = other DNA
gcggtacgtgtatatc

SEQ ID NO: 27659 - DNA, 16 bp, synthetic construct
  misc_feature 1..16: note = synthetic [barcode part1]
  source 1..16: mol_type = other DNA
gactcttagtcacact

SEQ ID NO: 27660 - DNA, 16 bp, synthetic construct
  misc_feature 1..16: note = synthetic [barcode part1]
  source 1..16: mol_type = other DNA
ttgttcgaccttaggt

SEQ ID NO: 27661 - DNA, 16 bp, synthetic construct
  misc_feature 1..16: note = synthetic [barcode part1]
  source 1..16: mol_type = other DNA
gcctataagtccgtag

SEQ ID NO: 27662 - DNA, 16 bp, synthetic construct
  misc_feature 1..16: note = synthetic [barcode part1]
  source 1..16: mol_type = other DNA
ttcgaggtacgacgtt

SEQ ID NO: 27663 - DNA, 16 bp, synthetic construct
  misc_feature 1..16: note = synthetic [barcode part1]
  source 1..16: mol_type = other DNA
caacacgcgacaaggt

SEQ ID NO: 27664 - DNA, 16 bp, synthetic construct
  misc_feature 1..16: note = synthetic [barcode part1]
  source 1..16: mol_type = other DNA
ttggccttgttctgtc

SEQ ID NO: 27665 - DNA, 16 bp, synthetic construct
  misc_feature 1..16: note = synthetic [barcode part1]
  source 1..16: mol_type = other DNA
gtgtcggaactgtatc

SEQ ID NO: 27666 - DNA, 16 bp, synthetic construct
  misc_feature 1..16: note = synthetic [barcode part1]
  source 1..16: mol_type = other DNA
caggagttggattgcg

SEQ ID NO: 27667 - DNA, 16 bp, synthetic construct
  misc_feature 1..16: note = synthetic [barcode part1]
  source 1..16: mol_type = other DNA
cggaactgaccttagt

SEQ ID NO: 27668 - DNA, 16 bp, synthetic construct
  misc_feature 1..16: note = synthetic [barcode part1]
  source 1..16: mol_type = other DNA
aggtgccgagtaacac

SEQ ID NO: 27669 - DNA, 16 bp, synthetic construct
  misc_feature 1..16: note = synthetic [barcode part1]
  source 1..16: mol_type = other DNA
gttgtggtctgagact

SEQ ID NO: 27670 - DNA, 16 bp, synthetic construct
  misc_feature 1..16: note = synthetic [barcode part1]
  source 1..16: mol_type = other DNA
aagtaggcaagactct

SEQ ID NO: 27671 - DNA, 16 bp, synthetic construct
  misc_feature 1..16: note = synthetic [barcode part1]
  source 1..16: mol_type = other DNA
ttgttcggcagtgcct

SEQ ID NO: 27672 - DNA, 16 bp, synthetic construct
  misc_feature 1..16: note = synthetic [barcode part1]
  source 1..16: mol_type = other DNA
ttggaacaataccgcc

SEQ ID NO: 27673 - DNA, 16 bp, synthetic construct
  misc_feature 1..16: note = synthetic [barcode part1]
  source 1..16: mol_type = other DNA
cgaacttgacaaggcg

SEQ ID NO: 27674 - DNA, 16 bp, synthetic construct
  misc_feature 1..16: note = synthetic [barcode part1]
  source 1..16: mol_type = other DNA
cacaacggtgatacct

SEQ ID NO: 27675 - DNA, 16 bp, synthetic construct
  misc_feature 1..16: note = synthetic [barcode part1]
  source 1..16: mol_type = other DNA
agacggacactataac

SEQ ID NO: 27676 - DNA, 16 bp, synthetic construct
  misc_feature 1..16: note = synthetic [barcode part1]
  source 1..16: mol_type = other DNA
cggacaatagagtccg

SEQ ID NO: 27677 - DNA, 16 bp, synthetic construct
  misc_feature 1..16: note = synthetic [barcode part1]
  source 1..16: mol_type = other DNA
acaggaatcctcacgt

SEQ ID NO: 27678 - DNA, 16 bp, synthetic construct
  misc_feature 1..16: note = synthetic [barcode part1]
  source 1..16: mol_type = other DNA
gaccgatacactacgt

SEQ ID NO: 27679 - DNA, 16 bp, synthetic construct
  misc_feature 1..16: note = synthetic [barcode part1]
  source 1..16: mol_type = other DNA
gacttactgcctgaag

SEQ ID NO: 27680 - DNA, 16 bp, synthetic construct
  misc_feature 1..16: note = synthetic [barcode part1]
  source 1..16: mol_type = other DNA
agtgtaccacaaccac

SEQ ID NO: 27681 - DNA, 16 bp, synthetic construct
  misc_feature 1..16: note = synthetic [barcode part1]
  source 1..16: mol_type = other DNA
gactcgacaacagtct

SEQ ID NO: 27682 - DNA, 16 bp, synthetic construct
  misc_feature 1..16: note = synthetic [barcode part1]
  source 1..16: mol_type = other DNA
tggagacggattgtcg

SEQ ID NO: 27683 - DNA, 16 bp, synthetic construct
  misc_feature 1..16: note = synthetic [barcode part1]
  source 1..16: mol_type = other DNA
tgaagtctgaccagtc

SEQ ID NO: 27684 - DNA, 16 bp, synthetic construct
  misc_feature 1..16: note = synthetic [barcode part1]
  source 1..16: mol_type = other DNA
ttctggaataacgccg

SEQ ID NO: 27685 - DNA, 16 bp, synthetic construct
  misc_feature 1..16: note = synthetic [barcode part1]
  source 1..16: mol_type = other DNA
aacctcacttgttcag

SEQ ID NO: 27686 - DNA, 16 bp, synthetic construct
  misc_feature 1..16: note = synthetic [barcode part1]
  source 1..16: mol_type = other DNA
atagtgtactggccgt

SEQ ID NO: 27687 - DNA, 16 bp, synthetic construct
  misc_feature 1..16: note = synthetic [barcode part1]
  source 1..16: mol_type = other DNA
gtaacgtcacacgtac

SEQ ID NO: 27688 - DNA, 16 bp, synthetic construct
  misc_feature 1..16: note = synthetic [barcode part1]
  source 1..16: mol_type = other DNA
tgtcactctcagtcct

SEQ ID NO: 27689 - DNA, 16 bp, synthetic construct
  misc_feature 1..16: note = synthetic [barcode part1]
  source 1..16: mol_type = other DNA
aggttcggtctgagtt

SEQ ID NO: 27690 - DNA, 16 bp, synthetic construct
  misc_feature 1..16: note = synthetic [barcode part1]
  source 1..16: mol_type = other DNA
cagacgcaatcgtatc

SEQ ID NO: 27691 - DNA, 16 bp, synthetic construct
  misc_feature 1..16: note = synthetic [barcode part1]
  source 1..16: mol_type = other DNA
aagtgtagacctagtg

SEQ ID NO: 27692 - DNA, 16 bp, synthetic construct
  misc_feature 1..16: note = synthetic [barcode part1]
  source 1..16: mol_type = other DNA
ttgcgttggtgtaggt

SEQ ID NO: 27693 - DNA, 16 bp, synthetic construct
  misc_feature 1..16: note = synthetic [barcode part1]
  source 1..16: mol_type = other DNA
ccgcagacgaagaatc

SEQ ID NO: 27694 - DNA, 16 bp, synthetic construct
  misc_feature 1..16: note = synthetic [barcode part1]
  source 1..16: mol_type = other DNA
tgcctcgacgaactct

SEQ ID NO: 27695 - DNA, 16 bp, synthetic construct
  misc_feature 1..16: note = synthetic [barcode part1]
  source 1..16: mol_type = other DNA
accacttatctgtggt

SEQ ID NO: 27696 - DNA, 16 bp, synthetic construct
  misc_feature 1..16: note = synthetic [barcode part1]
  source 1..16: mol_type = other DNA
tctccacaatagttcg

SEQ ID NO: 27697 - DNA, 16 bp, synthetic construct
  misc_feature 1..16: note = synthetic [barcode part1]
  source 1..16: mol_type = other DNA
gacgtccgacaacaag

SEQ ID NO: 27698 - DNA, 16 bp, synthetic construct
  misc_feature 1..16: note = synthetic [barcode part1]
  source 1..16: mol_type = other DNA
taacaacgccggatct

SEQ ID NO: 27699 - DNA, 16 bp, synthetic construct
  misc_feature 1..16: note = synthetic [barcode part1]
  source 1..16: mol_type = other DNA
gacgttagtcgtaacc

SEQ ID NO: 27700 - DNA, 16 bp, synthetic construct
  misc_feature 1..16: note = synthetic [barcode part1]
  source 1..16: mol_type = other DNA
tacgacagtgaacaac

SEQ ID NO: 27701 - DNA, 16 bp, synthetic construct
  misc_feature 1..16: note = synthetic [barcode part1]
  source 1..16: mol_type = other DNA
cgtcggtcttcgattg

SEQ ID NO: 27702 - DNA, 16 bp, synthetic construct
  misc_feature 1..16: note = synthetic [barcode part1]
  source 1..16: mol_type = other DNA
ttctatccaaggcgag

SEQ ID NO: 27703 - DNA, 16 bp, synthetic construct
  misc_feature 1..16: note = synthetic [barcode part1]
  source 1..16: mol_type = other DNA
agaaggtagtgtgtct

SEQ ID NO: 27704 - DNA, 16 bp, synthetic construct
  misc_feature 1..16: note = synthetic [barcode part1]
  source 1..16: mol_type = other DNA
cctgatattcggtgag

SEQ ID NO: 27705 - DNA, 16 bp, synthetic construct
  misc_feature 1..16: note = synthetic [barcode part1]
  source 1..16: mol_type = other DNA
agtcgtaggagaattc

SEQ ID NO: 27706 - DNA, 16 bp, synthetic construct
  misc_feature 1..16: note = synthetic [barcode part1]
  source 1..16: mol_type = other DNA
cctatacagaggcgtt

SEQ ID NO: 27707 - DNA, 16 bp, synthetic construct
  misc_feature 1..16: note = synthetic [barcode part1]
  source 1..16: mol_type = other DNA
gtgagactggagtaag

SEQ ID NO: 27708 - DNA, 16 bp, synthetic construct
  misc_feature 1..16: note = synthetic [barcode part1]
  source 1..16: mol_type = other DNA
actcagaacagtgaac

SEQ ID NO: 27709 - DNA, 16 bp, synthetic construct
  misc_feature 1..16: note = synthetic [barcode part1]
  source 1..16: mol_type = other DNA
tgcaagttcgtctcgc

SEQ ID NO: 27710 - DNA, 16 bp, synthetic construct
  misc_feature 1..16: note = synthetic [barcode part1]
  source 1..16: mol_type = other DNA
aagtagaggtgtcgcc

SEQ ID NO: 27711 - DNA, 16 bp, synthetic construct
  misc_feature 1..16: note = synthetic [barcode part1]
  source 1..16: mol_type = other DNA
ttacgacgaagttccg

SEQ ID NO: 27712 - DNA, 16 bp, synthetic construct
  misc_feature 1..16: note = synthetic [barcode part1]
  source 1..16: mol_type = other DNA
atccacacgtagatcg

SEQ ID NO: 27713 - DNA, 16 bp, synthetic construct
  misc_feature 1..16: note = synthetic [barcode part1]
  source 1..16: mol_type = other DNA
gaactggatcaacgcg

SEQ ID NO: 27714 - DNA, 16 bp, synthetic construct
  misc_feature 1..16: note = synthetic [barcode part1]
  source 1..16: mol_type = other DNA
gttgactcacaacgtg

SEQ ID NO: 27715 - DNA, 16 bp, synthetic construct
  misc_feature 1..16: note = synthetic [barcode part1]
  source 1..16: mol_type = other DNA
gtcgtatcgaccttcg

SEQ ID NO: 27716 - DNA, 16 bp, synthetic construct
  misc_feature 1..16: note = synthetic [barcode part1]
  source 1..16: mol_type = other DNA
taggtaccaacttctc

SEQ ID NO: 27717 - DNA, 16 bp, synthetic construct
  misc_feature 1..16: note = synthetic [barcode part1]
  source 1..16: mol_type = other DNA
tacttatcggagtcct

SEQ ID NO: 27718 - DNA, 16 bp, synthetic construct
  misc_feature 1..16: note = synthetic [barcode part1]
  source 1..16: mol_type = other DNA
tcacggcaattctgag

SEQ ID NO: 27719 - DNA, 16 bp, synthetic construct
  misc_feature 1..16: note = synthetic [barcode part1]
  source 1..16: mol_type = other DNA
cggaagagtactggtc

SEQ ID NO: 27720 - DNA, 16 bp, synthetic construct
  misc_feature 1..16: note = synthetic [barcode part1]
  source 1..16: mol_type = other DNA
ttctacgattaggcct

SEQ ID NO: 27721 - DNA, 16 bp, synthetic construct
  misc_feature 1..16: note = synthetic [barcode part1]
  source 1..16: mol_type = other DNA
attggaatctcgaccg

SEQ ID NO: 27722 - DNA, 16 bp, synthetic construct
  misc_feature 1..16: note = synthetic [barcode part1]
  source 1..16: mol_type = other DNA
gagttcgagattaggt

SEQ ID NO: 27723 - DNA, 16 bp, synthetic construct
  misc_feature 1..16: note = synthetic [barcode part1]
  source 1..16: mol_type = other DNA
cctacacctgacagtc

SEQ ID NO: 27724 - DNA, 16 bp, synthetic construct
  misc_feature 1..16: note = synthetic [barcode part1]
  source 1..16: mol_type = other DNA
ttaccgcagatctatc

SEQ ID NO: 27725 - DNA, 16 bp, synthetic construct
  misc_feature 1..16: note = synthetic [barcode part1]
  source 1..16: mol_type = other DNA
ccagtcggtattacag

SEQ ID NO: 27726 - DNA, 16 bp, synthetic construct
  misc_feature 1..16: note = synthetic [barcode part1]
  source 1..16: mol_type = other DNA
aagtggcactatctcg

SEQ ID NO: 27727 - DNA, 16 bp, synthetic construct
  misc_feature 1..16: note = synthetic [barcode part1]
  source 1..16: mol_type = other DNA
atatcggcacgttgac

SEQ ID NO: 27728 - DNA, 16 bp, synthetic construct
  misc_feature 1..16: note = synthetic [barcode part1]
  source 1..16: mol_type = other DNA
aatctggttccgtgcc

SEQ ID NO: 27729 - DNA, 16 bp, synthetic construct
  misc_feature 1..16: note = synthetic [barcode part1]
  source 1..16: mol_type = other DNA
gtgaaggaatcgtcgc

SEQ ID NO: 27730 - DNA, 16 bp, synthetic construct
  misc_feature 1..16: note = synthetic [barcode part1]
  source 1..16: mol_type = other DNA
caggtcagacttgact

SEQ ID NO: 27731 - DNA, 16 bp, synthetic construct
  misc_feature 1..16: note = synthetic [barcode part1]
  source 1..16: mol_type = other DNA
gttatcttccggacgc

SEQ ID NO: 27732 - DNA, 16 bp, synthetic construct
  misc_feature 1..16: note = synthetic [barcode part1]
  source 1..16: mol_type = other DNA
acttgagttaccttgc

SEQ ID NO: 27733 - DNA, 16 bp, synthetic construct
  misc_feature 1..16: note = synthetic [barcode part1]
  source 1..16: mol_type = other DNA
taggcgtaccgttcct

SEQ ID NO: 27734 - DNA, 16 bp, synthetic construct
  misc_feature 1..16: note = synthetic [barcode part1]
  source 1..16: mol_type = other DNA
gtagattcgacagagt

SEQ ID NO: 27735 - DNA, 16 bp, synthetic construct
  misc_feature 1..16: note = synthetic [barcode part1]
  source 1..16: mol_type = other DNA
cctcacttcgttctag

SEQ ID NO: 27736 - DNA, 16 bp, synthetic construct
  misc_feature 1..16: note = synthetic [barcode part1]
  source 1..16: mol_type = other DNA
tcgtctactcgttcgt

SEQ ID NO: 27737 - DNA, 16 bp, synthetic construct
  misc_feature 1..16: note = synthetic [barcode part1]
  source 1..16: mol_type = other DNA
aatacgacctgtaccg

SEQ ID NO: 27738 - DNA, 16 bp, synthetic construct
  misc_feature 1..16: note = synthetic [barcode part1]
  source 1..16: mol_type = other DNA
tccagaatcgattggc

SEQ ID NO: 27739 - DNA, 16 bp, synthetic construct
  misc_feature 1..16: note = synthetic [barcode part1]
  source 1..16: mol_type = other DNA
cctactgtcagtgcac

SEQ ID NO: 27740 - DNA, 16 bp, synthetic construct
  misc_feature 1..16: note = synthetic [barcode part1]
  source 1..16: mol_type = other DNA
taacgacgaagtacac

SEQ ID NO: 27741 - DNA, 16 bp, synthetic construct
  misc_feature 1..16: note = synthetic [barcode part1]
  source 1..16: mol_type = other DNA
ttggtacctagagaag

SEQ ID NO: 27742 - DNA, 16 bp, synthetic construct
  misc_feature 1..16: note = synthetic [barcode part1]
  source 1..16: mol_type = other DNA
ttcagtccgatacgtt

SEQ ID NO: 27743 - DNA, 16 bp, synthetic construct
  misc_feature 1..16: note = synthetic [barcode part1]
  source 1..16: mol_type = other DNA
tgaacggactccagag

SEQ ID NO: 27744 - DNA, 16 bp, synthetic construct
  misc_feature 1..16: note = synthetic [barcode part1]
  source 1..16: mol_type = other DNA
gacagaccttaaggcg

SEQ ID NO: 27745 - DNA, 16 bp, synthetic construct
  misc_feature 1..16: note = synthetic [barcode part1]
  source 1..16: mol_type = other DNA
taggtcgtaacgacct

SEQ ID NO: 27746 - DNA, 16 bp, synthetic construct
  misc_feature 1..16: note = synthetic [barcode part1]
  source 1..16: mol_type = other DNA
gagacggacaagtcct

SEQ ID NO: 27747 - DNA, 16 bp, synthetic construct
  misc_feature 1..16: note = synthetic [barcode part1]
  source 1..16: mol_type = other DNA
actctcgttcaacaac

SEQ ID NO: 27748 - DNA, 16 bp, synthetic construct
  misc_feature 1..16: note = synthetic [barcode part1]
  source 1..16: mol_type = other DNA
gagagactgccttatc

SEQ ID NO: 27749 - DNA, 16 bp, synthetic construct
  misc_feature 1..16: note = synthetic [barcode part1]
  source 1..16: mol_type = other DNA
gatctggtctcgcgtt

SEQ ID NO: 27750 - DNA, 16 bp, synthetic construct
  misc_feature 1..16: note = synthetic [barcode part1]
  source 1..16: mol_type = other DNA
acttgcactccgtcag

SEQ ID NO: 27751 - DNA, 16 bp, synthetic construct
  misc_feature 1..16: note = synthetic [barcode part1]
  source 1..16: mol_type = other DNA
tggttaaccaaccggt

SEQ ID NO: 27752 - DNA, 16 bp, synthetic construct
  misc_feature 1..16: note = synthetic [barcode part1]
  source 1..16: mol_type = other DNA
cctcctaacaattgtg

SEQ ID NO: 27753 - DNA, 16 bp, synthetic construct
  misc_feature 1..16: note = synthetic [barcode part1]
  source 1..16: mol_type = other DNA
gaactaagtcgcgcag

SEQ ID NO: 27754 - DNA, 16 bp, synthetic construct
  misc_feature 1..16: note = synthetic [barcode part1]
  source 1..16: mol_type = other DNA
aatcaacgccgtggtt

SEQ ID NO: 27755 - DNA, 16 bp, synthetic construct
  misc_feature 1..16: note = synthetic [barcode part1]
  source 1..16: mol_type = other DNA
accgatacgttccacc

SEQ ID NO: 27756 - DNA, 16 bp, synthetic construct
  misc_feature 1..16: note = synthetic [barcode part1]
  source 1..16: mol_type = other DNA
tgaaccggtgcctctt

SEQ ID NO: 27757 - DNA, 16 bp, synthetic construct
  misc_feature 1..16: note = synthetic [barcode part1]
  source 1..16: mol_type = other DNA
tcacctactcaggatt

SEQ ID NO: 27758 - DNA, 16 bp, synthetic construct
  misc_feature 1..16: note = synthetic [barcode part1]
  source 1..16: mol_type = other DNA
tcgtctgttatccacc

SEQ ID NO: 27759 - DNA, 16 bp, synthetic construct
  misc_feature 1..16: note = synthetic [barcode part1]
  source 1..16: mol_type = other DNA
gtgaatacagaatccg

SEQ ID NO: 27760 - DNA, 16 bp, synthetic construct
  misc_feature 1..16: note = synthetic [barcode part1]
  source 1..16: mol_type = other DNA
tgagagaccgaagagt

SEQ ID NO: 27761 - DNA, 16 bp, synthetic construct
  misc_feature 1..16: note = synthetic [barcode part1]
  source 1..16: mol_type = other DNA
ataggatcctgtcgtg

SEQ ID NO: 27762 - DNA, 16 bp, synthetic construct
  misc_feature 1..16: note = synthetic [barcode part1]
  source 1..16: mol_type = other DNA
actgcggtggatagac

SEQ ID NO: 27763 - DNA, 16 bp, synthetic construct
  misc_feature 1..16: note = synthetic [barcode part1]
  source 1..16: mol_type = other DNA
gtgactgaattcctct

SEQ ID NO: 27764 - DNA, 16 bp, synthetic construct
  misc_feature 1..16: note = synthetic [barcode part1]
  source 1..16: mol_type = other DNA
tacaccacgcgattag

SEQ ID NO: 27765 - DNA, 16 bp, synthetic construct
  misc_feature 1..16: note = synthetic [barcode part1]
  source 1..16: mol_type = other DNA
gatattgcggtgtcgt

SEQ ID NO: 27766 - DNA, 16 bp, synthetic construct
  misc_feature 1..16: note = synthetic [barcode part1]
  source 1..16: mol_type = other DNA
ttaggtgcctaagtgc

SEQ ID NO: 27767 - DNA, 16 bp, synthetic construct
  misc_feature 1..16: note = synthetic [barcode part1]
  source 1..16: mol_type = other DNA
gtccgttgaatctcgc

SEQ ID NO: 27768 - DNA, 16 bp, synthetic construct
  misc_feature 1..16: note = synthetic [barcode part1]
  source 1..16: mol_type = other DNA
tggttccgagactaac

SEQ ID NO: 27769 - DNA, 16 bp, synthetic construct
  misc_feature 1..16: note = synthetic [barcode part1]
  source 1..16: mol_type = other DNA
ttgcaccgacagtctc

SEQ ID NO: 27770 - DNA, 16 bp, synthetic construct
  misc_feature 1..16: note = synthetic [barcode part1]
  source 1..16: mol_type = other DNA
cacaagtggtggagtc

SEQ ID NO: 27771 - DNA, 16 bp, synthetic construct
  misc_feature 1..16: note = synthetic [barcode part1]
  source 1..16: mol_type = other DNA
atatctcggtccgacc

SEQ ID NO: 27772 - DNA, 16 bp, synthetic construct
  misc_feature 1..16: note = synthetic [barcode part1]
  source 1..16: mol_type = other DNA
cacacgatccgtaagt

SEQ ID NO: 27773 - DNA, 16 bp, synthetic construct
  misc_feature 1..16: note = synthetic [barcode part1]
  source 1..16: mol_type = other DNA
gcagtcaagtcggagt

SEQ ID NO: 27774 - DNA, 16 bp, synthetic construct
  misc_feature 1..16: note = synthetic [barcode part1]
  source 1..16: mol_type = other DNA
cctgtaagacgttcag

SEQ ID NO: 27775 - DNA, 16 bp, synthetic construct
  misc_feature 1..16: note = synthetic [barcode part1]
  source 1..16: mol_type = other DNA
cctacgttcttgtacc

SEQ ID NO: 27776 - DNA, 16 bp, synthetic construct
  misc_feature 1..16: note = synthetic [barcode part1]
  source 1..16: mol_type = other DNA
cagttgaggaatcctc

SEQ ID NO: 27777 - DNA, 16 bp, synthetic construct
  misc_feature 1..16: note = synthetic [barcode part1]
  source 1..16: mol_type = other DNA
cgcggagagaatatag

SEQ ID NO: 27778 - DNA, 16 bp, synthetic construct
  misc_feature 1..16: note = synthetic [barcode part1]
  source 1..16: mol_type = other DNA
tcgtccgttgtctgtt

SEQ ID NO: 27779 - DNA, 16 bp, synthetic construct
  misc_feature 1..16: note = synthetic [barcode part1]
  source 1..16: mol_type = other DNA
tccagttgaccgaagt

SEQ ID NO: 27780 - DNA, 16 bp, synthetic construct
  misc_feature 1..16: note = synthetic [barcode part1]
  source 1..16: mol_type = other DNA
aacaagaagtccacac

SEQ ID NO: 27781 - DNA, 16 bp, synthetic construct
  misc_feature 1..16: note = synthetic [barcode part1]
  source 1..16: mol_type = other DNA
ttactcttggcgagag

SEQ ID NO: 27782 - DNA, 16 bp, synthetic construct
  misc_feature 1..16: note = synthetic [barcode part1]
  source 1..16: mol_type = other DNA
gtgaagagtgtgaggt

SEQ ID NO: 27783 - DNA, 16 bp, synthetic construct
  misc_feature 1..16: note = synthetic [barcode part1]
  source 1..16: mol_type = other DNA
gattgtcggcaatctg

SEQ ID NO: 27784 - DNA, 16 bp, synthetic construct
  misc_feature 1..16: note = synthetic [barcode part1]
  source 1..16: mol_type = other DNA
gcaatctcctgcgttg

SEQ ID NO: 27785 - DNA, 16 bp, synthetic construct
  misc_feature 1..16: note = synthetic [barcode part1]
  source 1..16: mol_type = other DNA
atctggattcactgtc

SEQ ID NO: 27786 - DNA, 16 bp, synthetic construct
  misc_feature 1..16: note = synthetic [barcode part1]
  source 1..16: mol_type = other DNA
tacgtgtgtgtacgtg

SEQ ID NO: 27787 - DNA, 16 bp, synthetic construct
  misc_feature 1..16: note = synthetic [barcode part1]
  source 1..16: mol_type = other DNA
aagtcaccgttcttac

SEQ ID NO: 27788 - DNA, 16 bp, synthetic construct
  misc_feature 1..16: note = synthetic [barcode part1]
  source 1..16: mol_type = other DNA
tgagatcactggttgc

SEQ ID NO: 27789 - DNA, 16 bp, synthetic construct
  misc_feature 1..16: note = synthetic [barcode part1]
  source 1..16: mol_type = other DNA
acaacgccacgatact

SEQ ID NO: 27790 - DNA, 16 bp, synthetic construct
  misc_feature 1..16: note = synthetic [barcode part1]
  source 1..16: mol_type = other DNA
ttccgattgtggactt

SEQ ID NO: 27791 - DNA, 16 bp, synthetic construct
  misc_feature 1..16: note = synthetic [barcode part1]
  source 1..16: mol_type = other DNA
agatcggtcaaccttg

SEQ ID NO: 27792 - DNA, 16 bp, synthetic construct
  misc_feature 1..16: note = synthetic [barcode part1]
  source 1..16: mol_type = other DNA
cgaataattgtggcag

SEQ ID NO: 27793 - DNA, 16 bp, synthetic construct
  misc_feature 1..16: note = synthetic [barcode part1]
  source 1..16: mol_type = other DNA
gtcgtcgtcaatagtg

SEQ ID NO: 27794 - DNA, 16 bp, synthetic construct
  misc_feature 1..16: note = synthetic [barcode part1]
  source 1..16: mol_type = other DNA
tgtgtacctccttctg

SEQ ID NO: 27795 - DNA, 16 bp, synthetic construct
  misc_feature 1..16: note = synthetic [barcode part1]
  source 1..16: mol_type = other DNA
agtatatcgcgcagtc

SEQ ID NO: 27796 - DNA, 16 bp, synthetic construct
  misc_feature 1..16: note = synthetic [barcode part1]
  source 1..16: mol_type = other DNA
aaccggttgcggtatt

SEQ ID NO: 27797 - DNA, 16 bp, synthetic construct
  misc_feature 1..16: note = synthetic [barcode part1]
  source 1..16: mol_type = other DNA
ttgtgcctggaagtac

SEQ ID NO: 27798 - DNA, 16 bp, synthetic construct
  misc_feature 1..16: note = synthetic [barcode part1]
  source 1..16: mol_type = other DNA
atagattgccaccttc

SEQ ID NO: 27799 - DNA, 16 bp, synthetic construct
  misc_feature 1..16: note = synthetic [barcode part1]
  source 1..16: mol_type = other DNA
cactgataactctctg

SEQ ID NO: 27800 - DNA, 16 bp, synthetic construct
  misc_feature 1..16: note = synthetic [barcode part1]
  source 1..16: mol_type = other DNA
tggaggattgaggaac

SEQ ID NO: 27801 - DNA, 16 bp, synthetic construct
  misc_feature 1..16: note = synthetic [barcode part1]
  source 1..16: mol_type = other DNA
attgttaccttgcacg

SEQ ID NO: 27802 - DNA, 16 bp, synthetic construct
  misc_feature 1..16: note = synthetic [barcode part1]
  source 1..16: mol_type = other DNA
gttattccagacactc

SEQ ID NO: 27803 - DNA, 16 bp, synthetic construct
  misc_feature 1..16: note = synthetic [barcode part1]
  source 1..16: mol_type = other DNA
gcagagaggaatacac

SEQ ID NO: 27804 - DNA, 16 bp, synthetic construct
  misc_feature 1..16: note = synthetic [barcode part1]
  source 1..16: mol_type = other DNA
ataggccgtgttcagt

SEQ ID NO: 27805 - DNA, 16 bp, synthetic construct
  misc_feature 1..16: note = synthetic [barcode part1]
  source 1..16: mol_type = other DNA
tgcggtgtaagtggac

SEQ ID NO: 27806 - DNA, 16 bp, synthetic construct
  misc_feature 1..16: note = synthetic [barcode part1]
  source 1..16: mol_type = other DNA
gtgacaggtagttgcg

SEQ ID NO: 27807 - DNA, 16 bp, synthetic construct
  misc_feature 1..16: note = synthetic [barcode part1]
  source 1..16: mol_type = other DNA
taggccggtactcttc

SEQ ID NO: 27808 - DNA, 16 bp, synthetic construct
  misc_feature 1..16: note = synthetic [barcode part1]
  source 1..16: mol_type = other DNA
gtggactacactcagt

SEQ ID NO: 27809 - DNA, 16 bp, synthetic construct
  misc_feature 1..16: note = synthetic [barcode part1]
  source 1..16: mol_type = other DNA
gtattgccggaattcg

SEQ ID NO: 27810 - DNA, 16 bp, synthetic construct
  misc_feature 1..16: note = synthetic [barcode part1]
  source 1..16: mol_type = other DNA
acctagagtggtaggc

SEQ ID NO: 27811 - DNA, 16 bp, synthetic construct
  misc_feature 1..16: note = synthetic [barcode part1]
  source 1..16: mol_type = other DNA
gtgaactgtattcggc

SEQ ID NO: 27812 - DNA, 16 bp, synthetic construct
  misc_feature 1..16: note = synthetic [barcode part1]
  source 1..16: mol_type = other DNA
gttacggagattccgt

SEQ ID NO: 27813 - DNA, 16 bp, synthetic construct
  misc_feature 1..16: note = synthetic [barcode part1]
  source 1..16: mol_type = other DNA
tgtacactgaccaacg

SEQ ID NO: 27814 - DNA, 16 bp, synthetic construct
  misc_feature 1..16: note = synthetic [barcode part1]
  source 1..16: mol_type = other DNA
aacgtcgtcctaaggt

SEQ ID NO: 27815 - DNA, 16 bp, synthetic construct
  misc_feature 1..16: note = synthetic [barcode part1]
  source 1..16: mol_type = other DNA
atcactcgacggagtt

SEQ ID NO: 27816 - DNA, 16 bp, synthetic construct
  misc_feature 1..16: note = synthetic [barcode part1]
  source 1..16: mol_type = other DNA
tgtcgtccttagttcc

SEQ ID NO: 27817 - DNA, 16 bp, synthetic construct
  misc_feature 1..16: note = synthetic [barcode part1]
  source 1..16: mol_type = other DNA
gagttggaaccagaag

SEQ ID NO: 27818 - DNA, 16 bp, synthetic construct
  misc_feature 1..16: note = synthetic [barcode part1]
  source 1..16: mol_type = other DNA
gactgaggagtactcg

SEQ ID NO: 27819 - DNA, 16 bp, synthetic construct
  misc_feature 1..16: note = synthetic [barcode part1]
  source 1..16: mol_type = other DNA
gccgacagagttgaac

SEQ ID NO: 27820 - DNA, 16 bp, synthetic construct
  misc_feature 1..16: note = synthetic [barcode part1]
  source 1..16: mol_type = other DNA
taaccagatacgcacc

SEQ ID NO: 27821 - DNA, 16 bp, synthetic construct
  misc_feature 1..16: note = synthetic [barcode part1]
  source 1..16: mol_type = other DNA
attgtggttgcctgcc

SEQ ID NO: 27822 - DNA, 16 bp, synthetic construct
  misc_feature 1..16: note = synthetic [barcode part1]
  source 1..16: mol_type = other DNA
gcacttactattccag

SEQ ID NO: 27823 - DNA, 16 bp, synthetic construct
  misc_feature 1..16: note = synthetic [barcode part1]
  source 1..16: mol_type = other DNA
tccgttcaagtgaacg

SEQ ID NO: 27824 - DNA, 16 bp, synthetic construct
  misc_feature 1..16: note = synthetic [barcode part1]
  source 1..16: mol_type = other DNA
aacacgtacacgttgc

SEQ ID NO: 27825 - DNA, 16 bp, synthetic construct
  misc_feature 1..16: note = synthetic [barcode part1]
  source 1..16: mol_type = other DNA
acctctcgagatcaag

SEQ ID NO: 27826 - DNA, 16 bp, synthetic construct
  misc_feature 1..16: note = synthetic [barcode part1]
  source 1..16: mol_type = other DNA
gatcactggtgattcg

SEQ ID NO: 27827 - DNA, 16 bp, synthetic construct
  misc_feature 1..16: note = synthetic [barcode part1]
  source 1..16: mol_type = other DNA
atccgatatatctccg

SEQ ID NO: 27828 - DNA, 16 bp, synthetic construct
  misc_feature 1..16: note = synthetic [barcode part1]
  source 1..16: mol_type = other DNA
ttaggcgacagactct

SEQ ID NO: 27829 - DNA, 16 bp, synthetic construct
  misc_feature 1..16: note = synthetic [barcode part1]
  source 1..16: mol_type = other DNA
tgcgtagacgactgtt

SEQ ID NO: 27830 - DNA, 16 bp, synthetic construct
  misc_feature 1..16: note = synthetic [barcode part1]
  source 1..16: mol_type = other DNA
tggtcttcctcctagt

SEQ ID NO: 27831 - DNA, 16 bp, synthetic construct
  misc_feature 1..16: note = synthetic [barcode part1]
  source 1..16: mol_type = other DNA
cagaggtgtgacctag

SEQ ID NO: 27832 - DNA, 16 bp, synthetic construct
  misc_feature 1..16: note = synthetic [barcode part1]
  source 1..16: mol_type = other DNA
gtctaacttgacggtg

SEQ ID NO: 27833 - DNA, 16 bp, synthetic construct
  misc_feature 1..16: note = synthetic [barcode part1]
  source 1..16: mol_type = other DNA
ccgaacacctattact

SEQ ID NO: 27834 - DNA, 16 bp, synthetic construct
  misc_feature 1..16: note = synthetic [barcode part1]
  source 1..16: mol_type = other DNA
tcgtagaatccagacc

SEQ ID NO: 27835 - DNA, 16 bp, synthetic construct
  misc_feature 1..16: note = synthetic [barcode part1]
  source 1..16: mol_type = other DNA
tctgtcggattgtatc

SEQ ID NO: 27836 - DNA, 16 bp, synthetic construct
  misc_feature 1..16: note = synthetic [barcode part1]
  source 1..16: mol_type = other DNA
aacacacgtgttgacc

SEQ ID NO: 27837 - DNA, 16 bp, synthetic construct
  misc_feature 1..16: note = synthetic [barcode part1]
  source 1..16: mol_type = other DNA
ccagtgatatcggact

SEQ ID NO: 27838 - DNA, 16 bp, synthetic construct
  misc_feature 1..16: note = synthetic [barcode part1]
  source 1..16: mol_type = other DNA
tcgactctagatctac

SEQ ID NO: 27839 - DNA, 16 bp, synthetic construct
  misc_feature 1..16: note = synthetic [barcode part1]
  source 1..16: mol_type = other DNA
atctgtgtcgagtgtg

SEQ ID NO: 27840 - DNA, 16 bp, synthetic construct
  misc_feature 1..16: note = synthetic [barcode part1]
  source 1..16: mol_type = other DNA
tctctctgaccttgac

SEQ ID NO: 27841 - DNA, 16 bp, synthetic construct
  misc_feature 1..16: note = synthetic [barcode part1]
  source 1..16: mol_type = other DNA
gcagttgttctggcct

SEQ ID NO: 27842 - DNA, 16 bp, synthetic construct
  misc_feature 1..16: note = synthetic [barcode part1]
  source 1..16: mol_type = other DNA
atctactccgtgatac

SEQ ID NO: 27843 - DNA, 16 bp, synthetic construct
  misc_feature 1..16: note = synthetic [barcode part1]
  source 1..16: mol_type = other DNA
gtgttgaagagtgatc

SEQ ID NO: 27844 - DNA, 16 bp, synthetic construct
  misc_feature 1..16: note = synthetic [barcode part1]
  source 1..16: mol_type = other DNA
gcaggtcaatctgtac

SEQ ID NO: 27845 - DNA, 16 bp, synthetic construct
  misc_feature 1..16: note = synthetic [barcode part1]
  source 1..16: mol_type = other DNA
acgtagtccttgattc

SEQ ID NO: 27846 - DNA, 16 bp, synthetic construct
  misc_feature 1..16: note = synthetic [barcode part1]
  source 1..16: mol_type = other DNA
cggtgtgtcttcaacc

SEQ ID NO: 27847 - DNA, 16 bp, synthetic construct
  misc_feature 1..16: note = synthetic [barcode part1]
  source 1..16: mol_type = other DNA
atcagtctacgacacg

SEQ ID NO: 27848 - DNA, 16 bp, synthetic construct
  misc_feature 1..16: note = synthetic [barcode part1]
  source 1..16: mol_type = other DNA
tcgaggtggtatcgtt

SEQ ID NO: 27849 - DNA, 16 bp, synthetic construct
  misc_feature 1..16: note = synthetic [barcode part1]
  source 1..16: mol_type = other DNA
ttgacagttacacctc

SEQ ID NO: 27850 - DNA, 16 bp, synthetic construct
  misc_feature 1..16: note = synthetic [barcode part1]
  source 1..16: mol_type = other DNA
aagtagaccgcgacac

SEQ ID NO: 27851 - DNA, 16 bp, synthetic construct
  misc_feature 1..16: note = synthetic [barcode part1]
  source 1..16: mol_type = other DNA
accgtaacaggtggac

SEQ ID NO: 27852 - DNA, 16 bp, synthetic construct
  misc_feature 1..16: note = synthetic [barcode part1]
  source 1..16: mol_type = other DNA
atagagatctcacgcc

SEQ ID NO: 27853 - DNA, 16 bp, synthetic construct
  misc_feature 1..16: note = synthetic [barcode part1]
  source 1..16: mol_type = other DNA
agaatactctcgcacg

SEQ ID NO: 27854 - DNA, 16 bp, synthetic construct
  misc_feature 1..16: note = synthetic [barcode part1]
  source 1..16: mol_type = other DNA
actcaacacgtaagag

SEQ ID NO: 27855 - DNA, 16 bp, synthetic construct
  misc_feature 1..16: note = synthetic [barcode part1]
  source 1..16: mol_type = other DNA
gaggagtgcaactacc

SEQ ID NO: 27856 - DNA, 16 bp, synthetic construct
  misc_feature 1..16: note = synthetic [barcode part1]
  source 1..16: mol_type = other DNA
tacgtggtcgtacagt

SEQ ID NO: 27857 - DNA, 16 bp, synthetic construct
  misc_feature 1..16: note = synthetic [barcode part1]
  source 1..16: mol_type = other DNA
ccaggtcgagatacag

SEQ ID NO: 27858 - DNA, 16 bp, synthetic construct
  misc_feature 1..16: note = synthetic [barcode part1]
  source 1..16: mol_type = other DNA
accgacgtattccacc

SEQ ID NO: 27859 - DNA, 16 bp, synthetic construct
  misc_feature 1..16: note = synthetic [barcode part1]
  source 1..16: mol_type = other DNA
gccgacaacagttatc

SEQ ID NO: 27860 - DNA, 16 bp, synthetic construct
  misc_feature 1..16: note = synthetic [barcode part1]
  source 1..16: mol_type = other DNA
atcttgtcacctcgtc

SEQ ID NO: 27861 - DNA, 16 bp, synthetic construct
  misc_feature 1..16: note = synthetic [barcode part1]
  source 1..16: mol_type = other DNA
attctcgcacctctgt

SEQ ID NO: 27862 - DNA, 16 bp, synthetic construct
  misc_feature 1..16: note = synthetic [barcode part1]
  source 1..16: mol_type = other DNA
cacctaccgttgcaac

SEQ ID NO: 27863 - DNA, 16 bp, synthetic construct
  misc_feature 1..16: note = synthetic [barcode part1]
  source 1..16: mol_type = other DNA
cggtaattacgtcttc

SEQ ID NO: 27864 - DNA, 16 bp, synthetic construct
  misc_feature 1..16: note = synthetic [barcode part1]
  source 1..16: mol_type = other DNA
cactcctgaagtacag

SEQ ID NO: 27865 - DNA, 16 bp, synthetic construct
  misc_feature 1..16: note = synthetic [barcode part1]
  source 1..16: mol_type = other DNA
tcagtagagtgacctc

SEQ ID NO: 27866 - DNA, 16 bp, synthetic construct
  misc_feature 1..16: note = synthetic [barcode part1]
  source 1..16: mol_type = other DNA
aagtagttctccggtg

SEQ ID NO: 27867 - DNA, 16 bp, synthetic construct
  misc_feature 1..16: note = synthetic [barcode part1]
  source 1..16: mol_type = other DNA
acttggtaagacacag

SEQ ID NO: 27868 - DNA, 16 bp, synthetic construct
  misc_feature 1..16: note = synthetic [barcode part1]
  source 1..16: mol_type = other DNA
tcttgagtgagtgaag

SEQ ID NO: 27869 - DNA, 16 bp, synthetic construct
  misc_feature 1..16: note = synthetic [barcode part1]
  source 1..16: mol_type = other DNA
tgtctccactgagtcg

SEQ ID NO: 27870 - DNA, 16 bp, synthetic construct
  misc_feature 1..16: note = synthetic [barcode part1]
  source 1..16: mol_type = other DNA
gactgcggaagttgac

SEQ ID NO: 27871 - DNA, 16 bp, synthetic construct
  misc_feature 1..16: note = synthetic [barcode part1]
  source 1..16: mol_type = other DNA
ttgtggacgaatctgc

SEQ ID NO: 27872 - DNA, 16 bp, synthetic construct
  misc_feature 1..16: note = synthetic [barcode part1]
  source 1..16: mol_type = other DNA
tcgtccaagtaagtgc

SEQ ID NO: 27873 - DNA, 16 bp, synthetic construct
  misc_feature 1..16: note = synthetic [barcode part1]
  source 1..16: mol_type = other DNA
tcagtgttggttgcag

SEQ ID NO: 27874 - DNA, 16 bp, synthetic construct
  misc_feature 1..16: note = synthetic [barcode part1]
  source 1..16: mol_type = other DNA
cgtcgaacagactgtt

SEQ ID NO: 27875 - DNA, 16 bp, synthetic construct
  misc_feature 1..16: note = synthetic [barcode part1]
  source 1..16: mol_type = other DNA
aatcgtgtctctcggc

SEQ ID NO: 27876 - DNA, 16 bp, synthetic construct
  misc_feature 1..16: note = synthetic [barcode part1]
  source 1..16: mol_type = other DNA
tacgactaccactccg

SEQ ID NO: 27877 - DNA, 16 bp, synthetic construct
  misc_feature 1..16: note = synthetic [barcode part1]
  source 1..16: mol_type = other DNA
acaggaataacgacct

SEQ ID NO: 27878 - DNA, 16 bp, synthetic construct
  misc_feature 1..16: note = synthetic [barcode part1]
  source 1..16: mol_type = other DNA
cactaggtggatcact

SEQ ID NO: 27879 - DNA, 16 bp, synthetic construct
  misc_feature 1..16: note = synthetic [barcode part1]
  source 1..16: mol_type = other DNA
ttcgaggacgttacgt

SEQ ID NO: 27880 - DNA, 16 bp, synthetic construct
  misc_feature 1..16: note = synthetic [barcode part1]
  source 1..16: mol_type = other DNA
gtaattgtgcgcggtt

SEQ ID NO: 27881 - DNA, 16 bp, synthetic construct
  misc_feature 1..16: note = synthetic [barcode part1]
  source 1..16: mol_type = other DNA
gtagtcaccaattctc

SEQ ID NO: 27882 - DNA, 16 bp, synthetic construct
  misc_feature 1..16: note = synthetic [barcode part1]
  source 1..16: mol_type = other DNA
atctcgtcggagaact

SEQ ID NO: 27883 - DNA, 16 bp, synthetic construct
  misc_feature 1..16: note = synthetic [barcode part1]
  source 1..16: mol_type = other DNA
tcgtcaaggtctagtg

SEQ ID NO: 27884 - DNA, 16 bp, synthetic construct
  misc_feature 1..16: note = synthetic [barcode part1]
  source 1..16: mol_type = other DNA
caccggactgtatctc

SEQ ID NO: 27885 - DNA, 16 bp, synthetic construct
  misc_feature 1..16: note = synthetic [barcode part1]
  source 1..16: mol_type = other DNA
caccaattaacacgcg

SEQ ID NO: 27886 - DNA, 16 bp, synthetic construct
  misc_feature 1..16: note = synthetic [barcode part1]
  source 1..16: mol_type = other DNA
gtgatacctaaccgac

SEQ ID NO: 27887 - DNA, 16 bp, synthetic construct
  misc_feature 1..16: note = synthetic [barcode part1]
  source 1..16: mol_type = other DNA
acttgccgcggtattc

SEQ ID NO: 27888 - DNA, 16 bp, synthetic construct
  misc_feature 1..16: note = synthetic [barcode part1]
  source 1..16: mol_type = other DNA
aactcaggttggactc

SEQ ID NO: 27889 - DNA, 16 bp, synthetic construct
  misc_feature 1..16: note = synthetic [barcode part1]
  source 1..16: mol_type = other DNA
tggccaggttaactac

SEQ ID NO: 27890 - DNA, 16 bp, synthetic construct
  misc_feature 1..16: note = synthetic [barcode part1]
  source 1..16: mol_type = other DNA
ttgacgaccgtactcc

SEQ ID NO: 27891 - DNA, 16 bp, synthetic construct
  misc_feature 1..16: note = synthetic [barcode part1]
  source 1..16: mol_type = other DNA
tactggtacgttgacg

SEQ ID NO: 27892 - DNA, 16 bp, synthetic construct
  misc_feature 1..16: note = synthetic [barcode part1]
  source 1..16: mol_type = other DNA
atcaacgtatctcgtc

SEQ ID NO: 27893 - DNA, 16 bp, synthetic construct
  misc_feature 1..16: note = synthetic [barcode part1]
  source 1..16: mol_type = other DNA
ttgactgcaaccagtg

SEQ ID NO: 27894 - DNA, 16 bp, synthetic construct
  misc_feature 1..16: note = synthetic [barcode part1]
  source 1..16: mol_type = other DNA
aatccacgacaaggcg

SEQ ID NO: 27895 - DNA, 16 bp, synthetic construct
  misc_feature 1..16: note = synthetic [barcode part1]
  source 1..16: mol_type = other DNA
tggtgtattagtgcgc

SEQ ID NO: 27896 - DNA, 16 bp, synthetic construct
  misc_feature 1..16: note = synthetic [barcode part1]
  source 1..16: mol_type = other DNA
cagtcttgactcctct

SEQ ID NO: 27897 - DNA, 16 bp, synthetic construct
  misc_feature 1..16: note = synthetic [barcode part1]
  source 1..16: mol_type = other DNA
tagttgccgagagacg

SEQ ID NO: 27898 - DNA, 16 bp, synthetic construct
  misc_feature 1..16: note = synthetic [barcode part1]
  source 1..16: mol_type = other DNA
ccgagaattctcaacg

SEQ ID NO: 27899 - DNA, 16 bp, synthetic construct
  misc_feature 1..16: note = synthetic [barcode part1]
  source 1..16: mol_type = other DNA
tgcaggatccttgtag

SEQ ID NO: 27900 - DNA, 16 bp, synthetic construct
  misc_feature 1..16: note = synthetic [barcode part1]
  source 1..16: mol_type = other DNA
ttcgcggaggtgatag

SEQ ID NO: 27901 - DNA, 16 bp, synthetic construct
  misc_feature 1..16: note = synthetic [barcode part1]
  source 1..16: mol_type = other DNA
cacggatccgtagatt

SEQ ID NO: 27902 - DNA, 16 bp, synthetic construct
  misc_feature 1..16: note = synthetic [barcode part1]
  source 1..16: mol_type = other DNA
gcgattggattagagt

SEQ ID NO: 27903 - DNA, 16 bp, synthetic construct
  misc_feature 1..16: note = synthetic [barcode part1]
  source 1..16: mol_type = other DNA
caccgcaactagttag

SEQ ID NO: 27904 - DNA, 16 bp, synthetic construct
  misc_feature 1..16: note = synthetic [barcode part1]
  source 1..16: mol_type = other DNA
tgagagagaccttcct

SEQ ID NO: 27905 - DNA, 16 bp, synthetic construct
  misc_feature 1..16: note = synthetic [barcode part1]
  source 1..16: mol_type = other DNA
tcgtggattgtcgcct

SEQ ID NO: 27906 - DNA, 16 bp, synthetic construct
  misc_feature 1..16: note = synthetic [barcode part1]
  source 1..16: mol_type = other DNA
tgagtgcaggatagtt

SEQ ID NO: 27907 - DNA, 16 bp, synthetic construct
  misc_feature 1..16: note = synthetic [barcode part1]
  source 1..16: mol_type = other DNA
ttgttgtccacctcac

SEQ ID NO: 27908 - DNA, 16 bp, synthetic construct
  misc_feature 1..16: note = synthetic [barcode part1]
  source 1..16: mol_type = other DNA
actcagaggtaaggcc

SEQ ID NO: 27909 - DNA, 16 bp, synthetic construct
  misc_feature 1..16: note = synthetic [barcode part1]
  source 1..16: mol_type = other DNA
cggaacttcctctctt

SEQ ID NO: 27910 - DNA, 16 bp, synthetic construct
  misc_feature 1..16: note = synthetic [barcode part1]
  source 1..16: mol_type = other DNA
agtccaagtactcttc

SEQ ID NO: 27911 - DNA, 16 bp, synthetic construct
  misc_feature 1..16: note = synthetic [barcode part1]
  source 1..16: mol_type = other DNA
ttctaggagacaggcg

SEQ ID NO: 27912 - DNA, 16 bp, synthetic construct
  misc_feature 1..16: note = synthetic [barcode part1]
  source 1..16: mol_type = other DNA
tagtgtcggtggacag

SEQ ID NO: 27913 - DNA, 16 bp, synthetic construct
  misc_feature 1..16: note = synthetic [barcode part1]
  source 1..16: mol_type = other DNA
acctctcttgactctg

SEQ ID NO: 27914 - DNA, 16 bp, synthetic construct
  misc_feature 1..16: note = synthetic [barcode part1]
  source 1..16: mol_type = other DNA
tgaggactctgataag

SEQ ID NO: 27915 - DNA, 16 bp, synthetic construct
  misc_feature 1..16: note = synthetic [barcode part1]
  source 1..16: mol_type = other DNA
tgccggtctcttcaag

SEQ ID NO: 27916 - DNA, 16 bp, synthetic construct
  misc_feature 1..16: note = synthetic [barcode part1]
  source 1..16: mol_type = other DNA
atagagacttcgtgcc

SEQ ID NO: 27917 - DNA, 16 bp, synthetic construct
  misc_feature 1..16: note = synthetic [barcode part1]
  source 1..16: mol_type = other DNA
tatcgacaccgtacag

SEQ ID NO: 27918 - DNA, 16 bp, synthetic construct
  misc_feature 1..16: note = synthetic [barcode part1]
  source 1..16: mol_type = other DNA
tcttgcgtacaggaac

SEQ ID NO: 27919 - DNA, 16 bp, synthetic construct
  misc_feature 1..16: note = synthetic [barcode part1]
  source 1..16: mol_type = other DNA
atcgtgtctaggtacg

SEQ ID NO: 27920 - DNA, 16 bp, synthetic construct
  misc_feature 1..16: note = synthetic [barcode part1]
  source 1..16: mol_type = other DNA
agttggcctcttcctt

SEQ ID NO: 27921 - DNA, 16 bp, synthetic construct
  misc_feature 1..16: note = synthetic [barcode part1]
  source 1..16: mol_type = other DNA
atcttactgccggtgc

SEQ ID NO: 27922 - DNA, 16 bp, synthetic construct
  misc_feature 1..16: note = synthetic [barcode part1]
  source 1..16: mol_type = other DNA
tacttcggacgaggtt

SEQ ID NO: 27923 - DNA, 16 bp, synthetic construct
  misc_feature 1..16: note = synthetic [barcode part1]
  source 1..16: mol_type = other DNA
tcttcggattgcacgc

SEQ ID NO: 27924 - DNA, 16 bp, synthetic construct
  misc_feature 1..16: note = synthetic [barcode part1]
  source 1..16: mol_type = other DNA
gtgtggttggtgtgtt

SEQ ID NO: 27925 - DNA, 16 bp, synthetic construct
  misc_feature 1..16: note = synthetic [barcode part1]
  source 1..16: mol_type = other DNA
atcctagactggtcag

SEQ ID NO: 27926 - DNA, 16 bp, synthetic construct
  misc_feature 1..16: note = synthetic [barcode part1]
  source 1..16: mol_type = other DNA
cggttagtaaccgact

SEQ ID NO: 27927 - DNA, 16 bp, synthetic construct
  misc_feature 1..16: note = synthetic [barcode part1]
  source 1..16: mol_type = other DNA
aggcgtcttgtcctac

SEQ ID NO: 27928 - DNA, 16 bp, synthetic construct
  misc_feature 1..16: note = synthetic [barcode part1]
  source 1..16: mol_type = other DNA
tacacagacgattgcc

SEQ ID NO: 27929 - DNA, 16 bp, synthetic construct
  misc_feature 1..16: note = synthetic [barcode part1]
  source 1..16: mol_type = other DNA
gttacgtgtgtgatcg

SEQ ID NO: 27930 - DNA, 16 bp, synthetic construct
  misc_feature 1..16: note = synthetic [barcode part1]
  source 1..16: mol_type = other DNA
atcggacggtgtgagt

SEQ ID NO: 27931 - DNA, 16 bp, synthetic construct
  misc_feature 1..16: note = synthetic [barcode part1]
  source 1..16: mol_type = other DNA
taacgaagtgaatccg

SEQ ID NO: 27932 - DNA, 16 bp, synthetic construct
  misc_feature 1..16: note = synthetic [barcode part1]
  source 1..16: mol_type = other DNA
cgttcggtaacgagag

SEQ ID NO: 27933 - DNA, 16 bp, synthetic construct
  misc_feature 1..16: note = synthetic [barcode part1]
  source 1..16: mol_type = other DNA
aatagtggcggtgaag

SEQ ID NO: 27934 - DNA, 16 bp, synthetic construct
  misc_feature 1..16: note = synthetic [barcode part1]
  source 1..16: mol_type = other DNA
gtcgtataatccgcag

SEQ ID NO: 27935 - DNA, 16 bp, synthetic construct
  misc_feature 1..16: note = synthetic [barcode part1]
  source 1..16: mol_type = other DNA
tacttgtgtgacactc

SEQ ID NO: 27936 - DNA, 16 bp, synthetic construct
  misc_feature 1..16: note = synthetic [barcode part1]
  source 1..16: mol_type = other DNA
tctggagtggtgttgt

SEQ ID NO: 27937 - DNA, 16 bp, synthetic construct
  misc_feature 1..16: note = synthetic [barcode part1]
  source 1..16: mol_type = other DNA
cctgactactgtacgc

SEQ ID NO: 27938 - DNA, 16 bp, synthetic construct
  misc_feature 1..16: note = synthetic [barcode part1]
  source 1..16: mol_type = other DNA
ataggtcgattacgcc

SEQ ID NO: 27939 - DNA, 16 bp, synthetic construct
  misc_feature 1..16: note = synthetic [barcode part1]
  source 1..16: mol_type = other DNA
gcaagttggaacgacc

SEQ ID NO: 27940 - DNA, 16 bp, synthetic construct
  misc_feature 1..16: note = synthetic [barcode part1]
  source 1..16: mol_type = other DNA
tgccgagtgaaggtac

SEQ ID NO: 27941 - DNA, 16 bp, synthetic construct
  misc_feature 1..16: note = synthetic [barcode part1]
  source 1..16: mol_type = other DNA
cgcctcagatacctgt

SEQ ID NO: 27942 - DNA, 16 bp, synthetic construct
  misc_feature 1..16: note = synthetic [barcode part1]
  source 1..16: mol_type = other DNA
caacactatccacttg

SEQ ID NO: 27943 - DNA, 16 bp, synthetic construct
  misc_feature 1..16: note = synthetic [barcode part1]
  source 1..16: mol_type = other DNA
tgagtacgtcagaggc

SEQ ID NO: 27944 - DNA, 16 bp, synthetic construct
  misc_feature 1..16: note = synthetic [barcode part1]
  source 1..16: mol_type = other DNA
acagataaggcgaacg

SEQ ID NO: 27945 - DNA, 16 bp, synthetic construct
  misc_feature 1..16: note = synthetic [barcode part1]
  source 1..16: mol_type = other DNA
tcaagtgcaccgttcc

SEQ ID NO: 27946 - DNA, 16 bp, synthetic construct
  misc_feature 1..16: note = synthetic [barcode part1]
  source 1..16: mol_type = other DNA
cgcagacttgtcctac

SEQ ID NO: 27947 - DNA, 16 bp, synthetic construct
  misc_feature 1..16: note = synthetic [barcode part1]
  source 1..16: mol_type = other DNA
caattaacaacgccgc

SEQ ID NO: 27948 - DNA, 16 bp, synthetic construct
  misc_feature 1..16: note = synthetic [barcode part1]
  source 1..16: mol_type = other DNA
cggtaacgaaggcact

SEQ ID NO: 27949 - DNA, 16 bp, synthetic construct
  misc_feature 1..16: note = synthetic [barcode part1]
  source 1..16: mol_type = other DNA
aacagtcttctgcgcc

SEQ ID NO: 27950 - DNA, 16 bp, synthetic construct
  misc_feature 1..16: note = synthetic [barcode part1]
  source 1..16: mol_type = other DNA
cctcttctctcctctt

SEQ ID NO: 27951 - DNA, 16 bp, synthetic construct
  misc_feature 1..16: note = synthetic [barcode part1]
  source 1..16: mol_type = other DNA
gcgtcttacgttcttc

SEQ ID NO: 27952 - DNA, 16 bp, synthetic construct
  misc_feature 1..16: note = synthetic [barcode part1]
  source 1..16: mol_type = other DNA
accgaagaaggaactg

SEQ ID NO: 27953 - DNA, 16 bp, synthetic construct
  misc_feature 1..16: note = synthetic [barcode part1]
  source 1..16: mol_type = other DNA
aatccgttctatcgtg

SEQ ID NO: 27954 - DNA, 16 bp, synthetic construct
  misc_feature 1..16: note = synthetic [barcode part1]
  source 1..16: mol_type = other DNA
cgtcactgtaatcgcc

SEQ ID NO: 27955 - DNA, 16 bp, synthetic construct
  misc_feature 1..16: note = synthetic [barcode part1]
  source 1..16: mol_type = other DNA
aattcggcacggagac

SEQ ID NO: 27956 - DNA, 16 bp, synthetic construct
  misc_feature 1..16: note = synthetic [barcode part1]
  source 1..16: mol_type = other DNA
ccagagatagtcttcg

SEQ ID NO: 27957 - DNA, 16 bp, synthetic construct
  misc_feature 1..16: note = synthetic [barcode part1]
  source 1..16: mol_type = other DNA
aattgcacagtcgcgt

SEQ ID NO: 27958 - DNA, 16 bp, synthetic construct
  misc_feature 1..16: note = synthetic [barcode part1]
  source 1..16: mol_type = other DNA
ttgcacctgttcctac

SEQ ID NO: 27959 - DNA, 16 bp, synthetic construct
  misc_feature 1..16: note = synthetic [barcode part1]
  source 1..16: mol_type = other DNA
gcactggactatcctc

SEQ ID NO: 27960 - DNA, 16 bp, synthetic construct
  misc_feature 1..16: note = synthetic [barcode part1]
  source 1..16: mol_type = other DNA
atctgacacgttcttg

SEQ ID NO: 27961 - DNA, 16 bp, synthetic construct
  misc_feature 1..16: note = synthetic [barcode part1]
  source 1..16: mol_type = other DNA
acaaccgaactaaggt

SEQ ID NO: 27962 - DNA, 16 bp, synthetic construct
  misc_feature 1..16: note = synthetic [barcode part1]
  source 1..16: mol_type = other DNA
ttactggttagtggcg

SEQ ID NO: 27963 - DNA, 16 bp, synthetic construct
  misc_feature 1..16: note = synthetic [barcode part1]
  source 1..16: mol_type = other DNA
taactgcgaacgttcg

SEQ ID NO: 27964 - DNA, 16 bp, synthetic construct
  misc_feature 1..16: note = synthetic [barcode part1]
  source 1..16: mol_type = other DNA
tgatcaccactgacag

SEQ ID NO: 27965 - DNA, 16 bp, synthetic construct
  misc_feature 1..16: note = synthetic [barcode part1]
  source 1..16: mol_type = other DNA
aactgaccacacacac

SEQ ID NO: 27966 - DNA, 16 bp, synthetic construct
  misc_feature 1..16: note = synthetic [barcode part1]
  source 1..16: mol_type = other DNA
ttaacgcacgcactag

SEQ ID NO: 27967 - DNA, 16 bp, synthetic construct
  misc_feature 1..16: note = synthetic [barcode part1]
  source 1..16: mol_type = other DNA
tcagtagtaggtcacc

SEQ ID NO: 27968 - DNA, 16 bp, synthetic construct
  misc_feature 1..16: note = synthetic [barcode part1]
  source 1..16: mol_type = other DNA
aaccgcgtatacagtc

SEQ ID NO: 27969 - DNA, 16 bp, synthetic construct
  misc_feature 1..16: note = synthetic [barcode part1]
  source 1..16: mol_type = other DNA
tattgaggagtgcagt

SEQ ID NO: 27970 - DNA, 16 bp, synthetic construct
  misc_feature 1..16: note = synthetic [barcode part1]
  source 1..16: mol_type = other DNA
tgcagtatcacttacc

SEQ ID NO: 27971 - DNA, 16 bp, synthetic construct
  misc_feature 1..16: note = synthetic [barcode part1]
  source 1..16: mol_type = other DNA
atacggttcctctaac

SEQ ID NO: 27972 - DNA, 16 bp, synthetic construct
  misc_feature 1..16: note = synthetic [barcode part1]
  source 1..16: mol_type = other DNA
atctcgcagtgacaac

SEQ ID NO: 27973 - DNA, 16 bp, synthetic construct
  misc_feature 1..16: note = synthetic [barcode part1]
  source 1..16: mol_type = other DNA
accaccttattgcctc

SEQ ID NO: 27974 - DNA, 16 bp, synthetic construct
  misc_feature 1..16: note = synthetic [barcode part1]
  source 1..16: mol_type = other DNA
tcttgtaaccgccgac

SEQ ID NO: 27975 - DNA, 16 bp, synthetic construct
  misc_feature 1..16: note = synthetic [barcode part1]
  source 1..16: mol_type = other DNA
acggaacaatatccag

SEQ ID NO: 27976 - DNA, 16 bp, synthetic construct
  misc_feature 1..16: note = synthetic [barcode part1]
  source 1..16: mol_type = other DNA
tggatctatcttgtcg

SEQ ID NO: 27977 - DNA, 16 bp, synthetic construct
  misc_feature 1..16: note = synthetic [barcode part1]
  source 1..16: mol_type = other DNA
tgccttctcaatagtg

SEQ ID NO: 27978 - DNA, 16 bp, synthetic construct
  misc_feature 1..16: note = synthetic [barcode part1]
  source 1..16: mol_type = other DNA
cgcggtgagtaagtgt

SEQ ID NO: 27979 - DNA, 16 bp, synthetic construct
  misc_feature 1..16: note = synthetic [barcode part1]
  source 1..16: mol_type = other DNA
taacgtggtattcggc

SEQ ID NO: 27980 - DNA, 16 bp, synthetic construct
  misc_feature 1..16: note = synthetic [barcode part1]
  source 1..16: mol_type = other DNA
cctctacctaccagag

SEQ ID NO: 27981 - DNA, 16 bp, synthetic construct
  misc_feature 1..16: note = synthetic [barcode part1]
  source 1..16: mol_type = other DNA
cactagtgaagtcaag

SEQ ID NO: 27982 - DNA, 16 bp, synthetic construct
  misc_feature 1..16: note = synthetic [barcode part1]
  source 1..16: mol_type = other DNA
actgtcagtgttcttg

SEQ ID NO: 27983 - DNA, 16 bp, synthetic construct
  misc_feature 1..16: note = synthetic [barcode part1]
  source 1..16: mol_type = other DNA
taagtcgcgcaggaac

SEQ ID NO: 27984 - DNA, 16 bp, synthetic construct
  misc_feature 1..16: note = synthetic [barcode part1]
  source 1..16: mol_type = other DNA
cagacgagacagatag

SEQ ID NO: 27985 - DNA, 16 bp, synthetic construct
  misc_feature 1..16: note = synthetic [barcode part1]
  source 1..16: mol_type = other DNA
gtccttggacgatctc

SEQ ID NO: 27986 - DNA, 16 bp, synthetic construct
  misc_feature 1..16: note = synthetic [barcode part1]
  source 1..16: mol_type = other DNA
accagatcgccttcac

SEQ ID NO: 27987 - DNA, 16 bp, synthetic construct
  misc_feature 1..16: note = synthetic [barcode part1]
  source 1..16: mol_type = other DNA
tccacaacgttatctg

SEQ ID NO: 27988 - DNA, 16 bp, synthetic construct
  misc_feature 1..16: note = synthetic [barcode part1]
  source 1..16: mol_type = other DNA
actagacctgcactcc

SEQ ID NO: 27989 - DNA, 16 bp, synthetic construct
  misc_feature 1..16: note = synthetic [barcode part1]
  source 1..16: mol_type = other DNA
agttaccacaagagtg

SEQ ID NO: 27990 - DNA, 16 bp, synthetic construct
  misc_feature 1..16: note = synthetic [barcode part1]
  source 1..16: mol_type = other DNA
tgtgttgacgttggtg

SEQ ID NO: 27991 - DNA, 16 bp, synthetic construct
  misc_feature 1..16: note = synthetic [barcode part1]
  source 1..16: mol_type = other DNA
tgccgacgattaggag

SEQ ID NO: 27992 - DNA, 16 bp, synthetic construct
  misc_feature 1..16: note = synthetic [barcode part1]
  source 1..16: mol_type = other DNA
tccgttcacggtgttg

SEQ ID NO: 27993 - DNA, 16 bp, synthetic construct
  misc_feature 1..16: note = synthetic [barcode part1]
  source 1..16: mol_type = other DNA
cagtaggagacctacg

SEQ ID NO: 27994 - DNA, 16 bp, synthetic construct
  misc_feature 1..16: note = synthetic [barcode part1]
  source 1..16: mol_type = other DNA
acctgtccgttataac

SEQ ID NO: 27995 - DNA, 16 bp, synthetic construct
  misc_feature 1..16: note = synthetic [barcode part1]
  source 1..16: mol_type = other DNA
tctgttgacacggcct

SEQ ID NO: 27996 - DNA, 16 bp, synthetic construct
  misc_feature 1..16: note = synthetic [barcode part1]
  source 1..16: mol_type = other DNA
actcaactcttacgtg

SEQ ID NO: 27997 - DNA, 16 bp, synthetic construct
  misc_feature 1..16: note = synthetic [barcode part1]
  source 1..16: mol_type = other DNA
tgtactgacactggtg

SEQ ID NO: 27998 - DNA, 16 bp, synthetic construct
  misc_feature 1..16: note = synthetic [barcode part1]
  source 1..16: mol_type = other DNA
taagaccgtcgcaatc

SEQ ID NO: 27999 - DNA, 16 bp, synthetic construct
  misc_feature 1..16: note = synthetic [barcode part1]
  source 1..16: mol_type = other DNA
ttcgtccttgttcacg

SEQ ID NO: 28000 - DNA, 16 bp, synthetic construct
  misc_feature 1..16: note = synthetic [barcode part1]
  source 1..16: mol_type = other DNA
gtctcaatcggaatcg

SEQ ID NO: 28001 - DNA, 16 bp, synthetic construct
  misc_feature 1..16: note = synthetic [barcode part1]
  source 1..16: mol_type = other DNA
gaatcgtcggagacac

SEQ ID NO: 28002 - DNA, 16 bp, synthetic construct
  misc_feature 1..16: note = synthetic [barcode part1]
  source 1..16: mol_type = other DNA
cctgtaacgttgtccg

SEQ ID NO: 28003 - DNA, 16 bp, synthetic construct
  misc_feature 1..16: note = synthetic [barcode part1]
  source 1..16: mol_type = other DNA
taggactagtctcgac

SEQ ID NO: 28004 - DNA, 16 bp, synthetic construct
  misc_feature 1..16: note = synthetic [barcode part1]
  source 1..16: mol_type = other DNA
taccgttctaccgtct

SEQ ID NO: 28005 - DNA, 16 bp, synthetic construct
  misc_feature 1..16: note = synthetic [barcode part1]
  source 1..16: mol_type = other DNA
acacggcctagaagac

SEQ ID NO: 28006 - DNA, 16 bp, synthetic construct
  misc_feature 1..16: note = synthetic [barcode part1]
  source 1..16: mol_type = other DNA
actgtcctggacactc

SEQ ID NO: 28007 - DNA, 16 bp, synthetic construct
  misc_feature 1..16: note = synthetic [barcode part1]
  source 1..16: mol_type = other DNA
gaacgtgtccttgtag

SEQ ID NO: 28008 - DNA, 16 bp, synthetic construct
  misc_feature 1..16: note = synthetic [barcode part1]
  source 1..16: mol_type = other DNA
cggttccttgatctct

SEQ ID NO: 28009 - DNA, 16 bp, synthetic construct
  misc_feature 1..16: note = synthetic [barcode part1]
  source 1..16: mol_type = other DNA
ttgaggttctacctac

SEQ ID NO: 28010 - DNA, 16 bp, synthetic construct
  misc_feature 1..16: note = synthetic [barcode part1]
  source 1..16: mol_type = other DNA
caggaagtagttgcgc

SEQ ID NO: 28011 - DNA, 16 bp, synthetic construct
  misc_feature 1..16: note = synthetic [barcode part1]
  source 1..16: mol_type = other DNA
tcaggatcgtcacaac

SEQ ID NO: 28012 - DNA, 16 bp, synthetic construct
  misc_feature 1..16: note = synthetic [barcode part1]
  source 1..16: mol_type = other DNA
cctccgacaattgcgt

SEQ ID NO: 28013 - DNA, 16 bp, synthetic construct
  misc_feature 1..16: note = synthetic [barcode part1]
  source 1..16: mol_type = other DNA
cagagagtgatcgtgc

SEQ ID NO: 28014 - DNA, 16 bp, synthetic construct
  misc_feature 1..16: note = synthetic [barcode part1]
  source 1..16: mol_type = other DNA
gatcaaccgatcaacc

SEQ ID NO: 28015 - DNA, 16 bp, synthetic construct
  misc_feature 1..16: note = synthetic [barcode part1]
  source 1..16: mol_type = other DNA
actgtaggacactacc

SEQ ID NO: 28016 - DNA, 16 bp, synthetic construct
  misc_feature 1..16: note = synthetic [barcode part1]
  source 1..16: mol_type = other DNA
gtgcgacttgactctc

SEQ ID NO: 28017 - DNA, 16 bp, synthetic construct
  misc_feature 1..16: note = synthetic [barcode part1]
  source 1..16: mol_type = other DNA
gccaacagtctagact

SEQ ID NO: 28018 - DNA, 16 bp, synthetic construct
  misc_feature 1..16: note = synthetic [barcode part1]
  source 1..16: mol_type = other DNA
ttaagaggtcgtcctg

SEQ ID NO: 28019 - DNA, 16 bp, synthetic construct
  misc_feature 1..16: note = synthetic [barcode part1]
  source 1..16: mol_type = other DNA
atccggaacctgtagt

SEQ ID NO: 28020 - DNA, 16 bp, synthetic construct
  misc_feature 1..16: note = synthetic [barcode part1]
  source 1..16: mol_type = other DNA
cgagtgcactatctcc

SEQ ID NO: 28021 - DNA, 16 bp, synthetic construct
  misc_feature 1..16: note = synthetic [barcode part1]
  source 1..16: mol_type = other DNA
gatagaaggcctacgc

SEQ ID NO: 28022 - DNA, 16 bp, synthetic construct
  misc_feature 1..16: note = synthetic [barcode part1]
  source 1..16: mol_type = other DNA
attgtggataggcggc

SEQ ID NO: 28023 - DNA, 16 bp, synthetic construct
  misc_feature 1..16: note = synthetic [barcode part1]
  source 1..16: mol_type = other DNA
tctcaattcctcgacc

SEQ ID NO: 28024 - DNA, 16 bp, synthetic construct
  misc_feature 1..16: note = synthetic [barcode part1]
  source 1..16: mol_type = other DNA
gtcgccagagaatacg

SEQ ID NO: 28025 - DNA, 16 bp, synthetic construct
  misc_feature 1..16: note = synthetic [barcode part1]
  source 1..16: mol_type = other DNA
aattcttccaacgcgt

SEQ ID NO: 28026 - DNA, 16 bp, synthetic construct
  misc_feature 1..16: note = synthetic [barcode part1]
  source 1..16: mol_type = other DNA
gactctagagtcctag

SEQ ID NO: 28027 - DNA, 16 bp, synthetic construct
  misc_feature 1..16: note = synthetic [barcode part1]
  source 1..16: mol_type = other DNA
tcacggagacggtagt

SEQ ID NO: 28028 - DNA, 16 bp, synthetic construct
  misc_feature 1..16: note = synthetic [barcode part1]
  source 1..16: mol_type = other DNA
cgtaaggtaacagttg

SEQ ID NO: 28029 - DNA, 16 bp, synthetic construct
  misc_feature 1..16: note = synthetic [barcode part1]
  source 1..16: mol_type = other DNA
gacgtcacagtcagtt

SEQ ID NO: 28030 - DNA, 16 bp, synthetic construct
  misc_feature 1..16: note = synthetic [barcode part1]
  source 1..16: mol_type = other DNA
cagttcttgtgactgt

SEQ ID NO: 28031 - DNA, 16 bp, synthetic construct
  misc_feature 1..16: note = synthetic [barcode part1]
  source 1..16: mol_type = other DNA
gtatattgcgaccacg

SEQ ID NO: 28032 - DNA, 16 bp, synthetic construct
  misc_feature 1..16: note = synthetic [barcode part1]
  source 1..16: mol_type = other DNA
gtcttcgttgccagac

SEQ ID NO: 28033 - DNA, 16 bp, synthetic construct
  misc_feature 1..16: note = synthetic [barcode part1]
  source 1..16: mol_type = other DNA
acttaccgacgaacgt

SEQ ID NO: 28034 - DNA, 16 bp, synthetic construct
  misc_feature 1..16: note = synthetic [barcode part1]
  source 1..16: mol_type = other DNA
acttccaacaatccgt

SEQ ID NO: 28035 - DNA, 16 bp, synthetic construct
  misc_feature 1..16: note = synthetic [barcode part1]
  source 1..16: mol_type = other DNA
cgcgcggaatatattc

SEQ ID NO: 28036 - DNA, 16 bp, synthetic construct
  misc_feature 1..16: note = synthetic [barcode part1]
  source 1..16: mol_type = other DNA
aacgccgaagatcttc

SEQ ID NO: 28037 - DNA, 16 bp, synthetic construct
  misc_feature 1..16: note = synthetic [barcode part1]
  source 1..16: mol_type = other DNA
ccaggtctgtaggaag

SEQ ID NO: 28038 - DNA, 16 bp, synthetic construct
  misc_feature 1..16: note = synthetic [barcode part1]
  source 1..16: mol_type = other DNA
gcctatactagacgtg

SEQ ID NO: 28039 - DNA, 16 bp, synthetic construct
  misc_feature 1..16: note = synthetic [barcode part1]
  source 1..16: mol_type = other DNA
tactctaccgtaggcc

SEQ ID NO: 28040 - DNA, 16 bp, synthetic construct
  misc_feature 1..16: note = synthetic [barcode part1]
  source 1..16: mol_type = other DNA
ataactgtcgactcct

SEQ ID NO: 28041 - DNA, 16 bp, synthetic construct
  misc_feature 1..16: note = synthetic [barcode part1]
  source 1..16: mol_type = other DNA
gaggtccgacagatac

SEQ ID NO: 28042 - DNA, 16 bp, synthetic construct
  misc_feature 1..16: note = synthetic [barcode part1]
  source 1..16: mol_type = other DNA
tacggataacgtccac

SEQ ID NO: 28043 - DNA, 16 bp, synthetic construct
  misc_feature 1..16: note = synthetic [barcode part1]
  source 1..16: mol_type = other DNA
tgccgaatactggact

SEQ ID NO: 28044 - DNA, 16 bp, synthetic construct
  misc_feature 1..16: note = synthetic [barcode part1]
  source 1..16: mol_type = other DNA
agagtccaataggtgt

SEQ ID NO: 28045 - DNA, 16 bp, synthetic construct
  misc_feature 1..16: note = synthetic [barcode part1]
  source 1..16: mol_type = other DNA
tgttgacaaccttctg

SEQ ID NO: 28046 - DNA, 16 bp, synthetic construct
  misc_feature 1..16: note = synthetic [barcode part1]
  source 1..16: mol_type = other DNA
cctaactggaaggtct

SEQ ID NO: 28047 - DNA, 16 bp, synthetic construct
  misc_feature 1..16: note = synthetic [barcode part1]
  source 1..16: mol_type = other DNA
gcactaggaggtgact

SEQ ID NO: 28048 - DNA, 16 bp, synthetic construct
  misc_feature 1..16: note = synthetic [barcode part1]
  source 1..16: mol_type = other DNA
gtggagaactagattc

SEQ ID NO: 28049 - DNA, 16 bp, synthetic construct
  misc_feature 1..16: note = synthetic [barcode part1]
  source 1..16: mol_type = other DNA
tctcctctgaccgatt

SEQ ID NO: 28050 - DNA, 16 bp, synthetic construct
  misc_feature 1..16: note = synthetic [barcode part1]
  source 1..16: mol_type = other DNA
tgtccacagtgaacac

SEQ ID NO: 28051 - DNA, 16 bp, synthetic construct
  misc_feature 1..16: note = synthetic [barcode part1]
  source 1..16: mol_type = other DNA
ttaactccggactcgc

SEQ ID NO: 28052 - DNA, 16 bp, synthetic construct
  misc_feature 1..16: note = synthetic [barcode part1]
  source 1..16: mol_type = other DNA
aattctcgccaggaac

SEQ ID NO: 28053 - DNA, 16 bp, synthetic construct
  misc_feature 1..16: note = synthetic [barcode part1]
  source 1..16: mol_type = other DNA
tgtccgcgtcttaggt

SEQ ID NO: 28054 - DNA, 16 bp, synthetic construct
  misc_feature 1..16: note = synthetic [barcode part1]
  source 1..16: mol_type = other DNA
gcaccgattccactac

SEQ ID NO: 28055 - DNA, 16 bp, synthetic construct
  misc_feature 1..16: note = synthetic [barcode part1]
  source 1..16: mol_type = other DNA
tgcgaccgagaatcag

SEQ ID NO: 28056 - DNA, 16 bp, synthetic construct
  misc_feature 1..16: note = synthetic [barcode part1]
  source 1..16: mol_type = other DNA
tggatcgttctgtact

SEQ ID NO: 28057 - DNA, 16 bp, synthetic construct
  misc_feature 1..16: note = synthetic [barcode part1]
  source 1..16: mol_type = other DNA
ccaacaacgttgaacc

SEQ ID NO: 28058 - DNA, 16 bp, synthetic construct
  misc_feature 1..16: note = synthetic [barcode part1]
  source 1..16: mol_type = other DNA
cgaataccgtgaactc

SEQ ID NO: 28059 - DNA, 16 bp, synthetic construct
  misc_feature 1..16: note = synthetic [barcode part1]
  source 1..16: mol_type = other DNA
cctgtgttcgaaccac

SEQ ID NO: 28060 - DNA, 16 bp, synthetic construct
  misc_feature 1..16: note = synthetic [barcode part1]
  source 1..16: mol_type = other DNA
cgtgtcgtcaatctcg

SEQ ID NO: 28061 - DNA, 16 bp, synthetic construct
  misc_feature 1..16: note = synthetic [barcode part1]
  source 1..16: mol_type = other DNA
gtgacacacacacgtt

SEQ ID NO: 28062 - DNA, 16 bp, synthetic construct
  misc_feature 1..16: note = synthetic [barcode part1]
  source 1..16: mol_type = other DNA
attgtcgcgtgccttg

SEQ ID NO: 28063 - DNA, 16 bp, synthetic construct
  misc_feature 1..16: note = synthetic [barcode part1]
  source 1..16: mol_type = other DNA
caggtattagtccttc

SEQ ID NO: 28064 - DNA, 16 bp, synthetic construct
  misc_feature 1..16: note = synthetic [barcode part1]
  source 1..16: mol_type = other DNA
taagtcctgagacaag

SEQ ID NO: 28065 - DNA, 16 bp, synthetic construct
  misc_feature 1..16: note = synthetic [barcode part1]
  source 1..16: mol_type = other DNA
tgtagtcaaccgtgtg

SEQ ID NO: 28066 - DNA, 16 bp, synthetic construct
  misc_feature 1..16: note = synthetic [barcode part1]
  source 1..16: mol_type = other DNA
tagttctgccgatatc

SEQ ID NO: 28067 - DNA, 16 bp, synthetic construct
  misc_feature 1..16: note = synthetic [barcode part1]
  source 1..16: mol_type = other DNA
accgatattcgcgaac

SEQ ID NO: 28068 - DNA, 16 bp, synthetic construct
  misc_feature 1..16: note = synthetic [barcode part1]
  source 1..16: mol_type = other DNA
gatcgacttgagacct

SEQ ID NO: 28069 - DNA, 16 bp, synthetic construct
  misc_feature 1..16: note = synthetic [barcode part1]
  source 1..16: mol_type = other DNA
aacctaaccgacgact

SEQ ID NO: 28070 - DNA, 16 bp, synthetic construct
  misc_feature 1..16: note = synthetic [barcode part1]
  source 1..16: mol_type = other DNA
ccggtctactcaggtt

SEQ ID NO: 28071 - DNA, 16 bp, synthetic construct
  misc_feature 1..16: note = synthetic [barcode part1]
  source 1..16: mol_type = other DNA
attccacgcaactgtt

SEQ ID NO: 28072 - DNA, 16 bp, synthetic construct
  misc_feature 1..16: note = synthetic [barcode part1]
  source 1..16: mol_type = other DNA
actacgaagactccac

SEQ ID NO: 28073 - DNA, 16 bp, synthetic construct
  misc_feature 1..16: note = synthetic [barcode part1]
  source 1..16: mol_type = other DNA
tgacgcctgtctactg

SEQ ID NO: 28074 - DNA, 16 bp, synthetic construct
  misc_feature 1..16: note = synthetic [barcode part1]
  source 1..16: mol_type = other DNA
attgtcgcgcaaggag

SEQ ID NO: 28075 - DNA, 16 bp, synthetic construct
  misc_feature 1..16: note = synthetic [barcode part1]
  source 1..16: mol_type = other DNA
tccagaaggagagaac

SEQ ID NO: 28076 - DNA, 16 bp, synthetic construct
  misc_feature 1..16: note = synthetic [barcode part1]
  source 1..16: mol_type = other DNA
accttgtagacgtctt

SEQ ID NO: 28077 - DNA, 16 bp, synthetic construct
  misc_feature 1..16: note = synthetic [barcode part1]
  source 1..16: mol_type = other DNA
tagaccgtctcgtatt

SEQ ID NO: 28078 - DNA, 16 bp, synthetic construct
  misc_feature 1..16: note = synthetic [barcode part1]
  source 1..16: mol_type = other DNA
gactctccaatcttcc

SEQ ID NO: 28079 - DNA, 16 bp, synthetic construct
  misc_feature 1..16: note = synthetic [barcode part1]
  source 1..16: mol_type = other DNA
actacggcgttgtagt

SEQ ID NO: 28080 - DNA, 16 bp, synthetic construct
  misc_feature 1..16: note = synthetic [barcode part1]
  source 1..16: mol_type = other DNA
gtcagtaagtaacgac

SEQ ID NO: 28081 - DNA, 16 bp, synthetic construct
  misc_feature 1..16: note = synthetic [barcode part1]
  source 1..16: mol_type = other DNA
attactacgtgttccg

SEQ ID NO: 28082 - DNA, 16 bp, synthetic construct
  misc_feature 1..16: note = synthetic [barcode part1]
  source 1..16: mol_type = other DNA
gataagttaccgtgag

SEQ ID NO: 28083 - DNA, 16 bp, synthetic construct
  misc_feature 1..16: note = synthetic [barcode part1]
  source 1..16: mol_type = other DNA
ttccgtctactgtctg

SEQ ID NO: 28084 - DNA, 16 bp, synthetic construct
  misc_feature 1..16: note = synthetic [barcode part1]
  source 1..16: mol_type = other DNA
aggacgaaggttcgtc

SEQ ID NO: 28085 - DNA, 16 bp, synthetic construct
  misc_feature 1..16: note = synthetic [barcode part1]
  source 1..16: mol_type = other DNA
tccaatcactacacgt

SEQ ID NO: 28086 - DNA, 16 bp, synthetic construct
  misc_feature 1..16: note = synthetic [barcode part1]
  source 1..16: mol_type = other DNA
tatcgaaggatcgcct

SEQ ID NO: 28087 - DNA, 16 bp, synthetic construct
  misc_feature 1..16: note = synthetic [barcode part1]
  source 1..16: mol_type = other DNA
aagtaccttgcaggtc

SEQ ID NO: 28088 - DNA, 16 bp, synthetic construct
  misc_feature 1..16: note = synthetic [barcode part1]
  source 1..16: mol_type = other DNA
ttcaactgcgtactac

SEQ ID NO: 28089 - DNA, 16 bp, synthetic construct
  misc_feature 1..16: note = synthetic [barcode part1]
  source 1..16: mol_type = other DNA
tcgtcctcttctagtg

SEQ ID NO: 28090 - DNA, 16 bp, synthetic construct
  misc_feature 1..16: note = synthetic [barcode part1]
  source 1..16: mol_type = other DNA
acgtgttggcgacaag

SEQ ID NO: 28091 - DNA, 16 bp, synthetic construct
  misc_feature 1..16: note = synthetic [barcode part1]
  source 1..16: mol_type = other DNA
gcaatctagtgatccg

SEQ ID NO: 28092 - DNA, 16 bp, synthetic construct
  misc_feature 1..16: note = synthetic [barcode part1]
  source 1..16: mol_type = other DNA
atatcaaccgacacgc

SEQ ID NO: 28093 - DNA, 16 bp, synthetic construct
  misc_feature 1..16: note = synthetic [barcode part1]
  source 1..16: mol_type = other DNA
tctcaataactcgtgc

SEQ ID NO: 28094 - DNA, 16 bp, synthetic construct
  misc_feature 1..16: note = synthetic [barcode part1]
  source 1..16: mol_type = other DNA
gcaattgttgaggaac

SEQ ID NO: 28095 - DNA, 16 bp, synthetic construct
  misc_feature 1..16: note = synthetic [barcode part1]
  source 1..16: mol_type = other DNA
tctcgaatatctgtcg

SEQ ID NO: 28096 - DNA, 16 bp, synthetic construct
  misc_feature 1..16: note = synthetic [barcode part1]
  source 1..16: mol_type = other DNA
gttcggactacggatt

SEQ ID NO: 28097 - DNA, 16 bp, synthetic construct
  misc_feature 1..16: note = synthetic [barcode part1]
  source 1..16: mol_type = other DNA
ttaggcgtcgcgaatt

SEQ ID NO: 28098 - DNA, 16 bp, synthetic construct
  misc_feature 1..16: note = synthetic [barcode part1]
  source 1..16: mol_type = other DNA
cgcgcgaatagttact

SEQ ID NO: 28099 - DNA, 16 bp, synthetic construct
  misc_feature 1..16: note = synthetic [barcode part1]
  source 1..16: mol_type = other DNA
tcaacggtaccgaact

SEQ ID NO: 28100 - DNA, 16 bp, synthetic construct
  misc_feature 1..16: note = synthetic [barcode part1]
  source 1..16: mol_type = other DNA
acaaggacgtgtctct

SEQ ID NO: 28101 - DNA, 16 bp, synthetic construct
  misc_feature 1..16: note = synthetic [barcode part1]
  source 1..16: mol_type = other DNA
cggaacttgtacgtgt

SEQ ID NO: 28102 - DNA, 16 bp, synthetic construct
  misc_feature 1..16: note = synthetic [barcode part1]
  source 1..16: mol_type = other DNA
ttgtactgagtcgttc

SEQ ID NO: 28103 - DNA, 16 bp, synthetic construct
  misc_feature 1..16: note = synthetic [barcode part1]
  source 1..16: mol_type = other DNA
tcggcaacctgtgtct

SEQ ID NO: 28104 - DNA, 16 bp, synthetic construct
  misc_feature 1..16: note = synthetic [barcode part1]
  source 1..16: mol_type = other DNA
agatcgtgttcagtgc

SEQ ID NO: 28105 - DNA, 16 bp, synthetic construct
  misc_feature 1..16: note = synthetic [barcode part1]
  source 1..16: mol_type = other DNA
tgagactcaactggtc

SEQ ID NO: 28106 - DNA, 16 bp, synthetic construct
  misc_feature 1..16: note = synthetic [barcode part1]
  source 1..16: mol_type = other DNA
taccaaccagtgtacg

SEQ ID NO: 28107 - DNA, 16 bp, synthetic construct
  misc_feature 1..16: note = synthetic [barcode part1]
  source 1..16: mol_type = other DNA
ttatctgccgcgacac

SEQ ID NO: 28108 - DNA, 16 bp, synthetic construct
  misc_feature 1..16: note = synthetic [barcode part1]
  source 1..16: mol_type = other DNA
tgcactataacgcacg

SEQ ID NO: 28109 - DNA, 16 bp, synthetic construct
  misc_feature 1..16: note = synthetic [barcode part1]
  source 1..16: mol_type = other DNA
gactgactgtgacact

SEQ ID NO: 28110 - DNA, 16 bp, synthetic construct
  misc_feature 1..16: note = synthetic [barcode part1]
  source 1..16: mol_type = other DNA
tctactacgcaggtcc

SEQ ID NO: 28111 - DNA, 16 bp, synthetic construct
  misc_feature 1..16: note = synthetic [barcode part1]
  source 1..16: mol_type = other DNA
tgagaggcgatatatc

SEQ ID NO: 28112 - DNA, 16 bp, synthetic construct
  misc_feature 1..16: note = synthetic [barcode part1]
  source 1..16: mol_type = other DNA
acacctcaacctggtc

SEQ ID NO: 28113 - DNA, 16 bp, synthetic construct
  misc_feature 1..16: note = synthetic [barcode part1]
  source 1..16: mol_type = other DNA
agtggcaactctgttg

SEQ ID NO: 28114 - DNA, 16 bp, synthetic construct
  misc_feature 1..16: note = synthetic [barcode part1]
  source 1..16: mol_type = other DNA
aactcgaagtccagtc

SEQ ID NO: 28115 - DNA, 16 bp, synthetic construct
  misc_feature 1..16: note = synthetic [barcode part1]
  source 1..16: mol_type = other DNA
atcgaacctcgacaac

SEQ ID NO: 28116 - DNA, 16 bp, synthetic construct
  misc_feature 1..16: note = synthetic [barcode part1]
  source 1..16: mol_type = other DNA
gtcgtagttacggtgt

SEQ ID NO: 28117 - DNA, 16 bp, synthetic construct
  misc_feature 1..16: note = synthetic [barcode part1]
  source 1..16: mol_type = other DNA
ccttcaagttacgtgt

SEQ ID NO: 28118 - DNA, 16 bp, synthetic construct
  misc_feature 1..16: note = synthetic [barcode part1]
  source 1..16: mol_type = other DNA
aagtgaacgttgcggc

SEQ ID NO: 28119 - DNA, 16 bp, synthetic construct
  misc_feature 1..16: note = synthetic [barcode part1]
  source 1..16: mol_type = other DNA
gacgtagaataatccg

SEQ ID NO: 28120 - DNA, 16 bp, synthetic construct
  misc_feature 1..16: note = synthetic [barcode part1]
  source 1..16: mol_type = other DNA
gaggtgtaattcggcg

SEQ ID NO: 28121 - DNA, 16 bp, synthetic construct
  misc_feature 1..16: note = synthetic [barcode part1]
  source 1..16: mol_type = other DNA
ttctataccggcaact

SEQ ID NO: 28122 - DNA, 16 bp, synthetic construct
  misc_feature 1..16: note = synthetic [barcode part1]
  source 1..16: mol_type = other DNA
taccgcctagactcgt

SEQ ID NO: 28123 - DNA, 16 bp, synthetic construct
  misc_feature 1..16: note = synthetic [barcode part1]
  source 1..16: mol_type = other DNA
gcctactcgaatagac

SEQ ID NO: 28124 - DNA, 16 bp, synthetic construct
  misc_feature 1..16: note = synthetic [barcode part1]
  source 1..16: mol_type = other DNA
tgtattcacgatccac

SEQ ID NO: 28125 - DNA, 16 bp, synthetic construct
  misc_feature 1..16: note = synthetic [barcode part1]
  source 1..16: mol_type = other DNA
acgtggacttaacaag

SEQ ID NO: 28126 - DNA, 16 bp, synthetic construct
  misc_feature 1..16: note = synthetic [barcode part1]
  source 1..16: mol_type = other DNA
ttggcagtcgtgcctt

SEQ ID NO: 28127 - DNA, 16 bp, synthetic construct
  misc_feature 1..16: note = synthetic [barcode part1]
  source 1..16: mol_type = other DNA
ttgcgcgtaatacgtg

SEQ ID NO: 28128 - DNA, 16 bp, synthetic construct
  misc_feature 1..16: note = synthetic [barcode part1]
  source 1..16: mol_type = other DNA
agactcgcacctcact

SEQ ID NO: 28129 - DNA, 16 bp, synthetic construct
  misc_feature 1..16: note = synthetic [barcode part1]
  source 1..16: mol_type = other DNA
atccgaggcgataggt

SEQ ID NO: 28130 - DNA, 16 bp, synthetic construct
  misc_feature 1..16: note = synthetic [barcode part1]
  source 1..16: mol_type = other DNA
tccgtaccaacagtcc

SEQ ID NO: 28131 - DNA, 16 bp, synthetic construct
  misc_feature 1..16: note = synthetic [barcode part1]
  source 1..16: mol_type = other DNA
cagtaacgcactctcc

SEQ ID NO: 28132 - DNA, 16 bp, synthetic construct
  misc_feature 1..16: note = synthetic [barcode part1]
  source 1..16: mol_type = other DNA
agactggatcaatacg

SEQ ID NO: 28133 - DNA, 16 bp, synthetic construct
  misc_feature 1..16: note = synthetic [barcode part1]
  source 1..16: mol_type = other DNA
tgcagattctgagtgc

SEQ ID NO: 28134 - DNA, 16 bp, synthetic construct
  misc_feature 1..16: note = synthetic [barcode part1]
  source 1..16: mol_type = other DNA
gagtatacgatagtcg

SEQ ID NO: 28135 - DNA, 16 bp, synthetic construct
  misc_feature 1..16: note = synthetic [barcode part1]
  source 1..16: mol_type = other DNA
caatagtgaaggcact

SEQ ID NO: 28136 - DNA, 16 bp, synthetic construct
  misc_feature 1..16: note = synthetic [barcode part1]
  source 1..16: mol_type = other DNA
tcaagacttgtctacc

SEQ ID NO: 28137 - DNA, 16 bp, synthetic construct
  misc_feature 1..16: note = synthetic [barcode part1]
  source 1..16: mol_type = other DNA
gcctaatcagtctgag

SEQ ID NO: 28138 - DNA, 16 bp, synthetic construct
  misc_feature 1..16: note = synthetic [barcode part1]
  source 1..16: mol_type = other DNA
ttagagacgtggaccg

SEQ ID NO: 28139 - DNA, 16 bp, synthetic construct
  misc_feature 1..16: note = synthetic [barcode part1]
  source 1..16: mol_type = other DNA
gttccacacagttatc

SEQ ID NO: 28140 - DNA, 16 bp, synthetic construct
  misc_feature 1..16: note = synthetic [barcode part1]
  source 1..16: mol_type = other DNA
atcctactgtcggcgt

SEQ ID NO: 28141 - DNA, 16 bp, synthetic construct
  misc_feature 1..16: note = synthetic [barcode part1]
  source 1..16: mol_type = other DNA
tgacggtcttcgcgtt

SEQ ID NO: 28142 - DNA, 16 bp, synthetic construct
  misc_feature 1..16: note = synthetic [barcode part1]
  source 1..16: mol_type = other DNA
cgtgacctaacctctg

SEQ ID NO: 28143 - DNA, 16 bp, synthetic construct
  misc_feature 1..16: note = synthetic [barcode part1]
  source 1..16: mol_type = other DNA
cgcaccacaactatag

SEQ ID NO: 28144 - DNA, 16 bp, synthetic construct
  misc_feature 1..16: note = synthetic [barcode part1]
  source 1..16: mol_type = other DNA
cggtacgttctaccac

SEQ ID NO: 28145 - DNA, 16 bp, synthetic construct
  misc_feature 1..16: note = synthetic [barcode part1]
  source 1..16: mol_type = other DNA
gtctccttgattacag

SEQ ID NO: 28146 - DNA, 16 bp, synthetic construct
  misc_feature 1..16: note = synthetic [barcode part1]
  source 1..16: mol_type = other DNA
acgaattggagactgt

SEQ ID NO: 28147 - DNA, 16 bp, synthetic construct
  misc_feature 1..16: note = synthetic [barcode part1]
  source 1..16: mol_type = other DNA
aactattggcacgaag

SEQ ID NO: 28148 - DNA, 16 bp, synthetic construct
  misc_feature 1..16: note = synthetic [barcode part1]
  source 1..16: mol_type = other DNA
tcggaatcacttgttc

SEQ ID NO: 28149 - DNA, 16 bp, synthetic construct
  misc_feature 1..16: note = synthetic [barcode part1]
  source 1..16: mol_type = other DNA
ccgtaggataatcgtc

SEQ ID NO: 28150 - DNA, 16 bp, synthetic construct
  misc_feature 1..16: note = synthetic [barcode part1]
  source 1..16: mol_type = other DNA
gtcgtaggaacggact

SEQ ID NO: 28151 - DNA, 16 bp, synthetic construct
  misc_feature 1..16: note = synthetic [barcode part1]
  source 1..16: mol_type = other DNA
cacctatcagaatcct

SEQ ID NO: 28152 - DNA, 16 bp, synthetic construct
  misc_feature 1..16: note = synthetic [barcode part1]
  source 1..16: mol_type = other DNA
ccgtatctatcaagtc

SEQ ID NO: 28153 - DNA, 16 bp, synthetic construct
  misc_feature 1..16: note = synthetic [barcode part1]
  source 1..16: mol_type = other DNA
gaagtgagtgagttct

SEQ ID NO: 28154 - DNA, 16 bp, synthetic construct
  misc_feature 1..16: note = synthetic [barcode part1]
  source 1..16: mol_type = other DNA
tcgtacacgtggttag

SEQ ID NO: 28155 - DNA, 16 bp, synthetic construct
  misc_feature 1..16: note = synthetic [barcode part1]
  source 1..16: mol_type = other DNA
tgatctgactcgacag

SEQ ID NO: 28156 - DNA, 16 bp, synthetic construct
  misc_feature 1..16: note = synthetic [barcode part1]
  source 1..16: mol_type = other DNA
gtagattggtctgcgt

SEQ ID NO: 28157 - DNA, 16 bp, synthetic construct
  misc_feature 1..16: note = synthetic [barcode part1]
  source 1..16: mol_type = other DNA
gaacgtgaatcactag

SEQ ID NO: 28158 - DNA, 16 bp, synthetic construct
  misc_feature 1..16: note = synthetic [barcode part1]
  source 1..16: mol_type = other DNA
tgcggcaatagtgttc

SEQ ID NO: 28159 - DNA, 16 bp, synthetic construct
  misc_feature 1..16: note = synthetic [barcode part1]
  source 1..16: mol_type = other DNA
atacaccgtgatcgtg

SEQ ID NO: 28160 - DNA, 16 bp, synthetic construct
  misc_feature 1..16: note = synthetic [barcode part1]
  source 1..16: mol_type = other DNA
taccaccagacgttcc

SEQ ID NO: 28161 - DNA, 16 bp, synthetic construct
  misc_feature 1..16: note = synthetic [barcode part1]
  source 1..16: mol_type = other DNA
ttcactgaccactcct

SEQ ID NO: 28162 - DNA, 16 bp, synthetic construct
  misc_feature 1..16: note = synthetic [barcode part1]
  source 1..16: mol_type = other DNA
gccaacacaggagact

SEQ ID NO: 28163 - DNA, 16 bp, synthetic construct
  misc_feature 1..16: note = synthetic [barcode part1]
  source 1..16: mol_type = other DNA
caggtataggaattgc

SEQ ID NO: 28164 - DNA, 16 bp, synthetic construct
  misc_feature 1..16: note = synthetic [barcode part1]
  source 1..16: mol_type = other DNA
gattagactactgccg

SEQ ID NO: 28165 - DNA, 16 bp, synthetic construct
  misc_feature 1..16: note = synthetic [barcode part1]
  source 1..16: mol_type = other DNA
tggcaagtactcggag

SEQ ID NO: 28166 - DNA, 16 bp, synthetic construct
  misc_feature 1..16: note = synthetic [barcode part1]
  source 1..16: mol_type = other DNA
aactggtactggtcac

SEQ ID NO: 28167 - DNA, 16 bp, synthetic construct
  misc_feature 1..16: note = synthetic [barcode part1]
  source 1..16: mol_type = other DNA
tatcgcacttccttcg

SEQ ID NO: 28168 - DNA, 16 bp, synthetic construct
  misc_feature 1..16: note = synthetic [barcode part1]
  source 1..16: mol_type = other DNA
cgttacctgaagaacc

SEQ ID NO: 28169 - DNA, 16 bp, synthetic construct
  misc_feature 1..16: note = synthetic [barcode part1]
  source 1..16: mol_type = other DNA
actacgaaggtaagtc

SEQ ID NO: 28170 - DNA, 16 bp, synthetic construct
  misc_feature 1..16: note = synthetic [barcode part1]
  source 1..16: mol_type = other DNA
gatctacgtctgcaag

SEQ ID NO: 28171 - DNA, 16 bp, synthetic construct
  misc_feature 1..16: note = synthetic [barcode part1]
  source 1..16: mol_type = other DNA
caggtcagttgttggt

SEQ ID NO: 28172 - DNA, 16 bp, synthetic construct
  misc_feature 1..16: note = synthetic [barcode part1]
  source 1..16: mol_type = other DNA
attgcgtagttgtgcg

SEQ ID NO: 28173 - DNA, 16 bp, synthetic construct
  misc_feature 1..16: note = synthetic [barcode part1]
  source 1..16: mol_type = other DNA
tgtgacaagacaagtc

SEQ ID NO: 28174 - DNA, 16 bp, synthetic construct
  misc_feature 1..16: note = synthetic [barcode part1]
  source 1..16: mol_type = other DNA
atctggtaaccaccag

SEQ ID NO: 28175 - DNA, 16 bp, synthetic construct
  misc_feature 1..16: note = synthetic [barcode part1]
  source 1..16: mol_type = other DNA
cctcttcctctctctt

SEQ ID NO: 28176 - DNA, 16 bp, synthetic construct
  misc_feature 1..16: note = synthetic [barcode part1]
  source 1..16: mol_type = other DNA
acgtatcctcgatccg

SEQ ID NO: 28177 - DNA, 16 bp, synthetic construct
  misc_feature 1..16: note = synthetic [barcode part1]
  source 1..16: mol_type = other DNA
agtcgcaatcacgtgt

SEQ ID NO: 28178 - DNA, 16 bp, synthetic construct
  misc_feature 1..16: note = synthetic [barcode part1]
  source 1..16: mol_type = other DNA
ccgtgtgttaacctcg

SEQ ID NO: 28179 - DNA, 16 bp, synthetic construct
  misc_feature 1..16: note = synthetic [barcode part1]
  source 1..16: mol_type = other DNA
caaccttcacggtcgt

SEQ ID NO: 28180 - DNA, 16 bp, synthetic construct
  misc_feature 1..16: note = synthetic [barcode part1]
  source 1..16: mol_type = other DNA
gaggaacttaccactc

SEQ ID NO: 28181 - DNA, 16 bp, synthetic construct
  misc_feature 1..16: note = synthetic [barcode part1]
  source 1..16: mol_type = other DNA
cctatagaagtccgtg

SEQ ID NO: 28182 - DNA, 16 bp, synthetic construct
  misc_feature 1..16: note = synthetic [barcode part1]
  source 1..16: mol_type = other DNA
tctctctgtcgatcac

SEQ ID NO: 28183 - DNA, 16 bp, synthetic construct
  misc_feature 1..16: note = synthetic [barcode part1]
  source 1..16: mol_type = other DNA
tctataccacgtcctc

SEQ ID NO: 28184 - DNA, 16 bp, synthetic construct
  misc_feature 1..16: note = synthetic [barcode part1]
  source 1..16: mol_type = other DNA
tctggtcctaatcctc

SEQ ID NO: 28185 - DNA, 16 bp, synthetic construct
  misc_feature 1..16: note = synthetic [barcode part1]
  source 1..16: mol_type = other DNA
aggacttgcaacgttc

SEQ ID NO: 28186 - DNA, 16 bp, synthetic construct
  misc_feature 1..16: note = synthetic [barcode part1]
  source 1..16: mol_type = other DNA
cgaccaggttaattgc

SEQ ID NO: 28187 - DNA, 16 bp, synthetic construct
  misc_feature 1..16: note = synthetic [barcode part1]
  source 1..16: mol_type = other DNA
gactgcagtgtgttgt

SEQ ID NO: 28188 - DNA, 16 bp, synthetic construct
  misc_feature 1..16: note = synthetic [barcode part1]
  source 1..16: mol_type = other DNA
cctggttcgcgattac

SEQ ID NO: 28189 - DNA, 16 bp, synthetic construct
  misc_feature 1..16: note = synthetic [barcode part1]
  source 1..16: mol_type = other DNA
taggataggacgtccg

SEQ ID NO: 28190 - DNA, 16 bp, synthetic construct
  misc_feature 1..16: note = synthetic [barcode part1]
  source 1..16: mol_type = other DNA
tatcacgcgtgatacg

SEQ ID NO: 28191 - DNA, 16 bp, synthetic construct
  misc_feature 1..16: note = synthetic [barcode part1]
  source 1..16: mol_type = other DNA
cctagtccacaatcgc

SEQ ID NO: 28192 - DNA, 16 bp, synthetic construct
  misc_feature 1..16: note = synthetic [barcode part1]
  source 1..16: mol_type = other DNA
gtgcagatatcctcag

SEQ ID NO: 28193 - DNA, 16 bp, synthetic construct
  misc_feature 1..16: note = synthetic [barcode part1]
  source 1..16: mol_type = other DNA
aacgatagaatccgtg

SEQ ID NO: 28194 - DNA, 16 bp, synthetic construct
  misc_feature 1..16: note = synthetic [barcode part1]
  source 1..16: mol_type = other DNA
cctcgttcgagtactg

SEQ ID NO: 28195 - DNA, 16 bp, synthetic construct
  misc_feature 1..16: note = synthetic [barcode part1]
  source 1..16: mol_type = other DNA
ttaccgtcgtccaggt

SEQ ID NO: 28196 - DNA, 16 bp, synthetic construct
  misc_feature 1..16: note = synthetic [barcode part1]
  source 1..16: mol_type = other DNA
ttggcaacagactgtc

SEQ ID NO: 28197 - DNA, 16 bp, synthetic construct
  misc_feature 1..16: note = synthetic [barcode part1]
  source 1..16: mol_type = other DNA
gagaacctatagtcag

SEQ ID NO: 28198 - DNA, 16 bp, synthetic construct
  misc_feature 1..16: note = synthetic [barcode part1]
  source 1..16: mol_type = other DNA
tgtgaggtgtgtcttg

SEQ ID NO: 28199 - DNA, 16 bp, synthetic construct
  misc_feature 1..16: note = synthetic [barcode part1]
  source 1..16: mol_type = other DNA
agataaccggtggaag

SEQ ID NO: 28200 - DNA, 16 bp, synthetic construct
  misc_feature 1..16: note = synthetic [barcode part1]
  source 1..16: mol_type = other DNA
aacctggtcctcacgt

SEQ ID NO: 28201 - DNA, 16 bp, synthetic construct
  misc_feature 1..16: note = synthetic [barcode part1]
  source 1..16: mol_type = other DNA
gcctcacaacacgtct

SEQ ID NO: 28202 - DNA, 16 bp, synthetic construct
  misc_feature 1..16: note = synthetic [barcode part1]
  source 1..16: mol_type = other DNA
cctctggtcaatctct

SEQ ID NO: 28203 - DNA, 16 bp, synthetic construct
  misc_feature 1..16: note = synthetic [barcode part1]
  source 1..16: mol_type = other DNA
ttccaattggcaggac

SEQ ID NO: 28204 - DNA, 16 bp, synthetic construct
  misc_feature 1..16: note = synthetic [barcode part1]
  source 1..16: mol_type = other DNA
tacagaacggcgactg

SEQ ID NO: 28205 - DNA, 16 bp, synthetic construct
  misc_feature 1..16: note = synthetic [barcode part1]
  source 1..16: mol_type = other DNA
tgtgcctctcgacaac

SEQ ID NO: 28206 - DNA, 16 bp, synthetic construct
  misc_feature 1..16: note = synthetic [barcode part1]
  source 1..16: mol_type = other DNA
tagtcctcacgtgatt

SEQ ID NO: 28207 - DNA, 16 bp, synthetic construct
  misc_feature 1..16: note = synthetic [barcode part1]
  source 1..16: mol_type = other DNA
tctgcacggaagtatc

SEQ ID NO: 28208 - DNA, 16 bp, synthetic construct
  misc_feature 1..16: note = synthetic [barcode part1]
  source 1..16: mol_type = other DNA
gatcgatcgatcgatc

SEQ ID NO: 28209 - DNA, 16 bp, synthetic construct
  misc_feature 1..16: note = synthetic [barcode part1]
  source 1..16: mol_type = other DNA
ttctcaacggttgtac

SEQ ID NO: 28210 - DNA, 16 bp, synthetic construct
  misc_feature 1..16: note = synthetic [barcode part1]
  source 1..16: mol_type = other DNA
tgtaggtcaaggtaac

SEQ ID NO: 28211 - DNA, 16 bp, synthetic construct
  misc_feature 1..16: note = synthetic [barcode part1]
  source 1..16: mol_type = other DNA
taggtacgccgtcttc

SEQ ID NO: 28212 - DNA, 16 bp, synthetic construct
  misc_feature 1..16: note = synthetic [barcode part1]
  source 1..16: mol_type = other DNA
tatacctccgcacttc

SEQ ID NO: 28213 - DNA, 16 bp, synthetic construct
  misc_feature 1..16: note = synthetic [barcode part1]
  source 1..16: mol_type = other DNA
taagattccgactggc

SEQ ID NO: 28214 - DNA, 16 bp, synthetic construct
  misc_feature 1..16: note = synthetic [barcode part1]
  source 1..16: mol_type = other DNA
tagactcgtctgtgag

SEQ ID NO: 28215 - DNA, 16 bp, synthetic construct
  misc_feature 1..16: note = synthetic [barcode part1]
  source 1..16: mol_type = other DNA
aaggtctggtggacac

SEQ ID NO: 28216 - DNA, 16 bp, synthetic construct
  misc_feature 1..16: note = synthetic [barcode part1]
  source 1..16: mol_type = other DNA
ttatcgcctcggacgt

SEQ ID NO: 28217 - DNA, 16 bp, synthetic construct
  misc_feature 1..16: note = synthetic [barcode part1]
  source 1..16: mol_type = other DNA
tatagttaccgtctcg

SEQ ID NO: 28218 - DNA, 16 bp, synthetic construct
  misc_feature 1..16: note = synthetic [barcode part1]
  source 1..16: mol_type = other DNA
tgaccagaaggtcctt

SEQ ID NO: 28219 - DNA, 16 bp, synthetic construct
  misc_feature 1..16: note = synthetic [barcode part1]
  source 1..16: mol_type = other DNA
accaggtgagtacggt

SEQ ID NO: 28220 - DNA, 16 bp, synthetic construct
  misc_feature 1..16: note = synthetic [barcode part1]
  source 1..16: mol_type = other DNA
tgtagtggtgagtaac

SEQ ID NO: 28221 - DNA, 16 bp, synthetic construct
  misc_feature 1..16: note = synthetic [barcode part1]
  source 1..16: mol_type = other DNA
cgagattgtatcgcac

SEQ ID NO: 28222 - DNA, 16 bp, synthetic construct
  misc_feature 1..16: note = synthetic [barcode part1]
  source 1..16: mol_type = other DNA
caggactcaaccaact

SEQ ID NO: 28223 - DNA, 16 bp, synthetic construct
  misc_feature 1..16: note = synthetic [barcode part1]
  source 1..16: mol_type = other DNA
gtgttcagtgaactcg

SEQ ID NO: 28224 - DNA, 16 bp, synthetic construct
  misc_feature 1..16: note = synthetic [barcode part1]
  source 1..16: mol_type = other DNA
aggcagttacgccaag

SEQ ID NO: 28225 - DNA, 16 bp, synthetic construct
  misc_feature 1..16: note = synthetic [barcode part1]
  source 1..16: mol_type = other DNA
gtcgtataccgccttg

SEQ ID NO: 28226 - DNA, 16 bp, synthetic construct
  misc_feature 1..16: note = synthetic [barcode part1]
  source 1..16: mol_type = other DNA
ttcaggtggtaacaag

SEQ ID NO: 28227 - DNA, 16 bp, synthetic construct
  misc_feature 1..16: note = synthetic [barcode part1]
  source 1..16: mol_type = other DNA
agatactcaagacggt

SEQ ID NO: 28228 - DNA, 16 bp, synthetic construct
  misc_feature 1..16: note = synthetic [barcode part1]
  source 1..16: mol_type = other DNA
aatcacggaccaaggc

SEQ ID NO: 28229 - DNA, 16 bp, synthetic construct
  misc_feature 1..16: note = synthetic [barcode part1]
  source 1..16: mol_type = other DNA
aacctactctgttacg

SEQ ID NO: 28230 - DNA, 16 bp, synthetic construct
  misc_feature 1..16: note = synthetic [barcode part1]
  source 1..16: mol_type = other DNA
acggatcttcttgact

SEQ ID NO: 28231 - DNA, 16 bp, synthetic construct
  misc_feature 1..16: note = synthetic [barcode part1]
  source 1..16: mol_type = other DNA
gtgagttactaaggac

SEQ ID NO: 28232 - DNA, 16 bp, synthetic construct
  misc_feature 1..16: note = synthetic [barcode part1]
  source 1..16: mol_type = other DNA
taggagatcctggtct

SEQ ID NO: 28233 - DNA, 16 bp, synthetic construct
  misc_feature 1..16: note = synthetic [barcode part1]
  source 1..16: mol_type = other DNA
aatctcctcgaacgtt

SEQ ID NO: 28234 - DNA, 16 bp, synthetic construct
  misc_feature 1..16: note = synthetic [barcode part1]
  source 1..16: mol_type = other DNA
caacggcagaagtgtc

SEQ ID NO: 28235 - DNA, 16 bp, synthetic construct
  misc_feature 1..16: note = synthetic [barcode part1]
  source 1..16: mol_type = other DNA
tagattgtctccgtgt

SEQ ID NO: 28236 - DNA, 16 bp, synthetic construct
  misc_feature 1..16: note = synthetic [barcode part1]
  source 1..16: mol_type = other DNA
atattccaccgaatcc

SEQ ID NO: 28237 - DNA, 16 bp, synthetic construct
  misc_feature 1..16: note = synthetic [barcode part1]
  source 1..16: mol_type = other DNA
acgttccttgaatcac

SEQ ID NO: 28238 - DNA, 16 bp, synthetic construct
  misc_feature 1..16: note = synthetic [barcode part1]
  source 1..16: mol_type = other DNA
cgtagtgtggagtctt

SEQ ID NO: 28239 - DNA, 16 bp, synthetic construct
  misc_feature 1..16: note = synthetic [barcode part1]
  source 1..16: mol_type = other DNA
aatcggcgtacgtgtt

SEQ ID NO: 28240 - DNA, 16 bp, synthetic construct
  misc_feature 1..16: note = synthetic [barcode part1]
  source 1..16: mol_type = other DNA
tgagtgttcgatacgc

SEQ ID NO: 28241 - DNA, 16 bp, synthetic construct
  misc_feature 1..16: note = synthetic [barcode part1]
  source 1..16: mol_type = other DNA
aacgttaccgaccagt

SEQ ID NO: 28242 - DNA, 16 bp, synthetic construct
  misc_feature 1..16: note = synthetic [barcode part1]
  source 1..16: mol_type = other DNA
gagataaggtaaggcc

SEQ ID NO: 28243 - DNA, 16 bp, synthetic construct
  misc_feature 1..16: note = synthetic [barcode part1]
  source 1..16: mol_type = other DNA
gtgagagataccttcc

SEQ ID NO: 28244 - DNA, 16 bp, synthetic construct
  misc_feature 1..16: note = synthetic [barcode part1]
  source 1..16: mol_type = other DNA
agaaggccgttagtgc

SEQ ID NO: 28245 - DNA, 16 bp, synthetic construct
  misc_feature 1..16: note = synthetic [barcode part1]
  source 1..16: mol_type = other DNA
tggtagtggaacacgc

SEQ ID NO: 28246 - DNA, 16 bp, synthetic construct
  misc_feature 1..16: note = synthetic [barcode part1]
  source 1..16: mol_type = other DNA
cggtgtaaggagtcgt

SEQ ID NO: 28247 - DNA, 16 bp, synthetic construct
  misc_feature 1..16: note = synthetic [barcode part1]
  source 1..16: mol_type = other DNA
atcggttgatcggttg

SEQ ID NO: 28248 - DNA, 16 bp, synthetic construct
  misc_feature 1..16: note = synthetic [barcode part1]
  source 1..16: mol_type = other DNA
tgttatcaacgacggc

SEQ ID NO: 28249 - DNA, 16 bp, synthetic construct
  misc_feature 1..16: note = synthetic [barcode part1]
  source 1..16: mol_type = other DNA
gacgtcgagttgattc

SEQ ID NO: 28250 - DNA, 16 bp, synthetic construct
  misc_feature 1..16: note = synthetic [barcode part1]
  source 1..16: mol_type = other DNA
agtctctgtcgtctct

SEQ ID NO: 28251 - DNA, 16 bp, synthetic construct
  misc_feature 1..16: note = synthetic [barcode part1]
  source 1..16: mol_type = other DNA
acttggttcagtggtg

SEQ ID NO: 28252 - DNA, 16 bp, synthetic construct
  misc_feature 1..16: note = synthetic [barcode part1]
  source 1..16: mol_type = other DNA
cacggtcgttatcctg

SEQ ID NO: 28253 - DNA, 16 bp, synthetic construct
  misc_feature 1..16: note = synthetic [barcode part1]
  source 1..16: mol_type = other DNA
gaccaatagagaggac

SEQ ID NO: 28254 - DNA, 16 bp, synthetic construct
  misc_feature 1..16: note = synthetic [barcode part1]
  source 1..16: mol_type = other DNA
gaagttcctactcgcc

SEQ ID NO: 28255 - DNA, 16 bp, synthetic construct
  misc_feature 1..16: note = synthetic [barcode part1]
  source 1..16: mol_type = other DNA
caagtgccaatagagt

SEQ ID NO: 28256 - DNA, 16 bp, synthetic construct
  misc_feature 1..16: note = synthetic [barcode part1]
  source 1..16: mol_type = other DNA
atcaacgacagagtac

SEQ ID NO: 28257 - DNA, 16 bp, synthetic construct
  misc_feature 1..16: note = synthetic [barcode part1]
  source 1..16: mol_type = other DNA
acagttccttggtgag

SEQ ID NO: 28258 - DNA, 16 bp, synthetic construct
  misc_feature 1..16: note = synthetic [barcode part1]
  source 1..16: mol_type = other DNA
gtaccgcacaagtgag

SEQ ID NO: 28259 - DNA, 16 bp, synthetic construct
  misc_feature 1..16: note = synthetic [barcode part1]
  source 1..16: mol_type = other DNA
tagtgaagtcttgccg

SEQ ID NO: 28260 - DNA, 16 bp, synthetic construct
  misc_feature 1..16: note = synthetic [barcode part1]
  source 1..16: mol_type = other DNA
aagaatccgtgtaacg

SEQ ID NO: 28261 - DNA, 16 bp, synthetic construct
  misc_feature 1..16: note = synthetic [barcode part1]
  source 1..16: mol_type = other DNA
gaagtggaacaggatc

SEQ ID NO: 28262 - DNA, 16 bp, synthetic construct
  misc_feature 1..16: note = synthetic [barcode part1]
  source 1..16: mol_type = other DNA
gtaacgtatcgaccac

SEQ ID NO: 28263 - DNA, 16 bp, synthetic construct
  misc_feature 1..16: note = synthetic [barcode part1]
  source 1..16: mol_type = other DNA
cacgccaattgtacag

SEQ ID NO: 28264 - DNA, 16 bp, synthetic construct
  misc_feature 1..16: note = synthetic [barcode part1]
  source 1..16: mol_type = other DNA
aaccgttagtagtccg

SEQ ID NO: 28265 - DNA, 16 bp, synthetic construct
  misc_feature 1..16: note = synthetic [barcode part1]
  source 1..16: mol_type = other DNA
tcgtaggtgagttcgt

SEQ ID NO: 28266 - DNA, 16 bp, synthetic construct
  misc_feature 1..16: note = synthetic [barcode part1]
  source 1..16: mol_type = other DNA
aaggcacgaagtgtag

SEQ ID NO: 28267 - DNA, 16 bp, synthetic construct
  misc_feature 1..16: note = synthetic [barcode part1]
  source 1..16: mol_type = other DNA
caaggcagatatatcg

SEQ ID NO: 28268 - DNA, 16 bp, synthetic construct
  misc_feature 1..16: note = synthetic [barcode part1]
  source 1..16: mol_type = other DNA
actcgaacttaggtgc

SEQ ID NO: 28269 - DNA, 16 bp, synthetic construct
  misc_feature 1..16: note = synthetic [barcode part1]
  source 1..16: mol_type = other DNA
gtagtgtgtgtcgtac

SEQ ID NO: 28270 - DNA, 16 bp, synthetic construct
  misc_feature 1..16: note = synthetic [barcode part1]
  source 1..16: mol_type = other DNA
ttgttgttgaggtggc

SEQ ID NO: 28271 - DNA, 16 bp, synthetic construct
  misc_feature 1..16: note = synthetic [barcode part1]
  source 1..16: mol_type = other DNA
cgcggttcaacaagag

SEQ ID NO: 28272 - DNA, 16 bp, synthetic construct
  misc_feature 1..16: note = synthetic [barcode part1]
  source 1..16: mol_type = other DNA
taatacgtgtgccggt

SEQ ID NO: 28273 - DNA, 16 bp, synthetic construct
  misc_feature 1..16: note = synthetic [barcode part1]
  source 1..16: mol_type = other DNA
tggtcagtcagttggt

SEQ ID NO: 28274 - DNA, 16 bp, synthetic construct
  misc_feature 1..16: note = synthetic [barcode part1]
  source 1..16: mol_type = other DNA
ccagattgcacggaag

SEQ ID NO: 28275 - DNA, 16 bp, synthetic construct
  misc_feature 1..16: note = synthetic [barcode part1]
  source 1..16: mol_type = other DNA
agattcgactcctcgc

SEQ ID NO: 28276 - DNA, 16 bp, synthetic construct
  misc_feature 1..16: note = synthetic [barcode part1]
  source 1..16: mol_type = other DNA
gcgatccgtaatctag

SEQ ID NO: 28277 - DNA, 16 bp, synthetic construct
  misc_feature 1..16: note = synthetic [barcode part1]
  source 1..16: mol_type = other DNA
gaccttcacgcctaac

SEQ ID NO: 28278 - DNA, 16 bp, synthetic construct
  misc_feature 1..16: note = synthetic [barcode part1]
  source 1..16: mol_type = other DNA
tctacgttgcaggagt

SEQ ID NO: 28279 - DNA, 16 bp, synthetic construct
  misc_feature 1..16: note = synthetic [barcode part1]
  source 1..16: mol_type = other DNA
tggcgactacagagac

SEQ ID NO: 28280 - DNA, 16 bp, synthetic construct
  misc_feature 1..16: note = synthetic [barcode part1]
  source 1..16: mol_type = other DNA
gaatatccaaggcagt

SEQ ID NO: 28281 - DNA, 16 bp, synthetic construct
  misc_feature 1..16: note = synthetic [barcode part1]
  source 1..16: mol_type = other DNA
cgtctatacgatacct

SEQ ID NO: 28282 - DNA, 16 bp, synthetic construct
  misc_feature 1..16: note = synthetic [barcode part1]
  source 1..16: mol_type = other DNA
taacgatccggcaact

SEQ ID NO: 28283 - DNA, 16 bp, synthetic construct
  misc_feature 1..16: note = synthetic [barcode part1]
  source 1..16: mol_type = other DNA
ccaaccgtgattagtg

SEQ ID NO: 28284 - DNA, 16 bp, synthetic construct
  misc_feature 1..16: note = synthetic [barcode part1]
  source 1..16: mol_type = other DNA
tacacggtagagaact

SEQ ID NO: 28285 - DNA, 16 bp, synthetic construct
  misc_feature 1..16: note = synthetic [barcode part1]
  source 1..16: mol_type = other DNA
tcacgcgttctagtcg

SEQ ID NO: 28286 - DNA, 16 bp, synthetic construct
  misc_feature 1..16: note = synthetic [barcode part1]
  source 1..16: mol_type = other DNA
gtacgaggaatcgtcg

SEQ ID NO: 28287 - DNA, 16 bp, synthetic construct
  misc_feature 1..16: note = synthetic [barcode part1]
  source 1..16: mol_type = other DNA
tattgtctcacgcaac

SEQ ID NO: 28288 - DNA, 16 bp, synthetic construct
  misc_feature 1..16: note = synthetic [barcode part1]
  source 1..16: mol_type = other DNA
aatcctcgtacgactt

SEQ ID NO: 28289 - DNA, 16 bp, synthetic construct
  misc_feature 1..16: note = synthetic [barcode part1]
  source 1..16: mol_type = other DNA
aatctgcaggtaacag

SEQ ID NO: 28290 - DNA, 16 bp, synthetic construct
  misc_feature 1..16: note = synthetic [barcode part1]
  source 1..16: mol_type = other DNA
atcgacactcgactcc

SEQ ID NO: 28291 - DNA, 16 bp, synthetic construct
  misc_feature 1..16: note = synthetic [barcode part1]
  source 1..16: mol_type = other DNA
tggcaaggagttcacg

SEQ ID NO: 28292 - DNA, 16 bp, synthetic construct
  misc_feature 1..16: note = synthetic [barcode part1]
  source 1..16: mol_type = other DNA
atactagacgtggcct

SEQ ID NO: 28293 - DNA, 16 bp, synthetic construct
  misc_feature 1..16: note = synthetic [barcode part1]
  source 1..16: mol_type = other DNA
taggataggtgtgccg

SEQ ID NO: 28294 - DNA, 16 bp, synthetic construct
  misc_feature 1..16: note = synthetic [barcode part1]
  source 1..16: mol_type = other DNA
gccaagaatcgacgtg

SEQ ID NO: 28295 - DNA, 16 bp, synthetic construct
  misc_feature 1..16: note = synthetic [barcode part1]
  source 1..16: mol_type = other DNA
cacactcgttcaatac

SEQ ID NO: 28296 - DNA, 16 bp, synthetic construct
  misc_feature 1..16: note = synthetic [barcode part1]
  source 1..16: mol_type = other DNA
gcacaacctccttggt

SEQ ID NO: 28297 - DNA, 16 bp, synthetic construct
  misc_feature 1..16: note = synthetic [barcode part1]
  source 1..16: mol_type = other DNA
aggcacaggttcaacg

SEQ ID NO: 28298 - DNA, 16 bp, synthetic construct
  misc_feature 1..16: note = synthetic [barcode part1]
  source 1..16: mol_type = other DNA
gtgttacgtccgttcg

SEQ ID NO: 28299 - DNA, 16 bp, synthetic construct
  misc_feature 1..16: note = synthetic [barcode part1]
  source 1..16: mol_type = other DNA
actacctccgcgagtt

SEQ ID NO: 28300 - DNA, 16 bp, synthetic construct
  misc_feature 1..16: note = synthetic [barcode part1]
  source 1..16: mol_type = other DNA
ccagttactcttctcg

SEQ ID NO: 28301 - DNA, 16 bp, synthetic construct
  misc_feature 1..16: note = synthetic [barcode part1]
  source 1..16: mol_type = other DNA
gactgtaaccgatacc

SEQ ID NO: 28302 - DNA, 16 bp, synthetic construct
  misc_feature 1..16: note = synthetic [barcode part1]
  source 1..16: mol_type = other DNA
cgtgaattaaggtgac

SEQ ID NO: 28303 - DNA, 16 bp, synthetic construct
  misc_feature 1..16: note = synthetic [barcode part1]
  source 1..16: mol_type = other DNA
ccacaaggcctcttgt

SEQ ID NO: 28304 - DNA, 16 bp, synthetic construct
  misc_feature 1..16: note = synthetic [barcode part1]
  source 1..16: mol_type = other DNA
actatctacgacggac

SEQ ID NO: 28305 - DNA, 16 bp, synthetic construct
  misc_feature 1..16: note = synthetic [barcode part1]
  source 1..16: mol_type = other DNA
tgccggtctaacttcg

SEQ ID NO: 28306 - DNA, 16 bp, synthetic construct
  misc_feature 1..16: note = synthetic [barcode part1]
  source 1..16: mol_type = other DNA
gagtggttaatctccg

SEQ ID NO: 28307 - DNA, 16 bp, synthetic construct
  misc_feature 1..16: note = synthetic [barcode part1]
  source 1..16: mol_type = other DNA
gttacggaagtgaact

SEQ ID NO: 28308 - DNA, 16 bp, synthetic construct
  misc_feature 1..16: note = synthetic [barcode part1]
  source 1..16: mol_type = other DNA
gaccagaataaggcag

SEQ ID NO: 28309 - DNA, 16 bp, synthetic construct
  misc_feature 1..16: note = synthetic [barcode part1]
  source 1..16: mol_type = other DNA
tcaagacttacctgtc

SEQ ID NO: 28310 - DNA, 16 bp, synthetic construct
  misc_feature 1..16: note = synthetic [barcode part1]
  source 1..16: mol_type = other DNA
actacaacaggtaggt

SEQ ID NO: 28311 - DNA, 16 bp, synthetic construct
  misc_feature 1..16: note = synthetic [barcode part1]
  source 1..16: mol_type = other DNA
aactgacctagagtcc

SEQ ID NO: 28312 - DNA, 16 bp, synthetic construct
  misc_feature 1..16: note = synthetic [barcode part1]
  source 1..16: mol_type = other DNA
gcgcgacagagttagt

SEQ ID NO: 28313 - DNA, 16 bp, synthetic construct
  misc_feature 1..16: note = synthetic [barcode part1]
  source 1..16: mol_type = other DNA
tgacactcggaattcg

SEQ ID NO: 28314 - DNA, 16 bp, synthetic construct
  misc_feature 1..16: note = synthetic [barcode part1]
  source 1..16: mol_type = other DNA
cgatcctcgtgatcac

SEQ ID NO: 28315 - DNA, 16 bp, synthetic construct
  misc_feature 1..16: note = synthetic [barcode part1]
  source 1..16: mol_type = other DNA
caataataagacgcgc

SEQ ID NO: 28316 - DNA, 16 bp, synthetic construct
  misc_feature 1..16: note = synthetic [barcode part1]
  source 1..16: mol_type = other DNA
tgtgaaccttaccgcc

SEQ ID NO: 28317 - DNA, 16 bp, synthetic construct
  misc_feature 1..16: note = synthetic [barcode part1]
  source 1..16: mol_type = other DNA
taccagtctgaagaag

SEQ ID NO: 28318 - DNA, 16 bp, synthetic construct
  misc_feature 1..16: note = synthetic [barcode part1]
  source 1..16: mol_type = other DNA
gatatcgcgatcgatc

SEQ ID NO: 28319 - DNA, 16 bp, synthetic construct
  misc_feature 1..16: note = synthetic [barcode part1]
  source 1..16: mol_type = other DNA
tagaccaactggactc

SEQ ID NO: 28320 - DNA, 16 bp, synthetic construct
  misc_feature 1..16: note = synthetic [barcode part1]
  source 1..16: mol_type = other DNA
aagtcgcgacacgagt

SEQ ID NO: 28321 - DNA, 16 bp, synthetic construct
  misc_feature 1..16: note = synthetic [barcode part1]
  source 1..16: mol_type = other DNA
tgcctcaatccacgac

SEQ ID NO: 28322 - DNA, 16 bp, synthetic construct
  misc_feature 1..16: note = synthetic [barcode part1]
  source 1..16: mol_type = other DNA
gttcggcagaacgtag

SEQ ID NO: 28323 - DNA, 16 bp, synthetic construct
  misc_feature 1..16: note = synthetic [barcode part1]
  source 1..16: mol_type = other DNA
tggttagtgcgtgtac

SEQ ID NO: 28324 - DNA, 16 bp, synthetic construct
  misc_feature 1..16: note = synthetic [barcode part1]
  source 1..16: mol_type = other DNA
tggacagttacaacag

SEQ ID NO: 28325 - DNA, 16 bp, synthetic construct
  misc_feature 1..16: note = synthetic [barcode part1]
  source 1..16: mol_type = other DNA
tcaggacactctgagt

SEQ ID NO: 28326 - DNA, 16 bp, synthetic construct
  misc_feature 1..16: note = synthetic [barcode part1]
  source 1..16: mol_type = other DNA
tctagttcgtgtaacc

SEQ ID NO: 28327 - DNA, 16 bp, synthetic construct
  misc_feature 1..16: note = synthetic [barcode part1]
  source 1..16: mol_type = other DNA
agataacaatcgcacg

SEQ ID NO: 28328 - DNA, 16 bp, synthetic construct
  misc_feature 1..16: note = synthetic [barcode part1]
  source 1..16: mol_type = other DNA
gcacaataacttcctc

SEQ ID NO: 28329 - DNA, 16 bp, synthetic construct
  misc_feature 1..16: note = synthetic [barcode part1]
  source 1..16: mol_type = other DNA
tcgtcgtgaatagtgc

SEQ ID NO: 28330 - DNA, 16 bp, synthetic construct
  misc_feature 1..16: note = synthetic [barcode part1]
  source 1..16: mol_type = other DNA
agaagtaggtgtggac

SEQ ID NO: 28331 - DNA, 16 bp, synthetic construct
  misc_feature 1..16: note = synthetic [barcode part1]
  source 1..16: mol_type = other DNA
gcgtgacaaccaagac

SEQ ID NO: 28332 - DNA, 16 bp, synthetic construct
  misc_feature 1..16: note = synthetic [barcode part1]
  source 1..16: mol_type = other DNA
tactactgagtcggac

SEQ ID NO: 28333 - DNA, 16 bp, synthetic construct
  misc_feature 1..16: note = synthetic [barcode part1]
  source 1..16: mol_type = other DNA
agacaggaagtagacc

SEQ ID NO: 28334 - DNA, 16 bp, synthetic construct
  misc_feature 1..16: note = synthetic [barcode part1]
  source 1..16: mol_type = other DNA
tcaatctgtccggacc

SEQ ID NO: 28335 - DNA, 16 bp, synthetic construct
  misc_feature 1..16: note = synthetic [barcode part1]
  source 1..16: mol_type = other DNA
atattggcggcggagt

SEQ ID NO: 28336 - DNA, 16 bp, synthetic construct
  misc_feature 1..16: note = synthetic [barcode part1]
  source 1..16: mol_type = other DNA
aggatctcacctattc

SEQ ID NO: 28337 - DNA, 16 bp, synthetic construct
  misc_feature 1..16: note = synthetic [barcode part1]
  source 1..16: mol_type = other DNA
taaggccttctggagt

SEQ ID NO: 28338 - DNA, 16 bp, synthetic construct
  misc_feature 1..16: note = synthetic [barcode part1]
  source 1..16: mol_type = other DNA
agtgaggtcttactgc

SEQ ID NO: 28339 - DNA, 16 bp, synthetic construct
  misc_feature 1..16: note = synthetic [barcode part1]
  source 1..16: mol_type = other DNA
tgataactgcgagagt

SEQ ID NO: 28340 - DNA, 16 bp, synthetic construct
  misc_feature 1..16: note = synthetic [barcode part1]
  source 1..16: mol_type = other DNA
cctgttcgtctatctg

SEQ ID NO: 28341 - DNA, 16 bp, synthetic construct
  misc_feature 1..16: note = synthetic [barcode part1]
  source 1..16: mol_type = other DNA
agttaccttgcgtccg

SEQ ID NO: 28342 - DNA, 16 bp, synthetic construct
  misc_feature 1..16: note = synthetic [barcode part1]
  source 1..16: mol_type = other DNA
agtacacaaccttctc

SEQ ID NO: 28343 - DNA, 16 bp, synthetic construct
  misc_feature 1..16: note = synthetic [barcode part1]
  source 1..16: mol_type = other DNA
ttcagtgacagtccag

SEQ ID NO: 28344 - DNA, 16 bp, synthetic construct
  misc_feature 1..16: note = synthetic [barcode part1]
  source 1..16: mol_type = other DNA
gactatcaacgactcg

SEQ ID NO: 28345 - DNA, 16 bp, synthetic construct
  misc_feature 1..16: note = synthetic [barcode part1]
  source 1..16: mol_type = other DNA
gcagacttcttcagtt

SEQ ID NO: 28346 - DNA, 16 bp, synthetic construct
  misc_feature 1..16: note = synthetic [barcode part1]
  source 1..16: mol_type = other DNA
tataggactggtggcg

SEQ ID NO: 28347 - DNA, 16 bp, synthetic construct
  misc_feature 1..16: note = synthetic [barcode part1]
  source 1..16: mol_type = other DNA
gtaccagtagtagagt

SEQ ID NO: 28348 - DNA, 16 bp, synthetic construct
  misc_feature 1..16: note = synthetic [barcode part1]
  source 1..16: mol_type = other DNA
cctaactggtcctctt

SEQ ID NO: 28349 - DNA, 16 bp, synthetic construct
  misc_feature 1..16: note = synthetic [barcode part1]
  source 1..16: mol_type = other DNA
gttgtgaccgtgatac

SEQ ID NO: 28350 - DNA, 16 bp, synthetic construct
  misc_feature 1..16: note = synthetic [barcode part1]
  source 1..16: mol_type = other DNA
agtaagacctctgacc

SEQ ID NO: 28351 - DNA, 16 bp, synthetic construct
  misc_feature 1..16: note = synthetic [barcode part1]
  source 1..16: mol_type = other DNA
gtgtgaggacagttcg

SEQ ID NO: 28352 - DNA, 16 bp, synthetic construct
  misc_feature 1..16: note = synthetic [barcode part1]
  source 1..16: mol_type = other DNA
ttagtggcggactatc

SEQ ID NO: 28353 - DNA, 16 bp, synthetic construct
  misc_feature 1..16: note = synthetic [barcode part1]
  source 1..16: mol_type = other DNA
agtcggtgattctggt

SEQ ID NO: 28354 - DNA, 16 bp, synthetic construct
  misc_feature 1..16: note = synthetic [barcode part1]
  source 1..16: mol_type = other DNA
ccaataatcgcgtctt

SEQ ID NO: 28355 - DNA, 16 bp, synthetic construct
  misc_feature 1..16: note = synthetic [barcode part1]
  source 1..16: mol_type = other DNA
gtgattggagactaac

SEQ ID NO: 28356 - DNA, 16 bp, synthetic construct
  misc_feature 1..16: note = synthetic [barcode part1]
  source 1..16: mol_type = other DNA
caccttcaccgaactg

SEQ ID NO: 28357 - DNA, 16 bp, synthetic construct
  misc_feature 1..16: note = synthetic [barcode part1]
  source 1..16: mol_type = other DNA
gtggttatcaacttcc

SEQ ID NO: 28358 - DNA, 16 bp, synthetic construct
  misc_feature 1..16: note = synthetic [barcode part1]
  source 1..16: mol_type = other DNA
tgaatcgacgttcttc

SEQ ID NO: 28359 - DNA, 16 bp, synthetic construct
  misc_feature 1..16: note = synthetic [barcode part1]
  source 1..16: mol_type = other DNA
tgcagactatcgttct

SEQ ID NO: 28360 - DNA, 16 bp, synthetic construct
  misc_feature 1..16: note = synthetic [barcode part1]
  source 1..16: mol_type = other DNA
cgcagtaggtgagtgt

SEQ ID NO: 28361 - DNA, 16 bp, synthetic construct
  misc_feature 1..16: note = synthetic [barcode part1]
  source 1..16: mol_type = other DNA
aggtataccggtgacg

SEQ ID NO: 28362 - DNA, 16 bp, synthetic construct
  misc_feature 1..16: note = synthetic [barcode part1]
  source 1..16: mol_type = other DNA
gtaggtgatagacgag

SEQ ID NO: 28363 - DNA, 16 bp, synthetic construct
  misc_feature 1..16: note = synthetic [barcode part1]
  source 1..16: mol_type = other DNA
aaggttccgagatctc

SEQ ID NO: 28364 - DNA, 16 bp, synthetic construct
  misc_feature 1..16: note = synthetic [barcode part1]
  source 1..16: mol_type = other DNA
aacgactctaggtcac

SEQ ID NO: 28365 - DNA, 16 bp, synthetic construct
  misc_feature 1..16: note = synthetic [barcode part1]
  source 1..16: mol_type = other DNA
gatcgatcagttgacc

SEQ ID NO: 28366 - DNA, 16 bp, synthetic construct
  misc_feature 1..16: note = synthetic [barcode part1]
  source 1..16: mol_type = other DNA
cgagttaacgcctctc

SEQ ID NO: 28367 - DNA, 16 bp, synthetic construct
  misc_feature 1..16: note = synthetic [barcode part1]
  source 1..16: mol_type = other DNA
cgatcgcctatcactg

SEQ ID NO: 28368 - DNA, 16 bp, synthetic construct
  misc_feature 1..16: note = synthetic [barcode part1]
  source 1..16: mol_type = other DNA
cacaggatagtaatcg

SEQ ID NO: 28369 - DNA, 16 bp, synthetic construct
  misc_feature 1..16: note = synthetic [barcode part1]
  source 1..16: mol_type = other DNA
cgagagtcttataccg

SEQ ID NO: 28370 - DNA, 16 bp, synthetic construct
  misc_feature 1..16: note = synthetic [barcode part1]
  source 1..16: mol_type = other DNA
aatccgttgaggcgag

SEQ ID NO: 28371 - DNA, 16 bp, synthetic construct
  misc_feature 1..16: note = synthetic [barcode part1]
  source 1..16: mol_type = other DNA
agtccgatcctatact

SEQ ID NO: 28372 - DNA, 16 bp, synthetic construct
  misc_feature 1..16: note = synthetic [barcode part1]
  source 1..16: mol_type = other DNA
actaaccaccagtcag

SEQ ID NO: 28373 - DNA, 16 bp, synthetic construct
  misc_feature 1..16: note = synthetic [barcode part1]
  source 1..16: mol_type = other DNA
ttacgttgtggtccgc

SEQ ID NO: 28374 - DNA, 16 bp, synthetic construct
  misc_feature 1..16: note = synthetic [barcode part1]
  source 1..16: mol_type = other DNA
gattcctgtcggaagt

SEQ ID NO: 28375 - DNA, 16 bp, synthetic construct
  misc_feature 1..16: note = synthetic [barcode part1]
  source 1..16: mol_type = other DNA
cgacttcgaagaatcc

SEQ ID NO: 28376 - DNA, 16 bp, synthetic construct
  misc_feature 1..16: note = synthetic [barcode part1]
  source 1..16: mol_type = other DNA
atctacttgccgcgac

SEQ ID NO: 28377 - DNA, 16 bp, synthetic construct
  misc_feature 1..16: note = synthetic [barcode part1]
  source 1..16: mol_type = other DNA
caggcgtatcactctc

SEQ ID NO: 28378 - DNA, 16 bp, synthetic construct
  misc_feature 1..16: note = synthetic [barcode part1]
  source 1..16: mol_type = other DNA
gacttgattccacgcc

SEQ ID NO: 28379 - DNA, 16 bp, synthetic construct
  misc_feature 1..16: note = synthetic [barcode part1]
  source 1..16: mol_type = other DNA
tccagttccttccagt

SEQ ID NO: 28380 - DNA, 16 bp, synthetic construct
  misc_feature 1..16: note = synthetic [barcode part1]
  source 1..16: mol_type = other DNA
ttaggtgtgtccgaac

SEQ ID NO: 28381 - DNA, 16 bp, synthetic construct
  misc_feature 1..16: note = synthetic [barcode part1]
  source 1..16: mol_type = other DNA
gtcagaccagactgtt

SEQ ID NO: 28382 - DNA, 16 bp, synthetic construct
  misc_feature 1..16: note = synthetic [barcode part1]
  source 1..16: mol_type = other DNA
cggaggatcaagaagt

SEQ ID NO: 28383 - DNA, 16 bp, synthetic construct
  misc_feature 1..16: note = synthetic [barcode part1]
  source 1..16: mol_type = other DNA
ttgacagtactcttgc

SEQ ID NO: 28384 - DNA, 16 bp, synthetic construct
  misc_feature 1..16: note = synthetic [barcode part1]
  source 1..16: mol_type = other DNA
tctgtcctggaacctg

SEQ ID NO: 28385 - DNA, 16 bp, synthetic construct
  misc_feature 1..16: note = synthetic [barcode part1]
  source 1..16: mol_type = other DNA
ttgcgaatactccgcc

SEQ ID NO: 28386 - DNA, 16 bp, synthetic construct
  misc_feature 1..16: note = synthetic [barcode part1]
  source 1..16: mol_type = other DNA
tggtgtaccagtgtac

SEQ ID NO: 28387 - DNA, 16 bp, synthetic construct
  misc_feature 1..16: note = synthetic [barcode part1]
  source 1..16: mol_type = other DNA
ccagtatccgagagag

SEQ ID NO: 28388 - DNA, 16 bp, synthetic construct
  misc_feature 1..16: note = synthetic [barcode part1]
  source 1..16: mol_type = other DNA
gccggtaccgttattc

SEQ ID NO: 28389 - DNA, 16 bp, synthetic construct
  misc_feature 1..16: note = synthetic [barcode part1]
  source 1..16: mol_type = other DNA
gtatctgaggcgacag

SEQ ID NO: 28390 - DNA, 16 bp, synthetic construct
  misc_feature 1..16: note = synthetic [barcode part1]
  source 1..16: mol_type = other DNA
ttggttctccacaagt

SEQ ID NO: 28391 - DNA, 16 bp, synthetic construct
  misc_feature 1..16: note = synthetic [barcode part1]
  source 1..16: mol_type = other DNA
gtctgattgcgccttg

SEQ ID NO: 28392 - DNA, 16 bp, synthetic construct
  misc_feature 1..16: note = synthetic [barcode part1]
  source 1..16: mol_type = other DNA
tagaccacacacctcc

SEQ ID NO: 28393 - DNA, 16 bp, synthetic construct
  misc_feature 1..16: note = synthetic [barcode part1]
  source 1..16: mol_type = other DNA
atagtgagtagtcgtg

SEQ ID NO: 28394 - DNA, 16 bp, synthetic construct
  misc_feature 1..16: note = synthetic [barcode part1]
  source 1..16: mol_type = other DNA
aaccgccgataacttg

SEQ ID NO: 28395 - DNA, 16 bp, synthetic construct
  misc_feature 1..16: note = synthetic [barcode part1]
  source 1..16: mol_type = other DNA
cgttcactattcgtcc

SEQ ID NO: 28396 - DNA, 16 bp, synthetic construct
  misc_feature 1..16: note = synthetic [barcode part1]
  source 1..16: mol_type = other DNA
gagtaccgaatccgtt

SEQ ID NO: 28397 - DNA, 16 bp, synthetic construct
  misc_feature 1..16: note = synthetic [barcode part1]
  source 1..16: mol_type = other DNA
tcacgcgcaactatag

SEQ ID NO: 28398 - DNA, 16 bp, synthetic construct
  misc_feature 1..16: note = synthetic [barcode part1]
  source 1..16: mol_type = other DNA
tagatcgatcggatcc

SEQ ID NO: 28399 - DNA, 16 bp, synthetic construct
  misc_feature 1..16: note = synthetic [barcode part1]
  source 1..16: mol_type = other DNA
gtcggtccaatatcag

SEQ ID NO: 28400 - DNA, 16 bp, synthetic construct
  misc_feature 1..16: note = synthetic [barcode part1]
  source 1..16: mol_type = other DNA
taccaccaggtgtctc

SEQ ID NO: 28401 - DNA, 16 bp, synthetic construct
  misc_feature 1..16: note = synthetic [barcode part1]
  source 1..16: mol_type = other DNA
cgccgaatactcttgc

SEQ ID NO: 28402 - DNA, 16 bp, synthetic construct
  misc_feature 1..16: note = synthetic [barcode part1]
  source 1..16: mol_type = other DNA
gcaaccagtcagtgtt

SEQ ID NO: 28403 - DNA, 16 bp, synthetic construct
  misc_feature 1..16: note = synthetic [barcode part1]
  source 1..16: mol_type = other DNA
gacacgacgaatcacg

SEQ ID NO: 28404 - DNA, 16 bp, synthetic construct
  misc_feature 1..16: note = synthetic [barcode part1]
  source 1..16: mol_type = other DNA
tcgcgtctactcttgt

SEQ ID NO: 28405 - DNA, 16 bp, synthetic construct
  misc_feature 1..16: note = synthetic [barcode part1]
  source 1..16: mol_type = other DNA
agacggtggaataacg

SEQ ID NO: 28406 - DNA, 16 bp, synthetic construct
  misc_feature 1..16: note = synthetic [barcode part1]
  source 1..16: mol_type = other DNA
ccgaatattcactgtc

SEQ ID NO: 28407 - DNA, 16 bp, synthetic construct
  misc_feature 1..16: note = synthetic [barcode part1]
  source 1..16: mol_type = other DNA
tctgatcagaaccggt

SEQ ID NO: 28408 - DNA, 16 bp, synthetic construct
  misc_feature 1..16: note = synthetic [barcode part1]
  source 1..16: mol_type = other DNA
tctcaagtactgcgag

SEQ ID NO: 28409 - DNA, 16 bp, synthetic construct
  misc_feature 1..16: note = synthetic [barcode part1]
  source 1..16: mol_type = other DNA
tcgtgccacttctact

SEQ ID NO: 28410 - DNA, 16 bp, synthetic construct
  misc_feature 1..16: note = synthetic [barcode part1]
  source 1..16: mol_type = other DNA
ccacggatattaacgc

SEQ ID NO: 28411 - DNA, 16 bp, synthetic construct
  misc_feature 1..16: note = synthetic [barcode part1]
  source 1..16: mol_type = other DNA
tagattgtctcgcgtt

SEQ ID NO: 28412 - DNA, 16 bp, synthetic construct
  misc_feature 1..16: note = synthetic [barcode part1]
  source 1..16: mol_type = other DNA
taggcgtgaagtgatt

SEQ ID NO: 28413 - DNA, 16 bp, synthetic construct
  misc_feature 1..16: note = synthetic [barcode part1]
  source 1..16: mol_type = other DNA
tggttgttgttctacg

SEQ ID NO: 28414 - DNA, 16 bp, synthetic construct
  misc_feature 1..16: note = synthetic [barcode part1]
  source 1..16: mol_type = other DNA
cacgcgttaactaacg

SEQ ID NO: 28415 - DNA, 16 bp, synthetic construct
  misc_feature 1..16: note = synthetic [barcode part1]
  source 1..16: mol_type = other DNA
actgcgatctgaggtt

SEQ ID NO: 28416 - DNA, 16 bp, synthetic construct
  misc_feature 1..16: note = synthetic [barcode part1]
  source 1..16: mol_type = other DNA
tgccttgtccaggtac

SEQ ID NO: 28417 - DNA, 16 bp, synthetic construct
  misc_feature 1..16: note = synthetic [barcode part1]
  source 1..16: mol_type = other DNA
ttgcgtcacttggtgc

SEQ ID NO: 28418 - DNA, 16 bp, synthetic construct
  misc_feature 1..16: note = synthetic [barcode part1]
  source 1..16: mol_type = other DNA
tcttgccagtgaagtg

SEQ ID NO: 28419 - DNA, 16 bp, synthetic construct
  misc_feature 1..16: note = synthetic [barcode part1]
  source 1..16: mol_type = other DNA
gagaacgtaggttgcc

SEQ ID NO: 28420 - DNA, 16 bp, synthetic construct
  misc_feature 1..16: note = synthetic [barcode part1]
  source 1..16: mol_type = other DNA
tctgttatctccggtc

SEQ ID NO: 28421 - DNA, 16 bp, synthetic construct
  misc_feature 1..16: note = synthetic [barcode part1]
  source 1..16: mol_type = other DNA
aggaccttagacaagt

SEQ ID NO: 28422 - DNA, 16 bp, synthetic construct
  misc_feature 1..16: note = synthetic [barcode part1]
  source 1..16: mol_type = other DNA
gtgaggtgtgagttcg

SEQ ID NO: 28423 - DNA, 16 bp, synthetic construct
  misc_feature 1..16: note = synthetic [barcode part1]
  source 1..16: mol_type = other DNA
cgtgaacacttcactt

SEQ ID NO: 28424 - DNA, 16 bp, synthetic construct
  misc_feature 1..16: note = synthetic [barcode part1]
  source 1..16: mol_type = other DNA
ataatacgtcgcgacc

SEQ ID NO: 28425 - DNA, 16 bp, synthetic construct
  misc_feature 1..16: note = synthetic [barcode part1]
  source 1..16: mol_type = other DNA
cggacacaattacgtc

SEQ ID NO: 28426 - DNA, 16 bp, synthetic construct
  misc_feature 1..16: note = synthetic [barcode part1]
  source 1..16: mol_type = other DNA
cgaagttgccaactac

SEQ ID NO: 28427 - DNA, 16 bp, synthetic construct
  misc_feature 1..16: note = synthetic [barcode part1]
  source 1..16: mol_type = other DNA
gttactcggcagagtt

SEQ ID NO: 28428 - DNA, 16 bp, synthetic construct
  misc_feature 1..16: note = synthetic [barcode part1]
  source 1..16: mol_type = other DNA
aagagtacgccaggtc

SEQ ID NO: 28429 - DNA, 16 bp, synthetic construct
  misc_feature 1..16: note = synthetic [barcode part1]
  source 1..16: mol_type = other DNA
cagtgaggaacttgcg

SEQ ID NO: 28430 - DNA, 16 bp, synthetic construct
  misc_feature 1..16: note = synthetic [barcode part1]
  source 1..16: mol_type = other DNA
ttgagaatcgaacgtg

SEQ ID NO: 28431 - DNA, 16 bp, synthetic construct
  misc_feature 1..16: note = synthetic [barcode part1]
  source 1..16: mol_type = other DNA
ttaggacagtagacac

SEQ ID NO: 28432 - DNA, 16 bp, synthetic construct
  misc_feature 1..16: note = synthetic [barcode part1]
  source 1..16: mol_type = other DNA
gattctgtcgtctgcg

SEQ ID NO: 28433 - DNA, 16 bp, synthetic construct
  misc_feature 1..16: note = synthetic [barcode part1]
  source 1..16: mol_type = other DNA
gtgttgtgacactgtg

SEQ ID NO: 28434 - DNA, 16 bp, synthetic construct
  misc_feature 1..16: note = synthetic [barcode part1]
  source 1..16: mol_type = other DNA
cggtaatagaagtacc

SEQ ID NO: 28435 - DNA, 16 bp, synthetic construct
  misc_feature 1..16: note = synthetic [barcode part1]
  source 1..16: mol_type = other DNA
gtgtcctccgatagtc

SEQ ID NO: 28436 - DNA, 16 bp, synthetic construct
  misc_feature 1..16: note = synthetic [barcode part1]
  source 1..16: mol_type = other DNA
gttagtgatcttccac

SEQ ID NO: 28437 - DNA, 16 bp, synthetic construct
  misc_feature 1..16: note = synthetic [barcode part1]
  source 1..16: mol_type = other DNA
taggactagtcggttc

SEQ ID NO: 28438 - DNA, 16 bp, synthetic construct
  misc_feature 1..16: note = synthetic [barcode part1]
  source 1..16: mol_type = other DNA
aattcggtacaggaac

SEQ ID NO: 28439 - DNA, 16 bp, synthetic construct
  misc_feature 1..16: note = synthetic [barcode part1]
  source 1..16: mol_type = other DNA
gaagtggaagtctatc

SEQ ID NO: 28440 - DNA, 16 bp, synthetic construct
  misc_feature 1..16: note = synthetic [barcode part1]
  source 1..16: mol_type = other DNA
tccgtctactccagag

SEQ ID NO: 28441 - DNA, 16 bp, synthetic construct
  misc_feature 1..16: note = synthetic [barcode part1]
  source 1..16: mol_type = other DNA
ttgcgatcgatcaacg

SEQ ID NO: 28442 - DNA, 16 bp, synthetic construct
  misc_feature 1..16: note = synthetic [barcode part1]
  source 1..16: mol_type = other DNA
accgtaacgttcgtcc

SEQ ID NO: 28443 - DNA, 16 bp, synthetic construct
  misc_feature 1..16: note = synthetic [barcode part1]
  source 1..16: mol_type = other DNA
actccgcagtagtagt

SEQ ID NO: 28444 - DNA, 16 bp, synthetic construct
  misc_feature 1..16: note = synthetic [barcode part1]
  source 1..16: mol_type = other DNA
caggattaccgtagtc

SEQ ID NO: 28445 - DNA, 16 bp, synthetic construct
  misc_feature 1..16: note = synthetic [barcode part1]
  source 1..16: mol_type = other DNA
taggtggtcacgacag

SEQ ID NO: 28446 - DNA, 16 bp, synthetic construct
  misc_feature 1..16: note = synthetic [barcode part1]
  source 1..16: mol_type = other DNA
gcgttataagtagacg

SEQ ID NO: 28447 - DNA, 16 bp, synthetic construct
  misc_feature 1..16: note = synthetic [barcode part1]
  source 1..16: mol_type = other DNA
agacgacaaggatcag

SEQ ID NO: 28448 - DNA, 16 bp, synthetic construct
  misc_feature 1..16: note = synthetic [barcode part1]
  source 1..16: mol_type = other DNA
tacggagtaataaccg

SEQ ID NO: 28449 - DNA, 16 bp, synthetic construct
  misc_feature 1..16: note = synthetic [barcode part1]
  source 1..16: mol_type = other DNA
gtacaataggactggt

SEQ ID NO: 28450 - DNA, 16 bp, synthetic construct
  misc_feature 1..16: note = synthetic [barcode part1]
  source 1..16: mol_type = other DNA
gtaggccagtctatac

SEQ ID NO: 28451 - DNA, 16 bp, synthetic construct
  misc_feature 1..16: note = synthetic [barcode part1]
  source 1..16: mol_type = other DNA
ttataggcctgacctt

SEQ ID NO: 28452 - DNA, 16 bp, synthetic construct
  misc_feature 1..16: note = synthetic [barcode part1]
  source 1..16: mol_type = other DNA
gcagaggaagagtact

SEQ ID NO: 28453 - DNA, 16 bp, synthetic construct
  misc_feature 1..16: note = synthetic [barcode part1]
  source 1..16: mol_type = other DNA
aggacttacgaacaac

SEQ ID NO: 28454 - DNA, 16 bp, synthetic construct
  misc_feature 1..16: note = synthetic [barcode part1]
  source 1..16: mol_type = other DNA
aggactcgtggtactt

SEQ ID NO: 28455 - DNA, 16 bp, synthetic construct
  misc_feature 1..16: note = synthetic [barcode part1]
  source 1..16: mol_type = other DNA
tggtctatactggacg

SEQ ID NO: 28456 - DNA, 16 bp, synthetic construct
  misc_feature 1..16: note = synthetic [barcode part1]
  source 1..16: mol_type = other DNA
tatcactaacacgtcc

SEQ ID NO: 28457 - DNA, 16 bp, synthetic construct
  misc_feature 1..16: note = synthetic [barcode part1]
  source 1..16: mol_type = other DNA
caacgtaatcgaagac

SEQ ID NO: 28458 - DNA, 16 bp, synthetic construct
  misc_feature 1..16: note = synthetic [barcode part1]
  source 1..16: mol_type = other DNA
gaaggtaccaccaggt

SEQ ID NO: 28459 - DNA, 16 bp, synthetic construct
  misc_feature 1..16: note = synthetic [barcode part1]
  source 1..16: mol_type = other DNA
acggtccagactattg

SEQ ID NO: 28460 - DNA, 16 bp, synthetic construct
  misc_feature 1..16: note = synthetic [barcode part1]
  source 1..16: mol_type = other DNA
actaacctcgaagtcg

SEQ ID NO: 28461 - DNA, 16 bp, synthetic construct
  misc_feature 1..16: note = synthetic [barcode part1]
  source 1..16: mol_type = other DNA
aggcgcgtaataattg

SEQ ID NO: 28462 - DNA, 16 bp, synthetic construct
  misc_feature 1..16: note = synthetic [barcode part1]
  source 1..16: mol_type = other DNA
caacgacggaagtatt

SEQ ID NO: 28463 - DNA, 16 bp, synthetic construct
  misc_feature 1..16: note = synthetic [barcode part1]
  source 1..16: mol_type = other DNA
tgttgttgtccagatc

SEQ ID NO: 28464 - DNA, 16 bp, synthetic construct
  misc_feature 1..16: note = synthetic [barcode part1]
  source 1..16: mol_type = other DNA
cgaccacaacgtattg

SEQ ID NO: 28465 - DNA, 16 bp, synthetic construct
  misc_feature 1..16: note = synthetic [barcode part1]
  source 1..16: mol_type = other DNA
cggttggccaattaac

SEQ ID NO: 28466 - DNA, 16 bp, synthetic construct
  misc_feature 1..16: note = synthetic [barcode part1]
  source 1..16: mol_type = other DNA
ccttgtaccttcacgt

SEQ ID NO: 28467 - DNA, 16 bp, synthetic construct
  misc_feature 1..16: note = synthetic [barcode part1]
  source 1..16: mol_type = other DNA
gcctcacctactactt

SEQ ID NO: 28468 - DNA, 16 bp, synthetic construct
  misc_feature 1..16: note = synthetic [barcode part1]
  source 1..16: mol_type = other DNA
gagactcagtaggcgt

SEQ ID NO: 28469 - DNA, 16 bp, synthetic construct
  misc_feature 1..16: note = synthetic [barcode part1]
  source 1..16: mol_type = other DNA
acaactccgttgaacg

SEQ ID NO: 28470 - DNA, 16 bp, synthetic construct
  misc_feature 1..16: note = synthetic [barcode part1]
  source 1..16: mol_type = other DNA
tacgtgaatctggacc

SEQ ID NO: 28471 - DNA, 16 bp, synthetic construct
  misc_feature 1..16: note = synthetic [barcode part1]
  source 1..16: mol_type = other DNA
gaagaagaccgactag

SEQ ID NO: 28472 - DNA, 16 bp, synthetic construct
  misc_feature 1..16: note = synthetic [barcode part1]
  source 1..16: mol_type = other DNA
tctcctcagaagaggt

SEQ ID NO: 28473 - DNA, 16 bp, synthetic construct
  misc_feature 1..16: note = synthetic [barcode part1]
  source 1..16: mol_type = other DNA
tgacgttactccgaag

SEQ ID NO: 28474 - DNA, 16 bp, synthetic construct
  misc_feature 1..16: note = synthetic [barcode part1]
  source 1..16: mol_type = other DNA
gcgtgaatacctctag

SEQ ID NO: 28475 - DNA, 16 bp, synthetic construct
  misc_feature 1..16: note = synthetic [barcode part1]
  source 1..16: mol_type = other DNA
agatcacctgtgcctc

SEQ ID NO: 28476 - DNA, 16 bp, synthetic construct
  misc_feature 1..16: note = synthetic [barcode part1]
  source 1..16: mol_type = other DNA
cgactataggttagag

SEQ ID NO: 28477 - DNA, 16 bp, synthetic construct
  misc_feature 1..16: note = synthetic [barcode part1]
  source 1..16: mol_type = other DNA
attcgtccgtcgcagt

SEQ ID NO: 28478 - DNA, 16 bp, synthetic construct
  misc_feature 1..16: note = synthetic [barcode part1]
  source 1..16: mol_type = other DNA
aggagacggtaacaac

SEQ ID NO: 28479 - DNA, 16 bp, synthetic construct
  misc_feature 1..16: note = synthetic [barcode part1]
  source 1..16: mol_type = other DNA
acgattccaagttgcg

SEQ ID NO: 28480 - DNA, 16 bp, synthetic construct
  misc_feature 1..16: note = synthetic [barcode part1]
  source 1..16: mol_type = other DNA
actacggaccttaggt

SEQ ID NO: 28481 - DNA, 16 bp, synthetic construct
  misc_feature 1..16: note = synthetic [barcode part1]
  source 1..16: mol_type = other DNA
agagttcgacgaacgc

SEQ ID NO: 28482 - DNA, 16 bp, synthetic construct
  misc_feature 1..16: note = synthetic [barcode part1]
  source 1..16: mol_type = other DNA
acagattcgactctct

SEQ ID NO: 28483 - DNA, 16 bp, synthetic construct
  misc_feature 1..16: note = synthetic [barcode part1]
  source 1..16: mol_type = other DNA
acgcctcttaacaact

SEQ ID NO: 28484 - DNA, 16 bp, synthetic construct
  misc_feature 1..16: note = synthetic [barcode part1]
  source 1..16: mol_type = other DNA
attctcgaggtcgcct

SEQ ID NO: 28485 - DNA, 16 bp, synthetic construct
  misc_feature 1..16: note = synthetic [barcode part1]
  source 1..16: mol_type = other DNA
atctgcaattacctcg

SEQ ID NO: 28486 - DNA, 16 bp, synthetic construct
  misc_feature 1..16: note = synthetic [barcode part1]
  source 1..16: mol_type = other DNA
cggaggacacgtgatt

SEQ ID NO: 28487 - DNA, 16 bp, synthetic construct
  misc_feature 1..16: note = synthetic [barcode part1]
  source 1..16: mol_type = other DNA
atatactgccttccag

SEQ ID NO: 28488 - DNA, 16 bp, synthetic construct
  misc_feature 1..16: note = synthetic [barcode part1]
  source 1..16: mol_type = other DNA
ttagttccaggcctgc

SEQ ID NO: 28489 - DNA, 16 bp, synthetic construct
  misc_feature 1..16: note = synthetic [barcode part1]
  source 1..16: mol_type = other DNA
atcaggttccgcactc

SEQ ID NO: 28490 - DNA, 16 bp, synthetic construct
  misc_feature 1..16: note = synthetic [barcode part1]
  source 1..16: mol_type = other DNA
acacgacaactgaagt

SEQ ID NO: 28491 - DNA, 16 bp, synthetic construct
  misc_feature 1..16: note = synthetic [barcode part1]
  source 1..16: mol_type = other DNA
gaagacaagaccgcct

SEQ ID NO: 28492 - DNA, 16 bp, synthetic construct
  misc_feature 1..16: note = synthetic [barcode part1]
  source 1..16: mol_type = other DNA
tggcaagttgtaagtg

SEQ ID NO: 28493 - DNA, 16 bp, synthetic construct
  misc_feature 1..16: note = synthetic [barcode part1]
  source 1..16: mol_type = other DNA
gaggtgtactgttaag

SEQ ID NO: 28494 - DNA, 16 bp, synthetic construct
  misc_feature 1..16: note = synthetic [barcode part1]
  source 1..16: mol_type = other DNA
tccgatcgtcagtacc

SEQ ID NO: 28495 - DNA, 16 bp, synthetic construct
  misc_feature 1..16: note = synthetic [barcode part1]
  source 1..16: mol_type = other DNA
gaaccagattgcgcag

SEQ ID NO: 28496 - DNA, 16 bp, synthetic construct
  misc_feature 1..16: note = synthetic [barcode part1]
  source 1..16: mol_type = other DNA
gcggttctctgtatcg

SEQ ID NO: 28497 - DNA, 16 bp, synthetic construct
  misc_feature 1..16: note = synthetic [barcode part1]
  source 1..16: mol_type = other DNA
gtctgccttgttcgtt

SEQ ID NO: 28498 - DNA, 16 bp, synthetic construct
  misc_feature 1..16: note = synthetic [barcode part1]
  source 1..16: mol_type = other DNA
acgttggactggaggt

SEQ ID NO: 28499 - DNA, 16 bp, synthetic construct
  misc_feature 1..16: note = synthetic [barcode part1]
  source 1..16: mol_type = other DNA
acgtcggaggaactac

SEQ ID NO: 28500 - DNA, 16 bp, synthetic construct
  misc_feature 1..16: note = synthetic [barcode part1]
  source 1..16: mol_type = other DNA
gcaattactgaggagt

SEQ ID NO: 28501 - DNA, 16 bp, synthetic construct
  misc_feature 1..16: note = synthetic [barcode part1]
  source 1..16: mol_type = other DNA
gcgcactcgttaatag

SEQ ID NO: 28502 - DNA, 16 bp, synthetic construct
  misc_feature 1..16: note = synthetic [barcode part1]
  source 1..16: mol_type = other DNA
ataaggactggtgatc

SEQ ID NO: 28503 - DNA, 16 bp, synthetic construct
  misc_feature 1..16: note = synthetic [barcode part1]
  source 1..16: mol_type = other DNA
atagtagtgcctcgtg

SEQ ID NO: 28504 - DNA, 16 bp, synthetic construct
  misc_feature 1..16: note = synthetic [barcode part1]
  source 1..16: mol_type = other DNA
aacgtcgtcctctctt

SEQ ID NO: 28505 - DNA, 16 bp, synthetic construct
  misc_feature 1..16: note = synthetic [barcode part1]
  source 1..16: mol_type = other DNA
atcctattactggcac

SEQ ID NO: 28506 - DNA, 16 bp, synthetic construct
  misc_feature 1..16: note = synthetic [barcode part1]
  source 1..16: mol_type = other DNA
tacctcggacagaatc

SEQ ID NO: 28507 - DNA, 16 bp, synthetic construct
  misc_feature 1..16: note = synthetic [barcode part1]
  source 1..16: mol_type = other DNA
gaggcaattgtcttgc

SEQ ID NO: 28508 - DNA, 16 bp, synthetic construct
  misc_feature 1..16: note = synthetic [barcode part1]
  source 1..16: mol_type = other DNA
gagttgtcgtcctcac

SEQ ID NO: 28509 - DNA, 16 bp, synthetic construct
  misc_feature 1..16: note = synthetic [barcode part1]
  source 1..16: mol_type = other DNA
cgaccagttagttgac

SEQ ID NO: 28510 - DNA, 16 bp, synthetic construct
  misc_feature 1..16: note = synthetic [barcode part1]
  source 1..16: mol_type = other DNA
aagttactcgccgagt

SEQ ID NO: 28511 - DNA, 16 bp, synthetic construct
  misc_feature 1..16: note = synthetic [barcode part1]
  source 1..16: mol_type = other DNA
accacctaacaagacc

SEQ ID NO: 28512 - DNA, 16 bp, synthetic construct
  misc_feature 1..16: note = synthetic [barcode part1]
  source 1..16: mol_type = other DNA
gagaatacaccggacc

SEQ ID NO: 28513 - DNA, 16 bp, synthetic construct
  misc_feature 1..16: note = synthetic [barcode part1]
  source 1..16: mol_type = other DNA
caggtcagtacttctt

SEQ ID NO: 28514 - DNA, 16 bp, synthetic construct
  misc_feature 1..16: note = synthetic [barcode part1]
  source 1..16: mol_type = other DNA
atcggtagagtcaggc

SEQ ID NO: 28515 - DNA, 16 bp, synthetic construct
  misc_feature 1..16: note = synthetic [barcode part1]
  source 1..16: mol_type = other DNA
ttacggaactctctac

SEQ ID NO: 28516 - DNA, 16 bp, synthetic construct
  misc_feature 1..16: note = synthetic [barcode part1]
  source 1..16: mol_type = other DNA
gtgactgagaaggcct

SEQ ID NO: 28517 - DNA, 16 bp, synthetic construct
  misc_feature 1..16: note = synthetic [barcode part1]
  source 1..16: mol_type = other DNA
aagtcacgatacagac

SEQ ID NO: 28518 - DNA, 16 bp, synthetic construct
  misc_feature 1..16: note = synthetic [barcode part1]
  source 1..16: mol_type = other DNA
tcgtcgtctaccttac

SEQ ID NO: 28519 - DNA, 16 bp, synthetic construct
  misc_feature 1..16: note = synthetic [barcode part1]
  source 1..16: mol_type = other DNA
tactgcagaggaagag

SEQ ID NO: 28520 - DNA, 16 bp, synthetic construct
  misc_feature 1..16: note = synthetic [barcode part1]
  source 1..16: mol_type = other DNA
agattcgtagacctgc

SEQ ID NO: 28521 - DNA, 16 bp, synthetic construct
  misc_feature 1..16: note = synthetic [barcode part1]
  source 1..16: mol_type = other DNA
gtcacaattcgttcac

SEQ ID NO: 28522 - DNA, 16 bp, synthetic construct
  misc_feature 1..16: note = synthetic [barcode part1]
  source 1..16: mol_type = other DNA
tcaaccaactgaccag

SEQ ID NO: 28523 - DNA, 16 bp, synthetic construct
  misc_feature 1..16: note = synthetic [barcode part1]
  source 1..16: mol_type = other DNA
acgtgtacgtgatacc

SEQ ID NO: 28524 - DNA, 16 bp, synthetic construct
  misc_feature 1..16: note = synthetic [barcode part1]
  source 1..16: mol_type = other DNA
gagatagatccacagt

SEQ ID NO: 28525 - DNA, 16 bp, synthetic construct
  misc_feature 1..16: note = synthetic [barcode part1]
  source 1..16: mol_type = other DNA
ttcgtagttcactacg

SEQ ID NO: 28526 - DNA, 16 bp, synthetic construct
  misc_feature 1..16: note = synthetic [barcode part1]
  source 1..16: mol_type = other DNA
tctattggcacttgac

SEQ ID NO: 28527 - DNA, 16 bp, synthetic construct
  misc_feature 1..16: note = synthetic [barcode part1]
  source 1..16: mol_type = other DNA
caatcgtactctctag

SEQ ID NO: 28528 - DNA, 16 bp, synthetic construct
  misc_feature 1..16: note = synthetic [barcode part1]
  source 1..16: mol_type = other DNA
tacgtagtggattcgc

SEQ ID NO: 28529 - DNA, 16 bp, synthetic construct
  misc_feature 1..16: note = synthetic [barcode part1]
  source 1..16: mol_type = other DNA
gaacactaggcagtgc

SEQ ID NO: 28530 - DNA, 16 bp, synthetic construct
  misc_feature 1..16: note = synthetic [barcode part1]
  source 1..16: mol_type = other DNA
gacttcaacgaacaag

SEQ ID NO: 28531 - DNA, 16 bp, synthetic construct
  misc_feature 1..16: note = synthetic [barcode part1]
  source 1..16: mol_type = other DNA
attccgactggaactg

SEQ ID NO: 28532 - DNA, 16 bp, synthetic construct
  misc_feature 1..16: note = synthetic [barcode part1]
  source 1..16: mol_type = other DNA
cacttatcgcctgttc

SEQ ID NO: 28533 - DNA, 16 bp, synthetic construct
  misc_feature 1..16: note = synthetic [barcode part1]
  source 1..16: mol_type = other DNA
atacgactgcgtaacc

SEQ ID NO: 28534 - DNA, 16 bp, synthetic construct
  misc_feature 1..16: note = synthetic [barcode part1]
  source 1..16: mol_type = other DNA
agagacgtagattgtc

SEQ ID NO: 28535 - DNA, 16 bp, synthetic construct
  misc_feature 1..16: note = synthetic [barcode part1]
  source 1..16: mol_type = other DNA
agtcgcaccgatctct

SEQ ID NO: 28536 - DNA, 16 bp, synthetic construct
  misc_feature 1..16: note = synthetic [barcode part1]
  source 1..16: mol_type = other DNA
tgtcagtccggaagag

SEQ ID NO: 28537 - DNA, 16 bp, synthetic construct
  misc_feature 1..16: note = synthetic [barcode part1]
  source 1..16: mol_type = other DNA
tgccgaactatatcct

SEQ ID NO: 28538 - DNA, 16 bp, synthetic construct
  misc_feature 1..16: note = synthetic [barcode part1]
  source 1..16: mol_type = other DNA
tgtacagacgagacgc

SEQ ID NO: 28539 - DNA, 16 bp, synthetic construct
  misc_feature 1..16: note = synthetic [barcode part1]
  source 1..16: mol_type = other DNA
tgattcttgaccacac

SEQ ID NO: 28540 - DNA, 16 bp, synthetic construct
  misc_feature 1..16: note = synthetic [barcode part1]
  source 1..16: mol_type = other DNA
agttcctggtccacgt

SEQ ID NO: 28541 - DNA, 16 bp, synthetic construct
  misc_feature 1..16: note = synthetic [barcode part1]
  source 1..16: mol_type = other DNA
gcaagaacaactcagt

SEQ ID NO: 28542 - DNA, 16 bp, synthetic construct
  misc_feature 1..16: note = synthetic [barcode part1]
  source 1..16: mol_type = other DNA
gattctgttcgagacg

SEQ ID NO: 28543 - DNA, 16 bp, synthetic construct
  misc_feature 1..16: note = synthetic [barcode part1]
  source 1..16: mol_type = other DNA
taggtcgaatcgtcgt

SEQ ID NO: 28544 - DNA, 16 bp, synthetic construct
  misc_feature 1..16: note = synthetic [barcode part1]
  source 1..16: mol_type = other DNA
gtaacacctgatcgac

SEQ ID NO: 28545 - DNA, 16 bp, synthetic construct
  misc_feature 1..16: note = synthetic [barcode part1]
  source 1..16: mol_type = other DNA
cctatccgttcacttg

SEQ ID NO: 28546 - DNA, 16 bp, synthetic construct
  misc_feature 1..16: note = synthetic [barcode part1]
  source 1..16: mol_type = other DNA
acggactacgtagtct

SEQ ID NO: 28547 - DNA, 16 bp, synthetic construct
  misc_feature 1..16: note = synthetic [barcode part1]
  source 1..16: mol_type = other DNA
tgcgaaggccaagttg

SEQ ID NO: 28548 - DNA, 16 bp, synthetic construct
  misc_feature 1..16: note = synthetic [barcode part1]
  source 1..16: mol_type = other DNA
agaggtgtagactgcc

SEQ ID NO: 28549 - DNA, 16 bp, synthetic construct
  misc_feature 1..16: note = synthetic [barcode part1]
  source 1..16: mol_type = other DNA
aaccgcacttcttagt

SEQ ID NO: 28550 - DNA, 16 bp, synthetic construct
  misc_feature 1..16: note = synthetic [barcode part1]
  source 1..16: mol_type = other DNA
cggacgttatagatcc

SEQ ID NO: 28551 - DNA, 16 bp, synthetic construct
  misc_feature 1..16: note = synthetic [barcode part1]
  source 1..16: mol_type = other DNA
atacctgagtgcctag

SEQ ID NO: 28552 - DNA, 16 bp, synthetic construct
  misc_feature 1..16: note = synthetic [barcode part1]
  source 1..16: mol_type = other DNA
tatcgtgaccgtagtg

SEQ ID NO: 28553 - DNA, 16 bp, synthetic construct
  misc_feature 1..16: note = synthetic [barcode part1]
  source 1..16: mol_type = other DNA
gtccagagtgaactct

SEQ ID NO: 28554 - DNA, 16 bp, synthetic construct
  misc_feature 1..16: note = synthetic [barcode part1]
  source 1..16: mol_type = other DNA
tctactaccttgtcgc

SEQ ID NO: 28555 - DNA, 16 bp, synthetic construct
  misc_feature 1..16: note = synthetic [barcode part1]
  source 1..16: mol_type = other DNA
aagaaggcgtgtacag

SEQ ID NO: 28556 - DNA, 16 bp, synthetic construct
  misc_feature 1..16: note = synthetic [barcode part1]
  source 1..16: mol_type = other DNA
agagttaggtctgtag

SEQ ID NO: 28557 - DNA, 16 bp, synthetic construct
  misc_feature 1..16: note = synthetic [barcode part1]
  source 1..16: mol_type = other DNA
agaactcgaattccgc

SEQ ID NO: 28558 - DNA, 16 bp, synthetic construct
  misc_feature 1..16: note = synthetic [barcode part1]
  source 1..16: mol_type = other DNA
atactggccttcaatc

SEQ ID NO: 28559 - DNA, 16 bp, synthetic construct
  misc_feature 1..16: note = synthetic [barcode part1]
  source 1..16: mol_type = other DNA
gtggacttcgaacgtt

SEQ ID NO: 28560 - DNA, 16 bp, synthetic construct
  misc_feature 1..16: note = synthetic [barcode part1]
  source 1..16: mol_type = other DNA
gtctagtcgcaccttg

SEQ ID NO: 28561 - DNA, 16 bp, synthetic construct
  misc_feature 1..16: note = synthetic [barcode part1]
  source 1..16: mol_type = other DNA
tggcacgaaggtagtc

SEQ ID NO: 28562 - DNA, 16 bp, synthetic construct
  misc_feature 1..16: note = synthetic [barcode part1]
  source 1..16: mol_type = other DNA
accgtgagtgaatagt

SEQ ID NO: 28563 - DNA, 16 bp, synthetic construct
  misc_feature 1..16: note = synthetic [barcode part1]
  source 1..16: mol_type = other DNA
ttcagactcgcgtaag

SEQ ID NO: 28564 - DNA, 16 bp, synthetic construct
  misc_feature 1..16: note = synthetic [barcode part1]
  source 1..16: mol_type = other DNA
cctagtctacgtgacc

SEQ ID NO: 28565 - DNA, 16 bp, synthetic construct
  misc_feature 1..16: note = synthetic [barcode part1]
  source 1..16: mol_type = other DNA
tcggtattctcgattg

SEQ ID NO: 28566 - DNA, 16 bp, synthetic construct
  misc_feature 1..16: note = synthetic [barcode part1]
  source 1..16: mol_type = other DNA
cagttcttgacgtact

SEQ ID NO: 28567 - DNA, 16 bp, synthetic construct
  misc_feature 1..16: note = synthetic [barcode part1]
  source 1..16: mol_type = other DNA
tgcggacagtagagtc

SEQ ID NO: 28568 - DNA, 16 bp, synthetic construct
  misc_feature 1..16: note = synthetic [barcode part1]
  source 1..16: mol_type = other DNA
cgaattcagactcgtg

SEQ ID NO: 28569 - DNA, 16 bp, synthetic construct
  misc_feature 1..16: note = synthetic [barcode part1]
  source 1..16: mol_type = other DNA
cgagagaagagttgac

SEQ ID NO: 28570 - DNA, 16 bp, synthetic construct
  misc_feature 1..16: note = synthetic [barcode part1]
  source 1..16: mol_type = other DNA
tcgaagtagtaccacc

SEQ ID NO: 28571 - DNA, 16 bp, synthetic construct
  misc_feature 1..16: note = synthetic [barcode part1]
  source 1..16: mol_type = other DNA
tgtgtaacgagagact

SEQ ID NO: 28572 - DNA, 16 bp, synthetic construct
  misc_feature 1..16: note = synthetic [barcode part1]
  source 1..16: mol_type = other DNA
agtgcgtcgtgtaact

SEQ ID NO: 28573 - DNA, 16 bp, synthetic construct
  misc_feature 1..16: note = synthetic [barcode part1]
  source 1..16: mol_type = other DNA
acggacacttactcag

SEQ ID NO: 28574 - DNA, 16 bp, synthetic construct
  misc_feature 1..16: note = synthetic [barcode part1]
  source 1..16: mol_type = other DNA
gtaagattgtctggag

SEQ ID NO: 28575 - DNA, 16 bp, synthetic construct
  misc_feature 1..16: note = synthetic [barcode part1]
  source 1..16: mol_type = other DNA
acctaacgcaccttcg

SEQ ID NO: 28576 - DNA, 16 bp, synthetic construct
  misc_feature 1..16: note = synthetic [barcode part1]
  source 1..16: mol_type = other DNA
atatcctaggacacgc

SEQ ID NO: 28577 - DNA, 16 bp, synthetic construct
  misc_feature 1..16: note = synthetic [barcode part1]
  source 1..16: mol_type = other DNA
agtgttgtgaccaacc

SEQ ID NO: 28578 - DNA, 16 bp, synthetic construct
  misc_feature 1..16: note = synthetic [barcode part1]
  source 1..16: mol_type = other DNA
tctgactgcgcgttgt

SEQ ID NO: 28579 - DNA, 16 bp, synthetic construct
  misc_feature 1..16: note = synthetic [barcode part1]
  source 1..16: mol_type = other DNA
agagattgtcgatacg

SEQ ID NO: 28580 - DNA, 16 bp, synthetic construct
  misc_feature 1..16: note = synthetic [barcode part1]
  source 1..16: mol_type = other DNA
tatctcttggcagttg

SEQ ID NO: 28581 - DNA, 16 bp, synthetic construct
  misc_feature 1..16: note = synthetic [barcode part1]
  source 1..16: mol_type = other DNA
agaaccttccacctgc

SEQ ID NO: 28582 - DNA, 16 bp, synthetic construct
  misc_feature 1..16: note = synthetic [barcode part1]
  source 1..16: mol_type = other DNA
tgcacttgtgacttgt

SEQ ID NO: 28583 - DNA, 16 bp, synthetic construct
  misc_feature 1..16: note = synthetic [barcode part1]
  source 1..16: mol_type = other DNA
gtgagtggtagtgtcg

SEQ ID NO: 28584 - DNA, 16 bp, synthetic construct
  misc_feature 1..16: note = synthetic [barcode part1]
  source 1..16: mol_type = other DNA
aggataactcgtcacc

SEQ ID NO: 28585 - DNA, 16 bp, synthetic construct
  misc_feature 1..16: note = synthetic [barcode part1]
  source 1..16: mol_type = other DNA
ttgtcttagtcacgtg

SEQ ID NO: 28586 - DNA, 16 bp, synthetic construct
  misc_feature 1..16: note = synthetic [barcode part1]
  source 1..16: mol_type = other DNA
taccttgcactgtcct

SEQ ID NO: 28587 - DNA, 16 bp, synthetic construct
  misc_feature 1..16: note = synthetic [barcode part1]
  source 1..16: mol_type = other DNA
ttgacgtaaccttctg

SEQ ID NO: 28588 - DNA, 16 bp, synthetic construct
  misc_feature 1..16: note = synthetic [barcode part1]
  source 1..16: mol_type = other DNA
tcaaccagactggttg

SEQ ID NO: 28589 - DNA, 16 bp, synthetic construct
  misc_feature 1..16: note = synthetic [barcode part1]
  source 1..16: mol_type = other DNA
actcgaaccacagatc

SEQ ID NO: 28590 - DNA, 16 bp, synthetic construct
  misc_feature 1..16: note = synthetic [barcode part1]
  source 1..16: mol_type = other DNA
aagatccggtgaacgc

SEQ ID NO: 28591 - DNA, 16 bp, synthetic construct
  misc_feature 1..16: note = synthetic [barcode part1]
  source 1..16: mol_type = other DNA
acactcttcggcaatt

SEQ ID NO: 28592 - DNA, 16 bp, synthetic construct
  misc_feature 1..16: note = synthetic [barcode part1]
  source 1..16: mol_type = other DNA
caatcggtagtgtcgt

SEQ ID NO: 28593 - DNA, 16 bp, synthetic construct
  misc_feature 1..16: note = synthetic [barcode part1]
  source 1..16: mol_type = other DNA
ttcaactattgtgcgc

SEQ ID NO: 28594 - DNA, 16 bp, synthetic construct
  misc_feature 1..16: note = synthetic [barcode part1]
  source 1..16: mol_type = other DNA
tcacagttgtgacacg

SEQ ID NO: 28595 - DNA, 16 bp, synthetic construct
  misc_feature 1..16: note = synthetic [barcode part1]
  source 1..16: mol_type = other DNA
cacgtccgtccttatt

SEQ ID NO: 28596 - DNA, 16 bp, synthetic construct
  misc_feature 1..16: note = synthetic [barcode part1]
  source 1..16: mol_type = other DNA
atactaacttcgccac

SEQ ID NO: 28597 - DNA, 16 bp, synthetic construct
  misc_feature 1..16: note = synthetic [barcode part1]
  source 1..16: mol_type = other DNA
cacagatacggatctc

SEQ ID NO: 28598 - DNA, 16 bp, synthetic construct
  misc_feature 1..16: note = synthetic [barcode part1]
  source 1..16: mol_type = other DNA
gatcagtcctcttctc

SEQ ID NO: 28599 - DNA, 16 bp, synthetic construct
  misc_feature 1..16: note = synthetic [barcode part1]
  source 1..16: mol_type = other DNA
acgcgtagtcagttgt

SEQ ID NO: 28600 - DNA, 16 bp, synthetic construct
  misc_feature 1..16: note = synthetic [barcode part1]
  source 1..16: mol_type = other DNA
aatcgcacggttgtac

SEQ ID NO: 28601 - DNA, 16 bp, synthetic construct
  misc_feature 1..16: note = synthetic [barcode part1]
  source 1..16: mol_type = other DNA
gatcgtggccagtatt

SEQ ID NO: 28602 - DNA, 16 bp, synthetic construct
  misc_feature 1..16: note = synthetic [barcode part1]
  source 1..16: mol_type = other DNA
aaccttgtcacttacg

SEQ ID NO: 28603 - DNA, 16 bp, synthetic construct
  misc_feature 1..16: note = synthetic [barcode part1]
  source 1..16: mol_type = other DNA
tctctaacacgattgc

SEQ ID NO: 28604 - DNA, 16 bp, synthetic construct
  misc_feature 1..16: note = synthetic [barcode part1]
  source 1..16: mol_type = other DNA
caactctgcgtgtcgt

SEQ ID NO: 28605 - DNA, 16 bp, synthetic construct
  misc_feature 1..16: note = synthetic [barcode part1]
  source 1..16: mol_type = other DNA
aatcctcgatcgtgtt

SEQ ID NO: 28606 - DNA, 16 bp, synthetic construct
  misc_feature 1..16: note = synthetic [barcode part1]
  source 1..16: mol_type = other DNA
accaagtgtggagacc

SEQ ID NO: 28607 - DNA, 16 bp, synthetic construct
  misc_feature 1..16: note = synthetic [barcode part1]
  source 1..16: mol_type = other DNA
tccgtactgcaagaac

SEQ ID NO: 28608 - DNA, 16 bp, synthetic construct
  misc_feature 1..16: note = synthetic [barcode part1]
  source 1..16: mol_type = other DNA
cgtagattacctggac

SEQ ID NO: 28609 - DNA, 16 bp, synthetic construct
  misc_feature 1..16: note = synthetic [barcode part1]
  source 1..16: mol_type = other DNA
ttccggttagtgagac

SEQ ID NO: 28610 - DNA, 16 bp, synthetic construct
  misc_feature 1..16: note = synthetic [barcode part1]
  source 1..16: mol_type = other DNA
gttataaccgtctacc

SEQ ID NO: 28611 - DNA, 16 bp, synthetic construct
  misc_feature 1..16: note = synthetic [barcode part1]
  source 1..16: mol_type = other DNA
tccttcttgactgacc

SEQ ID NO: 28612 - DNA, 16 bp, synthetic construct
  misc_feature 1..16: note = synthetic [barcode part1]
  source 1..16: mol_type = other DNA
tgagttggtgtgaggc

SEQ ID NO: 28613 - DNA, 16 bp, synthetic construct
  misc_feature 1..16: note = synthetic [barcode part1]
  source 1..16: mol_type = other DNA
tcggcaactcgatagt

SEQ ID NO: 28614 - DNA, 16 bp, synthetic construct
  misc_feature 1..16: note = synthetic [barcode part1]
  source 1..16: mol_type = other DNA
gacttcacaccacaag

SEQ ID NO: 28615 - DNA, 16 bp, synthetic construct
  misc_feature 1..16: note = synthetic [barcode part1]
  source 1..16: mol_type = other DNA
atagactactggaggt

SEQ ID NO: 28616 - DNA, 16 bp, synthetic construct
  misc_feature 1..16: note = synthetic [barcode part1]
  source 1..16: mol_type = other DNA
aacgacttcgacagtc

SEQ ID NO: 28617 - DNA, 16 bp, synthetic construct
  misc_feature 1..16: note = synthetic [barcode part1]
  source 1..16: mol_type = other DNA
gcacgcgtatagtgtt

SEQ ID NO: 28618 - DNA, 16 bp, synthetic construct
  misc_feature 1..16: note = synthetic [barcode part1]
  source 1..16: mol_type = other DNA
gattcgtgttctactg

SEQ ID NO: 28619 - DNA, 16 bp, synthetic construct
  misc_feature 1..16: note = synthetic [barcode part1]
  source 1..16: mol_type = other DNA
ttgcgcgtcttctgag

SEQ ID NO: 28620 - DNA, 16 bp, synthetic construct
  misc_feature 1..16: note = synthetic [barcode part1]
  source 1..16: mol_type = other DNA
tgtgaacaggtggtgc

SEQ ID NO: 28621 - DNA, 16 bp, synthetic construct
  misc_feature 1..16: note = synthetic [barcode part1]
  source 1..16: mol_type = other DNA
tcgtcactcaccttac

SEQ ID NO: 28622 - DNA, 16 bp, synthetic construct
  misc_feature 1..16: note = synthetic [barcode part1]
  source 1..16: mol_type = other DNA
ttgtcactccaagtgt

SEQ ID NO: 28623 - DNA, 16 bp, synthetic construct
  misc_feature 1..16: note = synthetic [barcode part1]
  source 1..16: mol_type = other DNA
gcgaccactccaattc

SEQ ID NO: 28624 - DNA, 16 bp, synthetic construct
  misc_feature 1..16: note = synthetic [barcode part1]
  source 1..16: mol_type = other DNA
acaactgcaacgtacc

SEQ ID NO: 28625 - DNA, 16 bp, synthetic construct
  misc_feature 1..16: note = synthetic [barcode part1]
  source 1..16: mol_type = other DNA
tcagtagttgtactcc

SEQ ID NO: 28626 - DNA, 16 bp, synthetic construct
  misc_feature 1..16: note = synthetic [barcode part1]
  source 1..16: mol_type = other DNA
tcactgtatccgcggt

SEQ ID NO: 28627 - DNA, 16 bp, synthetic construct
  misc_feature 1..16: note = synthetic [barcode part1]
  source 1..16: mol_type = other DNA
tgtacgtcagttgacg

SEQ ID NO: 28628 - DNA, 16 bp, synthetic construct
  misc_feature 1..16: note = synthetic [barcode part1]
  source 1..16: mol_type = other DNA
gtgtacacacggtatc

SEQ ID NO: 28629 - DNA, 16 bp, synthetic construct
  misc_feature 1..16: note = synthetic [barcode part1]
  source 1..16: mol_type = other DNA
tgcggtgaagttctac

SEQ ID NO: 28630 - DNA, 16 bp, synthetic construct
  misc_feature 1..16: note = synthetic [barcode part1]
  source 1..16: mol_type = other DNA
tccactcgatatcgcg

SEQ ID NO: 28631 - DNA, 16 bp, synthetic construct
  misc_feature 1..16: note = synthetic [barcode part1]
  source 1..16: mol_type = other DNA
agtagaggccacttct

SEQ ID NO: 28632 - DNA, 16 bp, synthetic construct
  misc_feature 1..16: note = synthetic [barcode part1]
  source 1..16: mol_type = other DNA
tgtcaggttcgcgtct

SEQ ID NO: 28633 - DNA, 16 bp, synthetic construct
  misc_feature 1..16: note = synthetic [barcode part1]
  source 1..16: mol_type = other DNA
gagtcacttcgcacct

SEQ ID NO: 28634 - DNA, 16 bp, synthetic construct
  misc_feature 1..16: note = synthetic [barcode part1]
  source 1..16: mol_type = other DNA
gtcttatactcaggtc

SEQ ID NO: 28635 - DNA, 16 bp, synthetic construct
  misc_feature 1..16: note = synthetic [barcode part1]
  source 1..16: mol_type = other DNA
cggaaggaccgatact

SEQ ID NO: 28636 - DNA, 16 bp, synthetic construct
  misc_feature 1..16: note = synthetic [barcode part1]
  source 1..16: mol_type = other DNA
atacggtatactggcc

SEQ ID NO: 28637 - DNA, 16 bp, synthetic construct
  misc_feature 1..16: note = synthetic [barcode part1]
  source 1..16: mol_type = other DNA
tctccacgagttaccg

SEQ ID NO: 28638 - DNA, 16 bp, synthetic construct
  misc_feature 1..16: note = synthetic [barcode part1]
  source 1..16: mol_type = other DNA
cgcaattaaccgtgtg

SEQ ID NO: 28639 - DNA, 16 bp, synthetic construct
  misc_feature 1..16: note = synthetic [barcode part1]
  source 1..16: mol_type = other DNA
tacttacgagtcttgc

SEQ ID NO: 28640 - DNA, 16 bp, synthetic construct
  misc_feature 1..16: note = synthetic [barcode part1]
  source 1..16: mol_type = other DNA
gagaagtacctaggtt

SEQ ID NO: 28641 - DNA, 16 bp, synthetic construct
  misc_feature 1..16: note = synthetic [barcode part1]
  source 1..16: mol_type = other DNA
tataggcgtaacagac

SEQ ID NO: 28642 - DNA, 16 bp, synthetic construct
  misc_feature 1..16: note = synthetic [barcode part1]
  source 1..16: mol_type = other DNA
atcagactggaggcac

SEQ ID NO: 28643 - DNA, 16 bp, synthetic construct
  misc_feature 1..16: note = synthetic [barcode part1]
  source 1..16: mol_type = other DNA
agatatcgcctcgcct

SEQ ID NO: 28644 - DNA, 16 bp, synthetic construct
  misc_feature 1..16: note = synthetic [barcode part1]
  source 1..16: mol_type = other DNA
tgactgacaaccgatc

SEQ ID NO: 28645 - DNA, 16 bp, synthetic construct
  misc_feature 1..16: note = synthetic [barcode part1]
  source 1..16: mol_type = other DNA
gtcgtaagataccacc

SEQ ID NO: 28646 - DNA, 16 bp, synthetic construct
  misc_feature 1..16: note = synthetic [barcode part1]
  source 1..16: mol_type = other DNA
gcgtggttcttaattc

SEQ ID NO: 28647 - DNA, 16 bp, synthetic construct
  misc_feature 1..16: note = synthetic [barcode part1]
  source 1..16: mol_type = other DNA
aagacaaggacttgtc

SEQ ID NO: 28648 - DNA, 16 bp, synthetic construct
  misc_feature 1..16: note = synthetic [barcode part1]
  source 1..16: mol_type = other DNA
acagtactgaccaacc

SEQ ID NO: 28649 - DNA, 16 bp, synthetic construct
  misc_feature 1..16: note = synthetic [barcode part1]
  source 1..16: mol_type = other DNA
tcttgtatcctgcgtc

SEQ ID NO: 28650 - DNA, 16 bp, synthetic construct
  misc_feature 1..16: note = synthetic [barcode part1]
  source 1..16: mol_type = other DNA
cctaagtatccaggtg

SEQ ID NO: 28651 - DNA, 16 bp, synthetic construct
  misc_feature 1..16: note = synthetic [barcode part1]
  source 1..16: mol_type = other DNA
ttcttctgcgcacgtt

SEQ ID NO: 28652 - DNA, 16 bp, synthetic construct
  misc_feature 1..16: note = synthetic [barcode part1]
  source 1..16: mol_type = other DNA
aggcgagttgcaacgt

SEQ ID NO: 28653 - DNA, 16 bp, synthetic construct
  misc_feature 1..16: note = synthetic [barcode part1]
  source 1..16: mol_type = other DNA
atctaggcctgttatc

SEQ ID NO: 28654 - DNA, 16 bp, synthetic construct
  misc_feature 1..16: note = synthetic [barcode part1]
  source 1..16: mol_type = other DNA
cctaagatacgcgtac

SEQ ID NO: 28655 - DNA, 16 bp, synthetic construct
  misc_feature 1..16: note = synthetic [barcode part1]
  source 1..16: mol_type = other DNA
tcagtgaataaggacc

SEQ ID NO: 28656 - DNA, 16 bp, synthetic construct
  misc_feature 1..16: note = synthetic [barcode part1]
  source 1..16: mol_type = other DNA
aactcgaaccagatcc

SEQ ID NO: 28657 - DNA, 16 bp, synthetic construct
  misc_feature 1..16: note = synthetic [barcode part1]
  source 1..16: mol_type = other DNA
ttctagtcgtgccgac

SEQ ID NO: 28658 - DNA, 16 bp, synthetic construct
  misc_feature 1..16: note = synthetic [barcode part1]
  source 1..16: mol_type = other DNA
gcagtgaagacacctg

SEQ ID NO: 28659 - DNA, 16 bp, synthetic construct
  misc_feature 1..16: note = synthetic [barcode part1]
  source 1..16: mol_type = other DNA
actgaacaacgactcc

SEQ ID NO: 28660 - DNA, 16 bp, synthetic construct
  misc_feature 1..16: note = synthetic [barcode part1]
  source 1..16: mol_type = other DNA
aaccgacctaagacct

SEQ ID NO: 28661 - DNA, 16 bp, synthetic construct
  misc_feature 1..16: note = synthetic [barcode part1]
  source 1..16: mol_type = other DNA
cagtgcgttagtacac

SEQ ID NO: 28662 - DNA, 16 bp, synthetic construct
  misc_feature 1..16: note = synthetic [barcode part1]
  source 1..16: mol_type = other DNA
ataagaggcacaggac

SEQ ID NO: 28663 - DNA, 16 bp, synthetic construct
  misc_feature 1..16: note = synthetic [barcode part1]
  source 1..16: mol_type = other DNA
cgacgtacgtagactt

SEQ ID NO: 28664 - DNA, 16 bp, synthetic construct
  misc_feature 1..16: note = synthetic [barcode part1]
  source 1..16: mol_type = other DNA
ttagacactcgtcgtt

SEQ ID NO: 28665 - DNA, 16 bp, synthetic construct
  misc_feature 1..16: note = synthetic [barcode part1]
  source 1..16: mol_type = other DNA
cgccttatctaagtac

SEQ ID NO: 28666 - DNA, 16 bp, synthetic construct
  misc_feature 1..16: note = synthetic [barcode part1]
  source 1..16: mol_type = other DNA
aacaccgtagtgtcgt

SEQ ID NO: 28667 - DNA, 16 bp, synthetic construct
  misc_feature 1..16: note = synthetic [barcode part1]
  source 1..16: mol_type = other DNA
accagtataccttacc

SEQ ID NO: 28668 - DNA, 16 bp, synthetic construct
  misc_feature 1..16: note = synthetic [barcode part1]
  source 1..16: mol_type = other DNA
gacggaatagtccttc

SEQ ID NO: 28669 - DNA, 16 bp, synthetic construct
  misc_feature 1..16: note = synthetic [barcode part1]
  source 1..16: mol_type = other DNA
tatctctcgtgtcctg

SEQ ID NO: 28670 - DNA, 16 bp, synthetic construct
  misc_feature 1..16: note = synthetic [barcode part1]
  source 1..16: mol_type = other DNA
tcgtgtcgtaagaacc

SEQ ID NO: 28671 - DNA, 16 bp, synthetic construct
  misc_feature 1..16: note = synthetic [barcode part1]
  source 1..16: mol_type = other DNA
acacactaccttctag

SEQ ID NO: 28672 - DNA, 16 bp, synthetic construct
  misc_feature 1..16: note = synthetic [barcode part1]
  source 1..16: mol_type = other DNA
ccgtgcctactgaatc

SEQ ID NO: 28673 - DNA, 16 bp, synthetic construct
  misc_feature 1..16: note = synthetic [barcode part1]
  source 1..16: mol_type = other DNA
ttagttcactcagacc

SEQ ID NO: 28674 - DNA, 16 bp, synthetic construct
  misc_feature 1..16: note = synthetic [barcode part1]
  source 1..16: mol_type = other DNA
tccggagttaagatcc

SEQ ID NO: 28675 - DNA, 16 bp, synthetic construct
  misc_feature 1..16: note = synthetic [barcode part1]
  source 1..16: mol_type = other DNA
tacaaccagtcgtacg

SEQ ID NO: 28676 - DNA, 16 bp, synthetic construct
  misc_feature 1..16: note = synthetic [barcode part1]
  source 1..16: mol_type = other DNA
tgatcttcggcacacc

SEQ ID NO: 28677 - DNA, 16 bp, synthetic construct
  misc_feature 1..16: note = synthetic [barcode part1]
  source 1..16: mol_type = other DNA
accgaactacttctgt

SEQ ID NO: 28678 - DNA, 16 bp, synthetic construct
  misc_feature 1..16: note = synthetic [barcode part1]
  source 1..16: mol_type = other DNA
tgtcttgtaccgcctt

SEQ ID NO: 28679 - DNA, 16 bp, synthetic construct
  misc_feature 1..16: note = synthetic [barcode part1]
  source 1..16: mol_type = other DNA
ccgttaatcttgcgcg

SEQ ID NO: 28680 - DNA, 16 bp, synthetic construct
  misc_feature 1..16: note = synthetic [barcode part1]
  source 1..16: mol_type = other DNA
tcctcgatcagaagac

SEQ ID NO: 28681 - DNA, 16 bp, synthetic construct
  misc_feature 1..16: note = synthetic [barcode part1]
  source 1..16: mol_type = other DNA
gtccttcgaagttgag

SEQ ID NO: 28682 - DNA, 16 bp, synthetic construct
  misc_feature 1..16: note = synthetic [barcode part1]
  source 1..16: mol_type = other DNA
gatatcggtcagtcac

SEQ ID NO: 28683 - DNA, 16 bp, synthetic construct
  misc_feature 1..16: note = synthetic [barcode part1]
  source 1..16: mol_type = other DNA
taatcggataccacgc

SEQ ID NO: 28684 - DNA, 16 bp, synthetic construct
  misc_feature 1..16: note = synthetic [barcode part1]
  source 1..16: mol_type = other DNA
tcgcggatattccacc

SEQ ID NO: 28685 - DNA, 16 bp, synthetic construct
  misc_feature 1..16: note = synthetic [barcode part1]
  source 1..16: mol_type = other DNA
ttagaccgtatctctg

SEQ ID NO: 28686 - DNA, 16 bp, synthetic construct
  misc_feature 1..16: note = synthetic [barcode part1]
  source 1..16: mol_type = other DNA
tcttggcgaagtgatc

SEQ ID NO: 28687 - DNA, 16 bp, synthetic construct
  misc_feature 1..16: note = synthetic [barcode part1]
  source 1..16: mol_type = other DNA
tggacgtcctccgatt

SEQ ID NO: 28688 - DNA, 16 bp, synthetic construct
  misc_feature 1..16: note = synthetic [barcode part1]
  source 1..16: mol_type = other DNA
aacactcgacgtactg

SEQ ID NO: 28689 - DNA, 16 bp, synthetic construct
  misc_feature 1..16: note = synthetic [barcode part1]
  source 1..16: mol_type = other DNA
actacctgacggagtt

SEQ ID NO: 28690 - DNA, 16 bp, synthetic construct
  misc_feature 1..16: note = synthetic [barcode part1]
  source 1..16: mol_type = other DNA
gattcgtactctatcg

SEQ ID NO: 28691 - DNA, 16 bp, synthetic construct
  misc_feature 1..16: note = synthetic [barcode part1]
  source 1..16: mol_type = other DNA
attctgcgaaccgagt

SEQ ID NO: 28692 - DNA, 16 bp, synthetic construct
  misc_feature 1..16: note = synthetic [barcode part1]
  source 1..16: mol_type = other DNA
agacgactagttctcg

SEQ ID NO: 28693 - DNA, 16 bp, synthetic construct
  misc_feature 1..16: note = synthetic [barcode part1]
  source 1..16: mol_type = other DNA
atcgtgtggttacgtg

SEQ ID NO: 28694 - DNA, 16 bp, synthetic construct
  misc_feature 1..16: note = synthetic [barcode part1]
  source 1..16: mol_type = other DNA
gataggaacgcggtct

SEQ ID NO: 28695 - DNA, 16 bp, synthetic construct
  misc_feature 1..16: note = synthetic [barcode part1]
  source 1..16: mol_type = other DNA
cggacaacctagagtg

SEQ ID NO: 28696 - DNA, 16 bp, synthetic construct
  misc_feature 1..16: note = synthetic [barcode part1]
  source 1..16: mol_type = other DNA
tagtagatccaggtag

SEQ ID NO: 28697 - DNA, 16 bp, synthetic construct
  misc_feature 1..16: note = synthetic [barcode part1]
  source 1..16: mol_type = other DNA
gacgaggtacggatct

SEQ ID NO: 28698 - DNA, 16 bp, synthetic construct
  misc_feature 1..16: note = synthetic [barcode part1]
  source 1..16: mol_type = other DNA
ttgaccagtcagtcag

SEQ ID NO: 28699 - DNA, 16 bp, synthetic construct
  misc_feature 1..16: note = synthetic [barcode part1]
  source 1..16: mol_type = other DNA
accaggaaggagattg

SEQ ID NO: 28700 - DNA, 16 bp, synthetic construct
  misc_feature 1..16: note = synthetic [barcode part1]
  source 1..16: mol_type = other DNA
gtcggatacgagaatt

SEQ ID NO: 28701 - DNA, 16 bp, synthetic construct
  misc_feature 1..16: note = synthetic [barcode part1]
  source 1..16: mol_type = other DNA
aattagttgcggcacc

SEQ ID NO: 28702 - DNA, 16 bp, synthetic construct
  misc_feature 1..16: note = synthetic [barcode part1]
  source 1..16: mol_type = other DNA
agaactacgcagaccg

SEQ ID NO: 28703 - DNA, 16 bp, synthetic construct
  misc_feature 1..16: note = synthetic [barcode part1]
  source 1..16: mol_type = other DNA
agattccgagagagag

SEQ ID NO: 28704 - DNA, 16 bp, synthetic construct
  misc_feature 1..16: note = synthetic [barcode part1]
  source 1..16: mol_type = other DNA
ttgcgagactcgaact

SEQ ID NO: 28705 - DNA, 16 bp, synthetic construct
  misc_feature 1..16: note = synthetic [barcode part1]
  source 1..16: mol_type = other DNA
cggcctactgtatctg

SEQ ID NO: 28706 - DNA, 16 bp, synthetic construct
  misc_feature 1..16: note = synthetic [barcode part1]
  source 1..16: mol_type = other DNA
gaatcctaggaccttg

SEQ ID NO: 28707 - DNA, 16 bp, synthetic construct
  misc_feature 1..16: note = synthetic [barcode part1]
  source 1..16: mol_type = other DNA
aatcttccgactctcc

SEQ ID NO: 28708 - DNA, 16 bp, synthetic construct
  misc_feature 1..16: note = synthetic [barcode part1]
  source 1..16: mol_type = other DNA
tcaaccttctgcaagt

SEQ ID NO: 28709 - DNA, 16 bp, synthetic construct
  misc_feature 1..16: note = synthetic [barcode part1]
  source 1..16: mol_type = other DNA
tattcgtacggtactc

SEQ ID NO: 28710 - DNA, 16 bp, synthetic construct
  misc_feature 1..16: note = synthetic [barcode part1]
  source 1..16: mol_type = other DNA
gcggcactgtaatact

SEQ ID NO: 28711 - DNA, 16 bp, synthetic construct
  misc_feature 1..16: note = synthetic [barcode part1]
  source 1..16: mol_type = other DNA
acctaaggcgaacttc

SEQ ID NO: 28712 - DNA, 16 bp, synthetic construct
  misc_feature 1..16: note = synthetic [barcode part1]
  source 1..16: mol_type = other DNA
ttgcctggaacctcac

SEQ ID NO: 28713 - DNA, 16 bp, synthetic construct
  misc_feature 1..16: note = synthetic [barcode part1]
  source 1..16: mol_type = other DNA
gcgtacacggtcaatt

SEQ ID NO: 28714 - DNA, 16 bp, synthetic construct
  misc_feature 1..16: note = synthetic [barcode part1]
  source 1..16: mol_type = other DNA
gtggattgcgtaatcc

SEQ ID NO: 28715 - DNA, 16 bp, synthetic construct
  misc_feature 1..16: note = synthetic [barcode part1]
  source 1..16: mol_type = other DNA
cagagaatacgatcgt

SEQ ID NO: 28716 - DNA, 16 bp, synthetic construct
  misc_feature 1..16: note = synthetic [barcode part1]
  source 1..16: mol_type = other DNA
ccacaagtgagttcgt

SEQ ID NO: 28717 - DNA, 16 bp, synthetic construct
  misc_feature 1..16: note = synthetic [barcode part1]
  source 1..16: mol_type = other DNA
agaacctcaggtggac

SEQ ID NO: 28718 - DNA, 16 bp, synthetic construct
  misc_feature 1..16: note = synthetic [barcode part1]
  source 1..16: mol_type = other DNA
acgaaggtaacctaac

SEQ ID NO: 28719 - DNA, 16 bp, synthetic construct
  misc_feature 1..16: note = synthetic [barcode part1]
  source 1..16: mol_type = other DNA
cgtagaggttaccgag

SEQ ID NO: 28720 - DNA, 16 bp, synthetic construct
  misc_feature 1..16: note = synthetic [barcode part1]
  source 1..16: mol_type = other DNA
taacggttgtatctcc

SEQ ID NO: 28721 - DNA, 16 bp, synthetic construct
  misc_feature 1..16: note = synthetic [barcode part1]
  source 1..16: mol_type = other DNA
gcctctaacttaacac

SEQ ID NO: 28722 - DNA, 16 bp, synthetic construct
  misc_feature 1..16: note = synthetic [barcode part1]
  source 1..16: mol_type = other DNA
gccaagttctgcgtct

SEQ ID NO: 28723 - DNA, 16 bp, synthetic construct
  misc_feature 1..16: note = synthetic [barcode part1]
  source 1..16: mol_type = other DNA
cacttcgtgaacgtcc

SEQ ID NO: 28724 - DNA, 16 bp, synthetic construct
  misc_feature 1..16: note = synthetic [barcode part1]
  source 1..16: mol_type = other DNA
aagacaaggtgaggtc

SEQ ID NO: 28725 - DNA, 16 bp, synthetic construct
  misc_feature 1..16: note = synthetic [barcode part1]
  source 1..16: mol_type = other DNA
aacttatcgttgtccg

SEQ ID NO: 28726 - DNA, 16 bp, synthetic construct
  misc_feature 1..16: note = synthetic [barcode part1]
  source 1..16: mol_type = other DNA
tcttctagtagttgcg

SEQ ID NO: 28727 - DNA, 16 bp, synthetic construct
  misc_feature 1..16: note = synthetic [barcode part1]
  source 1..16: mol_type = other DNA
caggtgatactgtaag

SEQ ID NO: 28728 - DNA, 16 bp, synthetic construct
  misc_feature 1..16: note = synthetic [barcode part1]
  source 1..16: mol_type = other DNA
cacctaaccttcgacg

SEQ ID NO: 28729 - DNA, 16 bp, synthetic construct
  misc_feature 1..16: note = synthetic [barcode part1]
  source 1..16: mol_type = other DNA
atagtgaagaccggag

SEQ ID NO: 28730 - DNA, 16 bp, synthetic construct
  misc_feature 1..16: note = synthetic [barcode part1]
  source 1..16: mol_type = other DNA
cctcgtgatcagacct

SEQ ID NO: 28731 - DNA, 16 bp, synthetic construct
  misc_feature 1..16: note = synthetic [barcode part1]
  source 1..16: mol_type = other DNA
tggtcctaacttcctc

SEQ ID NO: 28732 - DNA, 16 bp, synthetic construct
  misc_feature 1..16: note = synthetic [barcode part1]
  source 1..16: mol_type = other DNA
aataatcggtccggtc

SEQ ID NO: 28733 - DNA, 16 bp, synthetic construct
  misc_feature 1..16: note = synthetic [barcode part1]
  source 1..16: mol_type = other DNA
tcggaaggacctacag

SEQ ID NO: 28734 - DNA, 16 bp, synthetic construct
  misc_feature 1..16: note = synthetic [barcode part1]
  source 1..16: mol_type = other DNA
caacgttggcagacag

SEQ ID NO: 28735 - DNA, 16 bp, synthetic construct
  misc_feature 1..16: note = synthetic [barcode part1]
  source 1..16: mol_type = other DNA
tggttaggacctcaac

SEQ ID NO: 28736 - DNA, 16 bp, synthetic construct
  misc_feature 1..16: note = synthetic [barcode part1]
  source 1..16: mol_type = other DNA
attcgacggaatacag

SEQ ID NO: 28737 - DNA, 16 bp, synthetic construct
  misc_feature 1..16: note = synthetic [barcode part1]
  source 1..16: mol_type = other DNA
ttcagaccagatccag

SEQ ID NO: 28738 - DNA, 16 bp, synthetic construct
  misc_feature 1..16: note = synthetic [barcode part1]
  source 1..16: mol_type = other DNA
cgaacagagtggatag

SEQ ID NO: 28739 - DNA, 16 bp, synthetic construct
  misc_feature 1..16: note = synthetic [barcode part1]
  source 1..16: mol_type = other DNA
aggtcaccgttcctgt

SEQ ID NO: 28740 - DNA, 16 bp, synthetic construct
  misc_feature 1..16: note = synthetic [barcode part1]
  source 1..16: mol_type = other DNA
atcctgcgaacactcc

SEQ ID NO: 28741 - DNA, 16 bp, synthetic construct
  misc_feature 1..16: note = synthetic [barcode part1]
  source 1..16: mol_type = other DNA
ttaccaggaagatacg

SEQ ID NO: 28742 - DNA, 16 bp, synthetic construct
  misc_feature 1..16: note = synthetic [barcode part1]
  source 1..16: mol_type = other DNA
tgcgagattgacggtg

SEQ ID NO: 28743 - DNA, 16 bp, synthetic construct
  misc_feature 1..16: note = synthetic [barcode part1]
  source 1..16: mol_type = other DNA
tctgattacgcgtcgc

SEQ ID NO: 28744 - DNA, 16 bp, synthetic construct
  misc_feature 1..16: note = synthetic [barcode part1]
  source 1..16: mol_type = other DNA
agacgcacggttcaag

SEQ ID NO: 28745 - DNA, 16 bp, synthetic construct
  misc_feature 1..16: note = synthetic [barcode part1]
  source 1..16: mol_type = other DNA
tgcctcgaggttcact

SEQ ID NO: 28746 - DNA, 16 bp, synthetic construct
  misc_feature 1..16: note = synthetic [barcode part1]
  source 1..16: mol_type = other DNA
cggatacttaggcgtt

SEQ ID NO: 28747 - DNA, 16 bp, synthetic construct
  misc_feature 1..16: note = synthetic [barcode part1]
  source 1..16: mol_type = other DNA
acaggcaactccagag

SEQ ID NO: 28748 - DNA, 16 bp, synthetic construct
  misc_feature 1..16: note = synthetic [barcode part1]
  source 1..16: mol_type = other DNA
cacgaaggttagaccg

SEQ ID NO: 28749 - DNA, 16 bp, synthetic construct
  misc_feature 1..16: note = synthetic [barcode part1]
  source 1..16: mol_type = other DNA
aggcagtgtgtaaccg

SEQ ID NO: 28750 - DNA, 16 bp, synthetic construct
  misc_feature 1..16: note = synthetic [barcode part1]
  source 1..16: mol_type = other DNA
gcctgtcaacaccact

SEQ ID NO: 28751 - DNA, 16 bp, synthetic construct
  misc_feature 1..16: note = synthetic [barcode part1]
  source 1..16: mol_type = other DNA
agacacttgaagtgac

SEQ ID NO: 28752 - DNA, 16 bp, synthetic construct
  misc_feature 1..16: note = synthetic [barcode part1]
  source 1..16: mol_type = other DNA
attcactctcacctgc

SEQ ID NO: 28753 - DNA, 16 bp, synthetic construct
  misc_feature 1..16: note = synthetic [barcode part1]
  source 1..16: mol_type = other DNA
ttggaacgcaacgttc

SEQ ID NO: 28754 - DNA, 16 bp, synthetic construct
  misc_feature 1..16: note = synthetic [barcode part1]
  source 1..16: mol_type = other DNA
caacagtcctctacgc

SEQ ID NO: 28755 - DNA, 16 bp, synthetic construct
  misc_feature 1..16: note = synthetic [barcode part1]
  source 1..16: mol_type = other DNA
tctagacggtaacaag

SEQ ID NO: 28756 - DNA, 16 bp, synthetic construct
  misc_feature 1..16: note = synthetic [barcode part1]
  source 1..16: mol_type = other DNA
tggagaatcgaggagt

SEQ ID NO: 28757 - DNA, 16 bp, synthetic construct
  misc_feature 1..16: note = synthetic [barcode part1]
  source 1..16: mol_type = other DNA
caggacaacttcctag

SEQ ID NO: 28758 - DNA, 16 bp, synthetic construct
  misc_feature 1..16: note = synthetic [barcode part1]
  source 1..16: mol_type = other DNA
gttggttcgataccag

SEQ ID NO: 28759 - DNA, 16 bp, synthetic construct
  misc_feature 1..16: note = synthetic [barcode part1]
  source 1..16: mol_type = other DNA
tcgagagactactctg

SEQ ID NO: 28760 - DNA, 16 bp, synthetic construct
  misc_feature 1..16: note = synthetic [barcode part1]
  source 1..16: mol_type = other DNA
acgacttaacggttcg

SEQ ID NO: 28761 - DNA, 16 bp, synthetic construct
  misc_feature 1..16: note = synthetic [barcode part1]
  source 1..16: mol_type = other DNA
ccttcggttagagagt

SEQ ID NO: 28762 - DNA, 16 bp, synthetic construct
  misc_feature 1..16: note = synthetic [barcode part1]
  source 1..16: mol_type = other DNA
actcctcggagaattg

SEQ ID NO: 28763 - DNA, 16 bp, synthetic construct
  misc_feature 1..16: note = synthetic [barcode part1]
  source 1..16: mol_type = other DNA
tccagagaactctggt

SEQ ID NO: 28764 - DNA, 16 bp, synthetic construct
  misc_feature 1..16: note = synthetic [barcode part1]
  source 1..16: mol_type = other DNA
tggtctacgtcctcag

SEQ ID NO: 28765 - DNA, 16 bp, synthetic construct
  misc_feature 1..16: note = synthetic [barcode part1]
  source 1..16: mol_type = other DNA
cggaactcgtggtatt

SEQ ID NO: 28766 - DNA, 16 bp, synthetic construct
  misc_feature 1..16: note = synthetic [barcode part1]
  source 1..16: mol_type = other DNA
gatccttgtcgaaggt

SEQ ID NO: 28767 - DNA, 16 bp, synthetic construct
  misc_feature 1..16: note = synthetic [barcode part1]
  source 1..16: mol_type = other DNA
cagagttgcacgtatc

SEQ ID NO: 28768 - DNA, 16 bp, synthetic construct
  misc_feature 1..16: note = synthetic [barcode part1]
  source 1..16: mol_type = other DNA
aagaactattggcacg

SEQ ID NO: 28769 - DNA, 16 bp, synthetic construct
  misc_feature 1..16: note = synthetic [barcode part1]
  source 1..16: mol_type = other DNA
taacctcgccgtgtgt

SEQ ID NO: 28770 - DNA, 16 bp, synthetic construct
  misc_feature 1..16: note = synthetic [barcode part1]
  source 1..16: mol_type = other DNA
gtctgtccttgtctac

SEQ ID NO: 28771 - DNA, 16 bp, synthetic construct
  misc_feature 1..16: note = synthetic [barcode part1]
  source 1..16: mol_type = other DNA
gttgtaggcaagtggc

SEQ ID NO: 28772 - DNA, 16 bp, synthetic construct
  misc_feature 1..16: note = synthetic [barcode part1]
  source 1..16: mol_type = other DNA
tgagtctgaatctgcg

SEQ ID NO: 28773 - DNA, 16 bp, synthetic construct
  misc_feature 1..16: note = synthetic [barcode part1]
  source 1..16: mol_type = other DNA
gcagtcaactgtgtgt

SEQ ID NO: 28774 - DNA, 16 bp, synthetic construct
  misc_feature 1..16: note = synthetic [barcode part1]
  source 1..16: mol_type = other DNA
gtaaggcctacagacg

SEQ ID NO: 28775 - DNA, 16 bp, synthetic construct
  misc_feature 1..16: note = synthetic [barcode part1]
  source 1..16: mol_type = other DNA
gttattccgaacgttc

SEQ ID NO: 28776 - DNA, 16 bp, synthetic construct
  misc_feature 1..16: note = synthetic [barcode part1]
  source 1..16: mol_type = other DNA
tgacttcaccggtatt

SEQ ID NO: 28777 - DNA, 16 bp, synthetic construct
  misc_feature 1..16: note = synthetic [barcode part1]
  source 1..16: mol_type = other DNA
gatatccgtaactgcg

SEQ ID NO: 28778 - DNA, 16 bp, synthetic construct
  misc_feature 1..16: note = synthetic [barcode part1]
  source 1..16: mol_type = other DNA
actcgaaccacttcgc

SEQ ID NO: 28779 - DNA, 16 bp, synthetic construct
  misc_feature 1..16: note = synthetic [barcode part1]
  source 1..16: mol_type = other DNA
gttaacaggtgcgtct

SEQ ID NO: 28780 - DNA, 16 bp, synthetic construct
  misc_feature 1..16: note = synthetic [barcode part1]
  source 1..16: mol_type = other DNA
aagagtagtctaacgc

SEQ ID NO: 28781 - DNA, 16 bp, synthetic construct
  misc_feature 1..16: note = synthetic [barcode part1]
  source 1..16: mol_type = other DNA
gactaggtcgcacaag

SEQ ID NO: 28782 - DNA, 16 bp, synthetic construct
  misc_feature 1..16: note = synthetic [barcode part1]
  source 1..16: mol_type = other DNA
gtggactatatccggt

SEQ ID NO: 28783 - DNA, 16 bp, synthetic construct
  misc_feature 1..16: note = synthetic [barcode part1]
  source 1..16: mol_type = other DNA
tgacttggaatcaccg

SEQ ID NO: 28784 - DNA, 16 bp, synthetic construct
  misc_feature 1..16: note = synthetic [barcode part1]
  source 1..16: mol_type = other DNA
tgaagttgccaaccgt

SEQ ID NO: 28785 - DNA, 16 bp, synthetic construct
  misc_feature 1..16: note = synthetic [barcode part1]
  source 1..16: mol_type = other DNA
cggccttcaatcacgt

SEQ ID NO: 28786 - DNA, 16 bp, synthetic construct
  misc_feature 1..16: note = synthetic [barcode part1]
  source 1..16: mol_type = other DNA
ttaatctctgcgcagt

SEQ ID NO: 28787 - DNA, 16 bp, synthetic construct
  misc_feature 1..16: note = synthetic [barcode part1]
  source 1..16: mol_type = other DNA
ttcggtcaatccttcc

SEQ ID NO: 28788 - DNA, 16 bp, synthetic construct
  misc_feature 1..16: note = synthetic [barcode part1]
  source 1..16: mol_type = other DNA
aagacaacttgagtgc

SEQ ID NO: 28789 - DNA, 16 bp, synthetic construct
  misc_feature 1..16: note = synthetic [barcode part1]
  source 1..16: mol_type = other DNA
gtctgtagtgcgattg

SEQ ID NO: 28790 - DNA, 16 bp, synthetic construct
  misc_feature 1..16: note = synthetic [barcode part1]
  source 1..16: mol_type = other DNA
cgatactctgcgatag

SEQ ID NO: 28791 - DNA, 16 bp, synthetic construct
  misc_feature 1..16: note = synthetic [barcode part1]
  source 1..16: mol_type = other DNA
gacactgtcaggactt

SEQ ID NO: 28792 - DNA, 16 bp, synthetic construct
  misc_feature 1..16: note = synthetic [barcode part1]
  source 1..16: mol_type = other DNA
gcgtgcacagtattac

SEQ ID NO: 28793 - DNA, 16 bp, synthetic construct
  misc_feature 1..16: note = synthetic [barcode part1]
  source 1..16: mol_type = other DNA
agaggtgcgagaatac

SEQ ID NO: 28794 - DNA, 16 bp, synthetic construct
  misc_feature 1..16: note = synthetic [barcode part1]
  source 1..16: mol_type = other DNA
cacaggatagttcaag

SEQ ID NO: 28795 - DNA, 16 bp, synthetic construct
  misc_feature 1..16: note = synthetic [barcode part1]
  source 1..16: mol_type = other DNA
cgatcgcggtagtaag

SEQ ID NO: 28796 - DNA, 16 bp, synthetic construct
  misc_feature 1..16: note = synthetic [barcode part1]
  source 1..16: mol_type = other DNA
gttcctcctgaagaag

SEQ ID NO: 28797 - DNA, 16 bp, synthetic construct
  misc_feature 1..16: note = synthetic [barcode part1]
  source 1..16: mol_type = other DNA
gcgttcgcactacttg

SEQ ID NO: 28798 - DNA, 16 bp, synthetic construct
  misc_feature 1..16: note = synthetic [barcode part1]
  source 1..16: mol_type = other DNA
aatacgagtgatccag

SEQ ID NO: 28799 - DNA, 16 bp, synthetic construct
  misc_feature 1..16: note = synthetic [barcode part1]
  source 1..16: mol_type = other DNA
tgtgcagatcctccgt

SEQ ID NO: 28800 - DNA, 16 bp, synthetic construct
  misc_feature 1..16: note = synthetic [barcode part1]
  source 1..16: mol_type = other DNA
agtgttgacgtgtacc

SEQ ID NO: 28801 - DNA, 16 bp, synthetic construct
  misc_feature 1..16: note = synthetic [barcode part1]
  source 1..16: mol_type = other DNA
agtcttgacggacgag

SEQ ID NO: 28802 - DNA, 16 bp, synthetic construct
  misc_feature 1..16: note = synthetic [barcode part1]
  source 1..16: mol_type = other DNA
acacagttgtgaccac

SEQ ID NO: 28803 - DNA, 16 bp, synthetic construct
  misc_feature 1..16: note = synthetic [barcode part1]
  source 1..16: mol_type = other DNA
gatagaacacagatcc

SEQ ID NO: 28804 - DNA, 16 bp, synthetic construct
  misc_feature 1..16: note = synthetic [barcode part1]
  source 1..16: mol_type = other DNA
actacactcttgtcag

SEQ ID NO: 28805 - DNA, 16 bp, synthetic construct
  misc_feature 1..16: note = synthetic [barcode part1]
  source 1..16: mol_type = other DNA
gcctacttgagtgaac

SEQ ID NO: 28806 - DNA, 16 bp, synthetic construct
  misc_feature 1..16: note = synthetic [barcode part1]
  source 1..16: mol_type = other DNA
atcgcgaagatctcgt

SEQ ID NO: 28807 - DNA, 16 bp, synthetic construct
  misc_feature 1..16: note = synthetic [barcode part1]
  source 1..16: mol_type = other DNA
tagttgaggtcctggt

SEQ ID NO: 28808 - DNA, 16 bp, synthetic construct
  misc_feature 1..16: note = synthetic [barcode part1]
  source 1..16: mol_type = other DNA
tacgtccttcagtggc

SEQ ID NO: 28809 - DNA, 16 bp, synthetic construct
  misc_feature 1..16: note = synthetic [barcode part1]
  source 1..16: mol_type = other DNA
gatcctctgcagactc

SEQ ID NO: 28810 - DNA, 16 bp, synthetic construct
  misc_feature 1..16: note = synthetic [barcode part1]
  source 1..16: mol_type = other DNA
gtccgagttattccgc

SEQ ID NO: 28811 - DNA, 16 bp, synthetic construct
  misc_feature 1..16: note = synthetic [barcode part1]
  source 1..16: mol_type = other DNA
cacactcctacacttc

SEQ ID NO: 28812 - DNA, 16 bp, synthetic construct
  misc_feature 1..16: note = synthetic [barcode part1]
  source 1..16: mol_type = other DNA
cctgtgtcgatccaac

SEQ ID NO: 28813 - DNA, 16 bp, synthetic construct
  misc_feature 1..16: note = synthetic [barcode part1]
  source 1..16: mol_type = other DNA
gcgtgatactacacgt

SEQ ID NO: 28814 - DNA, 16 bp, synthetic construct
  misc_feature 1..16: note = synthetic [barcode part1]
  source 1..16: mol_type = other DNA
cgttcactaccgcaac

SEQ ID NO: 28815 - DNA, 16 bp, synthetic construct
  misc_feature 1..16: note = synthetic [barcode part1]
  source 1..16: mol_type = other DNA
atagttgttggcctct

SEQ ID NO: 28816 - DNA, 16 bp, synthetic construct
  misc_feature 1..16: note = synthetic [barcode part1]
  source 1..16: mol_type = other DNA
aggtggaattctagac

SEQ ID NO: 28817 - DNA, 16 bp, synthetic construct
  misc_feature 1..16: note = synthetic [barcode part1]
  source 1..16: mol_type = other DNA
acggacctgattcctc

SEQ ID NO: 28818 - DNA, 16 bp, synthetic construct
  misc_feature 1..16: note = synthetic [barcode part1]
  source 1..16: mol_type = other DNA
acagactatatccggc

SEQ ID NO: 28819 - DNA, 16 bp, synthetic construct
  misc_feature 1..16: note = synthetic [barcode part1]
  source 1..16: mol_type = other DNA
aattgagtggaggacg

SEQ ID NO: 28820 - DNA, 16 bp, synthetic construct
  misc_feature 1..16: note = synthetic [barcode part1]
  source 1..16: mol_type = other DNA
gttactcaggcctatt

SEQ ID NO: 28821 - DNA, 16 bp, synthetic construct
  misc_feature 1..16: note = synthetic [barcode part1]
  source 1..16: mol_type = other DNA
accttacgcggtcgtt

SEQ ID NO: 28822 - DNA, 16 bp, synthetic construct
  misc_feature 1..16: note = synthetic [barcode part1]
  source 1..16: mol_type = other DNA
tgtccaccaaggtctc

SEQ ID NO: 28823 - DNA, 16 bp, synthetic construct
  misc_feature 1..16: note = synthetic [barcode part1]
  source 1..16: mol_type = other DNA
atagagttcgcctcag

SEQ ID NO: 28824 - DNA, 16 bp, synthetic construct
  misc_feature 1..16: note = synthetic [barcode part1]
  source 1..16: mol_type = other DNA
gcctcgtacctgaact

SEQ ID NO: 28825 - DNA, 16 bp, synthetic construct
  misc_feature 1..16: note = synthetic [barcode part1]
  source 1..16: mol_type = other DNA
tctctctccgattgac

SEQ ID NO: 28826 - DNA, 16 bp, synthetic construct
  misc_feature 1..16: note = synthetic [barcode part1]
  source 1..16: mol_type = other DNA
cgaccgataactgatc

SEQ ID NO: 28827 - DNA, 16 bp, synthetic construct
  misc_feature 1..16: note = synthetic [barcode part1]
  source 1..16: mol_type = other DNA
atcgacgaggccaagt

SEQ ID NO: 28828 - DNA, 16 bp, synthetic construct
  misc_feature 1..16: note = synthetic [barcode part1]
  source 1..16: mol_type = other DNA
aatcgcacacgattgc

SEQ ID NO: 28829 - DNA, 16 bp, synthetic construct
  misc_feature 1..16: note = synthetic [barcode part1]
  source 1..16: mol_type = other DNA
gaccaaccaaccagtt

SEQ ID NO: 28830 - DNA, 16 bp, synthetic construct
  misc_feature 1..16: note = synthetic [barcode part1]
  source 1..16: mol_type = other DNA
acagttgcagtgtacc

SEQ ID NO: 28831 - DNA, 16 bp, synthetic construct
  misc_feature 1..16: note = synthetic [barcode part1]
  source 1..16: mol_type = other DNA
gtcacggtcacaatac

SEQ ID NO: 28832 - DNA, 16 bp, synthetic construct
  misc_feature 1..16: note = synthetic [barcode part1]
  source 1..16: mol_type = other DNA
agacgtgaactcggtg

SEQ ID NO: 28833 - DNA, 16 bp, synthetic construct
  misc_feature 1..16: note = synthetic [barcode part1]
  source 1..16: mol_type = other DNA
gtaccagtgataaggt

SEQ ID NO: 28834 - DNA, 16 bp, synthetic construct
  misc_feature 1..16: note = synthetic [barcode part1]
  source 1..16: mol_type = other DNA
gaccttaatctacctg

SEQ ID NO: 28835 - DNA, 16 bp, synthetic construct
  misc_feature 1..16: note = synthetic [barcode part1]
  source 1..16: mol_type = other DNA
acagatcgtgtggttc

SEQ ID NO: 28836 - DNA, 16 bp, synthetic construct
  misc_feature 1..16: note = synthetic [barcode part1]
  source 1..16: mol_type = other DNA
gtgtcgccttactcag

SEQ ID NO: 28837 - DNA, 16 bp, synthetic construct
  misc_feature 1..16: note = synthetic [barcode part1]
  source 1..16: mol_type = other DNA
aacacggcacttctag

SEQ ID NO: 28838 - DNA, 16 bp, synthetic construct
  misc_feature 1..16: note = synthetic [barcode part1]
  source 1..16: mol_type = other DNA
gtcacaagtggataac

SEQ ID NO: 28839 - DNA, 16 bp, synthetic construct
  misc_feature 1..16: note = synthetic [barcode part1]
  source 1..16: mol_type = other DNA
gtgttagtctccggtc

SEQ ID NO: 28840 - DNA, 16 bp, synthetic construct
  misc_feature 1..16: note = synthetic [barcode part1]
  source 1..16: mol_type = other DNA
cctaccaacgtaattc

SEQ ID NO: 28841 - DNA, 16 bp, synthetic construct
  misc_feature 1..16: note = synthetic [barcode part1]
  source 1..16: mol_type = other DNA
gtgacacacgtgtgtt

SEQ ID NO: 28842 - DNA, 16 bp, synthetic construct
  misc_feature 1..16: note = synthetic [barcode part1]
  source 1..16: mol_type = other DNA
attaagttctgcgtcc

SEQ ID NO: 28843 - DNA, 16 bp, synthetic construct
  misc_feature 1..16: note = synthetic [barcode part1]
  source 1..16: mol_type = other DNA
gtactgtaggcaggtg

SEQ ID NO: 28844 - DNA, 16 bp, synthetic construct
  misc_feature 1..16: note = synthetic [barcode part1]
  source 1..16: mol_type = other DNA
cgttcggagttatacg

SEQ ID NO: 28845 - DNA, 16 bp, synthetic construct
  misc_feature 1..16: note = synthetic [barcode part1]
  source 1..16: mol_type = other DNA
gtggattccaggtatc

SEQ ID NO: 28846 - DNA, 16 bp, synthetic construct
  misc_feature 1..16: note = synthetic [barcode part1]
  source 1..16: mol_type = other DNA
ttctgtaactaccgac

SEQ ID NO: 28847 - DNA, 16 bp, synthetic construct
  misc_feature 1..16: note = synthetic [barcode part1]
  source 1..16: mol_type = other DNA
acactacgatactgcg

SEQ ID NO: 28848 - DNA, 16 bp, synthetic construct
  misc_feature 1..16: note = synthetic [barcode part1]
  source 1..16: mol_type = other DNA
gcgcctcactgttaac

SEQ ID NO: 28849 - DNA, 16 bp, synthetic construct
  misc_feature 1..16: note = synthetic [barcode part1]
  source 1..16: mol_type = other DNA
cacctacctacttgtc

SEQ ID NO: 28850 - DNA, 16 bp, synthetic construct
  misc_feature 1..16: note = synthetic [barcode part1]
  source 1..16: mol_type = other DNA
tcgttaggcgtaggag

SEQ ID NO: 28851 - DNA, 16 bp, synthetic construct
  misc_feature 1..16: note = synthetic [barcode part1]
  source 1..16: mol_type = other DNA
tacgacttcgacacag

SEQ ID NO: 28852 - DNA, 16 bp, synthetic construct
  misc_feature 1..16: note = synthetic [barcode part1]
  source 1..16: mol_type = other DNA
tctgaactctagttcg

SEQ ID NO: 28853 - DNA, 16 bp, synthetic construct
  misc_feature 1..16: note = synthetic [barcode part1]
  source 1..16: mol_type = other DNA
cgagaggcacagttgt

SEQ ID NO: 28854 - DNA, 16 bp, synthetic construct
  misc_feature 1..16: note = synthetic [barcode part1]
  source 1..16: mol_type = other DNA
ataggagagtccgatt

SEQ ID NO: 28855 - DNA, 16 bp, synthetic construct
  misc_feature 1..16: note = synthetic [barcode part1]
  source 1..16: mol_type = other DNA
atcactctcactccgt

SEQ ID NO: 28856 - DNA, 16 bp, synthetic construct
  misc_feature 1..16: note = synthetic [barcode part1]
  source 1..16: mol_type = other DNA
cggcaacaattaccac

SEQ ID NO: 28857 - DNA, 16 bp, synthetic construct
  misc_feature 1..16: note = synthetic [barcode part1]
  source 1..16: mol_type = other DNA
atctaccggtgccact

SEQ ID NO: 28858 - DNA, 16 bp, synthetic construct
  misc_feature 1..16: note = synthetic [barcode part1]
  source 1..16: mol_type = other DNA
tggtgagtgaggtaag

SEQ ID NO: 28859 - DNA, 16 bp, synthetic construct
  misc_feature 1..16: note = synthetic [barcode part1]
  source 1..16: mol_type = other DNA
gactgcgactaatacc

SEQ ID NO: 28860 - DNA, 16 bp, synthetic construct
  misc_feature 1..16: note = synthetic [barcode part1]
  source 1..16: mol_type = other DNA
tagtgcgttgacgtgt

SEQ ID NO: 28861 - DNA, 16 bp, synthetic construct
  misc_feature 1..16: note = synthetic [barcode part1]
  source 1..16: mol_type = other DNA
gattcttggccacgtc

SEQ ID NO: 28862 - DNA, 16 bp, synthetic construct
  misc_feature 1..16: note = synthetic [barcode part1]
  source 1..16: mol_type = other DNA
gtgtatacggcgttgt

SEQ ID NO: 28863 - DNA, 16 bp, synthetic construct
  misc_feature 1..16: note = synthetic [barcode part1]
  source 1..16: mol_type = other DNA
gtgttctgtcaggcct

SEQ ID NO: 28864 - DNA, 16 bp, synthetic construct
  misc_feature 1..16: note = synthetic [barcode part1]
  source 1..16: mol_type = other DNA
tgtagacacgaactcc

SEQ ID NO: 28865 - DNA, 16 bp, synthetic construct
  misc_feature 1..16: note = synthetic [barcode part1]
  source 1..16: mol_type = other DNA
ccaataaggtacaggt

SEQ ID NO: 28866 - DNA, 16 bp, synthetic construct
  misc_feature 1..16: note = synthetic [barcode part1]
  source 1..16: mol_type = other DNA
atccgtacgatctccg

SEQ ID NO: 28867 - DNA, 16 bp, synthetic construct
  misc_feature 1..16: note = synthetic [barcode part1]
  source 1..16: mol_type = other DNA
tggtactgaacaggcg

SEQ ID NO: 28868 - DNA, 16 bp, synthetic construct
  misc_feature 1..16: note = synthetic [barcode part1]
  source 1..16: mol_type = other DNA
aggagtgcgaagatac

SEQ ID NO: 28869 - DNA, 16 bp, synthetic construct
  misc_feature 1..16: note = synthetic [barcode part1]
  source 1..16: mol_type = other DNA
gactctaggtatcacg

SEQ ID NO: 28870 - DNA, 16 bp, synthetic construct
  misc_feature 1..16: note = synthetic [barcode part1]
  source 1..16: mol_type = other DNA
cgtcttatactcaggt

SEQ ID NO: 28871 - DNA, 16 bp, synthetic construct
  misc_feature 1..16: note = synthetic [barcode part1]
  source 1..16: mol_type = other DNA
ccaagttaatccggtg

SEQ ID NO: 28872 - DNA, 16 bp, synthetic construct
  misc_feature 1..16: note = synthetic [barcode part1]
  source 1..16: mol_type = other DNA
acctattagtaccacc

SEQ ID NO: 28873 - DNA, 16 bp, synthetic construct
  misc_feature 1..16: note = synthetic [barcode part1]
  source 1..16: mol_type = other DNA
cctgtctacctatctg

SEQ ID NO: 28874 - DNA, 16 bp, synthetic construct
  misc_feature 1..16: note = synthetic [barcode part1]
  source 1..16: mol_type = other DNA
gcgataccttccttct

SEQ ID NO: 28875 - DNA, 16 bp, synthetic construct
  misc_feature 1..16: note = synthetic [barcode part1]
  source 1..16: mol_type = other DNA
caataacagaggcact

SEQ ID NO: 28876 - DNA, 16 bp, synthetic construct
  misc_feature 1..16: note = synthetic [barcode part1]
  source 1..16: mol_type = other DNA
gccacggatagtatct

SEQ ID NO: 28877 - DNA, 16 bp, synthetic construct
  misc_feature 1..16: note = synthetic [barcode part1]
  source 1..16: mol_type = other DNA
acgaatcaaggatcac

SEQ ID NO: 28878 - DNA, 16 bp, synthetic construct
  misc_feature 1..16: note = synthetic [barcode part1]
  source 1..16: mol_type = other DNA
tacacagacgagatac

SEQ ID NO: 28879 - DNA, 16 bp, synthetic construct
  misc_feature 1..16: note = synthetic [barcode part1]
  source 1..16: mol_type = other DNA
tcaacgagaacacggc

SEQ ID NO: 28880 - DNA, 16 bp, synthetic construct
  misc_feature 1..16: note = synthetic [barcode part1]
  source 1..16: mol_type = other DNA
gcgtaaggcagttcag

SEQ ID NO: 28881 - DNA, 16 bp, synthetic construct
  misc_feature 1..16: note = synthetic [barcode part1]
  source 1..16: mol_type = other DNA
ttccgcgttggtgact

SEQ ID NO: 28882 - DNA, 16 bp, synthetic construct
  misc_feature 1..16: note = synthetic [barcode part1]
  source 1..16: mol_type = other DNA
ttctctaaggtgtctg

SEQ ID NO: 28883 - DNA, 16 bp, synthetic construct
  misc_feature 1..16: note = synthetic [barcode part1]
  source 1..16: mol_type = other DNA
gaagagtcgaattcgt

SEQ ID NO: 28884 - DNA, 16 bp, synthetic construct
  misc_feature 1..16: note = synthetic [barcode part1]
  source 1..16: mol_type = other DNA
gagacggtctgttgtt

SEQ ID NO: 28885 - DNA, 16 bp, synthetic construct
  misc_feature 1..16: note = synthetic [barcode part1]
  source 1..16: mol_type = other DNA
atccgtcaacgtcacc

SEQ ID NO: 28886 - DNA, 16 bp, synthetic construct
  misc_feature 1..16: note = synthetic [barcode part1]
  source 1..16: mol_type = other DNA
ccgtaggtactaacac

SEQ ID NO: 28887 - DNA, 16 bp, synthetic construct
  misc_feature 1..16: note = synthetic [barcode part1]
  source 1..16: mol_type = other DNA
caggccttatctagag

SEQ ID NO: 28888 - DNA, 16 bp, synthetic construct
  misc_feature 1..16: note = synthetic [barcode part1]
  source 1..16: mol_type = other DNA
tacttattcacggcgt

SEQ ID NO: 28889 - DNA, 16 bp, synthetic construct
  misc_feature 1..16: note = synthetic [barcode part1]
  source 1..16: mol_type = other DNA
gttaggtgcaatccac

SEQ ID NO: 28890 - DNA, 16 bp, synthetic construct
  misc_feature 1..16: note = synthetic [barcode part1]
  source 1..16: mol_type = other DNA
gtacactctactactg

SEQ ID NO: 28891 - DNA, 16 bp, synthetic construct
  misc_feature 1..16: note = synthetic [barcode part1]
  source 1..16: mol_type = other DNA
ttctgagtgagacctg

SEQ ID NO: 28892 - DNA, 16 bp, synthetic construct
  misc_feature 1..16: note = synthetic [barcode part1]
  source 1..16: mol_type = other DNA
ccactattccgtcact

SEQ ID NO: 28893 - DNA, 16 bp, synthetic construct
  misc_feature 1..16: note = synthetic [barcode part1]
  source 1..16: mol_type = other DNA
tcacaagacttaggcc

SEQ ID NO: 28894 - DNA, 16 bp, synthetic construct
  misc_feature 1..16: note = synthetic [barcode part1]
  source 1..16: mol_type = other DNA
tcaacaggacaactcc

SEQ ID NO: 28895 - DNA, 16 bp, synthetic construct
  misc_feature 1..16: note = synthetic [barcode part1]
  source 1..16: mol_type = other DNA
ccactgtagtatccgc

SEQ ID NO: 28896 - DNA, 16 bp, synthetic construct
  misc_feature 1..16: note = synthetic [barcode part1]
  source 1..16: mol_type = other DNA
cgatagttcaacgacc

SEQ ID NO: 28897 - DNA, 16 bp, synthetic construct
  misc_feature 1..16: note = synthetic [barcode part1]
  source 1..16: mol_type = other DNA
cagttcaggatcgttg

SEQ ID NO: 28898 - DNA, 16 bp, synthetic construct
  misc_feature 1..16: note = synthetic [barcode part1]
  source 1..16: mol_type = other DNA
gcacaccttgttgtcg

SEQ ID NO: 28899 - DNA, 16 bp, synthetic construct
  misc_feature 1..16: note = synthetic [barcode part1]
  source 1..16: mol_type = other DNA
accacttccacagatt

SEQ ID NO: 28900 - DNA, 16 bp, synthetic construct
  misc_feature 1..16: note = synthetic [barcode part1]
  source 1..16: mol_type = other DNA
tgagttctcgtgaacg

SEQ ID NO: 28901 - DNA, 16 bp, synthetic construct
  misc_feature 1..16: note = synthetic [barcode part1]
  source 1..16: mol_type = other DNA
aatcctgccgtagtag

SEQ ID NO: 28902 - DNA, 16 bp, synthetic construct
  misc_feature 1..16: note = synthetic [barcode part1]
  source 1..16: mol_type = other DNA
gttacagagtgttgcc

SEQ ID NO: 28903 - DNA, 16 bp, synthetic construct
  misc_feature 1..16: note = synthetic [barcode part1]
  source 1..16: mol_type = other DNA
tgatcacagtacaccg

SEQ ID NO: 28904 - DNA, 16 bp, synthetic construct
  misc_feature 1..16: note = synthetic [barcode part1]
  source 1..16: mol_type = other DNA
tcgaaggatcactctg

SEQ ID NO: 28905 - DNA, 16 bp, synthetic construct
  misc_feature 1..16: note = synthetic [barcode part1]
  source 1..16: mol_type = other DNA
tcgttagaggatacag

SEQ ID NO: 28906 - DNA, 16 bp, synthetic construct
  misc_feature 1..16: note = synthetic [barcode part1]
  source 1..16: mol_type = other DNA
gataagactagacacc

SEQ ID NO: 28907 - DNA, 16 bp, synthetic construct
  misc_feature 1..16: note = synthetic [barcode part1]
  source 1..16: mol_type = other DNA
tgtgtactgtgacacg

SEQ ID NO: 28908 - DNA, 16 bp, synthetic construct
  misc_feature 1..16: note = synthetic [barcode part1]
  source 1..16: mol_type = other DNA
tctcgaccgtgttgac

SEQ ID NO: 28909 - DNA, 16 bp, synthetic construct
  misc_feature 1..16: note = synthetic [barcode part1]
  source 1..16: mol_type = other DNA
tcactcaacaacacct

SEQ ID NO: 28910 - DNA, 16 bp, synthetic construct
  misc_feature 1..16: note = synthetic [barcode part1]
  source 1..16: mol_type = other DNA
tatcggtctctctaag

SEQ ID NO: 28911 - DNA, 16 bp, synthetic construct
  misc_feature 1..16: note = synthetic [barcode part1]
  source 1..16: mol_type = other DNA
agaagttgcacactag

SEQ ID NO: 28912 - DNA, 16 bp, synthetic construct
  misc_feature 1..16: note = synthetic [barcode part1]
  source 1..16: mol_type = other DNA
agatccgacgaggtgt

SEQ ID NO: 28913 - DNA, 16 bp, synthetic construct
  misc_feature 1..16: note = synthetic [barcode part1]
  source 1..16: mol_type = other DNA
tcctagaggtgaatag

SEQ ID NO: 28914 - DNA, 16 bp, synthetic construct
  misc_feature 1..16: note = synthetic [barcode part1]
  source 1..16: mol_type = other DNA
gcgatagaagtcagag

SEQ ID NO: 28915 - DNA, 16 bp, synthetic construct
  misc_feature 1..16: note = synthetic [barcode part1]
  source 1..16: mol_type = other DNA
gtacaacaagaggttc

SEQ ID NO: 28916 - DNA, 16 bp, synthetic construct
  misc_feature 1..16: note = synthetic [barcode part1]
  source 1..16: mol_type = other DNA
caactgtgacgataag

SEQ ID NO: 28917 - DNA, 16 bp, synthetic construct
  misc_feature 1..16: note = synthetic [barcode part1]
  source 1..16: mol_type = other DNA
agtaattctgacggcc

SEQ ID NO: 28918 - DNA, 16 bp, synthetic construct
  misc_feature 1..16: note = synthetic [barcode part1]
  source 1..16: mol_type = other DNA
gcggaggttaacagtc

SEQ ID NO: 28919 - DNA, 16 bp, synthetic construct
  misc_feature 1..16: note = synthetic [barcode part1]
  source 1..16: mol_type = other DNA
gttacgtaccaagaag

SEQ ID NO: 28920 - DNA, 16 bp, synthetic construct
  misc_feature 1..16: note = synthetic [barcode part1]
  source 1..16: mol_type = other DNA
tcgtagacgagttcac

SEQ ID NO: 28921 - DNA, 16 bp, synthetic construct
  misc_feature 1..16: note = synthetic [barcode part1]
  source 1..16: mol_type = other DNA
ttgcaccagacgtaac

SEQ ID NO: 28922 - DNA, 16 bp, synthetic construct
  misc_feature 1..16: note = synthetic [barcode part1]
  source 1..16: mol_type = other DNA
ttgagactggacaggc

SEQ ID NO: 28923 - DNA, 16 bp, synthetic construct
  misc_feature 1..16: note = synthetic [barcode part1]
  source 1..16: mol_type = other DNA
cgttaagatcctcgcc

SEQ ID NO: 28924 - DNA, 16 bp, synthetic construct
  misc_feature 1..16: note = synthetic [barcode part1]
  source 1..16: mol_type = other DNA
gacaatccacgaaggc

SEQ ID NO: 28925 - DNA, 16 bp, synthetic construct
  misc_feature 1..16: note = synthetic [barcode part1]
  source 1..16: mol_type = other DNA
tattcaccaggcgaac

SEQ ID NO: 28926 - DNA, 16 bp, synthetic construct
  misc_feature 1..16: note = synthetic [barcode part1]
  source 1..16: mol_type = other DNA
gattgtggttgcgtac

SEQ ID NO: 28927 - DNA, 16 bp, synthetic construct
  misc_feature 1..16: note = synthetic [barcode part1]
  source 1..16: mol_type = other DNA
cgccgagataggaact

SEQ ID NO: 28928 - DNA, 16 bp, synthetic construct
  misc_feature 1..16: note = synthetic [barcode part1]
  source 1..16: mol_type = other DNA
cgaagacacttgatag

SEQ ID NO: 28929 - DNA, 16 bp, synthetic construct
  misc_feature 1..16: note = synthetic [barcode part1]
  source 1..16: mol_type = other DNA
ttcaccagatctacgt

SEQ ID NO: 28930 - DNA, 16 bp, synthetic construct
  misc_feature 1..16: note = synthetic [barcode part1]
  source 1..16: mol_type = other DNA
gcacagtatcgtacgt

SEQ ID NO: 28931 - DNA, 16 bp, synthetic construct
  misc_feature 1..16: note = synthetic [barcode part1]
  source 1..16: mol_type = other DNA
ttaccagattgccgag

SEQ ID NO: 28932 - DNA, 16 bp, synthetic construct
  misc_feature 1..16: note = synthetic [barcode part1]
  source 1..16: mol_type = other DNA
aagtaggcgtctacct

SEQ ID NO: 28933 - DNA, 16 bp, synthetic construct
  misc_feature 1..16: note = synthetic [barcode part1]
  source 1..16: mol_type = other DNA
gtgcagattgttgaag

SEQ ID NO: 28934 - DNA, 16 bp, synthetic construct
  misc_feature 1..16: note = synthetic [barcode part1]
  source 1..16: mol_type = other DNA
cggacaagtggataag

SEQ ID NO: 28935 - DNA, 16 bp, synthetic construct
  misc_feature 1..16: note = synthetic [barcode part1]
  source 1..16: mol_type = other DNA
aattcggtgtaccttc

SEQ ID NO: 28936 - DNA, 16 bp, synthetic construct
  misc_feature 1..16: note = synthetic [barcode part1]
  source 1..16: mol_type = other DNA
aataatcaggaacgcc

SEQ ID NO: 28937 - DNA, 16 bp, synthetic construct
  misc_feature 1..16: note = synthetic [barcode part1]
  source 1..16: mol_type = other DNA
aaccggactcaatctg

SEQ ID NO: 28938 - DNA, 16 bp, synthetic construct
  misc_feature 1..16: note = synthetic [barcode part1]
  source 1..16: mol_type = other DNA
gagtgtggttggactg

SEQ ID NO: 28939 - DNA, 16 bp, synthetic construct
  misc_feature 1..16: note = synthetic [barcode part1]
  source 1..16: mol_type = other DNA
aactacagtcgcacgt

SEQ ID NO: 28940 - DNA, 16 bp, synthetic construct
  misc_feature 1..16: note = synthetic [barcode part1]
  source 1..16: mol_type = other DNA
tgaagtacgagttcag

SEQ ID NO: 28941 - DNA, 16 bp, synthetic construct
  misc_feature 1..16: note = synthetic [barcode part1]
  source 1..16: mol_type = other DNA
gcgagttgtatctggt

SEQ ID NO: 28942 - DNA, 16 bp, synthetic construct
  misc_feature 1..16: note = synthetic [barcode part1]
  source 1..16: mol_type = other DNA
acaagataggcgacag

SEQ ID NO: 28943 - DNA, 16 bp, synthetic construct
  misc_feature 1..16: note = synthetic [barcode part1]
  source 1..16: mol_type = other DNA
gaacagatactgcagt

SEQ ID NO: 28944 - DNA, 16 bp, synthetic construct
  misc_feature 1..16: note = synthetic [barcode part1]
  source 1..16: mol_type = other DNA
ttctgtggtcactagt

SEQ ID NO: 28945 - DNA, 16 bp, synthetic construct
  misc_feature 1..16: note = synthetic [barcode part1]
  source 1..16: mol_type = other DNA
tagttatccgccgtcg

SEQ ID NO: 28946 - DNA, 16 bp, synthetic construct
  misc_feature 1..16: note = synthetic [barcode part1]
  source 1..16: mol_type = other DNA
gtactacgttccgaag

SEQ ID NO: 28947 - DNA, 16 bp, synthetic construct
  misc_feature 1..16: note = synthetic [barcode part1]
  source 1..16: mol_type = other DNA
attctggaccgactag

SEQ ID NO: 28948 - DNA, 16 bp, synthetic construct
  misc_feature 1..16: note = synthetic [barcode part1]
  source 1..16: mol_type = other DNA
actggatattcctacc

SEQ ID NO: 28949 - DNA, 16 bp, synthetic construct
  misc_feature 1..16: note = synthetic [barcode part1]
  source 1..16: mol_type = other DNA
acttattacggtgcct

SEQ ID NO: 28950 - DNA, 16 bp, synthetic construct
  misc_feature 1..16: note = synthetic [barcode part1]
  source 1..16: mol_type = other DNA
tgcaagtactccgtcc

SEQ ID NO: 28951 - DNA, 16 bp, synthetic construct
  misc_feature 1..16: note = synthetic [barcode part1]
  source 1..16: mol_type = other DNA
cggaatcagagagagt

SEQ ID NO: 28952 - DNA, 16 bp, synthetic construct
  misc_feature 1..16: note = synthetic [barcode part1]
  source 1..16: mol_type = other DNA
gacgtatctctctggc

SEQ ID NO: 28953 - DNA, 16 bp, synthetic construct
  misc_feature 1..16: note = synthetic [barcode part1]
  source 1..16: mol_type = other DNA
acgttagtctctggcc

SEQ ID NO: 28954 - DNA, 16 bp, synthetic construct
  misc_feature 1..16: note = synthetic [barcode part1]
  source 1..16: mol_type = other DNA
cacagagatcactaag

SEQ ID NO: 28955 - DNA, 16 bp, synthetic construct
  misc_feature 1..16: note = synthetic [barcode part1]
  source 1..16: mol_type = other DNA
cgcagtggaacagatc

SEQ ID NO: 28956 - DNA, 16 bp, synthetic construct
  misc_feature 1..16: note = synthetic [barcode part1]
  source 1..16: mol_type = other DNA
tgacacagtacgatcc

SEQ ID NO: 28957 - DNA, 16 bp, synthetic construct
  misc_feature 1..16: note = synthetic [barcode part1]
  source 1..16: mol_type = other DNA
ttcaggacggttaacc

SEQ ID NO: 28958 - DNA, 16 bp, synthetic construct
  misc_feature 1..16: note = synthetic [barcode part1]
  source 1..16: mol_type = other DNA
attattctccggacgt

SEQ ID NO: 28959 - DNA, 16 bp, synthetic construct
  misc_feature 1..16: note = synthetic [barcode part1]
  source 1..16: mol_type = other DNA
gcaaccgttccttgac

SEQ ID NO: 28960 - DNA, 16 bp, synthetic construct
  misc_feature 1..16: note = synthetic [barcode part1]
  source 1..16: mol_type = other DNA
cactatcttgtgcagt

SEQ ID NO: 28961 - DNA, 16 bp, synthetic construct
  misc_feature 1..16: note = synthetic [barcode part1]
  source 1..16: mol_type = other DNA
cctaaccagtctcttc

SEQ ID NO: 28962 - DNA, 16 bp, synthetic construct
  misc_feature 1..16: note = synthetic [barcode part1]
  source 1..16: mol_type = other DNA
acactaggactcacac

SEQ ID NO: 28963 - DNA, 16 bp, synthetic construct
  misc_feature 1..16: note = synthetic [barcode part1]
  source 1..16: mol_type = other DNA
gtgtggtactgacgtt

SEQ ID NO: 28964 - DNA, 16 bp, synthetic construct
  misc_feature 1..16: note = synthetic [barcode part1]
  source 1..16: mol_type = other DNA
aacacgtcacagtcac

SEQ ID NO: 28965 - DNA, 16 bp, synthetic construct
  misc_feature 1..16: note = synthetic [barcode part1]
  source 1..16: mol_type = other DNA
ttcttccgagatcctc

SEQ ID NO: 28966 - DNA, 16 bp, synthetic construct
  misc_feature 1..16: note = synthetic [barcode part1]
  source 1..16: mol_type = other DNA
aatctaagtgcaggac

SEQ ID NO: 28967 - DNA, 16 bp, synthetic construct
  misc_feature 1..16: note = synthetic [barcode part1]
  source 1..16: mol_type = other DNA
ttgttctgtacggttg

SEQ ID NO: 28968 - DNA, 16 bp, synthetic construct
  misc_feature 1..16: note = synthetic [barcode part1]
  source 1..16: mol_type = other DNA
ttaccgaccttatacg

SEQ ID NO: 28969 - DNA, 16 bp, synthetic construct
  misc_feature 1..16: note = synthetic [barcode part1]
  source 1..16: mol_type = other DNA
gacagactaggatccg

SEQ ID NO: 28970 - DNA, 16 bp, synthetic construct
  misc_feature 1..16: note = synthetic [barcode part1]
  source 1..16: mol_type = other DNA
gttagactaggtcacc

SEQ ID NO: 28971 - DNA, 16 bp, synthetic construct
  misc_feature 1..16: note = synthetic [barcode part1]
  source 1..16: mol_type = other DNA
caatccttggccgtgt

SEQ ID NO: 28972 - DNA, 16 bp, synthetic construct
  misc_feature 1..16: note = synthetic [barcode part1]
  source 1..16: mol_type = other DNA
gttctcctcttctgag

SEQ ID NO: 28973 - DNA, 16 bp, synthetic construct
  misc_feature 1..16: note = synthetic [barcode part1]
  source 1..16: mol_type = other DNA
gcgatcgagtctcttc

SEQ ID NO: 28974 - DNA, 16 bp, synthetic construct
  misc_feature 1..16: note = synthetic [barcode part1]
  source 1..16: mol_type = other DNA
tggttacggattgaag

SEQ ID NO: 28975 - DNA, 16 bp, synthetic construct
  misc_feature 1..16: note = synthetic [barcode part1]
  source 1..16: mol_type = other DNA
agttggtgttgcagtc

SEQ ID NO: 28976 - DNA, 16 bp, synthetic construct
  misc_feature 1..16: note = synthetic [barcode part1]
  source 1..16: mol_type = other DNA
aggacacaccactgag

SEQ ID NO: 28977 - DNA, 16 bp, synthetic construct
  misc_feature 1..16: note = synthetic [barcode part1]
  source 1..16: mol_type = other DNA
gtccactcgttacgac

SEQ ID NO: 28978 - DNA, 16 bp, synthetic construct
  misc_feature 1..16: note = synthetic [barcode part1]
  source 1..16: mol_type = other DNA
ccgagtacggatatct

SEQ ID NO: 28979 - DNA, 16 bp, synthetic construct
  misc_feature 1..16: note = synthetic [barcode part1]
  source 1..16: mol_type = other DNA
tccttgaatcacacgt

SEQ ID NO: 28980 - DNA, 16 bp, synthetic construct
  misc_feature 1..16: note = synthetic [barcode part1]
  source 1..16: mol_type = other DNA
tcgcagaggtagtggt

SEQ ID NO: 28981 - DNA, 16 bp, synthetic construct
  misc_feature 1..16: note = synthetic [barcode part1]
  source 1..16: mol_type = other DNA
gatatccacaaggtag

SEQ ID NO: 28982 - DNA, 16 bp, synthetic construct
  misc_feature 1..16: note = synthetic [barcode part1]
  source 1..16: mol_type = other DNA
aaggtctacctacttc

SEQ ID NO: 28983 - DNA, 16 bp, synthetic construct
  misc_feature 1..16: note = synthetic [barcode part1]
  source 1..16: mol_type = other DNA
gtgtactgcctcctag

SEQ ID NO: 28984 - DNA, 16 bp, synthetic construct
  misc_feature 1..16: note = synthetic [barcode part1]
  source 1..16: mol_type = other DNA
agtagagagaggtcgt

SEQ ID NO: 28985 - DNA, 16 bp, synthetic construct
  misc_feature 1..16: note = synthetic [barcode part1]
  source 1..16: mol_type = other DNA
ttcctaaccgagagac

SEQ ID NO: 28986 - DNA, 16 bp, synthetic construct
  misc_feature 1..16: note = synthetic [barcode part1]
  source 1..16: mol_type = other DNA
cgcaagaggttcaacg

SEQ ID NO: 28987 - DNA, 16 bp, synthetic construct
  misc_feature 1..16: note = synthetic [barcode part1]
  source 1..16: mol_type = other DNA
tcggtggttatacttc

SEQ ID NO: 28988 - DNA, 16 bp, synthetic construct
  misc_feature 1..16: note = synthetic [barcode part1]
  source 1..16: mol_type = other DNA
gttactctaaggcggt

SEQ ID NO: 28989 - DNA, 16 bp, synthetic construct
  misc_feature 1..16: note = synthetic [barcode part1]
  source 1..16: mol_type = other DNA
tcgtagaggacacttc

SEQ ID NO: 28990 - DNA, 16 bp, synthetic construct
  misc_feature 1..16: note = synthetic [barcode part1]
  source 1..16: mol_type = other DNA
cctatacggtcgtcgt

SEQ ID NO: 28991 - DNA, 16 bp, synthetic construct
  misc_feature 1..16: note = synthetic [barcode part1]
  source 1..16: mol_type = other DNA
tgtcgttgacgtgcct

SEQ ID NO: 28992 - DNA, 16 bp, synthetic construct
  misc_feature 1..16: note = synthetic [barcode part1]
  source 1..16: mol_type = other DNA
taggattgtcgcgact

SEQ ID NO: 28993 - DNA, 16 bp, synthetic construct
  misc_feature 1..16: note = synthetic [barcode part1]
  source 1..16: mol_type = other DNA
tagttgcggacacttg

SEQ ID NO: 28994 - DNA, 16 bp, synthetic construct
  misc_feature 1..16: note = synthetic [barcode part1]
  source 1..16: mol_type = other DNA
actacagtatcgcgac

SEQ ID NO: 28995 - DNA, 16 bp, synthetic construct
  misc_feature 1..16: note = synthetic [barcode part1]
  source 1..16: mol_type = other DNA
ttccgtaagtccagtt

SEQ ID NO: 28996 - DNA, 16 bp, synthetic construct
  misc_feature 1..16: note = synthetic [barcode part1]
  source 1..16: mol_type = other DNA
ccagtatctaatctcg

SEQ ID NO: 28997 - DNA, 16 bp, synthetic construct
  misc_feature 1..16: note = synthetic [barcode part1]
  source 1..16: mol_type = other DNA
cctagtaagtagtccg

SEQ ID NO: 28998 - DNA, 16 bp, synthetic construct
  misc_feature 1..16: note = synthetic [barcode part1]
  source 1..16: mol_type = other DNA
gttgatcggttgatcg

SEQ ID NO: 28999 - DNA, 16 bp, synthetic construct
  misc_feature 1..16: note = synthetic [barcode part1]
  source 1..16: mol_type = other DNA
atcctgccaagttcgc

SEQ ID NO: 29000 - DNA, 16 bp, synthetic construct
  misc_feature 1..16: note = synthetic [barcode part1]
  source 1..16: mol_type = other DNA
aacgtgccttcggtct

SEQ ID NO: 29001 - DNA, 16 bp, synthetic construct
  misc_feature 1..16: note = synthetic [barcode part1]
  source 1..16: mol_type = other DNA
cctactgtcttcaacc

SEQ ID NO: 29002 - DNA, 16 bp, synthetic construct
  misc_feature 1..16: note = synthetic [barcode part1]
  source 1..16: mol_type = other DNA
actccaactgatcgag

SEQ ID NO: 29003 - DNA, 16 bp, synthetic construct
  misc_feature 1..16: note = synthetic [barcode part1]
  source 1..16: mol_type = other DNA
tgcgtgacgaagaatt

SEQ ID NO: 29004 - DNA, 16 bp, synthetic construct
  misc_feature 1..16: note = synthetic [barcode part1]
  source 1..16: mol_type = other DNA
tgtgcctcttagtaac

SEQ ID NO: 29005 - DNA, 16 bp, synthetic construct
  misc_feature 1..16: note = synthetic [barcode part1]
  source 1..16: mol_type = other DNA
caactggaacttcggt

SEQ ID NO: 29006 - DNA, 16 bp, synthetic construct
  misc_feature 1..16: note = synthetic [barcode part1]
  source 1..16: mol_type = other DNA
tgagtgcagttgcgtt

SEQ ID NO: 29007 - DNA, 16 bp, synthetic construct
  misc_feature 1..16: note = synthetic [barcode part1]
  source 1..16: mol_type = other DNA
gcggaattcgtaggtg

SEQ ID NO: 29008 - DNA, 16 bp, synthetic construct
  misc_feature 1..16: note = synthetic [barcode part1]
  source 1..16: mol_type = other DNA
agatcgcacagaagtt

SEQ ID NO: 29009 - DNA, 16 bp, synthetic construct
  misc_feature 1..16: note = synthetic [barcode part1]
  source 1..16: mol_type = other DNA
tacgtcacacacaacg

SEQ ID NO: 29010 - DNA, 16 bp, synthetic construct
  misc_feature 1..16: note = synthetic [barcode part1]
  source 1..16: mol_type = other DNA
tcgccagaactactag

SEQ ID NO: 29011 - DNA, 16 bp, synthetic construct
  misc_feature 1..16: note = synthetic [barcode part1]
  source 1..16: mol_type = other DNA
tgatatacctccggcc

SEQ ID NO: 29012 - DNA, 16 bp, synthetic construct
  misc_feature 1..16: note = synthetic [barcode part1]
  source 1..16: mol_type = other DNA
aacacgcgaccagagt

SEQ ID NO: 29013 - DNA, 16 bp, synthetic construct
  misc_feature 1..16: note = synthetic [barcode part1]
  source 1..16: mol_type = other DNA
taaccagtgcggtatc

SEQ ID NO: 29014 - DNA, 16 bp, synthetic construct
  misc_feature 1..16: note = synthetic [barcode part1]
  source 1..16: mol_type = other DNA
cactgatagagagttg

SEQ ID NO: 29015 - DNA, 16 bp, synthetic construct
  misc_feature 1..16: note = synthetic [barcode part1]
  source 1..16: mol_type = other DNA
ttcgattgcaccgacc

SEQ ID NO: 29016 - DNA, 16 bp, synthetic construct
  misc_feature 1..16: note = synthetic [barcode part1]
  source 1..16: mol_type = other DNA
gtccgaagtgacgagt

SEQ ID NO: 29017 - DNA, 16 bp, synthetic construct
  misc_feature 1..16: note = synthetic [barcode part1]
  source 1..16: mol_type = other DNA
tctcgtaacacgaggt

SEQ ID NO: 29018 - DNA, 16 bp, synthetic construct
  misc_feature 1..16: note = synthetic [barcode part1]
  source 1..16: mol_type = other DNA
tgacgttggtgaatag

SEQ ID NO: 29019 - DNA, 16 bp, synthetic construct
  misc_feature 1..16: note = synthetic [barcode part1]
  source 1..16: mol_type = other DNA
cgtagacctgcagatt

SEQ ID NO: 29020 - DNA, 16 bp, synthetic construct
  misc_feature 1..16: note = synthetic [barcode part1]
  source 1..16: mol_type = other DNA
tgtcgccttcgcaagt

SEQ ID NO: 29021 - DNA, 16 bp, synthetic construct
  misc_feature 1..16: note = synthetic [barcode part1]
  source 1..16: mol_type = other DNA
actaacctgcagtgtg

SEQ ID NO: 29022 - DNA, 16 bp, synthetic construct
  misc_feature 1..16: note = synthetic [barcode part1]
  source 1..16: mol_type = other DNA
gttccaattctctccg

SEQ ID NO: 29023 - DNA, 16 bp, synthetic construct
  misc_feature 1..16: note = synthetic [barcode part1]
  source 1..16: mol_type = other DNA
gacctaattccgcacc

SEQ ID NO: 29024 - DNA, 16 bp, synthetic construct
  misc_feature 1..16: note = synthetic [barcode part1]
  source 1..16: mol_type = other DNA
gagactcctacttgtt

SEQ ID NO: 29025 - DNA, 16 bp, synthetic construct
  misc_feature 1..16: note = synthetic [barcode part1]
  source 1..16: mol_type = other DNA
taaggcggtgaagtag

SEQ ID NO: 29026 - DNA, 16 bp, synthetic construct
  misc_feature 1..16: note = synthetic [barcode part1]
  source 1..16: mol_type = other DNA
tgtcgcgagtcttaag

SEQ ID NO: 29027 - DNA, 16 bp, synthetic construct
  misc_feature 1..16: note = synthetic [barcode part1]
  source 1..16: mol_type = other DNA
cgtattggaagaatcg

SEQ ID NO: 29028 - DNA, 16 bp, synthetic construct
  misc_feature 1..16: note = synthetic [barcode part1]
  source 1..16: mol_type = other DNA
taagtcggcactctcc

SEQ ID NO: 29029 - DNA, 16 bp, synthetic construct
  misc_feature 1..16: note = synthetic [barcode part1]
  source 1..16: mol_type = other DNA
atacttcctctgcacc

SEQ ID NO: 29030 - DNA, 16 bp, synthetic construct
  misc_feature 1..16: note = synthetic [barcode part1]
  source 1..16: mol_type = other DNA
actcgtaagtcacgtg

SEQ ID NO: 29031 - DNA, 16 bp, synthetic construct
  misc_feature 1..16: note = synthetic [barcode part1]
  source 1..16: mol_type = other DNA
ccttgacacacctgac

SEQ ID NO: 29032 - DNA, 16 bp, synthetic construct
  misc_feature 1..16: note = synthetic [barcode part1]
  source 1..16: mol_type = other DNA
tgcagagtaacgattg

SEQ ID NO: 29033 - DNA, 16 bp, synthetic construct
  misc_feature 1..16: note = synthetic [barcode part1]
  source 1..16: mol_type = other DNA
tgtcgtccaagtccac

SEQ ID NO: 29034 - DNA, 16 bp, synthetic construct
  misc_feature 1..16: note = synthetic [barcode part1]
  source 1..16: mol_type = other DNA
tctcagtacgtggcct

SEQ ID NO: 29035 - DNA, 16 bp, synthetic construct
  misc_feature 1..16: note = synthetic [barcode part1]
  source 1..16: mol_type = other DNA
gaatcggcgtggttag

SEQ ID NO: 29036 - DNA, 16 bp, synthetic construct
  misc_feature 1..16: note = synthetic [barcode part1]
  source 1..16: mol_type = other DNA
gttctcacgccggatt

SEQ ID NO: 29037 - DNA, 16 bp, synthetic construct
  misc_feature 1..16: note = synthetic [barcode part1]
  source 1..16: mol_type = other DNA
gtcgcgtattgttccg

SEQ ID NO: 29038 - DNA, 16 bp, synthetic construct
  misc_feature 1..16: note = synthetic [barcode part1]
  source 1..16: mol_type = other DNA
tactaggacgacttgc

SEQ ID NO: 29039 - DNA, 16 bp, synthetic construct
  misc_feature 1..16: note = synthetic [barcode part1]
  source 1..16: mol_type = other DNA
acacacttccacagag

SEQ ID NO: 29040 - DNA, 16 bp, synthetic construct
  misc_feature 1..16: note = synthetic [barcode part1]
  source 1..16: mol_type = other DNA
gttaacacactccgtt

SEQ ID NO: 29041 - DNA, 16 bp, synthetic construct
  misc_feature 1..16: note = synthetic [barcode part1]
  source 1..16: mol_type = other DNA
tcgataacaaggacgt

SEQ ID NO: 29042 - DNA, 16 bp, synthetic construct
  misc_feature 1..16: note = synthetic [barcode part1]
  source 1..16: mol_type = other DNA
tcgaggtgaacagatt

SEQ ID NO: 29043 - DNA, 16 bp, synthetic construct
  misc_feature 1..16: note = synthetic [barcode part1]
  source 1..16: mol_type = other DNA
gtggaggtcgagttgt

SEQ ID NO: 29044 - DNA, 16 bp, synthetic construct
  misc_feature 1..16: note = synthetic [barcode part1]
  source 1..16: mol_type = other DNA
tattcacctgttcgcc

SEQ ID NO: 29045 - DNA, 16 bp, synthetic construct
  misc_feature 1..16: note = synthetic [barcode part1]
  source 1..16: mol_type = other DNA
gacgagatccttaacc

SEQ ID NO: 29046 - DNA, 16 bp, synthetic construct
  misc_feature 1..16: note = synthetic [barcode part1]
  source 1..16: mol_type = other DNA
cgcctacctacctatt

SEQ ID NO: 29047 - DNA, 16 bp, synthetic construct
  misc_feature 1..16: note = synthetic [barcode part1]
  source 1..16: mol_type = other DNA
acaactcctactggag

SEQ ID NO: 29048 - DNA, 16 bp, synthetic construct
  misc_feature 1..16: note = synthetic [barcode part1]
  source 1..16: mol_type = other DNA
aattgcgaatcgagac

SEQ ID NO: 29049 - DNA, 16 bp, synthetic construct
  misc_feature 1..16: note = synthetic [barcode part1]
  source 1..16: mol_type = other DNA
gaattgagtgcgttag

SEQ ID NO: 29050 - DNA, 16 bp, synthetic construct
  misc_feature 1..16: note = synthetic [barcode part1]
  source 1..16: mol_type = other DNA
tctgtatccagtgatc

SEQ ID NO: 29051 - DNA, 16 bp, synthetic construct
  misc_feature 1..16: note = synthetic [barcode part1]
  source 1..16: mol_type = other DNA
tgtgccttgttcttgc

SEQ ID NO: 29052 - DNA, 16 bp, synthetic construct
  misc_feature 1..16: note = synthetic [barcode part1]
  source 1..16: mol_type = other DNA
ttcgaacgtgactacg

SEQ ID NO: 29053 - DNA, 16 bp, synthetic construct
  misc_feature 1..16: note = synthetic [barcode part1]
  source 1..16: mol_type = other DNA
acttaggcctgttgcc

SEQ ID NO: 29054 - DNA, 16 bp, synthetic construct
  misc_feature 1..16: note = synthetic [barcode part1]
  source 1..16: mol_type = other DNA
tgtaacacgcctactt

SEQ ID NO: 29055 - DNA, 16 bp, synthetic construct
  misc_feature 1..16: note = synthetic [barcode part1]
  source 1..16: mol_type = other DNA
gaggtcacgattcttg

SEQ ID NO: 29056 - DNA, 16 bp, synthetic construct
  misc_feature 1..16: note = synthetic [barcode part1]
  source 1..16: mol_type = other DNA
gccagtaatccgagtt

SEQ ID NO: 29057 - DNA, 16 bp, synthetic construct
  misc_feature 1..16: note = synthetic [barcode part1]
  source 1..16: mol_type = other DNA
tacaggtccactccac

SEQ ID NO: 29058 - DNA, 16 bp, synthetic construct
  misc_feature 1..16: note = synthetic [barcode part1]
  source 1..16: mol_type = other DNA
tctcctccagtcgatt

SEQ ID NO: 29059 - DNA, 16 bp, synthetic construct
  misc_feature 1..16: note = synthetic [barcode part1]
  source 1..16: mol_type = other DNA
actataggataggcgt

SEQ ID NO: 29060 - DNA, 16 bp, synthetic construct
  misc_feature 1..16: note = synthetic [barcode part1]
  source 1..16: mol_type = other DNA
ccaaggcagtattgtc

SEQ ID NO: 29061 - DNA, 16 bp, synthetic construct
  misc_feature 1..16: note = synthetic [barcode part1]
  source 1..16: mol_type = other DNA
aggtcgttgaaggcgt

SEQ ID NO: 29062 - DNA, 16 bp, synthetic construct
  misc_feature 1..16: note = synthetic [barcode part1]
  source 1..16: mol_type = other DNA
tacaattcgcgaaccg

SEQ ID NO: 29063 - DNA, 16 bp, synthetic construct
  misc_feature 1..16: note = synthetic [barcode part1]
  source 1..16: mol_type = other DNA
gtgacagttcagtctg

SEQ ID NO: 29064 - DNA, 16 bp, synthetic construct
  misc_feature 1..16: note = synthetic [barcode part1]
  source 1..16: mol_type = other DNA
caagaggcaactatac

SEQ ID NO: 29065 - DNA, 16 bp, synthetic construct
  misc_feature 1..16: note = synthetic [barcode part1]
  source 1..16: mol_type = other DNA
atactgcaggtaagtg

SEQ ID NO: 29066 - DNA, 16 bp, synthetic construct
  misc_feature 1..16: note = synthetic [barcode part1]
  source 1..16: mol_type = other DNA
gcagtagattctccag

SEQ ID NO: 29067 - DNA, 16 bp, synthetic construct
  misc_feature 1..16: note = synthetic [barcode part1]
  source 1..16: mol_type = other DNA
cgtatacctggttgag

SEQ ID NO: 29068 - DNA, 16 bp, synthetic construct
  misc_feature 1..16: note = synthetic [barcode part1]
  source 1..16: mol_type = other DNA
gatcggttcaactggt

SEQ ID NO: 29069 - DNA, 16 bp, synthetic construct
  misc_feature 1..16: note = synthetic [barcode part1]
  source 1..16: mol_type = other DNA
cagtgcgcaatctctc

SEQ ID NO: 29070 - DNA, 16 bp, synthetic construct
  misc_feature 1..16: note = synthetic [barcode part1]
  source 1..16: mol_type = other DNA
taacctcacgtgccgt

SEQ ID NO: 29071 - DNA, 16 bp, synthetic construct
  misc_feature 1..16: note = synthetic [barcode part1]
  source 1..16: mol_type = other DNA
aatatacctcttcggc

SEQ ID NO: 29072 - DNA, 16 bp, synthetic construct
  misc_feature 1..16: note = synthetic [barcode part1]
  source 1..16: mol_type = other DNA
tcaaggtgagttccac

SEQ ID NO: 29073 - DNA, 16 bp, synthetic construct
  misc_feature 1..16: note = synthetic [barcode part1]
  source 1..16: mol_type = other DNA
caatcagactggttgc

SEQ ID NO: 29074 - DNA, 16 bp, synthetic construct
  misc_feature 1..16: note = synthetic [barcode part1]
  source 1..16: mol_type = other DNA
gtacaaccgattgtgc

SEQ ID NO: 29075 - DNA, 16 bp, synthetic construct
  misc_feature 1..16: note = synthetic [barcode part1]
  source 1..16: mol_type = other DNA
agtactgactgactgc

SEQ ID NO: 29076 - DNA, 16 bp, synthetic construct
  misc_feature 1..16: note = synthetic [barcode part1]
  source 1..16: mol_type = other DNA
tgttactgtccggacc

SEQ ID NO: 29077 - DNA, 16 bp, synthetic construct
  misc_feature 1..16: note = synthetic [barcode part1]
  source 1..16: mol_type = other DNA
gtacagtggagaattc

SEQ ID NO: 29078 - DNA, 16 bp, synthetic construct
  misc_feature 1..16: note = synthetic [barcode part1]
  source 1..16: mol_type = other DNA
gtagtcgattgcgtgt

SEQ ID NO: 29079 - DNA, 16 bp, synthetic construct
  misc_feature 1..16: note = synthetic [barcode part1]
  source 1..16: mol_type = other DNA
caggccttctagatag

SEQ ID NO: 29080 - DNA, 16 bp, synthetic construct
  misc_feature 1..16: note = synthetic [barcode part1]
  source 1..16: mol_type = other DNA
tccgtgttcagattac

SEQ ID NO: 29081 - DNA, 16 bp, synthetic construct
  misc_feature 1..16: note = synthetic [barcode part1]
  source 1..16: mol_type = other DNA
cactgatccttgaccg

SEQ ID NO: 29082 - DNA, 16 bp, synthetic construct
  misc_feature 1..16: note = synthetic [barcode part1]
  source 1..16: mol_type = other DNA
aggattcacgacgttc

SEQ ID NO: 29083 - DNA, 16 bp, synthetic construct
  misc_feature 1..16: note = synthetic [barcode part1]
  source 1..16: mol_type = other DNA
cggcctaacaattcag

SEQ ID NO: 29084 - DNA, 16 bp, synthetic construct
  misc_feature 1..16: note = synthetic [barcode part1]
  source 1..16: mol_type = other DNA
tcacgtattctccaag

SEQ ID NO: 29085 - DNA, 16 bp, synthetic construct
  misc_feature 1..16: note = synthetic [barcode part1]
  source 1..16: mol_type = other DNA
aacagtcggttgtcac

SEQ ID NO: 29086 - DNA, 16 bp, synthetic construct
  misc_feature 1..16: note = synthetic [barcode part1]
  source 1..16: mol_type = other DNA
gtagttctgtcttcag

SEQ ID NO: 29087 - DNA, 16 bp, synthetic construct
  misc_feature 1..16: note = synthetic [barcode part1]
  source 1..16: mol_type = other DNA
attgcctacgagttct

SEQ ID NO: 29088 - DNA, 16 bp, synthetic construct
  misc_feature 1..16: note = synthetic [barcode part1]
  source 1..16: mol_type = other DNA
agtcaggcgagttcag

SEQ ID NO: 29089 - DNA, 16 bp, synthetic construct
  misc_feature 1..16: note = synthetic [barcode part1]
  source 1..16: mol_type = other DNA
agttctctggccttct

SEQ ID NO: 29090 - DNA, 16 bp, synthetic construct
  misc_feature 1..16: note = synthetic [barcode part1]
  source 1..16: mol_type = other DNA
taagtattctccggtc

SEQ ID NO: 29091 - DNA, 16 bp, synthetic construct
  misc_feature 1..16: note = synthetic [barcode part1]
  source 1..16: mol_type = other DNA
tagtgacctgaatcgc

SEQ ID NO: 29092 - DNA, 16 bp, synthetic construct
  misc_feature 1..16: note = synthetic [barcode part1]
  source 1..16: mol_type = other DNA
taattgtctcggtctg

SEQ ID NO: 29093 - DNA, 16 bp, synthetic construct
  misc_feature 1..16: note = synthetic [barcode part1]
  source 1..16: mol_type = other DNA
cgtgttcttcgtactc

SEQ ID NO: 29094 - DNA, 16 bp, synthetic construct
  misc_feature 1..16: note = synthetic [barcode part1]
  source 1..16: mol_type = other DNA
actagaacgcggtcag

SEQ ID NO: 29095 - DNA, 16 bp, synthetic construct
  misc_feature 1..16: note = synthetic [barcode part1]
  source 1..16: mol_type = other DNA
ttaggcgcagagtggt

SEQ ID NO: 29096 - DNA, 16 bp, synthetic construct
  misc_feature 1..16: note = synthetic [barcode part1]
  source 1..16: mol_type = other DNA
agattgcgacgtaggc

SEQ ID NO: 29097 - DNA, 16 bp, synthetic construct
  misc_feature 1..16: note = synthetic [barcode part1]
  source 1..16: mol_type = other DNA
cgcgatatcacagtgt

SEQ ID NO: 29098 - DNA, 16 bp, synthetic construct
  misc_feature 1..16: note = synthetic [barcode part1]
  source 1..16: mol_type = other DNA
tcggaatacctcagac

SEQ ID NO: 29099 - DNA, 16 bp, synthetic construct
  misc_feature 1..16: note = synthetic [barcode part1]
  source 1..16: mol_type = other DNA
tcgaatcaaggtacag

SEQ ID NO: 29100 - DNA, 16 bp, synthetic construct
  misc_feature 1..16: note = synthetic [barcode part1]
  source 1..16: mol_type = other DNA
ttatagtaccgcgacg

SEQ ID NO: 29101 - DNA, 16 bp, synthetic construct
  misc_feature 1..16: note = synthetic [barcode part1]
  source 1..16: mol_type = other DNA
tcaactgttggtcgag

SEQ ID NO: 29102 - DNA, 16 bp, synthetic construct
  misc_feature 1..16: note = synthetic [barcode part1]
  source 1..16: mol_type = other DNA
tccacgttaattcgac

SEQ ID NO: 29103 - DNA, 16 bp, synthetic construct
  misc_feature 1..16: note = synthetic [barcode part1]
  source 1..16: mol_type = other DNA
tgaatccgcgacagag

SEQ ID NO: 29104 - DNA, 16 bp, synthetic construct
  misc_feature 1..16: note = synthetic [barcode part1]
  source 1..16: mol_type = other DNA
gtgtgcctatcaacag

SEQ ID NO: 29105 - DNA, 16 bp, synthetic construct
  misc_feature 1..16: note = synthetic [barcode part1]
  source 1..16: mol_type = other DNA
tcgtagatagagagtc

SEQ ID NO: 29106 - DNA, 16 bp, synthetic construct
  misc_feature 1..16: note = synthetic [barcode part1]
  source 1..16: mol_type = other DNA
cgatatctactcgccg

SEQ ID NO: 29107 - DNA, 16 bp, synthetic construct
  misc_feature 1..16: note = synthetic [barcode part1]
  source 1..16: mol_type = other DNA
gtagtctacctgacag

SEQ ID NO: 29108 - DNA, 16 bp, synthetic construct
  misc_feature 1..16: note = synthetic [barcode part1]
  source 1..16: mol_type = other DNA
gtaactgttggttctc

SEQ ID NO: 29109 - DNA, 16 bp, synthetic construct
  misc_feature 1..16: note = synthetic [barcode part1]
  source 1..16: mol_type = other DNA
actcctcttctccaag

SEQ ID NO: 29110 - DNA, 16 bp, synthetic construct
  misc_feature 1..16: note = synthetic [barcode part1]
  source 1..16: mol_type = other DNA
gcgtatagtgtgtgtc

SEQ ID NO: 29111 - DNA, 16 bp, synthetic construct
  misc_feature 1..16: note = synthetic [barcode part1]
  source 1..16: mol_type = other DNA
gtcgaatactcttacc

SEQ ID NO: 29112 - DNA, 16 bp, synthetic construct
  misc_feature 1..16: note = synthetic [barcode part1]
  source 1..16: mol_type = other DNA
atccacctgaggtctc

SEQ ID NO: 29113 - DNA, 16 bp, synthetic construct
  misc_feature 1..16: note = synthetic [barcode part1]
  source 1..16: mol_type = other DNA
gttgtcagtgtcctcg

SEQ ID NO: 29114 - DNA, 16 bp, synthetic construct
  misc_feature 1..16: note = synthetic [barcode part1]
  source 1..16: mol_type = other DNA
gtaacaacctacagag

SEQ ID NO: 29115 - DNA, 16 bp, synthetic construct
  misc_feature 1..16: note = synthetic [barcode part1]
  source 1..16: mol_type = other DNA
tcctagaatccacttg

SEQ ID NO: 29116 - DNA, 16 bp, synthetic construct
  misc_feature 1..16: note = synthetic [barcode part1]
  source 1..16: mol_type = other DNA
attactcctacagacc

SEQ ID NO: 29117 - DNA, 16 bp, synthetic construct
  misc_feature 1..16: note = synthetic [barcode part1]
  source 1..16: mol_type = other DNA
aagttcacgtcggtgt

SEQ ID NO: 29118 - DNA, 16 bp, synthetic construct
  misc_feature 1..16: note = synthetic [barcode part1]
  source 1..16: mol_type = other DNA
gtaatcgttggtcttc

SEQ ID NO: 29119 - DNA, 16 bp, synthetic construct
  misc_feature 1..16: note = synthetic [barcode part1]
  source 1..16: mol_type = other DNA
acactggaatccacgt

SEQ ID NO: 29120 - DNA, 16 bp, synthetic construct
  misc_feature 1..16: note = synthetic [barcode part1]
  source 1..16: mol_type = other DNA
gcggaattccagacag

SEQ ID NO: 29121 - DNA, 16 bp, synthetic construct
  misc_feature 1..16: note = synthetic [barcode part1]
  source 1..16: mol_type = other DNA
atcacggagatcctgt

SEQ ID NO: 29122 - DNA, 16 bp, synthetic construct
  misc_feature 1..16: note = synthetic [barcode part1]
  source 1..16: mol_type = other DNA
tgactctgcaccggtt

SEQ ID NO: 29123 - DNA, 16 bp, synthetic construct
  misc_feature 1..16: note = synthetic [barcode part1]
  source 1..16: mol_type = other DNA
accggataacggttct

SEQ ID NO: 29124 - DNA, 16 bp, synthetic construct
  misc_feature 1..16: note = synthetic [barcode part1]
  source 1..16: mol_type = other DNA
gagaccagtgtccaag

SEQ ID NO: 29125 - DNA, 16 bp, synthetic construct
  misc_feature 1..16: note = synthetic [barcode part1]
  source 1..16: mol_type = other DNA
gtacaatccagtcctt

SEQ ID NO: 29126 - DNA, 16 bp, synthetic construct
  misc_feature 1..16: note = synthetic [barcode part1]
  source 1..16: mol_type = other DNA
cctcttcaaggtctct

SEQ ID NO: 29127 - DNA, 16 bp, synthetic construct
  misc_feature 1..16: note = synthetic [barcode part1]
  source 1..16: mol_type = other DNA
gtcacaggagtaagtt

SEQ ID NO: 29128 - DNA, 16 bp, synthetic construct
  misc_feature 1..16: note = synthetic [barcode part1]
  source 1..16: mol_type = other DNA
ttgcgtctgttggacc

SEQ ID NO: 29129 - DNA, 16 bp, synthetic construct
  misc_feature 1..16: note = synthetic [barcode part1]
  source 1..16: mol_type = other DNA
tctccgtattcagtag

SEQ ID NO: 29130 - DNA, 16 bp, synthetic construct
  misc_feature 1..16: note = synthetic [barcode part1]
  source 1..16: mol_type = other DNA
aggtgttattccgttc

SEQ ID NO: 29131 - DNA, 16 bp, synthetic construct
  misc_feature 1..16: note = synthetic [barcode part1]
  source 1..16: mol_type = other DNA
acagaaggcgttctct

SEQ ID NO: 29132 - DNA, 16 bp, synthetic construct
  misc_feature 1..16: note = synthetic [barcode part1]
  source 1..16: mol_type = other DNA
tcctctgactcagacg

SEQ ID NO: 29133 - DNA, 16 bp, synthetic construct
  misc_feature 1..16: note = synthetic [barcode part1]
  source 1..16: mol_type = other DNA
acgcggtctctctaac

SEQ ID NO: 29134 - DNA, 16 bp, synthetic construct
  misc_feature 1..16: note = synthetic [barcode part1]
  source 1..16: mol_type = other DNA
gatctaccggaacgag

SEQ ID NO: 29135 - DNA, 16 bp, synthetic construct
  misc_feature 1..16: note = synthetic [barcode part1]
  source 1..16: mol_type = other DNA
gcacaagtgttaggcg

SEQ ID NO: 29136 - DNA, 16 bp, synthetic construct
  misc_feature 1..16: note = synthetic [barcode part1]
  source 1..16: mol_type = other DNA
tctctggactacgtgc

SEQ ID NO: 29137 - DNA, 16 bp, synthetic construct
  misc_feature 1..16: note = synthetic [barcode part1]
  source 1..16: mol_type = other DNA
tacacctacctggcgt

SEQ ID NO: 29138 - DNA, 16 bp, synthetic construct
  misc_feature 1..16: note = synthetic [barcode part1]
  source 1..16: mol_type = other DNA
tagaactgtcgaccgt

SEQ ID NO: 29139 - DNA, 16 bp, synthetic construct
  misc_feature 1..16: note = synthetic [barcode part1]
  source 1..16: mol_type = other DNA
ttgtccaacggtgcct

SEQ ID NO: 29140 - DNA, 16 bp, synthetic construct
  misc_feature 1..16: note = synthetic [barcode part1]
  source 1..16: mol_type = other DNA
tcctatacagttcgac

SEQ ID NO: 29141 - DNA, 16 bp, synthetic construct
  misc_feature 1..16: note = synthetic [barcode part1]
  source 1..16: mol_type = other DNA
cctagattacctcgcg

SEQ ID NO: 29142 - DNA, 16 bp, synthetic construct
  misc_feature 1..16: note = synthetic [barcode part1]
  source 1..16: mol_type = other DNA
ttgcaaggacaacaac

SEQ ID NO: 29143 - DNA, 16 bp, synthetic construct
  misc_feature 1..16: note = synthetic [barcode part1]
  source 1..16: mol_type = other DNA
gtcactagtcggattg

SEQ ID NO: 29144 - DNA, 16 bp, synthetic construct
  misc_feature 1..16: note = synthetic [barcode part1]
  source 1..16: mol_type = other DNA
tgcgatacacttgttc

SEQ ID NO: 29145 - DNA, 16 bp, synthetic construct
  misc_feature 1..16: note = synthetic [barcode part1]
  source 1..16: mol_type = other DNA
tcctagatccacttag

SEQ ID NO: 29146 - DNA, 16 bp, synthetic construct
  misc_feature 1..16: note = synthetic [barcode part1]
  source 1..16: mol_type = other DNA
acgaacttccttagtc

SEQ ID NO: 29147 - DNA, 16 bp, synthetic construct
  misc_feature 1..16: note = synthetic [barcode part1]
  source 1..16: mol_type = other DNA
gatcgcctctgtgttg

SEQ ID NO: 29148 - DNA, 16 bp, synthetic construct
  misc_feature 1..16: note = synthetic [barcode part1]
  source 1..16: mol_type = other DNA
ttctcgacgcgtaatt

SEQ ID NO: 29149 - DNA, 16 bp, synthetic construct
  misc_feature 1..16: note = synthetic [barcode part1]
  source 1..16: mol_type = other DNA
gtagaggacacttctc

SEQ ID NO: 29150 - DNA, 16 bp, synthetic construct
  misc_feature 1..16: note = synthetic [barcode part1]
  source 1..16: mol_type = other DNA
gaaggtctaactgtag

SEQ ID NO: 29151 - DNA, 16 bp, synthetic construct
  misc_feature 1..16: note = synthetic [barcode part1]
  source 1..16: mol_type = other DNA
tgtggcgaataggcac

SEQ ID NO: 29152 - DNA, 16 bp, synthetic construct
  misc_feature 1..16: note = synthetic [barcode part1]
  source 1..16: mol_type = other DNA
ttcctctggtcaactc

SEQ ID NO: 29153 - DNA, 16 bp, synthetic construct
  misc_feature 1..16: note = synthetic [barcode part1]
  source 1..16: mol_type = other DNA
gttggtgcggaggatt

SEQ ID NO: 29154 - DNA, 16 bp, synthetic construct
  misc_feature 1..16: note = synthetic [barcode part1]
  source 1..16: mol_type = other DNA
aacagatatcctggag

SEQ ID NO: 29155 - DNA, 16 bp, synthetic construct
  misc_feature 1..16: note = synthetic [barcode part1]
  source 1..16: mol_type = other DNA
agtggtctgtatcctt

SEQ ID NO: 29156 - DNA, 16 bp, synthetic construct
  misc_feature 1..16: note = synthetic [barcode part1]
  source 1..16: mol_type = other DNA
ccttaactcaacacgt

SEQ ID NO: 29157 - DNA, 16 bp, synthetic construct
  misc_feature 1..16: note = synthetic [barcode part1]
  source 1..16: mol_type = other DNA
taatagtccttgcacc

SEQ ID NO: 29158 - DNA, 16 bp, synthetic construct
  misc_feature 1..16: note = synthetic [barcode part1]
  source 1..16: mol_type = other DNA
agtcggtcacggtatt

SEQ ID NO: 29159 - DNA, 16 bp, synthetic construct
  misc_feature 1..16: note = synthetic [barcode part1]
  source 1..16: mol_type = other DNA
cactggaatctctgtt

SEQ ID NO: 29160 - DNA, 16 bp, synthetic construct
  misc_feature 1..16: note = synthetic [barcode part1]
  source 1..16: mol_type = other DNA
cagattgtcctgcgtc

SEQ ID NO: 29161 - DNA, 16 bp, synthetic construct
  misc_feature 1..16: note = synthetic [barcode part1]
  source 1..16: mol_type = other DNA
cctggtcctctaactt

SEQ ID NO: 29162 - DNA, 16 bp, synthetic construct
  misc_feature 1..16: note = synthetic [barcode part1]
  source 1..16: mol_type = other DNA
gcgtcttattattggc

SEQ ID NO: 29163 - DNA, 16 bp, synthetic construct
  misc_feature 1..16: note = synthetic [barcode part1]
  source 1..16: mol_type = other DNA
aacctgtgaattcgcg

SEQ ID NO: 29164 - DNA, 16 bp, synthetic construct
  misc_feature 1..16: note = synthetic [barcode part1]
  source 1..16: mol_type = other DNA
cctcgatacgtgactc

SEQ ID NO: 29165 - DNA, 16 bp, synthetic construct
  misc_feature 1..16: note = synthetic [barcode part1]
  source 1..16: mol_type = other DNA
tatcactgttcagacc

SEQ ID NO: 29166 - DNA, 16 bp, synthetic construct
  misc_feature 1..16: note = synthetic [barcode part1]
  source 1..16: mol_type = other DNA
actagtgccactattc

SEQ ID NO: 29167 - DNA, 16 bp, synthetic construct
  misc_feature 1..16: note = synthetic [barcode part1]
  source 1..16: mol_type = other DNA
gaagacactgccaggt

SEQ ID NO: 29168 - DNA, 16 bp, synthetic construct
  misc_feature 1..16: note = synthetic [barcode part1]
  source 1..16: mol_type = other DNA
tcggtgaacgatctgt

SEQ ID NO: 29169 - DNA, 16 bp, synthetic construct
  misc_feature 1..16: note = synthetic [barcode part1]
  source 1..16: mol_type = other DNA
cgtgcagtagatctac

SEQ ID NO: 29170 - DNA, 16 bp, synthetic construct
  misc_feature 1..16: note = synthetic [barcode part1]
  source 1..16: mol_type = other DNA
tctccgatacacggtc

SEQ ID NO: 29171 - DNA, 16 bp, synthetic construct
  misc_feature 1..16: note = synthetic [barcode part1]
  source 1..16: mol_type = other DNA
ttacctgtatcgtggt

SEQ ID NO: 29172 - DNA, 16 bp, synthetic construct
  misc_feature 1..16: note = synthetic [barcode part1]
  source 1..16: mol_type = other DNA
aattgaggcaattgcg

SEQ ID NO: 29173 - DNA, 16 bp, synthetic construct
  misc_feature 1..16: note = synthetic [barcode part1]
  source 1..16: mol_type = other DNA
gacttaggcacctctc

SEQ ID NO: 29174 - DNA, 16 bp, synthetic construct
  misc_feature 1..16: note = synthetic [barcode part1]
  source 1..16: mol_type = other DNA
aggagactactgatac

SEQ ID NO: 29175 - DNA, 16 bp, synthetic construct
  misc_feature 1..16: note = synthetic [barcode part1]
  source 1..16: mol_type = other DNA
aggttgttggatcacc

SEQ ID NO: 29176 - DNA, 16 bp, synthetic construct
  misc_feature 1..16: note = synthetic [barcode part1]
  source 1..16: mol_type = other DNA
atacggtgaagagttc

SEQ ID NO: 29177 - DNA, 16 bp, synthetic construct
  misc_feature 1..16: note = synthetic [barcode part1]
  source 1..16: mol_type = other DNA
tctgagttctaactcg

SEQ ID NO: 29178 - DNA, 16 bp, synthetic construct
  misc_feature 1..16: note = synthetic [barcode part1]
  source 1..16: mol_type = other DNA
atcgagtggatcactc

SEQ ID NO: 29179 - DNA, 16 bp, synthetic construct
  misc_feature 1..16: note = synthetic [barcode part1]
  source 1..16: mol_type = other DNA
cgtaagtatccgcaac

SEQ ID NO: 29180 - DNA, 16 bp, synthetic construct
  misc_feature 1..16: note = synthetic [barcode part1]
  source 1..16: mol_type = other DNA
agtacgtgtgttgacc

SEQ ID NO: 29181 - DNA, 16 bp, synthetic construct
  misc_feature 1..16: note = synthetic [barcode part1]
  source 1..16: mol_type = other DNA
ttgagtcggttgtcag

SEQ ID NO: 29182 - DNA, 16 bp, synthetic construct
  misc_feature 1..16: note = synthetic [barcode part1]
  source 1..16: mol_type = other DNA
gcacagactatatccg

SEQ ID NO: 29183 - DNA, 16 bp, synthetic construct
  misc_feature 1..16: note = synthetic [barcode part1]
  source 1..16: mol_type = other DNA
ttattcgacggacgac

SEQ ID NO: 29184 - DNA, 16 bp, synthetic construct
  misc_feature 1..16: note = synthetic [barcode part1]
  source 1..16: mol_type = other DNA
cacctggaggaatcag

SEQ ID NO: 29185 - DNA, 16 bp, synthetic construct
  misc_feature 1..16: note = synthetic [barcode part1]
  source 1..16: mol_type = other DNA
tcgtctgagatcctgc

SEQ ID NO: 29186 - DNA, 16 bp, synthetic construct
  misc_feature 1..16: note = synthetic [barcode part1]
  source 1..16: mol_type = other DNA
ttgagtgcagaacggc

SEQ ID NO: 29187 - DNA, 16 bp, synthetic construct
  misc_feature 1..16: note = synthetic [barcode part1]
  source 1..16: mol_type = other DNA
gtgtctcttgacgacc

SEQ ID NO: 29188 - DNA, 16 bp, synthetic construct
  misc_feature 1..16: note = synthetic [barcode part1]
  source 1..16: mol_type = other DNA
gaaggcgattcctgtt

SEQ ID NO: 29189 - DNA, 16 bp, synthetic construct
  misc_feature 1..16: note = synthetic [barcode part1]
  source 1..16: mol_type = other DNA
tcctgtacgcaagagt

SEQ ID NO: 29190 - DNA, 16 bp, synthetic construct
  misc_feature 1..16: note = synthetic [barcode part1]
  source 1..16: mol_type = other DNA
atcggtgatccagact

SEQ ID NO: 29191 - DNA, 16 bp, synthetic construct
  misc_feature 1..16: note = synthetic [barcode part1]
  source 1..16: mol_type = other DNA
taccgttacggttact

SEQ ID NO: 29192 - DNA, 16 bp, synthetic construct
  misc_feature 1..16: note = synthetic [barcode part1]
  source 1..16: mol_type = other DNA
gccacaaggacaggtt

SEQ ID NO: 29193 - DNA, 16 bp, synthetic construct
  misc_feature 1..16: note = synthetic [barcode part1]
  source 1..16: mol_type = other DNA
ccggtacagtcttctg

SEQ ID NO: 29194 - DNA, 16 bp, synthetic construct
  misc_feature 1..16: note = synthetic [barcode part1]
  source 1..16: mol_type = other DNA
aggttacggtagttcc

SEQ ID NO: 29195 - DNA, 16 bp, synthetic construct
  misc_feature 1..16: note = synthetic [barcode part1]
  source 1..16: mol_type = other DNA
tccactgtcttatcgc

SEQ ID NO: 29196 - DNA, 16 bp, synthetic construct
  misc_feature 1..16: note = synthetic [barcode part1]
  source 1..16: mol_type = other DNA
gacgtcaactgactgt

SEQ ID NO: 29197 - DNA, 16 bp, synthetic construct
  misc_feature 1..16: note = synthetic [barcode part1]
  source 1..16: mol_type = other DNA
cgcgcaatacttcacc

SEQ ID NO: 29198 - DNA, 16 bp, synthetic construct
  misc_feature 1..16: note = synthetic [barcode part1]
  source 1..16: mol_type = other DNA
aacactgacgttgtgc

SEQ ID NO: 29199 - DNA, 16 bp, synthetic construct
  misc_feature 1..16: note = synthetic [barcode part1]
  source 1..16: mol_type = other DNA
tgtgtaggtgagacgc

SEQ ID NO: 29200 - DNA, 16 bp, synthetic construct
  misc_feature 1..16: note = synthetic [barcode part1]
  source 1..16: mol_type = other DNA
tatcctataccgcctc

SEQ ID NO: 29201 - DNA, 16 bp, synthetic construct
  misc_feature 1..16: note = synthetic [barcode part1]
  source 1..16: mol_type = other DNA
tctggtcctctaatcc

SEQ ID NO: 29202 - DNA, 16 bp, synthetic construct
  misc_feature 1..16: note = synthetic [barcode part1]
  source 1..16: mol_type = other DNA
atagaaggcgtaggac

SEQ ID NO: 29203 - DNA, 16 bp, synthetic construct
  misc_feature 1..16: note = synthetic [barcode part1]
  source 1..16: mol_type = other DNA
gccgaggtaattatag

SEQ ID NO: 29204 - DNA, 16 bp, synthetic construct
  misc_feature 1..16: note = synthetic [barcode part1]
  source 1..16: mol_type = other DNA
gttctgccttaacctc

SEQ ID NO: 29205 - DNA, 16 bp, synthetic construct
  misc_feature 1..16: note = synthetic [barcode part1]
  source 1..16: mol_type = other DNA
gacgttactggtcaac

SEQ ID NO: 29206 - DNA, 16 bp, synthetic construct
  misc_feature 1..16: note = synthetic [barcode part1]
  source 1..16: mol_type = other DNA
taggatctcgattggc

SEQ ID NO: 29207 - DNA, 16 bp, synthetic construct
  misc_feature 1..16: note = synthetic [barcode part1]
  source 1..16: mol_type = other DNA
agaacaagttcgtgac

SEQ ID NO: 29208 - DNA, 16 bp, synthetic construct
  misc_feature 1..16: note = synthetic [barcode part1]
  source 1..16: mol_type = other DNA
tggaagacgtacgatt

SEQ ID NO: 29209 - DNA, 16 bp, synthetic construct
  misc_feature 1..16: note = synthetic [barcode part1]
  source 1..16: mol_type = other DNA
ttataccggtgacttc

SEQ ID NO: 29210 - DNA, 16 bp, synthetic construct
  misc_feature 1..16: note = synthetic [barcode part1]
  source 1..16: mol_type = other DNA
tccttagtagttgcgt

SEQ ID NO: 29211 - DNA, 16 bp, synthetic construct
  misc_feature 1..16: note = synthetic [barcode part1]
  source 1..16: mol_type = other DNA
actcaggtattgtcct

SEQ ID NO: 29212 - DNA, 16 bp, synthetic construct
  misc_feature 1..16: note = synthetic [barcode part1]
  source 1..16: mol_type = other DNA
actgcaatctatctgc

SEQ ID NO: 29213 - DNA, 16 bp, synthetic construct
  misc_feature 1..16: note = synthetic [barcode part1]
  source 1..16: mol_type = other DNA
ccgaatacaagacggc

SEQ ID NO: 29214 - DNA, 16 bp, synthetic construct
  misc_feature 1..16: note = synthetic [barcode part1]
  source 1..16: mol_type = other DNA
aggttctctcctcttg

SEQ ID NO: 29215 - DNA, 16 bp, synthetic construct
  misc_feature 1..16: note = synthetic [barcode part1]
  source 1..16: mol_type = other DNA
cgcaccttgtcagact

SEQ ID NO: 29216 - DNA, 16 bp, synthetic construct
  misc_feature 1..16: note = synthetic [barcode part1]
  source 1..16: mol_type = other DNA
gaccgtatacggttgt

SEQ ID NO: 29217 - DNA, 16 bp, synthetic construct
  misc_feature 1..16: note = synthetic [barcode part1]
  source 1..16: mol_type = other DNA
gtggtcgtctctcaac

SEQ ID NO: 29218 - DNA, 16 bp, synthetic construct
  misc_feature 1..16: note = synthetic [barcode part1]
  source 1..16: mol_type = other DNA
cgtagatacctcgtcc

SEQ ID NO: 29219 - DNA, 16 bp, synthetic construct
  misc_feature 1..16: note = synthetic [barcode part1]
  source 1..16: mol_type = other DNA
aattgcgttgactctc

SEQ ID NO: 29220 - DNA, 16 bp, synthetic construct
  misc_feature 1..16: note = synthetic [barcode part1]
  source 1..16: mol_type = other DNA
gtctgttgagtcttgt

SEQ ID NO: 29221 - DNA, 16 bp, synthetic construct
  misc_feature 1..16: note = synthetic [barcode part1]
  source 1..16: mol_type = other DNA
actaggcacctccact

SEQ ID NO: 29222 - DNA, 16 bp, synthetic construct
  misc_feature 1..16: note = synthetic [barcode part1]
  source 1..16: mol_type = other DNA
tagtacgtggtaagac

SEQ ID NO: 29223 - DNA, 16 bp, synthetic construct
  misc_feature 1..16: note = synthetic [barcode part1]
  source 1..16: mol_type = other DNA
cctacacactgaattc

SEQ ID NO: 29224 - DNA, 16 bp, synthetic construct
  misc_feature 1..16: note = synthetic [barcode part1]
  source 1..16: mol_type = other DNA
tcggtccaataacggt

SEQ ID NO: 29225 - DNA, 16 bp, synthetic construct
  misc_feature 1..16: note = synthetic [barcode part1]
  source 1..16: mol_type = other DNA
aaggataactcggcgc

SEQ ID NO: 29226 - DNA, 16 bp, synthetic construct
  misc_feature 1..16: note = synthetic [barcode part1]
  source 1..16: mol_type = other DNA
agactggtctcagttg

SEQ ID NO: 29227 - DNA, 16 bp, synthetic construct
  misc_feature 1..16: note = synthetic [barcode part1]
  source 1..16: mol_type = other DNA
cagagtgttgtgtaag

SEQ ID NO: 29228 - DNA, 16 bp, synthetic construct
  misc_feature 1..16: note = synthetic [barcode part1]
  source 1..16: mol_type = other DNA
ttgccaagtgtctccg

SEQ ID NO: 29229 - DNA, 16 bp, synthetic construct
  misc_feature 1..16: note = synthetic [barcode part1]
  source 1..16: mol_type = other DNA
ccagtaataccttcac

SEQ ID NO: 29230 - DNA, 16 bp, synthetic construct
  misc_feature 1..16: note = synthetic [barcode part1]
  source 1..16: mol_type = other DNA
cgaagaacagtgtgtt

SEQ ID NO: 29231 - DNA, 16 bp, synthetic construct
  misc_feature 1..16: note = synthetic [barcode part1]
  source 1..16: mol_type = other DNA
gaccacaacgttggtt

SEQ ID NO: 29232 - DNA, 16 bp, synthetic construct
  misc_feature 1..16: note = synthetic [barcode part1]
  source 1..16: mol_type = other DNA
gtgcagagacaacctg

SEQ ID NO: 29233 - DNA, 16 bp, synthetic construct
  misc_feature 1..16: note = synthetic [barcode part1]
  source 1..16: mol_type = other DNA
cacggcgacgaatagt

SEQ ID NO: 29234 - DNA, 16 bp, synthetic construct
  misc_feature 1..16: note = synthetic [barcode part1]
  source 1..16: mol_type = other DNA
tgtactcgacgtaggt

SEQ ID NO: 29235 - DNA, 16 bp, synthetic construct
  misc_feature 1..16: note = synthetic [barcode part1]
  source 1..16: mol_type = other DNA
gccacagatctacctc

SEQ ID NO: 29236 - DNA, 16 bp, synthetic construct
  misc_feature 1..16: note = synthetic [barcode part1]
  source 1..16: mol_type = other DNA
gtactggccaggtatt

SEQ ID NO: 29237 - DNA, 16 bp, synthetic construct
  misc_feature 1..16: note = synthetic [barcode part1]
  source 1..16: mol_type = other DNA
cagtctagtccaacag

SEQ ID NO: 29238 - DNA, 16 bp, synthetic construct
  misc_feature 1..16: note = synthetic [barcode part1]
  source 1..16: mol_type = other DNA
tgtacttgtccgacgc

SEQ ID NO: 29239 - DNA, 16 bp, synthetic construct
  misc_feature 1..16: note = synthetic [barcode part1]
  source 1..16: mol_type = other DNA
gaacacgttagtggcg

SEQ ID NO: 29240 - DNA, 16 bp, synthetic construct
  misc_feature 1..16: note = synthetic [barcode part1]
  source 1..16: mol_type = other DNA
tcgcaagtactgacgt

SEQ ID NO: 29241 - DNA, 16 bp, synthetic construct
  misc_feature 1..16: note = synthetic [barcode part1]
  source 1..16: mol_type = other DNA
gacggcctaattcagt

SEQ ID NO: 29242 - DNA, 16 bp, synthetic construct
  misc_feature 1..16: note = synthetic [barcode part1]
  source 1..16: mol_type = other DNA
gtgagtgacttacctg

SEQ ID NO: 29243 - DNA, 16 bp, synthetic construct
  misc_feature 1..16: note = synthetic [barcode part1]
  source 1..16: mol_type = other DNA
gcgaactaccggaagt

SEQ ID NO: 29244 - DNA, 16 bp, synthetic construct
  misc_feature 1..16: note = synthetic [barcode part1]
  source 1..16: mol_type = other DNA
aatattggcacacgcc

SEQ ID NO: 29245 - DNA, 16 bp, synthetic construct
  misc_feature 1..16: note = synthetic [barcode part1]
  source 1..16: mol_type = other DNA
gcgatattgactgacc

SEQ ID NO: 29246 - DNA, 16 bp, synthetic construct
  misc_feature 1..16: note = synthetic [barcode part1]
  source 1..16: mol_type = other DNA
gagtcttgtgtcgtag

SEQ ID NO: 29247 - DNA, 16 bp, synthetic construct
  misc_feature 1..16: note = synthetic [barcode part1]
  source 1..16: mol_type = other DNA
gcgtaaggatacgaag

SEQ ID NO: 29248 - DNA, 16 bp, synthetic construct
  misc_feature 1..16: note = synthetic [barcode part1]
  source 1..16: mol_type = other DNA
acttgttaggtctcac

SEQ ID NO: 29249 - DNA, 16 bp, synthetic construct
  misc_feature 1..16: note = synthetic [barcode part1]
  source 1..16: mol_type = other DNA
tcgatcttaggtctgt

SEQ ID NO: 29250 - DNA, 16 bp, synthetic construct
  misc_feature 1..16: note = synthetic [barcode part1]
  source 1..16: mol_type = other DNA
tctcgcactaagtcgc

SEQ ID NO: 29251 - DNA, 16 bp, synthetic construct
  misc_feature 1..16: note = synthetic [barcode part1]
  source 1..16: mol_type = other DNA
gcactcttggcaatcc

SEQ ID NO: 29252 - DNA, 16 bp, synthetic construct
  misc_feature 1..16: note = synthetic [barcode part1]
  source 1..16: mol_type = other DNA
gattagaggtggtgag

SEQ ID NO: 29253 - DNA, 16 bp, synthetic construct
  misc_feature 1..16: note = synthetic [barcode part1]
  source 1..16: mol_type = other DNA
tgcgtccttcaatagt

SEQ ID NO: 29254 - DNA, 16 bp, synthetic construct
  misc_feature 1..16: note = synthetic [barcode part1]
  source 1..16: mol_type = other DNA
caactcaactcggtag

SEQ ID NO: 29255 - DNA, 16 bp, synthetic construct
  misc_feature 1..16: note = synthetic [barcode part1]
  source 1..16: mol_type = other DNA
aggcgtaagtcaccag

SEQ ID NO: 29256 - DNA, 16 bp, synthetic construct
  misc_feature 1..16: note = synthetic [barcode part1]
  source 1..16: mol_type = other DNA
agacagaatctcaggt

SEQ ID NO: 29257 - DNA, 16 bp, synthetic construct
  misc_feature 1..16: note = synthetic [barcode part1]
  source 1..16: mol_type = other DNA
gtggcacgttacaatc

SEQ ID NO: 29258 - DNA, 16 bp, synthetic construct
  misc_feature 1..16: note = synthetic [barcode part1]
  source 1..16: mol_type = other DNA
aacacaactcagtgag

SEQ ID NO: 29259 - DNA, 16 bp, synthetic construct
  misc_feature 1..16: note = synthetic [barcode part1]
  source 1..16: mol_type = other DNA
tgaggtcgtattgcgt

SEQ ID NO: 29260 - DNA, 16 bp, synthetic construct
  misc_feature 1..16: note = synthetic [barcode part1]
  source 1..16: mol_type = other DNA
cgcaagagttgtcgag

SEQ ID NO: 29261 - DNA, 16 bp, synthetic construct
  misc_feature 1..16: note = synthetic [barcode part1]
  source 1..16: mol_type = other DNA
agactgtgtctccgtc

SEQ ID NO: 29262 - DNA, 16 bp, synthetic construct
  misc_feature 1..16: note = synthetic [barcode part1]
  source 1..16: mol_type = other DNA
gtaactctccacgtcg

SEQ ID NO: 29263 - DNA, 16 bp, synthetic construct
  misc_feature 1..16: note = synthetic [barcode part1]
  source 1..16: mol_type = other DNA
gaacggagttcacttc

SEQ ID NO: 29264 - DNA, 16 bp, synthetic construct
  misc_feature 1..16: note = synthetic [barcode part1]
  source 1..16: mol_type = other DNA
acgacgacttagtctg

SEQ ID NO: 29265 - DNA, 16 bp, synthetic construct
  misc_feature 1..16: note = synthetic [barcode part1]
  source 1..16: mol_type = other DNA
ttcactactaacgtgc

SEQ ID NO: 29266 - DNA, 16 bp, synthetic construct
  misc_feature 1..16: note = synthetic [barcode part1]
  source 1..16: mol_type = other DNA
tatccttgttaggtcg

SEQ ID NO: 29267 - DNA, 16 bp, synthetic construct
  misc_feature 1..16: note = synthetic [barcode part1]
  source 1..16: mol_type = other DNA
cctagtaggcaattcg

SEQ ID NO: 29268 - DNA, 16 bp, synthetic construct
  misc_feature 1..16: note = synthetic [barcode part1]
  source 1..16: mol_type = other DNA
ttgttacgtgagttcc

SEQ ID NO: 29269 - DNA, 16 bp, synthetic construct
  misc_feature 1..16: note = synthetic [barcode part1]
  source 1..16: mol_type = other DNA
ccagtataatctcctg

SEQ ID NO: 29270 - DNA, 16 bp, synthetic construct
  misc_feature 1..16: note = synthetic [barcode part1]
  source 1..16: mol_type = other DNA
tgtactgagtcctccg

SEQ ID NO: 29271 - DNA, 16 bp, synthetic construct
  misc_feature 1..16: note = synthetic [barcode part1]
  source 1..16: mol_type = other DNA
cgcgaatcactgtcct

SEQ ID NO: 29272 - DNA, 16 bp, synthetic construct
  misc_feature 1..16: note = synthetic [barcode part1]
  source 1..16: mol_type = other DNA
agtaaggcgcagacct

SEQ ID NO: 29273 - DNA, 16 bp, synthetic construct
  misc_feature 1..16: note = synthetic [barcode part1]
  source 1..16: mol_type = other DNA
gaggtgacttactgtc

SEQ ID NO: 29274 - DNA, 16 bp, synthetic construct
  misc_feature 1..16: note = synthetic [barcode part1]
  source 1..16: mol_type = other DNA
tggtctaacagaggcg

SEQ ID NO: 29275 - DNA, 16 bp, synthetic construct
  misc_feature 1..16: note = synthetic [barcode part1]
  source 1..16: mol_type = other DNA
atcgcaggtctcaagt

SEQ ID NO: 29276 - DNA, 16 bp, synthetic construct
  misc_feature 1..16: note = synthetic [barcode part1]
  source 1..16: mol_type = other DNA
tccacgtgtcaccaac

SEQ ID NO: 29277 - DNA, 16 bp, synthetic construct
  misc_feature 1..16: note = synthetic [barcode part1]
  source 1..16: mol_type = other DNA
cctgaattcgtgcaag

SEQ ID NO: 29278 - DNA, 16 bp, synthetic construct
  misc_feature 1..16: note = synthetic [barcode part1]
  source 1..16: mol_type = other DNA
cggaacaacaactgcg

SEQ ID NO: 29279 - DNA, 16 bp, synthetic construct
  misc_feature 1..16: note = synthetic [barcode part1]
  source 1..16: mol_type = other DNA
gacactgagaaggagt

SEQ ID NO: 29280 - DNA, 16 bp, synthetic construct
  misc_feature 1..16: note = synthetic [barcode part1]
  source 1..16: mol_type = other DNA
ttcctcgacgaagtag

SEQ ID NO: 29281 - DNA, 16 bp, synthetic construct
  misc_feature 1..16: note = synthetic [barcode part1]
  source 1..16: mol_type = other DNA
cgaccaacacaacact

SEQ ID NO: 29282 - DNA, 16 bp, synthetic construct
  misc_feature 1..16: note = synthetic [barcode part1]
  source 1..16: mol_type = other DNA
tcttcagtgacacgtt

SEQ ID NO: 29283 - DNA, 16 bp, synthetic construct
  misc_feature 1..16: note = synthetic [barcode part1]
  source 1..16: mol_type = other DNA
atctcaccggaagact

SEQ ID NO: 29284 - DNA, 16 bp, synthetic construct
  misc_feature 1..16: note = synthetic [barcode part1]
  source 1..16: mol_type = other DNA
accgttccactacttc

SEQ ID NO: 29285 - DNA, 16 bp, synthetic construct
  misc_feature 1..16: note = synthetic [barcode part1]
  source 1..16: mol_type = other DNA
tgtgttgtcagttctg

SEQ ID NO: 29286 - DNA, 16 bp, synthetic construct
  misc_feature 1..16: note = synthetic [barcode part1]
  source 1..16: mol_type = other DNA
gacaatacgaacactg

SEQ ID NO: 29287 - DNA, 16 bp, synthetic construct
  misc_feature 1..16: note = synthetic [barcode part1]
  source 1..16: mol_type = other DNA
caccttgagtatccgc

SEQ ID NO: 29288 - DNA, 16 bp, synthetic construct
  misc_feature 1..16: note = synthetic [barcode part1]
  source 1..16: mol_type = other DNA
gttggcctaataccag

SEQ ID NO: 29289 - DNA, 16 bp, synthetic construct
  misc_feature 1..16: note = synthetic [barcode part1]
  source 1..16: mol_type = other DNA
acacgcaactagtcgt

SEQ ID NO: 29290 - DNA, 16 bp, synthetic construct
  misc_feature 1..16: note = synthetic [barcode part1]
  source 1..16: mol_type = other DNA
gtagtgtatcgtgacc

SEQ ID NO: 29291 - DNA, 16 bp, synthetic construct
  misc_feature 1..16: note = synthetic [barcode part1]
  source 1..16: mol_type = other DNA
cgcgatccgataagag

SEQ ID NO: 29292 - DNA, 16 bp, synthetic construct
  misc_feature 1..16: note = synthetic [barcode part1]
  source 1..16: mol_type = other DNA
acctcggatactacag

SEQ ID NO: 29293 - DNA, 16 bp, synthetic construct
  misc_feature 1..16: note = synthetic [barcode part1]
  source 1..16: mol_type = other DNA
acactagtacgtcgac

SEQ ID NO: 29294 - DNA, 16 bp, synthetic construct
  misc_feature 1..16: note = synthetic [barcode part1]
  source 1..16: mol_type = other DNA
tctatcgtgacgaggt

SEQ ID NO: 29295 - DNA, 16 bp, synthetic construct
  misc_feature 1..16: note = synthetic [barcode part1]
  source 1..16: mol_type = other DNA
gaactcgttacgtggt

SEQ ID NO: 29296 - DNA, 16 bp, synthetic construct
  misc_feature 1..16: note = synthetic [barcode part1]
  source 1..16: mol_type = other DNA
cggtacactctaccgt

SEQ ID NO: 29297 - DNA, 16 bp, synthetic construct
  misc_feature 1..16: note = synthetic [barcode part1]
  source 1..16: mol_type = other DNA
gcgactaagagtcggt

SEQ ID NO: 29298 - DNA, 16 bp, synthetic construct
  misc_feature 1..16: note = synthetic [barcode part1]
  source 1..16: mol_type = other DNA
gtattaagaggtggtc

SEQ ID NO: 29299 - DNA, 16 bp, synthetic construct
  misc_feature 1..16: note = synthetic [barcode part1]
  source 1..16: mol_type = other DNA
cggtgcacgatagaac

SEQ ID NO: 29300 - DNA, 16 bp, synthetic construct
  misc_feature 1..16: note = synthetic [barcode part1]
  source 1..16: mol_type = other DNA
tagttggcgatcgatc

SEQ ID NO: 29301 - DNA, 16 bp, synthetic construct
  misc_feature 1..16: note = synthetic [barcode part1]
  source 1..16: mol_type = other DNA
gtcagaggtattggcg

SEQ ID NO: 29302 - DNA, 16 bp, synthetic construct
  misc_feature 1..16: note = synthetic [barcode part1]
  source 1..16: mol_type = other DNA
caactggtctccttct

SEQ ID NO: 29303 - DNA, 16 bp, synthetic construct
  misc_feature 1..16: note = synthetic [barcode part1]
  source 1..16: mol_type = other DNA
gtcgtataaggtaacg

SEQ ID NO: 29304 - DNA, 16 bp, synthetic construct
  misc_feature 1..16: note = synthetic [barcode part1]
  source 1..16: mol_type = other DNA
gtcgtgccttctaacg

SEQ ID NO: 29305 - DNA, 16 bp, synthetic construct
  misc_feature 1..16: note = synthetic [barcode part1]
  source 1..16: mol_type = other DNA
aactggtacgtacacc

SEQ ID NO: 29306 - DNA, 16 bp, synthetic construct
  misc_feature 1..16: note = synthetic [barcode part1]
  source 1..16: mol_type = other DNA
taaccaacgcgacgtt

SEQ ID NO: 29307 - DNA, 16 bp, synthetic construct
  misc_feature 1..16: note = synthetic [barcode part1]
  source 1..16: mol_type = other DNA
gtcactcacctataac

SEQ ID NO: 29308 - DNA, 16 bp, synthetic construct
  misc_feature 1..16: note = synthetic [barcode part1]
  source 1..16: mol_type = other DNA
ttacttccgacctctg

SEQ ID NO: 29309 - DNA, 16 bp, synthetic construct
  misc_feature 1..16: note = synthetic [barcode part1]
  source 1..16: mol_type = other DNA
tgcgttatcaattccg

SEQ ID NO: 29310 - DNA, 16 bp, synthetic construct
  misc_feature 1..16: note = synthetic [barcode part1]
  source 1..16: mol_type = other DNA
tagtcgtatagtcgcg

SEQ ID NO: 29311 - DNA, 16 bp, synthetic construct
  misc_feature 1..16: note = synthetic [barcode part1]
  source 1..16: mol_type = other DNA
ttatcaccgccacttc

SEQ ID NO: 29312 - DNA, 16 bp, synthetic construct
  misc_feature 1..16: note = synthetic [barcode part1]
  source 1..16: mol_type = other DNA
agactggtgattgtag

SEQ ID NO: 29313 - DNA, 16 bp, synthetic construct
  misc_feature 1..16: note = synthetic [barcode part1]
  source 1..16: mol_type = other DNA
cactactgtagtcact

SEQ ID NO: 29314 - DNA, 16 bp, synthetic construct
  misc_feature 1..16: note = synthetic [barcode part1]
  source 1..16: mol_type = other DNA
tctggtcctaacttcc

SEQ ID NO: 29315 - DNA, 16 bp, synthetic construct
  misc_feature 1..16: note = synthetic [barcode part1]
  source 1..16: mol_type = other DNA
tctgttggcgcgactt

SEQ ID NO: 29316 - DNA, 16 bp, synthetic construct
  misc_feature 1..16: note = synthetic [barcode part1]
  source 1..16: mol_type = other DNA
agatccgtgttctact

SEQ ID NO: 29317 - DNA, 16 bp, synthetic construct
  misc_feature 1..16: note = synthetic [barcode part1]
  source 1..16: mol_type = other DNA
tgtgtccagtggtctc

SEQ ID NO: 29318 - DNA, 16 bp, synthetic construct
  misc_feature 1..16: note = synthetic [barcode part1]
  source 1..16: mol_type = other DNA
tataggacgcaaggag

SEQ ID NO: 29319 - DNA, 16 bp, synthetic construct
  misc_feature 1..16: note = synthetic [barcode part1]
  source 1..16: mol_type = other DNA
aggcagtctagtgcag

SEQ ID NO: 29320 - DNA, 16 bp, synthetic construct
  misc_feature 1..16: note = synthetic [barcode part1]
  source 1..16: mol_type = other DNA
gttgttcctgtaggtt

SEQ ID NO: 29321 - DNA, 16 bp, synthetic construct
  misc_feature 1..16: note = synthetic [barcode part1]
  source 1..16: mol_type = other DNA
caactagagtcctgac

SEQ ID NO: 29322 - DNA, 16 bp, synthetic construct
  misc_feature 1..16: note = synthetic [barcode part1]
  source 1..16: mol_type = other DNA
gaaccgaacgcgttag

SEQ ID NO: 29323 - DNA, 16 bp, synthetic construct
  misc_feature 1..16: note = synthetic [barcode part1]
  source 1..16: mol_type = other DNA
ccagtggtaagagtgc

SEQ ID NO: 29324 - DNA, 16 bp, synthetic construct
  misc_feature 1..16: note = synthetic [barcode part1]
  source 1..16: mol_type = other DNA
agacagagtaggcagt

SEQ ID NO: 29325 - DNA, 16 bp, synthetic construct
  misc_feature 1..16: note = synthetic [barcode part1]
  source 1..16: mol_type = other DNA
attctggtagtgccag

SEQ ID NO: 29326 - DNA, 16 bp, synthetic construct
  misc_feature 1..16: note = synthetic [barcode part1]
  source 1..16: mol_type = other DNA
aagattgtgcgagttg

SEQ ID NO: 29327 - DNA, 16 bp, synthetic construct
  misc_feature 1..16: note = synthetic [barcode part1]
  source 1..16: mol_type = other DNA
aaccagtctgagatcc

SEQ ID NO: 29328 - DNA, 16 bp, synthetic construct
  misc_feature 1..16: note = synthetic [barcode part1]
  source 1..16: mol_type = other DNA
cctgcgagtaacagag

SEQ ID NO: 29329 - DNA, 16 bp, synthetic construct
  misc_feature 1..16: note = synthetic [barcode part1]
  source 1..16: mol_type = other DNA
aggtggtccaatatag

SEQ ID NO: 29330 - DNA, 16 bp, synthetic construct
  misc_feature 1..16: note = synthetic [barcode part1]
  source 1..16: mol_type = other DNA
ccactattgcctaagt

SEQ ID NO: 29331 - DNA, 16 bp, synthetic construct
  misc_feature 1..16: note = synthetic [barcode part1]
  source 1..16: mol_type = other DNA
ttccacggattgttac

SEQ ID NO: 29332 - DNA, 16 bp, synthetic construct
  misc_feature 1..16: note = synthetic [barcode part1]
  source 1..16: mol_type = other DNA
agtcgagactcgagtg

SEQ ID NO: 29333 - DNA, 16 bp, synthetic construct
  misc_feature 1..16: note = synthetic [barcode part1]
  source 1..16: mol_type = other DNA
gcgttgaactacttct

SEQ ID NO: 29334 - DNA, 16 bp, synthetic construct
  misc_feature 1..16: note = synthetic [barcode part1]
  source 1..16: mol_type = other DNA
acgtgttgtgactgtg

SEQ ID NO: 29335 - DNA, 16 bp, synthetic construct
  misc_feature 1..16: note = synthetic [barcode part1]
  source 1..16: mol_type = other DNA
agacgttacggattcc

SEQ ID NO: 29336 - DNA, 16 bp, synthetic construct
  misc_feature 1..16: note = synthetic [barcode part1]
  source 1..16: mol_type = other DNA
cctatcggactacgtc

SEQ ID NO: 29337 - DNA, 16 bp, synthetic construct
  misc_feature 1..16: note = synthetic [barcode part1]
  source 1..16: mol_type = other DNA
gttcgtctctagaatc

SEQ ID NO: 29338 - DNA, 16 bp, synthetic construct
  misc_feature 1..16: note = synthetic [barcode part1]
  source 1..16: mol_type = other DNA
tccgttctctggaacg

SEQ ID NO: 29339 - DNA, 16 bp, synthetic construct
  misc_feature 1..16: note = synthetic [barcode part1]
  source 1..16: mol_type = other DNA
tgtagacgtcctgtcc

SEQ ID NO: 29340 - DNA, 16 bp, synthetic construct
  misc_feature 1..16: note = synthetic [barcode part1]
  source 1..16: mol_type = other DNA
cgacagatatcgtctg

SEQ ID NO: 29341 - DNA, 16 bp, synthetic construct
  misc_feature 1..16: note = synthetic [barcode part1]
  source 1..16: mol_type = other DNA
acgcaacacgtatcgt

SEQ ID NO: 29342 - DNA, 16 bp, synthetic construct
  misc_feature 1..16: note = synthetic [barcode part1]
  source 1..16: mol_type = other DNA
gaacactgtggcgaac

SEQ ID NO: 29343 - DNA, 16 bp, synthetic construct
  misc_feature 1..16: note = synthetic [barcode part1]
  source 1..16: mol_type = other DNA
tgagtgtcaacttctc

SEQ ID NO: 29344 - DNA, 16 bp, synthetic construct
  misc_feature 1..16: note = synthetic [barcode part1]
  source 1..16: mol_type = other DNA
tgattcgtgtctctag

SEQ ID NO: 29345 - DNA, 16 bp, synthetic construct
  misc_feature 1..16: note = synthetic [barcode part1]
  source 1..16: mol_type = other DNA
gttggcggcaattatc

SEQ ID NO: 29346 - DNA, 16 bp, synthetic construct
  misc_feature 1..16: note = synthetic [barcode part1]
  source 1..16: mol_type = other DNA
acaccggtatattggc

SEQ ID NO: 29347 - DNA, 16 bp, synthetic construct
  misc_feature 1..16: note = synthetic [barcode part1]
  source 1..16: mol_type = other DNA
caacgagaagtgacag

SEQ ID NO: 29348 - DNA, 16 bp, synthetic construct
  misc_feature 1..16: note = synthetic [barcode part1]
  source 1..16: mol_type = other DNA
tgtgaactgccactcc

SEQ ID NO: 29349 - DNA, 16 bp, synthetic construct
  misc_feature 1..16: note = synthetic [barcode part1]
  source 1..16: mol_type = other DNA
atctatcgacagacgc

SEQ ID NO: 29350 - DNA, 16 bp, synthetic construct
  misc_feature 1..16: note = synthetic [barcode part1]
  source 1..16: mol_type = other DNA
acttccaacctggcgt

SEQ ID NO: 29351 - DNA, 16 bp, synthetic construct
  misc_feature 1..16: note = synthetic [barcode part1]
  source 1..16: mol_type = other DNA
tcctgatccttcgact

SEQ ID NO: 29352 - DNA, 16 bp, synthetic construct
  misc_feature 1..16: note = synthetic [barcode part1]
  source 1..16: mol_type = other DNA
cgaaggattgaaggac

SEQ ID NO: 29353 - DNA, 16 bp, synthetic construct
  misc_feature 1..16: note = synthetic [barcode part1]
  source 1..16: mol_type = other DNA
caattcgcctacaccg

SEQ ID NO: 29354 - DNA, 16 bp, synthetic construct
  misc_feature 1..16: note = synthetic [barcode part1]
  source 1..16: mol_type = other DNA
agatacactctgcacg

SEQ ID NO: 29355 - DNA, 16 bp, synthetic construct
  misc_feature 1..16: note = synthetic [barcode part1]
  source 1..16: mol_type = other DNA
tacttcgccgcaggtt

SEQ ID NO: 29356 - DNA, 16 bp, synthetic construct
  misc_feature 1..16: note = synthetic [barcode part1]
  source 1..16: mol_type = other DNA
gtcgagtccgttaagt

SEQ ID NO: 29357 - DNA, 16 bp, synthetic construct
  misc_feature 1..16: note = synthetic [barcode part1]
  source 1..16: mol_type = other DNA
tgacactcctatctag

SEQ ID NO: 29358 - DNA, 16 bp, synthetic construct
  misc_feature 1..16: note = synthetic [barcode part1]
  source 1..16: mol_type = other DNA
ttgaccaactggtcag

SEQ ID NO: 29359 - DNA, 16 bp, synthetic construct
  misc_feature 1..16: note = synthetic [barcode part1]
  source 1..16: mol_type = other DNA
taagatcgccgcaact

SEQ ID NO: 29360 - DNA, 16 bp, synthetic construct
  misc_feature 1..16: note = synthetic [barcode part1]
  source 1..16: mol_type = other DNA
cgcagatacaagtcct

SEQ ID NO: 29361 - DNA, 16 bp, synthetic construct
  misc_feature 1..16: note = synthetic [barcode part1]
  source 1..16: mol_type = other DNA
tacacaggacaacaac

SEQ ID NO: 29362 - DNA, 16 bp, synthetic construct
  misc_feature 1..16: note = synthetic [barcode part1]
  source 1..16: mol_type = other DNA
ccggtacaagatcgag

SEQ ID NO: 29363 - DNA, 16 bp, synthetic construct
  misc_feature 1..16: note = synthetic [barcode part1]
  source 1..16: mol_type = other DNA
tagtctcggtcgaagt

SEQ ID NO: 29364 - DNA, 16 bp, synthetic construct
  misc_feature 1..16: note = synthetic [barcode part1]
  source 1..16: mol_type = other DNA
tattctcggtctaacg

SEQ ID NO: 29365 - DNA, 16 bp, synthetic construct
  misc_feature 1..16: note = synthetic [barcode part1]
  source 1..16: mol_type = other DNA
gaatcaccgttagacc

SEQ ID NO: 29366 - DNA, 16 bp, synthetic construct
  misc_feature 1..16: note = synthetic [barcode part1]
  source 1..16: mol_type = other DNA
actgatcctccaagag

SEQ ID NO: 29367 - DNA, 16 bp, synthetic construct
  misc_feature 1..16: note = synthetic [barcode part1]
  source 1..16: mol_type = other DNA
ttaaggtcgtcgtggt

SEQ ID NO: 29368 - DNA, 16 bp, synthetic construct
  misc_feature 1..16: note = synthetic [barcode part1]
  source 1..16: mol_type = other DNA
tgtcacctgccttatc

SEQ ID NO: 29369 - DNA, 16 bp, synthetic construct
  misc_feature 1..16: note = synthetic [barcode part1]
  source 1..16: mol_type = other DNA
tcaagtgattccgttc

SEQ ID NO: 29370 - DNA, 16 bp, synthetic construct
  misc_feature 1..16: note = synthetic [barcode part1]
  source 1..16: mol_type = other DNA
tagtggttgacagtcc

SEQ ID NO: 29371 - DNA, 16 bp, synthetic construct
  misc_feature 1..16: note = synthetic [barcode part1]
  source 1..16: mol_type = other DNA
gttggtgactcaggtt

SEQ ID NO: 29372 - DNA, 16 bp, synthetic construct
  misc_feature 1..16: note = synthetic [barcode part1]
  source 1..16: mol_type = other DNA
cgtctacttgcaatac

SEQ ID NO: 29373 - DNA, 16 bp, synthetic construct
  misc_feature 1..16: note = synthetic [barcode part1]
  source 1..16: mol_type = other DNA
tgacgtgatcactctt

SEQ ID NO: 29374 - DNA, 16 bp, synthetic construct
  misc_feature 1..16: note = synthetic [barcode part1]
  source 1..16: mol_type = other DNA
tcgaatcctaacgacg

SEQ ID NO: 29375 - DNA, 16 bp, synthetic construct
  misc_feature 1..16: note = synthetic [barcode part1]
  source 1..16: mol_type = other DNA
tctaggaccagtcaac

SEQ ID NO: 29376 - DNA, 16 bp, synthetic construct
  misc_feature 1..16: note = synthetic [barcode part1]
  source 1..16: mol_type = other DNA
gaggcgagttctactt

SEQ ID NO: 29377 - DNA, 16 bp, synthetic construct
  misc_feature 1..16: note = synthetic [barcode part1]
  source 1..16: mol_type = other DNA
cggcacgaaggattgt

SEQ ID NO: 29378 - DNA, 16 bp, synthetic construct
  misc_feature 1..16: note = synthetic [barcode part1]
  source 1..16: mol_type = other DNA
acggtagtatcgatag

SEQ ID NO: 29379 - DNA, 16 bp, synthetic construct
  misc_feature 1..16: note = synthetic [barcode part1]
  source 1..16: mol_type = other DNA
ccaacctgcgattgtc

SEQ ID NO: 29380 - DNA, 16 bp, synthetic construct
  misc_feature 1..16: note = synthetic [barcode part1]
  source 1..16: mol_type = other DNA
actcagagtaggttcc

SEQ ID NO: 29381 - DNA, 16 bp, synthetic construct
  misc_feature 1..16: note = synthetic [barcode part1]
  source 1..16: mol_type = other DNA
cggttcggataacttg

SEQ ID NO: 29382 - DNA, 16 bp, synthetic construct
  misc_feature 1..16: note = synthetic [barcode part1]
  source 1..16: mol_type = other DNA
gtccggttacaccttg

SEQ ID NO: 29383 - DNA, 16 bp, synthetic construct
  misc_feature 1..16: note = synthetic [barcode part1]
  source 1..16: mol_type = other DNA
tgcgcgtactatagtg

SEQ ID NO: 29384 - DNA, 16 bp, synthetic construct
  misc_feature 1..16: note = synthetic [barcode part1]
  source 1..16: mol_type = other DNA
aactgtggaggtcgac

SEQ ID NO: 29385 - DNA, 16 bp, synthetic construct
  misc_feature 1..16: note = synthetic [barcode part1]
  source 1..16: mol_type = other DNA
atcctacggcacacct

SEQ ID NO: 29386 - DNA, 16 bp, synthetic construct
  misc_feature 1..16: note = synthetic [barcode part1]
  source 1..16: mol_type = other DNA
tgacttctaacgcgtt

SEQ ID NO: 29387 - DNA, 16 bp, synthetic construct
  misc_feature 1..16: note = synthetic [barcode part1]
  source 1..16: mol_type = other DNA
tcctctgtccaattcg

SEQ ID NO: 29388 - DNA, 16 bp, synthetic construct
  misc_feature 1..16: note = synthetic [barcode part1]
  source 1..16: mol_type = other DNA
tcaaggcacctatctt

SEQ ID NO: 29389 - DNA, 16 bp, synthetic construct
  misc_feature 1..16: note = synthetic [barcode part1]
  source 1..16: mol_type = other DNA
tactgtcgtcttccgt

SEQ ID NO: 29390 - DNA, 16 bp, synthetic construct
  misc_feature 1..16: note = synthetic [barcode part1]
  source 1..16: mol_type = other DNA
aacgtctcggaagacg

SEQ ID NO: 29391 - DNA, 16 bp, synthetic construct
  misc_feature 1..16: note = synthetic [barcode part1]
  source 1..16: mol_type = other DNA
caacttccaatcgtgt

SEQ ID NO: 29392 - DNA, 16 bp, synthetic construct
  misc_feature 1..16: note = synthetic [barcode part1]
  source 1..16: mol_type = other DNA
ttccacgttgaaccgc

SEQ ID NO: 29393 - DNA, 16 bp, synthetic construct
  misc_feature 1..16: note = synthetic [barcode part1]
  source 1..16: mol_type = other DNA
gtgtctcaatctgatc

SEQ ID NO: 29394 - DNA, 16 bp, synthetic construct
  misc_feature 1..16: note = synthetic [barcode part1]
  source 1..16: mol_type = other DNA
ttctaggagtgagtag

SEQ ID NO: 29395 - DNA, 16 bp, synthetic construct
  misc_feature 1..16: note = synthetic [barcode part1]
  source 1..16: mol_type = other DNA
cgtaggaccaggttag

SEQ ID NO: 29396 - DNA, 16 bp, synthetic construct
  misc_feature 1..16: note = synthetic [barcode part1]
  source 1..16: mol_type = other DNA
aggtaccactctgcct

SEQ ID NO: 29397 - DNA, 16 bp, synthetic construct
  misc_feature 1..16: note = synthetic [barcode part1]
  source 1..16: mol_type = other DNA
cgaacaccgtatcagt

SEQ ID NO: 29398 - DNA, 16 bp, synthetic construct
  misc_feature 1..16: note = synthetic [barcode part1]
  source 1..16: mol_type = other DNA
cgtaacaacggtgttc

SEQ ID NO: 29399 - DNA, 16 bp, synthetic construct
  misc_feature 1..16: note = synthetic [barcode part1]
  source 1..16: mol_type = other DNA
gtacggcagaaggttc

SEQ ID NO: 29400 - DNA, 16 bp, synthetic construct
  misc_feature 1..16: note = synthetic [barcode part1]
  source 1..16: mol_type = other DNA
tggtcctgttaatacc

SEQ ID NO: 29401 - DNA, 16 bp, synthetic construct
  misc_feature 1..16: note = synthetic [barcode part1]
  source 1..16: mol_type = other DNA
acgtgccagtgtattg

SEQ ID NO: 29402 - DNA, 16 bp, synthetic construct
  misc_feature 1..16: note = synthetic [barcode part1]
  source 1..16: mol_type = other DNA
aaggttcggcaagtgc

SEQ ID NO: 29403 - DNA, 16 bp, synthetic construct
  misc_feature 1..16: note = synthetic [barcode part1]
  source 1..16: mol_type = other DNA
agttaattgaccggcc

SEQ ID NO: 29404 - DNA, 16 bp, synthetic construct
  misc_feature 1..16: note = synthetic [barcode part1]
  source 1..16: mol_type = other DNA
tccgaagtcggaactt

SEQ ID NO: 29405 - DNA, 16 bp, synthetic construct
  misc_feature 1..16: note = synthetic [barcode part1]
  source 1..16: mol_type = other DNA
tgagaggactgtgtgc

SEQ ID NO: 29406 - DNA, 16 bp, synthetic construct
  misc_feature 1..16: note = synthetic [barcode part1]
  source 1..16: mol_type = other DNA
tctacgtaacctggtt

SEQ ID NO: 29407 - DNA, 16 bp, synthetic construct
  misc_feature 1..16: note = synthetic [barcode part1]
  source 1..16: mol_type = other DNA
tacgatctacggatcg

SEQ ID NO: 29408 - DNA, 16 bp, synthetic construct
  misc_feature 1..16: note = synthetic [barcode part1]
  source 1..16: mol_type = other DNA
ccgatcgttaatcgag

SEQ ID NO: 29409 - DNA, 16 bp, synthetic construct
  misc_feature 1..16: note = synthetic [barcode part1]
  source 1..16: mol_type = other DNA
tcaccacacgagtctc

SEQ ID NO: 29410 - DNA, 16 bp, synthetic construct
  misc_feature 1..16: note = synthetic [barcode part1]
  source 1..16: mol_type = other DNA
gattagattcgcgaag

SEQ ID NO: 29411 - DNA, 16 bp, synthetic construct
  misc_feature 1..16: note = synthetic [barcode part1]
  source 1..16: mol_type = other DNA
actcaaggtagactcc

SEQ ID NO: 29412 - DNA, 16 bp, synthetic construct
  misc_feature 1..16: note = synthetic [barcode part1]
  source 1..16: mol_type = other DNA
gaccagtagaactcct

SEQ ID NO: 29413 - DNA, 16 bp, synthetic construct
  misc_feature 1..16: note = synthetic [barcode part1]
  source 1..16: mol_type = other DNA
cacgtcttgaactatc

SEQ ID NO: 29414 - DNA, 16 bp, synthetic construct
  misc_feature 1..16: note = synthetic [barcode part1]
  source 1..16: mol_type = other DNA
gcggacttcttcgatc

SEQ ID NO: 29415 - DNA, 16 bp, synthetic construct
  misc_feature 1..16: note = synthetic [barcode part1]
  source 1..16: mol_type = other DNA
tgcacttacttggtgt

SEQ ID NO: 29416 - DNA, 16 bp, synthetic construct
  misc_feature 1..16: note = synthetic [barcode part1]
  source 1..16: mol_type = other DNA
gcctcttagtcagaag

SEQ ID NO: 29417 - DNA, 16 bp, synthetic construct
  misc_feature 1..16: note = synthetic [barcode part1]
  source 1..16: mol_type = other DNA
gtgccacggtagatag

SEQ ID NO: 29418 - DNA, 16 bp, synthetic construct
  misc_feature 1..16: note = synthetic [barcode part1]
  source 1..16: mol_type = other DNA
tctggatctatcgccg

SEQ ID NO: 29419 - DNA, 16 bp, synthetic construct
  misc_feature 1..16: note = synthetic [barcode part1]
  source 1..16: mol_type = other DNA
aatcaacgtaccgcgt

SEQ ID NO: 29420 - DNA, 16 bp, synthetic construct
  misc_feature 1..16: note = synthetic [barcode part1]
  source 1..16: mol_type = other DNA
gaaggcggacaactct

SEQ ID NO: 29421 - DNA, 16 bp, synthetic construct
  misc_feature 1..16: note = synthetic [barcode part1]
  source 1..16: mol_type = other DNA
gtcacgcggaataacg

SEQ ID NO: 29422 - DNA, 16 bp, synthetic construct
  misc_feature 1..16: note = synthetic [barcode part1]
  source 1..16: mol_type = other DNA
ttctgatcggtctctc

SEQ ID NO: 29423 - DNA, 16 bp, synthetic construct
  misc_feature 1..16: note = synthetic [barcode part1]
  source 1..16: mol_type = other DNA
tcgagaggagaatcag

SEQ ID NO: 29424 - DNA, 16 bp, synthetic construct
  misc_feature 1..16: note = synthetic [barcode part1]
  source 1..16: mol_type = other DNA
tgtggatcgtcactcc

SEQ ID NO: 29425 - DNA, 16 bp, synthetic construct
  misc_feature 1..16: note = synthetic [barcode part1]
  source 1..16: mol_type = other DNA
ttgcctgtgttcactc

SEQ ID NO: 29426 - DNA, 16 bp, synthetic construct
  misc_feature 1..16: note = synthetic [barcode part1]
  source 1..16: mol_type = other DNA
tgcagacgacaagatt

SEQ ID NO: 29427 - DNA, 16 bp, synthetic construct
  misc_feature 1..16: note = synthetic [barcode part1]
  source 1..16: mol_type = other DNA
taattggcgcgacgtt

SEQ ID NO: 29428 - DNA, 16 bp, synthetic construct
  misc_feature 1..16: note = synthetic [barcode part1]
  source 1..16: mol_type = other DNA
tacgtcagtgtgtcag

SEQ ID NO: 29429 - DNA, 16 bp, synthetic construct
  misc_feature 1..16: note = synthetic [barcode part1]
  source 1..16: mol_type = other DNA
atctccactaccaagt

SEQ ID NO: 29430 - DNA, 16 bp, synthetic construct
  misc_feature 1..16: note = synthetic [barcode part1]
  source 1..16: mol_type = other DNA
taatccttgtacgacc

SEQ ID NO: 29431 - DNA, 16 bp, synthetic construct
  misc_feature 1..16: note = synthetic [barcode part1]
  source 1..16: mol_type = other DNA
aagaacacaggagtgc

SEQ ID NO: 29432 - DNA, 16 bp, synthetic construct
  misc_feature 1..16: note = synthetic [barcode part1]
  source 1..16: mol_type = other DNA
tcggtaagtctccacc

SEQ ID NO: 29433 - DNA, 16 bp, synthetic construct
  misc_feature 1..16: note = synthetic [barcode part1]
  source 1..16: mol_type = other DNA
atccgtcagacagatc

SEQ ID NO: 29434 - DNA, 16 bp, synthetic construct
  misc_feature 1..16: note = synthetic [barcode part1]
  source 1..16: mol_type = other DNA
cgttgtctagaaggtc

SEQ ID NO: 29435 - DNA, 16 bp, synthetic construct
  misc_feature 1..16: note = synthetic [barcode part1]
  source 1..16: mol_type = other DNA
gcctggtattaggttg

SEQ ID NO: 29436 - DNA, 16 bp, synthetic construct
  misc_feature 1..16: note = synthetic [barcode part1]
  source 1..16: mol_type = other DNA
tggatcaggaacacgc

SEQ ID NO: 29437 - DNA, 16 bp, synthetic construct
  misc_feature 1..16: note = synthetic [barcode part1]
  source 1..16: mol_type = other DNA
cgtagttaaggtaacg

SEQ ID NO: 29438 - DNA, 16 bp, synthetic construct
  misc_feature 1..16: note = synthetic [barcode part1]
  source 1..16: mol_type = other DNA
tctattgacgcaactc

SEQ ID NO: 29439 - DNA, 16 bp, synthetic construct
  misc_feature 1..16: note = synthetic [barcode part1]
  source 1..16: mol_type = other DNA
tggtgagaacgcctag

SEQ ID NO: 29440 - DNA, 16 bp, synthetic construct
  misc_feature 1..16: note = synthetic [barcode part1]
  source 1..16: mol_type = other DNA
atagaccgattgcgtc

SEQ ID NO: 29441 - DNA, 16 bp, synthetic construct
  misc_feature 1..16: note = synthetic [barcode part1]
  source 1..16: mol_type = other DNA
tctgtacgtgtggagt

SEQ ID NO: 29442 - DNA, 16 bp, synthetic construct
  misc_feature 1..16: note = synthetic [barcode part1]
  source 1..16: mol_type = other DNA
tcacctaggcactatt

SEQ ID NO: 29443 - DNA, 16 bp, synthetic construct
  misc_feature 1..16: note = synthetic [barcode part1]
  source 1..16: mol_type = other DNA
tgatcggtgcggtatt

SEQ ID NO: 29444 - DNA, 16 bp, synthetic construct
  misc_feature 1..16: note = synthetic [barcode part1]
  source 1..16: mol_type = other DNA
agtaagatcagtacgc

SEQ ID NO: 29445 - DNA, 16 bp, synthetic construct
  misc_feature 1..16: note = synthetic [barcode part1]
  source 1..16: mol_type = other DNA
taacgcagaagtaacc

SEQ ID NO: 29446 - DNA, 16 bp, synthetic construct
  misc_feature 1..16: note = synthetic [barcode part1]
  source 1..16: mol_type = other DNA
agtacgttggttgtgc

SEQ ID NO: 29447 - DNA, 16 bp, synthetic construct
  misc_feature 1..16: note = synthetic [barcode part1]
  source 1..16: mol_type = other DNA
cctgcacagttattgt

SEQ ID NO: 29448 - DNA, 16 bp, synthetic construct
  misc_feature 1..16: note = synthetic [barcode part1]
  source 1..16: mol_type = other DNA
acgttagaactcacgc

SEQ ID NO: 29449 - DNA, 16 bp, synthetic construct
  misc_feature 1..16: note = synthetic [barcode part1]
  source 1..16: mol_type = other DNA
aataacggaactcacg

SEQ ID NO: 29450 - DNA, 16 bp, synthetic construct
  misc_feature 1..16: note = synthetic [barcode part1]
  source 1..16: mol_type = other DNA
aaccaactggttggtc

SEQ ID NO: 29451 - DNA, 16 bp, synthetic construct
  misc_feature 1..16: note = synthetic [barcode part1]
  source 1..16: mol_type = other DNA
ttagtgacctggcagt

SEQ ID NO: 29452 - DNA, 16 bp, synthetic construct
  misc_feature 1..16: note = synthetic [barcode part1]
  source 1..16: mol_type = other DNA
cagacagataacactg

SEQ ID NO: 29453 - DNA, 16 bp, synthetic construct
  misc_feature 1..16: note = synthetic [barcode part1]
  source 1..16: mol_type = other DNA
tagaccttctggacag

SEQ ID NO: 29454 - DNA, 16 bp, synthetic construct
  misc_feature 1..16: note = synthetic [barcode part1]
  source 1..16: mol_type = other DNA
cacacttcaccttcgt

SEQ ID NO: 29455 - DNA, 16 bp, synthetic construct
  misc_feature 1..16: note = synthetic [barcode part1]
  source 1..16: mol_type = other DNA
tctctcctgacactgt

SEQ ID NO: 29456 - DNA, 16 bp, synthetic construct
  misc_feature 1..16: note = synthetic [barcode part1]
  source 1..16: mol_type = other DNA
gtccgtcaacgtcgtt

SEQ ID NO: 29457 - DNA, 16 bp, synthetic construct
  misc_feature 1..16: note = synthetic [barcode part1]
  source 1..16: mol_type = other DNA
tctgaactggactcag

SEQ ID NO: 29458 - DNA, 16 bp, synthetic construct
  misc_feature 1..16: note = synthetic [barcode part1]
  source 1..16: mol_type = other DNA
gaactgtactctcgcc

SEQ ID NO: 29459 - DNA, 16 bp, synthetic construct
  misc_feature 1..16: note = synthetic [barcode part1]
  source 1..16: mol_type = other DNA
gttgcggacttacctc

SEQ ID NO: 29460 - DNA, 16 bp, synthetic construct
  misc_feature 1..16: note = synthetic [barcode part1]
  source 1..16: mol_type = other DNA
gatatcggtcacagtc

SEQ ID NO: 29461 - DNA, 16 bp, synthetic construct
  misc_feature 1..16: note = synthetic [barcode part1]
  source 1..16: mol_type = other DNA
cacttgttgaggttct

SEQ ID NO: 29462 - DNA, 16 bp, synthetic construct
  misc_feature 1..16: note = synthetic [barcode part1]
  source 1..16: mol_type = other DNA
taccactcgttccgtt

SEQ ID NO: 29463 - DNA, 16 bp, synthetic construct
  misc_feature 1..16: note = synthetic [barcode part1]
  source 1..16: mol_type = other DNA
tggtggtctgaactgt

SEQ ID NO: 29464 - DNA, 16 bp, synthetic construct
  misc_feature 1..16: note = synthetic [barcode part1]
  source 1..16: mol_type = other DNA
tagtgtagagacggtt

SEQ ID NO: 29465 - DNA, 16 bp, synthetic construct
  misc_feature 1..16: note = synthetic [barcode part1]
  source 1..16: mol_type = other DNA
tgtacgacgaactcac

SEQ ID NO: 29466 - DNA, 16 bp, synthetic construct
  misc_feature 1..16: note = synthetic [barcode part1]
  source 1..16: mol_type = other DNA
tcaagaaccaacgtag

SEQ ID NO: 29467 - DNA, 16 bp, synthetic construct
  misc_feature 1..16: note = synthetic [barcode part1]
  source 1..16: mol_type = other DNA
tcgttcgaacaccacc

SEQ ID NO: 29468 - DNA, 16 bp, synthetic construct
  misc_feature 1..16: note = synthetic [barcode part1]
  source 1..16: mol_type = other DNA
gactacactggccttc

SEQ ID NO: 29469 - DNA, 16 bp, synthetic construct
  misc_feature 1..16: note = synthetic [barcode part1]
  source 1..16: mol_type = other DNA
tgatctgcactgagtg

SEQ ID NO: 29470 - DNA, 16 bp, synthetic construct
  misc_feature 1..16: note = synthetic [barcode part1]
  source 1..16: mol_type = other DNA
gaccaattcggaactc

SEQ ID NO: 29471 - DNA, 16 bp, synthetic construct
  misc_feature 1..16: note = synthetic [barcode part1]
  source 1..16: mol_type = other DNA
aagaatatccgacggt

SEQ ID NO: 29472 - DNA, 16 bp, synthetic construct
  misc_feature 1..16: note = synthetic [barcode part1]
  source 1..16: mol_type = other DNA
ttactgtagatccacc

SEQ ID NO: 29473 - DNA, 16 bp, synthetic construct
  misc_feature 1..16: note = synthetic [barcode part1]
  source 1..16: mol_type = other DNA
aggcctatcgttatct

SEQ ID NO: 29474 - DNA, 16 bp, synthetic construct
  misc_feature 1..16: note = synthetic [barcode part1]
  source 1..16: mol_type = other DNA
gtgttccttagaccgc

SEQ ID NO: 29475 - DNA, 16 bp, synthetic construct
  misc_feature 1..16: note = synthetic [barcode part1]
  source 1..16: mol_type = other DNA
aactggtcagtactgc

SEQ ID NO: 29476 - DNA, 16 bp, synthetic construct
  misc_feature 1..16: note = synthetic [barcode part1]
  source 1..16: mol_type = other DNA
ccgtaccttcgtactt

SEQ ID NO: 29477 - DNA, 16 bp, synthetic construct
  misc_feature 1..16: note = synthetic [barcode part1]
  source 1..16: mol_type = other DNA
acaattggagaggtct

SEQ ID NO: 29478 - DNA, 16 bp, synthetic construct
  misc_feature 1..16: note = synthetic [barcode part1]
  source 1..16: mol_type = other DNA
tcaacttagacgtctc

SEQ ID NO: 29479 - DNA, 16 bp, synthetic construct
  misc_feature 1..16: note = synthetic [barcode part1]
  source 1..16: mol_type = other DNA
accgagtatcttcact

SEQ ID NO: 29480 - DNA, 16 bp, synthetic construct
  misc_feature 1..16: note = synthetic [barcode part1]
  source 1..16: mol_type = other DNA
tcgtgaagtggagtgc

SEQ ID NO: 29481 - DNA, 16 bp, synthetic construct
  misc_feature 1..16: note = synthetic [barcode part1]
  source 1..16: mol_type = other DNA
tcgagttattggaccg

SEQ ID NO: 29482 - DNA, 16 bp, synthetic construct
  misc_feature 1..16: note = synthetic [barcode part1]
  source 1..16: mol_type = other DNA
tacacacaaccgatcg

SEQ ID NO: 29483 - DNA, 16 bp, synthetic construct
  misc_feature 1..16: note = synthetic [barcode part1]
  source 1..16: mol_type = other DNA
atagactgtcagaggt

SEQ ID NO: 29484 - DNA, 16 bp, synthetic construct
  misc_feature 1..16: note = synthetic [barcode part1]
  source 1..16: mol_type = other DNA
gaacaggttatccacc

SEQ ID NO: 29485 - DNA, 16 bp, synthetic construct
  misc_feature 1..16: note = synthetic [barcode part1]
  source 1..16: mol_type = other DNA
acgtcggtaacaaggc

SEQ ID NO: 29486 - DNA, 16 bp, synthetic construct
  misc_feature 1..16: note = synthetic [barcode part1]
  source 1..16: mol_type = other DNA
tgcgtccaataacctt

SEQ ID NO: 29487 - DNA, 16 bp, synthetic construct
  misc_feature 1..16: note = synthetic [barcode part1]
  source 1..16: mol_type = other DNA
cggagtcgtcaattac

SEQ ID NO: 29488 - DNA, 16 bp, synthetic construct
  misc_feature 1..16: note = synthetic [barcode part1]
  source 1..16: mol_type = other DNA
gcgattactgagaggc

SEQ ID NO: 29489 - DNA, 16 bp, synthetic construct
  misc_feature 1..16: note = synthetic [barcode part1]
  source 1..16: mol_type = other DNA
ttgtccgccacagtac

SEQ ID NO: 29490 - DNA, 16 bp, synthetic construct
  misc_feature 1..16: note = synthetic [barcode part1]
  source 1..16: mol_type = other DNA
gttggatacttggcac

SEQ ID NO: 29491 - DNA, 16 bp, synthetic construct
  misc_feature 1..16: note = synthetic [barcode part1]
  source 1..16: mol_type = other DNA
gtattatacctgtccg

SEQ ID NO: 29492 - DNA, 16 bp, synthetic construct
  misc_feature 1..16: note = synthetic [barcode part1]
  source 1..16: mol_type = other DNA
gacgtattcaactctc

SEQ ID NO: 29493 - DNA, 16 bp, synthetic construct
  misc_feature 1..16: note = synthetic [barcode part1]
  source 1..16: mol_type = other DNA
gtcgttagtgcaggag

SEQ ID NO: 29494 - DNA, 16 bp, synthetic construct
  misc_feature 1..16: note = synthetic [barcode part1]
  source 1..16: mol_type = other DNA
cgacgaacttaagtag

SEQ ID NO: 29495 - DNA, 16 bp, synthetic construct
  misc_feature 1..16: note = synthetic [barcode part1]
  source 1..16: mol_type = other DNA
agtcctatagagtccg

SEQ ID NO: 29496 - DNA, 16 bp, synthetic construct
  misc_feature 1..16: note = synthetic [barcode part1]
  source 1..16: mol_type = other DNA
gacgtattacaaccgc

SEQ ID NO: 29497 - DNA, 16 bp, synthetic construct
  misc_feature 1..16: note = synthetic [barcode part1]
  source 1..16: mol_type = other DNA
agaattcgtagacggt

SEQ ID NO: 29498 - DNA, 16 bp, synthetic construct
  misc_feature 1..16: note = synthetic [barcode part1]
  source 1..16: mol_type = other DNA
gcgactgtaattgcac

SEQ ID NO: 29499 - DNA, 16 bp, synthetic construct
  misc_feature 1..16: note = synthetic [barcode part1]
  source 1..16: mol_type = other DNA
ttcgccgaagacgatt

SEQ ID NO: 29500 - DNA, 16 bp, synthetic construct
  misc_feature 1..16: note = synthetic [barcode part1]
  source 1..16: mol_type = other DNA
tcgcaggtagaggatc

SEQ ID NO: 29501 - DNA, 16 bp, synthetic construct
  misc_feature 1..16: note = synthetic [barcode part1]
  source 1..16: mol_type = other DNA
ccgagtgttacagatc

SEQ ID NO: 29502 - DNA, 16 bp, synthetic construct
  misc_feature 1..16: note = synthetic [barcode part1]
  source 1..16: mol_type = other DNA
gcctgaatctgccgtt

SEQ ID NO: 29503 - DNA, 16 bp, synthetic construct
  misc_feature 1..16: note = synthetic [barcode part1]
  source 1..16: mol_type = other DNA
tacttgtggcgttatc

SEQ ID NO: 29504 - DNA, 16 bp, synthetic construct
  misc_feature 1..16: note = synthetic [barcode part1]
  source 1..16: mol_type = other DNA
cggattgtagtgacct

SEQ ID NO: 29505 - DNA, 16 bp, synthetic construct
  misc_feature 1..16: note = synthetic [barcode part1]
  source 1..16: mol_type = other DNA
acggttgtacgtgact

SEQ ID NO: 29506 - DNA, 16 bp, synthetic construct
  misc_feature 1..16: note = synthetic [barcode part1]
  source 1..16: mol_type = other DNA
ttcacgtcaacggcct

SEQ ID NO: 29507 - DNA, 16 bp, synthetic construct
  misc_feature 1..16: note = synthetic [barcode part1]
  source 1..16: mol_type = other DNA
tgacgcgagaataatc

SEQ ID NO: 29508 - DNA, 16 bp, synthetic construct
  misc_feature 1..16: note = synthetic [barcode part1]
  source 1..16: mol_type = other DNA
gatcgattcagagtcc

SEQ ID NO: 29509 - DNA, 16 bp, synthetic construct
  misc_feature 1..16: note = synthetic [barcode part1]
  source 1..16: mol_type = other DNA
tgtattctgccggacc

SEQ ID NO: 29510 - DNA, 16 bp, synthetic construct
  misc_feature 1..16: note = synthetic [barcode part1]
  source 1..16: mol_type = other DNA
gtcgtgaacgagtggt

SEQ ID NO: 29511 - DNA, 16 bp, synthetic construct
  misc_feature 1..16: note = synthetic [barcode part1]
  source 1..16: mol_type = other DNA
agtggttaccagactc

SEQ ID NO: 29512 - DNA, 16 bp, synthetic construct
  misc_feature 1..16: note = synthetic [barcode part1]
  source 1..16: mol_type = other DNA
ttcagtgcctgcgttg

SEQ ID NO: 29513 - DNA, 16 bp, synthetic construct
  misc_feature 1..16: note = synthetic [barcode part1]
  source 1..16: mol_type = other DNA
attctcgcagactact

SEQ ID NO: 29514 - DNA, 16 bp, synthetic construct
  misc_feature 1..16: note = synthetic [barcode part1]
  source 1..16: mol_type = other DNA
agagtcgcacgtcaag

SEQ ID NO: 29515 - DNA, 16 bp, synthetic construct
  misc_feature 1..16: note = synthetic [barcode part1]
  source 1..16: mol_type = other DNA
gttgtgtagtcgtgtg

SEQ ID NO: 29516 - DNA, 16 bp, synthetic construct
  misc_feature 1..16: note = synthetic [barcode part1]
  source 1..16: mol_type = other DNA
agttacgttggcctcc

SEQ ID NO: 29517 - DNA, 16 bp, synthetic construct
  misc_feature 1..16: note = synthetic [barcode part1]
  source 1..16: mol_type = other DNA
attacttcctggacgt

SEQ ID NO: 29518 - DNA, 16 bp, synthetic construct
  misc_feature 1..16: note = synthetic [barcode part1]
  source 1..16: mol_type = other DNA
attagtattgccgtcc

SEQ ID NO: 29519 - DNA, 16 bp, synthetic construct
  misc_feature 1..16: note = synthetic [barcode part1]
  source 1..16: mol_type = other DNA
taattctcgcgtgact

SEQ ID NO: 29520 - DNA, 16 bp, synthetic construct
  misc_feature 1..16: note = synthetic [barcode part1]
  source 1..16: mol_type = other DNA
ttagattccgacggtg

SEQ ID NO: 29521 - DNA, 16 bp, synthetic construct
  misc_feature 1..16: note = synthetic [barcode part1]
  source 1..16: mol_type = other DNA
cggcaatagaggtatt

SEQ ID NO: 29522 - DNA, 16 bp, synthetic construct
  misc_feature 1..16: note = synthetic [barcode part1]
  source 1..16: mol_type = other DNA
tcaacaaggcacaagt

SEQ ID NO: 29523 - DNA, 16 bp, synthetic construct
  misc_feature 1..16: note = synthetic [barcode part1]
  source 1..16: mol_type = other DNA
tccttcgagtatatcg

SEQ ID NO: 29524 - DNA, 16 bp, synthetic construct
  misc_feature 1..16: note = synthetic [barcode part1]
  source 1..16: mol_type = other DNA
aacctgagttggactc

SEQ ID NO: 29525 - DNA, 16 bp, synthetic construct
  misc_feature 1..16: note = synthetic [barcode part1]
  source 1..16: mol_type = other DNA
acgttcttcttcgcgt

SEQ ID NO: 29526 - DNA, 16 bp, synthetic construct
  misc_feature 1..16: note = synthetic [barcode part1]
  source 1..16: mol_type = other DNA
tccttgacgtggtcgt

SEQ ID NO: 29527 - DNA, 16 bp, synthetic construct
  misc_feature 1..16: note = synthetic [barcode part1]
  source 1..16: mol_type = other DNA
gttactctaccgcctt

SEQ ID NO: 29528 - DNA, 16 bp, synthetic construct
  misc_feature 1..16: note = synthetic [barcode part1]
  source 1..16: mol_type = other DNA
gttcgattggtggttg

SEQ ID NO: 29529 - DNA, 16 bp, synthetic construct
  misc_feature 1..16: note = synthetic [barcode part1]
  source 1..16: mol_type = other DNA
gtcgcctcgaacactt

SEQ ID NO: 29530 - DNA, 16 bp, synthetic construct
  misc_feature 1..16: note = synthetic [barcode part1]
  source 1..16: mol_type = other DNA
ttggagtgtagtgtcc

SEQ ID NO: 29531 - DNA, 16 bp, synthetic construct
  misc_feature 1..16: note = synthetic [barcode part1]
  source 1..16: mol_type = other DNA
gtaatccttcgtatcg

SEQ ID NO: 29532 - DNA, 16 bp, synthetic construct
  misc_feature 1..16: note = synthetic [barcode part1]
  source 1..16: mol_type = other DNA
agaatactcctgcgtg

SEQ ID NO: 29533 - DNA, 16 bp, synthetic construct
  misc_feature 1..16: note = synthetic [barcode part1]
  source 1..16: mol_type = other DNA
atcgaggcgtacagtg

SEQ ID NO: 29534 - DNA, 16 bp, synthetic construct
  misc_feature 1..16: note = synthetic [barcode part1]
  source 1..16: mol_type = other DNA
cggtattggacagacg

SEQ ID NO: 29535 - DNA, 16 bp, synthetic construct
  misc_feature 1..16: note = synthetic [barcode part1]
  source 1..16: mol_type = other DNA
gatcaatcgaccggtt

SEQ ID NO: 29536 - DNA, 16 bp, synthetic construct
  misc_feature 1..16: note = synthetic [barcode part1]
  source 1..16: mol_type = other DNA
gccaagtcactgagtt

SEQ ID NO: 29537 - DNA, 16 bp, synthetic construct
  misc_feature 1..16: note = synthetic [barcode part1]
  source 1..16: mol_type = other DNA
attccgtgtccttcgt

SEQ ID NO: 29538 - DNA, 16 bp, synthetic construct
  misc_feature 1..16: note = synthetic [barcode part1]
  source 1..16: mol_type = other DNA
cgaattcgtgagttcg

SEQ ID NO: 29539 - DNA, 16 bp, synthetic construct
  misc_feature 1..16: note = synthetic [barcode part1]
  source 1..16: mol_type = other DNA
aagttgttggagacgt

SEQ ID NO: 29540 - DNA, 16 bp, synthetic construct
  misc_feature 1..16: note = synthetic [barcode part1]
  source 1..16: mol_type = other DNA
gacgtgtagaactagt

SEQ ID NO: 29541 - DNA, 16 bp, synthetic construct
  misc_feature 1..16: note = synthetic [barcode part1]
  source 1..16: mol_type = other DNA
cgcgtactcagaattg

SEQ ID NO: 29542 - DNA, 16 bp, synthetic construct
  misc_feature 1..16: note = synthetic [barcode part1]
  source 1..16: mol_type = other DNA
gtataacggtctctct

SEQ ID NO: 29543 - DNA, 16 bp, synthetic construct
  misc_feature 1..16: note = synthetic [barcode part1]
  source 1..16: mol_type = other DNA
gtacgactcctaactt

SEQ ID NO: 29544 - DNA, 16 bp, synthetic construct
  misc_feature 1..16: note = synthetic [barcode part1]
  source 1..16: mol_type = other DNA
tcgccacagtgttcgt

SEQ ID NO: 29545 - DNA, 16 bp, synthetic construct
  misc_feature 1..16: note = synthetic [barcode part1]
  source 1..16: mol_type = other DNA
gtatataggaggaggc

SEQ ID NO: 29546 - DNA, 16 bp, synthetic construct
  misc_feature 1..16: note = synthetic [barcode part1]
  source 1..16: mol_type = other DNA
taggaggaccacacac

SEQ ID NO: 29547 - DNA, 16 bp, synthetic construct
  misc_feature 1..16: note = synthetic [barcode part1]
  source 1..16: mol_type = other DNA
tctggccaccaacact

SEQ ID NO: 29548 - DNA, 16 bp, synthetic construct
  misc_feature 1..16: note = synthetic [barcode part1]
  source 1..16: mol_type = other DNA
gtacggataccttcag

SEQ ID NO: 29549 - DNA, 16 bp, synthetic construct
  misc_feature 1..16: note = synthetic [barcode part1]
  source 1..16: mol_type = other DNA
tcaccgcacggattct

SEQ ID NO: 29550 - DNA, 16 bp, synthetic construct
  misc_feature 1..16: note = synthetic [barcode part1]
  source 1..16: mol_type = other DNA
cgaaggtagactgtcg

SEQ ID NO: 29551 - DNA, 16 bp, synthetic construct
  misc_feature 1..16: note = synthetic [barcode part1]
  source 1..16: mol_type = other DNA
tcttgttcgaacgccg

SEQ ID NO: 29552 - DNA, 16 bp, synthetic construct
  misc_feature 1..16: note = synthetic [barcode part1]
  source 1..16: mol_type = other DNA
tgtacgtgttgtggtg

SEQ ID NO: 29553 - DNA, 16 bp, synthetic construct
  misc_feature 1..16: note = synthetic [barcode part1]
  source 1..16: mol_type = other DNA
ccgtagatagagaact

SEQ ID NO: 29554 - DNA, 16 bp, synthetic construct
  misc_feature 1..16: note = synthetic [barcode part1]
  source 1..16: mol_type = other DNA
accttcaattcggtgt

SEQ ID NO: 29555 - DNA, 16 bp, synthetic construct
  misc_feature 1..16: note = synthetic [barcode part1]
  source 1..16: mol_type = other DNA
gacgtgacaaggatag

SEQ ID NO: 29556 - DNA, 16 bp, synthetic construct
  misc_feature 1..16: note = synthetic [barcode part1]
  source 1..16: mol_type = other DNA
tcgtgtccactgaacc

SEQ ID NO: 29557 - DNA, 16 bp, synthetic construct
  misc_feature 1..16: note = synthetic [barcode part1]
  source 1..16: mol_type = other DNA
tcgccgttatcactct

SEQ ID NO: 29558 - DNA, 16 bp, synthetic construct
  misc_feature 1..16: note = synthetic [barcode part1]
  source 1..16: mol_type = other DNA
gttactgccaagtcag

SEQ ID NO: 29559 - DNA, 16 bp, synthetic construct
  misc_feature 1..16: note = synthetic [barcode part1]
  source 1..16: mol_type = other DNA
gtagatctgtgccaac

SEQ ID NO: 29560 - DNA, 16 bp, synthetic construct
  misc_feature 1..16: note = synthetic [barcode part1]
  source 1..16: mol_type = other DNA
tggtcttgtgtgttgt

SEQ ID NO: 29561 - DNA, 16 bp, synthetic construct
  misc_feature 1..16: note = synthetic [barcode part1]
  source 1..16: mol_type = other DNA
tgcctgtaacactatc

SEQ ID NO: 29562 - DNA, 16 bp, synthetic construct
  misc_feature 1..16: note = synthetic [barcode part1]
  source 1..16: mol_type = other DNA
tcagactggagacacg

SEQ ID NO: 29563 - DNA, 16 bp, synthetic construct
  misc_feature 1..16: note = synthetic [barcode part1]
  source 1..16: mol_type = other DNA
gtaggccttggatatc

SEQ ID NO: 29564 - DNA, 16 bp, synthetic construct
  misc_feature 1..16: note = synthetic [barcode part1]
  source 1..16: mol_type = other DNA
cagagtctgacactgt

SEQ ID NO: 29565 - DNA, 16 bp, synthetic construct
  misc_feature 1..16: note = synthetic [barcode part1]
  source 1..16: mol_type = other DNA
aagtccagataacgac

SEQ ID NO: 29566 - DNA, 16 bp, synthetic construct
  misc_feature 1..16: note = synthetic [barcode part1]
  source 1..16: mol_type = other DNA
cgattacggatcggag

SEQ ID NO: 29567 - DNA, 16 bp, synthetic construct
  misc_feature 1..16: note = synthetic [barcode part1]
  source 1..16: mol_type = other DNA
gcctactgtcctgaac

SEQ ID NO: 29568 - DNA, 16 bp, synthetic construct
  misc_feature 1..16: note = synthetic [barcode part1]
  source 1..16: mol_type = other DNA
aacactccggattcag

SEQ ID NO: 29569 - DNA, 16 bp, synthetic construct
  misc_feature 1..16: note = synthetic [barcode part1]
  source 1..16: mol_type = other DNA
tcgtgccggattgtct

SEQ ID NO: 29570 - DNA, 16 bp, synthetic construct
  misc_feature 1..16: note = synthetic [barcode part1]
  source 1..16: mol_type = other DNA
aattcttcggcgaggt

SEQ ID NO: 29571 - DNA, 16 bp, synthetic construct
  misc_feature 1..16: note = synthetic [barcode part1]
  source 1..16: mol_type = other DNA
actcagagaacctacc

SEQ ID NO: 29572 - DNA, 16 bp, synthetic construct
  misc_feature 1..16: note = synthetic [barcode part1]
  source 1..16: mol_type = other DNA
tgcgtctgttcttgtc

SEQ ID NO: 29573 - DNA, 16 bp, synthetic construct
  misc_feature 1..16: note = synthetic [barcode part1]
  source 1..16: mol_type = other DNA
gttacctactccacct

SEQ ID NO: 29574 - DNA, 16 bp, synthetic construct
  misc_feature 1..16: note = synthetic [barcode part1]
  source 1..16: mol_type = other DNA
cacggattatcgttct

SEQ ID NO: 29575 - DNA, 16 bp, synthetic construct
  misc_feature 1..16: note = synthetic [barcode part1]
  source 1..16: mol_type = other DNA
cctaaggcacgatact

SEQ ID NO: 29576 - DNA, 16 bp, synthetic construct
  misc_feature 1..16: note = synthetic [barcode part1]
  source 1..16: mol_type = other DNA
aggatctggatctcac

SEQ ID NO: 29577 - DNA, 16 bp, synthetic construct
  misc_feature 1..16: note = synthetic [barcode part1]
  source 1..16: mol_type = other DNA
cgaaggatctcaactc

SEQ ID NO: 29578 - DNA, 16 bp, synthetic construct
  misc_feature 1..16: note = synthetic [barcode part1]
  source 1..16: mol_type = other DNA
cactcaaccgaatacg

SEQ ID NO: 29579 - DNA, 16 bp, synthetic construct
  misc_feature 1..16: note = synthetic [barcode part1]
  source 1..16: mol_type = other DNA
actcgtccgtcgtaac

SEQ ID NO: 29580 - DNA, 16 bp, synthetic construct
  misc_feature 1..16: note = synthetic [barcode part1]
  source 1..16: mol_type = other DNA
tcgaagtggactctac

SEQ ID NO: 29581 - DNA, 16 bp, synthetic construct
  misc_feature 1..16: note = synthetic [barcode part1]
  source 1..16: mol_type = other DNA
tcggagagttacttcg

SEQ ID NO: 29582 - DNA, 16 bp, synthetic construct
  misc_feature 1..16: note = synthetic [barcode part1]
  source 1..16: mol_type = other DNA
tgtgaatcggacacct

SEQ ID NO: 29583 - DNA, 16 bp, synthetic construct
  misc_feature 1..16: note = synthetic [barcode part1]
  source 1..16: mol_type = other DNA
tacgtgaccaccactc

SEQ ID NO: 29584 - DNA, 16 bp, synthetic construct
  misc_feature 1..16: note = synthetic [barcode part1]
  source 1..16: mol_type = other DNA
atattcaccgtcctag

SEQ ID NO: 29585 - DNA, 16 bp, synthetic construct
  misc_feature 1..16: note = synthetic [barcode part1]
  source 1..16: mol_type = other DNA
tgaaggagtatcggtt

SEQ ID NO: 29586 - DNA, 16 bp, synthetic construct
  misc_feature 1..16: note = synthetic [barcode part1]
  source 1..16: mol_type = other DNA
acgtggaccgttagag

SEQ ID NO: 29587 - DNA, 16 bp, synthetic construct
  misc_feature 1..16: note = synthetic [barcode part1]
  source 1..16: mol_type = other DNA
ttcaatccgtgtggcc

SEQ ID NO: 29588 - DNA, 16 bp, synthetic construct
  misc_feature 1..16: note = synthetic [barcode part1]
  source 1..16: mol_type = other DNA
gacaataccacaggcg

SEQ ID NO: 29589 - DNA, 16 bp, synthetic construct
  misc_feature 1..16: note = synthetic [barcode part1]
  source 1..16: mol_type = other DNA
gagtatctccggatac

SEQ ID NO: 29590 - DNA, 16 bp, synthetic construct
  misc_feature 1..16: note = synthetic [barcode part1]
  source 1..16: mol_type = other DNA
atcaccttcacctcgt

SEQ ID NO: 29591 - DNA, 16 bp, synthetic construct
  misc_feature 1..16: note = synthetic [barcode part1]
  source 1..16: mol_type = other DNA
ttgaatagacaaggcc

SEQ ID NO: 29592 - DNA, 16 bp, synthetic construct
  misc_feature 1..16: note = synthetic [barcode part1]
  source 1..16: mol_type = other DNA
cacgttccggattacc

SEQ ID NO: 29593 - DNA, 16 bp, synthetic construct
  misc_feature 1..16: note = synthetic [barcode part1]
  source 1..16: mol_type = other DNA
cgcctgatcttgtcag

SEQ ID NO: 29594 - DNA, 16 bp, synthetic construct
  misc_feature 1..16: note = synthetic [barcode part1]
  source 1..16: mol_type = other DNA
taccaagttacgtctc

SEQ ID NO: 29595 - DNA, 16 bp, synthetic construct
  misc_feature 1..16: note = synthetic [barcode part1]
  source 1..16: mol_type = other DNA
agactctataccgcag

SEQ ID NO: 29596 - DNA, 16 bp, synthetic construct
  misc_feature 1..16: note = synthetic [barcode part1]
  source 1..16: mol_type = other DNA
cacctactcacagtgc

SEQ ID NO: 29597 - DNA, 16 bp, synthetic construct
  misc_feature 1..16: note = synthetic [barcode part1]
  source 1..16: mol_type = other DNA
ccttacctagatactg

SEQ ID NO: 29598 - DNA, 16 bp, synthetic construct
  misc_feature 1..16: note = synthetic [barcode part1]
  source 1..16: mol_type = other DNA
ccagaacggatagatt

SEQ ID NO: 29599 - DNA, 16 bp, synthetic construct
  misc_feature 1..16: note = synthetic [barcode part1]
  source 1..16: mol_type = other DNA
tacgacaatctcggac

SEQ ID NO: 29600 - DNA, 16 bp, synthetic construct
  misc_feature 1..16: note = synthetic [barcode part1]
  source 1..16: mol_type = other DNA
cggaatcgaaggaagt

SEQ ID NO: 29601 - DNA, 16 bp, synthetic construct
  misc_feature 1..16: note = synthetic [barcode part1]
  source 1..16: mol_type = other DNA
acctacctattgtgac

SEQ ID NO: 29602 - DNA, 16 bp, synthetic construct
  misc_feature 1..16: note = synthetic [barcode part1]
  source 1..16: mol_type = other DNA
tctgacttcttggcct

SEQ ID NO: 29603 - DNA, 16 bp, synthetic construct
  misc_feature 1..16: note = synthetic [barcode part1]
  source 1..16: mol_type = other DNA
cctaagttccacagag

SEQ ID NO: 29604 - DNA, 16 bp, synthetic construct
  misc_feature 1..16: note = synthetic [barcode part1]
  source 1..16: mol_type = other DNA
ttaccgtggtaggact

SEQ ID NO: 29605 - DNA, 16 bp, synthetic construct
  misc_feature 1..16: note = synthetic [barcode part1]
  source 1..16: mol_type = other DNA
aggacgaggtagaatc

SEQ ID NO: 29606 - DNA, 16 bp, synthetic construct
  misc_feature 1..16: note = synthetic [barcode part1]
  source 1..16: mol_type = other DNA
ttcgcgtactatcggc

SEQ ID NO: 29607 - DNA, 16 bp, synthetic construct
  misc_feature 1..16: note = synthetic [barcode part1]
  source 1..16: mol_type = other DNA
aagacgacaaggcagt

SEQ ID NO: 29608 - DNA, 16 bp, synthetic construct
  misc_feature 1..16: note = synthetic [barcode part1]
  source 1..16: mol_type = other DNA
tctgaccagagaatcc

SEQ ID NO: 29609 - DNA, 16 bp, synthetic construct
  misc_feature 1..16: note = synthetic [barcode part1]
  source 1..16: mol_type = other DNA
tacggtgaccttgagt

SEQ ID NO: 29610 - DNA, 16 bp, synthetic construct
  misc_feature 1..16: note = synthetic [barcode part1]
  source 1..16: mol_type = other DNA
attgtccagtgttcgt

SEQ ID NO: 29611 - DNA, 16 bp, synthetic construct
  misc_feature 1..16: note = synthetic [barcode part1]
  source 1..16: mol_type = other DNA
cggtataactggaggc

SEQ ID NO: 29612 - DNA, 16 bp, synthetic construct
  misc_feature 1..16: note = synthetic [barcode part1]
  source 1..16: mol_type = other DNA
aatccgaacgcggaac

SEQ ID NO: 29613 - DNA, 16 bp, synthetic construct
  misc_feature 1..16: note = synthetic [barcode part1]
  source 1..16: mol_type = other DNA
aggacactgtgaagag

SEQ ID NO: 29614 - DNA, 16 bp, synthetic construct
  misc_feature 1..16: note = synthetic [barcode part1]
  source 1..16: mol_type = other DNA
caccgagttcgtgttc

SEQ ID NO: 29615 - DNA, 16 bp, synthetic construct
  misc_feature 1..16: note = synthetic [barcode part1]
  source 1..16: mol_type = other DNA
gtaaccagtcacgtac

SEQ ID NO: 29616 - DNA, 16 bp, synthetic construct
  misc_feature 1..16: note = synthetic [barcode part1]
  source 1..16: mol_type = other DNA
gaacgagttcgtctac

SEQ ID NO: 29617 - DNA, 16 bp, synthetic construct
  misc_feature 1..16: note = synthetic [barcode part1]
  source 1..16: mol_type = other DNA
ccactacaagtgacac

SEQ ID NO: 29618 - DNA, 16 bp, synthetic construct
  misc_feature 1..16: note = synthetic [barcode part1]
  source 1..16: mol_type = other DNA
ttctatcgtgaatccg

SEQ ID NO: 29619 - DNA, 16 bp, synthetic construct
  misc_feature 1..16: note = synthetic [barcode part1]
  source 1..16: mol_type = other DNA
cgacctctggtgtact

SEQ ID NO: 29620 - DNA, 16 bp, synthetic construct
  misc_feature 1..16: note = synthetic [barcode part1]
  source 1..16: mol_type = other DNA
cagttccaactctctc

SEQ ID NO: 29621 - DNA, 16 bp, synthetic construct
  misc_feature 1..16: note = synthetic [barcode part1]
  source 1..16: mol_type = other DNA
attcgaacaaggtggt

SEQ ID NO: 29622 - DNA, 16 bp, synthetic construct
  misc_feature 1..16: note = synthetic [barcode part1]
  source 1..16: mol_type = other DNA
cacaatcgagataacg

SEQ ID NO: 29623 - DNA, 16 bp, synthetic construct
  misc_feature 1..16: note = synthetic [barcode part1]
  source 1..16: mol_type = other DNA
attatccggactcgcc

SEQ ID NO: 29624 - DNA, 16 bp, synthetic construct
  misc_feature 1..16: note = synthetic [barcode part1]
  source 1..16: mol_type = other DNA
gagacaacactgtcct

SEQ ID NO: 29625 - DNA, 16 bp, synthetic construct
  misc_feature 1..16: note = synthetic [barcode part1]
  source 1..16: mol_type = other DNA
tgaggtgtaccaatag

SEQ ID NO: 29626 - DNA, 16 bp, synthetic construct
  misc_feature 1..16: note = synthetic [barcode part1]
  source 1..16: mol_type = other DNA
taggacggatatatcg

SEQ ID NO: 29627 - DNA, 16 bp, synthetic construct
  misc_feature 1..16: note = synthetic [barcode part1]
  source 1..16: mol_type = other DNA
ttgtccgataagtggc

SEQ ID NO: 29628 - DNA, 16 bp, synthetic construct
  misc_feature 1..16: note = synthetic [barcode part1]
  source 1..16: mol_type = other DNA
taggtctgaattcgcg

SEQ ID NO: 29629 - DNA, 16 bp, synthetic construct
  misc_feature 1..16: note = synthetic [barcode part1]
  source 1..16: mol_type = other DNA
taccggagttcttgtt

SEQ ID NO: 29630 - DNA, 16 bp, synthetic construct
  misc_feature 1..16: note = synthetic [barcode part1]
  source 1..16: mol_type = other DNA
ttaacgcggtcgagag

SEQ ID NO: 29631 - DNA, 16 bp, synthetic construct
  misc_feature 1..16: note = synthetic [barcode part1]
  source 1..16: mol_type = other DNA
tggtggacaaggtaag

SEQ ID NO: 29632 - DNA, 16 bp, synthetic construct
  misc_feature 1..16: note = synthetic [barcode part1]
  source 1..16: mol_type = other DNA
acttacgagtccacag

SEQ ID NO: 29633 - DNA, 16 bp, synthetic construct
  misc_feature 1..16: note = synthetic [barcode part1]
  source 1..16: mol_type = other DNA
tctataccggtccgac

SEQ ID NO: 29634 - DNA, 16 bp, synthetic construct
  misc_feature 1..16: note = synthetic [barcode part1]
  source 1..16: mol_type = other DNA
tgtcgtcggattgaac

SEQ ID NO: 29635 - DNA, 16 bp, synthetic construct
  misc_feature 1..16: note = synthetic [barcode part1]
  source 1..16: mol_type = other DNA
tgcggacaagtctatc

SEQ ID NO: 29636 - DNA, 16 bp, synthetic construct
  misc_feature 1..16: note = synthetic [barcode part1]
  source 1..16: mol_type = other DNA
agaactccactgtgac

SEQ ID NO: 29637 - DNA, 16 bp, synthetic construct
  misc_feature 1..16: note = synthetic [barcode part1]
  source 1..16: mol_type = other DNA
taaggcgttgtgtaag

SEQ ID NO: 29638 - DNA, 16 bp, synthetic construct
  misc_feature 1..16: note = synthetic [barcode part1]
  source 1..16: mol_type = other DNA
gcaggaatacaccttc

SEQ ID NO: 29639 - DNA, 16 bp, synthetic construct
  misc_feature 1..16: note = synthetic [barcode part1]
  source 1..16: mol_type = other DNA
gagtctaacttggacc

SEQ ID NO: 29640 - DNA, 16 bp, synthetic construct
  misc_feature 1..16: note = synthetic [barcode part1]
  source 1..16: mol_type = other DNA
gcaaccaagaaggcct

SEQ ID NO: 29641 - DNA, 16 bp, synthetic construct
  misc_feature 1..16: note = synthetic [barcode part1]
  source 1..16: mol_type = other DNA
cagtgataaggcacgc

SEQ ID NO: 29642 - DNA, 16 bp, synthetic construct
  misc_feature 1..16: note = synthetic [barcode part1]
  source 1..16: mol_type = other DNA
gtgtgttgcctctcag

SEQ ID NO: 29643 - DNA, 16 bp, synthetic construct
  misc_feature 1..16: note = synthetic [barcode part1]
  source 1..16: mol_type = other DNA
tctgtcgtgtagattc

SEQ ID NO: 29644 - DNA, 16 bp, synthetic construct
  misc_feature 1..16: note = synthetic [barcode part1]
  source 1..16: mol_type = other DNA
cgtataggcgactatc

SEQ ID NO: 29645 - DNA, 16 bp, synthetic construct
  misc_feature 1..16: note = synthetic [barcode part1]
  source 1..16: mol_type = other DNA
aatctgagtgtggagt

SEQ ID NO: 29646 - DNA, 16 bp, synthetic construct
  misc_feature 1..16: note = synthetic [barcode part1]
  source 1..16: mol_type = other DNA
cgcaatacttaaggcc

SEQ ID NO: 29647 - DNA, 16 bp, synthetic construct
  misc_feature 1..16: note = synthetic [barcode part1]
  source 1..16: mol_type = other DNA
ttcgccgagtcgtgtt

SEQ ID NO: 29648 - DNA, 16 bp, synthetic construct
  misc_feature 1..16: note = synthetic [barcode part1]
  source 1..16: mol_type = other DNA
gtcttgacgcaatacg

SEQ ID NO: 29649 - DNA, 16 bp, synthetic construct
  misc_feature 1..16: note = synthetic [barcode part1]
  source 1..16: mol_type = other DNA
actcttgttgcgcctt

SEQ ID NO: 29650 - DNA, 16 bp, synthetic construct
  misc_feature 1..16: note = synthetic [barcode part1]
  source 1..16: mol_type = other DNA
ttctcgacgtaatcgt

SEQ ID NO: 29651 - DNA, 16 bp, synthetic construct
  misc_feature 1..16: note = synthetic [barcode part1]
  source 1..16: mol_type = other DNA
cgagtattgtatcggc

SEQ ID NO: 29652 - DNA, 16 bp, synthetic construct
  misc_feature 1..16: note = synthetic [barcode part1]
  source 1..16: mol_type = other DNA
ttggagtctgcgatac

SEQ ID NO: 29653 - DNA, 16 bp, synthetic construct
  misc_feature 1..16: note = synthetic [barcode part1]
  source 1..16: mol_type = other DNA
caggaacagtggttcg

SEQ ID NO: 29654 - DNA, 16 bp, synthetic construct
  misc_feature 1..16: note = synthetic [barcode part1]
  source 1..16: mol_type = other DNA
ttccagtcaacggagt

SEQ ID NO: 29655 - DNA, 16 bp, synthetic construct
  misc_feature 1..16: note = synthetic [barcode part1]
  source 1..16: mol_type = other DNA
gcgttaagtcagaggc

SEQ ID NO: 29656 - DNA, 16 bp, synthetic construct
  misc_feature 1..16: note = synthetic [barcode part1]
  source 1..16: mol_type = other DNA
gcaactaggtcctctc

SEQ ID NO: 29657 - DNA, 16 bp, synthetic construct
  misc_feature 1..16: note = synthetic [barcode part1]
  source 1..16: mol_type = other DNA
cacttgtgtagtgtct

SEQ ID NO: 29658 - DNA, 16 bp, synthetic construct
  misc_feature 1..16: note = synthetic [barcode part1]
  source 1..16: mol_type = other DNA
ttgtcactgtccaagt

SEQ ID NO: 29659 - DNA, 16 bp, synthetic construct
  misc_feature 1..16: note = synthetic [barcode part1]
  source 1..16: mol_type = other DNA
tgtatagacggccact

SEQ ID NO: 29660 - DNA, 16 bp, synthetic construct
  misc_feature 1..16: note = synthetic [barcode part1]
  source 1..16: mol_type = other DNA
ttccaaggagtaagtg

SEQ ID NO: 29661 - DNA, 16 bp, synthetic construct
  misc_feature 1..16: note = synthetic [barcode part1]
  source 1..16: mol_type = other DNA
gttgttcctcaccgtt

SEQ ID NO: 29662 - DNA, 16 bp, synthetic construct
  misc_feature 1..16: note = synthetic [barcode part1]
  source 1..16: mol_type = other DNA
gtgtgcactagttggt

SEQ ID NO: 29663 - DNA, 16 bp, synthetic construct
  misc_feature 1..16: note = synthetic [barcode part1]
  source 1..16: mol_type = other DNA
tgcgtggatagaacgc

SEQ ID NO: 29664 - DNA, 16 bp, synthetic construct
  misc_feature 1..16: note = synthetic [barcode part1]
  source 1..16: mol_type = other DNA
acggttatctcagttc

SEQ ID NO: 29665 - DNA, 16 bp, synthetic construct
  misc_feature 1..16: note = synthetic [barcode part1]
  source 1..16: mol_type = other DNA
tcacaaccacacacag

SEQ ID NO: 29666 - DNA, 16 bp, synthetic construct
  misc_feature 1..16: note = synthetic [barcode part1]
  source 1..16: mol_type = other DNA
cacacaggcaactgtt

SEQ ID NO: 29667 - DNA, 16 bp, synthetic construct
  misc_feature 1..16: note = synthetic [barcode part1]
  source 1..16: mol_type = other DNA
cgatctagtgactcag

SEQ ID NO: 29668 - DNA, 16 bp, synthetic construct
  misc_feature 1..16: note = synthetic [barcode part1]
  source 1..16: mol_type = other DNA
cggacacttggatatc

SEQ ID NO: 29669 - DNA, 16 bp, synthetic construct
  misc_feature 1..16: note = synthetic [barcode part1]
  source 1..16: mol_type = other DNA
tcgccgcagataatac

SEQ ID NO: 29670 - DNA, 16 bp, synthetic construct
  misc_feature 1..16: note = synthetic [barcode part1]
  source 1..16: mol_type = other DNA
gaatccttcggaactg

SEQ ID NO: 29671 - DNA, 16 bp, synthetic construct
  misc_feature 1..16: note = synthetic [barcode part1]
  source 1..16: mol_type = other DNA
gcaagtggagtaagtg

SEQ ID NO: 29672 - DNA, 16 bp, synthetic construct
  misc_feature 1..16: note = synthetic [barcode part1]
  source 1..16: mol_type = other DNA
ccggtctacggttact

SEQ ID NO: 29673 - DNA, 16 bp, synthetic construct
  misc_feature 1..16: note = synthetic [barcode part1]
  source 1..16: mol_type = other DNA
cactaacagttcttcg

SEQ ID NO: 29674 - DNA, 16 bp, synthetic construct
  misc_feature 1..16: note = synthetic [barcode part1]
  source 1..16: mol_type = other DNA
acggttggaggagtct

SEQ ID NO: 29675 - DNA, 16 bp, synthetic construct
  misc_feature 1..16: note = synthetic [barcode part1]
  source 1..16: mol_type = other DNA
agttggtgtcagttgc

SEQ ID NO: 29676 - DNA, 16 bp, synthetic construct
  misc_feature 1..16: note = synthetic [barcode part1]
  source 1..16: mol_type = other DNA
tctagttcggttacac

SEQ ID NO: 29677 - DNA, 16 bp, synthetic construct
  misc_feature 1..16: note = synthetic [barcode part1]
  source 1..16: mol_type = other DNA
tgataaccggttcggt

SEQ ID NO: 29678 - DNA, 16 bp, synthetic construct
  misc_feature 1..16: note = synthetic [barcode part1]
  source 1..16: mol_type = other DNA
gccgaataacacaagt

SEQ ID NO: 29679 - DNA, 16 bp, synthetic construct
  misc_feature 1..16: note = synthetic [barcode part1]
  source 1..16: mol_type = other DNA
ttagtctacggttacc

SEQ ID NO: 29680 - DNA, 16 bp, synthetic construct
  misc_feature 1..16: note = synthetic [barcode part1]
  source 1..16: mol_type = other DNA
cgtcttacgtcgtctt

SEQ ID NO: 29681 - DNA, 16 bp, synthetic construct
  misc_feature 1..16: note = synthetic [barcode part1]
  source 1..16: mol_type = other DNA
gtcttactggatctgt

SEQ ID NO: 29682 - DNA, 16 bp, synthetic construct
  misc_feature 1..16: note = synthetic [barcode part1]
  source 1..16: mol_type = other DNA
tgccaggaagttactc

SEQ ID NO: 29683 - DNA, 16 bp, synthetic construct
  misc_feature 1..16: note = synthetic [barcode part1]
  source 1..16: mol_type = other DNA
agtgaatcctagaacg

SEQ ID NO: 29684 - DNA, 16 bp, synthetic construct
  misc_feature 1..16: note = synthetic [barcode part1]
  source 1..16: mol_type = other DNA
ccttagtaggacgact

SEQ ID NO: 29685 - DNA, 16 bp, synthetic construct
  misc_feature 1..16: note = synthetic [barcode part1]
  source 1..16: mol_type = other DNA
tgagactcgatatcgc

SEQ ID NO: 29686 - DNA, 16 bp, synthetic construct
  misc_feature 1..16: note = synthetic [barcode part1]
  source 1..16: mol_type = other DNA
aagtgatacgcaactg

SEQ ID NO: 29687 - DNA, 16 bp, synthetic construct
  misc_feature 1..16: note = synthetic [barcode part1]
  source 1..16: mol_type = other DNA
gtcaataagaccaggt

SEQ ID NO: 29688 - DNA, 16 bp, synthetic construct
  misc_feature 1..16: note = synthetic [barcode part1]
  source 1..16: mol_type = other DNA
gtggattggaacgacc

SEQ ID NO: 29689 - DNA, 16 bp, synthetic construct
  misc_feature 1..16: note = synthetic [barcode part1]
  source 1..16: mol_type = other DNA
cagagacaatacggag

SEQ ID NO: 29690 - DNA, 16 bp, synthetic construct
  misc_feature 1..16: note = synthetic [barcode part1]
  source 1..16: mol_type = other DNA
gcggaattgtctggag

SEQ ID NO: 29691 - DNA, 16 bp, synthetic construct
  misc_feature 1..16: note = synthetic [barcode part1]
  source 1..16: mol_type = other DNA
atacgcagtatcgtgc

SEQ ID NO: 29692 - DNA, 16 bp, synthetic construct
  misc_feature 1..16: note = synthetic [barcode part1]
  source 1..16: mol_type = other DNA
gcagattaaggtaacc

SEQ ID NO: 29693 - DNA, 16 bp, synthetic construct
  misc_feature 1..16: note = synthetic [barcode part1]
  source 1..16: mol_type = other DNA
ccacgtgtagtatacg

SEQ ID NO: 29694 - DNA, 16 bp, synthetic construct
  misc_feature 1..16: note = synthetic [barcode part1]
  source 1..16: mol_type = other DNA
tcctcggttagtcctt

SEQ ID NO: 29695 - DNA, 16 bp, synthetic construct
  misc_feature 1..16: note = synthetic [barcode part1]
  source 1..16: mol_type = other DNA
acgtacgcacaacgtt

SEQ ID NO: 29696 - DNA, 16 bp, synthetic construct
  misc_feature 1..16: note = synthetic [barcode part1]
  source 1..16: mol_type = other DNA
taaggtaccgtgtaag

SEQ ID NO: 29697 - DNA, 16 bp, synthetic construct
  misc_feature 1..16: note = synthetic [barcode part1]
  source 1..16: mol_type = other DNA
agatagattcgcctgc

SEQ ID NO: 29698 - DNA, 16 bp, synthetic construct
  misc_feature 1..16: note = synthetic [barcode part1]
  source 1..16: mol_type = other DNA
gtgatacacgcgtatc

SEQ ID NO: 29699 - DNA, 16 bp, synthetic construct
  misc_feature 1..16: note = synthetic [barcode part1]
  source 1..16: mol_type = other DNA
gttctcagtggcctgt

SEQ ID NO: 29700 - DNA, 16 bp, synthetic construct
  misc_feature 1..16: note = synthetic [barcode part1]
  source 1..16: mol_type = other DNA
gacttctcgcggactt

SEQ ID NO: 29701 - DNA, 16 bp, synthetic construct
  misc_feature 1..16: note = synthetic [barcode part1]
  source 1..16: mol_type = other DNA
cctgcgaaggcaatag

SEQ ID NO: 29702 - DNA, 16 bp, synthetic construct
  misc_feature 1..16: note = synthetic [barcode part1]
  source 1..16: mol_type = other DNA
aaggaacggtacgcct

SEQ ID NO: 29703 - DNA, 16 bp, synthetic construct
  misc_feature 1..16: note = synthetic [barcode part1]
  source 1..16: mol_type = other DNA
atctgttgagttctgc

SEQ ID NO: 29704 - DNA, 16 bp, synthetic construct
  misc_feature 1..16: note = synthetic [barcode part1]
  source 1..16: mol_type = other DNA
acactctatcaccagt

SEQ ID NO: 29705 - DNA, 16 bp, synthetic construct
  misc_feature 1..16: note = synthetic [barcode part1]
  source 1..16: mol_type = other DNA
acagtgtcagtgtcac

SEQ ID NO: 29706 - DNA, 16 bp, synthetic construct
  misc_feature 1..16: note = synthetic [barcode part1]
  source 1..16: mol_type = other DNA
ttggttcttgccgtct

SEQ ID NO: 29707 - DNA, 16 bp, synthetic construct
  misc_feature 1..16: note = synthetic [barcode part1]
  source 1..16: mol_type = other DNA
agtcggataccggtag

SEQ ID NO: 29708 - DNA, 16 bp, synthetic construct
  misc_feature 1..16: note = synthetic [barcode part1]
  source 1..16: mol_type = other DNA
caacgagtagatactg

SEQ ID NO: 29709 - DNA, 16 bp, synthetic construct
  misc_feature 1..16: note = synthetic [barcode part1]
  source 1..16: mol_type = other DNA
tcttgattcctgccac

SEQ ID NO: 29710 - DNA, 16 bp, synthetic construct
  misc_feature 1..16: note = synthetic [barcode part1]
  source 1..16: mol_type = other DNA
aagaacgacgaggact

SEQ ID NO: 29711 - DNA, 16 bp, synthetic construct
  misc_feature 1..16: note = synthetic [barcode part1]
  source 1..16: mol_type = other DNA
tgtgtccgacaactcc

SEQ ID NO: 29712 - DNA, 16 bp, synthetic construct
  misc_feature 1..16: note = synthetic [barcode part1]
  source 1..16: mol_type = other DNA
gaagtctaacactgcc

SEQ ID NO: 29713 - DNA, 16 bp, synthetic construct
  misc_feature 1..16: note = synthetic [barcode part1]
  source 1..16: mol_type = other DNA
gactgataatcggtcc

SEQ ID NO: 29714 - DNA, 16 bp, synthetic construct
  misc_feature 1..16: note = synthetic [barcode part1]
  source 1..16: mol_type = other DNA
aacactaacgccgtgt

SEQ ID NO: 29715 - DNA, 16 bp, synthetic construct
  misc_feature 1..16: note = synthetic [barcode part1]
  source 1..16: mol_type = other DNA
agtactctctgcagag

SEQ ID NO: 29716 - DNA, 16 bp, synthetic construct
  misc_feature 1..16: note = synthetic [barcode part1]
  source 1..16: mol_type = other DNA
gttgtctgtggtgagt

SEQ ID NO: 29717 - DNA, 16 bp, synthetic construct
  misc_feature 1..16: note = synthetic [barcode part1]
  source 1..16: mol_type = other DNA
tcaagacctcgcctac

SEQ ID NO: 29718 - DNA, 16 bp, synthetic construct
  misc_feature 1..16: note = synthetic [barcode part1]
  source 1..16: mol_type = other DNA
gaccaactggttgact

SEQ ID NO: 29719 - DNA, 16 bp, synthetic construct
  misc_feature 1..16: note = synthetic [barcode part1]
  source 1..16: mol_type = other DNA
taggaccgtcgattgt

SEQ ID NO: 29720 - DNA, 16 bp, synthetic construct
  misc_feature 1..16: note = synthetic [barcode part1]
  source 1..16: mol_type = other DNA
cacttacgtaggtggt

SEQ ID NO: 29721 - DNA, 16 bp, synthetic construct
  misc_feature 1..16: note = synthetic [barcode part1]
  source 1..16: mol_type = other DNA
ttcgaacttcaatccg

SEQ ID NO: 29722 - DNA, 16 bp, synthetic construct
  misc_feature 1..16: note = synthetic [barcode part1]
  source 1..16: mol_type = other DNA
cgattctactgacact

SEQ ID NO: 29723 - DNA, 16 bp, synthetic construct
  misc_feature 1..16: note = synthetic [barcode part1]
  source 1..16: mol_type = other DNA
tgttcgtcaggtgagt

SEQ ID NO: 29724 - DNA, 16 bp, synthetic construct
  misc_feature 1..16: note = synthetic [barcode part1]
  source 1..16: mol_type = other DNA
gcggtgcgattaatct

SEQ ID NO: 29725 - DNA, 16 bp, synthetic construct
  misc_feature 1..16: note = synthetic [barcode part1]
  source 1..16: mol_type = other DNA
ttctacggtcaagtct

SEQ ID NO: 29726 - DNA, 16 bp, synthetic construct
  misc_feature 1..16: note = synthetic [barcode part1]
  source 1..16: mol_type = other DNA
taccaggatccttgtt

SEQ ID NO: 29727 - DNA, 16 bp, synthetic construct
  misc_feature 1..16: note = synthetic [barcode part1]
  source 1..16: mol_type = other DNA
gtggttgcagtgtact

SEQ ID NO: 29728 - DNA, 16 bp, synthetic construct
  misc_feature 1..16: note = synthetic [barcode part1]
  source 1..16: mol_type = other DNA
agtgtacctccttggc

SEQ ID NO: 29729 - DNA, 16 bp, synthetic construct
  misc_feature 1..16: note = synthetic [barcode part1]
  source 1..16: mol_type = other DNA
gcaactgaagaagtct

SEQ ID NO: 29730 - DNA, 16 bp, synthetic construct
  misc_feature 1..16: note = synthetic [barcode part1]
  source 1..16: mol_type = other DNA
atcgccttccgaacac

SEQ ID NO: 29731 - DNA, 16 bp, synthetic construct
  misc_feature 1..16: note = synthetic [barcode part1]
  source 1..16: mol_type = other DNA
cgatctaacttctgtg

SEQ ID NO: 29732 - DNA, 16 bp, synthetic construct
  misc_feature 1..16: note = synthetic [barcode part1]
  source 1..16: mol_type = other DNA
cacttcaccgttctgt

SEQ ID NO: 29733 - DNA, 16 bp, synthetic construct
  misc_feature 1..16: note = synthetic [barcode part1]
  source 1..16: mol_type = other DNA
gcgagaatcgaatcgc

SEQ ID NO: 29734 - DNA, 16 bp, synthetic construct
  misc_feature 1..16: note = synthetic [barcode part1]
  source 1..16: mol_type = other DNA
tgactcagaattgccg

SEQ ID NO: 29735 - DNA, 16 bp, synthetic construct
  misc_feature 1..16: note = synthetic [barcode part1]
  source 1..16: mol_type = other DNA
gttcttggcgaggatt

SEQ ID NO: 29736 - DNA, 16 bp, synthetic construct
  misc_feature 1..16: note = synthetic [barcode part1]
  source 1..16: mol_type = other DNA
taatcgcaggtactcg

SEQ ID NO: 29737 - DNA, 16 bp, synthetic construct
  misc_feature 1..16: note = synthetic [barcode part1]
  source 1..16: mol_type = other DNA
gtattaagttggaggc

SEQ ID NO: 29738 - DNA, 16 bp, synthetic construct
  misc_feature 1..16: note = synthetic [barcode part1]
  source 1..16: mol_type = other DNA
attgattgtgccgcag

SEQ ID NO: 29739 - DNA, 16 bp, synthetic construct
  misc_feature 1..16: note = synthetic [barcode part1]
  source 1..16: mol_type = other DNA
tcgttgatcctgtgcg

SEQ ID NO: 29740 - DNA, 16 bp, synthetic construct
  misc_feature 1..16: note = synthetic [barcode part1]
  source 1..16: mol_type = other DNA
accagaggattccttg

SEQ ID NO: 29741 - DNA, 16 bp, synthetic construct
  misc_feature 1..16: note = synthetic [barcode part1]
  source 1..16: mol_type = other DNA
tctgattgtcgtgtac

SEQ ID NO: 29742 - DNA, 16 bp, synthetic construct
  misc_feature 1..16: note = synthetic [barcode part1]
  source 1..16: mol_type = other DNA
ttagtatcgtgcgacg

SEQ ID NO: 29743 - DNA, 16 bp, synthetic construct
  misc_feature 1..16: note = synthetic [barcode part1]
  source 1..16: mol_type = other DNA
tatccactaggactct

SEQ ID NO: 29744 - DNA, 16 bp, synthetic construct
  misc_feature 1..16: note = synthetic [barcode part1]
  source 1..16: mol_type = other DNA
acaatccggactatcg

SEQ ID NO: 29745 - DNA, 16 bp, synthetic construct
  misc_feature 1..16: note = synthetic [barcode part1]
  source 1..16: mol_type = other DNA
aacagttcacgttcct

SEQ ID NO: 29746 - DNA, 16 bp, synthetic construct
  misc_feature 1..16: note = synthetic [barcode part1]
  source 1..16: mol_type = other DNA
gactacgaagatcagt

SEQ ID NO: 29747 - DNA, 16 bp, synthetic construct
  misc_feature 1..16: note = synthetic [barcode part1]
  source 1..16: mol_type = other DNA
tgcaccgaatcttccg

SEQ ID NO: 29748 - DNA, 16 bp, synthetic construct
  misc_feature 1..16: note = synthetic [barcode part1]
  source 1..16: mol_type = other DNA
ttgagtccgtattctg

SEQ ID NO: 29749 - DNA, 16 bp, synthetic construct
  misc_feature 1..16: note = synthetic [barcode part1]
  source 1..16: mol_type = other DNA
agtctactccaccgtg

SEQ ID NO: 29750 - DNA, 16 bp, synthetic construct
  misc_feature 1..16: note = synthetic [barcode part1]
  source 1..16: mol_type = other DNA
ttagtaatctggcggc

SEQ ID NO: 29751 - DNA, 16 bp, synthetic construct
  misc_feature 1..16: note = synthetic [barcode part1]
  source 1..16: mol_type = other DNA
gtggtcctgaggatag

SEQ ID NO: 29752 - DNA, 16 bp, synthetic construct
  misc_feature 1..16: note = synthetic [barcode part1]
  source 1..16: mol_type = other DNA
aactgcggcactgatt

SEQ ID NO: 29753 - DNA, 16 bp, synthetic construct
  misc_feature 1..16: note = synthetic [barcode part1]
  source 1..16: mol_type = other DNA
aatccgttgttatccg

SEQ ID NO: 29754 - DNA, 16 bp, synthetic construct
  misc_feature 1..16: note = synthetic [barcode part1]
  source 1..16: mol_type = other DNA
cctgaccagagaactt

SEQ ID NO: 29755 - DNA, 16 bp, synthetic construct
  misc_feature 1..16: note = synthetic [barcode part1]
  source 1..16: mol_type = other DNA
gagatctggcgagtac

SEQ ID NO: 29756 - DNA, 16 bp, synthetic construct
  misc_feature 1..16: note = synthetic [barcode part1]
  source 1..16: mol_type = other DNA
cgtccgactaatacag

SEQ ID NO: 29757 - DNA, 16 bp, synthetic construct
  misc_feature 1..16: note = synthetic [barcode part1]
  source 1..16: mol_type = other DNA
ttctccttaactggcc

SEQ ID NO: 29758 - DNA, 16 bp, synthetic construct
  misc_feature 1..16: note = synthetic [barcode part1]
  source 1..16: mol_type = other DNA
aagtctgcactccgtc

SEQ ID NO: 29759 - DNA, 16 bp, synthetic construct
  misc_feature 1..16: note = synthetic [barcode part1]
  source 1..16: mol_type = other DNA
tcggttcgttcttcac

SEQ ID NO: 29760 - DNA, 16 bp, synthetic construct
  misc_feature 1..16: note = synthetic [barcode part1]
  source 1..16: mol_type = other DNA
ttcaaggaaggtcctc

SEQ ID NO: 29761 - DNA, 16 bp, synthetic construct
  misc_feature 1..16: note = synthetic [barcode part1]
  source 1..16: mol_type = other DNA
cgttaggcgtcgaatt

SEQ ID NO: 29762 - DNA, 16 bp, synthetic construct
  misc_feature 1..16: note = synthetic [barcode part1]
  source 1..16: mol_type = other DNA
aagaactggaaccgag

SEQ ID NO: 29763 - DNA, 16 bp, synthetic construct
  misc_feature 1..16: note = synthetic [barcode part1]
  source 1..16: mol_type = other DNA
actcacctgttcactc

SEQ ID NO: 29764 - DNA, 16 bp, synthetic construct
  misc_feature 1..16: note = synthetic [barcode part1]
  source 1..16: mol_type = other DNA
acagtcgaatcctctt

SEQ ID NO: 29765 - DNA, 16 bp, synthetic construct
  misc_feature 1..16: note = synthetic [barcode part1]
  source 1..16: mol_type = other DNA
gtgtcaggatctgtgt

SEQ ID NO: 29766 - DNA, 16 bp, synthetic construct
  misc_feature 1..16: note = synthetic [barcode part1]
  source 1..16: mol_type = other DNA
gtagacgaacaccgtg

SEQ ID NO: 29767 - DNA, 16 bp, synthetic construct
  misc_feature 1..16: note = synthetic [barcode part1]
  source 1..16: mol_type = other DNA
tggtaacagttcggtc

SEQ ID NO: 29768 - DNA, 16 bp, synthetic construct
  misc_feature 1..16: note = synthetic [barcode part1]
  source 1..16: mol_type = other DNA
cacgttactctaatcg

SEQ ID NO: 29769 - DNA, 16 bp, synthetic construct
  misc_feature 1..16: note = synthetic [barcode part1]
  source 1..16: mol_type = other DNA
cgagtacacacttggt

SEQ ID NO: 29770 - DNA, 16 bp, synthetic construct
  misc_feature 1..16: note = synthetic [barcode part1]
  source 1..16: mol_type = other DNA
acgaataggcgagtag

SEQ ID NO: 29771 - DNA, 16 bp, synthetic construct
  misc_feature 1..16: note = synthetic [barcode part1]
  source 1..16: mol_type = other DNA
acctgaacttgttacc

SEQ ID NO: 29772 - DNA, 16 bp, synthetic construct
  misc_feature 1..16: note = synthetic [barcode part1]
  source 1..16: mol_type = other DNA
aacgactctccacgtc

SEQ ID NO: 29773 - DNA, 16 bp, synthetic construct
  misc_feature 1..16: note = synthetic [barcode part1]
  source 1..16: mol_type = other DNA
ttcttgtcagaggcag

SEQ ID NO: 29774 - DNA, 16 bp, synthetic construct
  misc_feature 1..16: note = synthetic [barcode part1]
  source 1..16: mol_type = other DNA
cacggtgaagtagacc

SEQ ID NO: 29775 - DNA, 16 bp, synthetic construct
  misc_feature 1..16: note = synthetic [barcode part1]
  source 1..16: mol_type = other DNA
gtataaggttcctgcg

SEQ ID NO: 29776 - DNA, 16 bp, synthetic construct
  misc_feature 1..16: note = synthetic [barcode part1]
  source 1..16: mol_type = other DNA
gaagaattcgtcgtcc

SEQ ID NO: 29777 - DNA, 16 bp, synthetic construct
  misc_feature 1..16: note = synthetic [barcode part1]
  source 1..16: mol_type = other DNA
gagtgagtctaggacc

SEQ ID NO: 29778 - DNA, 16 bp, synthetic construct
  misc_feature 1..16: note = synthetic [barcode part1]
  source 1..16: mol_type = other DNA
ttgcacacctctcgag

SEQ ID NO: 29779 - DNA, 16 bp, synthetic construct
  misc_feature 1..16: note = synthetic [barcode part1]
  source 1..16: mol_type = other DNA
cacgtcgtgatatacg

SEQ ID NO: 29780 - DNA, 16 bp, synthetic construct
  misc_feature 1..16: note = synthetic [barcode part1]
  source 1..16: mol_type = other DNA
ataattctctacgccg

SEQ ID NO: 29781 - DNA, 16 bp, synthetic construct
  misc_feature 1..16: note = synthetic [barcode part1]
  source 1..16: mol_type = other DNA
gcgttctgatcaccac

SEQ ID NO: 29782 - DNA, 16 bp, synthetic construct
  misc_feature 1..16: note = synthetic [barcode part1]
  source 1..16: mol_type = other DNA
cacgtgatactggtgt

SEQ ID NO: 29783 - DNA, 16 bp, synthetic construct
  misc_feature 1..16: note = synthetic [barcode part1]
  source 1..16: mol_type = other DNA
tggcaatcgtgtcctc

SEQ ID NO: 29784 - DNA, 16 bp, synthetic construct
  misc_feature 1..16: note = synthetic [barcode part1]
  source 1..16: mol_type = other DNA
cacgaagtcggtaacg

SEQ ID NO: 29785 - DNA, 16 bp, synthetic construct
  misc_feature 1..16: note = synthetic [barcode part1]
  source 1..16: mol_type = other DNA
agtactctcaccaccg

SEQ ID NO: 29786 - DNA, 16 bp, synthetic construct
  misc_feature 1..16: note = synthetic [barcode part1]
  source 1..16: mol_type = other DNA
caatacgttctgtcac

SEQ ID NO: 29787 - DNA, 16 bp, synthetic construct
  misc_feature 1..16: note = synthetic [barcode part1]
  source 1..16: mol_type = other DNA
ccggtaatcacgcctt

SEQ ID NO: 29788 - DNA, 16 bp, synthetic construct
  misc_feature 1..16: note = synthetic [barcode part1]
  source 1..16: mol_type = other DNA
gtgtggcaactggaac

SEQ ID NO: 29789 - DNA, 16 bp, synthetic construct
  misc_feature 1..16: note = synthetic [barcode part1]
  source 1..16: mol_type = other DNA
tgtagtggaaccttgc

SEQ ID NO: 29790 - DNA, 16 bp, synthetic construct
  misc_feature 1..16: note = synthetic [barcode part1]
  source 1..16: mol_type = other DNA
taggcgcgtgtaattc

SEQ ID NO: 29791 - DNA, 16 bp, synthetic construct
  misc_feature 1..16: note = synthetic [barcode part1]
  source 1..16: mol_type = other DNA
ccggatacgttgcctt

SEQ ID NO: 29792 - DNA, 16 bp, synthetic construct
  misc_feature 1..16: note = synthetic [barcode part1]
  source 1..16: mol_type = other DNA
attcctaactcggtac

SEQ ID NO: 29793 - DNA, 16 bp, synthetic construct
  misc_feature 1..16: note = synthetic [barcode part1]
  source 1..16: mol_type = other DNA
acaggttaattcgcgc

SEQ ID NO: 29794 - DNA, 16 bp, synthetic construct
  misc_feature 1..16: note = synthetic [barcode part1]
  source 1..16: mol_type = other DNA
accaagttaagaacgc

SEQ ID NO: 29795 - DNA, 16 bp, synthetic construct
  misc_feature 1..16: note = synthetic [barcode part1]
  source 1..16: mol_type = other DNA
gccttattctgtgagt

SEQ ID NO: 29796 - DNA, 16 bp, synthetic construct
  misc_feature 1..16: note = synthetic [barcode part1]
  source 1..16: mol_type = other DNA
ccgttatctcaccgtt

SEQ ID NO: 29797 - DNA, 16 bp, synthetic construct
  misc_feature 1..16: note = synthetic [barcode part1]
  source 1..16: mol_type = other DNA
gaggtggagtactcgt

SEQ ID NO: 29798 - DNA, 16 bp, synthetic construct
  misc_feature 1..16: note = synthetic [barcode part1]
  source 1..16: mol_type = other DNA
ttcgtcggattgtgcc

SEQ ID NO: 29799 - DNA, 16 bp, synthetic construct
  misc_feature 1..16: note = synthetic [barcode part1]
  source 1..16: mol_type = other DNA
tggaggagtgcactac

SEQ ID NO: 29800 - DNA, 16 bp, synthetic construct
  misc_feature 1..16: note = synthetic [barcode part1]
  source 1..16: mol_type = other DNA
ccactctgttaggaag

SEQ ID NO: 29801 - DNA, 16 bp, synthetic construct
  misc_feature 1..16: note = synthetic [barcode part1]
  source 1..16: mol_type = other DNA
gtgcaattgcgtaacc

SEQ ID NO: 29802 - DNA, 16 bp, synthetic construct
  misc_feature 1..16: note = synthetic [barcode part1]
  source 1..16: mol_type = other DNA
actaacgtaggtccac

SEQ ID NO: 29803 - DNA, 16 bp, synthetic construct
  misc_feature 1..16: note = synthetic [barcode part1]
  source 1..16: mol_type = other DNA
actcagaccacctcac

SEQ ID NO: 29804 - DNA, 16 bp, synthetic construct
  misc_feature 1..16: note = synthetic [barcode part1]
  source 1..16: mol_type = other DNA
tcaacaagacgtaggt

SEQ ID NO: 29805 - DNA, 16 bp, synthetic construct
  misc_feature 1..16: note = synthetic [barcode part1]
  source 1..16: mol_type = other DNA
tagagatcttgcaccg

SEQ ID NO: 29806 - DNA, 16 bp, synthetic construct
  misc_feature 1..16: note = synthetic [barcode part1]
  source 1..16: mol_type = other DNA
attaccttcacagacc

SEQ ID NO: 29807 - DNA, 16 bp, synthetic construct
  misc_feature 1..16: note = synthetic [barcode part1]
  source 1..16: mol_type = other DNA
cctcactatcctgttg

SEQ ID NO: 29808 - DNA, 16 bp, synthetic construct
  misc_feature 1..16: note = synthetic [barcode part1]
  source 1..16: mol_type = other DNA
gcaaccagatcggagt

SEQ ID NO: 29809 - DNA, 16 bp, synthetic construct
  misc_feature 1..16: note = synthetic [barcode part1]
  source 1..16: mol_type = other DNA
tagtgcgtggccttct

SEQ ID NO: 29810 - DNA, 16 bp, synthetic construct
  misc_feature 1..16: note = synthetic [barcode part1]
  source 1..16: mol_type = other DNA
agtcttcgcgtgacct

SEQ ID NO: 29811 - DNA, 16 bp, synthetic construct
  misc_feature 1..16: note = synthetic [barcode part1]
  source 1..16: mol_type = other DNA
acgactattgactctc

SEQ ID NO: 29812 - DNA, 16 bp, synthetic construct
  misc_feature 1..16: note = synthetic [barcode part1]
  source 1..16: mol_type = other DNA
agtacgtcagtgtgtc

SEQ ID NO: 29813 - DNA, 16 bp, synthetic construct
  misc_feature 1..16: note = synthetic [barcode part1]
  source 1..16: mol_type = other DNA
acgtatcttgtcactg

SEQ ID NO: 29814 - DNA, 16 bp, synthetic construct
  misc_feature 1..16: note = synthetic [barcode part1]
  source 1..16: mol_type = other DNA
agttcttgactacacc

SEQ ID NO: 29815 - DNA, 16 bp, synthetic construct
  misc_feature 1..16: note = synthetic [barcode part1]
  source 1..16: mol_type = other DNA
ttgacaatctgtgcct

SEQ ID NO: 29816 - DNA, 16 bp, synthetic construct
  misc_feature 1..16: note = synthetic [barcode part1]
  source 1..16: mol_type = other DNA
gagtacgtgacctgag

SEQ ID NO: 29817 - DNA, 16 bp, synthetic construct
  misc_feature 1..16: note = synthetic [barcode part1]
  source 1..16: mol_type = other DNA
ttatccttggcaggag

SEQ ID NO: 29818 - DNA, 16 bp, synthetic construct
  misc_feature 1..16: note = synthetic [barcode part1]
  source 1..16: mol_type = other DNA
agtacgcaccgatact

SEQ ID NO: 29819 - DNA, 16 bp, synthetic construct
  misc_feature 1..16: note = synthetic [barcode part1]
  source 1..16: mol_type = other DNA
tactaccactcgaact

SEQ ID NO: 29820 - DNA, 16 bp, synthetic construct
  misc_feature 1..16: note = synthetic [barcode part1]
  source 1..16: mol_type = other DNA
attctctgcaccggtg

SEQ ID NO: 29821 - DNA, 16 bp, synthetic construct
  misc_feature 1..16: note = synthetic [barcode part1]
  source 1..16: mol_type = other DNA
actctcgaggtgtaac

SEQ ID NO: 29822 - DNA, 16 bp, synthetic construct
  misc_feature 1..16: note = synthetic [barcode part1]
  source 1..16: mol_type = other DNA
cggacgtgtgtaattc

SEQ ID NO: 29823 - DNA, 16 bp, synthetic construct
  misc_feature 1..16: note = synthetic [barcode part1]
  source 1..16: mol_type = other DNA
aactggcgttacggtt

SEQ ID NO: 29824 - DNA, 16 bp, synthetic construct
  misc_feature 1..16: note = synthetic [barcode part1]
  source 1..16: mol_type = other DNA
acgcaaggagttaccg

SEQ ID NO: 29825 - DNA, 16 bp, synthetic construct
  misc_feature 1..16: note = synthetic [barcode part1]
  source 1..16: mol_type = other DNA
tctgtgcgattgttac

SEQ ID NO: 29826 - DNA, 16 bp, synthetic construct
  misc_feature 1..16: note = synthetic [barcode part1]
  source 1..16: mol_type = other DNA
gacgacttggtaacct

SEQ ID NO: 29827 - DNA, 16 bp, synthetic construct
  misc_feature 1..16: note = synthetic [barcode part1]
  source 1..16: mol_type = other DNA
aacctcctacgtcgac

SEQ ID NO: 29828 - DNA, 16 bp, synthetic construct
  misc_feature 1..16: note = synthetic [barcode part1]
  source 1..16: mol_type = other DNA
acgaggtataagtctg

SEQ ID NO: 29829 - DNA, 16 bp, synthetic construct
  misc_feature 1..16: note = synthetic [barcode part1]
  source 1..16: mol_type = other DNA
ccacttgtaccgcaac

SEQ ID NO: 29830 - DNA, 16 bp, synthetic construct
  misc_feature 1..16: note = synthetic [barcode part1]
  source 1..16: mol_type = other DNA
tggactaccaggttac

SEQ ID NO: 29831 - DNA, 16 bp, synthetic construct
  misc_feature 1..16: note = synthetic [barcode part1]
  source 1..16: mol_type = other DNA
tgtgacgatcctgagt

SEQ ID NO: 29832 - DNA, 16 bp, synthetic construct
  misc_feature 1..16: note = synthetic [barcode part1]
  source 1..16: mol_type = other DNA
agatccagttcgagtc

SEQ ID NO: 29833 - DNA, 16 bp, synthetic construct
  misc_feature 1..16: note = synthetic [barcode part1]
  source 1..16: mol_type = other DNA
aggatcttcgcctgtc

SEQ ID NO: 29834 - DNA, 16 bp, synthetic construct
  misc_feature 1..16: note = synthetic [barcode part1]
  source 1..16: mol_type = other DNA
gcgtcgaagaacgatc

SEQ ID NO: 29835 - DNA, 16 bp, synthetic construct
  misc_feature 1..16: note = synthetic [barcode part1]
  source 1..16: mol_type = other DNA
agtgaatacggcgtcg

SEQ ID NO: 29836 - DNA, 16 bp, synthetic construct
  misc_feature 1..16: note = synthetic [barcode part1]
  source 1..16: mol_type = other DNA
gataggagtgcaatct

SEQ ID NO: 29837 - DNA, 16 bp, synthetic construct
  misc_feature 1..16: note = synthetic [barcode part1]
  source 1..16: mol_type = other DNA
accacgaggatcttgt

SEQ ID NO: 29838 - DNA, 16 bp, synthetic construct
  misc_feature 1..16: note = synthetic [barcode part1]
  source 1..16: mol_type = other DNA
aacaactgagacgtgt

SEQ ID NO: 29839 - DNA, 16 bp, synthetic construct
  misc_feature 1..16: note = synthetic [barcode part1]
  source 1..16: mol_type = other DNA
ttagtcctactgacgt

SEQ ID NO: 29840 - DNA, 16 bp, synthetic construct
  misc_feature 1..16: note = synthetic [barcode part1]
  source 1..16: mol_type = other DNA
cgcgaattgtcgtcct

SEQ ID NO: 29841 - DNA, 16 bp, synthetic construct
  misc_feature 1..16: note = synthetic [barcode part1]
  source 1..16: mol_type = other DNA
tgtgttcgcagagact

SEQ ID NO: 29842 - DNA, 16 bp, synthetic construct
  misc_feature 1..16: note = synthetic [barcode part1]
  source 1..16: mol_type = other DNA
acgtaatagtcggagt

SEQ ID NO: 29843 - DNA, 16 bp, synthetic construct
  misc_feature 1..16: note = synthetic [barcode part1]
  source 1..16: mol_type = other DNA
atcgatctgtgcgtag

SEQ ID NO: 29844 - DNA, 16 bp, synthetic construct
  misc_feature 1..16: note = synthetic [barcode part1]
  source 1..16: mol_type = other DNA
tcttggacctgtccag

SEQ ID NO: 29845 - DNA, 16 bp, synthetic construct
  misc_feature 1..16: note = synthetic [barcode part1]
  source 1..16: mol_type = other DNA
accgcaatactcgcct

SEQ ID NO: 29846 - DNA, 16 bp, synthetic construct
  misc_feature 1..16: note = synthetic [barcode part1]
  source 1..16: mol_type = other DNA
gagattcacaggtggc

SEQ ID NO: 29847 - DNA, 16 bp, synthetic construct
  misc_feature 1..16: note = synthetic [barcode part1]
  source 1..16: mol_type = other DNA
tctagaaggccaacct

SEQ ID NO: 29848 - DNA, 16 bp, synthetic construct
  misc_feature 1..16: note = synthetic [barcode part1]
  source 1..16: mol_type = other DNA
ataccaccaagatccg

SEQ ID NO: 29849 - DNA, 16 bp, synthetic construct
  misc_feature 1..16: note = synthetic [barcode part1]
  source 1..16: mol_type = other DNA
agacacttcacgagtc

SEQ ID NO: 29850 - DNA, 16 bp, synthetic construct
  misc_feature 1..16: note = synthetic [barcode part1]
  source 1..16: mol_type = other DNA
ttccggttgtatcaac

SEQ ID NO: 29851 - DNA, 16 bp, synthetic construct
  misc_feature 1..16: note = synthetic [barcode part1]
  source 1..16: mol_type = other DNA
cctgagatcaaccagt

SEQ ID NO: 29852 - DNA, 16 bp, synthetic construct
  misc_feature 1..16: note = synthetic [barcode part1]
  source 1..16: mol_type = other DNA
ccgtaaggcagttact

SEQ ID NO: 29853 - DNA, 16 bp, synthetic construct
  misc_feature 1..16: note = synthetic [barcode part1]
  source 1..16: mol_type = other DNA
ccaccgattcctgtag

SEQ ID NO: 29854 - DNA, 16 bp, synthetic construct
  misc_feature 1..16: note = synthetic [barcode part1]
  source 1..16: mol_type = other DNA
cgagacctaactgatc

SEQ ID NO: 29855 - DNA, 16 bp, synthetic construct
  misc_feature 1..16: note = synthetic [barcode part1]
  source 1..16: mol_type = other DNA
atcctgtatccgaact

SEQ ID NO: 29856 - DNA, 16 bp, synthetic construct
  misc_feature 1..16: note = synthetic [barcode part1]
  source 1..16: mol_type = other DNA
aacaggagtgcgacct

SEQ ID NO: 29857 - DNA, 16 bp, synthetic construct
  misc_feature 1..16: note = synthetic [barcode part1]
  source 1..16: mol_type = other DNA
aacttatcgcctggag

SEQ ID NO: 29858 - DNA, 16 bp, synthetic construct
  misc_feature 1..16: note = synthetic [barcode part1]
  source 1..16: mol_type = other DNA
gttctgtggcacgtct

SEQ ID NO: 29859 - DNA, 16 bp, synthetic construct
  misc_feature 1..16: note = synthetic [barcode part1]
  source 1..16: mol_type = other DNA
aggtctatacttcacc

SEQ ID NO: 29860 - DNA, 16 bp, synthetic construct
  misc_feature 1..16: note = synthetic [barcode part1]
  source 1..16: mol_type = other DNA
gaaccaggcactaacg

SEQ ID NO: 29861 - DNA, 16 bp, synthetic construct
  misc_feature 1..16: note = synthetic [barcode part1]
  source 1..16: mol_type = other DNA
gcgtgcacagttaatc

SEQ ID NO: 29862 - DNA, 16 bp, synthetic construct
  misc_feature 1..16: note = synthetic [barcode part1]
  source 1..16: mol_type = other DNA
gttggcctataacgtg

SEQ ID NO: 29863 - DNA, 16 bp, synthetic construct
  misc_feature 1..16: note = synthetic [barcode part1]
  source 1..16: mol_type = other DNA
aatccggactgagtct

SEQ ID NO: 29864 - DNA, 16 bp, synthetic construct
  misc_feature 1..16: note = synthetic [barcode part1]
  source 1..16: mol_type = other DNA
aaggtcgtctcgttag

SEQ ID NO: 29865 - DNA, 16 bp, synthetic construct
  misc_feature 1..16: note = synthetic [barcode part1]
  source 1..16: mol_type = other DNA
atagtactggtgccgt

SEQ ID NO: 29866 - DNA, 16 bp, synthetic construct
  misc_feature 1..16: note = synthetic [barcode part1]
  source 1..16: mol_type = other DNA
accgtctatccgcaac

SEQ ID NO: 29867 - DNA, 16 bp, synthetic construct
  misc_feature 1..16: note = synthetic [barcode part1]
  source 1..16: mol_type = other DNA
tctctccagtctcagt

SEQ ID NO: 29868 - DNA, 16 bp, synthetic construct
  misc_feature 1..16: note = synthetic [barcode part1]
  source 1..16: mol_type = other DNA
cgtatctgagtgcagt

SEQ ID NO: 29869 - DNA, 16 bp, synthetic construct
  misc_feature 1..16: note = synthetic [barcode part1]
  source 1..16: mol_type = other DNA
gtgaacgcaagtagag

SEQ ID NO: 29870 - DNA, 16 bp, synthetic construct
  misc_feature 1..16: note = synthetic [barcode part1]
  source 1..16: mol_type = other DNA
gcgttggtggtagaac

SEQ ID NO: 29871 - DNA, 16 bp, synthetic construct
  misc_feature 1..16: note = synthetic [barcode part1]
  source 1..16: mol_type = other DNA
tcctcaagaccaaggt

SEQ ID NO: 29872 - DNA, 16 bp, synthetic construct
  misc_feature 1..16: note = synthetic [barcode part1]
  source 1..16: mol_type = other DNA
aggcgttacaagtcct

SEQ ID NO: 29873 - DNA, 16 bp, synthetic construct
  misc_feature 1..16: note = synthetic [barcode part1]
  source 1..16: mol_type = other DNA
tatctctgttagaccg

SEQ ID NO: 29874 - DNA, 16 bp, synthetic construct
  misc_feature 1..16: note = synthetic [barcode part1]
  source 1..16: mol_type = other DNA
caatctcgtcgatact

SEQ ID NO: 29875 - DNA, 16 bp, synthetic construct
  misc_feature 1..16: note = synthetic [barcode part1]
  source 1..16: mol_type = other DNA
cgagacttgcaacact

SEQ ID NO: 29876 - DNA, 16 bp, synthetic construct
  misc_feature 1..16: note = synthetic [barcode part1]
  source 1..16: mol_type = other DNA
caccgttcgagtctac

SEQ ID NO: 29877 - DNA, 16 bp, synthetic construct
  misc_feature 1..16: note = synthetic [barcode part1]
  source 1..16: mol_type = other DNA
gtaatcgactgacacc

SEQ ID NO: 29878 - DNA, 16 bp, synthetic construct
  misc_feature 1..16: note = synthetic [barcode part1]
  source 1..16: mol_type = other DNA
tagtctggtggttcag

SEQ ID NO: 29879 - DNA, 16 bp, synthetic construct
  misc_feature 1..16: note = synthetic [barcode part1]
  source 1..16: mol_type = other DNA
aactgaacgaggaacg

SEQ ID NO: 29880 - DNA, 16 bp, synthetic construct
  misc_feature 1..16: note = synthetic [barcode part1]
  source 1..16: mol_type = other DNA
gactcggaggaatacc

SEQ ID NO: 29881 - DNA, 16 bp, synthetic construct
  misc_feature 1..16: note = synthetic [barcode part1]
  source 1..16: mol_type = other DNA
tgtggcctggtagaag

SEQ ID NO: 29882 - DNA, 16 bp, synthetic construct
  misc_feature 1..16: note = synthetic [barcode part1]
  source 1..16: mol_type = other DNA
attagatcggaccacc

SEQ ID NO: 29883 - DNA, 16 bp, synthetic construct
  misc_feature 1..16: note = synthetic [barcode part1]
  source 1..16: mol_type = other DNA
taacgcacgacgagac

SEQ ID NO: 29884 - DNA, 16 bp, synthetic construct
  misc_feature 1..16: note = synthetic [barcode part1]
  source 1..16: mol_type = other DNA
ttaggtggacggagtc

SEQ ID NO: 29885 - DNA, 16 bp, synthetic construct
  misc_feature 1..16: note = synthetic [barcode part1]
  source 1..16: mol_type = other DNA
gtcaggcaacacgaac

SEQ ID NO: 29886 - DNA, 16 bp, synthetic construct
  misc_feature 1..16: note = synthetic [barcode part1]
  source 1..16: mol_type = other DNA
tacggatccacagatc

SEQ ID NO: 29887 - DNA, 16 bp, synthetic construct
  misc_feature 1..16: note = synthetic [barcode part1]
  source 1..16: mol_type = other DNA
taacggtgtcgaactc

SEQ ID NO: 29888 - DNA, 16 bp, synthetic construct
  misc_feature 1..16: note = synthetic [barcode part1]
  source 1..16: mol_type = other DNA
atcgaggtataaccag

SEQ ID NO: 29889 - DNA, 16 bp, synthetic construct
  misc_feature 1..16: note = synthetic [barcode part1]
  source 1..16: mol_type = other DNA
gaagttctcgttcgcc

SEQ ID NO: 29890 - DNA, 16 bp, synthetic construct
  misc_feature 1..16: note = synthetic [barcode part1]
  source 1..16: mol_type = other DNA
tcggcgataagagtgc

SEQ ID NO: 29891 - DNA, 16 bp, synthetic construct
  misc_feature 1..16: note = synthetic [barcode part1]
  source 1..16: mol_type = other DNA
gagtaggcgaatagac

SEQ ID NO: 29892 - DNA, 16 bp, synthetic construct
  misc_feature 1..16: note = synthetic [barcode part1]
  source 1..16: mol_type = other DNA
caatcgatcttgaggc

SEQ ID NO: 29893 - DNA, 16 bp, synthetic construct
  misc_feature 1..16: note = synthetic [barcode part1]
  source 1..16: mol_type = other DNA
gaggcgagtcttatct

SEQ ID NO: 29894 - DNA, 16 bp, synthetic construct
  misc_feature 1..16: note = synthetic [barcode part1]
  source 1..16: mol_type = other DNA
gtcacaacacttatcc

SEQ ID NO: 29895 - DNA, 16 bp, synthetic construct
  misc_feature 1..16: note = synthetic [barcode part1]
  source 1..16: mol_type = other DNA
aaccgatcaaccgatc

SEQ ID NO: 29896 - DNA, 16 bp, synthetic construct
  misc_feature 1..16: note = synthetic [barcode part1]
  source 1..16: mol_type = other DNA
acctagtaactcggtg

SEQ ID NO: 29897 - DNA, 16 bp, synthetic construct
  misc_feature 1..16: note = synthetic [barcode part1]
  source 1..16: mol_type = other DNA
tcgtactccacgtctt

SEQ ID NO: 29898 - DNA, 16 bp, synthetic construct
  misc_feature 1..16: note = synthetic [barcode part1]
  source 1..16: mol_type = other DNA
gatctggcgtgtctct

SEQ ID NO: 29899 - DNA, 16 bp, synthetic construct
  misc_feature 1..16: note = synthetic [barcode part1]
  source 1..16: mol_type = other DNA
ccgcgtcttactgaac

SEQ ID NO: 29900 - DNA, 16 bp, synthetic construct
  misc_feature 1..16: note = synthetic [barcode part1]
  source 1..16: mol_type = other DNA
aactccagtaagtgag

SEQ ID NO: 29901 - DNA, 16 bp, synthetic construct
  misc_feature 1..16: note = synthetic [barcode part1]
  source 1..16: mol_type = other DNA
cgtagacttgtggact

SEQ ID NO: 29902 - DNA, 16 bp, synthetic construct
  misc_feature 1..16: note = synthetic [barcode part1]
  source 1..16: mol_type = other DNA
tatcaagtccggtggt

SEQ ID NO: 29903 - DNA, 16 bp, synthetic construct
  misc_feature 1..16: note = synthetic [barcode part1]
  source 1..16: mol_type = other DNA
gccactctagacgtct

SEQ ID NO: 29904 - DNA, 16 bp, synthetic construct
  misc_feature 1..16: note = synthetic [barcode part1]
  source 1..16: mol_type = other DNA
gtcgcagtagataggc

SEQ ID NO: 29905 - DNA, 16 bp, synthetic construct
  misc_feature 1..16: note = synthetic [barcode part1]
  source 1..16: mol_type = other DNA
cctctgagtgtgtcac

SEQ ID NO: 29906 - DNA, 16 bp, synthetic construct
  misc_feature 1..16: note = synthetic [barcode part1]
  source 1..16: mol_type = other DNA
gtacttccttcgcact

SEQ ID NO: 29907 - DNA, 16 bp, synthetic construct
  misc_feature 1..16: note = synthetic [barcode part1]
  source 1..16: mol_type = other DNA
agaactcgtggtgttc

SEQ ID NO: 29908 - DNA, 16 bp, synthetic construct
  misc_feature 1..16: note = synthetic [barcode part1]
  source 1..16: mol_type = other DNA
gactaacactaaccgc

SEQ ID NO: 29909 - DNA, 16 bp, synthetic construct
  misc_feature 1..16: note = synthetic [barcode part1]
  source 1..16: mol_type = other DNA
gtggaacacagacctg

SEQ ID NO: 29910 - DNA, 16 bp, synthetic construct
  misc_feature 1..16: note = synthetic [barcode part1]
  source 1..16: mol_type = other DNA
ccaactcctgtgtgac

SEQ ID NO: 29911 - DNA, 16 bp, synthetic construct
  misc_feature 1..16: note = synthetic [barcode part1]
  source 1..16: mol_type = other DNA
gagaggtacgaagtac

SEQ ID NO: 29912 - DNA, 16 bp, synthetic construct
  misc_feature 1..16: note = synthetic [barcode part1]
  source 1..16: mol_type = other DNA
gaccggtcaatactac

SEQ ID NO: 29913 - DNA, 16 bp, synthetic construct
  misc_feature 1..16: note = synthetic [barcode part1]
  source 1..16: mol_type = other DNA
tctaggtgagtcggag

SEQ ID NO: 29914 - DNA, 16 bp, synthetic construct
  misc_feature 1..16: note = synthetic [barcode part1]
  source 1..16: mol_type = other DNA
gttgtggttgcaacgt

SEQ ID NO: 29915 - DNA, 16 bp, synthetic construct
  misc_feature 1..16: note = synthetic [barcode part1]
  source 1..16: mol_type = other DNA
cgacgtatacgagtct

SEQ ID NO: 29916 - DNA, 16 bp, synthetic construct
  misc_feature 1..16: note = synthetic [barcode part1]
  source 1..16: mol_type = other DNA
acactaggtacagtcc

SEQ ID NO: 29917 - DNA, 16 bp, synthetic construct
  misc_feature 1..16: note = synthetic [barcode part1]
  source 1..16: mol_type = other DNA
ttggatcaagagtgtg

SEQ ID NO: 29918 - DNA, 16 bp, synthetic construct
  misc_feature 1..16: note = synthetic [barcode part1]
  source 1..16: mol_type = other DNA
tgtcctagtctgcggt

SEQ ID NO: 29919 - DNA, 16 bp, synthetic construct
  misc_feature 1..16: note = synthetic [barcode part1]
  source 1..16: mol_type = other DNA
tatactcacctagtgc

SEQ ID NO: 29920 - DNA, 16 bp, synthetic construct
  misc_feature 1..16: note = synthetic [barcode part1]
  source 1..16: mol_type = other DNA
ttctccggaacacctg

SEQ ID NO: 29921 - DNA, 16 bp, synthetic construct
  misc_feature 1..16: note = synthetic [barcode part1]
  source 1..16: mol_type = other DNA
tgcctgtgtctattcc

SEQ ID NO: 29922 - DNA, 16 bp, synthetic construct
  misc_feature 1..16: note = synthetic [barcode part1]
  source 1..16: mol_type = other DNA
tgaggttcgtaacacc

SEQ ID NO: 29923 - DNA, 16 bp, synthetic construct
  misc_feature 1..16: note = synthetic [barcode part1]
  source 1..16: mol_type = other DNA
cgtctaatacagaccg

SEQ ID NO: 29924 - DNA, 16 bp, synthetic construct
  misc_feature 1..16: note = synthetic [barcode part1]
  source 1..16: mol_type = other DNA
cagaaggtgattgtac

SEQ ID NO: 29925 - DNA, 16 bp, synthetic construct
  misc_feature 1..16: note = synthetic [barcode part1]
  source 1..16: mol_type = other DNA
acaatagaggccagag

SEQ ID NO: 29926 - DNA, 16 bp, synthetic construct
  misc_feature 1..16: note = synthetic [barcode part1]
  source 1..16: mol_type = other DNA
ataatcgaaccgaggt

SEQ ID NO: 29927 - DNA, 16 bp, synthetic construct
  misc_feature 1..16: note = synthetic [barcode part1]
  source 1..16: mol_type = other DNA
ataccagttgacgcac

SEQ ID NO: 29928 - DNA, 16 bp, synthetic construct
  misc_feature 1..16: note = synthetic [barcode part1]
  source 1..16: mol_type = other DNA
gttagtacggacctgt

SEQ ID NO: 29929 - DNA, 16 bp, synthetic construct
  misc_feature 1..16: note = synthetic [barcode part1]
  source 1..16: mol_type = other DNA
cgttcacgtaagtgac

SEQ ID NO: 29930 - DNA, 16 bp, synthetic construct
  misc_feature 1..16: note = synthetic [barcode part1]
  source 1..16: mol_type = other DNA
tgtccgcgatattact

SEQ ID NO: 29931 - DNA, 16 bp, synthetic construct
  misc_feature 1..16: note = synthetic [barcode part1]
  source 1..16: mol_type = other DNA
aactgcgtagttgcgt

SEQ ID NO: 29932 - DNA, 16 bp, synthetic construct
  misc_feature 1..16: note = synthetic [barcode part1]
  source 1..16: mol_type = other DNA
tctattgcacgaactc

SEQ ID NO: 29933 - DNA, 16 bp, synthetic construct
  misc_feature 1..16: note = synthetic [barcode part1]
  source 1..16: mol_type = other DNA
cgtaacgcaagatcct

SEQ ID NO: 29934 - DNA, 16 bp, synthetic construct
  misc_feature 1..16: note = synthetic [barcode part1]
  source 1..16: mol_type = other DNA
gaggtcaagaacagtg

SEQ ID NO: 29935 - DNA, 16 bp, synthetic construct
  misc_feature 1..16: note = synthetic [barcode part1]
  source 1..16: mol_type = other DNA
gtacgacaccgatact

SEQ ID NO: 29936 - DNA, 16 bp, synthetic construct
  misc_feature 1..16: note = synthetic [barcode part1]
  source 1..16: mol_type = other DNA
attgcaaccgtctact

SEQ ID NO: 29937 - DNA, 16 bp, synthetic construct
  misc_feature 1..16: note = synthetic [barcode part1]
  source 1..16: mol_type = other DNA
atatactcaagaggcg

SEQ ID NO: 29938 - DNA, 16 bp, synthetic construct
  misc_feature 1..16: note = synthetic [barcode part1]
  source 1..16: mol_type = other DNA
gccggtaggattgaac

SEQ ID NO: 29939 - DNA, 16 bp, synthetic construct
  misc_feature 1..16: note = synthetic [barcode part1]
  source 1..16: mol_type = other DNA
gagtgtgtggtgactg

SEQ ID NO: 29940 - DNA, 16 bp, synthetic construct
  misc_feature 1..16: note = synthetic [barcode part1]
  source 1..16: mol_type = other DNA
tcaagacctcgagatc

SEQ ID NO: 29941 - DNA, 16 bp, synthetic construct
  misc_feature 1..16: note = synthetic [barcode part1]
  source 1..16: mol_type = other DNA
gtaggacagtagaacg

SEQ ID NO: 29942 - DNA, 16 bp, synthetic construct
  misc_feature 1..16: note = synthetic [barcode part1]
  source 1..16: mol_type = other DNA
ttgtggacaccttgcc

SEQ ID NO: 29943 - DNA, 16 bp, synthetic construct
  misc_feature 1..16: note = synthetic [barcode part1]
  source 1..16: mol_type = other DNA
gttcagttggtagtcg

SEQ ID NO: 29944 - DNA, 16 bp, synthetic construct
  misc_feature 1..16: note = synthetic [barcode part1]
  source 1..16: mol_type = other DNA
tgaaggaccttccagt

SEQ ID NO: 29945 - DNA, 16 bp, synthetic construct
  misc_feature 1..16: note = synthetic [barcode part1]
  source 1..16: mol_type = other DNA
tcagtccaggtgttcc

SEQ ID NO: 29946 - DNA, 16 bp, synthetic construct
  misc_feature 1..16: note = synthetic [barcode part1]
  source 1..16: mol_type = other DNA
tcctgaatcacgacag

SEQ ID NO: 29947 - DNA, 16 bp, synthetic construct
  misc_feature 1..16: note = synthetic [barcode part1]
  source 1..16: mol_type = other DNA
gtcggatattcctact

SEQ ID NO: 29948 - DNA, 16 bp, synthetic construct
  misc_feature 1..16: note = synthetic [barcode part1]
  source 1..16: mol_type = other DNA
gcagtaccacaacact

SEQ ID NO: 29949 - DNA, 16 bp, synthetic construct
  misc_feature 1..16: note = synthetic [barcode part1]
  source 1..16: mol_type = other DNA
ttggttcctcagtcct

SEQ ID NO: 29950 - DNA, 16 bp, synthetic construct
  misc_feature 1..16: note = synthetic [barcode part1]
  source 1..16: mol_type = other DNA
gatacgccgtgattgt

SEQ ID NO: 29951 - DNA, 16 bp, synthetic construct
  misc_feature 1..16: note = synthetic [barcode part1]
  source 1..16: mol_type = other DNA
tactgcaactggtcag

SEQ ID NO: 29952 - DNA, 16 bp, synthetic construct
  misc_feature 1..16: note = synthetic [barcode part1]
  source 1..16: mol_type = other DNA
gaaggaatctcggaag

SEQ ID NO: 29953 - DNA, 16 bp, synthetic construct
  misc_feature 1..16: note = synthetic [barcode part1]
  source 1..16: mol_type = other DNA
aagacaagatactcgc

SEQ ID NO: 29954 - DNA, 16 bp, synthetic construct
  misc_feature 1..16: note = synthetic [barcode part1]
  source 1..16: mol_type = other DNA
tcgatcctcacacgac

SEQ ID NO: 29955 - DNA, 16 bp, synthetic construct
  misc_feature 1..16: note = synthetic [barcode part1]
  source 1..16: mol_type = other DNA
tatcggaacaatccgc

SEQ ID NO: 29956 - DNA, 16 bp, synthetic construct
  misc_feature 1..16: note = synthetic [barcode part1]
  source 1..16: mol_type = other DNA
gtggagtacgaacctg

SEQ ID NO: 29957 - DNA, 16 bp, synthetic construct
  misc_feature 1..16: note = synthetic [barcode part1]
  source 1..16: mol_type = other DNA
tggaactgccacaatc

SEQ ID NO: 29958 - DNA, 16 bp, synthetic construct
  misc_feature 1..16: note = synthetic [barcode part1]
  source 1..16: mol_type = other DNA
tgagatcggttgactc

SEQ ID NO: 29959 - DNA, 16 bp, synthetic construct
  misc_feature 1..16: note = synthetic [barcode part1]
  source 1..16: mol_type = other DNA
cgtagtactacggtac

SEQ ID NO: 29960 - DNA, 16 bp, synthetic construct
  misc_feature 1..16: note = synthetic [barcode part1]
  source 1..16: mol_type = other DNA
gagtgactacgaattg

SEQ ID NO: 29961 - DNA, 16 bp, synthetic construct
  misc_feature 1..16: note = synthetic [barcode part1]
  source 1..16: mol_type = other DNA
gcctcgataataccag

SEQ ID NO: 29962 - DNA, 16 bp, synthetic construct
  misc_feature 1..16: note = synthetic [barcode part1]
  source 1..16: mol_type = other DNA
gactgttcagagatag

SEQ ID NO: 29963 - DNA, 16 bp, synthetic construct
  misc_feature 1..16: note = synthetic [barcode part1]
  source 1..16: mol_type = other DNA
caatacgaagacgatc

SEQ ID NO: 29964 - DNA, 16 bp, synthetic construct
  misc_feature 1..16: note = synthetic [barcode part1]
  source 1..16: mol_type = other DNA
gatcgagtcgtgtgag

SEQ ID NO: 29965 - DNA, 16 bp, synthetic construct
  misc_feature 1..16: note = synthetic [barcode part1]
  source 1..16: mol_type = other DNA
aacaggccactgcaag

SEQ ID NO: 29966 - DNA, 16 bp, synthetic construct
  misc_feature 1..16: note = synthetic [barcode part1]
  source 1..16: mol_type = other DNA
aagaccgaatcacgcg

SEQ ID NO: 29967 - DNA, 16 bp, synthetic construct
  misc_feature 1..16: note = synthetic [barcode part1]
  source 1..16: mol_type = other DNA
gcagactccaatacgt

SEQ ID NO: 29968 - DNA, 16 bp, synthetic construct
  misc_feature 1..16: note = synthetic [barcode part1]
  source 1..16: mol_type = other DNA
cggcgtgattgagagt

SEQ ID NO: 29969 - DNA, 16 bp, synthetic construct
  misc_feature 1..16: note = synthetic [barcode part1]
  source 1..16: mol_type = other DNA
ttccagtatatccggt

SEQ ID NO: 29970 - DNA, 16 bp, synthetic construct
  misc_feature 1..16: note = synthetic [barcode part1]
  source 1..16: mol_type = other DNA
cacttccaccggattg

SEQ ID NO: 29971 - DNA, 16 bp, synthetic construct
  misc_feature 1..16: note = synthetic [barcode part1]
  source 1..16: mol_type = other DNA
cgtactagattccttg

SEQ ID NO: 29972 - DNA, 16 bp, synthetic construct
  misc_feature 1..16: note = synthetic [barcode part1]
  source 1..16: mol_type = other DNA
cgttcgcgtagtacct

SEQ ID NO: 29973 - DNA, 16 bp, synthetic construct
  misc_feature 1..16: note = synthetic [barcode part1]
  source 1..16: mol_type = other DNA
gcctactgacactgtc

SEQ ID NO: 29974 - DNA, 16 bp, synthetic construct
  misc_feature 1..16: note = synthetic [barcode part1]
  source 1..16: mol_type = other DNA
agttgcagtaccagtc

SEQ ID NO: 29975 - DNA, 16 bp, synthetic construct
  misc_feature 1..16: note = synthetic [barcode part1]
  source 1..16: mol_type = other DNA
aggtgttccacaagtc

SEQ ID NO: 29976 - DNA, 16 bp, synthetic construct
  misc_feature 1..16: note = synthetic [barcode part1]
  source 1..16: mol_type = other DNA
acactgacctcgtcac

SEQ ID NO: 29977 - DNA, 16 bp, synthetic construct
  misc_feature 1..16: note = synthetic [barcode part1]
  source 1..16: mol_type = other DNA
gcggatatacctactg

SEQ ID NO: 29978 - DNA, 16 bp, synthetic construct
  misc_feature 1..16: note = synthetic [barcode part1]
  source 1..16: mol_type = other DNA
cacgtctactcaacgc

SEQ ID NO: 29979 - DNA, 16 bp, synthetic construct
  misc_feature 1..16: note = synthetic [barcode part1]
  source 1..16: mol_type = other DNA
gagtgccaggtgatac

SEQ ID NO: 29980 - DNA, 16 bp, synthetic construct
  misc_feature 1..16: note = synthetic [barcode part1]
  source 1..16: mol_type = other DNA
ttagtccacgactact

SEQ ID NO: 29981 - DNA, 16 bp, synthetic construct
  misc_feature 1..16: note = synthetic [barcode part1]
  source 1..16: mol_type = other DNA
tattattcgccagtgc

SEQ ID NO: 29982 - DNA, 16 bp, synthetic construct
  misc_feature 1..16: note = synthetic [barcode part1]
  source 1..16: mol_type = other DNA
tacacgtgtacacgtg

SEQ ID NO: 29983 - DNA, 16 bp, synthetic construct
  misc_feature 1..16: note = synthetic [barcode part1]
  source 1..16: mol_type = other DNA
ttcgacacaccaagtg

SEQ ID NO: 29984 - DNA, 16 bp, synthetic construct
  misc_feature 1..16: note = synthetic [barcode part1]
  source 1..16: mol_type = other DNA
cggcaggttataggtg

SEQ ID NO: 29985 - DNA, 16 bp, synthetic construct
  misc_feature 1..16: note = synthetic [barcode part1]
  source 1..16: mol_type = other DNA
gacgtcgactatagtc

SEQ ID NO: 29986 - DNA, 16 bp, synthetic construct
  misc_feature 1..16: note = synthetic [barcode part1]
  source 1..16: mol_type = other DNA
cagttctcgtacgatt

SEQ ID NO: 29987 - DNA, 16 bp, synthetic construct
  misc_feature 1..16: note = synthetic [barcode part1]
  source 1..16: mol_type = other DNA
tcgagacgcaacactt

SEQ ID NO: 29988 - DNA, 16 bp, synthetic construct
  misc_feature 1..16: note = synthetic [barcode part1]
  source 1..16: mol_type = other DNA
gcaatcgcgatacgtt

SEQ ID NO: 29989 - DNA, 16 bp, synthetic construct
  misc_feature 1..16: note = synthetic [barcode part1]
  source 1..16: mol_type = other DNA
gtgaaggccgaattgc

SEQ ID NO: 29990 - DNA, 16 bp, synthetic construct
  misc_feature 1..16: note = synthetic [barcode part1]
  source 1..16: mol_type = other DNA
gtgtactaggtatccg

SEQ ID NO: 29991 - DNA, 16 bp, synthetic construct
  misc_feature 1..16: note = synthetic [barcode part1]
  source 1..16: mol_type = other DNA
aggaacaggacacagt

SEQ ID NO: 29992 - DNA, 16 bp, synthetic construct
  misc_feature 1..16: note = synthetic [barcode part1]
  source 1..16: mol_type = other DNA
tcactcgtactacaac

SEQ ID NO: 29993 - DNA, 16 bp, synthetic construct
  misc_feature 1..16: note = synthetic [barcode part1]
  source 1..16: mol_type = other DNA
accacagataagtggt

SEQ ID NO: 29994 - DNA, 16 bp, synthetic construct
  misc_feature 1..16: note = synthetic [barcode part1]
  source 1..16: mol_type = other DNA
gtgactgtggtacgtt

SEQ ID NO: 29995 - DNA, 16 bp, synthetic construct
  misc_feature 1..16: note = synthetic [barcode part1]
  source 1..16: mol_type = other DNA
ttcttgatacacggtc

SEQ ID NO: 29996 - DNA, 16 bp, synthetic construct
  misc_feature 1..16: note = synthetic [barcode part1]
  source 1..16: mol_type = other DNA
aaccgcaattgcgtgt

SEQ ID NO: 29997 - DNA, 16 bp, synthetic construct
  misc_feature 1..16: note = synthetic [barcode part1]
  source 1..16: mol_type = other DNA
gaggttgtaatctccg

SEQ ID NO: 29998 - DNA, 16 bp, synthetic construct
  misc_feature 1..16: note = synthetic [barcode part1]
  source 1..16: mol_type = other DNA
tcttcggcaatatacc

SEQ ID NO: 29999 - DNA, 16 bp, synthetic construct
  misc_feature 1..16: note = synthetic [barcode part1]
  source 1..16: mol_type = other DNA
cagatacctctatcac

SEQ ID NO: 30000 - DNA, 16 bp, synthetic construct
  misc_feature 1..16: note = synthetic [barcode part1]
  source 1..16: mol_type = other DNA
tagtcgtagattggag

SEQ ID NO: 30001 - DNA, 16 bp, synthetic construct
  misc_feature 1..16: note = synthetic [barcode part1]
  source 1..16: mol_type = other DNA
cagtcgaactgatcgt

SEQ ID NO: 30002 - DNA, 16 bp, synthetic construct
  misc_feature 1..16: note = synthetic [barcode part1]
  source 1..16: mol_type = other DNA
aaggcgttcggtagtg

SEQ ID NO: 30003 - DNA, 16 bp, synthetic construct
  misc_feature 1..16: note = synthetic [barcode part1]
  source 1..16: mol_type = other DNA
gtcaacgtactggtgt

SEQ ID NO: 30004 - DNA, 16 bp, synthetic construct
  misc_feature 1..16: note = synthetic [barcode part1]
  source 1..16: mol_type = other DNA
taccactcgaggaact

SEQ ID NO: 30005 - DNA, 16 bp, synthetic construct
  misc_feature 1..16: note = synthetic [barcode part1]
  source 1..16: mol_type = other DNA
cgttgattcctggtcg

SEQ ID NO: 30006 - DNA, 16 bp, synthetic construct
  misc_feature 1..16: note = synthetic [barcode part1]
  source 1..16: mol_type = other DNA
tgaccttgcacaccgt

SEQ ID NO: 30007 - DNA, 16 bp, synthetic construct
  misc_feature 1..16: note = synthetic [barcode part1]
  source 1..16: mol_type = other DNA
agttctcgtcgtctct

SEQ ID NO: 30008 - DNA, 16 bp, synthetic construct
  misc_feature 1..16: note = synthetic [barcode part1]
  source 1..16: mol_type = other DNA
cacggattcgcaagtt

SEQ ID NO: 30009 - DNA, 16 bp, synthetic construct
  misc_feature 1..16: note = synthetic [barcode part1]
  source 1..16: mol_type = other DNA
cgagatcactgtgact

SEQ ID NO: 30010 - DNA, 16 bp, synthetic construct
  misc_feature 1..16: note = synthetic [barcode part1]
  source 1..16: mol_type = other DNA
caactacctcaacttg

SEQ ID NO: 30011 - DNA, 16 bp, synthetic construct
  misc_feature 1..16: note = synthetic [barcode part1]
  source 1..16: mol_type = other DNA
caggaactatcggacg

SEQ ID NO: 30012 - DNA, 16 bp, synthetic construct
  misc_feature 1..16: note = synthetic [barcode part1]
  source 1..16: mol_type = other DNA
gacttcagtccactcg

SEQ ID NO: 30013 - DNA, 16 bp, synthetic construct
  misc_feature 1..16: note = synthetic [barcode part1]
  source 1..16: mol_type = other DNA
gtgaggagattcaatc

SEQ ID NO: 30014 - DNA, 16 bp, synthetic construct
  misc_feature 1..16: note = synthetic [barcode part1]
  source 1..16: mol_type = other DNA
cggatcaccttgcact

SEQ ID NO: 30015 - DNA, 16 bp, synthetic construct
  misc_feature 1..16: note = synthetic [barcode part1]
  source 1..16: mol_type = other DNA
tggagttgaccaatcc

SEQ ID NO: 30016 - DNA, 16 bp, synthetic construct
  misc_feature 1..16: note = synthetic [barcode part1]
  source 1..16: mol_type = other DNA
tatctgtcgagacttc

SEQ ID NO: 30017 - DNA, 16 bp, synthetic construct
  misc_feature 1..16: note = synthetic [barcode part1]
  source 1..16: mol_type = other DNA
ttctatccaagtaccg

SEQ ID NO: 30018 - DNA, 16 bp, synthetic construct
  misc_feature 1..16: note = synthetic [barcode part1]
  source 1..16: mol_type = other DNA
aggtatcttgtaggcc

SEQ ID NO: 30019 - DNA, 16 bp, synthetic construct
  misc_feature 1..16: note = synthetic [barcode part1]
  source 1..16: mol_type = other DNA
agaaggtggtatacct

SEQ ID NO: 30020 - DNA, 16 bp, synthetic construct
  misc_feature 1..16: note = synthetic [barcode part1]
  source 1..16: mol_type = other DNA
tacggttgatcacacg

SEQ ID NO: 30021 - DNA, 16 bp, synthetic construct
  misc_feature 1..16: note = synthetic [barcode part1]
  source 1..16: mol_type = other DNA
tggtcgaacgtacact

SEQ ID NO: 30022 - DNA, 16 bp, synthetic construct
  misc_feature 1..16: note = synthetic [barcode part1]
  source 1..16: mol_type = other DNA
tcggatatctgttacc

SEQ ID NO: 30023 - DNA, 16 bp, synthetic construct
  misc_feature 1..16: note = synthetic [barcode part1]
  source 1..16: mol_type = other DNA
ttaccgtcagatacct

SEQ ID NO: 30024 - DNA, 16 bp, synthetic construct
  misc_feature 1..16: note = synthetic [barcode part1]
  source 1..16: mol_type = other DNA
tgtactggttgacacg

SEQ ID NO: 30025 - DNA, 16 bp, synthetic construct
  misc_feature 1..16: note = synthetic [barcode part1]
  source 1..16: mol_type = other DNA
gtactcctcaggtcac

SEQ ID NO: 30026 - DNA, 16 bp, synthetic construct
  misc_feature 1..16: note = synthetic [barcode part1]
  source 1..16: mol_type = other DNA
tggtggatccgagtag

SEQ ID NO: 30027 - DNA, 16 bp, synthetic construct
  misc_feature 1..16: note = synthetic [barcode part1]
  source 1..16: mol_type = other DNA
tctctccgacttcagt

SEQ ID NO: 30028 - DNA, 16 bp, synthetic construct
  misc_feature 1..16: note = synthetic [barcode part1]
  source 1..16: mol_type = other DNA
cacgacacagacaggt

SEQ ID NO: 30029 - DNA, 16 bp, synthetic construct
  misc_feature 1..16: note = synthetic [barcode part1]
  source 1..16: mol_type = other DNA
cgccaacctagaagag

SEQ ID NO: 30030 - DNA, 16 bp, synthetic construct
  misc_feature 1..16: note = synthetic [barcode part1]
  source 1..16: mol_type = other DNA
cgtgatacactgcaac

SEQ ID NO: 30031 - DNA, 16 bp, synthetic construct
  misc_feature 1..16: note = synthetic [barcode part1]
  source 1..16: mol_type = other DNA
tgtgacaaggtcttgc

SEQ ID NO: 30032 - DNA, 16 bp, synthetic construct
  misc_feature 1..16: note = synthetic [barcode part1]
  source 1..16: mol_type = other DNA
cctgttaccaggtatt

SEQ ID NO: 30033 - DNA, 16 bp, synthetic construct
  misc_feature 1..16: note = synthetic [barcode part1]
  source 1..16: mol_type = other DNA
tacgtcaacacgtcag

SEQ ID NO: 30034 - DNA, 16 bp, synthetic construct
  misc_feature 1..16: note = synthetic [barcode part1]
  source 1..16: mol_type = other DNA
accacagacagtacct

SEQ ID NO: 30035 - DNA, 16 bp, synthetic construct
  misc_feature 1..16: note = synthetic [barcode part1]
  source 1..16: mol_type = other DNA
ttatagtgaccgaccg

SEQ ID NO: 30036 - DNA, 16 bp, synthetic construct
  misc_feature 1..16: note = synthetic [barcode part1]
  source 1..16: mol_type = other DNA
accgagtcgaatcact

SEQ ID NO: 30037 - DNA, 16 bp, synthetic construct
  misc_feature 1..16: note = synthetic [barcode part1]
  source 1..16: mol_type = other DNA
gcagacagagtctcag

SEQ ID NO: 30038 - DNA, 16 bp, synthetic construct
  misc_feature 1..16: note = synthetic [barcode part1]
  source 1..16: mol_type = other DNA
tagattgcgacggtct

SEQ ID NO: 30039 - DNA, 16 bp, synthetic construct
  misc_feature 1..16: note = synthetic [barcode part1]
  source 1..16: mol_type = other DNA
tgatcctgcaccgact

SEQ ID NO: 30040 - DNA, 16 bp, synthetic construct
  misc_feature 1..16: note = synthetic [barcode part1]
  source 1..16: mol_type = other DNA
tgacgacctctatact

SEQ ID NO: 30041 - DNA, 16 bp, synthetic construct
  misc_feature 1..16: note = synthetic [barcode part1]
  source 1..16: mol_type = other DNA
cctcggttagtagagt

SEQ ID NO: 30042 - DNA, 16 bp, synthetic construct
  misc_feature 1..16: note = synthetic [barcode part1]
  source 1..16: mol_type = other DNA
tcagtcacacagtgtg

SEQ ID NO: 30043 - DNA, 16 bp, synthetic construct
  misc_feature 1..16: note = synthetic [barcode part1]
  source 1..16: mol_type = other DNA
gtggtgttgaccagtt

SEQ ID NO: 30044 - DNA, 16 bp, synthetic construct
  misc_feature 1..16: note = synthetic [barcode part1]
  source 1..16: mol_type = other DNA
cagtatcttgttcacg

SEQ ID NO: 30045 - DNA, 16 bp, synthetic construct
  misc_feature 1..16: note = synthetic [barcode part1]
  source 1..16: mol_type = other DNA
tgcaacactgtctatc

SEQ ID NO: 30046 - DNA, 16 bp, synthetic construct
  misc_feature 1..16: note = synthetic [barcode part1]
  source 1..16: mol_type = other DNA
cgccacaattagtcag

SEQ ID NO: 30047 - DNA, 16 bp, synthetic construct
  misc_feature 1..16: note = synthetic [barcode part1]
  source 1..16: mol_type = other DNA
atcacaccgtagactg

SEQ ID NO: 30048 - DNA, 16 bp, synthetic construct
  misc_feature 1..16: note = synthetic [barcode part1]
  source 1..16: mol_type = other DNA
tgttgttcgtctcacc

SEQ ID NO: 30049 - DNA, 16 bp, synthetic construct
  misc_feature 1..16: note = synthetic [barcode part1]
  source 1..16: mol_type = other DNA
ccttaacgtgcaactt

SEQ ID NO: 30050 - DNA, 16 bp, synthetic construct
  misc_feature 1..16: note = synthetic [barcode part1]
  source 1..16: mol_type = other DNA
aagtctgttcgtggac

SEQ ID NO: 30051 - DNA, 16 bp, synthetic construct
  misc_feature 1..16: note = synthetic [barcode part1]
  source 1..16: mol_type = other DNA
agttaccggactatcg

SEQ ID NO: 30052 - DNA, 16 bp, synthetic construct
  misc_feature 1..16: note = synthetic [barcode part1]
  source 1..16: mol_type = other DNA
accgttaaggacgcag

SEQ ID NO: 30053 - DNA, 16 bp, synthetic construct
  misc_feature 1..16: note = synthetic [barcode part1]
  source 1..16: mol_type = other DNA
aagtgtcaagtgacac

SEQ ID NO: 30054 - DNA, 16 bp, synthetic construct
  misc_feature 1..16: note = synthetic [barcode part1]
  source 1..16: mol_type = other DNA
agaacggtcacagacc

SEQ ID NO: 30055 - DNA, 16 bp, synthetic construct
  misc_feature 1..16: note = synthetic [barcode part1]
  source 1..16: mol_type = other DNA
gattaatatcggccgc

SEQ ID NO: 30056 - DNA, 16 bp, synthetic construct
  misc_feature 1..16: note = synthetic [barcode part1]
  source 1..16: mol_type = other DNA
tgtgtccgtagagatc

SEQ ID NO: 30057 - DNA, 16 bp, synthetic construct
  misc_feature 1..16: note = synthetic [barcode part1]
  source 1..16: mol_type = other DNA
atacttctcggtaacc

SEQ ID NO: 30058 - DNA, 16 bp, synthetic construct
  misc_feature 1..16: note = synthetic [barcode part1]
  source 1..16: mol_type = other DNA
ttgaagatataggccg

SEQ ID NO: 30059 - DNA, 16 bp, synthetic construct
  misc_feature 1..16: note = synthetic [barcode part1]
  source 1..16: mol_type = other DNA
tcctcacaacacgaag

SEQ ID NO: 30060 - DNA, 16 bp, synthetic construct
  misc_feature 1..16: note = synthetic [barcode part1]
  source 1..16: mol_type = other DNA
taagtaggtccgttcg

SEQ ID NO: 30061 - DNA, 16 bp, synthetic construct
  misc_feature 1..16: note = synthetic [barcode part1]
  source 1..16: mol_type = other DNA
accgagtacagagatt

SEQ ID NO: 30062 - DNA, 16 bp, synthetic construct
  misc_feature 1..16: note = synthetic [barcode part1]
  source 1..16: mol_type = other DNA
gcgaagtaagttcgcg

SEQ ID NO: 30063 - DNA, 16 bp, synthetic construct
  misc_feature 1..16: note = synthetic [barcode part1]
  source 1..16: mol_type = other DNA
ccggttctagactcgt

SEQ ID NO: 30064 - DNA, 16 bp, synthetic construct
  misc_feature 1..16: note = synthetic [barcode part1]
  source 1..16: mol_type = other DNA
agtggtgcggaataag

SEQ ID NO: 30065 - DNA, 16 bp, synthetic construct
  misc_feature 1..16: note = synthetic [barcode part1]
  source 1..16: mol_type = other DNA
cctaacctgacgtacc

SEQ ID NO: 30066 - DNA, 16 bp, synthetic construct
  misc_feature 1..16: note = synthetic [barcode part1]
  source 1..16: mol_type = other DNA
ttccagacagaacctg

SEQ ID NO: 30067 - DNA, 16 bp, synthetic construct
  misc_feature 1..16: note = synthetic [barcode part1]
  source 1..16: mol_type = other DNA
tgacgtgtagtctctt

SEQ ID NO: 30068 - DNA, 16 bp, synthetic construct
  misc_feature 1..16: note = synthetic [barcode part1]
  source 1..16: mol_type = other DNA
tgttaccgtctagact

SEQ ID NO: 30069 - DNA, 16 bp, synthetic construct
  misc_feature 1..16: note = synthetic [barcode part1]
  source 1..16: mol_type = other DNA
cctactgaacctgtgc

SEQ ID NO: 30070 - DNA, 16 bp, synthetic construct
  misc_feature 1..16: note = synthetic [barcode part1]
  source 1..16: mol_type = other DNA
agactgtgcgatctac

SEQ ID NO: 30071 - DNA, 16 bp, synthetic construct
  misc_feature 1..16: note = synthetic [barcode part1]
  source 1..16: mol_type = other DNA
gactgtattccttgac

SEQ ID NO: 30072 - DNA, 16 bp, synthetic construct
  misc_feature 1..16: note = synthetic [barcode part1]
  source 1..16: mol_type = other DNA
cgaacgatactgtaag

SEQ ID NO: 30073 - DNA, 16 bp, synthetic construct
  misc_feature 1..16: note = synthetic [barcode part1]
  source 1..16: mol_type = other DNA
agactggtgtaactag

SEQ ID NO: 30074 - DNA, 16 bp, synthetic construct
  misc_feature 1..16: note = synthetic [barcode part1]
  source 1..16: mol_type = other DNA
ccgacacttggagaag

SEQ ID NO: 30075 - DNA, 16 bp, synthetic construct
  misc_feature 1..16: note = synthetic [barcode part1]
  source 1..16: mol_type = other DNA
tgtgtgtaaccagtcg

SEQ ID NO: 30076 - DNA, 16 bp, synthetic construct
  misc_feature 1..16: note = synthetic [barcode part1]
  source 1..16: mol_type = other DNA
gcgccttgtataaggt

SEQ ID NO: 30077 - DNA, 16 bp, synthetic construct
  misc_feature 1..16: note = synthetic [barcode part1]
  source 1..16: mol_type = other DNA
tctgtccgagtaagtg

SEQ ID NO: 30078 - DNA, 16 bp, synthetic construct
  misc_feature 1..16: note = synthetic [barcode part1]
  source 1..16: mol_type = other DNA
actcgagaacaaggtt

SEQ ID NO: 30079 - DNA, 16 bp, synthetic construct
  misc_feature 1..16: note = synthetic [barcode part1]
  source 1..16: mol_type = other DNA
cgagtatctcttggcc

SEQ ID NO: 30080 - DNA, 16 bp, synthetic construct
  misc_feature 1..16: note = synthetic [barcode part1]
  source 1..16: mol_type = other DNA
gtacgtaactgcaacc

SEQ ID NO: 30081 - DNA, 16 bp, synthetic construct
  misc_feature 1..16: note = synthetic [barcode part1]
  source 1..16: mol_type = other DNA
tcctcagtcgatcttc

SEQ ID NO: 30082 - DNA, 16 bp, synthetic construct
  misc_feature 1..16: note = synthetic [barcode part1]
  source 1..16: mol_type = other DNA
ccgcagatatcttgcc

SEQ ID NO: 30083 - DNA, 16 bp, synthetic construct
  misc_feature 1..16: note = synthetic [barcode part1]
  source 1..16: mol_type = other DNA
cacagatctgtcttac

SEQ ID NO: 30084 - DNA, 16 bp, synthetic construct
  misc_feature 1..16: note = synthetic [barcode part1]
  source 1..16: mol_type = other DNA
attatctcgtccgagt

SEQ ID NO: 30085 - DNA, 16 bp, synthetic construct
  misc_feature 1..16: note = synthetic [barcode part1]
  source 1..16: mol_type = other DNA
ccgaagagtacaaccg

SEQ ID NO: 30086 - DNA, 16 bp, synthetic construct
  misc_feature 1..16: note = synthetic [barcode part1]
  source 1..16: mol_type = other DNA
aactacgaagatcgac

SEQ ID NO: 30087 - DNA, 16 bp, synthetic construct
  misc_feature 1..16: note = synthetic [barcode part1]
  source 1..16: mol_type = other DNA
caactcactcaacgag

SEQ ID NO: 30088 - DNA, 16 bp, synthetic construct
  misc_feature 1..16: note = synthetic [barcode part1]
  source 1..16: mol_type = other DNA
tctaacgtaggtcacg

SEQ ID NO: 30089 - DNA, 16 bp, synthetic construct
  misc_feature 1..16: note = synthetic [barcode part1]
  source 1..16: mol_type = other DNA
gatccgatcggcaatt

SEQ ID NO: 30090 - DNA, 16 bp, synthetic construct
  misc_feature 1..16: note = synthetic [barcode part1]
  source 1..16: mol_type = other DNA
atccgagtctgttact

SEQ ID NO: 30091 - DNA, 16 bp, synthetic construct
  misc_feature 1..16: note = synthetic [barcode part1]
  source 1..16: mol_type = other DNA
attaccttccaccgtc

SEQ ID NO: 30092 - DNA, 16 bp, synthetic construct
  misc_feature 1..16: note = synthetic [barcode part1]
  source 1..16: mol_type = other DNA
gtcgaaccttagtggt

SEQ ID NO: 30093 - DNA, 16 bp, synthetic construct
  misc_feature 1..16: note = synthetic [barcode part1]
  source 1..16: mol_type = other DNA
tctcagataggtagag

SEQ ID NO: 30094 - DNA, 16 bp, synthetic construct
  misc_feature 1..16: note = synthetic [barcode part1]
  source 1..16: mol_type = other DNA
gcactccggcctaatt

SEQ ID NO: 30095 - DNA, 16 bp, synthetic construct
  misc_feature 1..16: note = synthetic [barcode part1]
  source 1..16: mol_type = other DNA
agtctgattcttgtgc

SEQ ID NO: 30096 - DNA, 16 bp, synthetic construct
  misc_feature 1..16: note = synthetic [barcode part1]
  source 1..16: mol_type = other DNA
tgtagtgttgttcgtc

SEQ ID NO: 30097 - DNA, 16 bp, synthetic construct
  misc_feature 1..16: note = synthetic [barcode part1]
  source 1..16: mol_type = other DNA
gagtcacacggagact

SEQ ID NO: 30098 - DNA, 16 bp, synthetic construct
  misc_feature 1..16: note = synthetic [barcode part1]
  source 1..16: mol_type = other DNA
agagtggtaagtatcc

SEQ ID NO: 30099 - DNA, 16 bp, synthetic construct
  misc_feature 1..16: note = synthetic [barcode part1]
  source 1..16: mol_type = other DNA
ttgacgtgtcagtacg

SEQ ID NO: 30100 - DNA, 16 bp, synthetic construct
  misc_feature 1..16: note = synthetic [barcode part1]
  source 1..16: mol_type = other DNA
ccgcgttgacgatctt

SEQ ID NO: 30101 - DNA, 16 bp, synthetic construct
  misc_feature 1..16: note = synthetic [barcode part1]
  source 1..16: mol_type = other DNA
gaggatcctagttctg

SEQ ID NO: 30102 - DNA, 16 bp, synthetic construct
  misc_feature 1..16: note = synthetic [barcode part1]
  source 1..16: mol_type = other DNA
tctcgtgtgattcaac

SEQ ID NO: 30103 - DNA, 16 bp, synthetic construct
  misc_feature 1..16: note = synthetic [barcode part1]
  source 1..16: mol_type = other DNA
accgattccttccttg

SEQ ID NO: 30104 - DNA, 16 bp, synthetic construct
  misc_feature 1..16: note = synthetic [barcode part1]
  source 1..16: mol_type = other DNA
agaagacaacggcagt

SEQ ID NO: 30105 - DNA, 16 bp, synthetic construct
  misc_feature 1..16: note = synthetic [barcode part1]
  source 1..16: mol_type = other DNA
ttaggtgtgaacgtcc

SEQ ID NO: 30106 - DNA, 16 bp, synthetic construct
  misc_feature 1..16: note = synthetic [barcode part1]
  source 1..16: mol_type = other DNA
atcctacactcggatt

SEQ ID NO: 30107 - DNA, 16 bp, synthetic construct
  misc_feature 1..16: note = synthetic [barcode part1]
  source 1..16: mol_type = other DNA
cgcacttaggtcgttc

SEQ ID NO: 30108 - DNA, 16 bp, synthetic construct
  misc_feature 1..16: note = synthetic [barcode part1]
  source 1..16: mol_type = other DNA
actatccgcgaattct

SEQ ID NO: 30109 - DNA, 16 bp, synthetic construct
  misc_feature 1..16: note = synthetic [barcode part1]
  source 1..16: mol_type = other DNA
gcgttgatacagacct

SEQ ID NO: 30110 - DNA, 16 bp, synthetic construct
  misc_feature 1..16: note = synthetic [barcode part1]
  source 1..16: mol_type = other DNA
aatactggcgcgtact

SEQ ID NO: 30111 - DNA, 16 bp, synthetic construct
  misc_feature 1..16: note = synthetic [barcode part1]
  source 1..16: mol_type = other DNA
aggttcttacgacacg

SEQ ID NO: 30112 - DNA, 16 bp, synthetic construct
  misc_feature 1..16: note = synthetic [barcode part1]
  source 1..16: mol_type = other DNA
tatctgtcactgcaac

SEQ ID NO: 30113 - DNA, 16 bp, synthetic construct
  misc_feature 1..16: note = synthetic [barcode part1]
  source 1..16: mol_type = other DNA
tctatacgaaggcgtc

SEQ ID NO: 30114 - DNA, 16 bp, synthetic construct
  misc_feature 1..16: note = synthetic [barcode part1]
  source 1..16: mol_type = other DNA
cctacgtattattggc

SEQ ID NO: 30115 - DNA, 16 bp, synthetic construct
  misc_feature 1..16: note = synthetic [barcode part1]
  source 1..16: mol_type = other DNA
cgtcgacttccaatcg

SEQ ID NO: 30116 - DNA, 16 bp, synthetic construct
  misc_feature 1..16: note = synthetic [barcode part1]
  source 1..16: mol_type = other DNA
tgttgagtactctcac

SEQ ID NO: 30117 - DNA, 16 bp, synthetic construct
  misc_feature 1..16: note = synthetic [barcode part1]
  source 1..16: mol_type = other DNA
tccagttgccagtatt

SEQ ID NO: 30118 - DNA, 16 bp, synthetic construct
  misc_feature 1..16: note = synthetic [barcode part1]
  source 1..16: mol_type = other DNA
aacacgtgactaagac

SEQ ID NO: 30119 - DNA, 16 bp, synthetic construct
  misc_feature 1..16: note = synthetic [barcode part1]
  source 1..16: mol_type = other DNA
ttaaccgtagtcgacg

SEQ ID NO: 30120 - DNA, 16 bp, synthetic construct
  misc_feature 1..16: note = synthetic [barcode part1]
  source 1..16: mol_type = other DNA
cgagactgactaacct

SEQ ID NO: 30121 - DNA, 16 bp, synthetic construct
  misc_feature 1..16: note = synthetic [barcode part1]
  source 1..16: mol_type = other DNA
taagaaggtgccaatc

SEQ ID NO: 30122 - DNA, 16 bp, synthetic construct
  misc_feature 1..16: note = synthetic [barcode part1]
  source 1..16: mol_type = other DNA
acgaactcacgagttc

SEQ ID NO: 30123 - DNA, 16 bp, synthetic construct
  misc_feature 1..16: note = synthetic [barcode part1]
  source 1..16: mol_type = other DNA
acaagttgtcggaagt

SEQ ID NO: 30124 - DNA, 16 bp, synthetic construct
  misc_feature 1..16: note = synthetic [barcode part1]
  source 1..16: mol_type = other DNA
attaacagtctcctgc

SEQ ID NO: 30125 - DNA, 16 bp, synthetic construct
  misc_feature 1..16: note = synthetic [barcode part1]
  source 1..16: mol_type = other DNA
cctaagttgtctcgcg

SEQ ID NO: 30126 - DNA, 16 bp, synthetic construct
  misc_feature 1..16: note = synthetic [barcode part1]
  source 1..16: mol_type = other DNA
tctacgacaccacctg

SEQ ID NO: 30127 - DNA, 16 bp, synthetic construct
  misc_feature 1..16: note = synthetic [barcode part1]
  source 1..16: mol_type = other DNA
tggaggtattcagtag

SEQ ID NO: 30128 - DNA, 16 bp, synthetic construct
  misc_feature 1..16: note = synthetic [barcode part1]
  source 1..16: mol_type = other DNA
tgttagaggaccgtct

SEQ ID NO: 30129 - DNA, 16 bp, synthetic construct
  misc_feature 1..16: note = synthetic [barcode part1]
  source 1..16: mol_type = other DNA
ttcagttgcaccggtc

SEQ ID NO: 30130 - DNA, 16 bp, synthetic construct
  misc_feature 1..16: note = synthetic [barcode part1]
  source 1..16: mol_type = other DNA
gtgtaataccacgcgt

SEQ ID NO: 30131 - DNA, 16 bp, synthetic construct
  misc_feature 1..16: note = synthetic [barcode part1]
  source 1..16: mol_type = other DNA
cacgttcgtctaatac

SEQ ID NO: 30132 - DNA, 16 bp, synthetic construct
  misc_feature 1..16: note = synthetic [barcode part1]
  source 1..16: mol_type = other DNA
tgtcacctgccagtac

SEQ ID NO: 30133 - DNA, 16 bp, synthetic construct
  misc_feature 1..16: note = synthetic [barcode part1]
  source 1..16: mol_type = other DNA
tccggagtataacgtc

SEQ ID NO: 30134 - DNA, 16 bp, synthetic construct
  misc_feature 1..16: note = synthetic [barcode part1]
  source 1..16: mol_type = other DNA
tcgaagtggcaggtac

SEQ ID NO: 30135 - DNA, 16 bp, synthetic construct
  misc_feature 1..16: note = synthetic [barcode part1]
  source 1..16: mol_type = other DNA
aagtctggttcgagtc

SEQ ID NO: 30136 - DNA, 16 bp, synthetic construct
  misc_feature 1..16: note = synthetic [barcode part1]
  source 1..16: mol_type = other DNA
aacctcttacagacct

SEQ ID NO: 30137 - DNA, 16 bp, synthetic construct
  misc_feature 1..16: note = synthetic [barcode part1]
  source 1..16: mol_type = other DNA
gcggagacaataatct

SEQ ID NO: 30138 - DNA, 16 bp, synthetic construct
  misc_feature 1..16: note = synthetic [barcode part1]
  source 1..16: mol_type = other DNA
gtgaggtcagacactg

SEQ ID NO: 30139 - DNA, 16 bp, synthetic construct
  misc_feature 1..16: note = synthetic [barcode part1]
  source 1..16: mol_type = other DNA
tatagaggtgcggaag

SEQ ID NO: 30140 - DNA, 16 bp, synthetic construct
  misc_feature 1..16: note = synthetic [barcode part1]
  source 1..16: mol_type = other DNA
tctaggactctaggac

SEQ ID NO: 30141 - DNA, 16 bp, synthetic construct
  misc_feature 1..16: note = synthetic [barcode part1]
  source 1..16: mol_type = other DNA
gtggtatagttccgac

SEQ ID NO: 30142 - DNA, 16 bp, synthetic construct
  misc_feature 1..16: note = synthetic [barcode part1]
  source 1..16: mol_type = other DNA
caacgtaactgagaac

SEQ ID NO: 30143 - DNA, 16 bp, synthetic construct
  misc_feature 1..16: note = synthetic [barcode part1]
  source 1..16: mol_type = other DNA
tccgattcttcctggt

SEQ ID NO: 30144 - DNA, 16 bp, synthetic construct
  misc_feature 1..16: note = synthetic [barcode part1]
  source 1..16: mol_type = other DNA
cgccggacctatactt

SEQ ID NO: 30145 - DNA, 16 bp, synthetic construct
  misc_feature 1..16: note = synthetic [barcode part1]
  source 1..16: mol_type = other DNA
cgaccacttacacaag

SEQ ID NO: 30146 - DNA, 16 bp, synthetic construct
  misc_feature 1..16: note = synthetic [barcode part1]
  source 1..16: mol_type = other DNA
aggaagtatccagact

SEQ ID NO: 30147 - DNA, 16 bp, synthetic construct
  misc_feature 1..16: note = synthetic [barcode part1]
  source 1..16: mol_type = other DNA
gaaggtcaatctctcg

SEQ ID NO: 30148 - DNA, 16 bp, synthetic construct
  misc_feature 1..16: note = synthetic [barcode part1]
  source 1..16: mol_type = other DNA
ttctggttacggatct

SEQ ID NO: 30149 - DNA, 16 bp, synthetic construct
  misc_feature 1..16: note = synthetic [barcode part1]
  source 1..16: mol_type = other DNA
ttcggaaggaatcctc

SEQ ID NO: 30150 - DNA, 16 bp, synthetic construct
  misc_feature 1..16: note = synthetic [barcode part1]
  source 1..16: mol_type = other DNA
gatcgaggttccttag

SEQ ID NO: 30151 - DNA, 16 bp, synthetic construct
  misc_feature 1..16: note = synthetic [barcode part1]
  source 1..16: mol_type = other DNA
acactaggttgttctc

SEQ ID NO: 30152 - DNA, 16 bp, synthetic construct
  misc_feature 1..16: note = synthetic [barcode part1]
  source 1..16: mol_type = other DNA
gtctgaacactgcctc

SEQ ID NO: 30153 - DNA, 16 bp, synthetic construct
  misc_feature 1..16: note = synthetic [barcode part1]
  source 1..16: mol_type = other DNA
actatcttggacgttc

SEQ ID NO: 30154 - DNA, 16 bp, synthetic construct
  misc_feature 1..16: note = synthetic [barcode part1]
  source 1..16: mol_type = other DNA
gttagatcggaagtgt

SEQ ID NO: 30155 - DNA, 16 bp, synthetic construct
  misc_feature 1..16: note = synthetic [barcode part1]
  source 1..16: mol_type = other DNA
gcgtctgcgttacttg

SEQ ID NO: 30156 - DNA, 16 bp, synthetic construct
  misc_feature 1..16: note = synthetic [barcode part1]
  source 1..16: mol_type = other DNA
acggaagatacgagac

SEQ ID NO: 30157 - DNA, 16 bp, synthetic construct
  misc_feature 1..16: note = synthetic [barcode part1]
  source 1..16: mol_type = other DNA
cgagatcttaaggcct

SEQ ID NO: 30158 - DNA, 16 bp, synthetic construct
  misc_feature 1..16: note = synthetic [barcode part1]
  source 1..16: mol_type = other DNA
taactccaccaacgtt

SEQ ID NO: 30159 - DNA, 16 bp, synthetic construct
  misc_feature 1..16: note = synthetic [barcode part1]
  source 1..16: mol_type = other DNA
gtgtatctgttctgtg

SEQ ID NO: 30160 - DNA, 16 bp, synthetic construct
  misc_feature 1..16: note = synthetic [barcode part1]
  source 1..16: mol_type = other DNA
acaggttcgtaggttc

SEQ ID NO: 30161 - DNA, 16 bp, synthetic construct
  misc_feature 1..16: note = synthetic [barcode part1]
  source 1..16: mol_type = other DNA
cagtctataggagtag

SEQ ID NO: 30162 - DNA, 16 bp, synthetic construct
  misc_feature 1..16: note = synthetic [barcode part1]
  source 1..16: mol_type = other DNA
ttagatacgaggcaac

SEQ ID NO: 30163 - DNA, 16 bp, synthetic construct
  misc_feature 1..16: note = synthetic [barcode part1]
  source 1..16: mol_type = other DNA
agattgtgacacaggt

SEQ ID NO: 30164 - DNA, 16 bp, synthetic construct
  misc_feature 1..16: note = synthetic [barcode part1]
  source 1..16: mol_type = other DNA
cagagacagaccactg

SEQ ID NO: 30165 - DNA, 16 bp, synthetic construct
  misc_feature 1..16: note = synthetic [barcode part1]
  source 1..16: mol_type = other DNA
tgaacaacactcaccg

SEQ ID NO: 30166 - DNA, 16 bp, synthetic construct
  misc_feature 1..16: note = synthetic [barcode part1]
  source 1..16: mol_type = other DNA
gaatcgtaccttcgcc

SEQ ID NO: 30167 - DNA, 16 bp, synthetic construct
  misc_feature 1..16: note = synthetic [barcode part1]
  source 1..16: mol_type = other DNA
cgtcctgagacctgtt

SEQ ID NO: 30168 - DNA, 16 bp, synthetic construct
  misc_feature 1..16: note = synthetic [barcode part1]
  source 1..16: mol_type = other DNA
agtctagtggtagtcc

SEQ ID NO: 30169 - DNA, 16 bp, synthetic construct
  misc_feature 1..16: note = synthetic [barcode part1]
  source 1..16: mol_type = other DNA
tccaccggtattcggt

SEQ ID NO: 30170 - DNA, 16 bp, synthetic construct
  misc_feature 1..16: note = synthetic [barcode part1]
  source 1..16: mol_type = other DNA
aagtccggagtatcct

SEQ ID NO: 30171 - DNA, 16 bp, synthetic construct
  misc_feature 1..16: note = synthetic [barcode part1]
  source 1..16: mol_type = other DNA
tgcaggtctgcaagtt

SEQ ID NO: 30172 - DNA, 16 bp, synthetic construct
  misc_feature 1..16: note = synthetic [barcode part1]
  source 1..16: mol_type = other DNA
gtacgattggtacgtc

SEQ ID NO: 30173 - DNA, 16 bp, synthetic construct
  misc_feature 1..16: note = synthetic [barcode part1]
  source 1..16: mol_type = other DNA
taggcgtcggtaaggt

SEQ ID NO: 30174 - DNA, 16 bp, synthetic construct
  misc_feature 1..16: note = synthetic [barcode part1]
  source 1..16: mol_type = other DNA
aaccacaaccagtgtc

SEQ ID NO: 30175 - DNA, 16 bp, synthetic construct
  misc_feature 1..16: note = synthetic [barcode part1]
  source 1..16: mol_type = other DNA
atatactcgtcggcag

SEQ ID NO: 30176 - DNA, 16 bp, synthetic construct
  misc_feature 1..16: note = synthetic [barcode part1]
  source 1..16: mol_type = other DNA
cacgcgatattggtac

SEQ ID NO: 30177 - DNA, 16 bp, synthetic construct
  misc_feature 1..16: note = synthetic [barcode part1]
  source 1..16: mol_type = other DNA
ccttgtatcggtagtt

SEQ ID NO: 30178 - DNA, 16 bp, synthetic construct
  misc_feature 1..16: note = synthetic [barcode part1]
  source 1..16: mol_type = other DNA
tcagatcgaggcgtag

SEQ ID NO: 30179 - DNA, 16 bp, synthetic construct
  misc_feature 1..16: note = synthetic [barcode part1]
  source 1..16: mol_type = other DNA
gtgttgacgtgtcaac

SEQ ID NO: 30180 - DNA, 16 bp, synthetic construct
  misc_feature 1..16: note = synthetic [barcode part1]
  source 1..16: mol_type = other DNA
tctcgtgtcctgtatc

SEQ ID NO: 30181 - DNA, 16 bp, synthetic construct
  misc_feature 1..16: note = synthetic [barcode part1]
  source 1..16: mol_type = other DNA
tactgtcaacacacct

SEQ ID NO: 30182 - DNA, 16 bp, synthetic construct
  misc_feature 1..16: note = synthetic [barcode part1]
  source 1..16: mol_type = other DNA
gcaatctgtagaagtg

SEQ ID NO: 30183 - DNA, 16 bp, synthetic construct
  misc_feature 1..16: note = synthetic [barcode part1]
  source 1..16: mol_type = other DNA
gtatcagtcagacgtc

SEQ ID NO: 30184 - DNA, 16 bp, synthetic construct
  misc_feature 1..16: note = synthetic [barcode part1]
  source 1..16: mol_type = other DNA
tagacgtgttggaggc

SEQ ID NO: 30185 - DNA, 16 bp, synthetic construct
  misc_feature 1..16: note = synthetic [barcode part1]
  source 1..16: mol_type = other DNA
atctaggcgtcgtctc

SEQ ID NO: 30186 - DNA, 16 bp, synthetic construct
  misc_feature 1..16: note = synthetic [barcode part1]
  source 1..16: mol_type = other DNA
cctataggtaagtccg

SEQ ID NO: 30187 - DNA, 16 bp, synthetic construct
  misc_feature 1..16: note = synthetic [barcode part1]
  source 1..16: mol_type = other DNA
gtgatctgtgaggacg

SEQ ID NO: 30188 - DNA, 16 bp, synthetic construct
  misc_feature 1..16: note = synthetic [barcode part1]
  source 1..16: mol_type = other DNA
ttcgtgcactattgac

SEQ ID NO: 30189 - DNA, 16 bp, synthetic construct
  misc_feature 1..16: note = synthetic [barcode part1]
  source 1..16: mol_type = other DNA
ttcgactcagttacgt

SEQ ID NO: 30190 - DNA, 16 bp, synthetic construct
  misc_feature 1..16: note = synthetic [barcode part1]
  source 1..16: mol_type = other DNA
cgtacgacgtcctact

SEQ ID NO: 30191 - DNA, 16 bp, synthetic construct
  misc_feature 1..16: note = synthetic [barcode part1]
  source 1..16: mol_type = other DNA
gatacgtcgtagttgc

SEQ ID NO: 30192 - DNA, 16 bp, synthetic construct
  misc_feature 1..16: note = synthetic [barcode part1]
  source 1..16: mol_type = other DNA
tgtgtagacgattgcc

SEQ ID NO: 30193 - DNA, 16 bp, synthetic construct
  misc_feature 1..16: note = synthetic [barcode part1]
  source 1..16: mol_type = other DNA
ttcgaggtcgactagt

SEQ ID NO: 30194 - DNA, 16 bp, synthetic construct
  misc_feature 1..16: note = synthetic [barcode part1]
  source 1..16: mol_type = other DNA
gagtgttcctgttgcc

SEQ ID NO: 30195 - DNA, 16 bp, synthetic construct
  misc_feature 1..16: note = synthetic [barcode part1]
  source 1..16: mol_type = other DNA
tctagagttgaggtcc

SEQ ID NO: 30196 - DNA, 16 bp, synthetic construct
  misc_feature 1..16: note = synthetic [barcode part1]
  source 1..16: mol_type = other DNA
tcgatcaggaatctcg

SEQ ID NO: 30197 - DNA, 16 bp, synthetic construct
  misc_feature 1..16: note = synthetic [barcode part1]
  source 1..16: mol_type = other DNA
ccgtacttacttctgc

SEQ ID NO: 30198 - DNA, 16 bp, synthetic construct
  misc_feature 1..16: note = synthetic [barcode part1]
  source 1..16: mol_type = other DNA
taaggaagtcgcgcac

SEQ ID NO: 30199 - DNA, 16 bp, synthetic construct
  misc_feature 1..16: note = synthetic [barcode part1]
  source 1..16: mol_type = other DNA
ttgtgcctatctctgc

SEQ ID NO: 30200 - DNA, 16 bp, synthetic construct
  misc_feature 1..16: note = synthetic [barcode part1]
  source 1..16: mol_type = other DNA
gtccaccagtgtcgtt

SEQ ID NO: 30201 - DNA, 16 bp, synthetic construct
  misc_feature 1..16: note = synthetic [barcode part1]
  source 1..16: mol_type = other DNA
tctctctgcactgtac

SEQ ID NO: 30202 - DNA, 16 bp, synthetic construct
  misc_feature 1..16: note = synthetic [barcode part1]
  source 1..16: mol_type = other DNA
aaccttgcgttgcaag

SEQ ID NO: 30203 - DNA, 16 bp, synthetic construct
  misc_feature 1..16: note = synthetic [barcode part1]
  source 1..16: mol_type = other DNA
gttcgaattgtggacc

SEQ ID NO: 30204 - DNA, 16 bp, synthetic construct
  misc_feature 1..16: note = synthetic [barcode part1]
  source 1..16: mol_type = other DNA
tcgacctgtctgaacc

SEQ ID NO: 30205 - DNA, 16 bp, synthetic construct
  misc_feature 1..16: note = synthetic [barcode part1]
  source 1..16: mol_type = other DNA
cgcctccagaatatag

SEQ ID NO: 30206 - DNA, 16 bp, synthetic construct
  misc_feature 1..16: note = synthetic [barcode part1]
  source 1..16: mol_type = other DNA
gtgacgtctgagatct

SEQ ID NO: 30207 - DNA, 16 bp, synthetic construct
  misc_feature 1..16: note = synthetic [barcode part1]
  source 1..16: mol_type = other DNA
aacgttgtgcacacac

SEQ ID NO: 30208 - DNA, 16 bp, synthetic construct
  misc_feature 1..16: note = synthetic [barcode part1]
  source 1..16: mol_type = other DNA
ccacaggagatattcc

SEQ ID NO: 30209 - DNA, 16 bp, synthetic construct
  misc_feature 1..16: note = synthetic [barcode part1]
  source 1..16: mol_type = other DNA
cacctacgttctggac

SEQ ID NO: 30210 - DNA, 16 bp, synthetic construct
  misc_feature 1..16: note = synthetic [barcode part1]
  source 1..16: mol_type = other DNA
cgcacactatagtacg

SEQ ID NO: 30211 - DNA, 16 bp, synthetic construct
  misc_feature 1..16: note = synthetic [barcode part1]
  source 1..16: mol_type = other DNA
aggcgatagtcacacg

SEQ ID NO: 30212 - DNA, 16 bp, synthetic construct
  misc_feature 1..16: note = synthetic [barcode part1]
  source 1..16: mol_type = other DNA
atccaactcttgtgtg

SEQ ID NO: 30213 - DNA, 16 bp, synthetic construct
  misc_feature 1..16: note = synthetic [barcode part1]
  source 1..16: mol_type = other DNA
ccgcagtacactatag

SEQ ID NO: 30214 - DNA, 16 bp, synthetic construct
  misc_feature 1..16: note = synthetic [barcode part1]
  source 1..16: mol_type = other DNA
agaaggttccgatcct

SEQ ID NO: 30215 - DNA, 16 bp, synthetic construct
  misc_feature 1..16: note = synthetic [barcode part1]
  source 1..16: mol_type = other DNA
ttcaagacggccgatt

SEQ ID NO: 30216 - DNA, 16 bp, synthetic construct
  misc_feature 1..16: note = synthetic [barcode part1]
  source 1..16: mol_type = other DNA
gcggtaatctgatctg

SEQ ID NO: 30217 - DNA, 16 bp, synthetic construct
  misc_feature 1..16: note = synthetic [barcode part1]
  source 1..16: mol_type = other DNA
atctgttgcaacgttc

SEQ ID NO: 30218 - DNA, 16 bp, synthetic construct
  misc_feature 1..16: note = synthetic [barcode part1]
  source 1..16: mol_type = other DNA
atataaccacgcggtc

SEQ ID NO: 30219 - DNA, 16 bp, synthetic construct
  misc_feature 1..16: note = synthetic [barcode part1]
  source 1..16: mol_type = other DNA
tccgcacgtatagagt

SEQ ID NO: 30220 - DNA, 16 bp, synthetic construct
  misc_feature 1..16: note = synthetic [barcode part1]
  source 1..16: mol_type = other DNA
aattgaggcctcctag

SEQ ID NO: 30221 - DNA, 16 bp, synthetic construct
  misc_feature 1..16: note = synthetic [barcode part1]
  source 1..16: mol_type = other DNA
attaggtctgccgagt

SEQ ID NO: 30222 - DNA, 16 bp, synthetic construct
  misc_feature 1..16: note = synthetic [barcode part1]
  source 1..16: mol_type = other DNA
actaacgatcttccac

SEQ ID NO: 30223 - DNA, 16 bp, synthetic construct
  misc_feature 1..16: note = synthetic [barcode part1]
  source 1..16: mol_type = other DNA
cacgacctctctagtg

SEQ ID NO: 30224 - DNA, 16 bp, synthetic construct
  misc_feature 1..16: note = synthetic [barcode part1]
  source 1..16: mol_type = other DNA
tcgagtaatcctatcc

SEQ ID NO: 30225 - DNA, 16 bp, synthetic construct
  misc_feature 1..16: note = synthetic [barcode part1]
  source 1..16: mol_type = other DNA
gacggtctcctgtatc

SEQ ID NO: 30226 - DNA, 16 bp, synthetic construct
  misc_feature 1..16: note = synthetic [barcode part1]
  source 1..16: mol_type = other DNA
aacctgttccagacag

SEQ ID NO: 30227 - DNA, 16 bp, synthetic construct
  misc_feature 1..16: note = synthetic [barcode part1]
  source 1..16: mol_type = other DNA
tactactctcgacctc

SEQ ID NO: 30228 - DNA, 16 bp, synthetic construct
  misc_feature 1..16: note = synthetic [barcode part1]
  source 1..16: mol_type = other DNA
acttggtaagagtacg

SEQ ID NO: 30229 - DNA, 16 bp, synthetic construct
  misc_feature 1..16: note = synthetic [barcode part1]
  source 1..16: mol_type = other DNA
tgcaggccggaataac

SEQ ID NO: 30230 - DNA, 16 bp, synthetic construct
  misc_feature 1..16: note = synthetic [barcode part1]
  source 1..16: mol_type = other DNA
aggtcagttaactccg

SEQ ID NO: 30231 - DNA, 16 bp, synthetic construct
  misc_feature 1..16: note = synthetic [barcode part1]
  source 1..16: mol_type = other DNA
tcacgcgtgcaattag

SEQ ID NO: 30232 - DNA, 16 bp, synthetic construct
  misc_feature 1..16: note = synthetic [barcode part1]
  source 1..16: mol_type = other DNA
agttctcaggacggtt

SEQ ID NO: 30233 - DNA, 16 bp, synthetic construct
  misc_feature 1..16: note = synthetic [barcode part1]
  source 1..16: mol_type = other DNA
gtctggaatcttacct

SEQ ID NO: 30234 - DNA, 16 bp, synthetic construct
  misc_feature 1..16: note = synthetic [barcode part1]
  source 1..16: mol_type = other DNA
cagagagttaggagac

SEQ ID NO: 30235 - DNA, 16 bp, synthetic construct
  misc_feature 1..16: note = synthetic [barcode part1]
  source 1..16: mol_type = other DNA
tcgtacaggtctcctg

SEQ ID NO: 30236 - DNA, 16 bp, synthetic construct
  misc_feature 1..16: note = synthetic [barcode part1]
  source 1..16: mol_type = other DNA
caggtgtgatcacact

SEQ ID NO: 30237 - DNA, 16 bp, synthetic construct
  misc_feature 1..16: note = synthetic [barcode part1]
  source 1..16: mol_type = other DNA
ccttagtcgacgaagt

SEQ ID NO: 30238 - DNA, 16 bp, synthetic construct
  misc_feature 1..16: note = synthetic [barcode part1]
  source 1..16: mol_type = other DNA
tatcggatccagtgac

SEQ ID NO: 30239 - DNA, 16 bp, synthetic construct
  misc_feature 1..16: note = synthetic [barcode part1]
  source 1..16: mol_type = other DNA
tatcgcacaatcggtg

SEQ ID NO: 30240 - DNA, 16 bp, synthetic construct
  misc_feature 1..16: note = synthetic [barcode part1]
  source 1..16: mol_type = other DNA
atcactcactcgcggt

SEQ ID NO: 30241 - DNA, 16 bp, synthetic construct
  misc_feature 1..16: note = synthetic [barcode part1]
  source 1..16: mol_type = other DNA
ttggtctggcaacagt

SEQ ID NO: 30242 - DNA, 16 bp, synthetic construct
  misc_feature 1..16: note = synthetic [barcode part1]
  source 1..16: mol_type = other DNA
aggagtagaatcacct

SEQ ID NO: 30243 - DNA, 16 bp, synthetic construct
  misc_feature 1..16: note = synthetic [barcode part1]
  source 1..16: mol_type = other DNA
atagagtggattcgtg

SEQ ID NO: 30244 - DNA, 16 bp, synthetic construct
  misc_feature 1..16: note = synthetic [barcode part1]
  source 1..16: mol_type = other DNA
gaccttaatctgttcg

SEQ ID NO: 30245 - DNA, 16 bp, synthetic construct
  misc_feature 1..16: note = synthetic [barcode part1]
  source 1..16: mol_type = other DNA
tcttagtctggcacgc

SEQ ID NO: 30246 - DNA, 16 bp, synthetic construct
  misc_feature 1..16: note = synthetic [barcode part1]
  source 1..16: mol_type = other DNA
agaataaccacggact

SEQ ID NO: 30247 - DNA, 16 bp, synthetic construct
  misc_feature 1..16: note = synthetic [barcode part1]
  source 1..16: mol_type = other DNA
aattagtgcgtcacgc

SEQ ID NO: 30248 - DNA, 16 bp, synthetic construct
  misc_feature 1..16: note = synthetic [barcode part1]
  source 1..16: mol_type = other DNA
gactaacacgcgtatc

SEQ ID NO: 30249 - DNA, 16 bp, synthetic construct
  misc_feature 1..16: note = synthetic [barcode part1]
  source 1..16: mol_type = other DNA
ttatacagagagaccg

SEQ ID NO: 30250 - DNA, 16 bp, synthetic construct
  misc_feature 1..16: note = synthetic [barcode part1]
  source 1..16: mol_type = other DNA
actcgtctctacttgc

SEQ ID NO: 30251 - DNA, 16 bp, synthetic construct
  misc_feature 1..16: note = synthetic [barcode part1]
  source 1..16: mol_type = other DNA
accaggtggtacgagt

SEQ ID NO: 30252 - DNA, 16 bp, synthetic construct
  misc_feature 1..16: note = synthetic [barcode part1]
  source 1..16: mol_type = other DNA
tggccttccttaactc

SEQ ID NO: 30253 - DNA, 16 bp, synthetic construct
  misc_feature 1..16: note = synthetic [barcode part1]
  source 1..16: mol_type = other DNA
tgttgtgactgcagtg

SEQ ID NO: 30254 - DNA, 16 bp, synthetic construct
  misc_feature 1..16: note = synthetic [barcode part1]
  source 1..16: mol_type = other DNA
tagtacgaagacaacc

SEQ ID NO: 30255 - DNA, 16 bp, synthetic construct
  misc_feature 1..16: note = synthetic [barcode part1]
  source 1..16: mol_type = other DNA
atactctgaaggtgcc

SEQ ID NO: 30256 - DNA, 16 bp, synthetic construct
  misc_feature 1..16: note = synthetic [barcode part1]
  source 1..16: mol_type = other DNA
atcactcgtctgcggt

SEQ ID NO: 30257 - DNA, 16 bp, synthetic construct
  misc_feature 1..16: note = synthetic [barcode part1]
  source 1..16: mol_type = other DNA
gtggaggattaagtct

SEQ ID NO: 30258 - DNA, 16 bp, synthetic construct
  misc_feature 1..16: note = synthetic [barcode part1]
  source 1..16: mol_type = other DNA
ccggagtatctacctc

SEQ ID NO: 30259 - DNA, 16 bp, synthetic construct
  misc_feature 1..16: note = synthetic [barcode part1]
  source 1..16: mol_type = other DNA
tattagtaggaccgag

SEQ ID NO: 30260 - DNA, 16 bp, synthetic construct
  misc_feature 1..16: note = synthetic [barcode part1]
  source 1..16: mol_type = other DNA
cagtcggtaactaacc

SEQ ID NO: 30261 - DNA, 16 bp, synthetic construct
  misc_feature 1..16: note = synthetic [barcode part1]
  source 1..16: mol_type = other DNA
ttggtgtctccgatcg

SEQ ID NO: 30262 - DNA, 16 bp, synthetic construct
  misc_feature 1..16: note = synthetic [barcode part1]
  source 1..16: mol_type = other DNA
cgcaggcaacaagact

SEQ ID NO: 30263 - DNA, 16 bp, synthetic construct
  misc_feature 1..16: note = synthetic [barcode part1]
  source 1..16: mol_type = other DNA
agttctgaagtagacg

SEQ ID NO: 30264 - DNA, 16 bp, synthetic construct
  misc_feature 1..16: note = synthetic [barcode part1]
  source 1..16: mol_type = other DNA
tgatacgttggcgtac

SEQ ID NO: 30265 - DNA, 16 bp, synthetic construct
  misc_feature 1..16: note = synthetic [barcode part1]
  source 1..16: mol_type = other DNA
tgatagtcgactcggt

SEQ ID NO: 30266 - DNA, 16 bp, synthetic construct
  misc_feature 1..16: note = synthetic [barcode part1]
  source 1..16: mol_type = other DNA
tctcgactagtccttc

SEQ ID NO: 30267 - DNA, 16 bp, synthetic construct
  misc_feature 1..16: note = synthetic [barcode part1]
  source 1..16: mol_type = other DNA
tcggcaacgaaggtgt

SEQ ID NO: 30268 - DNA, 16 bp, synthetic construct
  misc_feature 1..16: note = synthetic [barcode part1]
  source 1..16: mol_type = other DNA
cggtaacgtcgaactt

SEQ ID NO: 30269 - DNA, 16 bp, synthetic construct
  misc_feature 1..16: note = synthetic [barcode part1]
  source 1..16: mol_type = other DNA
gatctagaacctggtc

SEQ ID NO: 30270 - DNA, 16 bp, synthetic construct
  misc_feature 1..16: note = synthetic [barcode part1]
  source 1..16: mol_type = other DNA
tccaggcgaatcgaag

SEQ ID NO: 30271 - DNA, 16 bp, synthetic construct
  misc_feature 1..16: note = synthetic [barcode part1]
  source 1..16: mol_type = other DNA
caatcgttcacacgag

SEQ ID NO: 30272 - DNA, 16 bp, synthetic construct
  misc_feature 1..16: note = synthetic [barcode part1]
  source 1..16: mol_type = other DNA
aggccggatattggtg

SEQ ID NO: 30273 - DNA, 16 bp, synthetic construct
  misc_feature 1..16: note = synthetic [barcode part1]
  source 1..16: mol_type = other DNA
tcaatccgtaaccact

SEQ ID NO: 30274 - DNA, 16 bp, synthetic construct
  misc_feature 1..16: note = synthetic [barcode part1]
  source 1..16: mol_type = other DNA
agattccgcactgtag

SEQ ID NO: 30275 - DNA, 16 bp, synthetic construct
  misc_feature 1..16: note = synthetic [barcode part1]
  source 1..16: mol_type = other DNA
gatcgattcttcctcc

SEQ ID NO: 30276 - DNA, 16 bp, synthetic construct
  misc_feature 1..16: note = synthetic [barcode part1]
  source 1..16: mol_type = other DNA
cctaacacgttagacg

SEQ ID NO: 30277 - DNA, 16 bp, synthetic construct
  misc_feature 1..16: note = synthetic [barcode part1]
  source 1..16: mol_type = other DNA
tcgtcctgttaccttg

SEQ ID NO: 30278 - DNA, 16 bp, synthetic construct
  misc_feature 1..16: note = synthetic [barcode part1]
  source 1..16: mol_type = other DNA
agtggagtgtgttggc

SEQ ID NO: 30279 - DNA, 16 bp, synthetic construct
  misc_feature 1..16: note = synthetic [barcode part1]
  source 1..16: mol_type = other DNA
tggactattgaaccgc

SEQ ID NO: 30280 - DNA, 16 bp, synthetic construct
  misc_feature 1..16: note = synthetic [barcode part1]
  source 1..16: mol_type = other DNA
gacctgaggttcgatt

SEQ ID NO: 30281 - DNA, 16 bp, synthetic construct
  misc_feature 1..16: note = synthetic [barcode part1]
  source 1..16: mol_type = other DNA
tgtcgtagaggttctg

SEQ ID NO: 30282 - DNA, 16 bp, synthetic construct
  misc_feature 1..16: note = synthetic [barcode part1]
  source 1..16: mol_type = other DNA
cctctgagtacaccac

SEQ ID NO: 30283 - DNA, 16 bp, synthetic construct
  misc_feature 1..16: note = synthetic [barcode part1]
  source 1..16: mol_type = other DNA
gccacaatacctactt

SEQ ID NO: 30284 - DNA, 16 bp, synthetic construct
  misc_feature 1..16: note = synthetic [barcode part1]
  source 1..16: mol_type = other DNA
cggatacaaggaccgt

SEQ ID NO: 30285 - DNA, 16 bp, synthetic construct
  misc_feature 1..16: note = synthetic [barcode part1]
  source 1..16: mol_type = other DNA
tcgcggtgttaatcag

SEQ ID NO: 30286 - DNA, 16 bp, synthetic construct
  misc_feature 1..16: note = synthetic [barcode part1]
  source 1..16: mol_type = other DNA
tgcctacttgcagtgc

SEQ ID NO: 30287 - DNA, 16 bp, synthetic construct
  misc_feature 1..16: note = synthetic [barcode part1]
  source 1..16: mol_type = other DNA
taaccgtctatcactg

SEQ ID NO: 30288 - DNA, 16 bp, synthetic construct
  misc_feature 1..16: note = synthetic [barcode part1]
  source 1..16: mol_type = other DNA
ccaccttgcactcaag

SEQ ID NO: 30289 - DNA, 16 bp, synthetic construct
  misc_feature 1..16: note = synthetic [barcode part1]
  source 1..16: mol_type = other DNA
cgataggtggacactg

SEQ ID NO: 30290 - DNA, 16 bp, synthetic construct
  misc_feature 1..16: note = synthetic [barcode part1]
  source 1..16: mol_type = other DNA
ttgattatcgaggccg

SEQ ID NO: 30291 - DNA, 16 bp, synthetic construct
  misc_feature 1..16: note = synthetic [barcode part1]
  source 1..16: mol_type = other DNA
gactgtgttctggcct

SEQ ID NO: 30292 - DNA, 16 bp, synthetic construct
  misc_feature 1..16: note = synthetic [barcode part1]
  source 1..16: mol_type = other DNA
ttggaggaaccgtacg

SEQ ID NO: 30293 - DNA, 16 bp, synthetic construct
  misc_feature 1..16: note = synthetic [barcode part1]
  source 1..16: mol_type = other DNA
tcgagttgtgcggaag

SEQ ID NO: 30294 - DNA, 16 bp, synthetic construct
  misc_feature 1..16: note = synthetic [barcode part1]
  source 1..16: mol_type = other DNA
tcagtagtatcctcac

SEQ ID NO: 30295 - DNA, 16 bp, synthetic construct
  misc_feature 1..16: note = synthetic [barcode part1]
  source 1..16: mol_type = other DNA
gaatccgttacacggt

SEQ ID NO: 30296 - DNA, 16 bp, synthetic construct
  misc_feature 1..16: note = synthetic [barcode part1]
  source 1..16: mol_type = other DNA
tagatacggaacggtt

SEQ ID NO: 30297 - DNA, 16 bp, synthetic construct
  misc_feature 1..16: note = synthetic [barcode part1]
  source 1..16: mol_type = other DNA
tcagtaggagtgtggc

SEQ ID NO: 30298 - DNA, 16 bp, synthetic construct
  misc_feature 1..16: note = synthetic [barcode part1]
  source 1..16: mol_type = other DNA
tcagttctcgtgtagt

SEQ ID NO: 30299 - DNA, 16 bp, synthetic construct
  misc_feature 1..16: note = synthetic [barcode part1]
  source 1..16: mol_type = other DNA
tggattgtgatctggc

SEQ ID NO: 30300 - DNA, 16 bp, synthetic construct
  misc_feature 1..16: note = synthetic [barcode part1]
  source 1..16: mol_type = other DNA
tatcctggccttgtct

SEQ ID NO: 30301 - DNA, 16 bp, synthetic construct
  misc_feature 1..16: note = synthetic [barcode part1]
  source 1..16: mol_type = other DNA
agtacaccgtaatcgc

SEQ ID NO: 30302 - DNA, 16 bp, synthetic construct
  misc_feature 1..16: note = synthetic [barcode part1]
  source 1..16: mol_type = other DNA
tatcgtgactacggtg

SEQ ID NO: 30303 - DNA, 16 bp, synthetic construct
  misc_feature 1..16: note = synthetic [barcode part1]
  source 1..16: mol_type = other DNA
cacgtgacttacgagt

SEQ ID NO: 30304 - DNA, 16 bp, synthetic construct
  misc_feature 1..16: note = synthetic [barcode part1]
  source 1..16: mol_type = other DNA
tgaaggaatacaccgt

SEQ ID NO: 30305 - DNA, 16 bp, synthetic construct
  misc_feature 1..16: note = synthetic [barcode part1]
  source 1..16: mol_type = other DNA
cgataacgagaacgcc

SEQ ID NO: 30306 - DNA, 16 bp, synthetic construct
  misc_feature 1..16: note = synthetic [barcode part1]
  source 1..16: mol_type = other DNA
gtgttagagagtggcc

SEQ ID NO: 30307 - DNA, 16 bp, synthetic construct
  misc_feature 1..16: note = synthetic [barcode part1]
  source 1..16: mol_type = other DNA
gactatacggcgtgtt

SEQ ID NO: 30308 - DNA, 16 bp, synthetic construct
  misc_feature 1..16: note = synthetic [barcode part1]
  source 1..16: mol_type = other DNA
tacacagagtggtggc

SEQ ID NO: 30309 - DNA, 16 bp, synthetic construct
  misc_feature 1..16: note = synthetic [barcode part1]
  source 1..16: mol_type = other DNA
gtgcgacttcctcaac

SEQ ID NO: 30310 - DNA, 16 bp, synthetic construct
  misc_feature 1..16: note = synthetic [barcode part1]
  source 1..16: mol_type = other DNA
cgtaggtcaccgtctt

SEQ ID NO: 30311 - DNA, 16 bp, synthetic construct
  misc_feature 1..16: note = synthetic [barcode part1]
  source 1..16: mol_type = other DNA
gtggccaccttaactc

SEQ ID NO: 30312 - DNA, 16 bp, synthetic construct
  misc_feature 1..16: note = synthetic [barcode part1]
  source 1..16: mol_type = other DNA
tgcgaatctgtcctgc

SEQ ID NO: 30313 - DNA, 16 bp, synthetic construct
  misc_feature 1..16: note = synthetic [barcode part1]
  source 1..16: mol_type = other DNA
tctctggcacgatcac

SEQ ID NO: 30314 - DNA, 16 bp, synthetic construct
  misc_feature 1..16: note = synthetic [barcode part1]
  source 1..16: mol_type = other DNA
tgtgtaggccttccac

SEQ ID NO: 30315 - DNA, 16 bp, synthetic construct
  misc_feature 1..16: note = synthetic [barcode part1]
  source 1..16: mol_type = other DNA
cacgaagtaacaactg

SEQ ID NO: 30316 - DNA, 16 bp, synthetic construct
  misc_feature 1..16: note = synthetic [barcode part1]
  source 1..16: mol_type = other DNA
gactcagattaggcct

SEQ ID NO: 30317 - DNA, 16 bp, synthetic construct
  misc_feature 1..16: note = synthetic [barcode part1]
  source 1..16: mol_type = other DNA
ttggataggacggcgt

SEQ ID NO: 30318 - DNA, 16 bp, synthetic construct
  misc_feature 1..16: note = synthetic [barcode part1]
  source 1..16: mol_type = other DNA
caagtcaacgttcttc

SEQ ID NO: 30319 - DNA, 16 bp, synthetic construct
  misc_feature 1..16: note = synthetic [barcode part1]
  source 1..16: mol_type = other DNA
tgttgcaagtctcgag

SEQ ID NO: 30320 - DNA, 16 bp, synthetic construct
  misc_feature 1..16: note = synthetic [barcode part1]
  source 1..16: mol_type = other DNA
gttcggatcactccgt

SEQ ID NO: 30321 - DNA, 16 bp, synthetic construct
  misc_feature 1..16: note = synthetic [barcode part1]
  source 1..16: mol_type = other DNA
tgtcagtacactggtg

SEQ ID NO: 30322 - DNA, 16 bp, synthetic construct
  misc_feature 1..16: note = synthetic [barcode part1]
  source 1..16: mol_type = other DNA
tctgccggttgttctt

SEQ ID NO: 30323 - DNA, 16 bp, synthetic construct
  misc_feature 1..16: note = synthetic [barcode part1]
  source 1..16: mol_type = other DNA
cagtaaccggtctaac

SEQ ID NO: 30324 - DNA, 16 bp, synthetic construct
  misc_feature 1..16: note = synthetic [barcode part1]
  source 1..16: mol_type = other DNA
gacgtccggtatattg

SEQ ID NO: 30325 - DNA, 16 bp, synthetic construct
  misc_feature 1..16: note = synthetic [barcode part1]
  source 1..16: mol_type = other DNA
tatcgttcggattcac

SEQ ID NO: 30326 - DNA, 16 bp, synthetic construct
  misc_feature 1..16: note = synthetic [barcode part1]
  source 1..16: mol_type = other DNA
gcgttctcgtatcttc

SEQ ID NO: 30327 - DNA, 16 bp, synthetic construct
  misc_feature 1..16: note = synthetic [barcode part1]
  source 1..16: mol_type = other DNA
tggcagacttattgcg

SEQ ID NO: 30328 - DNA, 16 bp, synthetic construct
  misc_feature 1..16: note = synthetic [barcode part1]
  source 1..16: mol_type = other DNA
attaggaggtccttcg

SEQ ID NO: 30329 - DNA, 16 bp, synthetic construct
  misc_feature 1..16: note = synthetic [barcode part1]
  source 1..16: mol_type = other DNA
acggttgttctagtct

SEQ ID NO: 30330 - DNA, 16 bp, synthetic construct
  misc_feature 1..16: note = synthetic [barcode part1]
  source 1..16: mol_type = other DNA
acttctgcggattact

SEQ ID NO: 30331 - DNA, 16 bp, synthetic construct
  misc_feature 1..16: note = synthetic [barcode part1]
  source 1..16: mol_type = other DNA
cgagattggtcaatcc

SEQ ID NO: 30332 - DNA, 16 bp, synthetic construct
  misc_feature 1..16: note = synthetic [barcode part1]
  source 1..16: mol_type = other DNA
gaattacggcgactct

SEQ ID NO: 30333 - DNA, 16 bp, synthetic construct
  misc_feature 1..16: note = synthetic [barcode part1]
  source 1..16: mol_type = other DNA
tattggacctgtacct

SEQ ID NO: 30334 - DNA, 16 bp, synthetic construct
  misc_feature 1..16: note = synthetic [barcode part1]
  source 1..16: mol_type = other DNA
tccggtcaccggtatt

SEQ ID NO: 30335 - DNA, 16 bp, synthetic construct
  misc_feature 1..16: note = synthetic [barcode part1]
  source 1..16: mol_type = other DNA
tggagagtaacgcacc

SEQ ID NO: 30336 - DNA, 16 bp, synthetic construct
  misc_feature 1..16: note = synthetic [barcode part1]
  source 1..16: mol_type = other DNA
cctcacagactatcgc

SEQ ID NO: 30337 - DNA, 16 bp, synthetic construct
  misc_feature 1..16: note = synthetic [barcode part1]
  source 1..16: mol_type = other DNA
gagtaagtgtccgtct

SEQ ID NO: 30338 - DNA, 16 bp, synthetic construct
  misc_feature 1..16: note = synthetic [barcode part1]
  source 1..16: mol_type = other DNA
cggagttccttcttct

SEQ ID NO: 30339 - DNA, 16 bp, synthetic construct
  misc_feature 1..16: note = synthetic [barcode part1]
  source 1..16: mol_type = other DNA
aatcctcctagtacgt

SEQ ID NO: 30340 - DNA, 16 bp, synthetic construct
  misc_feature 1..16: note = synthetic [barcode part1]
  source 1..16: mol_type = other DNA
gtggtgtatcgatcgt

SEQ ID NO: 30341 - DNA, 16 bp, synthetic construct
  misc_feature 1..16: note = synthetic [barcode part1]
  source 1..16: mol_type = other DNA
tgagactcacagtgtc

SEQ ID NO: 30342 - DNA, 16 bp, synthetic construct
  misc_feature 1..16: note = synthetic [barcode part1]
  source 1..16: mol_type = other DNA
ccacgtgagttggaag

SEQ ID NO: 30343 - DNA, 16 bp, synthetic construct
  misc_feature 1..16: note = synthetic [barcode part1]
  source 1..16: mol_type = other DNA
gattacgtcttgatcc

SEQ ID NO: 30344 - DNA, 16 bp, synthetic construct
  misc_feature 1..16: note = synthetic [barcode part1]
  source 1..16: mol_type = other DNA
aggtaaggttctgagt

SEQ ID NO: 30345 - DNA, 16 bp, synthetic construct
  misc_feature 1..16: note = synthetic [barcode part1]
  source 1..16: mol_type = other DNA
agaaggttactggtgt

SEQ ID NO: 30346 - DNA, 16 bp, synthetic construct
  misc_feature 1..16: note = synthetic [barcode part1]
  source 1..16: mol_type = other DNA
gtctgcctgaggtctt

SEQ ID NO: 30347 - DNA, 16 bp, synthetic construct
  misc_feature 1..16: note = synthetic [barcode part1]
  source 1..16: mol_type = other DNA
acttgactgcactccg

SEQ ID NO: 30348 - DNA, 16 bp, synthetic construct
  misc_feature 1..16: note = synthetic [barcode part1]
  source 1..16: mol_type = other DNA
ttgtggttggtcaacg

SEQ ID NO: 30349 - DNA, 16 bp, synthetic construct
  misc_feature 1..16: note = synthetic [barcode part1]
  source 1..16: mol_type = other DNA
ttaacggccgcacttc

SEQ ID NO: 30350 - DNA, 16 bp, synthetic construct
  misc_feature 1..16: note = synthetic [barcode part1]
  source 1..16: mol_type = other DNA
tacgacacagaacctc

SEQ ID NO: 30351 - DNA, 16 bp, synthetic construct
  misc_feature 1..16: note = synthetic [barcode part1]
  source 1..16: mol_type = other DNA
agacgtcagacctgtt

SEQ ID NO: 30352 - DNA, 16 bp, synthetic construct
  misc_feature 1..16: note = synthetic [barcode part1]
  source 1..16: mol_type = other DNA
caggacacagacctag

SEQ ID NO: 30353 - DNA, 16 bp, synthetic construct
  misc_feature 1..16: note = synthetic [barcode part1]
  source 1..16: mol_type = other DNA
attcgttaagtctcgc

SEQ ID NO: 30354 - DNA, 16 bp, synthetic construct
  misc_feature 1..16: note = synthetic [barcode part1]
  source 1..16: mol_type = other DNA
ttgacttgcctaagtc

SEQ ID NO: 30355 - DNA, 16 bp, synthetic construct
  misc_feature 1..16: note = synthetic [barcode part1]
  source 1..16: mol_type = other DNA
ttaggtgtaaggtgac

SEQ ID NO: 30356 - DNA, 16 bp, synthetic construct
  misc_feature 1..16: note = synthetic [barcode part1]
  source 1..16: mol_type = other DNA
cactcctctaagttag

SEQ ID NO: 30357 - DNA, 16 bp, synthetic construct
  misc_feature 1..16: note = synthetic [barcode part1]
  source 1..16: mol_type = other DNA
tgaagatcgagttacg

SEQ ID NO: 30358 - DNA, 16 bp, synthetic construct
  misc_feature 1..16: note = synthetic [barcode part1]
  source 1..16: mol_type = other DNA
agttcactagacgtcg

SEQ ID NO: 30359 - DNA, 16 bp, synthetic construct
  misc_feature 1..16: note = synthetic [barcode part1]
  source 1..16: mol_type = other DNA
tccaccgacgcaactt

SEQ ID NO: 30360 - DNA, 16 bp, synthetic construct
  misc_feature 1..16: note = synthetic [barcode part1]
  source 1..16: mol_type = other DNA
taagtccaggtctacg

SEQ ID NO: 30361 - DNA, 16 bp, synthetic construct
  misc_feature 1..16: note = synthetic [barcode part1]
  source 1..16: mol_type = other DNA
cactctgtagatactc

SEQ ID NO: 30362 - DNA, 16 bp, synthetic construct
  misc_feature 1..16: note = synthetic [barcode part1]
  source 1..16: mol_type = other DNA
tagagtccgtatacgc

SEQ ID NO: 30363 - DNA, 16 bp, synthetic construct
  misc_feature 1..16: note = synthetic [barcode part1]
  source 1..16: mol_type = other DNA
gtaactggtgtatcgc

SEQ ID NO: 30364 - DNA, 16 bp, synthetic construct
  misc_feature 1..16: note = synthetic [barcode part1]
  source 1..16: mol_type = other DNA
atctcttcacacagtg

SEQ ID NO: 30365 - DNA, 16 bp, synthetic construct
  misc_feature 1..16: note = synthetic [barcode part1]
  source 1..16: mol_type = other DNA
gccagtactcagtcct

SEQ ID NO: 30366 - DNA, 16 bp, synthetic construct
  misc_feature 1..16: note = synthetic [barcode part1]
  source 1..16: mol_type = other DNA
gtctcgtgtaactatc

SEQ ID NO: 30367 - DNA, 16 bp, synthetic construct
  misc_feature 1..16: note = synthetic [barcode part1]
  source 1..16: mol_type = other DNA
ccgaagaacacctgag

SEQ ID NO: 30368 - DNA, 16 bp, synthetic construct
  misc_feature 1..16: note = synthetic [barcode part1]
  source 1..16: mol_type = other DNA
ttatcgtgcgaacttc

SEQ ID NO: 30369 - DNA, 16 bp, synthetic construct
  misc_feature 1..16: note = synthetic [barcode part1]
  source 1..16: mol_type = other DNA
gcgttgaggtcgtatt

SEQ ID NO: 30370 - DNA, 16 bp, synthetic construct
  misc_feature 1..16: note = synthetic [barcode part1]
  source 1..16: mol_type = other DNA
agagtggaagtagtgc

SEQ ID NO: 30371 - DNA, 16 bp, synthetic construct
  misc_feature 1..16: note = synthetic [barcode part1]
  source 1..16: mol_type = other DNA
cggcaacgtactcttc

SEQ ID NO: 30372 - DNA, 16 bp, synthetic construct
  misc_feature 1..16: note = synthetic [barcode part1]
  source 1..16: mol_type = other DNA
gtggtcacacagttgt

SEQ ID NO: 30373 - DNA, 16 bp, synthetic construct
  misc_feature 1..16: note = synthetic [barcode part1]
  source 1..16: mol_type = other DNA
gatcgtacacagttgc

SEQ ID NO: 30374 - DNA, 16 bp, synthetic construct
  misc_feature 1..16: note = synthetic [barcode part1]
  source 1..16: mol_type = other DNA
gacacgcgagagattc

SEQ ID NO: 30375 - DNA, 16 bp, synthetic construct
  misc_feature 1..16: note = synthetic [barcode part1]
  source 1..16: mol_type = other DNA
acttccacggattgtt

SEQ ID NO: 30376 - DNA, 16 bp, synthetic construct
  misc_feature 1..16: note = synthetic [barcode part1]
  source 1..16: mol_type = other DNA
cgcagtgagtgagtac

SEQ ID NO: 30377 - DNA, 16 bp, synthetic construct
  misc_feature 1..16: note = synthetic [barcode part1]
  source 1..16: mol_type = other DNA
gcgaagtcgttcagag

SEQ ID NO: 30378 - DNA, 16 bp, synthetic construct
  misc_feature 1..16: note = synthetic [barcode part1]
  source 1..16: mol_type = other DNA
tgcctatccactcgtt

SEQ ID NO: 30379 - DNA, 16 bp, synthetic construct
  misc_feature 1..16: note = synthetic [barcode part1]
  source 1..16: mol_type = other DNA
cagataactcgcctag

SEQ ID NO: 30380 - DNA, 16 bp, synthetic construct
  misc_feature 1..16: note = synthetic [barcode part1]
  source 1..16: mol_type = other DNA
agttcgaccaacagtc

SEQ ID NO: 30381 - DNA, 16 bp, synthetic construct
  misc_feature 1..16: note = synthetic [barcode part1]
  source 1..16: mol_type = other DNA
ccaggattccgaagtt

SEQ ID NO: 30382 - DNA, 16 bp, synthetic construct
  misc_feature 1..16: note = synthetic [barcode part1]
  source 1..16: mol_type = other DNA
tcttctcaccgtaacc

SEQ ID NO: 30383 - DNA, 16 bp, synthetic construct
  misc_feature 1..16: note = synthetic [barcode part1]
  source 1..16: mol_type = other DNA
tctagttcggtgcgtc

SEQ ID NO: 30384 - DNA, 16 bp, synthetic construct
  misc_feature 1..16: note = synthetic [barcode part1]
  source 1..16: mol_type = other DNA
tctccgtaacgacctg

SEQ ID NO: 30385 - DNA, 16 bp, synthetic construct
  misc_feature 1..16: note = synthetic [barcode part1]
  source 1..16: mol_type = other DNA
cgttcactgaacagac

SEQ ID NO: 30386 - DNA, 16 bp, synthetic construct
  misc_feature 1..16: note = synthetic [barcode part1]
  source 1..16: mol_type = other DNA
tgcgacactatctgtt

SEQ ID NO: 30387 - DNA, 16 bp, synthetic construct
  misc_feature 1..16: note = synthetic [barcode part1]
  source 1..16: mol_type = other DNA
tcaacttgtgagacgc

SEQ ID NO: 30388 - DNA, 16 bp, synthetic construct
  misc_feature 1..16: note = synthetic [barcode part1]
  source 1..16: mol_type = other DNA
gcaccagttaggtatc

SEQ ID NO: 30389 - DNA, 16 bp, synthetic construct
  misc_feature 1..16: note = synthetic [barcode part1]
  source 1..16: mol_type = other DNA
gcggactaagaatcgc

SEQ ID NO: 30390 - DNA, 16 bp, synthetic construct
  misc_feature 1..16: note = synthetic [barcode part1]
  source 1..16: mol_type = other DNA
tgcggacagtaagacc

SEQ ID NO: 30391 - DNA, 16 bp, synthetic construct
  misc_feature 1..16: note = synthetic [barcode part1]
  source 1..16: mol_type = other DNA
cctaaccgccgtatac

SEQ ID NO: 30392 - DNA, 16 bp, synthetic construct
  misc_feature 1..16: note = synthetic [barcode part1]
  source 1..16: mol_type = other DNA
agaactcactcacttc

SEQ ID NO: 30393 - DNA, 16 bp, synthetic construct
  misc_feature 1..16: note = synthetic [barcode part1]
  source 1..16: mol_type = other DNA
acacgaccgtgattgt

SEQ ID NO: 30394 - DNA, 16 bp, synthetic construct
  misc_feature 1..16: note = synthetic [barcode part1]
  source 1..16: mol_type = other DNA
gtctctggtggtctac

SEQ ID NO: 30395 - DNA, 16 bp, synthetic construct
  misc_feature 1..16: note = synthetic [barcode part1]
  source 1..16: mol_type = other DNA
ccaccagaatctagtg

SEQ ID NO: 30396 - DNA, 16 bp, synthetic construct
  misc_feature 1..16: note = synthetic [barcode part1]
  source 1..16: mol_type = other DNA
tgccacgtaactaacg

SEQ ID NO: 30397 - DNA, 16 bp, synthetic construct
  misc_feature 1..16: note = synthetic [barcode part1]
  source 1..16: mol_type = other DNA
cgtacagttcaactct

SEQ ID NO: 30398 - DNA, 16 bp, synthetic construct
  misc_feature 1..16: note = synthetic [barcode part1]
  source 1..16: mol_type = other DNA
aacaagtacggtgttg

SEQ ID NO: 30399 - DNA, 16 bp, synthetic construct
  misc_feature 1..16: note = synthetic [barcode part1]
  source 1..16: mol_type = other DNA
attaggttccgtacct

SEQ ID NO: 30400 - DNA, 16 bp, synthetic construct
  misc_feature 1..16: note = synthetic [barcode part1]
  source 1..16: mol_type = other DNA
gtctccgacttgacgt

SEQ ID NO: 30401 - DNA, 16 bp, synthetic construct
  misc_feature 1..16: note = synthetic [barcode part1]
  source 1..16: mol_type = other DNA
aacacctctcacagag

SEQ ID NO: 30402 - DNA, 16 bp, synthetic construct
  misc_feature 1..16: note = synthetic [barcode part1]
  source 1..16: mol_type = other DNA
acttcactcgtacagt

SEQ ID NO: 30403 - DNA, 16 bp, synthetic construct
  misc_feature 1..16: note = synthetic [barcode part1]
  source 1..16: mol_type = other DNA
agtccttatacctggt

SEQ ID NO: 30404 - DNA, 16 bp, synthetic construct
  misc_feature 1..16: note = synthetic [barcode part1]
  source 1..16: mol_type = other DNA
gcgattgtcctggtct

SEQ ID NO: 30405 - DNA, 16 bp, synthetic construct
  misc_feature 1..16: note = synthetic [barcode part1]
  source 1..16: mol_type = other DNA
acgttgaacgcaatcc

SEQ ID NO: 30406 - DNA, 16 bp, synthetic construct
  misc_feature 1..16: note = synthetic [barcode part1]
  source 1..16: mol_type = other DNA
aaggttagtcgtctcg

SEQ ID NO: 30407 - DNA, 16 bp, synthetic construct
  misc_feature 1..16: note = synthetic [barcode part1]
  source 1..16: mol_type = other DNA
gcgttaggtcgtctct

SEQ ID NO: 30408 - DNA, 16 bp, synthetic construct
  misc_feature 1..16: note = synthetic [barcode part1]
  source 1..16: mol_type = other DNA
tgcgagtgacaagatt

SEQ ID NO: 30409 - DNA, 16 bp, synthetic construct
  misc_feature 1..16: note = synthetic [barcode part1]
  source 1..16: mol_type = other DNA
tcgactcctcacgaac

SEQ ID NO: 30410 - DNA, 16 bp, synthetic construct
  misc_feature 1..16: note = synthetic [barcode part1]
  source 1..16: mol_type = other DNA
tactaatcggcgtgtg

SEQ ID NO: 30411 - DNA, 16 bp, synthetic construct
  misc_feature 1..16: note = synthetic [barcode part1]
  source 1..16: mol_type = other DNA
tgcggtcggaatagtg

SEQ ID NO: 30412 - DNA, 16 bp, synthetic construct
  misc_feature 1..16: note = synthetic [barcode part1]
  source 1..16: mol_type = other DNA
ttcggaagtcgtaacc

SEQ ID NO: 30413 - DNA, 16 bp, synthetic construct
  misc_feature 1..16: note = synthetic [barcode part1]
  source 1..16: mol_type = other DNA
caagtattctccgact

SEQ ID NO: 30414 - DNA, 16 bp, synthetic construct
  misc_feature 1..16: note = synthetic [barcode part1]
  source 1..16: mol_type = other DNA
ccgactccactagtgt

SEQ ID NO: 30415 - DNA, 16 bp, synthetic construct
  misc_feature 1..16: note = synthetic [barcode part1]
  source 1..16: mol_type = other DNA
acagtgcgagattcct

SEQ ID NO: 30416 - DNA, 16 bp, synthetic construct
  misc_feature 1..16: note = synthetic [barcode part1]
  source 1..16: mol_type = other DNA
gcaccgatagttctcc

SEQ ID NO: 30417 - DNA, 16 bp, synthetic construct
  misc_feature 1..16: note = synthetic [barcode part1]
  source 1..16: mol_type = other DNA
agtaggcgtaacgtcg

SEQ ID NO: 30418 - DNA, 16 bp, synthetic construct
  misc_feature 1..16: note = synthetic [barcode part1]
  source 1..16: mol_type = other DNA
caagtcgagaggtatt

SEQ ID NO: 30419 - DNA, 16 bp, synthetic construct
  misc_feature 1..16: note = synthetic [barcode part1]
  source 1..16: mol_type = other DNA
acacactatccaggtg

SEQ ID NO: 30420 - DNA, 16 bp, synthetic construct
  misc_feature 1..16: note = synthetic [barcode part1]
  source 1..16: mol_type = other DNA
acgcctcactggatct

SEQ ID NO: 30421 - DNA, 16 bp, synthetic construct
  misc_feature 1..16: note = synthetic [barcode part1]
  source 1..16: mol_type = other DNA
cctggtccgtgtgatt

SEQ ID NO: 30422 - DNA, 16 bp, synthetic construct
  misc_feature 1..16: note = synthetic [barcode part1]
  source 1..16: mol_type = other DNA
gttacctggacttact

SEQ ID NO: 30423 - DNA, 16 bp, synthetic construct
  misc_feature 1..16: note = synthetic [barcode part1]
  source 1..16: mol_type = other DNA
gccacagtctatccac

SEQ ID NO: 30424 - DNA, 16 bp, synthetic construct
  misc_feature 1..16: note = synthetic [barcode part1]
  source 1..16: mol_type = other DNA
acagaggtcagactgc

SEQ ID NO: 30425 - DNA, 16 bp, synthetic construct
  misc_feature 1..16: note = synthetic [barcode part1]
  source 1..16: mol_type = other DNA
ttgtcgttcgtcctgt

SEQ ID NO: 30426 - DNA, 16 bp, synthetic construct
  misc_feature 1..16: note = synthetic [barcode part1]
  source 1..16: mol_type = other DNA
caggaggcgtaatcgt

SEQ ID NO: 30427 - DNA, 16 bp, synthetic construct
  misc_feature 1..16: note = synthetic [barcode part1]
  source 1..16: mol_type = other DNA
cgaaggttctacgttg

SEQ ID NO: 30428 - DNA, 16 bp, synthetic construct
  misc_feature 1..16: note = synthetic [barcode part1]
  source 1..16: mol_type = other DNA
ttcacacgactgccgt

SEQ ID NO: 30429 - DNA, 16 bp, synthetic construct
  misc_feature 1..16: note = synthetic [barcode part1]
  source 1..16: mol_type = other DNA
aggtctgttcgatctt

SEQ ID NO: 30430 - DNA, 16 bp, synthetic construct
  misc_feature 1..16: note = synthetic [barcode part1]
  source 1..16: mol_type = other DNA
tgagtggcctacttag

SEQ ID NO: 30431 - DNA, 16 bp, synthetic construct
  misc_feature 1..16: note = synthetic [barcode part1]
  source 1..16: mol_type = other DNA
accgataaccttccgc

SEQ ID NO: 30432 - DNA, 16 bp, synthetic construct
  misc_feature 1..16: note = synthetic [barcode part1]
  source 1..16: mol_type = other DNA
tgttctaccacaggcc

SEQ ID NO: 30433 - DNA, 16 bp, synthetic construct
  misc_feature 1..16: note = synthetic [barcode part1]
  source 1..16: mol_type = other DNA
aataggaggtcgtgcc

SEQ ID NO: 30434 - DNA, 16 bp, synthetic construct
  misc_feature 1..16: note = synthetic [barcode part1]
  source 1..16: mol_type = other DNA
aggccactgttaagtc

SEQ ID NO: 30435 - DNA, 16 bp, synthetic construct
  misc_feature 1..16: note = synthetic [barcode part1]
  source 1..16: mol_type = other DNA
tacacgttgtgacgtg

SEQ ID NO: 30436 - DNA, 16 bp, synthetic construct
  misc_feature 1..16: note = synthetic [barcode part1]
  source 1..16: mol_type = other DNA
cggaagaccaatcttc

SEQ ID NO: 30437 - DNA, 16 bp, synthetic construct
  misc_feature 1..16: note = synthetic [barcode part1]
  source 1..16: mol_type = other DNA
tagagttcgtgcacgt

SEQ ID NO: 30438 - DNA, 16 bp, synthetic construct
  misc_feature 1..16: note = synthetic [barcode part1]
  source 1..16: mol_type = other DNA
taagacctagtcggtc

SEQ ID NO: 30439 - DNA, 16 bp, synthetic construct
  misc_feature 1..16: note = synthetic [barcode part1]
  source 1..16: mol_type = other DNA
gaaggacaagtacttc

SEQ ID NO: 30440 - DNA, 16 bp, synthetic construct
  misc_feature 1..16: note = synthetic [barcode part1]
  source 1..16: mol_type = other DNA
agtcgagaagtcgaag

SEQ ID NO: 30441 - DNA, 16 bp, synthetic construct
  misc_feature 1..16: note = synthetic [barcode part1]
  source 1..16: mol_type = other DNA
ataagtggtgacgttg

SEQ ID NO: 30442 - DNA, 16 bp, synthetic construct
  misc_feature 1..16: note = synthetic [barcode part1]
  source 1..16: mol_type = other DNA
tctcgattgcagactt

SEQ ID NO: 30443 - DNA, 16 bp, synthetic construct
  misc_feature 1..16: note = synthetic [barcode part1]
  source 1..16: mol_type = other DNA
caacacacgtattggc

SEQ ID NO: 30444 - DNA, 16 bp, synthetic construct
  misc_feature 1..16: note = synthetic [barcode part1]
  source 1..16: mol_type = other DNA
ttccggtgattgcgtc

SEQ ID NO: 30445 - DNA, 16 bp, synthetic construct
  misc_feature 1..16: note = synthetic [barcode part1]
  source 1..16: mol_type = other DNA
aagtaccggtgtctac

SEQ ID NO: 30446 - DNA, 16 bp, synthetic construct
  misc_feature 1..16: note = synthetic [barcode part1]
  source 1..16: mol_type = other DNA
ccagtagagacacggt

SEQ ID NO: 30447 - DNA, 16 bp, synthetic construct
  misc_feature 1..16: note = synthetic [barcode part1]
  source 1..16: mol_type = other DNA
gaagttatcctcgacg

SEQ ID NO: 30448 - DNA, 16 bp, synthetic construct
  misc_feature 1..16: note = synthetic [barcode part1]
  source 1..16: mol_type = other DNA
atcacgttacgccaag

SEQ ID NO: 30449 - DNA, 16 bp, synthetic construct
  misc_feature 1..16: note = synthetic [barcode part1]
  source 1..16: mol_type = other DNA
gccttgttaggtccac

SEQ ID NO: 30450 - DNA, 16 bp, synthetic construct
  misc_feature 1..16: note = synthetic [barcode part1]
  source 1..16: mol_type = other DNA
ataaggaccgataacc

SEQ ID NO: 30451 - DNA, 16 bp, synthetic construct
  misc_feature 1..16: note = synthetic [barcode part1]
  source 1..16: mol_type = other DNA
cagacttgaacttgcg

SEQ ID NO: 30452 - DNA, 16 bp, synthetic construct
  misc_feature 1..16: note = synthetic [barcode part1]
  source 1..16: mol_type = other DNA
acgttactgcctattg

SEQ ID NO: 30453 - DNA, 16 bp, synthetic construct
  misc_feature 1..16: note = synthetic [barcode part1]
  source 1..16: mol_type = other DNA
ttgtgaccacacacag

SEQ ID NO: 30454 - DNA, 16 bp, synthetic construct
  misc_feature 1..16: note = synthetic [barcode part1]
  source 1..16: mol_type = other DNA
cgaggaggttgatatt

SEQ ID NO: 30455 - DNA, 16 bp, synthetic construct
  misc_feature 1..16: note = synthetic [barcode part1]
  source 1..16: mol_type = other DNA
gattcgactccacacc

SEQ ID NO: 30456 - DNA, 16 bp, synthetic construct
  misc_feature 1..16: note = synthetic [barcode part1]
  source 1..16: mol_type = other DNA
tgtctcgatctcactc

SEQ ID NO: 30457 - DNA, 16 bp, synthetic construct
  misc_feature 1..16: note = synthetic [barcode part1]
  source 1..16: mol_type = other DNA
atctactaacgtcacc

SEQ ID NO: 30458 - DNA, 16 bp, synthetic construct
  misc_feature 1..16: note = synthetic [barcode part1]
  source 1..16: mol_type = other DNA
gttcgccaagtggatt

SEQ ID NO: 30459 - DNA, 16 bp, synthetic construct
  misc_feature 1..16: note = synthetic [barcode part1]
  source 1..16: mol_type = other DNA
tcggttaaggactctg

SEQ ID NO: 30460 - DNA, 16 bp, synthetic construct
  misc_feature 1..16: note = synthetic [barcode part1]
  source 1..16: mol_type = other DNA
caagttcagatccacg

SEQ ID NO: 30461 - DNA, 16 bp, synthetic construct
  misc_feature 1..16: note = synthetic [barcode part1]
  source 1..16: mol_type = other DNA
aggacaacgaggtagt

SEQ ID NO: 30462 - DNA, 16 bp, synthetic construct
  misc_feature 1..16: note = synthetic [barcode part1]
  source 1..16: mol_type = other DNA
agattgcgtctaacgc

SEQ ID NO: 30463 - DNA, 16 bp, synthetic construct
  misc_feature 1..16: note = synthetic [barcode part1]
  source 1..16: mol_type = other DNA
gcgtctgtaccacttg

SEQ ID NO: 30464 - DNA, 16 bp, synthetic construct
  misc_feature 1..16: note = synthetic [barcode part1]
  source 1..16: mol_type = other DNA
cgttccaagtatctac

SEQ ID NO: 30465 - DNA, 16 bp, synthetic construct
  misc_feature 1..16: note = synthetic [barcode part1]
  source 1..16: mol_type = other DNA
gactgaccacaacact

SEQ ID NO: 30466 - DNA, 16 bp, synthetic construct
  misc_feature 1..16: note = synthetic [barcode part1]
  source 1..16: mol_type = other DNA
actctaggttgcagtg

SEQ ID NO: 30467 - DNA, 16 bp, synthetic construct
  misc_feature 1..16: note = synthetic [barcode part1]
  source 1..16: mol_type = other DNA
actgcaataggtgaac

SEQ ID NO: 30468 - DNA, 16 bp, synthetic construct
  misc_feature 1..16: note = synthetic [barcode part1]
  source 1..16: mol_type = other DNA
gcagattagttcacgc

SEQ ID NO: 30469 - DNA, 16 bp, synthetic construct
  misc_feature 1..16: note = synthetic [barcode part1]
  source 1..16: mol_type = other DNA
aatccttaccgtctcc

SEQ ID NO: 30470 - DNA, 16 bp, synthetic construct
  misc_feature 1..16: note = synthetic [barcode part1]
  source 1..16: mol_type = other DNA
cgcgtctcttgtactt

SEQ ID NO: 30471 - DNA, 16 bp, synthetic construct
  misc_feature 1..16: note = synthetic [barcode part1]
  source 1..16: mol_type = other DNA
agttcctgtattcggt

SEQ ID NO: 30472 - DNA, 16 bp, synthetic construct
  misc_feature 1..16: note = synthetic [barcode part1]
  source 1..16: mol_type = other DNA
agtcactgcagagacg

SEQ ID NO: 30473 - DNA, 16 bp, synthetic construct
  misc_feature 1..16: note = synthetic [barcode part1]
  source 1..16: mol_type = other DNA
agtaattcctcgtacc

SEQ ID NO: 30474 - DNA, 16 bp, synthetic construct
  misc_feature 1..16: note = synthetic [barcode part1]
  source 1..16: mol_type = other DNA
gtacctacacttggag

SEQ ID NO: 30475 - DNA, 16 bp, synthetic construct
  misc_feature 1..16: note = synthetic [barcode part1]
  source 1..16: mol_type = other DNA
taattgagtgccacgc

SEQ ID NO: 30476 - DNA, 16 bp, synthetic construct
  misc_feature 1..16: note = synthetic [barcode part1]
  source 1..16: mol_type = other DNA
gtccgaactatcttgt

SEQ ID NO: 30477 - DNA, 16 bp, synthetic construct
  misc_feature 1..16: note = synthetic [barcode part1]
  source 1..16: mol_type = other DNA
acaaccgttagagagt

SEQ ID NO: 30478 - DNA, 16 bp, synthetic construct
  misc_feature 1..16: note = synthetic [barcode part1]
  source 1..16: mol_type = other DNA
tagactggaggtgcac

SEQ ID NO: 30479 - DNA, 16 bp, synthetic construct
  misc_feature 1..16: note = synthetic [barcode part1]
  source 1..16: mol_type = other DNA
gcctattcaggattct

SEQ ID NO: 30480 - DNA, 16 bp, synthetic construct
  misc_feature 1..16: note = synthetic [barcode part1]
  source 1..16: mol_type = other DNA
cgtggattctactgtt

SEQ ID NO: 30481 - DNA, 16 bp, synthetic construct
  misc_feature 1..16: note = synthetic [barcode part1]
  source 1..16: mol_type = other DNA
cagtcaatacacgtgc

SEQ ID NO: 30482 - DNA, 16 bp, synthetic construct
  misc_feature 1..16: note = synthetic [barcode part1]
  source 1..16: mol_type = other DNA
gtcacggacggataac

SEQ ID NO: 30483 - DNA, 16 bp, synthetic construct
  misc_feature 1..16: note = synthetic [barcode part1]
  source 1..16: mol_type = other DNA
gttgaacacttgacgc

SEQ ID NO: 30484 - DNA, 16 bp, synthetic construct
  misc_feature 1..16: note = synthetic [barcode part1]
  source 1..16: mol_type = other DNA
gcgatcgtcttgactc

SEQ ID NO: 30485 - DNA, 16 bp, synthetic construct
  misc_feature 1..16: note = synthetic [barcode part1]
  source 1..16: mol_type = other DNA
gtacaattctcgacct

SEQ ID NO: 30486 - DNA, 16 bp, synthetic construct
  misc_feature 1..16: note = synthetic [barcode part1]
  source 1..16: mol_type = other DNA
atacacggagatctcc

SEQ ID NO: 30487 - DNA, 16 bp, synthetic construct
  misc_feature 1..16: note = synthetic [barcode part1]
  source 1..16: mol_type = other DNA
atccttaccacactcc

SEQ ID NO: 30488 - DNA, 16 bp, synthetic construct
  misc_feature 1..16: note = synthetic [barcode part1]
  source 1..16: mol_type = other DNA
aagaacgaacggtctt

SEQ ID NO: 30489 - DNA, 16 bp, synthetic construct
  misc_feature 1..16: note = synthetic [barcode part1]
  source 1..16: mol_type = other DNA
ttcacgcaccggattc

SEQ ID NO: 30490 - DNA, 16 bp, synthetic construct
  misc_feature 1..16: note = synthetic [barcode part1]
  source 1..16: mol_type = other DNA
gtgaacgtacttgtcg

SEQ ID NO: 30491 - DNA, 16 bp, synthetic construct
  misc_feature 1..16: note = synthetic [barcode part1]
  source 1..16: mol_type = other DNA
ttgaccactgaagtcg

SEQ ID NO: 30492 - DNA, 16 bp, synthetic construct
  misc_feature 1..16: note = synthetic [barcode part1]
  source 1..16: mol_type = other DNA
gttcaacagaacacag

SEQ ID NO: 30493 - DNA, 16 bp, synthetic construct
  misc_feature 1..16: note = synthetic [barcode part1]
  source 1..16: mol_type = other DNA
tcactgttagacgtct

SEQ ID NO: 30494 - DNA, 16 bp, synthetic construct
  misc_feature 1..16: note = synthetic [barcode part1]
  source 1..16: mol_type = other DNA
cgtcgactcctagttg

SEQ ID NO: 30495 - DNA, 16 bp, synthetic construct
  misc_feature 1..16: note = synthetic [barcode part1]
  source 1..16: mol_type = other DNA
ttcgttagattcacgc

SEQ ID NO: 30496 - DNA, 16 bp, synthetic construct
  misc_feature 1..16: note = synthetic [barcode part1]
  source 1..16: mol_type = other DNA
atctggtcgatccaag

SEQ ID NO: 30497 - DNA, 16 bp, synthetic construct
  misc_feature 1..16: note = synthetic [barcode part1]
  source 1..16: mol_type = other DNA
tgcaaggttagactag

SEQ ID NO: 30498 - DNA, 16 bp, synthetic construct
  misc_feature 1..16: note = synthetic [barcode part1]
  source 1..16: mol_type = other DNA
ccggactcgtatcttg

SEQ ID NO: 30499 - DNA, 16 bp, synthetic construct
  misc_feature 1..16: note = synthetic [barcode part1]
  source 1..16: mol_type = other DNA
tcaacagaggtacaac

SEQ ID NO: 30500 - DNA, 16 bp, synthetic construct
  misc_feature 1..16: note = synthetic [barcode part1]
  source 1..16: mol_type = other DNA
atcctcgaacgtagac

SEQ ID NO: 30501 - DNA, 16 bp, synthetic construct
  misc_feature 1..16: note = synthetic [barcode part1]
  source 1..16: mol_type = other DNA
tctggttactggtgtt

SEQ ID NO: 30502 - DNA, 16 bp, synthetic construct
  misc_feature 1..16: note = synthetic [barcode part1]
  source 1..16: mol_type = other DNA
gagttggcaacacacg

SEQ ID NO: 30503 - DNA, 16 bp, synthetic construct
  misc_feature 1..16: note = synthetic [barcode part1]
  source 1..16: mol_type = other DNA
atcggtaaggtacctc

SEQ ID NO: 30504 - DNA, 16 bp, synthetic construct
  misc_feature 1..16: note = synthetic [barcode part1]
  source 1..16: mol_type = other DNA
ttagacgtattgcctc

SEQ ID NO: 30505 - DNA, 16 bp, synthetic construct
  misc_feature 1..16: note = synthetic [barcode part1]
  source 1..16: mol_type = other DNA
ttgagactggagtctc

SEQ ID NO: 30506 - DNA, 16 bp, synthetic construct
  misc_feature 1..16: note = synthetic [barcode part1]
  source 1..16: mol_type = other DNA
ataggatcaccactcg

SEQ ID NO: 30507 - DNA, 16 bp, synthetic construct
  misc_feature 1..16: note = synthetic [barcode part1]
  source 1..16: mol_type = other DNA
ccgagaagttgagaag

SEQ ID NO: 30508 - DNA, 16 bp, synthetic construct
  misc_feature 1..16: note = synthetic [barcode part1]
  source 1..16: mol_type = other DNA
caatattgcaggcaag

SEQ ID NO: 30509 - DNA, 16 bp, synthetic construct
  misc_feature 1..16: note = synthetic [barcode part1]
  source 1..16: mol_type = other DNA
tgtccactactcgttc

SEQ ID NO: 30510 - DNA, 16 bp, synthetic construct
  misc_feature 1..16: note = synthetic [barcode part1]
  source 1..16: mol_type = other DNA
cgcacttgtgactcac

SEQ ID NO: 30511 - DNA, 16 bp, synthetic construct
  misc_feature 1..16: note = synthetic [barcode part1]
  source 1..16: mol_type = other DNA
atatacttggaaggcg

SEQ ID NO: 30512 - DNA, 16 bp, synthetic construct
  misc_feature 1..16: note = synthetic [barcode part1]
  source 1..16: mol_type = other DNA
gagtagaaggcgaact

SEQ ID NO: 30513 - DNA, 16 bp, synthetic construct
  misc_feature 1..16: note = synthetic [barcode part1]
  source 1..16: mol_type = other DNA
gcaggttagaacagtt

SEQ ID NO: 30514 - DNA, 16 bp, synthetic construct
  misc_feature 1..16: note = synthetic [barcode part1]
  source 1..16: mol_type = other DNA
acactcctcagatcgc

SEQ ID NO: 30515 - DNA, 16 bp, synthetic construct
  misc_feature 1..16: note = synthetic [barcode part1]
  source 1..16: mol_type = other DNA
tcggacctgtatcctg

SEQ ID NO: 30516 - DNA, 16 bp, synthetic construct
  misc_feature 1..16: note = synthetic [barcode part1]
  source 1..16: mol_type = other DNA
gtgaggactctatacc

SEQ ID NO: 30517 - DNA, 16 bp, synthetic construct
  misc_feature 1..16: note = synthetic [barcode part1]
  source 1..16: mol_type = other DNA
gtccaatatactctcg

SEQ ID NO: 30518 - DNA, 16 bp, synthetic construct
  misc_feature 1..16: note = synthetic [barcode part1]
  source 1..16: mol_type = other DNA
acagaatcctaccgtg

SEQ ID NO: 30519 - DNA, 16 bp, synthetic construct
  misc_feature 1..16: note = synthetic [barcode part1]
  source 1..16: mol_type = other DNA
cacaatccaatctctg

SEQ ID NO: 30520 - DNA, 16 bp, synthetic construct
  misc_feature 1..16: note = synthetic [barcode part1]
  source 1..16: mol_type = other DNA
tacagacaacggaatc

SEQ ID NO: 30521 - DNA, 16 bp, synthetic construct
  misc_feature 1..16: note = synthetic [barcode part1]
  source 1..16: mol_type = other DNA
cgttatcctcgcaggt

SEQ ID NO: 30522 - DNA, 16 bp, synthetic construct
  misc_feature 1..16: note = synthetic [barcode part1]
  source 1..16: mol_type = other DNA
ccgttatcacttgagt

SEQ ID NO: 30523 - DNA, 16 bp, synthetic construct
  misc_feature 1..16: note = synthetic [barcode part1]
  source 1..16: mol_type = other DNA
tgaagtcgtcaactgc

SEQ ID NO: 30524 - DNA, 16 bp, synthetic construct
  misc_feature 1..16: note = synthetic [barcode part1]
  source 1..16: mol_type = other DNA
tgaacggtcacttacg

SEQ ID NO: 30525 - DNA, 16 bp, synthetic construct
  misc_feature 1..16: note = synthetic [barcode part1]
  source 1..16: mol_type = other DNA
tcgtacactaacttcg

SEQ ID NO: 30526 - DNA, 16 bp, synthetic construct
  misc_feature 1..16: note = synthetic [barcode part1]
  source 1..16: mol_type = other DNA
tgtctatcgtcacaac

SEQ ID NO: 30527 - DNA, 16 bp, synthetic construct
  misc_feature 1..16: note = synthetic [barcode part1]
  source 1..16: mol_type = other DNA
tgtgcgagttcaggtt

SEQ ID NO: 30528 - DNA, 16 bp, synthetic construct
  misc_feature 1..16: note = synthetic [barcode part1]
  source 1..16: mol_type = other DNA
cctaccactgacacac

SEQ ID NO: 30529 - DNA, 16 bp, synthetic construct
  misc_feature 1..16: note = synthetic [barcode part1]
  source 1..16: mol_type = other DNA
cctcggaactcacttg

SEQ ID NO: 30530 - DNA, 16 bp, synthetic construct
  misc_feature 1..16: note = synthetic [barcode part1]
  source 1..16: mol_type = other DNA
gtgttgatagtaaggc

SEQ ID NO: 30531 - DNA, 16 bp, synthetic construct
  misc_feature 1..16: note = synthetic [barcode part1]
  source 1..16: mol_type = other DNA
cggtattgtctcagag

SEQ ID NO: 30532 - DNA, 16 bp, synthetic construct
  misc_feature 1..16: note = synthetic [barcode part1]
  source 1..16: mol_type = other DNA
ttacaggtccaatctc

SEQ ID NO: 30533 - DNA, 16 bp, synthetic construct
  misc_feature 1..16: note = synthetic [barcode part1]
  source 1..16: mol_type = other DNA
gacaaggtgtactggc

SEQ ID NO: 30534 - DNA, 16 bp, synthetic construct
  misc_feature 1..16: note = synthetic [barcode part1]
  source 1..16: mol_type = other DNA
cgttggacagagacgt

SEQ ID NO: 30535 - DNA, 16 bp, synthetic construct
  misc_feature 1..16: note = synthetic [barcode part1]
  source 1..16: mol_type = other DNA
tgcactcactcgacac

SEQ ID NO: 30536 - DNA, 16 bp, synthetic construct
  misc_feature 1..16: note = synthetic [barcode part1]
  source 1..16: mol_type = other DNA
cagacgaacgatattg

SEQ ID NO: 30537 - DNA, 16 bp, synthetic construct
  misc_feature 1..16: note = synthetic [barcode part1]
  source 1..16: mol_type = other DNA
ttgtgtcgcaggaact

SEQ ID NO: 30538 - DNA, 16 bp, synthetic construct
  misc_feature 1..16: note = synthetic [barcode part1]
  source 1..16: mol_type = other DNA
tacggcgatcttgaac

SEQ ID NO: 30539 - DNA, 16 bp, synthetic construct
  misc_feature 1..16: note = synthetic [barcode part1]
  source 1..16: mol_type = other DNA
gtccgcagttatcctg

SEQ ID NO: 30540 - DNA, 16 bp, synthetic construct
  misc_feature 1..16: note = synthetic [barcode part1]
  source 1..16: mol_type = other DNA
tcaggtggatactcgt

SEQ ID NO: 30541 - DNA, 16 bp, synthetic construct
  misc_feature 1..16: note = synthetic [barcode part1]
  source 1..16: mol_type = other DNA
tcagacgtagaacagt

SEQ ID NO: 30542 - DNA, 16 bp, synthetic construct
  misc_feature 1..16: note = synthetic [barcode part1]
  source 1..16: mol_type = other DNA
tgaaccggattcgact

SEQ ID NO: 30543 - DNA, 16 bp, synthetic construct
  misc_feature 1..16: note = synthetic [barcode part1]
  source 1..16: mol_type = other DNA
gttctatcagatccac

SEQ ID NO: 30544 - DNA, 16 bp, synthetic construct
  misc_feature 1..16: note = synthetic [barcode part1]
  source 1..16: mol_type = other DNA
caaggaagtcgatact

SEQ ID NO: 30545 - DNA, 16 bp, synthetic construct
  misc_feature 1..16: note = synthetic [barcode part1]
  source 1..16: mol_type = other DNA
aggtcgtgcgagaact

SEQ ID NO: 30546 - DNA, 16 bp, synthetic construct
  misc_feature 1..16: note = synthetic [barcode part1]
  source 1..16: mol_type = other DNA
atcttaacgcgcacag

SEQ ID NO: 30547 - DNA, 16 bp, synthetic construct
  misc_feature 1..16: note = synthetic [barcode part1]
  source 1..16: mol_type = other DNA
tcctgactgtgccaac

SEQ ID NO: 30548 - DNA, 16 bp, synthetic construct
  misc_feature 1..16: note = synthetic [barcode part1]
  source 1..16: mol_type = other DNA
tacctcactgtagact

SEQ ID NO: 30549 - DNA, 16 bp, synthetic construct
  misc_feature 1..16: note = synthetic [barcode part1]
  source 1..16: mol_type = other DNA
gcagaccaaggatcac

SEQ ID NO: 30550 - DNA, 16 bp, synthetic construct
  misc_feature 1..16: note = synthetic [barcode part1]
  source 1..16: mol_type = other DNA
accgcagacaatactc

SEQ ID NO: 30551 - DNA, 16 bp, synthetic construct
  misc_feature 1..16: note = synthetic [barcode part1]
  source 1..16: mol_type = other DNA
gcggtattaaccggtt

SEQ ID NO: 30552 - DNA, 16 bp, synthetic construct
  misc_feature 1..16: note = synthetic [barcode part1]
  source 1..16: mol_type = other DNA
cgatagtgaagtgtac

SEQ ID NO: 30553 - DNA, 16 bp, synthetic construct
  misc_feature 1..16: note = synthetic [barcode part1]
  source 1..16: mol_type = other DNA
ataccagttcctaacc

SEQ ID NO: 30554 - DNA, 16 bp, synthetic construct
  misc_feature 1..16: note = synthetic [barcode part1]
  source 1..16: mol_type = other DNA
gcgtctcaactcgact

SEQ ID NO: 30555 - DNA, 16 bp, synthetic construct
  misc_feature 1..16: note = synthetic [barcode part1]
  source 1..16: mol_type = other DNA
gagtgttcctggatac

SEQ ID NO: 30556 - DNA, 16 bp, synthetic construct
  misc_feature 1..16: note = synthetic [barcode part1]
  source 1..16: mol_type = other DNA
gttggtgagtacacct

SEQ ID NO: 30557 - DNA, 16 bp, synthetic construct
  misc_feature 1..16: note = synthetic [barcode part1]
  source 1..16: mol_type = other DNA
tcgcgttgcagttcac

SEQ ID NO: 30558 - DNA, 16 bp, synthetic construct
  misc_feature 1..16: note = synthetic [barcode part1]
  source 1..16: mol_type = other DNA
acggaggttctgtgtt

SEQ ID NO: 30559 - DNA, 16 bp, synthetic construct
  misc_feature 1..16: note = synthetic [barcode part1]
  source 1..16: mol_type = other DNA
agaagacgcggtcact

SEQ ID NO: 30560 - DNA, 16 bp, synthetic construct
  misc_feature 1..16: note = synthetic [barcode part1]
  source 1..16: mol_type = other DNA
ttggtgtgtaccaacg

SEQ ID NO: 30561 - DNA, 16 bp, synthetic construct
  misc_feature 1..16: note = synthetic [barcode part1]
  source 1..16: mol_type = other DNA
aacagtattcgccgtg

SEQ ID NO: 30562 - DNA, 16 bp, synthetic construct
  misc_feature 1..16: note = synthetic [barcode part1]
  source 1..16: mol_type = other DNA
tagtacaggaacggtt

SEQ ID NO: 30563 - DNA, 16 bp, synthetic construct
  misc_feature 1..16: note = synthetic [barcode part1]
  source 1..16: mol_type = other DNA
taccgaaggtaacctc

SEQ ID NO: 30564 - DNA, 16 bp, synthetic construct
  misc_feature 1..16: note = synthetic [barcode part1]
  source 1..16: mol_type = other DNA
actgtcacgatccaag

SEQ ID NO: 30565 - DNA, 16 bp, synthetic construct
  misc_feature 1..16: note = synthetic [barcode part1]
  source 1..16: mol_type = other DNA
taactcgccactgaag

SEQ ID NO: 30566 - DNA, 16 bp, synthetic construct
  misc_feature 1..16: note = synthetic [barcode part1]
  source 1..16: mol_type = other DNA
tcctctggtctagacg

SEQ ID NO: 30567 - DNA, 16 bp, synthetic construct
  misc_feature 1..16: note = synthetic [barcode part1]
  source 1..16: mol_type = other DNA
agaggcgtctaacggt

SEQ ID NO: 30568 - DNA, 16 bp, synthetic construct
  misc_feature 1..16: note = synthetic [barcode part1]
  source 1..16: mol_type = other DNA
accaccgtaacgattg

SEQ ID NO: 30569 - DNA, 16 bp, synthetic construct
  misc_feature 1..16: note = synthetic [barcode part1]
  source 1..16: mol_type = other DNA
tgaagaagtacgtcac

SEQ ID NO: 30570 - DNA, 16 bp, synthetic construct
  misc_feature 1..16: note = synthetic [barcode part1]
  source 1..16: mol_type = other DNA
ataccactgttgcgag

SEQ ID NO: 30571 - DNA, 16 bp, synthetic construct
  misc_feature 1..16: note = synthetic [barcode part1]
  source 1..16: mol_type = other DNA
tcgacaacactagacc

SEQ ID NO: 30572 - DNA, 16 bp, synthetic construct
  misc_feature 1..16: note = synthetic [barcode part1]
  source 1..16: mol_type = other DNA
gtgtgttggtacgttg

SEQ ID NO: 30573 - DNA, 16 bp, synthetic construct
  misc_feature 1..16: note = synthetic [barcode part1]
  source 1..16: mol_type = other DNA
gtacttcgcgttctct

SEQ ID NO: 30574 - DNA, 16 bp, synthetic construct
  misc_feature 1..16: note = synthetic [barcode part1]
  source 1..16: mol_type = other DNA
gttgtaacaggcaagt

SEQ ID NO: 30575 - DNA, 16 bp, synthetic construct
  misc_feature 1..16: note = synthetic [barcode part1]
  source 1..16: mol_type = other DNA
tcacgaggttcgaact

SEQ ID NO: 30576 - DNA, 16 bp, synthetic construct
  misc_feature 1..16: note = synthetic [barcode part1]
  source 1..16: mol_type = other DNA
acctgaatcacagacc

SEQ ID NO: 30577 - DNA, 16 bp, synthetic construct
  misc_feature 1..16: note = synthetic [barcode part1]
  source 1..16: mol_type = other DNA
cgagacagtgagatag

SEQ ID NO: 30578 - DNA, 16 bp, synthetic construct
  misc_feature 1..16: note = synthetic [barcode part1]
  source 1..16: mol_type = other DNA
cctctaacgtggtcgt

SEQ ID NO: 30579 - DNA, 16 bp, synthetic construct
  misc_feature 1..16: note = synthetic [barcode part1]
  source 1..16: mol_type = other DNA
cgtgttacgactgtag

SEQ ID NO: 30580 - DNA, 16 bp, synthetic construct
  misc_feature 1..16: note = synthetic [barcode part1]
  source 1..16: mol_type = other DNA
cgttaactctcgaccg

SEQ ID NO: 30581 - DNA, 16 bp, synthetic construct
  misc_feature 1..16: note = synthetic [barcode part1]
  source 1..16: mol_type = other DNA
gttggcgaatacactc

SEQ ID NO: 30582 - DNA, 16 bp, synthetic construct
  misc_feature 1..16: note = synthetic [barcode part1]
  source 1..16: mol_type = other DNA
cctcagttcagtgcac

SEQ ID NO: 30583 - DNA, 16 bp, synthetic construct
  misc_feature 1..16: note = synthetic [barcode part1]
  source 1..16: mol_type = other DNA
tcttcggcaattacac

SEQ ID NO: 30584 - DNA, 16 bp, synthetic construct
  misc_feature 1..16: note = synthetic [barcode part1]
  source 1..16: mol_type = other DNA
tgtcactcgttccact

SEQ ID NO: 30585 - DNA, 16 bp, synthetic construct
  misc_feature 1..16: note = synthetic [barcode part1]
  source 1..16: mol_type = other DNA
ttaagtaggcaaggtc

SEQ ID NO: 30586 - DNA, 16 bp, synthetic construct
  misc_feature 1..16: note = synthetic [barcode part1]
  source 1..16: mol_type = other DNA
accgaaggagaagttg

SEQ ID NO: 30587 - DNA, 16 bp, synthetic construct
  misc_feature 1..16: note = synthetic [barcode part1]
  source 1..16: mol_type = other DNA
tatagaggccaagttg

SEQ ID NO: 30588 - DNA, 16 bp, synthetic construct
  misc_feature 1..16: note = synthetic [barcode part1]
  source 1..16: mol_type = other DNA
agatccgaacgacggt

SEQ ID NO: 30589 - DNA, 16 bp, synthetic construct
  misc_feature 1..16: note = synthetic [barcode part1]
  source 1..16: mol_type = other DNA
gtagttattccggtct

SEQ ID NO: 30590 - DNA, 16 bp, synthetic construct
  misc_feature 1..16: note = synthetic [barcode part1]
  source 1..16: mol_type = other DNA
tcctgtgaacctaatc

SEQ ID NO: 30591 - DNA, 16 bp, synthetic construct
  misc_feature 1..16: note = synthetic [barcode part1]
  source 1..16: mol_type = other DNA
actcaccgccttagac

SEQ ID NO: 30592 - DNA, 16 bp, synthetic construct
  misc_feature 1..16: note = synthetic [barcode part1]
  source 1..16: mol_type = other DNA
agtggcctcttcgtac

SEQ ID NO: 30593 - DNA, 16 bp, synthetic construct
  misc_feature 1..16: note = synthetic [barcode part1]
  source 1..16: mol_type = other DNA
aggaagactaggatcg

SEQ ID NO: 30594 - DNA, 16 bp, synthetic construct
  misc_feature 1..16: note = synthetic [barcode part1]
  source 1..16: mol_type = other DNA
ttcggaacggttgatc

SEQ ID NO: 30595 - DNA, 16 bp, synthetic construct
  misc_feature 1..16: note = synthetic [barcode part1]
  source 1..16: mol_type = other DNA
attggtgtgtcttgtc

SEQ ID NO: 30596 - DNA, 16 bp, synthetic construct
  misc_feature 1..16: note = synthetic [barcode part1]
  source 1..16: mol_type = other DNA
ttcctcggtagagtag

SEQ ID NO: 30597 - DNA, 16 bp, synthetic construct
  misc_feature 1..16: note = synthetic [barcode part1]
  source 1..16: mol_type = other DNA
cgattaggtcgattgc

SEQ ID NO: 30598 - DNA, 16 bp, synthetic construct
  misc_feature 1..16: note = synthetic [barcode part1]
  source 1..16: mol_type = other DNA
tagtaacggaacgtgt

SEQ ID NO: 30599 - DNA, 16 bp, synthetic construct
  misc_feature 1..16: note = synthetic [barcode part1]
  source 1..16: mol_type = other DNA
gtctctatctacgcct

SEQ ID NO: 30600 - DNA, 16 bp, synthetic construct
  misc_feature 1..16: note = synthetic [barcode part1]
  source 1..16: mol_type = other DNA
gtcgagaatacgccag

SEQ ID NO: 30601 - DNA, 16 bp, synthetic construct
  misc_feature 1..16: note = synthetic [barcode part1]
  source 1..16: mol_type = other DNA
gagaggtcgaatccac

SEQ ID NO: 30602 - DNA, 16 bp, synthetic construct
  misc_feature 1..16: note = synthetic [barcode part1]
  source 1..16: mol_type = other DNA
tgcagttaggacggtg

SEQ ID NO: 30603 - DNA, 16 bp, synthetic construct
  misc_feature 1..16: note = synthetic [barcode part1]
  source 1..16: mol_type = other DNA
acttccgagtggtctc

SEQ ID NO: 30604 - DNA, 16 bp, synthetic construct
  misc_feature 1..16: note = synthetic [barcode part1]
  source 1..16: mol_type = other DNA
tgccgactgtaatcag

SEQ ID NO: 30605 - DNA, 16 bp, synthetic construct
  misc_feature 1..16: note = synthetic [barcode part1]
  source 1..16: mol_type = other DNA
ttgacctgcgaccact

SEQ ID NO: 30606 - DNA, 16 bp, synthetic construct
  misc_feature 1..16: note = synthetic [barcode part1]
  source 1..16: mol_type = other DNA
agaagtaggcaacttc

SEQ ID NO: 30607 - DNA, 16 bp, synthetic construct
  misc_feature 1..16: note = synthetic [barcode part1]
  source 1..16: mol_type = other DNA
gtagttcctcacgtcg

SEQ ID NO: 30608 - DNA, 16 bp, synthetic construct
  misc_feature 1..16: note = synthetic [barcode part1]
  source 1..16: mol_type = other DNA
tccaacagacgtggag

SEQ ID NO: 30609 - DNA, 16 bp, synthetic construct
  misc_feature 1..16: note = synthetic [barcode part1]
  source 1..16: mol_type = other DNA
gccttcgcctatactt

SEQ ID NO: 30610 - DNA, 16 bp, synthetic construct
  misc_feature 1..16: note = synthetic [barcode part1]
  source 1..16: mol_type = other DNA
attggactagatcgcc

SEQ ID NO: 30611 - DNA, 16 bp, synthetic construct
  misc_feature 1..16: note = synthetic [barcode part1]
  source 1..16: mol_type = other DNA
tctggagactgcagtt

SEQ ID NO: 30612 - DNA, 16 bp, synthetic construct
  misc_feature 1..16: note = synthetic [barcode part1]
  source 1..16: mol_type = other DNA
ttggtccgcaatcacc

SEQ ID NO: 30613 - DNA, 16 bp, synthetic construct
  misc_feature 1..16: note = synthetic [barcode part1]
  source 1..16: mol_type = other DNA
taactggaccgtaacc

SEQ ID NO: 30614 - DNA, 16 bp, synthetic construct
  misc_feature 1..16: note = synthetic [barcode part1]
  source 1..16: mol_type = other DNA
taacgaccttcacgcc

SEQ ID NO: 30615 - DNA, 16 bp, synthetic construct
  misc_feature 1..16: note = synthetic [barcode part1]
  source 1..16: mol_type = other DNA
cggtatacgattcttc

SEQ ID NO: 30616 - DNA, 16 bp, synthetic construct
  misc_feature 1..16: note = synthetic [barcode part1]
  source 1..16: mol_type = other DNA
aacctactagacgtcg

SEQ ID NO: 30617 - DNA, 16 bp, synthetic construct
  misc_feature 1..16: note = synthetic [barcode part1]
  source 1..16: mol_type = other DNA
tcttgtgagaacgcgt

SEQ ID NO: 30618 - DNA, 16 bp, synthetic construct
  misc_feature 1..16: note = synthetic [barcode part1]
  source 1..16: mol_type = other DNA
tatattgtggcgcacg

SEQ ID NO: 30619 - DNA, 16 bp, synthetic construct
  misc_feature 1..16: note = synthetic [barcode part1]
  source 1..16: mol_type = other DNA
tgcaacaggtgaatac

SEQ ID NO: 30620 - DNA, 16 bp, synthetic construct
  misc_feature 1..16: note = synthetic [barcode part1]
  source 1..16: mol_type = other DNA
atctctggtctaacgt

SEQ ID NO: 30621 - DNA, 16 bp, synthetic construct
  misc_feature 1..16: note = synthetic [barcode part1]
  source 1..16: mol_type = other DNA
tggtcgattctggagt

SEQ ID NO: 30622 - DNA, 16 bp, synthetic construct
  misc_feature 1..16: note = synthetic [barcode part1]
  source 1..16: mol_type = other DNA
gaccttaagacaggcg

SEQ ID NO: 30623 - DNA, 16 bp, synthetic construct
  misc_feature 1..16: note = synthetic [barcode part1]
  source 1..16: mol_type = other DNA
gtctgtcacctatctc

SEQ ID NO: 30624 - DNA, 16 bp, synthetic construct
  misc_feature 1..16: note = synthetic [barcode part1]
  source 1..16: mol_type = other DNA
aatcagtccggagtct

SEQ ID NO: 30625 - DNA, 16 bp, synthetic construct
  misc_feature 1..16: note = synthetic [barcode part1]
  source 1..16: mol_type = other DNA
tccaactattgcgtgt

SEQ ID NO: 30626 - DNA, 16 bp, synthetic construct
  misc_feature 1..16: note = synthetic [barcode part1]
  source 1..16: mol_type = other DNA
atattccactatcggc

SEQ ID NO: 30627 - DNA, 16 bp, synthetic construct
  misc_feature 1..16: note = synthetic [barcode part1]
  source 1..16: mol_type = other DNA
tgcaggagtattcctg

SEQ ID NO: 30628 - DNA, 16 bp, synthetic construct
  misc_feature 1..16: note = synthetic [barcode part1]
  source 1..16: mol_type = other DNA
aacgtctcctaattcg

SEQ ID NO: 30629 - DNA, 16 bp, synthetic construct
  misc_feature 1..16: note = synthetic [barcode part1]
  source 1..16: mol_type = other DNA
actaccttgaacgtct

SEQ ID NO: 30630 - DNA, 16 bp, synthetic construct
  misc_feature 1..16: note = synthetic [barcode part1]
  source 1..16: mol_type = other DNA
tgttggatatcggacc

SEQ ID NO: 30631 - DNA, 16 bp, synthetic construct
  misc_feature 1..16: note = synthetic [barcode part1]
  source 1..16: mol_type = other DNA
ttgacgactcgcgttc

SEQ ID NO: 30632 - DNA, 16 bp, synthetic construct
  misc_feature 1..16: note = synthetic [barcode part1]
  source 1..16: mol_type = other DNA
cgtagttgttaccttg

SEQ ID NO: 30633 - DNA, 16 bp, synthetic construct
  misc_feature 1..16: note = synthetic [barcode part1]
  source 1..16: mol_type = other DNA
ccgttactactactcc

SEQ ID NO: 30634 - DNA, 16 bp, synthetic construct
  misc_feature 1..16: note = synthetic [barcode part1]
  source 1..16: mol_type = other DNA
gtcactctacctggac

SEQ ID NO: 30635 - DNA, 16 bp, synthetic construct
  misc_feature 1..16: note = synthetic [barcode part1]
  source 1..16: mol_type = other DNA
agattagtaacacgcg

SEQ ID NO: 30636 - DNA, 16 bp, synthetic construct
  misc_feature 1..16: note = synthetic [barcode part1]
  source 1..16: mol_type = other DNA
ccacttacaccgcagt

SEQ ID NO: 30637 - DNA, 16 bp, synthetic construct
  misc_feature 1..16: note = synthetic [barcode part1]
  source 1..16: mol_type = other DNA
acgagagaccgaactc

SEQ ID NO: 30638 - DNA, 16 bp, synthetic construct
  misc_feature 1..16: note = synthetic [barcode part1]
  source 1..16: mol_type = other DNA
cagtgcgtgatcttcc

SEQ ID NO: 30639 - DNA, 16 bp, synthetic construct
  misc_feature 1..16: note = synthetic [barcode part1]
  source 1..16: mol_type = other DNA
gaagtatcttcgcgtg

SEQ ID NO: 30640 - DNA, 16 bp, synthetic construct
  misc_feature 1..16: note = synthetic [barcode part1]
  source 1..16: mol_type = other DNA
tgtcctggtgagttcc

SEQ ID NO: 30641 - DNA, 16 bp, synthetic construct
  misc_feature 1..16: note = synthetic [barcode part1]
  source 1..16: mol_type = other DNA
gcagttataaccacgc

SEQ ID NO: 30642 - DNA, 16 bp, synthetic construct
  misc_feature 1..16: note = synthetic [barcode part1]
  source 1..16: mol_type = other DNA
agaagtgtatcggact

SEQ ID NO: 30643 - DNA, 16 bp, synthetic construct
  misc_feature 1..16: note = synthetic [barcode part1]
  source 1..16: mol_type = other DNA
attctactagactcgc

SEQ ID NO: 30644 - DNA, 16 bp, synthetic construct
  misc_feature 1..16: note = synthetic [barcode part1]
  source 1..16: mol_type = other DNA
cgtgtggacggaatac

SEQ ID NO: 30645 - DNA, 16 bp, synthetic construct
  misc_feature 1..16: note = synthetic [barcode part1]
  source 1..16: mol_type = other DNA
tagagtcacgtacgtc

SEQ ID NO: 30646 - DNA, 16 bp, synthetic construct
  misc_feature 1..16: note = synthetic [barcode part1]
  source 1..16: mol_type = other DNA
aattctcctctgccac

SEQ ID NO: 30647 - DNA, 16 bp, synthetic construct
  misc_feature 1..16: note = synthetic [barcode part1]
  source 1..16: mol_type = other DNA
gcaccttgttattgac

SEQ ID NO: 30648 - DNA, 16 bp, synthetic construct
  misc_feature 1..16: note = synthetic [barcode part1]
  source 1..16: mol_type = other DNA
caacagtacgttcttc

SEQ ID NO: 30649 - DNA, 16 bp, synthetic construct
  misc_feature 1..16: note = synthetic [barcode part1]
  source 1..16: mol_type = other DNA
cgatacttccgcctag

SEQ ID NO: 30650 - DNA, 16 bp, synthetic construct
  misc_feature 1..16: note = synthetic [barcode part1]
  source 1..16: mol_type = other DNA
aagttcgttatcgtcc

SEQ ID NO: 30651 - DNA, 16 bp, synthetic construct
  misc_feature 1..16: note = synthetic [barcode part1]
  source 1..16: mol_type = other DNA
tatcacgtaaccgacg

SEQ ID NO: 30652 - DNA, 16 bp, synthetic construct
  misc_feature 1..16: note = synthetic [barcode part1]
  source 1..16: mol_type = other DNA
ttggaactaggtagac

SEQ ID NO: 30653 - DNA, 16 bp, synthetic construct
  misc_feature 1..16: note = synthetic [barcode part1]
  source 1..16: mol_type = other DNA
gataaggtggcgaagt

SEQ ID NO: 30654 - DNA, 16 bp, synthetic construct
  misc_feature 1..16: note = synthetic [barcode part1]
  source 1..16: mol_type = other DNA
gaactaagaccaggag

SEQ ID NO: 30655 - DNA, 16 bp, synthetic construct
  misc_feature 1..16: note = synthetic [barcode part1]
  source 1..16: mol_type = other DNA
tctattcctcgtccag

SEQ ID NO: 30656 - DNA, 16 bp, synthetic construct
  misc_feature 1..16: note = synthetic [barcode part1]
  source 1..16: mol_type = other DNA
aaggtggcgttattcc

SEQ ID NO: 30657 - DNA, 16 bp, synthetic construct
  misc_feature 1..16: note = synthetic [barcode part1]
  source 1..16: mol_type = other DNA
tattgcgtaacgccag

SEQ ID NO: 30658 - DNA, 16 bp, synthetic construct
  misc_feature 1..16: note = synthetic [barcode part1]
  source 1..16: mol_type = other DNA
ttcgtatcacggagac

SEQ ID NO: 30659 - DNA, 16 bp, synthetic construct
  misc_feature 1..16: note = synthetic [barcode part1]
  source 1..16: mol_type = other DNA
tcacgaatcgcacaac

SEQ ID NO: 30660 - DNA, 16 bp, synthetic construct
  misc_feature 1..16: note = synthetic [barcode part1]
  source 1..16: mol_type = other DNA
tggattagtgtgaggt

SEQ ID NO: 30661 - DNA, 16 bp, synthetic construct
  misc_feature 1..16: note = synthetic [barcode part1]
  source 1..16: mol_type = other DNA
tcgaaggactaccttg

SEQ ID NO: 30662 - DNA, 16 bp, synthetic construct
  misc_feature 1..16: note = synthetic [barcode part1]
  source 1..16: mol_type = other DNA
ccgttatactccacct

SEQ ID NO: 30663 - DNA, 16 bp, synthetic construct
  misc_feature 1..16: note = synthetic [barcode part1]
  source 1..16: mol_type = other DNA
aggccactatcgaatc

SEQ ID NO: 30664 - DNA, 16 bp, synthetic construct
  misc_feature 1..16: note = synthetic [barcode part1]
  source 1..16: mol_type = other DNA
acggttaccgactctc

SEQ ID NO: 30665 - DNA, 16 bp, synthetic construct
  misc_feature 1..16: note = synthetic [barcode part1]
  source 1..16: mol_type = other DNA
ccttataccggtggtc

SEQ ID NO: 30666 - DNA, 16 bp, synthetic construct
  misc_feature 1..16: note = synthetic [barcode part1]
  source 1..16: mol_type = other DNA
tactggaattcggcac

SEQ ID NO: 30667 - DNA, 16 bp, synthetic construct
  misc_feature 1..16: note = synthetic [barcode part1]
  source 1..16: mol_type = other DNA
accgaatcaggaacgc

SEQ ID NO: 30668 - DNA, 16 bp, synthetic construct
  misc_feature 1..16: note = synthetic [barcode part1]
  source 1..16: mol_type = other DNA
actgttgtcagtggtg

SEQ ID NO: 30669 - DNA, 16 bp, synthetic construct
  misc_feature 1..16: note = synthetic [barcode part1]
  source 1..16: mol_type = other DNA
tatcaagaggtgcagt

SEQ ID NO: 30670 - DNA, 16 bp, synthetic construct
  misc_feature 1..16: note = synthetic [barcode part1]
  source 1..16: mol_type = other DNA
acgtcctctaatagtc

SEQ ID NO: 30671 - DNA, 16 bp, synthetic construct
  misc_feature 1..16: note = synthetic [barcode part1]
  source 1..16: mol_type = other DNA
tggttggaccaatcgt

SEQ ID NO: 30672 - DNA, 16 bp, synthetic construct
  misc_feature 1..16: note = synthetic [barcode part1]
  source 1..16: mol_type = other DNA
cacctcaagtactcgc

SEQ ID NO: 30673 - DNA, 16 bp, synthetic construct
  misc_feature 1..16: note = synthetic [barcode part1]
  source 1..16: mol_type = other DNA
ttcgttgccaatacgt

SEQ ID NO: 30674 - DNA, 16 bp, synthetic construct
  misc_feature 1..16: note = synthetic [barcode part1]
  source 1..16: mol_type = other DNA
ttattcgacctcagac

SEQ ID NO: 30675 - DNA, 16 bp, synthetic construct
  misc_feature 1..16: note = synthetic [barcode part1]
  source 1..16: mol_type = other DNA
gtaggcacctagagtg

SEQ ID NO: 30676 - DNA, 16 bp, synthetic construct
  misc_feature 1..16: note = synthetic [barcode part1]
  source 1..16: mol_type = other DNA
agagagatccttcctg

SEQ ID NO: 30677 - DNA, 16 bp, synthetic construct
  misc_feature 1..16: note = synthetic [barcode part1]
  source 1..16: mol_type = other DNA
ttactggtcctgcgtg

SEQ ID NO: 30678 - DNA, 16 bp, synthetic construct
  misc_feature 1..16: note = synthetic [barcode part1]
  source 1..16: mol_type = other DNA
ccttaattcagtacgc

SEQ ID NO: 30679 - DNA, 16 bp, synthetic construct
  misc_feature 1..16: note = synthetic [barcode part1]
  source 1..16: mol_type = other DNA
gaactgtaagtacgac

SEQ ID NO: 30680 - DNA, 16 bp, synthetic construct
  misc_feature 1..16: note = synthetic [barcode part1]
  source 1..16: mol_type = other DNA
tggaaggaactctctc

SEQ ID NO: 30681 - DNA, 16 bp, synthetic construct
  misc_feature 1..16: note = synthetic [barcode part1]
  source 1..16: mol_type = other DNA
ccgatattgtggtcag

SEQ ID NO: 30682 - DNA, 16 bp, synthetic construct
  misc_feature 1..16: note = synthetic [barcode part1]
  source 1..16: mol_type = other DNA
aactcacctacaggtg

SEQ ID NO: 30683 - DNA, 16 bp, synthetic construct
  misc_feature 1..16: note = synthetic [barcode part1]
  source 1..16: mol_type = other DNA
aacaagtgatactgcg

SEQ ID NO: 30684 - DNA, 16 bp, synthetic construct
  misc_feature 1..16: note = synthetic [barcode part1]
  source 1..16: mol_type = other DNA
aggagtgtaggttgcc

SEQ ID NO: 30685 - DNA, 16 bp, synthetic construct
  misc_feature 1..16: note = synthetic [barcode part1]
  source 1..16: mol_type = other DNA
tcctccaagtaacgag

SEQ ID NO: 30686 - DNA, 16 bp, synthetic construct
  misc_feature 1..16: note = synthetic [barcode part1]
  source 1..16: mol_type = other DNA
agactactgtcaggtc

SEQ ID NO: 30687 - DNA, 16 bp, synthetic construct
  misc_feature 1..16: note = synthetic [barcode part1]
  source 1..16: mol_type = other DNA
gtaggagtatagaggc

SEQ ID NO: 30688 - DNA, 16 bp, synthetic construct
  misc_feature 1..16: note = synthetic [barcode part1]
  source 1..16: mol_type = other DNA
tcacctaatagtgcct

SEQ ID NO: 30689 - DNA, 16 bp, synthetic construct
  misc_feature 1..16: note = synthetic [barcode part1]
  source 1..16: mol_type = other DNA
agagtctctacttgtc

SEQ ID NO: 30690 - DNA, 16 bp, synthetic construct
  misc_feature 1..16: note = synthetic [barcode part1]
  source 1..16: mol_type = other DNA
tcctaccagtagaacg

SEQ ID NO: 30691 - DNA, 16 bp, synthetic construct
  misc_feature 1..16: note = synthetic [barcode part1]
  source 1..16: mol_type = other DNA
gcgaattagaacggcc

SEQ ID NO: 30692 - DNA, 16 bp, synthetic construct
  misc_feature 1..16: note = synthetic [barcode part1]
  source 1..16: mol_type = other DNA
ttgtgacactgcaacg

SEQ ID NO: 30693 - DNA, 16 bp, synthetic construct
  misc_feature 1..16: note = synthetic [barcode part1]
  source 1..16: mol_type = other DNA
gaggactcagttgcag

SEQ ID NO: 30694 - DNA, 16 bp, synthetic construct
  misc_feature 1..16: note = synthetic [barcode part1]
  source 1..16: mol_type = other DNA
ccgtcgaattaccaag

SEQ ID NO: 30695 - DNA, 16 bp, synthetic construct
  misc_feature 1..16: note = synthetic [barcode part1]
  source 1..16: mol_type = other DNA
tagaattcctcgaggc

SEQ ID NO: 30696 - DNA, 16 bp, synthetic construct
  misc_feature 1..16: note = synthetic [barcode part1]
  source 1..16: mol_type = other DNA
gagtggtcaacttctg

SEQ ID NO: 30697 - DNA, 16 bp, synthetic construct
  misc_feature 1..16: note = synthetic [barcode part1]
  source 1..16: mol_type = other DNA
aacaaccttctacgtc

SEQ ID NO: 30698 - DNA, 16 bp, synthetic construct
  misc_feature 1..16: note = synthetic [barcode part1]
  source 1..16: mol_type = other DNA
gcgtagtgagagacct

SEQ ID NO: 30699 - DNA, 16 bp, synthetic construct
  misc_feature 1..16: note = synthetic [barcode part1]
  source 1..16: mol_type = other DNA
aagacggatcctactc

SEQ ID NO: 30700 - DNA, 16 bp, synthetic construct
  misc_feature 1..16: note = synthetic [barcode part1]
  source 1..16: mol_type = other DNA
tggtctataggaacag

SEQ ID NO: 30701 - DNA, 16 bp, synthetic construct
  misc_feature 1..16: note = synthetic [barcode part1]
  source 1..16: mol_type = other DNA
atacttcggtctaacc

SEQ ID NO: 30702 - DNA, 16 bp, synthetic construct
  misc_feature 1..16: note = synthetic [barcode part1]
  source 1..16: mol_type = other DNA
taactgcaggtacctg

SEQ ID NO: 30703 - DNA, 16 bp, synthetic construct
  misc_feature 1..16: note = synthetic [barcode part1]
  source 1..16: mol_type = other DNA
gacacgtacgttggtt

SEQ ID NO: 30704 - DNA, 16 bp, synthetic construct
  misc_feature 1..16: note = synthetic [barcode part1]
  source 1..16: mol_type = other DNA
cgttgtacgtgtgtag

SEQ ID NO: 30705 - DNA, 16 bp, synthetic construct
  misc_feature 1..16: note = synthetic [barcode part1]
  source 1..16: mol_type = other DNA
gagtgcacagtagtcg

SEQ ID NO: 30706 - DNA, 16 bp, synthetic construct
  misc_feature 1..16: note = synthetic [barcode part1]
  source 1..16: mol_type = other DNA
caggtgacaagatccg

SEQ ID NO: 30707 - DNA, 16 bp, synthetic construct
  misc_feature 1..16: note = synthetic [barcode part1]
  source 1..16: mol_type = other DNA
cgccttattacggacc

SEQ ID NO: 30708 - DNA, 16 bp, synthetic construct
  misc_feature 1..16: note = synthetic [barcode part1]
  source 1..16: mol_type = other DNA
tatcgaccggttgtag

SEQ ID NO: 30709 - DNA, 16 bp, synthetic construct
  misc_feature 1..16: note = synthetic [barcode part1]
  source 1..16: mol_type = other DNA
aatcctccacaagtct

SEQ ID NO: 30710 - DNA, 16 bp, synthetic construct
  misc_feature 1..16: note = synthetic [barcode part1]
  source 1..16: mol_type = other DNA
aaccgacgagacttct

SEQ ID NO: 30711 - DNA, 16 bp, synthetic construct
  misc_feature 1..16: note = synthetic [barcode part1]
  source 1..16: mol_type = other DNA
cggtaagatagatctg

SEQ ID NO: 30712 - DNA, 16 bp, synthetic construct
  misc_feature 1..16: note = synthetic [barcode part1]
  source 1..16: mol_type = other DNA
ccacactctcaacgac

SEQ ID NO: 30713 - DNA, 16 bp, synthetic construct
  misc_feature 1..16: note = synthetic [barcode part1]
  source 1..16: mol_type = other DNA
cactaccgtaaccacc

SEQ ID NO: 30714 - DNA, 16 bp, synthetic construct
  misc_feature 1..16: note = synthetic [barcode part1]
  source 1..16: mol_type = other DNA
ccgtctaagactccac

SEQ ID NO: 30715 - DNA, 16 bp, synthetic construct
  misc_feature 1..16: note = synthetic [barcode part1]
  source 1..16: mol_type = other DNA
ccggacttacgtcttg

SEQ ID NO: 30716 - DNA, 16 bp, synthetic construct
  misc_feature 1..16: note = synthetic [barcode part1]
  source 1..16: mol_type = other DNA
taggcgataaggtccg

SEQ ID NO: 30717 - DNA, 16 bp, synthetic construct
  misc_feature 1..16: note = synthetic [barcode part1]
  source 1..16: mol_type = other DNA
tacaccacctctcgag

SEQ ID NO: 30718 - DNA, 16 bp, synthetic construct
  misc_feature 1..16: note = synthetic [barcode part1]
  source 1..16: mol_type = other DNA
cgaacgaattcactcg

SEQ ID NO: 30719 - DNA, 16 bp, synthetic construct
  misc_feature 1..16: note = synthetic [barcode part1]
  source 1..16: mol_type = other DNA
aacgaggatatagtcc

SEQ ID NO: 30720 - DNA, 16 bp, synthetic construct
  misc_feature 1..16: note = synthetic [barcode part1]
  source 1..16: mol_type = other DNA
ccggacgagtaggatt

SEQ ID NO: 30721 - DNA, 16 bp, synthetic construct
  misc_feature 1..16: note = synthetic [barcode part1]
  source 1..16: mol_type = other DNA
cagactgcacacctct

SEQ ID NO: 30722 - DNA, 16 bp, synthetic construct
  misc_feature 1..16: note = synthetic [barcode part1]
  source 1..16: mol_type = other DNA
tcctctctaaccggtt

SEQ ID NO: 30723 - DNA, 16 bp, synthetic construct
  misc_feature 1..16: note = synthetic [barcode part1]
  source 1..16: mol_type = other DNA
tcaggcggtagtagac

SEQ ID NO: 30724 - DNA, 16 bp, synthetic construct
  misc_feature 1..16: note = synthetic [barcode part1]
  source 1..16: mol_type = other DNA
gtaggtctagttcctt

SEQ ID NO: 30725 - DNA, 16 bp, synthetic construct
  misc_feature 1..16: note = synthetic [barcode part1]
  source 1..16: mol_type = other DNA
ttcctatcagaccgcg

SEQ ID NO: 30726 - DNA, 16 bp, synthetic construct
  misc_feature 1..16: note = synthetic [barcode part1]
  source 1..16: mol_type = other DNA
cgaggttatcggttgt

SEQ ID NO: 30727 - DNA, 16 bp, synthetic construct
  misc_feature 1..16: note = synthetic [barcode part1]
  source 1..16: mol_type = other DNA
ttgcctacactcgtct

SEQ ID NO: 30728 - DNA, 16 bp, synthetic construct
  misc_feature 1..16: note = synthetic [barcode part1]
  source 1..16: mol_type = other DNA
tcgtgattacacgcag

SEQ ID NO: 30729 - DNA, 16 bp, synthetic construct
  misc_feature 1..16: note = synthetic [barcode part1]
  source 1..16: mol_type = other DNA
aggatccgtctgtcct

SEQ ID NO: 30730 - DNA, 16 bp, synthetic construct
  misc_feature 1..16: note = synthetic [barcode part1]
  source 1..16: mol_type = other DNA
cctggtggataattcg

SEQ ID NO: 30731 - DNA, 16 bp, synthetic construct
  misc_feature 1..16: note = synthetic [barcode part1]
  source 1..16: mol_type = other DNA
gccttatcggaaggtt

SEQ ID NO: 30732 - DNA, 16 bp, synthetic construct
  misc_feature 1..16: note = synthetic [barcode part1]
  source 1..16: mol_type = other DNA
taggtacacacgatcc

SEQ ID NO: 30733 - DNA, 16 bp, synthetic construct
  misc_feature 1..16: note = synthetic [barcode part1]
  source 1..16: mol_type = other DNA
ttactgtctgtggatc

SEQ ID NO: 30734 - DNA, 16 bp, synthetic construct
  misc_feature 1..16: note = synthetic [barcode part1]
  source 1..16: mol_type = other DNA
gttcggacgttgtcct

SEQ ID NO: 30735 - DNA, 16 bp, synthetic construct
  misc_feature 1..16: note = synthetic [barcode part1]
  source 1..16: mol_type = other DNA
tctaatcgttacgcac

SEQ ID NO: 30736 - DNA, 16 bp, synthetic construct
  misc_feature 1..16: note = synthetic [barcode part1]
  source 1..16: mol_type = other DNA
tagtcagtacgacacc

SEQ ID NO: 30737 - DNA, 16 bp, synthetic construct
  misc_feature 1..16: note = synthetic [barcode part1]
  source 1..16: mol_type = other DNA
tcttggcctctattgc

SEQ ID NO: 30738 - DNA, 16 bp, synthetic construct
  misc_feature 1..16: note = synthetic [barcode part1]
  source 1..16: mol_type = other DNA
tgttggagtagaggcc

SEQ ID NO: 30739 - DNA, 16 bp, synthetic construct
  misc_feature 1..16: note = synthetic [barcode part1]
  source 1..16: mol_type = other DNA
gcaaccaaccaacgtt

SEQ ID NO: 30740 - DNA, 16 bp, synthetic construct
  misc_feature 1..16: note = synthetic [barcode part1]
  source 1..16: mol_type = other DNA
tggtactccacagtag

SEQ ID NO: 30741 - DNA, 16 bp, synthetic construct
  misc_feature 1..16: note = synthetic [barcode part1]
  source 1..16: mol_type = other DNA
accagttaggagagag

SEQ ID NO: 30742 - DNA, 16 bp, synthetic construct
  misc_feature 1..16: note = synthetic [barcode part1]
  source 1..16: mol_type = other DNA
ttggtggtctgacagt

SEQ ID NO: 30743 - DNA, 16 bp, synthetic construct
  misc_feature 1..16: note = synthetic [barcode part1]
  source 1..16: mol_type = other DNA
tggacgtcgtattggt

SEQ ID NO: 30744 - DNA, 16 bp, synthetic construct
  misc_feature 1..16: note = synthetic [barcode part1]
  source 1..16: mol_type = other DNA
ttctccggaacgttcg

SEQ ID NO: 30745 - DNA, 16 bp, synthetic construct
  misc_feature 1..16: note = synthetic [barcode part1]
  source 1..16: mol_type = other DNA
agtgattccgagtcgt

SEQ ID NO: 30746 - DNA, 16 bp, synthetic construct
  misc_feature 1..16: note = synthetic [barcode part1]
  source 1..16: mol_type = other DNA
aggagtgttgttagac

SEQ ID NO: 30747 - DNA, 16 bp, synthetic construct
  misc_feature 1..16: note = synthetic [barcode part1]
  source 1..16: mol_type = other DNA
gtagttgttaacctcc

SEQ ID NO: 30748 - DNA, 16 bp, synthetic construct
  misc_feature 1..16: note = synthetic [barcode part1]
  source 1..16: mol_type = other DNA
gtagtcgacgccaatt

SEQ ID NO: 30749 - DNA, 16 bp, synthetic construct
  misc_feature 1..16: note = synthetic [barcode part1]
  source 1..16: mol_type = other DNA
gtgagttgttaccttc

SEQ ID NO: 30750 - DNA, 16 bp, synthetic construct
  misc_feature 1..16: note = synthetic [barcode part1]
  source 1..16: mol_type = other DNA
ccagtgcgagattgag

SEQ ID NO: 30751 - DNA, 16 bp, synthetic construct
  misc_feature 1..16: note = synthetic [barcode part1]
  source 1..16: mol_type = other DNA
agtgtaacggaccgtg

SEQ ID NO: 30752 - DNA, 16 bp, synthetic construct
  misc_feature 1..16: note = synthetic [barcode part1]
  source 1..16: mol_type = other DNA
agttcgttcgtgaacg

SEQ ID NO: 30753 - DNA, 16 bp, synthetic construct
  misc_feature 1..16: note = synthetic [barcode part1]
  source 1..16: mol_type = other DNA
gcgtagtagagttagt

SEQ ID NO: 30754 - DNA, 16 bp, synthetic construct
  misc_feature 1..16: note = synthetic [barcode part1]
  source 1..16: mol_type = other DNA
tcctccagtaattacg

SEQ ID NO: 30755 - DNA, 16 bp, synthetic construct
  misc_feature 1..16: note = synthetic [barcode part1]
  source 1..16: mol_type = other DNA
cgtgtaaggcagtgac

SEQ ID NO: 30756 - DNA, 16 bp, synthetic construct
  misc_feature 1..16: note = synthetic [barcode part1]
  source 1..16: mol_type = other DNA
ataccaccaagtagag

SEQ ID NO: 30757 - DNA, 16 bp, synthetic construct
  misc_feature 1..16: note = synthetic [barcode part1]
  source 1..16: mol_type = other DNA
caaggaggtgtcaacc

SEQ ID NO: 30758 - DNA, 16 bp, synthetic construct
  misc_feature 1..16: note = synthetic [barcode part1]
  source 1..16: mol_type = other DNA
gtacaggaagtgcaag

SEQ ID NO: 30759 - DNA, 16 bp, synthetic construct
  misc_feature 1..16: note = synthetic [barcode part1]
  source 1..16: mol_type = other DNA
gagtacgtcaggtcag

SEQ ID NO: 30760 - DNA, 16 bp, synthetic construct
  misc_feature 1..16: note = synthetic [barcode part1]
  source 1..16: mol_type = other DNA
acggtagttcacggag

SEQ ID NO: 30761 - DNA, 16 bp, synthetic construct
  misc_feature 1..16: note = synthetic [barcode part1]
  source 1..16: mol_type = other DNA
gacaaccttggcagtt

SEQ ID NO: 30762 - DNA, 16 bp, synthetic construct
  misc_feature 1..16: note = synthetic [barcode part1]
  source 1..16: mol_type = other DNA
gataccaatcggttgc

SEQ ID NO: 30763 - DNA, 16 bp, synthetic construct
  misc_feature 1..16: note = synthetic [barcode part1]
  source 1..16: mol_type = other DNA
atacggccagtacact

SEQ ID NO: 30764 - DNA, 16 bp, synthetic construct
  misc_feature 1..16: note = synthetic [barcode part1]
  source 1..16: mol_type = other DNA
caatcgacaacgttgc

SEQ ID NO: 30765 - DNA, 16 bp, synthetic construct
  misc_feature 1..16: note = synthetic [barcode part1]
  source 1..16: mol_type = other DNA
aacgcgagttcttgtg

SEQ ID NO: 30766 - DNA, 16 bp, synthetic construct
  misc_feature 1..16: note = synthetic [barcode part1]
  source 1..16: mol_type = other DNA
gtgtagttgtaaccgc

SEQ ID NO: 30767 - DNA, 16 bp, synthetic construct
  misc_feature 1..16: note = synthetic [barcode part1]
  source 1..16: mol_type = other DNA
actcttgaagtcacct

SEQ ID NO: 30768 - DNA, 16 bp, synthetic construct
  misc_feature 1..16: note = synthetic [barcode part1]
  source 1..16: mol_type = other DNA
ttgcgaggcgactatt

SEQ ID NO: 30769 - DNA, 16 bp, synthetic construct
  misc_feature 1..16: note = synthetic [barcode part1]
  source 1..16: mol_type = other DNA
tgcagaggtatctctg

SEQ ID NO: 30770 - DNA, 16 bp, synthetic construct
  misc_feature 1..16: note = synthetic [barcode part1]
  source 1..16: mol_type = other DNA
ttcgaccagttggaac

SEQ ID NO: 30771 - DNA, 16 bp, synthetic construct
  misc_feature 1..16: note = synthetic [barcode part1]
  source 1..16: mol_type = other DNA
gttaattggccaaccg

SEQ ID NO: 30772 - DNA, 16 bp, synthetic construct
  misc_feature 1..16: note = synthetic [barcode part1]
  source 1..16: mol_type = other DNA
aatccgtgaacttgcg

SEQ ID NO: 30773 - DNA, 16 bp, synthetic construct
  misc_feature 1..16: note = synthetic [barcode part1]
  source 1..16: mol_type = other DNA
tgccagagacacgagt

SEQ ID NO: 30774 - DNA, 16 bp, synthetic construct
  misc_feature 1..16: note = synthetic [barcode part1]
  source 1..16: mol_type = other DNA
gacaagagtcacctct

SEQ ID NO: 30775 - DNA, 16 bp, synthetic construct
  misc_feature 1..16: note = synthetic [barcode part1]
  source 1..16: mol_type = other DNA
caatcgaacactgtgc

SEQ ID NO: 30776 - DNA, 16 bp, synthetic construct
  misc_feature 1..16: note = synthetic [barcode part1]
  source 1..16: mol_type = other DNA
gaggtaacgagtatct

SEQ ID NO: 30777 - DNA, 16 bp, synthetic construct
  misc_feature 1..16: note = synthetic [barcode part1]
  source 1..16: mol_type = other DNA
gcggataacctcagag

SEQ ID NO: 30778 - DNA, 16 bp, synthetic construct
  misc_feature 1..16: note = synthetic [barcode part1]
  source 1..16: mol_type = other DNA
caggaaccttacgttg

SEQ ID NO: 30779 - DNA, 16 bp, synthetic construct
  misc_feature 1..16: note = synthetic [barcode part1]
  source 1..16: mol_type = other DNA
agtatccacaagacag

SEQ ID NO: 30780 - DNA, 16 bp, synthetic construct
  misc_feature 1..16: note = synthetic [barcode part1]
  source 1..16: mol_type = other DNA
tatccaggtgcctaag

SEQ ID NO: 30781 - DNA, 16 bp, synthetic construct
  misc_feature 1..16: note = synthetic [barcode part1]
  source 1..16: mol_type = other DNA
tacgtgacaagaggcc

SEQ ID NO: 30782 - DNA, 16 bp, synthetic construct
  misc_feature 1..16: note = synthetic [barcode part1]
  source 1..16: mol_type = other DNA
taggccggttgaattc

SEQ ID NO: 30783 - DNA, 16 bp, synthetic construct
  misc_feature 1..16: note = synthetic [barcode part1]
  source 1..16: mol_type = other DNA
cgtagacttaccttgt

SEQ ID NO: 30784 - DNA, 16 bp, synthetic construct
  misc_feature 1..16: note = synthetic [barcode part1]
  source 1..16: mol_type = other DNA
tccaccgtgatcttct

SEQ ID NO: 30785 - DNA, 16 bp, synthetic construct
  misc_feature 1..16: note = synthetic [barcode part1]
  source 1..16: mol_type = other DNA
gaaggatctatcgcct

SEQ ID NO: 30786 - DNA, 16 bp, synthetic construct
  misc_feature 1..16: note = synthetic [barcode part1]
  source 1..16: mol_type = other DNA
aggaggcctgttatct

SEQ ID NO: 30787 - DNA, 16 bp, synthetic construct
  misc_feature 1..16: note = synthetic [barcode part1]
  source 1..16: mol_type = other DNA
actcgttgtctcaagt

SEQ ID NO: 30788 - DNA, 16 bp, synthetic construct
  misc_feature 1..16: note = synthetic [barcode part1]
  source 1..16: mol_type = other DNA
acttccaggacgtagt

SEQ ID NO: 30789 - DNA, 16 bp, synthetic construct
  misc_feature 1..16: note = synthetic [barcode part1]
  source 1..16: mol_type = other DNA
tcgttgacttcgtgcg

SEQ ID NO: 30790 - DNA, 16 bp, synthetic construct
  misc_feature 1..16: note = synthetic [barcode part1]
  source 1..16: mol_type = other DNA
cagttccaatccttcc

SEQ ID NO: 30791 - DNA, 16 bp, synthetic construct
  misc_feature 1..16: note = synthetic [barcode part1]
  source 1..16: mol_type = other DNA
agaacctgttccagac

SEQ ID NO: 30792 - DNA, 16 bp, synthetic construct
  misc_feature 1..16: note = synthetic [barcode part1]
  source 1..16: mol_type = other DNA
ccactgcgtagtaagt

SEQ ID NO: 30793 - DNA, 16 bp, synthetic construct
  misc_feature 1..16: note = synthetic [barcode part1]
  source 1..16: mol_type = other DNA
cgttgtcgttctctac

SEQ ID NO: 30794 - DNA, 16 bp, synthetic construct
  misc_feature 1..16: note = synthetic [barcode part1]
  source 1..16: mol_type = other DNA
agttgtgacacgtcac

SEQ ID NO: 30795 - DNA, 16 bp, synthetic construct
  misc_feature 1..16: note = synthetic [barcode part1]
  source 1..16: mol_type = other DNA
tgtctgccttaggacc

SEQ ID NO: 30796 - DNA, 16 bp, synthetic construct
  misc_feature 1..16: note = synthetic [barcode part1]
  source 1..16: mol_type = other DNA
atccaggaagtaacgt

SEQ ID NO: 30797 - DNA, 16 bp, synthetic construct
  misc_feature 1..16: note = synthetic [barcode part1]
  source 1..16: mol_type = other DNA
cgaatcaaggacacgc

SEQ ID NO: 30798 - DNA, 16 bp, synthetic construct
  misc_feature 1..16: note = synthetic [barcode part1]
  source 1..16: mol_type = other DNA
ccagtctatccgaacc

SEQ ID NO: 30799 - DNA, 16 bp, synthetic construct
  misc_feature 1..16: note = synthetic [barcode part1]
  source 1..16: mol_type = other DNA
cgatctactatacctg

SEQ ID NO: 30800 - DNA, 16 bp, synthetic construct
  misc_feature 1..16: note = synthetic [barcode part1]
  source 1..16: mol_type = other DNA
tggtcgacgatatcgt

SEQ ID NO: 30801 - DNA, 16 bp, synthetic construct
  misc_feature 1..16: note = synthetic [barcode part1]
  source 1..16: mol_type = other DNA
accgaaggattaggag

SEQ ID NO: 30802 - DNA, 16 bp, synthetic construct
  misc_feature 1..16: note = synthetic [barcode part1]
  source 1..16: mol_type = other DNA
cgttactcctgtaagt

SEQ ID NO: 30803 - DNA, 16 bp, synthetic construct
  misc_feature 1..16: note = synthetic [barcode part1]
  source 1..16: mol_type = other DNA
gtaactgtacggttgc

SEQ ID NO: 30804 - DNA, 16 bp, synthetic construct
  misc_feature 1..16: note = synthetic [barcode part1]
  source 1..16: mol_type = other DNA
cgaaggttccgtattg

SEQ ID NO: 30805 - DNA, 16 bp, synthetic construct
  misc_feature 1..16: note = synthetic [barcode part1]
  source 1..16: mol_type = other DNA
tggaactaatcggtcc

SEQ ID NO: 30806 - DNA, 16 bp, synthetic construct
  misc_feature 1..16: note = synthetic [barcode part1]
  source 1..16: mol_type = other DNA
agatcggtctcgattg

SEQ ID NO: 30807 - DNA, 16 bp, synthetic construct
  misc_feature 1..16: note = synthetic [barcode part1]
  source 1..16: mol_type = other DNA
tactctagacaaggcc

SEQ ID NO: 30808 - DNA, 16 bp, synthetic construct
  misc_feature 1..16: note = synthetic [barcode part1]
  source 1..16: mol_type = other DNA
gacctccttaagtgtt

SEQ ID NO: 30809 - DNA, 16 bp, synthetic construct
  misc_feature 1..16: note = synthetic [barcode part1]
  source 1..16: mol_type = other DNA
ttatccaacaacgtcc

SEQ ID NO: 30810 - DNA, 16 bp, synthetic construct
  misc_feature 1..16: note = synthetic [barcode part1]
  source 1..16: mol_type = other DNA
attggaccttgtatcc

SEQ ID NO: 30811 - DNA, 16 bp, synthetic construct
  misc_feature 1..16: note = synthetic [barcode part1]
  source 1..16: mol_type = other DNA
attaggacttcggtcg

SEQ ID NO: 30812 - DNA, 16 bp, synthetic construct
  misc_feature 1..16: note = synthetic [barcode part1]
  source 1..16: mol_type = other DNA
actcaggcctaccact

SEQ ID NO: 30813 - DNA, 16 bp, synthetic construct
  misc_feature 1..16: note = synthetic [barcode part1]
  source 1..16: mol_type = other DNA
ccttgcgtaacaactt

SEQ ID NO: 30814 - DNA, 16 bp, synthetic construct
  misc_feature 1..16: note = synthetic [barcode part1]
  source 1..16: mol_type = other DNA
gttacaagtctgtcct

SEQ ID NO: 30815 - DNA, 16 bp, synthetic construct
  misc_feature 1..16: note = synthetic [barcode part1]
  source 1..16: mol_type = other DNA
tctccgagtataccgc

SEQ ID NO: 30816 - DNA, 16 bp, synthetic construct
  misc_feature 1..16: note = synthetic [barcode part1]
  source 1..16: mol_type = other DNA
aattatccgtctccag

SEQ ID NO: 30817 - DNA, 16 bp, synthetic construct
  misc_feature 1..16: note = synthetic [barcode part1]
  source 1..16: mol_type = other DNA
aattgagtccgactcg

SEQ ID NO: 30818 - DNA, 16 bp, synthetic construct
  misc_feature 1..16: note = synthetic [barcode part1]
  source 1..16: mol_type = other DNA
aagacttccgtgacgt

SEQ ID NO: 30819 - DNA, 16 bp, synthetic construct
  misc_feature 1..16: note = synthetic [barcode part1]
  source 1..16: mol_type = other DNA
tcaggttactgccaag

SEQ ID NO: 30820 - DNA, 16 bp, synthetic construct
  misc_feature 1..16: note = synthetic [barcode part1]
  source 1..16: mol_type = other DNA
cgaagttctctcttcc

SEQ ID NO: 30821 - DNA, 16 bp, synthetic construct
  misc_feature 1..16: note = synthetic [barcode part1]
  source 1..16: mol_type = other DNA
caatagtccttgcgtt

SEQ ID NO: 30822 - DNA, 16 bp, synthetic construct
  misc_feature 1..16: note = synthetic [barcode part1]
  source 1..16: mol_type = other DNA
acaagtcaagaaccac

SEQ ID NO: 30823 - DNA, 16 bp, synthetic construct
  misc_feature 1..16: note = synthetic [barcode part1]
  source 1..16: mol_type = other DNA
gagagtgtaggtcacc

SEQ ID NO: 30824 - DNA, 16 bp, synthetic construct
  misc_feature 1..16: note = synthetic [barcode part1]
  source 1..16: mol_type = other DNA
cagacagagtgagtag

SEQ ID NO: 30825 - DNA, 16 bp, synthetic construct
  misc_feature 1..16: note = synthetic [barcode part1]
  source 1..16: mol_type = other DNA
aacaatcctcttgcgt

SEQ ID NO: 30826 - DNA, 16 bp, synthetic construct
  misc_feature 1..16: note = synthetic [barcode part1]
  source 1..16: mol_type = other DNA
gaccgtacctcttggt

SEQ ID NO: 30827 - DNA, 16 bp, synthetic construct
  misc_feature 1..16: note = synthetic [barcode part1]
  source 1..16: mol_type = other DNA
ttgttggtgacctgag

SEQ ID NO: 30828 - DNA, 16 bp, synthetic construct
  misc_feature 1..16: note = synthetic [barcode part1]
  source 1..16: mol_type = other DNA
cagaatcgcgttacac

SEQ ID NO: 30829 - DNA, 16 bp, synthetic construct
  misc_feature 1..16: note = synthetic [barcode part1]
  source 1..16: mol_type = other DNA
cgttctacgaagtggt

SEQ ID NO: 30830 - DNA, 16 bp, synthetic construct
  misc_feature 1..16: note = synthetic [barcode part1]
  source 1..16: mol_type = other DNA
aactcgtggcaaggtg

SEQ ID NO: 30831 - DNA, 16 bp, synthetic construct
  misc_feature 1..16: note = synthetic [barcode part1]
  source 1..16: mol_type = other DNA
aacttctctcctggtc

SEQ ID NO: 30832 - DNA, 16 bp, synthetic construct
  misc_feature 1..16: note = synthetic [barcode part1]
  source 1..16: mol_type = other DNA
gtacttgcgttgtccg

SEQ ID NO: 30833 - DNA, 16 bp, synthetic construct
  misc_feature 1..16: note = synthetic [barcode part1]
  source 1..16: mol_type = other DNA
gaaggcaatccgacac

SEQ ID NO: 30834 - DNA, 16 bp, synthetic construct
  misc_feature 1..16: note = synthetic [barcode part1]
  source 1..16: mol_type = other DNA
gatcggttaacgtcgt

SEQ ID NO: 30835 - DNA, 16 bp, synthetic construct
  misc_feature 1..16: note = synthetic [barcode part1]
  source 1..16: mol_type = other DNA
attggtatccgacctt

SEQ ID NO: 30836 - DNA, 16 bp, synthetic construct
  misc_feature 1..16: note = synthetic [barcode part1]
  source 1..16: mol_type = other DNA
tctcgtctatctgaag

SEQ ID NO: 30837 - DNA, 16 bp, synthetic construct
  misc_feature 1..16: note = synthetic [barcode part1]
  source 1..16: mol_type = other DNA
tctaataacttccgcg

SEQ ID NO: 30838 - DNA, 16 bp, synthetic construct
  misc_feature 1..16: note = synthetic [barcode part1]
  source 1..16: mol_type = other DNA
tcacaagtgaggaatc

SEQ ID NO: 30839 - DNA, 16 bp, synthetic construct
  misc_feature 1..16: note = synthetic [barcode part1]
  source 1..16: mol_type = other DNA
tctgtatcggtggtcc

SEQ ID NO: 30840 - DNA, 16 bp, synthetic construct
  misc_feature 1..16: note = synthetic [barcode part1]
  source 1..16: mol_type = other DNA
ccaccgagttagattg

SEQ ID NO: 30841 - DNA, 16 bp, synthetic construct
  misc_feature 1..16: note = synthetic [barcode part1]
  source 1..16: mol_type = other DNA
aatccgaactatcggc

SEQ ID NO: 30842 - DNA, 16 bp, synthetic construct
  misc_feature 1..16: note = synthetic [barcode part1]
  source 1..16: mol_type = other DNA
caccgaacttagtggt

SEQ ID NO: 30843 - DNA, 16 bp, synthetic construct
  misc_feature 1..16: note = synthetic [barcode part1]
  source 1..16: mol_type = other DNA
cgaagaagtacgttgt

SEQ ID NO: 30844 - DNA, 16 bp, synthetic construct
  misc_feature 1..16: note = synthetic [barcode part1]
  source 1..16: mol_type = other DNA
actatcggactaccag

SEQ ID NO: 30845 - DNA, 16 bp, synthetic construct
  misc_feature 1..16: note = synthetic [barcode part1]
  source 1..16: mol_type = other DNA
gtaacggactcgaacg

SEQ ID NO: 30846 - DNA, 16 bp, synthetic construct
  misc_feature 1..16: note = synthetic [barcode part1]
  source 1..16: mol_type = other DNA
aacagaggcacaatct

SEQ ID NO: 30847 - DNA, 16 bp, synthetic construct
  misc_feature 1..16: note = synthetic [barcode part1]
  source 1..16: mol_type = other DNA
ttgtgtccttgtgcct

SEQ ID NO: 30848 - DNA, 16 bp, synthetic construct
  misc_feature 1..16: note = synthetic [barcode part1]
  source 1..16: mol_type = other DNA
gaacgtctcgccttgt

SEQ ID NO: 30849 - DNA, 16 bp, synthetic construct
  misc_feature 1..16: note = synthetic [barcode part1]
  source 1..16: mol_type = other DNA
tcgtacctaccaggtc

SEQ ID NO: 30850 - DNA, 16 bp, synthetic construct
  misc_feature 1..16: note = synthetic [barcode part1]
  source 1..16: mol_type = other DNA
accttgaaccgtaacg

SEQ ID NO: 30851 - DNA, 16 bp, synthetic construct
  misc_feature 1..16: note = synthetic [barcode part1]
  source 1..16: mol_type = other DNA
aactcactcacagacg

SEQ ID NO: 30852 - DNA, 16 bp, synthetic construct
  misc_feature 1..16: note = synthetic [barcode part1]
  source 1..16: mol_type = other DNA
gccgttgaagatatag

SEQ ID NO: 30853 - DNA, 16 bp, synthetic construct
  misc_feature 1..16: note = synthetic [barcode part1]
  source 1..16: mol_type = other DNA
cgaccgtacgaagtag

SEQ ID NO: 30854 - DNA, 16 bp, synthetic construct
  misc_feature 1..16: note = synthetic [barcode part1]
  source 1..16: mol_type = other DNA
ataactaccgactctc

SEQ ID NO: 30855 - DNA, 16 bp, synthetic construct
  misc_feature 1..16: note = synthetic [barcode part1]
  source 1..16: mol_type = other DNA
gtctctctctcaatcg

SEQ ID NO: 30856 - DNA, 16 bp, synthetic construct
  misc_feature 1..16: note = synthetic [barcode part1]
  source 1..16: mol_type = other DNA
cctaccaatcgttctc

SEQ ID NO: 30857 - DNA, 16 bp, synthetic construct
  misc_feature 1..16: note = synthetic [barcode part1]
  source 1..16: mol_type = other DNA
tcggtgcaactccttg

SEQ ID NO: 30858 - DNA, 16 bp, synthetic construct
  misc_feature 1..16: note = synthetic [barcode part1]
  source 1..16: mol_type = other DNA
acagatcgaggcgatc

SEQ ID NO: 30859 - DNA, 16 bp, synthetic construct
  misc_feature 1..16: note = synthetic [barcode part1]
  source 1..16: mol_type = other DNA
ccttccaagatatctg

SEQ ID NO: 30860 - DNA, 16 bp, synthetic construct
  misc_feature 1..16: note = synthetic [barcode part1]
  source 1..16: mol_type = other DNA
gacgcaaggtagtctg

SEQ ID NO: 30861 - DNA, 16 bp, synthetic construct
  misc_feature 1..16: note = synthetic [barcode part1]
  source 1..16: mol_type = other DNA
gtggattgtgcagttc

SEQ ID NO: 30862 - DNA, 16 bp, synthetic construct
  misc_feature 1..16: note = synthetic [barcode part1]
  source 1..16: mol_type = other DNA
aacagtcctccacgtc

SEQ ID NO: 30863 - DNA, 16 bp, synthetic construct
  misc_feature 1..16: note = synthetic [barcode part1]
  source 1..16: mol_type = other DNA
ttggttgtcagagtcg

SEQ ID NO: 30864 - DNA, 16 bp, synthetic construct
  misc_feature 1..16: note = synthetic [barcode part1]
  source 1..16: mol_type = other DNA
ttccgtacctctgtgt

SEQ ID NO: 30865 - DNA, 16 bp, synthetic construct
  misc_feature 1..16: note = synthetic [barcode part1]
  source 1..16: mol_type = other DNA
tacagaacgatccaag

SEQ ID NO: 30866 - DNA, 16 bp, synthetic construct
  misc_feature 1..16: note = synthetic [barcode part1]
  source 1..16: mol_type = other DNA
cggatatcacaagtcc

SEQ ID NO: 30867 - DNA, 16 bp, synthetic construct
  misc_feature 1..16: note = synthetic [barcode part1]
  source 1..16: mol_type = other DNA
ccaagtgtgttactct

SEQ ID NO: 30868 - DNA, 16 bp, synthetic construct
  misc_feature 1..16: note = synthetic [barcode part1]
  source 1..16: mol_type = other DNA
agacgttgatagagtc

SEQ ID NO: 30869 - DNA, 16 bp, synthetic construct
  misc_feature 1..16: note = synthetic [barcode part1]
  source 1..16: mol_type = other DNA
tgagtgcaaggcaatt

SEQ ID NO: 30870 - DNA, 16 bp, synthetic construct
  misc_feature 1..16: note = synthetic [barcode part1]
  source 1..16: mol_type = other DNA
agaaccgactacttcg

SEQ ID NO: 30871 - DNA, 16 bp, synthetic construct
  misc_feature 1..16: note = synthetic [barcode part1]
  source 1..16: mol_type = other DNA
cgcgtctggcaatctt

SEQ ID NO: 30872 - DNA, 16 bp, synthetic construct
  misc_feature 1..16: note = synthetic [barcode part1]
  source 1..16: mol_type = other DNA
caatcttccggaagac

SEQ ID NO: 30873 - DNA, 16 bp, synthetic construct
  misc_feature 1..16: note = synthetic [barcode part1]
  source 1..16: mol_type = other DNA
tgtacaggcctctcac

SEQ ID NO: 30874 - DNA, 16 bp, synthetic construct
  misc_feature 1..16: note = synthetic [barcode part1]
  source 1..16: mol_type = other DNA
gactgtggatcggagt

SEQ ID NO: 30875 - DNA, 16 bp, synthetic construct
  misc_feature 1..16: note = synthetic [barcode part1]
  source 1..16: mol_type = other DNA
tatccttcgcagagag

SEQ ID NO: 30876 - DNA, 16 bp, synthetic construct
  misc_feature 1..16: note = synthetic [barcode part1]
  source 1..16: mol_type = other DNA
taatcgcggcgtattg

SEQ ID NO: 30877 - DNA, 16 bp, synthetic construct
  misc_feature 1..16: note = synthetic [barcode part1]
  source 1..16: mol_type = other DNA
tcttcagaccaacact

SEQ ID NO: 30878 - DNA, 16 bp, synthetic construct
  misc_feature 1..16: note = synthetic [barcode part1]
  source 1..16: mol_type = other DNA
aattacgagtcctcct

SEQ ID NO: 30879 - DNA, 16 bp, synthetic construct
  misc_feature 1..16: note = synthetic [barcode part1]
  source 1..16: mol_type = other DNA
taacaccgtgaacaag

SEQ ID NO: 30880 - DNA, 16 bp, synthetic construct
  misc_feature 1..16: note = synthetic [barcode part1]
  source 1..16: mol_type = other DNA
tgcctactgaataggc

SEQ ID NO: 30881 - DNA, 16 bp, synthetic construct
  misc_feature 1..16: note = synthetic [barcode part1]
  source 1..16: mol_type = other DNA
cgcaataagacggacc

SEQ ID NO: 30882 - DNA, 16 bp, synthetic construct
  misc_feature 1..16: note = synthetic [barcode part1]
  source 1..16: mol_type = other DNA
caacggagatatctag

SEQ ID NO: 30883 - DNA, 16 bp, synthetic construct
  misc_feature 1..16: note = synthetic [barcode part1]
  source 1..16: mol_type = other DNA
atccagagtgagttcc

SEQ ID NO: 30884 - DNA, 16 bp, synthetic construct
  misc_feature 1..16: note = synthetic [barcode part1]
  source 1..16: mol_type = other DNA
cctaagttcgtcaccg

SEQ ID NO: 30885 - DNA, 16 bp, synthetic construct
  misc_feature 1..16: note = synthetic [barcode part1]
  source 1..16: mol_type = other DNA
cactagtgcactaacg

SEQ ID NO: 30886 - DNA, 16 bp, synthetic construct
  misc_feature 1..16: note = synthetic [barcode part1]
  source 1..16: mol_type = other DNA
ttctgtggtacctcct

SEQ ID NO: 30887 - DNA, 16 bp, synthetic construct
  misc_feature 1..16: note = synthetic [barcode part1]
  source 1..16: mol_type = other DNA
tccagtctcttgatcc

SEQ ID NO: 30888 - DNA, 16 bp, synthetic construct
  misc_feature 1..16: note = synthetic [barcode part1]
  source 1..16: mol_type = other DNA
gacttctggagactgt

SEQ ID NO: 30889 - DNA, 16 bp, synthetic construct
  misc_feature 1..16: note = synthetic [barcode part1]
  source 1..16: mol_type = other DNA
cggttcgacaagagtg

SEQ ID NO: 30890 - DNA, 16 bp, synthetic construct
  misc_feature 1..16: note = synthetic [barcode part1]
  source 1..16: mol_type = other DNA
taggacgtaccttacg

SEQ ID NO: 30891 - DNA, 16 bp, synthetic construct
  misc_feature 1..16: note = synthetic [barcode part1]
  source 1..16: mol_type = other DNA
accagtacggattcac

SEQ ID NO: 30892 - DNA, 16 bp, synthetic construct
  misc_feature 1..16: note = synthetic [barcode part1]
  source 1..16: mol_type = other DNA
ccactcgttcagaatt

SEQ ID NO: 30893 - DNA, 16 bp, synthetic construct
  misc_feature 1..16: note = synthetic [barcode part1]
  source 1..16: mol_type = other DNA
cagtactcgaatagag

SEQ ID NO: 30894 - DNA, 16 bp, synthetic construct
  misc_feature 1..16: note = synthetic [barcode part1]
  source 1..16: mol_type = other DNA
aacttaaccggcgatc

SEQ ID NO: 30895 - DNA, 16 bp, synthetic construct
  misc_feature 1..16: note = synthetic [barcode part1]
  source 1..16: mol_type = other DNA
gattacgcacacaacc

SEQ ID NO: 30896 - DNA, 16 bp, synthetic construct
  misc_feature 1..16: note = synthetic [barcode part1]
  source 1..16: mol_type = other DNA
gcggttgatataccac

SEQ ID NO: 30897 - DNA, 16 bp, synthetic construct
  misc_feature 1..16: note = synthetic [barcode part1]
  source 1..16: mol_type = other DNA
caatccttaaccacgt

SEQ ID NO: 30898 - DNA, 16 bp, synthetic construct
  misc_feature 1..16: note = synthetic [barcode part1]
  source 1..16: mol_type = other DNA
gtcaacttcctggaag

SEQ ID NO: 30899 - DNA, 16 bp, synthetic construct
  misc_feature 1..16: note = synthetic [barcode part1]
  source 1..16: mol_type = other DNA
tatacggacggttacc

SEQ ID NO: 30900 - DNA, 16 bp, synthetic construct
  misc_feature 1..16: note = synthetic [barcode part1]
  source 1..16: mol_type = other DNA
aagtccggagtcgagt

SEQ ID NO: 30901 - DNA, 16 bp, synthetic construct
  misc_feature 1..16: note = synthetic [barcode part1]
  source 1..16: mol_type = other DNA
accggtgaacaataac

SEQ ID NO: 30902 - DNA, 16 bp, synthetic construct
  misc_feature 1..16: note = synthetic [barcode part1]
  source 1..16: mol_type = other DNA
attacctggtgaggtc

SEQ ID NO: 30903 - DNA, 16 bp, synthetic construct
  misc_feature 1..16: note = synthetic [barcode part1]
  source 1..16: mol_type = other DNA
agtaccgataccacgt

SEQ ID NO: 30904 - DNA, 16 bp, synthetic construct
  misc_feature 1..16: note = synthetic [barcode part1]
  source 1..16: mol_type = other DNA
aattgagtgagtccag

SEQ ID NO: 30905 - DNA, 16 bp, synthetic construct
  misc_feature 1..16: note = synthetic [barcode part1]
  source 1..16: mol_type = other DNA
cggtgtagttaagagt

SEQ ID NO: 30906 - DNA, 16 bp, synthetic construct
  misc_feature 1..16: note = synthetic [barcode part1]
  source 1..16: mol_type = other DNA
gttgttcctcaagtgt

SEQ ID NO: 30907 - DNA, 16 bp, synthetic construct
  misc_feature 1..16: note = synthetic [barcode part1]
  source 1..16: mol_type = other DNA
actcgttcttgcctgt

SEQ ID NO: 30908 - DNA, 16 bp, synthetic construct
  misc_feature 1..16: note = synthetic [barcode part1]
  source 1..16: mol_type = other DNA
caacgatcacagaggc

SEQ ID NO: 30909 - DNA, 16 bp, synthetic construct
  misc_feature 1..16: note = synthetic [barcode part1]
  source 1..16: mol_type = other DNA
cacaagtaagtagtgc

SEQ ID NO: 30910 - DNA, 16 bp, synthetic construct
  misc_feature 1..16: note = synthetic [barcode part1]
  source 1..16: mol_type = other DNA
gatcgactccttcctt

SEQ ID NO: 30911 - DNA, 16 bp, synthetic construct
  misc_feature 1..16: note = synthetic [barcode part1]
  source 1..16: mol_type = other DNA
gcaccttatcaggtcc

SEQ ID NO: 30912 - DNA, 16 bp, synthetic construct
  misc_feature 1..16: note = synthetic [barcode part1]
  source 1..16: mol_type = other DNA
gttgttgttctacgtg

SEQ ID NO: 30913 - DNA, 16 bp, synthetic construct
  misc_feature 1..16: note = synthetic [barcode part1]
  source 1..16: mol_type = other DNA
acgtaacgtatcgacc

SEQ ID NO: 30914 - DNA, 16 bp, synthetic construct
  misc_feature 1..16: note = synthetic [barcode part1]
  source 1..16: mol_type = other DNA
gtaggacggacaatag

SEQ ID NO: 30915 - DNA, 16 bp, synthetic construct
  misc_feature 1..16: note = synthetic [barcode part1]
  source 1..16: mol_type = other DNA
tcctggcaatctgcgt

SEQ ID NO: 30916 - DNA, 16 bp, synthetic construct
  misc_feature 1..16: note = synthetic [barcode part1]
  source 1..16: mol_type = other DNA
atctgttgtgacactc

SEQ ID NO: 30917 - DNA, 16 bp, synthetic construct
  misc_feature 1..16: note = synthetic [barcode part1]
  source 1..16: mol_type = other DNA
ttgtgtgacactggtg

SEQ ID NO: 30918 - DNA, 16 bp, synthetic construct
  misc_feature 1..16: note = synthetic [barcode part1]
  source 1..16: mol_type = other DNA
gccactctattgcctt

SEQ ID NO: 30919 - DNA, 16 bp, synthetic construct
  misc_feature 1..16: note = synthetic [barcode part1]
  source 1..16: mol_type = other DNA
acgacgacaccaacag

SEQ ID NO: 30920 - DNA, 16 bp, synthetic construct
  misc_feature 1..16: note = synthetic [barcode part1]
  source 1..16: mol_type = other DNA
ttgtaggtccgactcc

SEQ ID NO: 30921 - DNA, 16 bp, synthetic construct
  misc_feature 1..16: note = synthetic [barcode part1]
  source 1..16: mol_type = other DNA
tacttcgttgcgagtt

SEQ ID NO: 30922 - DNA, 16 bp, synthetic construct
  misc_feature 1..16: note = synthetic [barcode part1]
  source 1..16: mol_type = other DNA
aggcgtaagtccaacg

SEQ ID NO: 30923 - DNA, 16 bp, synthetic construct
  misc_feature 1..16: note = synthetic [barcode part1]
  source 1..16: mol_type = other DNA
cggtgataactcggtt

SEQ ID NO: 30924 - DNA, 16 bp, synthetic construct
  misc_feature 1..16: note = synthetic [barcode part1]
  source 1..16: mol_type = other DNA
cgtacttattcggtgt

SEQ ID NO: 30925 - DNA, 16 bp, synthetic construct
  misc_feature 1..16: note = synthetic [barcode part1]
  source 1..16: mol_type = other DNA
tactgacggccagaag

SEQ ID NO: 30926 - DNA, 16 bp, synthetic construct
  misc_feature 1..16: note = synthetic [barcode part1]
  source 1..16: mol_type = other DNA
aagattgcggttcctg

SEQ ID NO: 30927 - DNA, 16 bp, synthetic construct
  misc_feature 1..16: note = synthetic [barcode part1]
  source 1..16: mol_type = other DNA
cggacaacactgcaag

SEQ ID NO: 30928 - DNA, 16 bp, synthetic construct
  misc_feature 1..16: note = synthetic [barcode part1]
  source 1..16: mol_type = other DNA
caacttggttctcgcg

SEQ ID NO: 30929 - DNA, 16 bp, synthetic construct
  misc_feature 1..16: note = synthetic [barcode part1]
  source 1..16: mol_type = other DNA
actcgtcttacagtac

SEQ ID NO: 30930 - DNA, 16 bp, synthetic construct
  misc_feature 1..16: note = synthetic [barcode part1]
  source 1..16: mol_type = other DNA
ttgtaggaacggtaac

SEQ ID NO: 30931 - DNA, 16 bp, synthetic construct
  misc_feature 1..16: note = synthetic [barcode part1]
  source 1..16: mol_type = other DNA
ttacgtcgacaactct

SEQ ID NO: 30932 - DNA, 16 bp, synthetic construct
  misc_feature 1..16: note = synthetic [barcode part1]
  source 1..16: mol_type = other DNA
gacttgaggtctagtc

SEQ ID NO: 30933 - DNA, 16 bp, synthetic construct
  misc_feature 1..16: note = synthetic [barcode part1]
  source 1..16: mol_type = other DNA
tgaatcgaagaacgtc

SEQ ID NO: 30934 - DNA, 16 bp, synthetic construct
  misc_feature 1..16: note = synthetic [barcode part1]
  source 1..16: mol_type = other DNA
ccttcagacaccagtc

SEQ ID NO: 30935 - DNA, 16 bp, synthetic construct
  misc_feature 1..16: note = synthetic [barcode part1]
  source 1..16: mol_type = other DNA
tcaggtggcgaattct

SEQ ID NO: 30936 - DNA, 16 bp, synthetic construct
  misc_feature 1..16: note = synthetic [barcode part1]
  source 1..16: mol_type = other DNA
acacaacgttgacacc

SEQ ID NO: 30937 - DNA, 16 bp, synthetic construct
  misc_feature 1..16: note = synthetic [barcode part1]
  source 1..16: mol_type = other DNA
tcacagacctggtctc

SEQ ID NO: 30938 - DNA, 16 bp, synthetic construct
  misc_feature 1..16: note = synthetic [barcode part1]
  source 1..16: mol_type = other DNA
agaggcagtctgacac

SEQ ID NO: 30939 - DNA, 16 bp, synthetic construct
  misc_feature 1..16: note = synthetic [barcode part1]
  source 1..16: mol_type = other DNA
accttgtgagtactct

SEQ ID NO: 30940 - DNA, 16 bp, synthetic construct
  misc_feature 1..16: note = synthetic [barcode part1]
  source 1..16: mol_type = other DNA
cgatatcgtgacactg

SEQ ID NO: 30941 - DNA, 16 bp, synthetic construct
  misc_feature 1..16: note = synthetic [barcode part1]
  source 1..16: mol_type = other DNA
gcgatcaatcacacgt

SEQ ID NO: 30942 - DNA, 16 bp, synthetic construct
  misc_feature 1..16: note = synthetic [barcode part1]
  source 1..16: mol_type = other DNA
ttgcagtagtctcgag

SEQ ID NO: 30943 - DNA, 16 bp, synthetic construct
  misc_feature 1..16: note = synthetic [barcode part1]
  source 1..16: mol_type = other DNA
tggccttctctagttc

SEQ ID NO: 30944 - DNA, 16 bp, synthetic construct
  misc_feature 1..16: note = synthetic [barcode part1]
  source 1..16: mol_type = other DNA
atacgcgacgtgtact

SEQ ID NO: 30945 - DNA, 16 bp, synthetic construct
  misc_feature 1..16: note = synthetic [barcode part1]
  source 1..16: mol_type = other DNA
tgcaatcacgcagttg

SEQ ID NO: 30946 - DNA, 16 bp, synthetic construct
  misc_feature 1..16: note = synthetic [barcode part1]
  source 1..16: mol_type = other DNA
tcagagtgcaacgttc

SEQ ID NO: 30947 - DNA, 16 bp, synthetic construct
  misc_feature 1..16: note = synthetic [barcode part1]
  source 1..16: mol_type = other DNA
tactgttccgttgtcc

SEQ ID NO: 30948 - DNA, 16 bp, synthetic construct
  misc_feature 1..16: note = synthetic [barcode part1]
  source 1..16: mol_type = other DNA
tgttgacgttgacacg

SEQ ID NO: 30949 - DNA, 16 bp, synthetic construct
  misc_feature 1..16: note = synthetic [barcode part1]
  source 1..16: mol_type = other DNA
aataatcgcacctctc

SEQ ID NO: 30950 - DNA, 16 bp, synthetic construct
  misc_feature 1..16: note = synthetic [barcode part1]
  source 1..16: mol_type = other DNA
taggacctcggaactt

SEQ ID NO: 30951 - DNA, 16 bp, synthetic construct
  misc_feature 1..16: note = synthetic [barcode part1]
  source 1..16: mol_type = other DNA
ccggcaattgttgaac

SEQ ID NO: 30952 - DNA, 16 bp, synthetic construct
  misc_feature 1..16: note = synthetic [barcode part1]
  source 1..16: mol_type = other DNA
gatcaggactcgagtg

SEQ ID NO: 30953 - DNA, 16 bp, synthetic construct
  misc_feature 1..16: note = synthetic [barcode part1]
  source 1..16: mol_type = other DNA
gagtgtcctacgaact

SEQ ID NO: 30954 - DNA, 16 bp, synthetic construct
  misc_feature 1..16: note = synthetic [barcode part1]
  source 1..16: mol_type = other DNA
gcacaagttacgttcg

SEQ ID NO: 30955 - DNA, 16 bp, synthetic construct
  misc_feature 1..16: note = synthetic [barcode part1]
  source 1..16: mol_type = other DNA
attaggagtatcggtg

SEQ ID NO: 30956 - DNA, 16 bp, synthetic construct
  misc_feature 1..16: note = synthetic [barcode part1]
  source 1..16: mol_type = other DNA
gcgcacgcaatcaatt

SEQ ID NO: 30957 - DNA, 16 bp, synthetic construct
  misc_feature 1..16: note = synthetic [barcode part1]
  source 1..16: mol_type = other DNA
tagtccactgtattcg

SEQ ID NO: 30958 - DNA, 16 bp, synthetic construct
  misc_feature 1..16: note = synthetic [barcode part1]
  source 1..16: mol_type = other DNA
ttatcacggtgtccgc

SEQ ID NO: 30959 - DNA, 16 bp, synthetic construct
  misc_feature 1..16: note = synthetic [barcode part1]
  source 1..16: mol_type = other DNA
agtacgcctctctggt

SEQ ID NO: 30960 - DNA, 16 bp, synthetic construct
  misc_feature 1..16: note = synthetic [barcode part1]
  source 1..16: mol_type = other DNA
cgtctgttaagattcc

SEQ ID NO: 30961 - DNA, 16 bp, synthetic construct
  misc_feature 1..16: note = synthetic [barcode part1]
  source 1..16: mol_type = other DNA
ttctcaggttgtgtgt

SEQ ID NO: 30962 - DNA, 16 bp, synthetic construct
  misc_feature 1..16: note = synthetic [barcode part1]
  source 1..16: mol_type = other DNA
actcgtcttgtgatac

SEQ ID NO: 30963 - DNA, 16 bp, synthetic construct
  misc_feature 1..16: note = synthetic [barcode part1]
  source 1..16: mol_type = other DNA
tattcactcacaacgc

SEQ ID NO: 30964 - DNA, 16 bp, synthetic construct
  misc_feature 1..16: note = synthetic [barcode part1]
  source 1..16: mol_type = other DNA
gttattctaggcgttc

SEQ ID NO: 30965 - DNA, 16 bp, synthetic construct
  misc_feature 1..16: note = synthetic [barcode part1]
  source 1..16: mol_type = other DNA
cgtgcacactaactag

SEQ ID NO: 30966 - DNA, 16 bp, synthetic construct
  misc_feature 1..16: note = synthetic [barcode part1]
  source 1..16: mol_type = other DNA
cctctactagaccgtg

SEQ ID NO: 30967 - DNA, 16 bp, synthetic construct
  misc_feature 1..16: note = synthetic [barcode part1]
  source 1..16: mol_type = other DNA
gaactcacgagagacc

SEQ ID NO: 30968 - DNA, 16 bp, synthetic construct
  misc_feature 1..16: note = synthetic [barcode part1]
  source 1..16: mol_type = other DNA
gacgcgtggaattgac

SEQ ID NO: 30969 - DNA, 16 bp, synthetic construct
  misc_feature 1..16: note = synthetic [barcode part1]
  source 1..16: mol_type = other DNA
tctatcaagttgcacc

SEQ ID NO: 30970 - DNA, 16 bp, synthetic construct
  misc_feature 1..16: note = synthetic [barcode part1]
  source 1..16: mol_type = other DNA
tggaactccgagattc

SEQ ID NO: 30971 - DNA, 16 bp, synthetic construct
  misc_feature 1..16: note = synthetic [barcode part1]
  source 1..16: mol_type = other DNA
gtaccaacctcactgc

SEQ ID NO: 30972 - DNA, 16 bp, synthetic construct
  misc_feature 1..16: note = synthetic [barcode part1]
  source 1..16: mol_type = other DNA
tccgttgtgtgagtcc

SEQ ID NO: 30973 - DNA, 16 bp, synthetic construct
  misc_feature 1..16: note = synthetic [barcode part1]
  source 1..16: mol_type = other DNA
gtcttccggaagattg

SEQ ID NO: 30974 - DNA, 16 bp, synthetic construct
  misc_feature 1..16: note = synthetic [barcode part1]
  source 1..16: mol_type = other DNA
gttgacacaagttcgc

SEQ ID NO: 30975 - DNA, 16 bp, synthetic construct
  misc_feature 1..16: note = synthetic [barcode part1]
  source 1..16: mol_type = other DNA
gcagtcgtcaatcctc

SEQ ID NO: 30976 - DNA, 16 bp, synthetic construct
  misc_feature 1..16: note = synthetic [barcode part1]
  source 1..16: mol_type = other DNA
tgacctaagtacgaag

SEQ ID NO: 30977 - DNA, 16 bp, synthetic construct
  misc_feature 1..16: note = synthetic [barcode part1]
  source 1..16: mol_type = other DNA
tccggccagaattaac

SEQ ID NO: 30978 - DNA, 16 bp, synthetic construct
  misc_feature 1..16: note = synthetic [barcode part1]
  source 1..16: mol_type = other DNA
atcttcaacgactcac

SEQ ID NO: 30979 - DNA, 16 bp, synthetic construct
  misc_feature 1..16: note = synthetic [barcode part1]
  source 1..16: mol_type = other DNA
cagagagatacgtcgc

SEQ ID NO: 30980 - DNA, 16 bp, synthetic construct
  misc_feature 1..16: note = synthetic [barcode part1]
  source 1..16: mol_type = other DNA
accacggttattcgcc

SEQ ID NO: 30981 - DNA, 16 bp, synthetic construct
  misc_feature 1..16: note = synthetic [barcode part1]
  source 1..16: mol_type = other DNA
caataccgatatcgcg

SEQ ID NO: 30982 - DNA, 16 bp, synthetic construct
  misc_feature 1..16: note = synthetic [barcode part1]
  source 1..16: mol_type = other DNA
tcgtgtagacctcctg

SEQ ID NO: 30983 - DNA, 16 bp, synthetic construct
  misc_feature 1..16: note = synthetic [barcode part1]
  source 1..16: mol_type = other DNA
gactcctaatctgcgc

SEQ ID NO: 30984 - DNA, 16 bp, synthetic construct
  misc_feature 1..16: note = synthetic [barcode part1]
  source 1..16: mol_type = other DNA
ttagtgagtcctcact

SEQ ID NO: 30985 - DNA, 16 bp, synthetic construct
  misc_feature 1..16: note = synthetic [barcode part1]
  source 1..16: mol_type = other DNA
tactgactggtacgtg

SEQ ID NO: 30986 - DNA, 16 bp, synthetic construct
  misc_feature 1..16: note = synthetic [barcode part1]
  source 1..16: mol_type = other DNA
gtcacaacgagacttc

SEQ ID NO: 30987 - DNA, 16 bp, synthetic construct
  misc_feature 1..16: note = synthetic [barcode part1]
  source 1..16: mol_type = other DNA
gcgaccgttccaatct

SEQ ID NO: 30988 - DNA, 16 bp, synthetic construct
  misc_feature 1..16: note = synthetic [barcode part1]
  source 1..16: mol_type = other DNA
ataggcgtacttaccg

SEQ ID NO: 30989 - DNA, 16 bp, synthetic construct
  misc_feature 1..16: note = synthetic [barcode part1]
  source 1..16: mol_type = other DNA
tgatctcgaccaaggt

SEQ ID NO: 30990 - DNA, 16 bp, synthetic construct
  misc_feature 1..16: note = synthetic [barcode part1]
  source 1..16: mol_type = other DNA
tgagtaagtggtgttg

SEQ ID NO: 30991 - DNA, 16 bp, synthetic construct
  misc_feature 1..16: note = synthetic [barcode part1]
  source 1..16: mol_type = other DNA
tactaggtccgcactc

SEQ ID NO: 30992 - DNA, 16 bp, synthetic construct
  misc_feature 1..16: note = synthetic [barcode part1]
  source 1..16: mol_type = other DNA
ttccagagtagtgtcg

SEQ ID NO: 30993 - DNA, 16 bp, synthetic construct
  misc_feature 1..16: note = synthetic [barcode part1]
  source 1..16: mol_type = other DNA
agtgataacctgcaag

SEQ ID NO: 30994 - DNA, 16 bp, synthetic construct
  misc_feature 1..16: note = synthetic [barcode part1]
  source 1..16: mol_type = other DNA
gcagttggtcaacact

SEQ ID NO: 30995 - DNA, 16 bp, synthetic construct
  misc_feature 1..16: note = synthetic [barcode part1]
  source 1..16: mol_type = other DNA
cctaagagtgttgcac

SEQ ID NO: 30996 - DNA, 16 bp, synthetic construct
  misc_feature 1..16: note = synthetic [barcode part1]
  source 1..16: mol_type = other DNA
ttctgttgaacggcag

SEQ ID NO: 30997 - DNA, 16 bp, synthetic construct
  misc_feature 1..16: note = synthetic [barcode part1]
  source 1..16: mol_type = other DNA
acttcgacagtcaacg

SEQ ID NO: 30998 - DNA, 16 bp, synthetic construct
  misc_feature 1..16: note = synthetic [barcode part1]
  source 1..16: mol_type = other DNA
tgcaatccaatccttg

SEQ ID NO: 30999 - DNA, 16 bp, synthetic construct
  misc_feature 1..16: note = synthetic [barcode part1]
  source 1..16: mol_type = other DNA
ccgagtcttctgtacg

SEQ ID NO: 31000 - DNA, 16 bp, synthetic construct
  misc_feature 1..16: note = synthetic [barcode part1]
  source 1..16: mol_type = other DNA
aacggttcctctgtgc

SEQ ID NO: 31001 - DNA, 16 bp, synthetic construct
  misc_feature 1..16: note = synthetic [barcode part1]
  source 1..16: mol_type = other DNA
gtctgcgatactcaag

SEQ ID NO: 31002 - DNA, 16 bp, synthetic construct
  misc_feature 1..16: note = synthetic [barcode part1]
  source 1..16: mol_type = other DNA
ccttctggcagttgtg

SEQ ID NO: 31003 - DNA, 16 bp, synthetic construct
  misc_feature 1..16: note = synthetic [barcode part1]
  source 1..16: mol_type = other DNA
atagaacctgcctcag

SEQ ID NO: 31004 - DNA, 16 bp, synthetic construct
  misc_feature 1..16: note = synthetic [barcode part1]
  source 1..16: mol_type = other DNA
taggtggttgcggtag

SEQ ID NO: 31005 - DNA, 16 bp, synthetic construct
  misc_feature 1..16: note = synthetic [barcode part1]
  source 1..16: mol_type = other DNA
gagagaccaaggaatc

SEQ ID NO: 31006 - DNA, 16 bp, synthetic construct
  misc_feature 1..16: note = synthetic [barcode part1]
  source 1..16: mol_type = other DNA
gcgttgaagttcgtgt

SEQ ID NO: 31007 - DNA, 16 bp, synthetic construct
  misc_feature 1..16: note = synthetic [barcode part1]
  source 1..16: mol_type = other DNA
gttcgatcaacaaccg

SEQ ID NO: 31008 - DNA, 16 bp, synthetic construct
  misc_feature 1..16: note = synthetic [barcode part1]
  source 1..16: mol_type = other DNA
tcggtattaacgcgtg

SEQ ID NO: 31009 - DNA, 16 bp, synthetic construct
  misc_feature 1..16: note = synthetic [barcode part1]
  source 1..16: mol_type = other DNA
atcctcagtggtccgt

SEQ ID NO: 31010 - DNA, 16 bp, synthetic construct
  misc_feature 1..16: note = synthetic [barcode part1]
  source 1..16: mol_type = other DNA
aacaacaggacgacag

SEQ ID NO: 31011 - DNA, 16 bp, synthetic construct
  misc_feature 1..16: note = synthetic [barcode part1]
  source 1..16: mol_type = other DNA
gttaagttagaggcgt

SEQ ID NO: 31012 - DNA, 16 bp, synthetic construct
  misc_feature 1..16: note = synthetic [barcode part1]
  source 1..16: mol_type = other DNA
cagtctccttcttgac

SEQ ID NO: 31013 - DNA, 16 bp, synthetic construct
  misc_feature 1..16: note = synthetic [barcode part1]
  source 1..16: mol_type = other DNA
tcctcgattggttctc

SEQ ID NO: 31014 - DNA, 16 bp, synthetic construct
  misc_feature 1..16: note = synthetic [barcode part1]
  source 1..16: mol_type = other DNA
tagtgtggccgtcttc

SEQ ID NO: 31015 - DNA, 16 bp, synthetic construct
  misc_feature 1..16: note = synthetic [barcode part1]
  source 1..16: mol_type = other DNA
ccttgtaggaacgtgt

SEQ ID NO: 31016 - DNA, 16 bp, synthetic construct
  misc_feature 1..16: note = synthetic [barcode part1]
  source 1..16: mol_type = other DNA
tccgactgtgtactgc

SEQ ID NO: 31017 - DNA, 16 bp, synthetic construct
  misc_feature 1..16: note = synthetic [barcode part1]
  source 1..16: mol_type = other DNA
gcgcgagacaacttag

SEQ ID NO: 31018 - DNA, 16 bp, synthetic construct
  misc_feature 1..16: note = synthetic [barcode part1]
  source 1..16: mol_type = other DNA
tcgtgaaggtgtatcc

SEQ ID NO: 31019 - DNA, 16 bp, synthetic construct
  misc_feature 1..16: note = synthetic [barcode part1]
  source 1..16: mol_type = other DNA
actacttagtgtccac

SEQ ID NO: 31020 - DNA, 16 bp, synthetic construct
  misc_feature 1..16: note = synthetic [barcode part1]
  source 1..16: mol_type = other DNA
taattacgtgaggcag

SEQ ID NO: 31021 - DNA, 16 bp, synthetic construct
  misc_feature 1..16: note = synthetic [barcode part1]
  source 1..16: mol_type = other DNA
aacgaccgtcgttagt

SEQ ID NO: 31022 - DNA, 16 bp, synthetic construct
  misc_feature 1..16: note = synthetic [barcode part1]
  source 1..16: mol_type = other DNA
aaggtaaggcagaacc

SEQ ID NO: 31023 - DNA, 16 bp, synthetic construct
  misc_feature 1..16: note = synthetic [barcode part1]
  source 1..16: mol_type = other DNA
ccggcagaagtacagt

SEQ ID NO: 31024 - DNA, 16 bp, synthetic construct
  misc_feature 1..16: note = synthetic [barcode part1]
  source 1..16: mol_type = other DNA
acacctagtcttatcg

SEQ ID NO: 31025 - DNA, 16 bp, synthetic construct
  misc_feature 1..16: note = synthetic [barcode part1]
  source 1..16: mol_type = other DNA
accacctaacagagtc

SEQ ID NO: 31026 - DNA, 16 bp, synthetic construct
  misc_feature 1..16: note = synthetic [barcode part1]
  source 1..16: mol_type = other DNA
cacgacaaggtcttgt

SEQ ID NO: 31027 - DNA, 16 bp, synthetic construct
  misc_feature 1..16: note = synthetic [barcode part1]
  source 1..16: mol_type = other DNA
aaccgtatcgatcttc

SEQ ID NO: 31028 - DNA, 16 bp, synthetic construct
  misc_feature 1..16: note = synthetic [barcode part1]
  source 1..16: mol_type = other DNA
cgaggaggtgtatcgt

SEQ ID NO: 31029 - DNA, 16 bp, synthetic construct
  misc_feature 1..16: note = synthetic [barcode part1]
  source 1..16: mol_type = other DNA
caatcgaagtcctgac

SEQ ID NO: 31030 - DNA, 16 bp, synthetic construct
  misc_feature 1..16: note = synthetic [barcode part1]
  source 1..16: mol_type = other DNA
tgaggcctcagaattc

SEQ ID NO: 31031 - DNA, 16 bp, synthetic construct
  misc_feature 1..16: note = synthetic [barcode part1]
  source 1..16: mol_type = other DNA
ccttacctcgtgagtg

SEQ ID NO: 31032 - DNA, 16 bp, synthetic construct
  misc_feature 1..16: note = synthetic [barcode part1]
  source 1..16: mol_type = other DNA
tacaggtacagacctc

SEQ ID NO: 31033 - DNA, 16 bp, synthetic construct
  misc_feature 1..16: note = synthetic [barcode part1]
  source 1..16: mol_type = other DNA
gagtacgcagtaattg

SEQ ID NO: 31034 - DNA, 16 bp, synthetic construct
  misc_feature 1..16: note = synthetic [barcode part1]
  source 1..16: mol_type = other DNA
tccactcggtgttgtg

SEQ ID NO: 31035 - DNA, 16 bp, synthetic construct
  misc_feature 1..16: note = synthetic [barcode part1]
  source 1..16: mol_type = other DNA
cacttactgcctgtct

SEQ ID NO: 31036 - DNA, 16 bp, synthetic construct
  misc_feature 1..16: note = synthetic [barcode part1]
  source 1..16: mol_type = other DNA
agaacttccacgacgt

SEQ ID NO: 31037 - DNA, 16 bp, synthetic construct
  misc_feature 1..16: note = synthetic [barcode part1]
  source 1..16: mol_type = other DNA
gcctgaactcaagtgt

SEQ ID NO: 31038 - DNA, 16 bp, synthetic construct
  misc_feature 1..16: note = synthetic [barcode part1]
  source 1..16: mol_type = other DNA
aagatagagatccgtc

SEQ ID NO: 31039 - DNA, 16 bp, synthetic construct
  misc_feature 1..16: note = synthetic [barcode part1]
  source 1..16: mol_type = other DNA
tcacagtcagtcagtg

SEQ ID NO: 31040 - DNA, 16 bp, synthetic construct
  misc_feature 1..16: note = synthetic [barcode part1]
  source 1..16: mol_type = other DNA
tctgtgtctgacaact

SEQ ID NO: 31041 - DNA, 16 bp, synthetic construct
  misc_feature 1..16: note = synthetic [barcode part1]
  source 1..16: mol_type = other DNA
actcctacgccggatt

SEQ ID NO: 31042 - DNA, 16 bp, synthetic construct
  misc_feature 1..16: note = synthetic [barcode part1]
  source 1..16: mol_type = other DNA
cgatacgtcaggtgtt

SEQ ID NO: 31043 - DNA, 16 bp, synthetic construct
  misc_feature 1..16: note = synthetic [barcode part1]
  source 1..16: mol_type = other DNA
aacgagaatactcggt

SEQ ID NO: 31044 - DNA, 16 bp, synthetic construct
  misc_feature 1..16: note = synthetic [barcode part1]
  source 1..16: mol_type = other DNA
tgcgagtggtatctgt

SEQ ID NO: 31045 - DNA, 16 bp, synthetic construct
  misc_feature 1..16: note = synthetic [barcode part1]
  source 1..16: mol_type = other DNA
gtgtccgagacagtag

SEQ ID NO: 31046 - DNA, 16 bp, synthetic construct
  misc_feature 1..16: note = synthetic [barcode part1]
  source 1..16: mol_type = other DNA
ccgtggtgatcttaag

SEQ ID NO: 31047 - DNA, 16 bp, synthetic construct
  misc_feature 1..16: note = synthetic [barcode part1]
  source 1..16: mol_type = other DNA
gtagagaatcaccagt

SEQ ID NO: 31048 - DNA, 16 bp, synthetic construct
  misc_feature 1..16: note = synthetic [barcode part1]
  source 1..16: mol_type = other DNA
agacttgtaccaacgc

SEQ ID NO: 31049 - DNA, 16 bp, synthetic construct
  misc_feature 1..16: note = synthetic [barcode part1]
  source 1..16: mol_type = other DNA
gccgcaacttacctac

SEQ ID NO: 31050 - DNA, 16 bp, synthetic construct
  misc_feature 1..16: note = synthetic [barcode part1]
  source 1..16: mol_type = other DNA
tgtatatcgcgcacag

SEQ ID NO: 31051 - DNA, 16 bp, synthetic construct
  misc_feature 1..16: note = synthetic [barcode part1]
  source 1..16: mol_type = other DNA
aagtagtgcactcaag

SEQ ID NO: 31052 - DNA, 16 bp, synthetic construct
  misc_feature 1..16: note = synthetic [barcode part1]
  source 1..16: mol_type = other DNA
caagaaggtcgtgcgt

SEQ ID NO: 31053 - DNA, 16 bp, synthetic construct
  misc_feature 1..16: note = synthetic [barcode part1]
  source 1..16: mol_type = other DNA
tggactaactaccgac

SEQ ID NO: 31054 - DNA, 16 bp, synthetic construct
  misc_feature 1..16: note = synthetic [barcode part1]
  source 1..16: mol_type = other DNA
cacgtcgaatccttcg

SEQ ID NO: 31055 - DNA, 16 bp, synthetic construct
  misc_feature 1..16: note = synthetic [barcode part1]
  source 1..16: mol_type = other DNA
gaataccaggcctatc

SEQ ID NO: 31056 - DNA, 16 bp, synthetic construct
  misc_feature 1..16: note = synthetic [barcode part1]
  source 1..16: mol_type = other DNA
gcgtccagatagagtg

SEQ ID NO: 31057 - DNA, 16 bp, synthetic construct
  misc_feature 1..16: note = synthetic [barcode part1]
  source 1..16: mol_type = other DNA
accagattcaccagac

SEQ ID NO: 31058 - DNA, 16 bp, synthetic construct
  misc_feature 1..16: note = synthetic [barcode part1]
  source 1..16: mol_type = other DNA
cagaggtctcgtattg

SEQ ID NO: 31059 - DNA, 16 bp, synthetic construct
  misc_feature 1..16: note = synthetic [barcode part1]
  source 1..16: mol_type = other DNA
gtaggccactgtcttc

SEQ ID NO: 31060 - DNA, 16 bp, synthetic construct
  misc_feature 1..16: note = synthetic [barcode part1]
  source 1..16: mol_type = other DNA
tggaccacaacctagt

SEQ ID NO: 31061 - DNA, 16 bp, synthetic construct
  misc_feature 1..16: note = synthetic [barcode part1]
  source 1..16: mol_type = other DNA
gaactctggtctcaag

SEQ ID NO: 31062 - DNA, 16 bp, synthetic construct
  misc_feature 1..16: note = synthetic [barcode part1]
  source 1..16: mol_type = other DNA
aggaggtctgcacaac

SEQ ID NO: 31063 - DNA, 16 bp, synthetic construct
  misc_feature 1..16: note = synthetic [barcode part1]
  source 1..16: mol_type = other DNA
gtgttgatccttaacc

SEQ ID NO: 31064 - DNA, 16 bp, synthetic construct
  misc_feature 1..16: note = synthetic [barcode part1]
  source 1..16: mol_type = other DNA
aacactcgcagttgtg

SEQ ID NO: 31065 - DNA, 16 bp, synthetic construct
  misc_feature 1..16: note = synthetic [barcode part1]
  source 1..16: mol_type = other DNA
ccttgtcgaatccacg

SEQ ID NO: 31066 - DNA, 16 bp, synthetic construct
  misc_feature 1..16: note = synthetic [barcode part1]
  source 1..16: mol_type = other DNA
taagtagtggagtctg

SEQ ID NO: 31067 - DNA, 16 bp, synthetic construct
  misc_feature 1..16: note = synthetic [barcode part1]
  source 1..16: mol_type = other DNA
tataccgtcggttccg

SEQ ID NO: 31068 - DNA, 16 bp, synthetic construct
  misc_feature 1..16: note = synthetic [barcode part1]
  source 1..16: mol_type = other DNA
gcgaaggagaggtatt

SEQ ID NO: 31069 - DNA, 16 bp, synthetic construct
  misc_feature 1..16: note = synthetic [barcode part1]
  source 1..16: mol_type = other DNA
ttgagtacctaccgtt

SEQ ID NO: 31070 - DNA, 16 bp, synthetic construct
  misc_feature 1..16: note = synthetic [barcode part1]
  source 1..16: mol_type = other DNA
agtggcctgacttaac

SEQ ID NO: 31071 - DNA, 16 bp, synthetic construct
  misc_feature 1..16: note = synthetic [barcode part1]
  source 1..16: mol_type = other DNA
gcaacagacgaagtag

SEQ ID NO: 31072 - DNA, 16 bp, synthetic construct
  misc_feature 1..16: note = synthetic [barcode part1]
  source 1..16: mol_type = other DNA
cggatacgagacggtt

SEQ ID NO: 31073 - DNA, 16 bp, synthetic construct
  misc_feature 1..16: note = synthetic [barcode part1]
  source 1..16: mol_type = other DNA
cctagagatcacggtt

SEQ ID NO: 31074 - DNA, 16 bp, synthetic construct
  misc_feature 1..16: note = synthetic [barcode part1]
  source 1..16: mol_type = other DNA
tcctaagtacctgttg

SEQ ID NO: 31075 - DNA, 16 bp, synthetic construct
  misc_feature 1..16: note = synthetic [barcode part1]
  source 1..16: mol_type = other DNA
atcgcctaataggacc

SEQ ID NO: 31076 - DNA, 16 bp, synthetic construct
  misc_feature 1..16: note = synthetic [barcode part1]
  source 1..16: mol_type = other DNA
gccgtgattacttatc

SEQ ID NO: 31077 - DNA, 16 bp, synthetic construct
  misc_feature 1..16: note = synthetic [barcode part1]
  source 1..16: mol_type = other DNA
ttacacttgaaccgtc

SEQ ID NO: 31078 - DNA, 16 bp, synthetic construct
  misc_feature 1..16: note = synthetic [barcode part1]
  source 1..16: mol_type = other DNA
tcctgcaagtctgacc

SEQ ID NO: 31079 - DNA, 16 bp, synthetic construct
  misc_feature 1..16: note = synthetic [barcode part1]
  source 1..16: mol_type = other DNA
acacttctccttgcgt

SEQ ID NO: 31080 - DNA, 16 bp, synthetic construct
  misc_feature 1..16: note = synthetic [barcode part1]
  source 1..16: mol_type = other DNA
tataatcctctcgacg

SEQ ID NO: 31081 - DNA, 16 bp, synthetic construct
  misc_feature 1..16: note = synthetic [barcode part1]
  source 1..16: mol_type = other DNA
tgtacctctcaacagt

SEQ ID NO: 31082 - DNA, 16 bp, synthetic construct
  misc_feature 1..16: note = synthetic [barcode part1]
  source 1..16: mol_type = other DNA
atcttgtctgcgtggc

SEQ ID NO: 31083 - DNA, 16 bp, synthetic construct
  misc_feature 1..16: note = synthetic [barcode part1]
  source 1..16: mol_type = other DNA
cctctagacactggtc

SEQ ID NO: 31084 - DNA, 16 bp, synthetic construct
  misc_feature 1..16: note = synthetic [barcode part1]
  source 1..16: mol_type = other DNA
tgattcgtctgacgag

SEQ ID NO: 31085 - DNA, 16 bp, synthetic construct
  misc_feature 1..16: note = synthetic [barcode part1]
  source 1..16: mol_type = other DNA
tactataggccaaccg

SEQ ID NO: 31086 - DNA, 16 bp, synthetic construct
  misc_feature 1..16: note = synthetic [barcode part1]
  source 1..16: mol_type = other DNA
actagtggcggagtac

SEQ ID NO: 31087 - DNA, 16 bp, synthetic construct
  misc_feature 1..16: note = synthetic [barcode part1]
  source 1..16: mol_type = other DNA
agacgaacagagtctt

SEQ ID NO: 31088 - DNA, 16 bp, synthetic construct
  misc_feature 1..16: note = synthetic [barcode part1]
  source 1..16: mol_type = other DNA
cgttccaatagtaggc

SEQ ID NO: 31089 - DNA, 16 bp, synthetic construct
  misc_feature 1..16: note = synthetic [barcode part1]
  source 1..16: mol_type = other DNA
acggcaattgttgtcg

SEQ ID NO: 31090 - DNA, 16 bp, synthetic construct
  misc_feature 1..16: note = synthetic [barcode part1]
  source 1..16: mol_type = other DNA
aggcaggtcacaacgt

SEQ ID NO: 31091 - DNA, 16 bp, synthetic construct
  misc_feature 1..16: note = synthetic [barcode part1]
  source 1..16: mol_type = other DNA
aagaggaccagagttg

SEQ ID NO: 31092 - DNA, 16 bp, synthetic construct
  misc_feature 1..16: note = synthetic [barcode part1]
  source 1..16: mol_type = other DNA
gtgcgcgatatacact

SEQ ID NO: 31093 - DNA, 16 bp, synthetic construct
  misc_feature 1..16: note = synthetic [barcode part1]
  source 1..16: mol_type = other DNA
ttcgcctcgtcacaag

SEQ ID NO: 31094 - DNA, 16 bp, synthetic construct
  misc_feature 1..16: note = synthetic [barcode part1]
  source 1..16: mol_type = other DNA
tactggtagaaggttg

SEQ ID NO: 31095 - DNA, 16 bp, synthetic construct
  misc_feature 1..16: note = synthetic [barcode part1]
  source 1..16: mol_type = other DNA
gagaagactcctcttg

SEQ ID NO: 31096 - DNA, 16 bp, synthetic construct
  misc_feature 1..16: note = synthetic [barcode part1]
  source 1..16: mol_type = other DNA
gtgcacacacaacgtt

SEQ ID NO: 31097 - DNA, 16 bp, synthetic construct
  misc_feature 1..16: note = synthetic [barcode part1]
  source 1..16: mol_type = other DNA
atcggcactacgtagt

SEQ ID NO: 31098 - DNA, 16 bp, synthetic construct
  misc_feature 1..16: note = synthetic [barcode part1]
  source 1..16: mol_type = other DNA
aaccgacggtcttagt

SEQ ID NO: 31099 - DNA, 16 bp, synthetic construct
  misc_feature 1..16: note = synthetic [barcode part1]
  source 1..16: mol_type = other DNA
aacgtaaggacacgag

SEQ ID NO: 31100 - DNA, 16 bp, synthetic construct
  misc_feature 1..16: note = synthetic [barcode part1]
  source 1..16: mol_type = other DNA
atccaccggtagatac

SEQ ID NO: 31101 - DNA, 16 bp, synthetic construct
  misc_feature 1..16: note = synthetic [barcode part1]
  source 1..16: mol_type = other DNA
gccaacgataagatac

SEQ ID NO: 31102 - DNA, 16 bp, synthetic construct
  misc_feature 1..16: note = synthetic [barcode part1]
  source 1..16: mol_type = other DNA
gcgaacttcctattgt

SEQ ID NO: 31103 - DNA, 16 bp, synthetic construct
  misc_feature 1..16: note = synthetic [barcode part1]
  source 1..16: mol_type = other DNA
cgcagatacctcacct

SEQ ID NO: 31104 - DNA, 16 bp, synthetic construct
  misc_feature 1..16: note = synthetic [barcode part1]
  source 1..16: mol_type = other DNA
tacgcggtatcgatac

SEQ ID NO: 31105 - DNA, 16 bp, synthetic construct
  misc_feature 1..16: note = synthetic [barcode part1]
  source 1..16: mol_type = other DNA
agactcaggcaataac

SEQ ID NO: 31106 - DNA, 16 bp, synthetic construct
  misc_feature 1..16: note = synthetic [barcode part1]
  source 1..16: mol_type = other DNA
attgttcgatactcgc

SEQ ID NO: 31107 - DNA, 16 bp, synthetic construct
  misc_feature 1..16: note = synthetic [barcode part1]
  source 1..16: mol_type = other DNA
tagagatcttgacgag

SEQ ID NO: 31108 - DNA, 16 bp, synthetic construct
  misc_feature 1..16: note = synthetic [barcode part1]
  source 1..16: mol_type = other DNA
ttgacagtgccttcgc

SEQ ID NO: 31109 - DNA, 16 bp, synthetic construct
  misc_feature 1..16: note = synthetic [barcode part1]
  source 1..16: mol_type = other DNA
atcggcgatcttccac

SEQ ID NO: 31110 - DNA, 16 bp, synthetic construct
  misc_feature 1..16: note = synthetic [barcode part1]
  source 1..16: mol_type = other DNA
cgagaacctatatccg

SEQ ID NO: 31111 - DNA, 16 bp, synthetic construct
  misc_feature 1..16: note = synthetic [barcode part1]
  source 1..16: mol_type = other DNA
acgactaccagtctcc

SEQ ID NO: 31112 - DNA, 16 bp, synthetic construct
  misc_feature 1..16: note = synthetic [barcode part1]
  source 1..16: mol_type = other DNA
acgcacgtagtattgc

SEQ ID NO: 31113 - DNA, 16 bp, synthetic construct
  misc_feature 1..16: note = synthetic [barcode part1]
  source 1..16: mol_type = other DNA
tcgtccttcggtacag

SEQ ID NO: 31114 - DNA, 16 bp, synthetic construct
  misc_feature 1..16: note = synthetic [barcode part1]
  source 1..16: mol_type = other DNA
acacggttacacgact

SEQ ID NO: 31115 - DNA, 16 bp, synthetic construct
  misc_feature 1..16: note = synthetic [barcode part1]
  source 1..16: mol_type = other DNA
gcggaagtgataatct

SEQ ID NO: 31116 - DNA, 16 bp, synthetic construct
  misc_feature 1..16: note = synthetic [barcode part1]
  source 1..16: mol_type = other DNA
cagtacgtgacggagt

SEQ ID NO: 31117 - DNA, 16 bp, synthetic construct
  misc_feature 1..16: note = synthetic [barcode part1]
  source 1..16: mol_type = other DNA
tgaatccgtaacgaag

SEQ ID NO: 31118 - DNA, 16 bp, synthetic construct
  misc_feature 1..16: note = synthetic [barcode part1]
  source 1..16: mol_type = other DNA
ccgtggactatacaac

SEQ ID NO: 31119 - DNA, 16 bp, synthetic construct
  misc_feature 1..16: note = synthetic [barcode part1]
  source 1..16: mol_type = other DNA
caaggacgtaatctag

SEQ ID NO: 31120 - DNA, 16 bp, synthetic construct
  misc_feature 1..16: note = synthetic [barcode part1]
  source 1..16: mol_type = other DNA
gagtctgtgaagagtt

SEQ ID NO: 31121 - DNA, 16 bp, synthetic construct
  misc_feature 1..16: note = synthetic [barcode part1]
  source 1..16: mol_type = other DNA
gtgagtggacactacg

SEQ ID NO: 31122 - DNA, 16 bp, synthetic construct
  misc_feature 1..16: note = synthetic [barcode part1]
  source 1..16: mol_type = other DNA
atctagagttctgcct

SEQ ID NO: 31123 - DNA, 16 bp, synthetic construct
  misc_feature 1..16: note = synthetic [barcode part1]
  source 1..16: mol_type = other DNA
gttcctacgttgaact

SEQ ID NO: 31124 - DNA, 16 bp, synthetic construct
  misc_feature 1..16: note = synthetic [barcode part1]
  source 1..16: mol_type = other DNA
acgaatatccgaggcg

SEQ ID NO: 31125 - DNA, 16 bp, synthetic construct
  misc_feature 1..16: note = synthetic [barcode part1]
  source 1..16: mol_type = other DNA
cgaacttacagtagag

SEQ ID NO: 31126 - DNA, 16 bp, synthetic construct
  misc_feature 1..16: note = synthetic [barcode part1]
  source 1..16: mol_type = other DNA
ttctggtcgatcctct

SEQ ID NO: 31127 - DNA, 16 bp, synthetic construct
  misc_feature 1..16: note = synthetic [barcode part1]
  source 1..16: mol_type = other DNA
cgagaaggaagttgac

SEQ ID NO: 31128 - DNA, 16 bp, synthetic construct
  misc_feature 1..16: note = synthetic [barcode part1]
  source 1..16: mol_type = other DNA
gtgactaaggaagttc

SEQ ID NO: 31129 - DNA, 16 bp, synthetic construct
  misc_feature 1..16: note = synthetic [barcode part1]
  source 1..16: mol_type = other DNA
actctactcgtcacct

SEQ ID NO: 31130 - DNA, 16 bp, synthetic construct
  misc_feature 1..16: note = synthetic [barcode part1]
  source 1..16: mol_type = other DNA
tggaatccttcctctc

SEQ ID NO: 31131 - DNA, 16 bp, synthetic construct
  misc_feature 1..16: note = synthetic [barcode part1]
  source 1..16: mol_type = other DNA
gatacgcgttacacgt

SEQ ID NO: 31132 - DNA, 16 bp, synthetic construct
  misc_feature 1..16: note = synthetic [barcode part1]
  source 1..16: mol_type = other DNA
cagttgactggtcaac

SEQ ID NO: 31133 - DNA, 16 bp, synthetic construct
  misc_feature 1..16: note = synthetic [barcode part1]
  source 1..16: mol_type = other DNA
gagaggtgcaactgtc

SEQ ID NO: 31134 - DNA, 16 bp, synthetic construct
  misc_feature 1..16: note = synthetic [barcode part1]
  source 1..16: mol_type = other DNA
tactaccgacggtagt

SEQ ID NO: 31135 - DNA, 16 bp, synthetic construct
  misc_feature 1..16: note = synthetic [barcode part1]
  source 1..16: mol_type = other DNA
tctaactccgaaggac

SEQ ID NO: 31136 - DNA, 16 bp, synthetic construct
  misc_feature 1..16: note = synthetic [barcode part1]
  source 1..16: mol_type = other DNA
acacttgactccaccg

SEQ ID NO: 31137 - DNA, 16 bp, synthetic construct
  misc_feature 1..16: note = synthetic [barcode part1]
  source 1..16: mol_type = other DNA
caacgcactaacacgt

SEQ ID NO: 31138 - DNA, 16 bp, synthetic construct
  misc_feature 1..16: note = synthetic [barcode part1]
  source 1..16: mol_type = other DNA
cagtacttctacctag

SEQ ID NO: 31139 - DNA, 16 bp, synthetic construct
  misc_feature 1..16: note = synthetic [barcode part1]
  source 1..16: mol_type = other DNA
cggaactagttgacct

SEQ ID NO: 31140 - DNA, 16 bp, synthetic construct
  misc_feature 1..16: note = synthetic [barcode part1]
  source 1..16: mol_type = other DNA
atcgtccgtccgtaac

SEQ ID NO: 31141 - DNA, 16 bp, synthetic construct
  misc_feature 1..16: note = synthetic [barcode part1]
  source 1..16: mol_type = other DNA
tacgtagtggacctac

SEQ ID NO: 31142 - DNA, 16 bp, synthetic construct
  misc_feature 1..16: note = synthetic [barcode part1]
  source 1..16: mol_type = other DNA
ttgcgtcaacggtctc

SEQ ID NO: 31143 - DNA, 16 bp, synthetic construct
  misc_feature 1..16: note = synthetic [barcode part1]
  source 1..16: mol_type = other DNA
gcaaggtacagtgaag

SEQ ID NO: 31144 - DNA, 16 bp, synthetic construct
  misc_feature 1..16: note = synthetic [barcode part1]
  source 1..16: mol_type = other DNA
acagtgtctaggatcc

SEQ ID NO: 31145 - DNA, 16 bp, synthetic construct
  misc_feature 1..16: note = synthetic [barcode part1]
  source 1..16: mol_type = other DNA
cctaagttctgtggag

SEQ ID NO: 31146 - DNA, 16 bp, synthetic construct
  misc_feature 1..16: note = synthetic [barcode part1]
  source 1..16: mol_type = other DNA
tcctatactgagttgc

SEQ ID NO: 31147 - DNA, 16 bp, synthetic construct
  misc_feature 1..16: note = synthetic [barcode part1]
  source 1..16: mol_type = other DNA
aagaggtgacagtggt

SEQ ID NO: 31148 - DNA, 16 bp, synthetic construct
  misc_feature 1..16: note = synthetic [barcode part1]
  source 1..16: mol_type = other DNA
acctaagatcctgttc

SEQ ID NO: 31149 - DNA, 16 bp, synthetic construct
  misc_feature 1..16: note = synthetic [barcode part1]
  source 1..16: mol_type = other DNA
acttgcaatcgagaag

SEQ ID NO: 31150 - DNA, 16 bp, synthetic construct
  misc_feature 1..16: note = synthetic [barcode part1]
  source 1..16: mol_type = other DNA
aactgtgtcttccggc

SEQ ID NO: 31151 - DNA, 16 bp, synthetic construct
  misc_feature 1..16: note = synthetic [barcode part1]
  source 1..16: mol_type = other DNA
gactacgccaattctt

SEQ ID NO: 31152 - DNA, 16 bp, synthetic construct
  misc_feature 1..16: note = synthetic [barcode part1]
  source 1..16: mol_type = other DNA
cctaattggaggatcc

SEQ ID NO: 31153 - DNA, 16 bp, synthetic construct
  misc_feature 1..16: note = synthetic [barcode part1]
  source 1..16: mol_type = other DNA
tactctaatctgtggc

SEQ ID NO: 31154 - DNA, 16 bp, synthetic construct
  misc_feature 1..16: note = synthetic [barcode part1]
  source 1..16: mol_type = other DNA
gtaactgtgcacgatc

SEQ ID NO: 31155 - DNA, 16 bp, synthetic construct
  misc_feature 1..16: note = synthetic [barcode part1]
  source 1..16: mol_type = other DNA
attctcttgcgtggcg

SEQ ID NO: 31156 - DNA, 16 bp, synthetic construct
  misc_feature 1..16: note = synthetic [barcode part1]
  source 1..16: mol_type = other DNA
gcgtagtctaatctct

SEQ ID NO: 31157 - DNA, 16 bp, synthetic construct
  misc_feature 1..16: note = synthetic [barcode part1]
  source 1..16: mol_type = other DNA
agtcctcaattacgtc

SEQ ID NO: 31158 - DNA, 16 bp, synthetic construct
  misc_feature 1..16: note = synthetic [barcode part1]
  source 1..16: mol_type = other DNA
ttatctgccgcagtgc

SEQ ID NO: 31159 - DNA, 16 bp, synthetic construct
  misc_feature 1..16: note = synthetic [barcode part1]
  source 1..16: mol_type = other DNA
cgcacgaccactattc

SEQ ID NO: 31160 - DNA, 16 bp, synthetic construct
  misc_feature 1..16: note = synthetic [barcode part1]
  source 1..16: mol_type = other DNA
tactgcaaccaaccag

SEQ ID NO: 31161 - DNA, 16 bp, synthetic construct
  misc_feature 1..16: note = synthetic [barcode part1]
  source 1..16: mol_type = other DNA
tgttcacaggcggatt

SEQ ID NO: 31162 - DNA, 16 bp, synthetic construct
  misc_feature 1..16: note = synthetic [barcode part1]
  source 1..16: mol_type = other DNA
gacaagacagtgaggt

SEQ ID NO: 31163 - DNA, 16 bp, synthetic construct
  misc_feature 1..16: note = synthetic [barcode part1]
  source 1..16: mol_type = other DNA
agttcagtgtggaggc

SEQ ID NO: 31164 - DNA, 16 bp, synthetic construct
  misc_feature 1..16: note = synthetic [barcode part1]
  source 1..16: mol_type = other DNA
tggacgacaagacctg

SEQ ID NO: 31165 - DNA, 16 bp, synthetic construct
  misc_feature 1..16: note = synthetic [barcode part1]
  source 1..16: mol_type = other DNA
cagacttaacgaagtg

SEQ ID NO: 31166 - DNA, 16 bp, synthetic construct
  misc_feature 1..16: note = synthetic [barcode part1]
  source 1..16: mol_type = other DNA
gattgaagtggttacg

SEQ ID NO: 31167 - DNA, 16 bp, synthetic construct
  misc_feature 1..16: note = synthetic [barcode part1]
  source 1..16: mol_type = other DNA
tacgatctcttgtcag

SEQ ID NO: 31168 - DNA, 16 bp, synthetic construct
  misc_feature 1..16: note = synthetic [barcode part1]
  source 1..16: mol_type = other DNA
accgacggtaaggtac

SEQ ID NO: 31169 - DNA, 16 bp, synthetic construct
  misc_feature 1..16: note = synthetic [barcode part1]
  source 1..16: mol_type = other DNA
tagacactgacttctc

SEQ ID NO: 31170 - DNA, 16 bp, synthetic construct
  misc_feature 1..16: note = synthetic [barcode part1]
  source 1..16: mol_type = other DNA
tatagttcgtgccgag

SEQ ID NO: 31171 - DNA, 16 bp, synthetic construct
  misc_feature 1..16: note = synthetic [barcode part1]
  source 1..16: mol_type = other DNA
cgtggaagattatcag

SEQ ID NO: 31172 - DNA, 16 bp, synthetic construct
  misc_feature 1..16: note = synthetic [barcode part1]
  source 1..16: mol_type = other DNA
taaccggagtcagtct

SEQ ID NO: 31173 - DNA, 16 bp, synthetic construct
  misc_feature 1..16: note = synthetic [barcode part1]
  source 1..16: mol_type = other DNA
cggatacttcctaact

SEQ ID NO: 31174 - DNA, 16 bp, synthetic construct
  misc_feature 1..16: note = synthetic [barcode part1]
  source 1..16: mol_type = other DNA
tcttacgagtcgttgt

SEQ ID NO: 31175 - DNA, 16 bp, synthetic construct
  misc_feature 1..16: note = synthetic [barcode part1]
  source 1..16: mol_type = other DNA
ataggcgtgccacaag

SEQ ID NO: 31176 - DNA, 16 bp, synthetic construct
  misc_feature 1..16: note = synthetic [barcode part1]
  source 1..16: mol_type = other DNA
gtaccgattaggcgtt

SEQ ID NO: 31177 - DNA, 16 bp, synthetic construct
  misc_feature 1..16: note = synthetic [barcode part1]
  source 1..16: mol_type = other DNA
gaaggtgtattcctgc

SEQ ID NO: 31178 - DNA, 16 bp, synthetic construct
  misc_feature 1..16: note = synthetic [barcode part1]
  source 1..16: mol_type = other DNA
atcaacgccaccactc

SEQ ID NO: 31179 - DNA, 16 bp, synthetic construct
  misc_feature 1..16: note = synthetic [barcode part1]
  source 1..16: mol_type = other DNA
acacggcggttaagac

SEQ ID NO: 31180 - DNA, 16 bp, synthetic construct
  misc_feature 1..16: note = synthetic [barcode part1]
  source 1..16: mol_type = other DNA
taacgatcggcctagt

SEQ ID NO: 31181 - DNA, 16 bp, synthetic construct
  misc_feature 1..16: note = synthetic [barcode part1]
  source 1..16: mol_type = other DNA
ttgagatactcgcctt

SEQ ID NO: 31182 - DNA, 16 bp, synthetic construct
  misc_feature 1..16: note = synthetic [barcode part1]
  source 1..16: mol_type = other DNA
ttgtgtggacttcttg

SEQ ID NO: 31183 - DNA, 16 bp, synthetic construct
  misc_feature 1..16: note = synthetic [barcode part1]
  source 1..16: mol_type = other DNA
aatcgtcaacgatccg

SEQ ID NO: 31184 - DNA, 16 bp, synthetic construct
  misc_feature 1..16: note = synthetic [barcode part1]
  source 1..16: mol_type = other DNA
gtggaccaactatacc

SEQ ID NO: 31185 - DNA, 16 bp, synthetic construct
  misc_feature 1..16: note = synthetic [barcode part1]
  source 1..16: mol_type = other DNA
aggtcactgtcggatt

SEQ ID NO: 31186 - DNA, 16 bp, synthetic construct
  misc_feature 1..16: note = synthetic [barcode part1]
  source 1..16: mol_type = other DNA
cacgtggcactctatc

SEQ ID NO: 31187 - DNA, 16 bp, synthetic construct
  misc_feature 1..16: note = synthetic [barcode part1]
  source 1..16: mol_type = other DNA
cggaatcgagattcct

SEQ ID NO: 31188 - DNA, 16 bp, synthetic construct
  misc_feature 1..16: note = synthetic [barcode part1]
  source 1..16: mol_type = other DNA
aacgcgcaaccaagac

SEQ ID NO: 31189 - DNA, 16 bp, synthetic construct
  misc_feature 1..16: note = synthetic [barcode part1]
  source 1..16: mol_type = other DNA
actgtgtctagacacg

SEQ ID NO: 31190 - DNA, 16 bp, synthetic construct
  misc_feature 1..16: note = synthetic [barcode part1]
  source 1..16: mol_type = other DNA
cacttagaaggtagtg

SEQ ID NO: 31191 - DNA, 16 bp, synthetic construct
  misc_feature 1..16: note = synthetic [barcode part1]
  source 1..16: mol_type = other DNA
cggaaggtcaatctct

SEQ ID NO: 31192 - DNA, 16 bp, synthetic construct
  misc_feature 1..16: note = synthetic [barcode part1]
  source 1..16: mol_type = other DNA
acgaggactaagtcgc

SEQ ID NO: 31193 - DNA, 16 bp, synthetic construct
  misc_feature 1..16: note = synthetic [barcode part1]
  source 1..16: mol_type = other DNA
tgccggtcttcaactg

SEQ ID NO: 31194 - DNA, 16 bp, synthetic construct
  misc_feature 1..16: note = synthetic [barcode part1]
  source 1..16: mol_type = other DNA
tggtgttcaaggttcg

SEQ ID NO: 31195 - DNA, 16 bp, synthetic construct
  misc_feature 1..16: note = synthetic [barcode part1]
  source 1..16: mol_type = other DNA
ttcctatcctgcactg

SEQ ID NO: 31196 - DNA, 16 bp, synthetic construct
  misc_feature 1..16: note = synthetic [barcode part1]
  source 1..16: mol_type = other DNA
tgcagataggcaatac

SEQ ID NO: 31197 - DNA, 16 bp, synthetic construct
  misc_feature 1..16: note = synthetic [barcode part1]
  source 1..16: mol_type = other DNA
cgtcctatacctggac

SEQ ID NO: 31198 - DNA, 16 bp, synthetic construct
  misc_feature 1..16: note = synthetic [barcode part1]
  source 1..16: mol_type = other DNA
ttggacttcgacagtg

SEQ ID NO: 31199 - DNA, 16 bp, synthetic construct
  misc_feature 1..16: note = synthetic [barcode part1]
  source 1..16: mol_type = other DNA
cacttgagtgcgattg

SEQ ID NO: 31200 - DNA, 16 bp, synthetic construct
  misc_feature 1..16: note = synthetic [barcode part1]
  source 1..16: mol_type = other DNA
ataaggatcggcaatc

SEQ ID NO: 31201 - DNA, 16 bp, synthetic construct
  misc_feature 1..16: note = synthetic [barcode part1]
  source 1..16: mol_type = other DNA
aggcaggtagagtcct

SEQ ID NO: 31202 - DNA, 16 bp, synthetic construct
  misc_feature 1..16: note = synthetic [barcode part1]
  source 1..16: mol_type = other DNA
agacactagatctgcc

SEQ ID NO: 31203 - DNA, 16 bp, synthetic construct
  misc_feature 1..16: note = synthetic [barcode part1]
  source 1..16: mol_type = other DNA
gatcggactacacgag

SEQ ID NO: 31204 - DNA, 16 bp, synthetic construct
  misc_feature 1..16: note = synthetic [barcode part1]
  source 1..16: mol_type = other DNA
cctgttcagatagacg

SEQ ID NO: 31205 - DNA, 16 bp, synthetic construct
  misc_feature 1..16: note = synthetic [barcode part1]
  source 1..16: mol_type = other DNA
attgcgattgcagtgc

SEQ ID NO: 31206 - DNA, 16 bp, synthetic construct
  misc_feature 1..16: note = synthetic [barcode part1]
  source 1..16: mol_type = other DNA
tggtcaactaaggtcc

SEQ ID NO: 31207 - DNA, 16 bp, synthetic construct
  misc_feature 1..16: note = synthetic [barcode part1]
  source 1..16: mol_type = other DNA
cacctatcctgttcgt

SEQ ID NO: 31208 - DNA, 16 bp, synthetic construct
  misc_feature 1..16: note = synthetic [barcode part1]
  source 1..16: mol_type = other DNA
ccgtatctgagttgcc

SEQ ID NO: 31209 - DNA, 16 bp, synthetic construct
  misc_feature 1..16: note = synthetic [barcode part1]
  source 1..16: mol_type = other DNA
tagttggcctcaagac

SEQ ID NO: 31210 - DNA, 16 bp, synthetic construct
  misc_feature 1..16: note = synthetic [barcode part1]
  source 1..16: mol_type = other DNA
ttcggagaaccgactt

SEQ ID NO: 31211 - DNA, 16 bp, synthetic construct
  misc_feature 1..16: note = synthetic [barcode part1]
  source 1..16: mol_type = other DNA
caatctgtcgtcagag

SEQ ID NO: 31212 - DNA, 16 bp, synthetic construct
  misc_feature 1..16: note = synthetic [barcode part1]
  source 1..16: mol_type = other DNA
gataggccttgttcag

SEQ ID NO: 31213 - DNA, 16 bp, synthetic construct
  misc_feature 1..16: note = synthetic [barcode part1]
  source 1..16: mol_type = other DNA
ttctgccgaacctacg

SEQ ID NO: 31214 - DNA, 16 bp, synthetic construct
  misc_feature 1..16: note = synthetic [barcode part1]
  source 1..16: mol_type = other DNA
tccgccagttaagagt

SEQ ID NO: 31215 - DNA, 16 bp, synthetic construct
  misc_feature 1..16: note = synthetic [barcode part1]
  source 1..16: mol_type = other DNA
tgcgcagatagttacc

SEQ ID NO: 31216 - DNA, 16 bp, synthetic construct
  misc_feature 1..16: note = synthetic [barcode part1]
  source 1..16: mol_type = other DNA
gccttacggtatattc

SEQ ID NO: 31217 - DNA, 16 bp, synthetic construct
  misc_feature 1..16: note = synthetic [barcode part1]
  source 1..16: mol_type = other DNA
actcggaggtgagact

SEQ ID NO: 31218 - DNA, 16 bp, synthetic construct
  misc_feature 1..16: note = synthetic [barcode part1]
  source 1..16: mol_type = other DNA
acgcacgtcaattgac

SEQ ID NO: 31219 - DNA, 16 bp, synthetic construct
  misc_feature 1..16: note = synthetic [barcode part1]
  source 1..16: mol_type = other DNA
ttcttacgcggcctag

SEQ ID NO: 31220 - DNA, 16 bp, synthetic construct
  misc_feature 1..16: note = synthetic [barcode part1]
  source 1..16: mol_type = other DNA
atccagtaccactgag

SEQ ID NO: 31221 - DNA, 16 bp, synthetic construct
  misc_feature 1..16: note = synthetic [barcode part1]
  source 1..16: mol_type = other DNA
gagttgtaacgtagac

SEQ ID NO: 31222 - DNA, 16 bp, synthetic construct
  misc_feature 1..16: note = synthetic [barcode part1]
  source 1..16: mol_type = other DNA
tcaccgtgaactcgtc

SEQ ID NO: 31223 - DNA, 16 bp, synthetic construct
  misc_feature 1..16: note = synthetic [barcode part1]
  source 1..16: mol_type = other DNA
ccgttcagacaagtac

SEQ ID NO: 31224 - DNA, 16 bp, synthetic construct
  misc_feature 1..16: note = synthetic [barcode part1]
  source 1..16: mol_type = other DNA
ataggcgtgttcactg

SEQ ID NO: 31225 - DNA, 16 bp, synthetic construct
  misc_feature 1..16: note = synthetic [barcode part1]
  source 1..16: mol_type = other DNA
aacttctgccgttctc

SEQ ID NO: 31226 - DNA, 16 bp, synthetic construct
  misc_feature 1..16: note = synthetic [barcode part1]
  source 1..16: mol_type = other DNA
gactgacacactgtgt

SEQ ID NO: 31227 - DNA, 16 bp, synthetic construct
  misc_feature 1..16: note = synthetic [barcode part1]
  source 1..16: mol_type = other DNA
cgtagagttaggttag

SEQ ID NO: 31228 - DNA, 16 bp, synthetic construct
  misc_feature 1..16: note = synthetic [barcode part1]
  source 1..16: mol_type = other DNA
ttaaccgaggacttcg

SEQ ID NO: 31229 - DNA, 16 bp, synthetic construct
  misc_feature 1..16: note = synthetic [barcode part1]
  source 1..16: mol_type = other DNA
gtacgttcggattcag

SEQ ID NO: 31230 - DNA, 16 bp, synthetic construct
  misc_feature 1..16: note = synthetic [barcode part1]
  source 1..16: mol_type = other DNA
tctagaacacacgcgt

SEQ ID NO: 31231 - DNA, 16 bp, synthetic construct
  misc_feature 1..16: note = synthetic [barcode part1]
  source 1..16: mol_type = other DNA
agtcggcactgattac

SEQ ID NO: 31232 - DNA, 16 bp, synthetic construct
  misc_feature 1..16: note = synthetic [barcode part1]
  source 1..16: mol_type = other DNA
cctacgcaactcgact

SEQ ID NO: 31233 - DNA, 16 bp, synthetic construct
  misc_feature 1..16: note = synthetic [barcode part1]
  source 1..16: mol_type = other DNA
ttggtgaacgaaggcc

SEQ ID NO: 31234 - DNA, 16 bp, synthetic construct
  misc_feature 1..16: note = synthetic [barcode part1]
  source 1..16: mol_type = other DNA
tgcacaggagttaagt

SEQ ID NO: 31235 - DNA, 16 bp, synthetic construct
  misc_feature 1..16: note = synthetic [barcode part1]
  source 1..16: mol_type = other DNA
gttagtgaggttgaac

SEQ ID NO: 31236 - DNA, 16 bp, synthetic construct
  misc_feature 1..16: note = synthetic [barcode part1]
  source 1..16: mol_type = other DNA
attgttacgtgaggag

SEQ ID NO: 31237 - DNA, 16 bp, synthetic construct
  misc_feature 1..16: note = synthetic [barcode part1]
  source 1..16: mol_type = other DNA
tattggacaccggact

SEQ ID NO: 31238 - DNA, 16 bp, synthetic construct
  misc_feature 1..16: note = synthetic [barcode part1]
  source 1..16: mol_type = other DNA
ttaatccggtgtgttc

SEQ ID NO: 31239 - DNA, 16 bp, synthetic construct
  misc_feature 1..16: note = synthetic [barcode part1]
  source 1..16: mol_type = other DNA
agtctggtacaagagt

SEQ ID NO: 31240 - DNA, 16 bp, synthetic construct
  misc_feature 1..16: note = synthetic [barcode part1]
  source 1..16: mol_type = other DNA
tactgtctaccagtgt

SEQ ID NO: 31241 - DNA, 16 bp, synthetic construct
  misc_feature 1..16: note = synthetic [barcode part1]
  source 1..16: mol_type = other DNA
attcttgcgccggatc

SEQ ID NO: 31242 - DNA, 16 bp, synthetic construct
  misc_feature 1..16: note = synthetic [barcode part1]
  source 1..16: mol_type = other DNA
gaacttgagtacgtcc

SEQ ID NO: 31243 - DNA, 16 bp, synthetic construct
  misc_feature 1..16: note = synthetic [barcode part1]
  source 1..16: mol_type = other DNA
cgcagatcgagtatct

SEQ ID NO: 31244 - DNA, 16 bp, synthetic construct
  misc_feature 1..16: note = synthetic [barcode part1]
  source 1..16: mol_type = other DNA
tacgtaggaactgaac

SEQ ID NO: 31245 - DNA, 16 bp, synthetic construct
  misc_feature 1..16: note = synthetic [barcode part1]
  source 1..16: mol_type = other DNA
ccaaccttctgcagac

SEQ ID NO: 31246 - DNA, 16 bp, synthetic construct
  misc_feature 1..16: note = synthetic [barcode part1]
  source 1..16: mol_type = other DNA
tgtatctggtaactcc

SEQ ID NO: 31247 - DNA, 16 bp, synthetic construct
  misc_feature 1..16: note = synthetic [barcode part1]
  source 1..16: mol_type = other DNA
tgtaacaggacagact

SEQ ID NO: 31248 - DNA, 16 bp, synthetic construct
  misc_feature 1..16: note = synthetic [barcode part1]
  source 1..16: mol_type = other DNA
aacgattctctgcact

SEQ ID NO: 31249 - DNA, 16 bp, synthetic construct
  misc_feature 1..16: note = synthetic [barcode part1]
  source 1..16: mol_type = other DNA
agattaccaaggacgt

SEQ ID NO: 31250 - DNA, 16 bp, synthetic construct
  misc_feature 1..16: note = synthetic [barcode part1]
  source 1..16: mol_type = other DNA
tcgaaggccttactag

SEQ ID NO: 31251 - DNA, 16 bp, synthetic construct
  misc_feature 1..16: note = synthetic [barcode part1]
  source 1..16: mol_type = other DNA
cgccgaatacttccac

SEQ ID NO: 31252 - DNA, 16 bp, synthetic construct
  misc_feature 1..16: note = synthetic [barcode part1]
  source 1..16: mol_type = other DNA
tctgtaccaacctagt

SEQ ID NO: 31253 - DNA, 16 bp, synthetic construct
  misc_feature 1..16: note = synthetic [barcode part1]
  source 1..16: mol_type = other DNA
acggccactctctaac

SEQ ID NO: 31254 - DNA, 16 bp, synthetic construct
  misc_feature 1..16: note = synthetic [barcode part1]
  source 1..16: mol_type = other DNA
acacaggataggaacg

SEQ ID NO: 31255 - DNA, 16 bp, synthetic construct
  misc_feature 1..16: note = synthetic [barcode part1]
  source 1..16: mol_type = other DNA
ccgtggtaattaaccg

SEQ ID NO: 31256 - DNA, 16 bp, synthetic construct
  misc_feature 1..16: note = synthetic [barcode part1]
  source 1..16: mol_type = other DNA
gttggagattaacgtg

SEQ ID NO: 31257 - DNA, 16 bp, synthetic construct
  misc_feature 1..16: note = synthetic [barcode part1]
  source 1..16: mol_type = other DNA
tcacaagagtggtaac

SEQ ID NO: 31258 - DNA, 16 bp, synthetic construct
  misc_feature 1..16: note = synthetic [barcode part1]
  source 1..16: mol_type = other DNA
gcaggaacaattcaac

SEQ ID NO: 31259 - DNA, 16 bp, synthetic construct
  misc_feature 1..16: note = synthetic [barcode part1]
  source 1..16: mol_type = other DNA
aactatagtcacgcgc

SEQ ID NO: 31260 - DNA, 16 bp, synthetic construct
  misc_feature 1..16: note = synthetic [barcode part1]
  source 1..16: mol_type = other DNA
gtagtcgcaatcacgt

SEQ ID NO: 31261 - DNA, 16 bp, synthetic construct
  misc_feature 1..16: note = synthetic [barcode part1]
  source 1..16: mol_type = other DNA
aggtgcaacgtaagag

SEQ ID NO: 31262 - DNA, 16 bp, synthetic construct
  misc_feature 1..16: note = synthetic [barcode part1]
  source 1..16: mol_type = other DNA
ccgtgtctgtcgagtt

SEQ ID NO: 31263 - DNA, 16 bp, synthetic construct
  misc_feature 1..16: note = synthetic [barcode part1]
  source 1..16: mol_type = other DNA
tccgatcagtcaagac

SEQ ID NO: 31264 - DNA, 16 bp, synthetic construct
  misc_feature 1..16: note = synthetic [barcode part1]
  source 1..16: mol_type = other DNA
tgtgacttgcaggttg

SEQ ID NO: 31265 - DNA, 16 bp, synthetic construct
  misc_feature 1..16: note = synthetic [barcode part1]
  source 1..16: mol_type = other DNA
tgtcgtccttaacctc

SEQ ID NO: 31266 - DNA, 16 bp, synthetic construct
  misc_feature 1..16: note = synthetic [barcode part1]
  source 1..16: mol_type = other DNA
gcgaagatcagaccac

SEQ ID NO: 31267 - DNA, 16 bp, synthetic construct
  misc_feature 1..16: note = synthetic [barcode part1]
  source 1..16: mol_type = other DNA
agacggtagttacgcg

SEQ ID NO: 31268 - DNA, 16 bp, synthetic construct
  misc_feature 1..16: note = synthetic [barcode part1]
  source 1..16: mol_type = other DNA
tccagtctgacgtgtc

SEQ ID NO: 31269 - DNA, 16 bp, synthetic construct
  misc_feature 1..16: note = synthetic [barcode part1]
  source 1..16: mol_type = other DNA
attcgttcaggtaggc

SEQ ID NO: 31270 - DNA, 16 bp, synthetic construct
  misc_feature 1..16: note = synthetic [barcode part1]
  source 1..16: mol_type = other DNA
tactgtgcacaacgtg

SEQ ID NO: 31271 - DNA, 16 bp, synthetic construct
  misc_feature 1..16: note = synthetic [barcode part1]
  source 1..16: mol_type = other DNA
taactctattgacgcc

SEQ ID NO: 31272 - DNA, 16 bp, synthetic construct
  misc_feature 1..16: note = synthetic [barcode part1]
  source 1..16: mol_type = other DNA
aggaggcgataacagt

SEQ ID NO: 31273 - DNA, 16 bp, synthetic construct
  misc_feature 1..16: note = synthetic [barcode part1]
  source 1..16: mol_type = other DNA
ttcacgcaaggtacac

SEQ ID NO: 31274 - DNA, 16 bp, synthetic construct
  misc_feature 1..16: note = synthetic [barcode part1]
  source 1..16: mol_type = other DNA
cgtgcaataggttcgt

SEQ ID NO: 31275 - DNA, 16 bp, synthetic construct
  misc_feature 1..16: note = synthetic [barcode part1]
  source 1..16: mol_type = other DNA
tatcggaggtgacttc

SEQ ID NO: 31276 - DNA, 16 bp, synthetic construct
  misc_feature 1..16: note = synthetic [barcode part1]
  source 1..16: mol_type = other DNA
tacgaaccgtctagac

SEQ ID NO: 31277 - DNA, 16 bp, synthetic construct
  misc_feature 1..16: note = synthetic [barcode part1]
  source 1..16: mol_type = other DNA
tgattcgttcgcgtcg

SEQ ID NO: 31278 - DNA, 16 bp, synthetic construct
  misc_feature 1..16: note = synthetic [barcode part1]
  source 1..16: mol_type = other DNA
agaacggatccgcaac

SEQ ID NO: 31279 - DNA, 16 bp, synthetic construct
  misc_feature 1..16: note = synthetic [barcode part1]
  source 1..16: mol_type = other DNA
tcgcggagacgataac

SEQ ID NO: 31280 - DNA, 16 bp, synthetic construct
  misc_feature 1..16: note = synthetic [barcode part1]
  source 1..16: mol_type = other DNA
gcactgagactgtact

SEQ ID NO: 31281 - DNA, 16 bp, synthetic construct
  misc_feature 1..16: note = synthetic [barcode part1]
  source 1..16: mol_type = other DNA
attgcaagacaggtgt

SEQ ID NO: 31282 - DNA, 16 bp, synthetic construct
  misc_feature 1..16: note = synthetic [barcode part1]
  source 1..16: mol_type = other DNA
gaggacaattcaacac

SEQ ID NO: 31283 - DNA, 16 bp, synthetic construct
  misc_feature 1..16: note = synthetic [barcode part1]
  source 1..16: mol_type = other DNA
ttccgacgattcgcac

SEQ ID NO: 31284 - DNA, 16 bp, synthetic construct
  misc_feature 1..16: note = synthetic [barcode part1]
  source 1..16: mol_type = other DNA
cgtgacgacggataac

SEQ ID NO: 31285 - DNA, 16 bp, synthetic construct
  misc_feature 1..16: note = synthetic [barcode part1]
  source 1..16: mol_type = other DNA
tcctaagatagacgag

SEQ ID NO: 31286 - DNA, 16 bp, synthetic construct
  misc_feature 1..16: note = synthetic [barcode part1]
  source 1..16: mol_type = other DNA
agttcaaggtcgtcgt

SEQ ID NO: 31287 - DNA, 16 bp, synthetic construct
  misc_feature 1..16: note = synthetic [barcode part1]
  source 1..16: mol_type = other DNA
tacgcgaatcctccgt

SEQ ID NO: 31288 - DNA, 16 bp, synthetic construct
  misc_feature 1..16: note = synthetic [barcode part1]
  source 1..16: mol_type = other DNA
atcacgactcgcctac

SEQ ID NO: 31289 - DNA, 16 bp, synthetic construct
  misc_feature 1..16: note = synthetic [barcode part1]
  source 1..16: mol_type = other DNA
tcaccacttacaagtc

SEQ ID NO: 31290 - DNA, 16 bp, synthetic construct
  misc_feature 1..16: note = synthetic [barcode part1]
  source 1..16: mol_type = other DNA
tgagtgttggtagaac

SEQ ID NO: 31291 - DNA, 16 bp, synthetic construct
  misc_feature 1..16: note = synthetic [barcode part1]
  source 1..16: mol_type = other DNA
cagtgaccacagaggt

SEQ ID NO: 31292 - DNA, 16 bp, synthetic construct
  misc_feature 1..16: note = synthetic [barcode part1]
  source 1..16: mol_type = other DNA
ttactacggcacttac

SEQ ID NO: 31293 - DNA, 16 bp, synthetic construct
  misc_feature 1..16: note = synthetic [barcode part1]
  source 1..16: mol_type = other DNA
aagtaaggcgagtgac

SEQ ID NO: 31294 - DNA, 16 bp, synthetic construct
  misc_feature 1..16: note = synthetic [barcode part1]
  source 1..16: mol_type = other DNA
cagtagttcggatcac

SEQ ID NO: 31295 - DNA, 16 bp, synthetic construct
  misc_feature 1..16: note = synthetic [barcode part1]
  source 1..16: mol_type = other DNA
caggacaataatcacg

SEQ ID NO: 31296 - DNA, 16 bp, synthetic construct
  misc_feature 1..16: note = synthetic [barcode part1]
  source 1..16: mol_type = other DNA
aatcaccttgtcggag

SEQ ID NO: 31297 - DNA, 16 bp, synthetic construct
  misc_feature 1..16: note = synthetic [barcode part1]
  source 1..16: mol_type = other DNA
taactctgcgtgttac

SEQ ID NO: 31298 - DNA, 16 bp, synthetic construct
  misc_feature 1..16: note = synthetic [barcode part1]
  source 1..16: mol_type = other DNA
gatatcgattacggcc

SEQ ID NO: 31299 - DNA, 16 bp, synthetic construct
  misc_feature 1..16: note = synthetic [barcode part1]
  source 1..16: mol_type = other DNA
aaggtgcaggatacag

SEQ ID NO: 31300 - DNA, 16 bp, synthetic construct
  misc_feature 1..16: note = synthetic [barcode part1]
  source 1..16: mol_type = other DNA
attgccactctcgcag

SEQ ID NO: 31301 - DNA, 16 bp, synthetic construct
  misc_feature 1..16: note = synthetic [barcode part1]
  source 1..16: mol_type = other DNA
acagtgcaatcggtct

SEQ ID NO: 31302 - DNA, 16 bp, synthetic construct
  misc_feature 1..16: note = synthetic [barcode part1]
  source 1..16: mol_type = other DNA
acttgaggaacctacc

SEQ ID NO: 31303 - DNA, 16 bp, synthetic construct
  misc_feature 1..16: note = synthetic [barcode part1]
  source 1..16: mol_type = other DNA
tcgtctggacgttgtc

SEQ ID NO: 31304 - DNA, 16 bp, synthetic construct
  misc_feature 1..16: note = synthetic [barcode part1]
  source 1..16: mol_type = other DNA
gcggattgagaattgt

SEQ ID NO: 31305 - DNA, 16 bp, synthetic construct
  misc_feature 1..16: note = synthetic [barcode part1]
  source 1..16: mol_type = other DNA
tactgagtgccagatc

SEQ ID NO: 31306 - DNA, 16 bp, synthetic construct
  misc_feature 1..16: note = synthetic [barcode part1]
  source 1..16: mol_type = other DNA
caaggaatcggtctct

SEQ ID NO: 31307 - DNA, 16 bp, synthetic construct
  misc_feature 1..16: note = synthetic [barcode part1]
  source 1..16: mol_type = other DNA
gcaatacttccaaggc

SEQ ID NO: 31308 - DNA, 16 bp, synthetic construct
  misc_feature 1..16: note = synthetic [barcode part1]
  source 1..16: mol_type = other DNA
tacttgcagatcctgt

SEQ ID NO: 31309 - DNA, 16 bp, synthetic construct
  misc_feature 1..16: note = synthetic [barcode part1]
  source 1..16: mol_type = other DNA
cgtgtataggaccttg

SEQ ID NO: 31310 - DNA, 16 bp, synthetic construct
  misc_feature 1..16: note = synthetic [barcode part1]
  source 1..16: mol_type = other DNA
acgttgacggtaggac

SEQ ID NO: 31311 - DNA, 16 bp, synthetic construct
  misc_feature 1..16: note = synthetic [barcode part1]
  source 1..16: mol_type = other DNA
acgagagactactggc

SEQ ID NO: 31312 - DNA, 16 bp, synthetic construct
  misc_feature 1..16: note = synthetic [barcode part1]
  source 1..16: mol_type = other DNA
acgatactctctcctc

SEQ ID NO: 31313 - DNA, 16 bp, synthetic construct
  misc_feature 1..16: note = synthetic [barcode part1]
  source 1..16: mol_type = other DNA
attgcactgtagaccg

SEQ ID NO: 31314 - DNA, 16 bp, synthetic construct
  misc_feature 1..16: note = synthetic [barcode part1]
  source 1..16: mol_type = other DNA
atcacagtactcgttc

SEQ ID NO: 31315 - DNA, 16 bp, synthetic construct
  misc_feature 1..16: note = synthetic [barcode part1]
  source 1..16: mol_type = other DNA
tgaactgtgtgcctcc

SEQ ID NO: 31316 - DNA, 16 bp, synthetic construct
  misc_feature 1..16: note = synthetic [barcode part1]
  source 1..16: mol_type = other DNA
atatctctgatccgac

SEQ ID NO: 31317 - DNA, 16 bp, synthetic construct
  misc_feature 1..16: note = synthetic [barcode part1]
  source 1..16: mol_type = other DNA
tctcaaccgtaagtct

SEQ ID NO: 31318 - DNA, 16 bp, synthetic construct
  misc_feature 1..16: note = synthetic [barcode part1]
  source 1..16: mol_type = other DNA
actacagaggtcttgc

SEQ ID NO: 31319 - DNA, 16 bp, synthetic construct
  misc_feature 1..16: note = synthetic [barcode part1]
  source 1..16: mol_type = other DNA
gttaccaattaggccg

SEQ ID NO: 31320 - DNA, 16 bp, synthetic construct
  misc_feature 1..16: note = synthetic [barcode part1]
  source 1..16: mol_type = other DNA
attgacgaagtcagac

SEQ ID NO: 31321 - DNA, 16 bp, synthetic construct
  misc_feature 1..16: note = synthetic [barcode part1]
  source 1..16: mol_type = other DNA
cgtagacgaacctact

SEQ ID NO: 31322 - DNA, 16 bp, synthetic construct
  misc_feature 1..16: note = synthetic [barcode part1]
  source 1..16: mol_type = other DNA
ttcggtacgaatcgtg

SEQ ID NO: 31323 - DNA, 16 bp, synthetic construct
  misc_feature 1..16: note = synthetic [barcode part1]
  source 1..16: mol_type = other DNA
gcagagtagactcgtg

SEQ ID NO: 31324 - DNA, 16 bp, synthetic construct
  misc_feature 1..16: note = synthetic [barcode part1]
  source 1..16: mol_type = other DNA
tattagaggcacagac

SEQ ID NO: 31325 - DNA, 16 bp, synthetic construct
  misc_feature 1..16: note = synthetic [barcode part1]
  source 1..16: mol_type = other DNA
agacttcgcgtatacg

SEQ ID NO: 31326 - DNA, 16 bp, synthetic construct
  misc_feature 1..16: note = synthetic [barcode part1]
  source 1..16: mol_type = other DNA
cgtaggccgttacttc

SEQ ID NO: 31327 - DNA, 16 bp, synthetic construct
  misc_feature 1..16: note = synthetic [barcode part1]
  source 1..16: mol_type = other DNA
aggacttgtgacactc

SEQ ID NO: 31328 - DNA, 16 bp, synthetic construct
  misc_feature 1..16: note = synthetic [barcode part1]
  source 1..16: mol_type = other DNA
ccgattccagaagatc

SEQ ID NO: 31329 - DNA, 16 bp, synthetic construct
  misc_feature 1..16: note = synthetic [barcode part1]
  source 1..16: mol_type = other DNA
gtgattctgttctcag

SEQ ID NO: 31330 - DNA, 16 bp, synthetic construct
  misc_feature 1..16: note = synthetic [barcode part1]
  source 1..16: mol_type = other DNA
cggttggttaattggc

SEQ ID NO: 31331 - DNA, 16 bp, synthetic construct
  misc_feature 1..16: note = synthetic [barcode part1]
  source 1..16: mol_type = other DNA
gtatacgtacgcgtac

SEQ ID NO: 31332 - DNA, 16 bp, synthetic construct
  misc_feature 1..16: note = synthetic [barcode part1]
  source 1..16: mol_type = other DNA
ccagtctcactaacgc

SEQ ID NO: 31333 - DNA, 16 bp, synthetic construct
  misc_feature 1..16: note = synthetic [barcode part1]
  source 1..16: mol_type = other DNA
cctgacctagtatact

SEQ ID NO: 31334 - DNA, 16 bp, synthetic construct
  misc_feature 1..16: note = synthetic [barcode part1]
  source 1..16: mol_type = other DNA
ttcttggcgcgcagtt

SEQ ID NO: 31335 - DNA, 16 bp, synthetic construct
  misc_feature 1..16: note = synthetic [barcode part1]
  source 1..16: mol_type = other DNA
tgcaagttctgaacgc

SEQ ID NO: 31336 - DNA, 16 bp, synthetic construct
  misc_feature 1..16: note = synthetic [barcode part1]
  source 1..16: mol_type = other DNA
gactcctgcacttgac

SEQ ID NO: 31337 - DNA, 16 bp, synthetic construct
  misc_feature 1..16: note = synthetic [barcode part1]
  source 1..16: mol_type = other DNA
ttacggtcgacactag

SEQ ID NO: 31338 - DNA, 16 bp, synthetic construct
  misc_feature 1..16: note = synthetic [barcode part1]
  source 1..16: mol_type = other DNA
acaacctggacacgag

SEQ ID NO: 31339 - DNA, 16 bp, synthetic construct
  misc_feature 1..16: note = synthetic [barcode part1]
  source 1..16: mol_type = other DNA
tgcgaaccgaagtggt

SEQ ID NO: 31340 - DNA, 16 bp, synthetic construct
  misc_feature 1..16: note = synthetic [barcode part1]
  source 1..16: mol_type = other DNA
tcactgtaagtccgtt

SEQ ID NO: 31341 - DNA, 16 bp, synthetic construct
  misc_feature 1..16: note = synthetic [barcode part1]
  source 1..16: mol_type = other DNA
gtacggcctagagaac

SEQ ID NO: 31342 - DNA, 16 bp, synthetic construct
  misc_feature 1..16: note = synthetic [barcode part1]
  source 1..16: mol_type = other DNA
atcaacggccttccac

SEQ ID NO: 31343 - DNA, 16 bp, synthetic construct
  misc_feature 1..16: note = synthetic [barcode part1]
  source 1..16: mol_type = other DNA
tacaacggagtgaatc

SEQ ID NO: 31344 - DNA, 16 bp, synthetic construct
  misc_feature 1..16: note = synthetic [barcode part1]
  source 1..16: mol_type = other DNA
ttcggcgattctcgtg

SEQ ID NO: 31345 - DNA, 16 bp, synthetic construct
  misc_feature 1..16: note = synthetic [barcode part1]
  source 1..16: mol_type = other DNA
cacgcctaatagtctt

SEQ ID NO: 31346 - DNA, 16 bp, synthetic construct
  misc_feature 1..16: note = synthetic [barcode part1]
  source 1..16: mol_type = other DNA
aactcggatcagacct

SEQ ID NO: 31347 - DNA, 16 bp, synthetic construct
  misc_feature 1..16: note = synthetic [barcode part1]
  source 1..16: mol_type = other DNA
tcttcaggtcagtact

SEQ ID NO: 31348 - DNA, 16 bp, synthetic construct
  misc_feature 1..16: note = synthetic [barcode part1]
  source 1..16: mol_type = other DNA
ttcctctgccaactac

SEQ ID NO: 31349 - DNA, 16 bp, synthetic construct
  misc_feature 1..16: note = synthetic [barcode part1]
  source 1..16: mol_type = other DNA
tccgtaacttgttacg

SEQ ID NO: 31350 - DNA, 16 bp, synthetic construct
  misc_feature 1..16: note = synthetic [barcode part1]
  source 1..16: mol_type = other DNA
gcaacgtgttggttgt

SEQ ID NO: 31351 - DNA, 16 bp, synthetic construct
  misc_feature 1..16: note = synthetic [barcode part1]
  source 1..16: mol_type = other DNA
ccgcctacactgtagt

SEQ ID NO: 31352 - DNA, 16 bp, synthetic construct
  misc_feature 1..16: note = synthetic [barcode part1]
  source 1..16: mol_type = other DNA
gtcgaagataccgacg

SEQ ID NO: 31353 - DNA, 16 bp, synthetic construct
  misc_feature 1..16: note = synthetic [barcode part1]
  source 1..16: mol_type = other DNA
ttccgtaactgccggt

SEQ ID NO: 31354 - DNA, 16 bp, synthetic construct
  misc_feature 1..16: note = synthetic [barcode part1]
  source 1..16: mol_type = other DNA
gattctccgacctctt

SEQ ID NO: 31355 - DNA, 16 bp, synthetic construct
  misc_feature 1..16: note = synthetic [barcode part1]
  source 1..16: mol_type = other DNA
ttcgcgtagagtacac

SEQ ID NO: 31356 - DNA, 16 bp, synthetic construct
  misc_feature 1..16: note = synthetic [barcode part1]
  source 1..16: mol_type = other DNA
cagtgttgcaacactg

SEQ ID NO: 31357 - DNA, 16 bp, synthetic construct
  misc_feature 1..16: note = synthetic [barcode part1]
  source 1..16: mol_type = other DNA
aagtgttcgtccaggt

SEQ ID NO: 31358 - DNA, 16 bp, synthetic construct
  misc_feature 1..16: note = synthetic [barcode part1]
  source 1..16: mol_type = other DNA
tgtcagacaccttcgc

SEQ ID NO: 31359 - DNA, 16 bp, synthetic construct
  misc_feature 1..16: note = synthetic [barcode part1]
  source 1..16: mol_type = other DNA
ccactggtaacagttg

SEQ ID NO: 31360 - DNA, 16 bp, synthetic construct
  misc_feature 1..16: note = synthetic [barcode part1]
  source 1..16: mol_type = other DNA
acgagacttacaggcg

SEQ ID NO: 31361 - DNA, 16 bp, synthetic construct
  misc_feature 1..16: note = synthetic [barcode part1]
  source 1..16: mol_type = other DNA
tgagtggagatcttag

SEQ ID NO: 31362 - DNA, 16 bp, synthetic construct
  misc_feature 1..16: note = synthetic [barcode part1]
  source 1..16: mol_type = other DNA
actggcaagattaggt

SEQ ID NO: 31363 - DNA, 16 bp, synthetic construct
  misc_feature 1..16: note = synthetic [barcode part1]
  source 1..16: mol_type = other DNA
agatcgcctgcgtctt

SEQ ID NO: 31364 - DNA, 16 bp, synthetic construct
  misc_feature 1..16: note = synthetic [barcode part1]
  source 1..16: mol_type = other DNA
tctgacctacacggtc

SEQ ID NO: 31365 - DNA, 16 bp, synthetic construct
  misc_feature 1..16: note = synthetic [barcode part1]
  source 1..16: mol_type = other DNA
aataggagtatctggc

SEQ ID NO: 31366 - DNA, 16 bp, synthetic construct
  misc_feature 1..16: note = synthetic [barcode part1]
  source 1..16: mol_type = other DNA
taccaacctagagaag

SEQ ID NO: 31367 - DNA, 16 bp, synthetic construct
  misc_feature 1..16: note = synthetic [barcode part1]
  source 1..16: mol_type = other DNA
tgcaggcaccttgttc

SEQ ID NO: 31368 - DNA, 16 bp, synthetic construct
  misc_feature 1..16: note = synthetic [barcode part1]
  source 1..16: mol_type = other DNA
tcacttgcggaatctt

SEQ ID NO: 31369 - DNA, 16 bp, synthetic construct
  misc_feature 1..16: note = synthetic [barcode part1]
  source 1..16: mol_type = other DNA
aagtccaagatcagac

SEQ ID NO: 31370 - DNA, 16 bp, synthetic construct
  misc_feature 1..16: note = synthetic [barcode part1]
  source 1..16: mol_type = other DNA
accacaactacttgtc

SEQ ID NO: 31371 - DNA, 16 bp, synthetic construct
  misc_feature 1..16: note = synthetic [barcode part1]
  source 1..16: mol_type = other DNA
gttgcgattatccgtt

SEQ ID NO: 31372 - DNA, 16 bp, synthetic construct
  misc_feature 1..16: note = synthetic [barcode part1]
  source 1..16: mol_type = other DNA
gacgtgtctccgactt

SEQ ID NO: 31373 - DNA, 16 bp, synthetic construct
  misc_feature 1..16: note = synthetic [barcode part1]
  source 1..16: mol_type = other DNA
tgacactcgcctactg

SEQ ID NO: 31374 - DNA, 16 bp, synthetic construct
  misc_feature 1..16: note = synthetic [barcode part1]
  source 1..16: mol_type = other DNA
gtgtggtgtgtcaact

SEQ ID NO: 31375 - DNA, 16 bp, synthetic construct
  misc_feature 1..16: note = synthetic [barcode part1]
  source 1..16: mol_type = other DNA
gttaacactacgcggt

SEQ ID NO: 31376 - DNA, 16 bp, synthetic construct
  misc_feature 1..16: note = synthetic [barcode part1]
  source 1..16: mol_type = other DNA
tcctcgtcaggttgtg

SEQ ID NO: 31377 - DNA, 16 bp, synthetic construct
  misc_feature 1..16: note = synthetic [barcode part1]
  source 1..16: mol_type = other DNA
gtcgtccacaggtctt

SEQ ID NO: 31378 - DNA, 16 bp, synthetic construct
  misc_feature 1..16: note = synthetic [barcode part1]
  source 1..16: mol_type = other DNA
acttaggacgacggac

SEQ ID NO: 31379 - DNA, 16 bp, synthetic construct
  misc_feature 1..16: note = synthetic [barcode part1]
  source 1..16: mol_type = other DNA
tcgaacgttgtggact

SEQ ID NO: 31380 - DNA, 16 bp, synthetic construct
  misc_feature 1..16: note = synthetic [barcode part1]
  source 1..16: mol_type = other DNA
gttggattccggtaac

SEQ ID NO: 31381 - DNA, 16 bp, synthetic construct
  misc_feature 1..16: note = synthetic [barcode part1]
  source 1..16: mol_type = other DNA
cagatcgaacctgact

SEQ ID NO: 31382 - DNA, 16 bp, synthetic construct
  misc_feature 1..16: note = synthetic [barcode part1]
  source 1..16: mol_type = other DNA
ttgcaacgtgtacgtg

SEQ ID NO: 31383 - DNA, 16 bp, synthetic construct
  misc_feature 1..16: note = synthetic [barcode part1]
  source 1..16: mol_type = other DNA
cctacaacgaggtgag

SEQ ID NO: 31384 - DNA, 16 bp, synthetic construct
  misc_feature 1..16: note = synthetic [barcode part1]
  source 1..16: mol_type = other DNA
gaagacaacgacttgt

SEQ ID NO: 31385 - DNA, 16 bp, synthetic construct
  misc_feature 1..16: note = synthetic [barcode part1]
  source 1..16: mol_type = other DNA
gtagactcgtatcgac

SEQ ID NO: 31386 - DNA, 16 bp, synthetic construct
  misc_feature 1..16: note = synthetic [barcode part1]
  source 1..16: mol_type = other DNA
ttactgccgtctaagt

SEQ ID NO: 31387 - DNA, 16 bp, synthetic construct
  misc_feature 1..16: note = synthetic [barcode part1]
  source 1..16: mol_type = other DNA
ccgatctacgattatc

SEQ ID NO: 31388 - DNA, 16 bp, synthetic construct
  misc_feature 1..16: note = synthetic [barcode part1]
  source 1..16: mol_type = other DNA
tgacgatctcctgtgc

SEQ ID NO: 31389 - DNA, 16 bp, synthetic construct
  misc_feature 1..16: note = synthetic [barcode part1]
  source 1..16: mol_type = other DNA
gcacacagtgtacgtt

SEQ ID NO: 31390 - DNA, 16 bp, synthetic construct
  misc_feature 1..16: note = synthetic [barcode part1]
  source 1..16: mol_type = other DNA
gagttaacagtgtgtg

SEQ ID NO: 31391 - DNA, 16 bp, synthetic construct
  misc_feature 1..16: note = synthetic [barcode part1]
  source 1..16: mol_type = other DNA
acgcggtctaaggaac

SEQ ID NO: 31392 - DNA, 16 bp, synthetic construct
  misc_feature 1..16: note = synthetic [barcode part1]
  source 1..16: mol_type = other DNA
ccgcaagttactattc

SEQ ID NO: 31393 - DNA, 16 bp, synthetic construct
  misc_feature 1..16: note = synthetic [barcode part1]
  source 1..16: mol_type = other DNA
ttgaacggagtgacgc

SEQ ID NO: 31394 - DNA, 16 bp, synthetic construct
  misc_feature 1..16: note = synthetic [barcode part1]
  source 1..16: mol_type = other DNA
gaagagtgtccaagtt

SEQ ID NO: 31395 - DNA, 16 bp, synthetic construct
  misc_feature 1..16: note = synthetic [barcode part1]
  source 1..16: mol_type = other DNA
accgtgaggataagtt

SEQ ID NO: 31396 - DNA, 16 bp, synthetic construct
  misc_feature 1..16: note = synthetic [barcode part1]
  source 1..16: mol_type = other DNA
tcagtggcctatactt

SEQ ID NO: 31397 - DNA, 16 bp, synthetic construct
  misc_feature 1..16: note = synthetic [barcode part1]
  source 1..16: mol_type = other DNA
accactaagttcggtg

SEQ ID NO: 31398 - DNA, 16 bp, synthetic construct
  misc_feature 1..16: note = synthetic [barcode part1]
  source 1..16: mol_type = other DNA
cagtactaggttccag

SEQ ID NO: 31399 - DNA, 16 bp, synthetic construct
  misc_feature 1..16: note = synthetic [barcode part1]
  source 1..16: mol_type = other DNA
gaacctgacgactgtt

SEQ ID NO: 31400 - DNA, 16 bp, synthetic construct
  misc_feature 1..16: note = synthetic [barcode part1]
  source 1..16: mol_type = other DNA
cggtaaggcgaatctg

SEQ ID NO: 31401 - DNA, 16 bp, synthetic construct
  misc_feature 1..16: note = synthetic [barcode part1]
  source 1..16: mol_type = other DNA
tgatcactaccggtag

SEQ ID NO: 31402 - DNA, 16 bp, synthetic construct
  misc_feature 1..16: note = synthetic [barcode part1]
  source 1..16: mol_type = other DNA
ccgcaggagatcaagt

SEQ ID NO: 31403 - DNA, 16 bp, synthetic construct
  misc_feature 1..16: note = synthetic [barcode part1]
  source 1..16: mol_type = other DNA
aatacgtgttgcgcgt

SEQ ID NO: 31404 - DNA, 16 bp, synthetic construct
  misc_feature 1..16: note = synthetic [barcode part1]
  source 1..16: mol_type = other DNA
gacggtactgcaagtg

SEQ ID NO: 31405 - DNA, 16 bp, synthetic construct
  misc_feature 1..16: note = synthetic [barcode part1]
  source 1..16: mol_type = other DNA
gtggcaattgtgcgag

SEQ ID NO: 31406 - DNA, 16 bp, synthetic construct
  misc_feature 1..16: note = synthetic [barcode part1]
  source 1..16: mol_type = other DNA
tgattcggtctggtag

SEQ ID NO: 31407 - DNA, 16 bp, synthetic construct
  misc_feature 1..16: note = synthetic [barcode part1]
  source 1..16: mol_type = other DNA
tgcgaattaaggcggc

SEQ ID NO: 31408 - DNA, 16 bp, synthetic construct
  misc_feature 1..16: note = synthetic [barcode part1]
  source 1..16: mol_type = other DNA
gactacgttctgatct

SEQ ID NO: 31409 - DNA, 16 bp, synthetic construct
  misc_feature 1..16: note = synthetic [barcode part1]
  source 1..16: mol_type = other DNA
cggtagtgattcgact

SEQ ID NO: 31410 - DNA, 16 bp, synthetic construct
  misc_feature 1..16: note = synthetic [barcode part1]
  source 1..16: mol_type = other DNA
gttgtagtaggacctc

SEQ ID NO: 31411 - DNA, 16 bp, synthetic construct
  misc_feature 1..16: note = synthetic [barcode part1]
  source 1..16: mol_type = other DNA
gatccagaatcaccgt

SEQ ID NO: 31412 - DNA, 16 bp, synthetic construct
  misc_feature 1..16: note = synthetic [barcode part1]
  source 1..16: mol_type = other DNA
cgtccgtatcttaagt

SEQ ID NO: 31413 - DNA, 16 bp, synthetic construct
  misc_feature 1..16: note = synthetic [barcode part1]
  source 1..16: mol_type = other DNA
atctgtcacaacgtct

SEQ ID NO: 31414 - DNA, 16 bp, synthetic construct
  misc_feature 1..16: note = synthetic [barcode part1]
  source 1..16: mol_type = other DNA
ccggcctaacgtattc

SEQ ID NO: 31415 - DNA, 16 bp, synthetic construct
  misc_feature 1..16: note = synthetic [barcode part1]
  source 1..16: mol_type = other DNA
tacacgtggttagtcg

SEQ ID NO: 31416 - DNA, 16 bp, synthetic construct
  misc_feature 1..16: note = synthetic [barcode part1]
  source 1..16: mol_type = other DNA
gaattcgactcagacc

SEQ ID NO: 31417 - DNA, 16 bp, synthetic construct
  misc_feature 1..16: note = synthetic [barcode part1]
  source 1..16: mol_type = other DNA
cctggaatcaactggt

SEQ ID NO: 31418 - DNA, 16 bp, synthetic construct
  misc_feature 1..16: note = synthetic [barcode part1]
  source 1..16: mol_type = other DNA
acactcttgcgtctct

SEQ ID NO: 31419 - DNA, 16 bp, synthetic construct
  misc_feature 1..16: note = synthetic [barcode part1]
  source 1..16: mol_type = other DNA
taagactgtgtcgcgt

SEQ ID NO: 31420 - DNA, 16 bp, synthetic construct
  misc_feature 1..16: note = synthetic [barcode part1]
  source 1..16: mol_type = other DNA
tgttgtggatcaaccg

SEQ ID NO: 31421 - DNA, 16 bp, synthetic construct
  misc_feature 1..16: note = synthetic [barcode part1]
  source 1..16: mol_type = other DNA
ttctgtaggtccgacc

SEQ ID NO: 31422 - DNA, 16 bp, synthetic construct
  misc_feature 1..16: note = synthetic [barcode part1]
  source 1..16: mol_type = other DNA
tcacctgacttgtctc

SEQ ID NO: 31423 - DNA, 16 bp, synthetic construct
  misc_feature 1..16: note = synthetic [barcode part1]
  source 1..16: mol_type = other DNA
gttctgttgaacctgt

SEQ ID NO: 31424 - DNA, 16 bp, synthetic construct
  misc_feature 1..16: note = synthetic [barcode part1]
  source 1..16: mol_type = other DNA
actgtacctgaacacg

SEQ ID NO: 31425 - DNA, 16 bp, synthetic construct
  misc_feature 1..16: note = synthetic [barcode part1]
  source 1..16: mol_type = other DNA
tattcgccagaacctt

SEQ ID NO: 31426 - DNA, 16 bp, synthetic construct
  misc_feature 1..16: note = synthetic [barcode part1]
  source 1..16: mol_type = other DNA
acgcggtaggattgac

SEQ ID NO: 31427 - DNA, 16 bp, synthetic construct
  misc_feature 1..16: note = synthetic [barcode part1]
  source 1..16: mol_type = other DNA
tatcgttagtacgtcc

SEQ ID NO: 31428 - DNA, 16 bp, synthetic construct
  misc_feature 1..16: note = synthetic [barcode part1]
  source 1..16: mol_type = other DNA
agatccggagttaagt

SEQ ID NO: 31429 - DNA, 16 bp, synthetic construct
  misc_feature 1..16: note = synthetic [barcode part1]
  source 1..16: mol_type = other DNA
attggtactgccactt

SEQ ID NO: 31430 - DNA, 16 bp, synthetic construct
  misc_feature 1..16: note = synthetic [barcode part1]
  source 1..16: mol_type = other DNA
gacacttcaagaggcg

SEQ ID NO: 31431 - DNA, 16 bp, synthetic construct
  misc_feature 1..16: note = synthetic [barcode part1]
  source 1..16: mol_type = other DNA
tcggttccttgtaggc

SEQ ID NO: 31432 - DNA, 16 bp, synthetic construct
  misc_feature 1..16: note = synthetic [barcode part1]
  source 1..16: mol_type = other DNA
cggtacagattgcact

SEQ ID NO: 31433 - DNA, 16 bp, synthetic construct
  misc_feature 1..16: note = synthetic [barcode part1]
  source 1..16: mol_type = other DNA
ttggtgttggtacgtg

SEQ ID NO: 31434 - DNA, 16 bp, synthetic construct
  misc_feature 1..16: note = synthetic [barcode part1]
  source 1..16: mol_type = other DNA
gagaacacctaacagt

SEQ ID NO: 31435 - DNA, 16 bp, synthetic construct
  misc_feature 1..16: note = synthetic [barcode part1]
  source 1..16: mol_type = other DNA
taagagtaggtgcgag

SEQ ID NO: 31436 - DNA, 16 bp, synthetic construct
  misc_feature 1..16: note = synthetic [barcode part1]
  source 1..16: mol_type = other DNA
tgacgcagaaggtcgt

SEQ ID NO: 31437 - DNA, 16 bp, synthetic construct
  misc_feature 1..16: note = synthetic [barcode part1]
  source 1..16: mol_type = other DNA
tggactagaagtgcgc

SEQ ID NO: 31438 - DNA, 16 bp, synthetic construct
  misc_feature 1..16: note = synthetic [barcode part1]
  source 1..16: mol_type = other DNA
ttcgaccgtatactac

SEQ ID NO: 31439 - DNA, 16 bp, synthetic construct
  misc_feature 1..16: note = synthetic [barcode part1]
  source 1..16: mol_type = other DNA
ttgattcggatcaggc

SEQ ID NO: 31440 - DNA, 16 bp, synthetic construct
  misc_feature 1..16: note = synthetic [barcode part1]
  source 1..16: mol_type = other DNA
gaacctgagtggcagt

SEQ ID NO: 31441 - DNA, 16 bp, synthetic construct
  misc_feature 1..16: note = synthetic [barcode part1]
  source 1..16: mol_type = other DNA
cagacagaatactgtg

SEQ ID NO: 31442 - DNA, 16 bp, synthetic construct
  misc_feature 1..16: note = synthetic [barcode part1]
  source 1..16: mol_type = other DNA
gcagtgttggtcagtt

SEQ ID NO: 31443 - DNA, 16 bp, synthetic construct
  misc_feature 1..16: note = synthetic [barcode part1]
  source 1..16: mol_type = other DNA
tgcgtctaacaatctc

SEQ ID NO: 31444 - DNA, 16 bp, synthetic construct
  misc_feature 1..16: note = synthetic [barcode part1]
  source 1..16: mol_type = other DNA
aaggcagacaataggc

SEQ ID NO: 31445 - DNA, 16 bp, synthetic construct
  misc_feature 1..16: note = synthetic [barcode part1]
  source 1..16: mol_type = other DNA
caatattctgtccacg

SEQ ID NO: 31446 - DNA, 16 bp, synthetic construct
  misc_feature 1..16: note = synthetic [barcode part1]
  source 1..16: mol_type = other DNA
accacctctacgagtc

SEQ ID NO: 31447 - DNA, 16 bp, synthetic construct
  misc_feature 1..16: note = synthetic [barcode part1]
  source 1..16: mol_type = other DNA
aggacagatctcgttc

SEQ ID NO: 31448 - DNA, 16 bp, synthetic construct
  misc_feature 1..16: note = synthetic [barcode part1]
  source 1..16: mol_type = other DNA
tggataccttcgttac

SEQ ID NO: 31449 - DNA, 16 bp, synthetic construct
  misc_feature 1..16: note = synthetic [barcode part1]
  source 1..16: mol_type = other DNA
gaataaccggtgagag

SEQ ID NO: 31450 - DNA, 16 bp, synthetic construct
  misc_feature 1..16: note = synthetic [barcode part1]
  source 1..16: mol_type = other DNA
gtcgtattctctaacg

SEQ ID NO: 31451 - DNA, 16 bp, synthetic construct
  misc_feature 1..16: note = synthetic [barcode part1]
  source 1..16: mol_type = other DNA
tgttggtctgaagaag

SEQ ID NO: 31452 - DNA, 16 bp, synthetic construct
  misc_feature 1..16: note = synthetic [barcode part1]
  source 1..16: mol_type = other DNA
ccacaattacagtgcg

SEQ ID NO: 31453 - DNA, 16 bp, synthetic construct
  misc_feature 1..16: note = synthetic [barcode part1]
  source 1..16: mol_type = other DNA
gaggatcgttgtgcag

SEQ ID NO: 31454 - DNA, 16 bp, synthetic construct
  misc_feature 1..16: note = synthetic [barcode part1]
  source 1..16: mol_type = other DNA
gtcctactagagaacc

SEQ ID NO: 31455 - DNA, 16 bp, synthetic construct
  misc_feature 1..16: note = synthetic [barcode part1]
  source 1..16: mol_type = other DNA
ccttcgagttgacacc

SEQ ID NO: 31456 - DNA, 16 bp, synthetic construct
  misc_feature 1..16: note = synthetic [barcode part1]
  source 1..16: mol_type = other DNA
tacaccaagaatcgag

SEQ ID NO: 31457 - DNA, 16 bp, synthetic construct
  misc_feature 1..16: note = synthetic [barcode part1]
  source 1..16: mol_type = other DNA
gcgttcgaacaagacg

SEQ ID NO: 31458 - DNA, 16 bp, synthetic construct
  misc_feature 1..16: note = synthetic [barcode part1]
  source 1..16: mol_type = other DNA
tgcaacagtcttaggc

SEQ ID NO: 31459 - DNA, 16 bp, synthetic construct
  misc_feature 1..16: note = synthetic [barcode part1]
  source 1..16: mol_type = other DNA
cgttaacgaagaatcg

SEQ ID NO: 31460 - DNA, 16 bp, synthetic construct
  misc_feature 1..16: note = synthetic [barcode part1]
  source 1..16: mol_type = other DNA
aacggtctgcgtcctt

SEQ ID NO: 31461 - DNA, 16 bp, synthetic construct
  misc_feature 1..16: note = synthetic [barcode part1]
  source 1..16: mol_type = other DNA
tacacacacgtacacg

SEQ ID NO: 31462 - DNA, 16 bp, synthetic construct
  misc_feature 1..16: note = synthetic [barcode part1]
  source 1..16: mol_type = other DNA
gtcgatatctgtaggc

SEQ ID NO: 31463 - DNA, 16 bp, synthetic construct
  misc_feature 1..16: note = synthetic [barcode part1]
  source 1..16: mol_type = other DNA
tggcagagtccgtaag

SEQ ID NO: 31464 - DNA, 16 bp, synthetic construct
  misc_feature 1..16: note = synthetic [barcode part1]
  source 1..16: mol_type = other DNA
tcgcagattgttacct

SEQ ID NO: 31465 - DNA, 16 bp, synthetic construct
  misc_feature 1..16: note = synthetic [barcode part1]
  source 1..16: mol_type = other DNA
tctggccgtgtgttgt

SEQ ID NO: 31466 - DNA, 16 bp, synthetic construct
  misc_feature 1..16: note = synthetic [barcode part1]
  source 1..16: mol_type = other DNA
ttcggtactcgtaccg

SEQ ID NO: 31467 - DNA, 16 bp, synthetic construct
  misc_feature 1..16: note = synthetic [barcode part1]
  source 1..16: mol_type = other DNA
cagttcctgcgattgc

SEQ ID NO: 31468 - DNA, 16 bp, synthetic construct
  misc_feature 1..16: note = synthetic [barcode part1]
  source 1..16: mol_type = other DNA
gagttcgaccttccgt

SEQ ID NO: 31469 - DNA, 16 bp, synthetic construct
  misc_feature 1..16: note = synthetic [barcode part1]
  source 1..16: mol_type = other DNA
attaggcaagtgtgac

SEQ ID NO: 31470 - DNA, 16 bp, synthetic construct
  misc_feature 1..16: note = synthetic [barcode part1]
  source 1..16: mol_type = other DNA
gttataaggcggatac

SEQ ID NO: 31471 - DNA, 16 bp, synthetic construct
  misc_feature 1..16: note = synthetic [barcode part1]
  source 1..16: mol_type = other DNA
gtgtcttagtcgttgt

SEQ ID NO: 31472 - DNA, 16 bp, synthetic construct
  misc_feature 1..16: note = synthetic [barcode part1]
  source 1..16: mol_type = other DNA
gcgttctgactactgc

SEQ ID NO: 31473 - DNA, 16 bp, synthetic construct
  misc_feature 1..16: note = synthetic [barcode part1]
  source 1..16: mol_type = other DNA
cgttctgtcacttcac

SEQ ID NO: 31474 - DNA, 16 bp, synthetic construct
  misc_feature 1..16: note = synthetic [barcode part1]
  source 1..16: mol_type = other DNA
acgttcaggatctgtg

SEQ ID NO: 31475 - DNA, 16 bp, synthetic construct
  misc_feature 1..16: note = synthetic [barcode part1]
  source 1..16: mol_type = other DNA
acctgtacgtgagttg

SEQ ID NO: 31476 - DNA, 16 bp, synthetic construct
  misc_feature 1..16: note = synthetic [barcode part1]
  source 1..16: mol_type = other DNA
gtggtagataactacg

SEQ ID NO: 31477 - DNA, 16 bp, synthetic construct
  misc_feature 1..16: note = synthetic [barcode part1]
  source 1..16: mol_type = other DNA
gacctgacctctgtgt

SEQ ID NO: 31478 - DNA, 16 bp, synthetic construct
  misc_feature 1..16: note = synthetic [barcode part1]
  source 1..16: mol_type = other DNA
actcgaatctaggcac

SEQ ID NO: 31479 - DNA, 16 bp, synthetic construct
  misc_feature 1..16: note = synthetic [barcode part1]
  source 1..16: mol_type = other DNA
tcaggttgaggacacg

SEQ ID NO: 31480 - DNA, 16 bp, synthetic construct
  misc_feature 1..16: note = synthetic [barcode part1]
  source 1..16: mol_type = other DNA
cagtacttaggatccg

SEQ ID NO: 31481 - DNA, 16 bp, synthetic construct
  misc_feature 1..16: note = synthetic [barcode part1]
  source 1..16: mol_type = other DNA
acgtcggccttgttac

SEQ ID NO: 31482 - DNA, 16 bp, synthetic construct
  misc_feature 1..16: note = synthetic [barcode part1]
  source 1..16: mol_type = other DNA
aagtagagacgagtgc

SEQ ID NO: 31483 - DNA, 16 bp, synthetic construct
  misc_feature 1..16: note = synthetic [barcode part1]
  source 1..16: mol_type = other DNA
aagacgactcgtcgtt

SEQ ID NO: 31484 - DNA, 16 bp, synthetic construct
  misc_feature 1..16: note = synthetic [barcode part1]
  source 1..16: mol_type = other DNA
taacaatctctgcgtc

SEQ ID NO: 31485 - DNA, 16 bp, synthetic construct
  misc_feature 1..16: note = synthetic [barcode part1]
  source 1..16: mol_type = other DNA
gtacgcgaagattctc

SEQ ID NO: 31486 - DNA, 16 bp, synthetic construct
  misc_feature 1..16: note = synthetic [barcode part1]
  source 1..16: mol_type = other DNA
actgacgacctcctgt

SEQ ID NO: 31487 - DNA, 16 bp, synthetic construct
  misc_feature 1..16: note = synthetic [barcode part1]
  source 1..16: mol_type = other DNA
gacttggcagtctagt

SEQ ID NO: 31488 - DNA, 16 bp, synthetic construct
  misc_feature 1..16: note = synthetic [barcode part1]
  source 1..16: mol_type = other DNA
atacttcaccgagttc

SEQ ID NO: 31489 - DNA, 16 bp, synthetic construct
  misc_feature 1..16: note = synthetic [barcode part1]
  source 1..16: mol_type = other DNA
cgttccttagtagttg

SEQ ID NO: 31490 - DNA, 16 bp, synthetic construct
  misc_feature 1..16: note = synthetic [barcode part1]
  source 1..16: mol_type = other DNA
cctcttgtagaagacg

SEQ ID NO: 31491 - DNA, 16 bp, synthetic construct
  misc_feature 1..16: note = synthetic [barcode part1]
  source 1..16: mol_type = other DNA
cagtctaggatcactg

SEQ ID NO: 31492 - DNA, 16 bp, synthetic construct
  misc_feature 1..16: note = synthetic [barcode part1]
  source 1..16: mol_type = other DNA
gagtgagaataggtgc

SEQ ID NO: 31493 - DNA, 16 bp, synthetic construct
  misc_feature 1..16: note = synthetic [barcode part1]
  source 1..16: mol_type = other DNA
tcgtgtaaggactaag

SEQ ID NO: 31494 - DNA, 16 bp, synthetic construct
  misc_feature 1..16: note = synthetic [barcode part1]
  source 1..16: mol_type = other DNA
gtacggtctggtcctt

SEQ ID NO: 31495 - DNA, 16 bp, synthetic construct
  misc_feature 1..16: note = synthetic [barcode part1]
  source 1..16: mol_type = other DNA
tgtgtacacacgtacg

SEQ ID NO: 31496 - DNA, 16 bp, synthetic construct
  misc_feature 1..16: note = synthetic [barcode part1]
  source 1..16: mol_type = other DNA
ccagagtctcggaatt

SEQ ID NO: 31497 - DNA, 16 bp, synthetic construct
  misc_feature 1..16: note = synthetic [barcode part1]
  source 1..16: mol_type = other DNA
tcagagtggcgagtac

SEQ ID NO: 31498 - DNA, 16 bp, synthetic construct
  misc_feature 1..16: note = synthetic [barcode part1]
  source 1..16: mol_type = other DNA
cacttgagaagactag

SEQ ID NO: 31499 - DNA, 16 bp, synthetic construct
  misc_feature 1..16: note = synthetic [barcode part1]
  source 1..16: mol_type = other DNA
tagttcggtctctgcg

SEQ ID NO: 31500 - DNA, 16 bp, synthetic construct
  misc_feature 1..16: note = synthetic [barcode part1]
  source 1..16: mol_type = other DNA
tgtagtggtccgtctc

SEQ ID NO: 31501 - DNA, 16 bp, synthetic construct
  misc_feature 1..16: note = synthetic [barcode part1]
  source 1..16: mol_type = other DNA
ttccacgttaggtcgc

SEQ ID NO: 31502 - DNA, 16 bp, synthetic construct
  misc_feature 1..16: note = synthetic [barcode part1]
  source 1..16: mol_type = other DNA
acagacctccttagtt

SEQ ID NO: 31503 - DNA, 16 bp, synthetic construct
  misc_feature 1..16: note = synthetic [barcode part1]
  source 1..16: mol_type = other DNA
tcgagtagtggcagac

SEQ ID NO: 31504 - DNA, 16 bp, synthetic construct
  misc_feature 1..16: note = synthetic [barcode part1]
  source 1..16: mol_type = other DNA
agtcaacgactggttc

SEQ ID NO: 31505 - DNA, 16 bp, synthetic construct
  misc_feature 1..16: note = synthetic [barcode part1]
  source 1..16: mol_type = other DNA
tacagataggcagtgt

SEQ ID NO: 31506 - DNA, 16 bp, synthetic construct
  misc_feature 1..16: note = synthetic [barcode part1]
  source 1..16: mol_type = other DNA
ttagtattgcgtggcg

SEQ ID NO: 31507 - DNA, 16 bp, synthetic construct
  misc_feature 1..16: note = synthetic [barcode part1]
  source 1..16: mol_type = other DNA
ttgactcacctctcgt

SEQ ID NO: 31508 - DNA, 16 bp, synthetic construct
  misc_feature 1..16: note = synthetic [barcode part1]
  source 1..16: mol_type = other DNA
tgattgccttggtccg

SEQ ID NO: 31509 - DNA, 16 bp, synthetic construct
  misc_feature 1..16: note = synthetic [barcode part1]
  source 1..16: mol_type = other DNA
ttggacgagtagagtt

SEQ ID NO: 31510 - DNA, 16 bp, synthetic construct
  misc_feature 1..16: note = synthetic [barcode part1]
  source 1..16: mol_type = other DNA
attaggcactcctgcc

SEQ ID NO: 31511 - DNA, 16 bp, synthetic construct
  misc_feature 1..16: note = synthetic [barcode part1]
  source 1..16: mol_type = other DNA
agattcctcggtcaag

SEQ ID NO: 31512 - DNA, 16 bp, synthetic construct
  misc_feature 1..16: note = synthetic [barcode part1]
  source 1..16: mol_type = other DNA
ttctgattctcgccac

SEQ ID NO: 31513 - DNA, 16 bp, synthetic construct
  misc_feature 1..16: note = synthetic [barcode part1]
  source 1..16: mol_type = other DNA
tcaggttccaagtcag

SEQ ID NO: 31514 - DNA, 16 bp, synthetic construct
  misc_feature 1..16: note = synthetic [barcode part1]
  source 1..16: mol_type = other DNA
gacctccgtgtgactt

SEQ ID NO: 31515 - DNA, 16 bp, synthetic construct
  misc_feature 1..16: note = synthetic [barcode part1]
  source 1..16: mol_type = other DNA
tacctaccgttcgtct

SEQ ID NO: 31516 - DNA, 16 bp, synthetic construct
  misc_feature 1..16: note = synthetic [barcode part1]
  source 1..16: mol_type = other DNA
tacggatcaaggcgac

SEQ ID NO: 31517 - DNA, 16 bp, synthetic construct
  misc_feature 1..16: note = synthetic [barcode part1]
  source 1..16: mol_type = other DNA
caatcgagatctcgac

SEQ ID NO: 31518 - DNA, 16 bp, synthetic construct
  misc_feature 1..16: note = synthetic [barcode part1]
  source 1..16: mol_type = other DNA
cggttcctgcgtgatt

SEQ ID NO: 31519 - DNA, 16 bp, synthetic construct
  misc_feature 1..16: note = synthetic [barcode part1]
  source 1..16: mol_type = other DNA
taccagtaattcctcg

SEQ ID NO: 31520 - DNA, 16 bp, synthetic construct
  misc_feature 1..16: note = synthetic [barcode part1]
  source 1..16: mol_type = other DNA
atatagtgcacaccgc

SEQ ID NO: 31521 - DNA, 16 bp, synthetic construct
  misc_feature 1..16: note = synthetic [barcode part1]
  source 1..16: mol_type = other DNA
gtaacctgcgatctag

SEQ ID NO: 31522 - DNA, 16 bp, synthetic construct
  misc_feature 1..16: note = synthetic [barcode part1]
  source 1..16: mol_type = other DNA
accgcggttgtctgtt

SEQ ID NO: 31523 - DNA, 16 bp, synthetic construct
  misc_feature 1..16: note = synthetic [barcode part1]
  source 1..16: mol_type = other DNA
acgtcctgaccactac

SEQ ID NO: 31524 - DNA, 16 bp, synthetic construct
  misc_feature 1..16: note = synthetic [barcode part1]
  source 1..16: mol_type = other DNA
cagtggtgatcactgt

SEQ ID NO: 31525 - DNA, 16 bp, synthetic construct
  misc_feature 1..16: note = synthetic [barcode part1]
  source 1..16: mol_type = other DNA
taataactccttgcgc

SEQ ID NO: 31526 - DNA, 16 bp, synthetic construct
  misc_feature 1..16: note = synthetic [barcode part1]
  source 1..16: mol_type = other DNA
tgcggtattactcact

SEQ ID NO: 31527 - DNA, 16 bp, synthetic construct
  misc_feature 1..16: note = synthetic [barcode part1]
  source 1..16: mol_type = other DNA
aacaagtctcaaggtg

SEQ ID NO: 31528 - DNA, 16 bp, synthetic construct
  misc_feature 1..16: note = synthetic [barcode part1]
  source 1..16: mol_type = other DNA
caaggacttcgtactg

SEQ ID NO: 31529 - DNA, 16 bp, synthetic construct
  misc_feature 1..16: note = synthetic [barcode part1]
  source 1..16: mol_type = other DNA
cgtctaatctcgttag

SEQ ID NO: 31530 - DNA, 16 bp, synthetic construct
  misc_feature 1..16: note = synthetic [barcode part1]
  source 1..16: mol_type = other DNA
cctcttcggaatctct

SEQ ID NO: 31531 - DNA, 16 bp, synthetic construct
  misc_feature 1..16: note = synthetic [barcode part1]
  source 1..16: mol_type = other DNA
aatccactaggacaag

SEQ ID NO: 31532 - DNA, 16 bp, synthetic construct
  misc_feature 1..16: note = synthetic [barcode part1]
  source 1..16: mol_type = other DNA
gttacttccgtgaatc

SEQ ID NO: 31533 - DNA, 16 bp, synthetic construct
  misc_feature 1..16: note = synthetic [barcode part1]
  source 1..16: mol_type = other DNA
taccagaagtgacctc

SEQ ID NO: 31534 - DNA, 16 bp, synthetic construct
  misc_feature 1..16: note = synthetic [barcode part1]
  source 1..16: mol_type = other DNA
tgcagttaactgtgcg

SEQ ID NO: 31535 - DNA, 16 bp, synthetic construct
  misc_feature 1..16: note = synthetic [barcode part1]
  source 1..16: mol_type = other DNA
ttcagttcgtgtagtc

SEQ ID NO: 31536 - DNA, 16 bp, synthetic construct
  misc_feature 1..16: note = synthetic [barcode part1]
  source 1..16: mol_type = other DNA
aggttcaccaccgttc

SEQ ID NO: 31537 - DNA, 16 bp, synthetic construct
  misc_feature 1..16: note = synthetic [barcode part1]
  source 1..16: mol_type = other DNA
accttacgtccgaatt

SEQ ID NO: 31538 - DNA, 16 bp, synthetic construct
  misc_feature 1..16: note = synthetic [barcode part1]
  source 1..16: mol_type = other DNA
agactcttcaaccgag

SEQ ID NO: 31539 - DNA, 16 bp, synthetic construct
  misc_feature 1..16: note = synthetic [barcode part1]
  source 1..16: mol_type = other DNA
ccagacctagtaactg

SEQ ID NO: 31540 - DNA, 16 bp, synthetic construct
  misc_feature 1..16: note = synthetic [barcode part1]
  source 1..16: mol_type = other DNA
gcaagacagtgaagtg

SEQ ID NO: 31541 - DNA, 16 bp, synthetic construct
  misc_feature 1..16: note = synthetic [barcode part1]
  source 1..16: mol_type = other DNA
tgttaccgcagaacgt

SEQ ID NO: 31542 - DNA, 16 bp, synthetic construct
  misc_feature 1..16: note = synthetic [barcode part1]
  source 1..16: mol_type = other DNA
aggtctacgaactcac

SEQ ID NO: 31543 - DNA, 16 bp, synthetic construct
  misc_feature 1..16: note = synthetic [barcode part1]
  source 1..16: mol_type = other DNA
gattaccgcgagaacg

SEQ ID NO: 31544 - DNA, 16 bp, synthetic construct
  misc_feature 1..16: note = synthetic [barcode part1]
  source 1..16: mol_type = other DNA
tcttgagttacggcag

SEQ ID NO: 31545 - DNA, 16 bp, synthetic construct
  misc_feature 1..16: note = synthetic [barcode part1]
  source 1..16: mol_type = other DNA
tcttctctctctctcc

SEQ ID NO: 31546 - DNA, 16 bp, synthetic construct
  misc_feature 1..16: note = synthetic [barcode part1]
  source 1..16: mol_type = other DNA
aatcggcgttgcaact

SEQ ID NO: 31547 - DNA, 16 bp, synthetic construct
  misc_feature 1..16: note = synthetic [barcode part1]
  source 1..16: mol_type = other DNA
taccttatctaggtgc

SEQ ID NO: 31548 - DNA, 16 bp, synthetic construct
  misc_feature 1..16: note = synthetic [barcode part1]
  source 1..16: mol_type = other DNA
tcgaactctggatcag

SEQ ID NO: 31549 - DNA, 16 bp, synthetic construct
  misc_feature 1..16: note = synthetic [barcode part1]
  source 1..16: mol_type = other DNA
gaacgtgttgacgacg

SEQ ID NO: 31550 - DNA, 16 bp, synthetic construct
  misc_feature 1..16: note = synthetic [barcode part1]
  source 1..16: mol_type = other DNA
gtgagagtcaatagtc

SEQ ID NO: 31551 - DNA, 16 bp, synthetic construct
  misc_feature 1..16: note = synthetic [barcode part1]
  source 1..16: mol_type = other DNA
gtgacgtacgtacgtt

SEQ ID NO: 31552 - DNA, 16 bp, synthetic construct
  misc_feature 1..16: note = synthetic [barcode part1]
  source 1..16: mol_type = other DNA
gaagacaggtagttct

SEQ ID NO: 31553 - DNA, 16 bp, synthetic construct
  misc_feature 1..16: note = synthetic [barcode part1]
  source 1..16: mol_type = other DNA
aagttcgcactggtac

SEQ ID NO: 31554 - DNA, 16 bp, synthetic construct
  misc_feature 1..16: note = synthetic [barcode part1]
  source 1..16: mol_type = other DNA
ccttgacgactcgtac

SEQ ID NO: 31555 - DNA, 16 bp, synthetic construct
  misc_feature 1..16: note = synthetic [barcode part1]
  source 1..16: mol_type = other DNA
cacttccttgagttag

SEQ ID NO: 31556 - DNA, 16 bp, synthetic construct
  misc_feature 1..16: note = synthetic [barcode part1]
  source 1..16: mol_type = other DNA
aacctgagtgtagaac

SEQ ID NO: 31557 - DNA, 16 bp, synthetic construct
  misc_feature 1..16: note = synthetic [barcode part1]
  source 1..16: mol_type = other DNA
tgatctcgtgcaccgt

SEQ ID NO: 31558 - DNA, 16 bp, synthetic construct
  misc_feature 1..16: note = synthetic [barcode part1]
  source 1..16: mol_type = other DNA
gccagattctgcacct

SEQ ID NO: 31559 - DNA, 16 bp, synthetic construct
  misc_feature 1..16: note = synthetic [barcode part1]
  source 1..16: mol_type = other DNA
tgaaccttcgtaggtg

SEQ ID NO: 31560 - DNA, 16 bp, synthetic construct
  misc_feature 1..16: note = synthetic [barcode part1]
  source 1..16: mol_type = other DNA
ttataggcaccgacgt

SEQ ID NO: 31561 - DNA, 16 bp, synthetic construct
  misc_feature 1..16: note = synthetic [barcode part1]
  source 1..16: mol_type = other DNA
cggatacgagaattgt

SEQ ID NO: 31562 - DNA, 16 bp, synthetic construct
  misc_feature 1..16: note = synthetic [barcode part1]
  source 1..16: mol_type = other DNA
agttgtgagaactgac

SEQ ID NO: 31563 - DNA, 16 bp, synthetic construct
  misc_feature 1..16: note = synthetic [barcode part1]
  source 1..16: mol_type = other DNA
tagatccacggattcg

SEQ ID NO: 31564 - DNA, 16 bp, synthetic construct
  misc_feature 1..16: note = synthetic [barcode part1]
  source 1..16: mol_type = other DNA
ccaagactccgttcgt

SEQ ID NO: 31565 - DNA, 16 bp, synthetic construct
  misc_feature 1..16: note = synthetic [barcode part1]
  source 1..16: mol_type = other DNA
ttaggtggtcttactc

SEQ ID NO: 31566 - DNA, 16 bp, synthetic construct
  misc_feature 1..16: note = synthetic [barcode part1]
  source 1..16: mol_type = other DNA
ataggtcttcctgatc

SEQ ID NO: 31567 - DNA, 16 bp, synthetic construct
  misc_feature 1..16: note = synthetic [barcode part1]
  source 1..16: mol_type = other DNA
ccacgttggactactc

SEQ ID NO: 31568 - DNA, 16 bp, synthetic construct
  misc_feature 1..16: note = synthetic [barcode part1]
  source 1..16: mol_type = other DNA
taccacactaggactg

SEQ ID NO: 31569 - DNA, 16 bp, synthetic construct
  misc_feature 1..16: note = synthetic [barcode part1]
  source 1..16: mol_type = other DNA
acaccgacggttctct

SEQ ID NO: 31570 - DNA, 16 bp, synthetic construct
  misc_feature 1..16: note = synthetic [barcode part1]
  source 1..16: mol_type = other DNA
ttacttgacctgcctc

SEQ ID NO: 31571 - DNA, 16 bp, synthetic construct
  misc_feature 1..16: note = synthetic [barcode part1]
  source 1..16: mol_type = other DNA
aaggatagacggcctc

SEQ ID NO: 31572 - DNA, 16 bp, synthetic construct
  misc_feature 1..16: note = synthetic [barcode part1]
  source 1..16: mol_type = other DNA
ttggttggccgattag

SEQ ID NO: 31573 - DNA, 16 bp, synthetic construct
  misc_feature 1..16: note = synthetic [barcode part1]
  source 1..16: mol_type = other DNA
tagattactccgtacc

SEQ ID NO: 31574 - DNA, 16 bp, synthetic construct
  misc_feature 1..16: note = synthetic [barcode part1]
  source 1..16: mol_type = other DNA
cggaacaagtatactg

SEQ ID NO: 31575 - DNA, 16 bp, synthetic construct
  misc_feature 1..16: note = synthetic [barcode part1]
  source 1..16: mol_type = other DNA
ttccgactagtaggac

SEQ ID NO: 31576 - DNA, 16 bp, synthetic construct
  misc_feature 1..16: note = synthetic [barcode part1]
  source 1..16: mol_type = other DNA
tggtgccaatattgcg

SEQ ID NO: 31577 - DNA, 16 bp, synthetic construct
  misc_feature 1..16: note = synthetic [barcode part1]
  source 1..16: mol_type = other DNA
tgacaacgatcgtcac

SEQ ID NO: 31578 - DNA, 16 bp, synthetic construct
  misc_feature 1..16: note = synthetic [barcode part1]
  source 1..16: mol_type = other DNA
actctaggacttcgag

SEQ ID NO: 31579 - DNA, 16 bp, synthetic construct
  misc_feature 1..16: note = synthetic [barcode part1]
  source 1..16: mol_type = other DNA
tccaccgatacttagt

SEQ ID NO: 31580 - DNA, 16 bp, synthetic construct
  misc_feature 1..16: note = synthetic [barcode part1]
  source 1..16: mol_type = other DNA
gcacaccacagagtag

SEQ ID NO: 31581 - DNA, 16 bp, synthetic construct
  misc_feature 1..16: note = synthetic [barcode part1]
  source 1..16: mol_type = other DNA
gactgtgacacactgt

SEQ ID NO: 31582 - DNA, 16 bp, synthetic construct
  misc_feature 1..16: note = synthetic [barcode part1]
  source 1..16: mol_type = other DNA
tctagttcacgaccgc

SEQ ID NO: 31583 - DNA, 16 bp, synthetic construct
  misc_feature 1..16: note = synthetic [barcode part1]
  source 1..16: mol_type = other DNA
acggcacaatcctaac

SEQ ID NO: 31584 - DNA, 16 bp, synthetic construct
  misc_feature 1..16: note = synthetic [barcode part1]
  source 1..16: mol_type = other DNA
ccaactagtcgtaacg

SEQ ID NO: 31585 - DNA, 16 bp, synthetic construct
  misc_feature 1..16: note = synthetic [barcode part1]
  source 1..16: mol_type = other DNA
gtgtcaagtcgtctcc

SEQ ID NO: 31586 - DNA, 16 bp, synthetic construct
  misc_feature 1..16: note = synthetic [barcode part1]
  source 1..16: mol_type = other DNA
tgactgacgtacacac

SEQ ID NO: 31587 - DNA, 16 bp, synthetic construct
  misc_feature 1..16: note = synthetic [barcode part1]
  source 1..16: mol_type = other DNA
ccaactatctccttcg

SEQ ID NO: 31588 - DNA, 16 bp, synthetic construct
  misc_feature 1..16: note = synthetic [barcode part1]
  source 1..16: mol_type = other DNA
actaacgagtgcactc

SEQ ID NO: 31589 - DNA, 16 bp, synthetic construct
  misc_feature 1..16: note = synthetic [barcode part1]
  source 1..16: mol_type = other DNA
ttacctgcgtccactt

SEQ ID NO: 31590 - DNA, 16 bp, synthetic construct
  misc_feature 1..16: note = synthetic [barcode part1]
  source 1..16: mol_type = other DNA
atctatcgcctcaggc

SEQ ID NO: 31591 - DNA, 16 bp, synthetic construct
  misc_feature 1..16: note = synthetic [barcode part1]
  source 1..16: mol_type = other DNA
atcacggatccgtcct

SEQ ID NO: 31592 - DNA, 16 bp, synthetic construct
  misc_feature 1..16: note = synthetic [barcode part1]
  source 1..16: mol_type = other DNA
tctccacgaactattg

SEQ ID NO: 31593 - DNA, 16 bp, synthetic construct
  misc_feature 1..16: note = synthetic [barcode part1]
  source 1..16: mol_type = other DNA
agtcgtgccttaatct

SEQ ID NO: 31594 - DNA, 16 bp, synthetic construct
  misc_feature 1..16: note = synthetic [barcode part1]
  source 1..16: mol_type = other DNA
gagtccaacctcctgt

SEQ ID NO: 31595 - DNA, 16 bp, synthetic construct
  misc_feature 1..16: note = synthetic [barcode part1]
  source 1..16: mol_type = other DNA
aatctggccgacaatc

SEQ ID NO: 31596 - DNA, 16 bp, synthetic construct
  misc_feature 1..16: note = synthetic [barcode part1]
  source 1..16: mol_type = other DNA
aggatcttatccactc

SEQ ID NO: 31597 - DNA, 16 bp, synthetic construct
  misc_feature 1..16: note = synthetic [barcode part1]
  source 1..16: mol_type = other DNA
agaactcttcgtctac

SEQ ID NO: 31598 - DNA, 16 bp, synthetic construct
  misc_feature 1..16: note = synthetic [barcode part1]
  source 1..16: mol_type = other DNA
cagtccggagttattg

SEQ ID NO: 31599 - DNA, 16 bp, synthetic construct
  misc_feature 1..16: note = synthetic [barcode part1]
  source 1..16: mol_type = other DNA
gcaggccaagataatt

SEQ ID NO: 31600 - DNA, 16 bp, synthetic construct
  misc_feature 1..16: note = synthetic [barcode part1]
  source 1..16: mol_type = other DNA
tatcagagtgaggact

SEQ ID NO: 31601 - DNA, 16 bp, synthetic construct
  misc_feature 1..16: note = synthetic [barcode part1]
  source 1..16: mol_type = other DNA
gtgtctaacttcgccg

SEQ ID NO: 31602 - DNA, 16 bp, synthetic construct
  misc_feature 1..16: note = synthetic [barcode part1]
  source 1..16: mol_type = other DNA
gacgcaccttcttgac

SEQ ID NO: 31603 - DNA, 16 bp, synthetic construct
  misc_feature 1..16: note = synthetic [barcode part1]
  source 1..16: mol_type = other DNA
agaggcgatctgacgt

SEQ ID NO: 31604 - DNA, 16 bp, synthetic construct
  misc_feature 1..16: note = synthetic [barcode part1]
  source 1..16: mol_type = other DNA
cgtggatctatcttgt

SEQ ID NO: 31605 - DNA, 16 bp, synthetic construct
  misc_feature 1..16: note = synthetic [barcode part1]
  source 1..16: mol_type = other DNA
gaactcactgttgttc

SEQ ID NO: 31606 - DNA, 16 bp, synthetic construct
  misc_feature 1..16: note = synthetic [barcode part1]
  source 1..16: mol_type = other DNA
ttctaggtctatccag

SEQ ID NO: 31607 - DNA, 16 bp, synthetic construct
  misc_feature 1..16: note = synthetic [barcode part1]
  source 1..16: mol_type = other DNA
tggagaggtcggtatc

SEQ ID NO: 31608 - DNA, 16 bp, synthetic construct
  misc_feature 1..16: note = synthetic [barcode part1]
  source 1..16: mol_type = other DNA
cgcggtgtaagtgagt

SEQ ID NO: 31609 - DNA, 16 bp, synthetic construct
  misc_feature 1..16: note = synthetic [barcode part1]
  source 1..16: mol_type = other DNA
aacgtcagtgttgcac

SEQ ID NO: 31610 - DNA, 16 bp, synthetic construct
  misc_feature 1..16: note = synthetic [barcode part1]
  source 1..16: mol_type = other DNA
acaccagaaggcgact

SEQ ID NO: 31611 - DNA, 16 bp, synthetic construct
  misc_feature 1..16: note = synthetic [barcode part1]
  source 1..16: mol_type = other DNA
gagatctgcggtattc

SEQ ID NO: 31612 - DNA, 16 bp, synthetic construct
  misc_feature 1..16: note = synthetic [barcode part1]
  source 1..16: mol_type = other DNA
tacgcctgagtcgttc

SEQ ID NO: 31613 - DNA, 16 bp, synthetic construct
  misc_feature 1..16: note = synthetic [barcode part1]
  source 1..16: mol_type = other DNA
gaacagataggcgagt

SEQ ID NO: 31614 - DNA, 16 bp, synthetic construct
  misc_feature 1..16: note = synthetic [barcode part1]
  source 1..16: mol_type = other DNA
tgacaggcgagataag

SEQ ID NO: 31615 - DNA, 16 bp, synthetic construct
  misc_feature 1..16: note = synthetic [barcode part1]
  source 1..16: mol_type = other DNA
tcagttgtgcaacacg

SEQ ID NO: 31616 - DNA, 16 bp, synthetic construct
  misc_feature 1..16: note = synthetic [barcode part1]
  source 1..16: mol_type = other DNA
tcgcgacactaatcag

SEQ ID NO: 31617 - DNA, 16 bp, synthetic construct
  misc_feature 1..16: note = synthetic [barcode part1]
  source 1..16: mol_type = other DNA
tacacggacctctcgt

SEQ ID NO: 31618 - DNA, 16 bp, synthetic construct
  misc_feature 1..16: note = synthetic [barcode part1]
  source 1..16: mol_type = other DNA
gcagttatcggtcctc

SEQ ID NO: 31619 - DNA, 16 bp, synthetic construct
  misc_feature 1..16: note = synthetic [barcode part1]
  source 1..16: mol_type = other DNA
caggagacttcaatcc

SEQ ID NO: 31620 - DNA, 16 bp, synthetic construct
  misc_feature 1..16: note = synthetic [barcode part1]
  source 1..16: mol_type = other DNA
cgtatctggtagttct

SEQ ID NO: 31621 - DNA, 16 bp, synthetic construct
  misc_feature 1..16: note = synthetic [barcode part1]
  source 1..16: mol_type = other DNA
cgatctccgtgattgc

SEQ ID NO: 31622 - DNA, 16 bp, synthetic construct
  misc_feature 1..16: note = synthetic [barcode part1]
  source 1..16: mol_type = other DNA
tctagactggatccag

SEQ ID NO: 31623 - DNA, 16 bp, synthetic construct
  misc_feature 1..16: note = synthetic [barcode part1]
  source 1..16: mol_type = other DNA
tacggcacaggtgagt

SEQ ID NO: 31624 - DNA, 16 bp, synthetic construct
  misc_feature 1..16: note = synthetic [barcode part1]
  source 1..16: mol_type = other DNA
tgacaacagtctggtc

SEQ ID NO: 31625 - DNA, 16 bp, synthetic construct
  misc_feature 1..16: note = synthetic [barcode part1]
  source 1..16: mol_type = other DNA
gcaccagatacaactc

SEQ ID NO: 31626 - DNA, 16 bp, synthetic construct
  misc_feature 1..16: note = synthetic [barcode part1]
  source 1..16: mol_type = other DNA
acgtcgcaatagatag

SEQ ID NO: 31627 - DNA, 16 bp, synthetic construct
  misc_feature 1..16: note = synthetic [barcode part1]
  source 1..16: mol_type = other DNA
gtcttcctctcgattg

SEQ ID NO: 31628 - DNA, 16 bp, synthetic construct
  misc_feature 1..16: note = synthetic [barcode part1]
  source 1..16: mol_type = other DNA
cgtcctgttgtaagtt

SEQ ID NO: 31629 - DNA, 16 bp, synthetic construct
  misc_feature 1..16: note = synthetic [barcode part1]
  source 1..16: mol_type = other DNA
ttcttgtcaagtcgtg

SEQ ID NO: 31630 - DNA, 16 bp, synthetic construct
  misc_feature 1..16: note = synthetic [barcode part1]
  source 1..16: mol_type = other DNA
gtggactaacctgtgt

SEQ ID NO: 31631 - DNA, 16 bp, synthetic construct
  misc_feature 1..16: note = synthetic [barcode part1]
  source 1..16: mol_type = other DNA
cgaccaattaaggcct

SEQ ID NO: 31632 - DNA, 16 bp, synthetic construct
  misc_feature 1..16: note = synthetic [barcode part1]
  source 1..16: mol_type = other DNA
caccgttgtaaccacc

SEQ ID NO: 31633 - DNA, 16 bp, synthetic construct
  misc_feature 1..16: note = synthetic [barcode part1]
  source 1..16: mol_type = other DNA
accaacgcgaagaatt

SEQ ID NO: 31634 - DNA, 16 bp, synthetic construct
  misc_feature 1..16: note = synthetic [barcode part1]
  source 1..16: mol_type = other DNA
caggttaatacaggac

SEQ ID NO: 31635 - DNA, 16 bp, synthetic construct
  misc_feature 1..16: note = synthetic [barcode part1]
  source 1..16: mol_type = other DNA
gcactagagaacagtt

SEQ ID NO: 31636 - DNA, 16 bp, synthetic construct
  misc_feature 1..16: note = synthetic [barcode part1]
  source 1..16: mol_type = other DNA
aacgcgaatagtctag

SEQ ID NO: 31637 - DNA, 16 bp, synthetic construct
  misc_feature 1..16: note = synthetic [barcode part1]
  source 1..16: mol_type = other DNA
taattgtccaccgttg

SEQ ID NO: 31638 - DNA, 16 bp, synthetic construct
  misc_feature 1..16: note = synthetic [barcode part1]
  source 1..16: mol_type = other DNA
tgtgactctcctgacg

SEQ ID NO: 31639 - DNA, 16 bp, synthetic construct
  misc_feature 1..16: note = synthetic [barcode part1]
  source 1..16: mol_type = other DNA
gattcctcgactcctt

SEQ ID NO: 31640 - DNA, 16 bp, synthetic construct
  misc_feature 1..16: note = synthetic [barcode part1]
  source 1..16: mol_type = other DNA
gtggtacgactctagt

SEQ ID NO: 31641 - DNA, 16 bp, synthetic construct
  misc_feature 1..16: note = synthetic [barcode part1]
  source 1..16: mol_type = other DNA
gtagactcaacttctc

SEQ ID NO: 31642 - DNA, 16 bp, synthetic construct
  misc_feature 1..16: note = synthetic [barcode part1]
  source 1..16: mol_type = other DNA
tgagtatacgcctggt

SEQ ID NO: 31643 - DNA, 16 bp, synthetic construct
  misc_feature 1..16: note = synthetic [barcode part1]
  source 1..16: mol_type = other DNA
gcaattctactaggcg

SEQ ID NO: 31644 - DNA, 16 bp, synthetic construct
  misc_feature 1..16: note = synthetic [barcode part1]
  source 1..16: mol_type = other DNA
caggtcacgtactcct

SEQ ID NO: 31645 - DNA, 16 bp, synthetic construct
  misc_feature 1..16: note = synthetic [barcode part1]
  source 1..16: mol_type = other DNA
acgttaaggaggccgt

SEQ ID NO: 31646 - DNA, 16 bp, synthetic construct
  misc_feature 1..16: note = synthetic [barcode part1]
  source 1..16: mol_type = other DNA
atagacaccacagtag

SEQ ID NO: 31647 - DNA, 16 bp, synthetic construct
  misc_feature 1..16: note = synthetic [barcode part1]
  source 1..16: mol_type = other DNA
cactcacaacaagtgc

SEQ ID NO: 31648 - DNA, 16 bp, synthetic construct
  misc_feature 1..16: note = synthetic [barcode part1]
  source 1..16: mol_type = other DNA
tggatcagattcggtc

SEQ ID NO: 31649 - DNA, 16 bp, synthetic construct
  misc_feature 1..16: note = synthetic [barcode part1]
  source 1..16: mol_type = other DNA
acgaggttgttatccg

SEQ ID NO: 31650 - DNA, 16 bp, synthetic construct
  misc_feature 1..16: note = synthetic [barcode part1]
  source 1..16: mol_type = other DNA
ccttggtagtctatac

SEQ ID NO: 31651 - DNA, 16 bp, synthetic construct
  misc_feature 1..16: note = synthetic [barcode part1]
  source 1..16: mol_type = other DNA
cagtagtccttgtatc

SEQ ID NO: 31652 - DNA, 16 bp, synthetic construct
  misc_feature 1..16: note = synthetic [barcode part1]
  source 1..16: mol_type = other DNA
cgtcactggtgtgttc

SEQ ID NO: 31653 - DNA, 16 bp, synthetic construct
  misc_feature 1..16: note = synthetic [barcode part1]
  source 1..16: mol_type = other DNA
gcaaggaagttcaatc

SEQ ID NO: 31654 - DNA, 16 bp, synthetic construct
  misc_feature 1..16: note = synthetic [barcode part1]
  source 1..16: mol_type = other DNA
gatcaacaaccggttc

SEQ ID NO: 31655 - DNA, 16 bp, synthetic construct
  misc_feature 1..16: note = synthetic [barcode part1]
  source 1..16: mol_type = other DNA
tagtcagtcagtcgac

SEQ ID NO: 31656 - DNA, 16 bp, synthetic construct
  misc_feature 1..16: note = synthetic [barcode part1]
  source 1..16: mol_type = other DNA
gcactggtctccaatc

SEQ ID NO: 31657 - DNA, 16 bp, synthetic construct
  misc_feature 1..16: note = synthetic [barcode part1]
  source 1..16: mol_type = other DNA
aggacttggatagatc

SEQ ID NO: 31658 - DNA, 16 bp, synthetic construct
  misc_feature 1..16: note = synthetic [barcode part1]
  source 1..16: mol_type = other DNA
cgccttgaacaggatt

SEQ ID NO: 31659 - DNA, 16 bp, synthetic construct
  misc_feature 1..16: note = synthetic [barcode part1]
  source 1..16: mol_type = other DNA
ccagtgcaacttcctg

SEQ ID NO: 31660 - DNA, 16 bp, synthetic construct
  misc_feature 1..16: note = synthetic [barcode part1]
  source 1..16: mol_type = other DNA
gatcttggcaggtgag

SEQ ID NO: 31661 - DNA, 16 bp, synthetic construct
  misc_feature 1..16: note = synthetic [barcode part1]
  source 1..16: mol_type = other DNA
tacgtgttcttcctcg

SEQ ID NO: 31662 - DNA, 16 bp, synthetic construct
  misc_feature 1..16: note = synthetic [barcode part1]
  source 1..16: mol_type = other DNA
ccttaaggtggacgag

SEQ ID NO: 31663 - DNA, 16 bp, synthetic construct
  misc_feature 1..16: note = synthetic [barcode part1]
  source 1..16: mol_type = other DNA
gttccacaggtgttcc

SEQ ID NO: 31664 - DNA, 16 bp, synthetic construct
  misc_feature 1..16: note = synthetic [barcode part1]
  source 1..16: mol_type = other DNA
tgtgtaatcaccacct

SEQ ID NO: 31665 - DNA, 16 bp, synthetic construct
  misc_feature 1..16: note = synthetic [barcode part1]
  source 1..16: mol_type = other DNA
gtgtaacactacacgc

SEQ ID NO: 31666 - DNA, 16 bp, synthetic construct
  misc_feature 1..16: note = synthetic [barcode part1]
  source 1..16: mol_type = other DNA
ataacgcgtcgtgatc

SEQ ID NO: 31667 - DNA, 16 bp, synthetic construct
  misc_feature 1..16: note = synthetic [barcode part1]
  source 1..16: mol_type = other DNA
ataccgaatcagagac

SEQ ID NO: 31668 - DNA, 16 bp, synthetic construct
  misc_feature 1..16: note = synthetic [barcode part1]
  source 1..16: mol_type = other DNA
acttaccggacaggtt

SEQ ID NO: 31669 - DNA, 16 bp, synthetic construct
  misc_feature 1..16: note = synthetic [barcode part1]
  source 1..16: mol_type = other DNA
actgacactatacggc

SEQ ID NO: 31670 - DNA, 16 bp, synthetic construct
  misc_feature 1..16: note = synthetic [barcode part1]
  source 1..16: mol_type = other DNA
attccgagagaccttg

SEQ ID NO: 31671 - DNA, 16 bp, synthetic construct
  misc_feature 1..16: note = synthetic [barcode part1]
  source 1..16: mol_type = other DNA
gcagattgtgcgattc

SEQ ID NO: 31672 - DNA, 16 bp, synthetic construct
  misc_feature 1..16: note = synthetic [barcode part1]
  source 1..16: mol_type = other DNA
ttcctcgatcttccag

SEQ ID NO: 31673 - DNA, 16 bp, synthetic construct
  misc_feature 1..16: note = synthetic [barcode part1]
  source 1..16: mol_type = other DNA
atcctgaacgtgtacg

SEQ ID NO: 31674 - DNA, 16 bp, synthetic construct
  misc_feature 1..16: note = synthetic [barcode part1]
  source 1..16: mol_type = other DNA
gactacgtgcaatcgt

SEQ ID NO: 31675 - DNA, 16 bp, synthetic construct
  misc_feature 1..16: note = synthetic [barcode part1]
  source 1..16: mol_type = other DNA
cgtggaacgacgattg

SEQ ID NO: 31676 - DNA, 16 bp, synthetic construct
  misc_feature 1..16: note = synthetic [barcode part1]
  source 1..16: mol_type = other DNA
cacacagaggtgtctt

SEQ ID NO: 31677 - DNA, 16 bp, synthetic construct
  misc_feature 1..16: note = synthetic [barcode part1]
  source 1..16: mol_type = other DNA
gactgtgtgcaactgt

SEQ ID NO: 31678 - DNA, 16 bp, synthetic construct
  misc_feature 1..16: note = synthetic [barcode part1]
  source 1..16: mol_type = other DNA
gcctctggaatacagt

SEQ ID NO: 31679 - DNA, 16 bp, synthetic construct
  misc_feature 1..16: note = synthetic [barcode part1]
  source 1..16: mol_type = other DNA
acagtgtggagagaac

SEQ ID NO: 31680 - DNA, 16 bp, synthetic construct
  misc_feature 1..16: note = synthetic [barcode part1]
  source 1..16: mol_type = other DNA
gcacagtacacgttgt

SEQ ID NO: 31681 - DNA, 16 bp, synthetic construct
  misc_feature 1..16: note = synthetic [barcode part1]
  source 1..16: mol_type = other DNA
tgaggttggttctgac

SEQ ID NO: 31682 - DNA, 16 bp, synthetic construct
  misc_feature 1..16: note = synthetic [barcode part1]
  source 1..16: mol_type = other DNA
gcgagtagataggtag

SEQ ID NO: 31683 - DNA, 16 bp, synthetic construct
  misc_feature 1..16: note = synthetic [barcode part1]
  source 1..16: mol_type = other DNA
ccacgagagtaacgac

SEQ ID NO: 31684 - DNA, 16 bp, synthetic construct
  misc_feature 1..16: note = synthetic [barcode part1]
  source 1..16: mol_type = other DNA
tagtgtcacggtgttg

SEQ ID NO: 31685 - DNA, 16 bp, synthetic construct
  misc_feature 1..16: note = synthetic [barcode part1]
  source 1..16: mol_type = other DNA
tccacacggttcgatc

SEQ ID NO: 31686 - DNA, 16 bp, synthetic construct
  misc_feature 1..16: note = synthetic [barcode part1]
  source 1..16: mol_type = other DNA
tcaacttgtccttcgc

SEQ ID NO: 31687 - DNA, 16 bp, synthetic construct
  misc_feature 1..16: note = synthetic [barcode part1]
  source 1..16: mol_type = other DNA
tggcaacgatccgatt

SEQ ID NO: 31688 - DNA, 16 bp, synthetic construct
  misc_feature 1..16: note = synthetic [barcode part1]
  source 1..16: mol_type = other DNA
cgatacgaccaggagt

SEQ ID NO: 31689 - DNA, 16 bp, synthetic construct
  misc_feature 1..16: note = synthetic [barcode part1]
  source 1..16: mol_type = other DNA
ataccaagttggaggt

SEQ ID NO: 31690 - DNA, 16 bp, synthetic construct
  misc_feature 1..16: note = synthetic [barcode part1]
  source 1..16: mol_type = other DNA
gagacaccagtagtcg

SEQ ID NO: 31691 - DNA, 16 bp, synthetic construct
  misc_feature 1..16: note = synthetic [barcode part1]
  source 1..16: mol_type = other DNA
attataaggcggacgt

SEQ ID NO: 31692 - DNA, 16 bp, synthetic construct
  misc_feature 1..16: note = synthetic [barcode part1]
  source 1..16: mol_type = other DNA
tgcaacgacgagtggt

SEQ ID NO: 31693 - DNA, 16 bp, synthetic construct
  misc_feature 1..16: note = synthetic [barcode part1]
  source 1..16: mol_type = other DNA
acaggcacaggacttg

SEQ ID NO: 31694 - DNA, 16 bp, synthetic construct
  misc_feature 1..16: note = synthetic [barcode part1]
  source 1..16: mol_type = other DNA
cgtgagtacttgtggt

SEQ ID NO: 31695 - DNA, 16 bp, synthetic construct
  misc_feature 1..16: note = synthetic [barcode part1]
  source 1..16: mol_type = other DNA
caacgacgagacgtgt

SEQ ID NO: 31696 - DNA, 16 bp, synthetic construct
  misc_feature 1..16: note = synthetic [barcode part1]
  source 1..16: mol_type = other DNA
acggttgcgattgtgt

SEQ ID NO: 31697 - DNA, 16 bp, synthetic construct
  misc_feature 1..16: note = synthetic [barcode part1]
  source 1..16: mol_type = other DNA
tcaagtcctagaccag

SEQ ID NO: 31698 - DNA, 16 bp, synthetic construct
  misc_feature 1..16: note = synthetic [barcode part1]
  source 1..16: mol_type = other DNA
gatcacactccaattc

SEQ ID NO: 31699 - DNA, 16 bp, synthetic construct
  misc_feature 1..16: note = synthetic [barcode part1]
  source 1..16: mol_type = other DNA
tggtacttgagtagag

SEQ ID NO: 31700 - DNA, 16 bp, synthetic construct
  misc_feature 1..16: note = synthetic [barcode part1]
  source 1..16: mol_type = other DNA
gattgcaggagtcgac

SEQ ID NO: 31701 - DNA, 16 bp, synthetic construct
  misc_feature 1..16: note = synthetic [barcode part1]
  source 1..16: mol_type = other DNA
atccaagataacggac

SEQ ID NO: 31702 - DNA, 16 bp, synthetic construct
  misc_feature 1..16: note = synthetic [barcode part1]
  source 1..16: mol_type = other DNA
gagtctgtcaccgtct

SEQ ID NO: 31703 - DNA, 16 bp, synthetic construct
  misc_feature 1..16: note = synthetic [barcode part1]
  source 1..16: mol_type = other DNA
atccactctcaggatt

SEQ ID NO: 31704 - DNA, 16 bp, synthetic construct
  misc_feature 1..16: note = synthetic [barcode part1]
  source 1..16: mol_type = other DNA
taggttcggtggagtg

SEQ ID NO: 31705 - DNA, 16 bp, synthetic construct
  misc_feature 1..16: note = synthetic [barcode part1]
  source 1..16: mol_type = other DNA
taagtcctggagtaag

SEQ ID NO: 31706 - DNA, 16 bp, synthetic construct
  misc_feature 1..16: note = synthetic [barcode part1]
  source 1..16: mol_type = other DNA
gttatctctgcagatc

SEQ ID NO: 31707 - DNA, 16 bp, synthetic construct
  misc_feature 1..16: note = synthetic [barcode part1]
  source 1..16: mol_type = other DNA
cgcgtgaacttaagtc

SEQ ID NO: 31708 - DNA, 16 bp, synthetic construct
  misc_feature 1..16: note = synthetic [barcode part1]
  source 1..16: mol_type = other DNA
gagtcgtacctccgtt

SEQ ID NO: 31709 - DNA, 16 bp, synthetic construct
  misc_feature 1..16: note = synthetic [barcode part1]
  source 1..16: mol_type = other DNA
gactacagtgcactac

SEQ ID NO: 31710 - DNA, 16 bp, synthetic construct
  misc_feature 1..16: note = synthetic [barcode part1]
  source 1..16: mol_type = other DNA
gttcctgtgagttgcc

SEQ ID NO: 31711 - DNA, 16 bp, synthetic construct
  misc_feature 1..16: note = synthetic [barcode part1]
  source 1..16: mol_type = other DNA
ttctgagacgagtaag

SEQ ID NO: 31712 - DNA, 16 bp, synthetic construct
  misc_feature 1..16: note = synthetic [barcode part1]
  source 1..16: mol_type = other DNA
gttcaacgaggacgtg

SEQ ID NO: 31713 - DNA, 16 bp, synthetic construct
  misc_feature 1..16: note = synthetic [barcode part1]
  source 1..16: mol_type = other DNA
agagtccgagtagatt

SEQ ID NO: 31714 - DNA, 16 bp, synthetic construct
  misc_feature 1..16: note = synthetic [barcode part1]
  source 1..16: mol_type = other DNA
caacctcgtcaatatc

SEQ ID NO: 31715 - DNA, 16 bp, synthetic construct
  misc_feature 1..16: note = synthetic [barcode part1]
  source 1..16: mol_type = other DNA
cacggtacctgagatt

SEQ ID NO: 31716 - DNA, 16 bp, synthetic construct
  misc_feature 1..16: note = synthetic [barcode part1]
  source 1..16: mol_type = other DNA
gagttctggagagaag

SEQ ID NO: 31717 - DNA, 16 bp, synthetic construct
  misc_feature 1..16: note = synthetic [barcode part1]
  source 1..16: mol_type = other DNA
caagaagacgcaccgt

SEQ ID NO: 31718 - DNA, 16 bp, synthetic construct
  misc_feature 1..16: note = synthetic [barcode part1]
  source 1..16: mol_type = other DNA
agacttctaaccgacg

SEQ ID NO: 31719 - DNA, 16 bp, synthetic construct
  misc_feature 1..16: note = synthetic [barcode part1]
  source 1..16: mol_type = other DNA
ccaacctgtaactgcc

SEQ ID NO: 31720 - DNA, 16 bp, synthetic construct
  misc_feature 1..16: note = synthetic [barcode part1]
  source 1..16: mol_type = other DNA
gacggtatctatcacg

SEQ ID NO: 31721 - DNA, 16 bp, synthetic construct
  misc_feature 1..16: note = synthetic [barcode part1]
  source 1..16: mol_type = other DNA
gttggtattcacggac

SEQ ID NO: 31722 - DNA, 16 bp, synthetic construct
  misc_feature 1..16: note = synthetic [barcode part1]
  source 1..16: mol_type = other DNA
atcctgaccaactgag

SEQ ID NO: 31723 - DNA, 16 bp, synthetic construct
  misc_feature 1..16: note = synthetic [barcode part1]
  source 1..16: mol_type = other DNA
cgaattgagagacgcc

SEQ ID NO: 31724 - DNA, 16 bp, synthetic construct
  misc_feature 1..16: note = synthetic [barcode part1]
  source 1..16: mol_type = other DNA
tagagtacggattcag

SEQ ID NO: 31725 - DNA, 16 bp, synthetic construct
  misc_feature 1..16: note = synthetic [barcode part1]
  source 1..16: mol_type = other DNA
gcaatacctctgagac

SEQ ID NO: 31726 - DNA, 16 bp, synthetic construct
  misc_feature 1..16: note = synthetic [barcode part1]
  source 1..16: mol_type = other DNA
gttgtcttccaagtgt

SEQ ID NO: 31727 - DNA, 16 bp, synthetic construct
  misc_feature 1..16: note = synthetic [barcode part1]
  source 1..16: mol_type = other DNA
cgccactgttcgagtt

SEQ ID NO: 31728 - DNA, 16 bp, synthetic construct
  misc_feature 1..16: note = synthetic [barcode part1]
  source 1..16: mol_type = other DNA
gttcagactgcaagtc

SEQ ID NO: 31729 - DNA, 16 bp, synthetic construct
  misc_feature 1..16: note = synthetic [barcode part1]
  source 1..16: mol_type = other DNA
acaacgttgtgtgtgc

SEQ ID NO: 31730 - DNA, 16 bp, synthetic construct
  misc_feature 1..16: note = synthetic [barcode part1]
  source 1..16: mol_type = other DNA
tctgtgtaacctgact

SEQ ID NO: 31731 - DNA, 16 bp, synthetic construct
  misc_feature 1..16: note = synthetic [barcode part1]
  source 1..16: mol_type = other DNA
aggcgatacacttaag

SEQ ID NO: 31732 - DNA, 16 bp, synthetic construct
  misc_feature 1..16: note = synthetic [barcode part1]
  source 1..16: mol_type = other DNA
acgttagtcaagtgcc

SEQ ID NO: 31733 - DNA, 16 bp, synthetic construct
  misc_feature 1..16: note = synthetic [barcode part1]
  source 1..16: mol_type = other DNA
cctcacagatctaatc

SEQ ID NO: 31734 - DNA, 16 bp, synthetic construct
  misc_feature 1..16: note = synthetic [barcode part1]
  source 1..16: mol_type = other DNA
cctcctatccaatctg

SEQ ID NO: 31735 - DNA, 16 bp, synthetic construct
  misc_feature 1..16: note = synthetic [barcode part1]
  source 1..16: mol_type = other DNA
tgtgttggttggtacg

SEQ ID NO: 31736 - DNA, 16 bp, synthetic construct
  misc_feature 1..16: note = synthetic [barcode part1]
  source 1..16: mol_type = other DNA
agtcaattggccgact

SEQ ID NO: 31737 - DNA, 16 bp, synthetic construct
  misc_feature 1..16: note = synthetic [barcode part1]
  source 1..16: mol_type = other DNA
tccactgcagtagaac

SEQ ID NO: 31738 - DNA, 16 bp, synthetic construct
  misc_feature 1..16: note = synthetic [barcode part1]
  source 1..16: mol_type = other DNA
tatcaggtcaccgaac

SEQ ID NO: 31739 - DNA, 16 bp, synthetic construct
  misc_feature 1..16: note = synthetic [barcode part1]
  source 1..16: mol_type = other DNA
tgtacgattcacaggc

SEQ ID NO: 31740 - DNA, 16 bp, synthetic construct
  misc_feature 1..16: note = synthetic [barcode part1]
  source 1..16: mol_type = other DNA
gtggaagtacaggaac

SEQ ID NO: 31741 - DNA, 16 bp, synthetic construct
  misc_feature 1..16: note = synthetic [barcode part1]
  source 1..16: mol_type = other DNA
ccaccagtaacaactg

SEQ ID NO: 31742 - DNA, 16 bp, synthetic construct
  misc_feature 1..16: note = synthetic [barcode part1]
  source 1..16: mol_type = other DNA
agatagtaactcgcag

SEQ ID NO: 31743 - DNA, 16 bp, synthetic construct
  misc_feature 1..16: note = synthetic [barcode part1]
  source 1..16: mol_type = other DNA
tccgccgaattacacc

SEQ ID NO: 31744 - DNA, 16 bp, synthetic construct
  misc_feature 1..16: note = synthetic [barcode part1]
  source 1..16: mol_type = other DNA
actctgatcgagatcg

SEQ ID NO: 31745 - DNA, 16 bp, synthetic construct
  misc_feature 1..16: note = synthetic [barcode part1]
  source 1..16: mol_type = other DNA
gtataattcttccggc

SEQ ID NO: 31746 - DNA, 16 bp, synthetic construct
  misc_feature 1..16: note = synthetic [barcode part1]
  source 1..16: mol_type = other DNA
tgattctgtgtaccac

SEQ ID NO: 31747 - DNA, 16 bp, synthetic construct
  misc_feature 1..16: note = synthetic [barcode part1]
  source 1..16: mol_type = other DNA
acctgcgaatctgtag

SEQ ID NO: 31748 - DNA, 16 bp, synthetic construct
  misc_feature 1..16: note = synthetic [barcode part1]
  source 1..16: mol_type = other DNA
gatcagtagaacctcc

SEQ ID NO: 31749 - DNA, 16 bp, synthetic construct
  misc_feature 1..16: note = synthetic [barcode part1]
  source 1..16: mol_type = other DNA
gacaactaccgaactc

SEQ ID NO: 31750 - DNA, 16 bp, synthetic construct
  misc_feature 1..16: note = synthetic [barcode part1]
  source 1..16: mol_type = other DNA
agttcggtctctgcgt

SEQ ID NO: 31751 - DNA, 16 bp, synthetic construct
  misc_feature 1..16: note = synthetic [barcode part1]
  source 1..16: mol_type = other DNA
ttcacagttcaggcag

SEQ ID NO: 31752 - DNA, 16 bp, synthetic construct
  misc_feature 1..16: note = synthetic [barcode part1]
  source 1..16: mol_type = other DNA
agtaagacagtcctcc

SEQ ID NO: 31753 - DNA, 16 bp, synthetic construct
  misc_feature 1..16: note = synthetic [barcode part1]
  source 1..16: mol_type = other DNA
accgaagtcaacttcg

SEQ ID NO: 31754 - DNA, 16 bp, synthetic construct
  misc_feature 1..16: note = synthetic [barcode part1]
  source 1..16: mol_type = other DNA
tggacttattccgccg

SEQ ID NO: 31755 - DNA, 16 bp, synthetic construct
  misc_feature 1..16: note = synthetic [barcode part1]
  source 1..16: mol_type = other DNA
gaggtgatctactacc

SEQ ID NO: 31756 - DNA, 16 bp, synthetic construct
  misc_feature 1..16: note = synthetic [barcode part1]
  source 1..16: mol_type = other DNA
actctacgcgaccgtt

SEQ ID NO: 31757 - DNA, 16 bp, synthetic construct
  misc_feature 1..16: note = synthetic [barcode part1]
  source 1..16: mol_type = other DNA
gcgtagttacagtcgt

SEQ ID NO: 31758 - DNA, 16 bp, synthetic construct
  misc_feature 1..16: note = synthetic [barcode part1]
  source 1..16: mol_type = other DNA
tcgcgtcaggttgtct

SEQ ID NO: 31759 - DNA, 16 bp, synthetic construct
  misc_feature 1..16: note = synthetic [barcode part1]
  source 1..16: mol_type = other DNA
ttcgattaccgacgcc

SEQ ID NO: 31760 - DNA, 16 bp, synthetic construct
  misc_feature 1..16: note = synthetic [barcode part1]
  source 1..16: mol_type = other DNA
tggaataacttaggcg

SEQ ID NO: 31761 - DNA, 16 bp, synthetic construct
  misc_feature 1..16: note = synthetic [barcode part1]
  source 1..16: mol_type = other DNA
agaaccttccagagtc

SEQ ID NO: 31762 - DNA, 16 bp, synthetic construct
  misc_feature 1..16: note = synthetic [barcode part1]
  source 1..16: mol_type = other DNA
gtatcctccgagtcgt

SEQ ID NO: 31763 - DNA, 16 bp, synthetic construct
  misc_feature 1..16: note = synthetic [barcode part1]
  source 1..16: mol_type = other DNA
cggaaccaattccaac

SEQ ID NO: 31764 - DNA, 16 bp, synthetic construct
  misc_feature 1..16: note = synthetic [barcode part1]
  source 1..16: mol_type = other DNA
ccagttcacaaggtac

SEQ ID NO: 31765 - DNA, 16 bp, synthetic construct
  misc_feature 1..16: note = synthetic [barcode part1]
  source 1..16: mol_type = other DNA
gaaggtggtaatccgc

SEQ ID NO: 31766 - DNA, 16 bp, synthetic construct
  misc_feature 1..16: note = synthetic [barcode part1]
  source 1..16: mol_type = other DNA
tactgtgactgtggtg

SEQ ID NO: 31767 - DNA, 16 bp, synthetic construct
  misc_feature 1..16: note = synthetic [barcode part1]
  source 1..16: mol_type = other DNA
tcagtccagtgacaac

SEQ ID NO: 31768 - DNA, 16 bp, synthetic construct
  misc_feature 1..16: note = synthetic [barcode part1]
  source 1..16: mol_type = other DNA
aacgtctatccaggtg

SEQ ID NO: 31769 - DNA, 16 bp, synthetic construct
  misc_feature 1..16: note = synthetic [barcode part1]
  source 1..16: mol_type = other DNA
actagaaccaacctcg

SEQ ID NO: 31770 - DNA, 16 bp, synthetic construct
  misc_feature 1..16: note = synthetic [barcode part1]
  source 1..16: mol_type = other DNA
tagatcgacactcttc

SEQ ID NO: 31771 - DNA, 16 bp, synthetic construct
  misc_feature 1..16: note = synthetic [barcode part1]
  source 1..16: mol_type = other DNA
tcacaggtgaactcgt

SEQ ID NO: 31772 - DNA, 16 bp, synthetic construct
  misc_feature 1..16: note = synthetic [barcode part1]
  source 1..16: mol_type = other DNA
agacaaggtcctaagt

SEQ ID NO: 31773 - DNA, 16 bp, synthetic construct
  misc_feature 1..16: note = synthetic [barcode part1]
  source 1..16: mol_type = other DNA
atacagtcggcacact

SEQ ID NO: 31774 - DNA, 16 bp, synthetic construct
  misc_feature 1..16: note = synthetic [barcode part1]
  source 1..16: mol_type = other DNA
tcggagagtgcaactg

SEQ ID NO: 31775 - DNA, 16 bp, synthetic construct
  misc_feature 1..16: note = synthetic [barcode part1]
  source 1..16: mol_type = other DNA
acgaccacgatacgtt

SEQ ID NO: 31776 - DNA, 16 bp, synthetic construct
  misc_feature 1..16: note = synthetic [barcode part1]
  source 1..16: mol_type = other DNA
gttgcgatccaggatt

SEQ ID NO: 31777 - DNA, 16 bp, synthetic construct
  misc_feature 1..16: note = synthetic [barcode part1]
  source 1..16: mol_type = other DNA
gagagtcacgttggtg

SEQ ID NO: 31778 - DNA, 16 bp, synthetic construct
  misc_feature 1..16: note = synthetic [barcode part1]
  source 1..16: mol_type = other DNA
gtcagagatcacgcag

SEQ ID NO: 31779 - DNA, 16 bp, synthetic construct
  misc_feature 1..16: note = synthetic [barcode part1]
  source 1..16: mol_type = other DNA
ttcagacaacggtaag

SEQ ID NO: 31780 - DNA, 16 bp, synthetic construct
  misc_feature 1..16: note = synthetic [barcode part1]
  source 1..16: mol_type = other DNA
tcgatagtagaccacc

SEQ ID NO: 31781 - DNA, 16 bp, synthetic construct
  misc_feature 1..16: note = synthetic [barcode part1]
  source 1..16: mol_type = other DNA
attctggcgtgatacg

SEQ ID NO: 31782 - DNA, 16 bp, synthetic construct
  misc_feature 1..16: note = synthetic [barcode part1]
  source 1..16: mol_type = other DNA
ttcacacctaggttgt

SEQ ID NO: 31783 - DNA, 16 bp, synthetic construct
  misc_feature 1..16: note = synthetic [barcode part1]
  source 1..16: mol_type = other DNA
aacgacctacactctt

SEQ ID NO: 31784 - DNA, 16 bp, synthetic construct
  misc_feature 1..16: note = synthetic [barcode part1]
  source 1..16: mol_type = other DNA
ccgattctactggcac

SEQ ID NO: 31785 - DNA, 16 bp, synthetic construct
  misc_feature 1..16: note = synthetic [barcode part1]
  source 1..16: mol_type = other DNA
tatccgtacaggcagt

SEQ ID NO: 31786 - DNA, 16 bp, synthetic construct
  misc_feature 1..16: note = synthetic [barcode part1]
  source 1..16: mol_type = other DNA
aacttcgcggaacttg

SEQ ID NO: 31787 - DNA, 16 bp, synthetic construct
  misc_feature 1..16: note = synthetic [barcode part1]
  source 1..16: mol_type = other DNA
gagatccgttcgcctt

SEQ ID NO: 31788 - DNA, 16 bp, synthetic construct
  misc_feature 1..16: note = synthetic [barcode part1]
  source 1..16: mol_type = other DNA
ccttgcaccaacgatc

SEQ ID NO: 31789 - DNA, 16 bp, synthetic construct
  misc_feature 1..16: note = synthetic [barcode part1]
  source 1..16: mol_type = other DNA
cggcaacttctatatc

SEQ ID NO: 31790 - DNA, 16 bp, synthetic construct
  misc_feature 1..16: note = synthetic [barcode part1]
  source 1..16: mol_type = other DNA
cggaccgatacaaggt

SEQ ID NO: 31791 - DNA, 16 bp, synthetic construct
  misc_feature 1..16: note = synthetic [barcode part1]
  source 1..16: mol_type = other DNA
gcaacgtctaggatct

SEQ ID NO: 31792 - DNA, 16 bp, synthetic construct
  misc_feature 1..16: note = synthetic [barcode part1]
  source 1..16: mol_type = other DNA
gcaaggacaatccgac

SEQ ID NO: 31793 - DNA, 16 bp, synthetic construct
  misc_feature 1..16: note = synthetic [barcode part1]
  source 1..16: mol_type = other DNA
tcaactgtgaccagtg

SEQ ID NO: 31794 - DNA, 16 bp, synthetic construct
  misc_feature 1..16: note = synthetic [barcode part1]
  source 1..16: mol_type = other DNA
ccttgtgaattaccac

SEQ ID NO: 31795 - DNA, 16 bp, synthetic construct
  misc_feature 1..16: note = synthetic [barcode part1]
  source 1..16: mol_type = other DNA
accgatacctacgaac

SEQ ID NO: 31796 - DNA, 16 bp, synthetic construct
  misc_feature 1..16: note = synthetic [barcode part1]
  source 1..16: mol_type = other DNA
cagtgcacacaagtct

SEQ ID NO: 31797 - DNA, 16 bp, synthetic construct
  misc_feature 1..16: note = synthetic [barcode part1]
  source 1..16: mol_type = other DNA
gagttggcacagtcag

SEQ ID NO: 31798 - DNA, 16 bp, synthetic construct
  misc_feature 1..16: note = synthetic [barcode part1]
  source 1..16: mol_type = other DNA
gattagtacgcgcact

SEQ ID NO: 31799 - DNA, 16 bp, synthetic construct
  misc_feature 1..16: note = synthetic [barcode part1]
  source 1..16: mol_type = other DNA
cgtaacactacttacc

SEQ ID NO: 31800 - DNA, 16 bp, synthetic construct
  misc_feature 1..16: note = synthetic [barcode part1]
  source 1..16: mol_type = other DNA
tggacgtgtgtctagt

SEQ ID NO: 31801 - DNA, 16 bp, synthetic construct
  misc_feature 1..16: note = synthetic [barcode part1]
  source 1..16: mol_type = other DNA
gtgattcagaccgttg

SEQ ID NO: 31802 - DNA, 16 bp, synthetic construct
  misc_feature 1..16: note = synthetic [barcode part1]
  source 1..16: mol_type = other DNA
acgcgtcttcaacctg

SEQ ID NO: 31803 - DNA, 16 bp, synthetic construct
  misc_feature 1..16: note = synthetic [barcode part1]
  source 1..16: mol_type = other DNA
ttcaccaggccacgtt

SEQ ID NO: 31804 - DNA, 16 bp, synthetic construct
  misc_feature 1..16: note = synthetic [barcode part1]
  source 1..16: mol_type = other DNA
gacaactccgaattgc

SEQ ID NO: 31805 - DNA, 16 bp, synthetic construct
  misc_feature 1..16: note = synthetic [barcode part1]
  source 1..16: mol_type = other DNA
cagactgaagatacgt

SEQ ID NO: 31806 - DNA, 16 bp, synthetic construct
  misc_feature 1..16: note = synthetic [barcode part1]
  source 1..16: mol_type = other DNA
cgtccttgattactag

SEQ ID NO: 31807 - DNA, 16 bp, synthetic construct
  misc_feature 1..16: note = synthetic [barcode part1]
  source 1..16: mol_type = other DNA
aggtggacaccgtaac

SEQ ID NO: 31808 - DNA, 16 bp, synthetic construct
  misc_feature 1..16: note = synthetic [barcode part1]
  source 1..16: mol_type = other DNA
tcttatcacttgcgag

SEQ ID NO: 31809 - DNA, 16 bp, synthetic construct
  misc_feature 1..16: note = synthetic [barcode part1]
  source 1..16: mol_type = other DNA
atacggttgatcgcac

SEQ ID NO: 31810 - DNA, 16 bp, synthetic construct
  misc_feature 1..16: note = synthetic [barcode part1]
  source 1..16: mol_type = other DNA
agactatagaccgcct

SEQ ID NO: 31811 - DNA, 16 bp, synthetic construct
  misc_feature 1..16: note = synthetic [barcode part1]
  source 1..16: mol_type = other DNA
acggagttctatcacg

SEQ ID NO: 31812 - DNA, 16 bp, synthetic construct
  misc_feature 1..16: note = synthetic [barcode part1]
  source 1..16: mol_type = other DNA
tgttgaccacacagtg

SEQ ID NO: 31813 - DNA, 16 bp, synthetic construct
  misc_feature 1..16: note = synthetic [barcode part1]
  source 1..16: mol_type = other DNA
aacaccttaaggaacg

SEQ ID NO: 31814 - DNA, 16 bp, synthetic construct
  misc_feature 1..16: note = synthetic [barcode part1]
  source 1..16: mol_type = other DNA
agacggatcacaatac

SEQ ID NO: 31815 - DNA, 16 bp, synthetic construct
  misc_feature 1..16: note = synthetic [barcode part1]
  source 1..16: mol_type = other DNA
tggaggatcaaccttc

SEQ ID NO: 31816 - DNA, 16 bp, synthetic construct
  misc_feature 1..16: note = synthetic [barcode part1]
  source 1..16: mol_type = other DNA
gtatcactgtcgcaag

SEQ ID NO: 31817 - DNA, 16 bp, synthetic construct
  misc_feature 1..16: note = synthetic [barcode part1]
  source 1..16: mol_type = other DNA
attgttacacgtcctg

SEQ ID NO: 31818 - DNA, 16 bp, synthetic construct
  misc_feature 1..16: note = synthetic [barcode part1]
  source 1..16: mol_type = other DNA
aaccagtcaacgtcac

SEQ ID NO: 31819 - DNA, 16 bp, synthetic construct
  misc_feature 1..16: note = synthetic [barcode part1]
  source 1..16: mol_type = other DNA
tcaggacgtcttgagt

SEQ ID NO: 31820 - DNA, 16 bp, synthetic construct
  misc_feature 1..16: note = synthetic [barcode part1]
  source 1..16: mol_type = other DNA
cgatactgtagtgtcg

SEQ ID NO: 31821 - DNA, 16 bp, synthetic construct
  misc_feature 1..16: note = synthetic [barcode part1]
  source 1..16: mol_type = other DNA
agtggtgcgagtatcg

SEQ ID NO: 31822 - DNA, 16 bp, synthetic construct
  misc_feature 1..16: note = synthetic [barcode part1]
  source 1..16: mol_type = other DNA
aatacttgtgaggcag

SEQ ID NO: 31823 - DNA, 16 bp, synthetic construct
  misc_feature 1..16: note = synthetic [barcode part1]
  source 1..16: mol_type = other DNA
cgtcgttgtggttgtc

SEQ ID NO: 31824 - DNA, 16 bp, synthetic construct
  misc_feature 1..16: note = synthetic [barcode part1]
  source 1..16: mol_type = other DNA
cgcacggtctgattct

SEQ ID NO: 31825 - DNA, 16 bp, synthetic construct
  misc_feature 1..16: note = synthetic [barcode part1]
  source 1..16: mol_type = other DNA
gagttcttgtgacacg

SEQ ID NO: 31826 - DNA, 16 bp, synthetic construct
  misc_feature 1..16: note = synthetic [barcode part1]
  source 1..16: mol_type = other DNA
ttgacggttcgtactt

SEQ ID NO: 31827 - DNA, 16 bp, synthetic construct
  misc_feature 1..16: note = synthetic [barcode part1]
  source 1..16: mol_type = other DNA
ttctccttccttcctc

SEQ ID NO: 31828 - DNA, 16 bp, synthetic construct
  misc_feature 1..16: note = synthetic [barcode part1]
  source 1..16: mol_type = other DNA
atcgcgactgtccgtt

SEQ ID NO: 31829 - DNA, 16 bp, synthetic construct
  misc_feature 1..16: note = synthetic [barcode part1]
  source 1..16: mol_type = other DNA
gaaccaggagactaag

SEQ ID NO: 31830 - DNA, 16 bp, synthetic construct
  misc_feature 1..16: note = synthetic [barcode part1]
  source 1..16: mol_type = other DNA
agtcaggtctgacttg

SEQ ID NO: 31831 - DNA, 16 bp, synthetic construct
  misc_feature 1..16: note = synthetic [barcode part1]
  source 1..16: mol_type = other DNA
gtcgagtgtgaggact

SEQ ID NO: 31832 - DNA, 16 bp, synthetic construct
  misc_feature 1..16: note = synthetic [barcode part1]
  source 1..16: mol_type = other DNA
taccgttaggcgtcct

SEQ ID NO: 31833 - DNA, 16 bp, synthetic construct
  misc_feature 1..16: note = synthetic [barcode part1]
  source 1..16: mol_type = other DNA
gcctcgttcactactt

SEQ ID NO: 31834 - DNA, 16 bp, synthetic construct
  misc_feature 1..16: note = synthetic [barcode part1]
  source 1..16: mol_type = other DNA
taacaatcttcgcacc

SEQ ID NO: 31835 - DNA, 16 bp, synthetic construct
  misc_feature 1..16: note = synthetic [barcode part1]
  source 1..16: mol_type = other DNA
cgtaaggaatcactag

SEQ ID NO: 31836 - DNA, 16 bp, synthetic construct
  misc_feature 1..16: note = synthetic [barcode part1]
  source 1..16: mol_type = other DNA
ccacggttagtatcag

SEQ ID NO: 31837 - DNA, 16 bp, synthetic construct
  misc_feature 1..16: note = synthetic [barcode part1]
  source 1..16: mol_type = other DNA
gaggtctctgtagtgt

SEQ ID NO: 31838 - DNA, 16 bp, synthetic construct
  misc_feature 1..16: note = synthetic [barcode part1]
  source 1..16: mol_type = other DNA
agaaccgtagtaggag

SEQ ID NO: 31839 - DNA, 16 bp, synthetic construct
  misc_feature 1..16: note = synthetic [barcode part1]
  source 1..16: mol_type = other DNA
gcgtaatacgtgttgc

SEQ ID NO: 31840 - DNA, 16 bp, synthetic construct
  misc_feature 1..16: note = synthetic [barcode part1]
  source 1..16: mol_type = other DNA
agttgtggttgtgtgc

SEQ ID NO: 31841 - DNA, 16 bp, synthetic construct
  misc_feature 1..16: note = synthetic [barcode part1]
  source 1..16: mol_type = other DNA
tgagatcgttgactgc

SEQ ID NO: 31842 - DNA, 16 bp, synthetic construct
  misc_feature 1..16: note = synthetic [barcode part1]
  source 1..16: mol_type = other DNA
ttctctcgaccagttc

SEQ ID NO: 31843 - DNA, 16 bp, synthetic construct
  misc_feature 1..16: note = synthetic [barcode part1]
  source 1..16: mol_type = other DNA
cctgatagtggttcag

SEQ ID NO: 31844 - DNA, 16 bp, synthetic construct
  misc_feature 1..16: note = synthetic [barcode part1]
  source 1..16: mol_type = other DNA
atactctgccactggc

SEQ ID NO: 31845 - DNA, 16 bp, synthetic construct
  misc_feature 1..16: note = synthetic [barcode part1]
  source 1..16: mol_type = other DNA
caatcgatcgaccaac

SEQ ID NO: 31846 - DNA, 16 bp, synthetic construct
  misc_feature 1..16: note = synthetic [barcode part1]
  source 1..16: mol_type = other DNA
tggccacttactaccg

SEQ ID NO: 31847 - DNA, 16 bp, synthetic construct
  misc_feature 1..16: note = synthetic [barcode part1]
  source 1..16: mol_type = other DNA
taactccgatcctcct

SEQ ID NO: 31848 - DNA, 16 bp, synthetic construct
  misc_feature 1..16: note = synthetic [barcode part1]
  source 1..16: mol_type = other DNA
gtccggaatagatctc

SEQ ID NO: 31849 - DNA, 16 bp, synthetic construct
  misc_feature 1..16: note = synthetic [barcode part1]
  source 1..16: mol_type = other DNA
gcctgacttctgtacg

SEQ ID NO: 31850 - DNA, 16 bp, synthetic construct
  misc_feature 1..16: note = synthetic [barcode part1]
  source 1..16: mol_type = other DNA
tgttgacctccagtcg

SEQ ID NO: 31851 - DNA, 16 bp, synthetic construct
  misc_feature 1..16: note = synthetic [barcode part1]
  source 1..16: mol_type = other DNA
gcgattatcttccaac

SEQ ID NO: 31852 - DNA, 16 bp, synthetic construct
  misc_feature 1..16: note = synthetic [barcode part1]
  source 1..16: mol_type = other DNA
ttctaacggaagtcgc

SEQ ID NO: 31853 - DNA, 16 bp, synthetic construct
  misc_feature 1..16: note = synthetic [barcode part1]
  source 1..16: mol_type = other DNA
agatcgcacgacttgt

SEQ ID NO: 31854 - DNA, 16 bp, synthetic construct
  misc_feature 1..16: note = synthetic [barcode part1]
  source 1..16: mol_type = other DNA
gtgataacagatccag

SEQ ID NO: 31855 - DNA, 16 bp, synthetic construct
  misc_feature 1..16: note = synthetic [barcode part1]
  source 1..16: mol_type = other DNA
gacctagagtctggtt

SEQ ID NO: 31856 - DNA, 16 bp, synthetic construct
  misc_feature 1..16: note = synthetic [barcode part1]
  source 1..16: mol_type = other DNA
cactggagagtgtggt

SEQ ID NO: 31857 - DNA, 16 bp, synthetic construct
  misc_feature 1..16: note = synthetic [barcode part1]
  source 1..16: mol_type = other DNA
gaccaatccgaagttc

SEQ ID NO: 31858 - DNA, 16 bp, synthetic construct
  misc_feature 1..16: note = synthetic [barcode part1]
  source 1..16: mol_type = other DNA
agtgtggtccagtgag

SEQ ID NO: 31859 - DNA, 16 bp, synthetic construct
  misc_feature 1..16: note = synthetic [barcode part1]
  source 1..16: mol_type = other DNA
gtgaactcttcgtcgc

SEQ ID NO: 31860 - DNA, 16 bp, synthetic construct
  misc_feature 1..16: note = synthetic [barcode part1]
  source 1..16: mol_type = other DNA
agtccagtcctgcact

SEQ ID NO: 31861 - DNA, 16 bp, synthetic construct
  misc_feature 1..16: note = synthetic [barcode part1]
  source 1..16: mol_type = other DNA
ttaccgtgtcctacct

SEQ ID NO: 31862 - DNA, 16 bp, synthetic construct
  misc_feature 1..16: note = synthetic [barcode part1]
  source 1..16: mol_type = other DNA
gtcactcctgttctac

SEQ ID NO: 31863 - DNA, 16 bp, synthetic construct
  misc_feature 1..16: note = synthetic [barcode part1]
  source 1..16: mol_type = other DNA
taggttcttcgtcgcg

SEQ ID NO: 31864 - DNA, 16 bp, synthetic construct
  misc_feature 1..16: note = synthetic [barcode part1]
  source 1..16: mol_type = other DNA
taacttctgcgcggtc

SEQ ID NO: 31865 - DNA, 16 bp, synthetic construct
  misc_feature 1..16: note = synthetic [barcode part1]
  source 1..16: mol_type = other DNA
tctccttggtcttgac

SEQ ID NO: 31866 - DNA, 16 bp, synthetic construct
  misc_feature 1..16: note = synthetic [barcode part1]
  source 1..16: mol_type = other DNA
tctaacgagtgacctg

SEQ ID NO: 31867 - DNA, 16 bp, synthetic construct
  misc_feature 1..16: note = synthetic [barcode part1]
  source 1..16: mol_type = other DNA
ttggtggcacttccgt

SEQ ID NO: 31868 - DNA, 16 bp, synthetic construct
  misc_feature 1..16: note = synthetic [barcode part1]
  source 1..16: mol_type = other DNA
cagacacacacgatct

SEQ ID NO: 31869 - DNA, 16 bp, synthetic construct
  misc_feature 1..16: note = synthetic [barcode part1]
  source 1..16: mol_type = other DNA
cagtcagttggttggt

SEQ ID NO: 31870 - DNA, 16 bp, synthetic construct
  misc_feature 1..16: note = synthetic [barcode part1]
  source 1..16: mol_type = other DNA
aatccggcaacgatct

SEQ ID NO: 31871 - DNA, 16 bp, synthetic construct
  misc_feature 1..16: note = synthetic [barcode part1]
  source 1..16: mol_type = other DNA
aacgcaggataacttg

SEQ ID NO: 31872 - DNA, 16 bp, synthetic construct
  misc_feature 1..16: note = synthetic [barcode part1]
  source 1..16: mol_type = other DNA
ccagatactaccttac

SEQ ID NO: 31873 - DNA, 16 bp, synthetic construct
  misc_feature 1..16: note = synthetic [barcode part1]
  source 1..16: mol_type = other DNA
agaggtattgtcgagt

SEQ ID NO: 31874 - DNA, 16 bp, synthetic construct
  misc_feature 1..16: note = synthetic [barcode part1]
  source 1..16: mol_type = other DNA
cgcgaatactcgtagt

SEQ ID NO: 31875 - DNA, 16 bp, synthetic construct
  misc_feature 1..16: note = synthetic [barcode part1]
  source 1..16: mol_type = other DNA
tctgagtcagactcag

SEQ ID NO: 31876 - DNA, 16 bp, synthetic construct
  misc_feature 1..16: note = synthetic [barcode part1]
  source 1..16: mol_type = other DNA
tagtaacgcgttctct

SEQ ID NO: 31877 - DNA, 16 bp, synthetic construct
  misc_feature 1..16: note = synthetic [barcode part1]
  source 1..16: mol_type = other DNA
gtgaaggtgatctggc

SEQ ID NO: 31878 - DNA, 16 bp, synthetic construct
  misc_feature 1..16: note = synthetic [barcode part1]
  source 1..16: mol_type = other DNA
cacgagtgagttcgtt

SEQ ID NO: 31879 - DNA, 16 bp, synthetic construct
  misc_feature 1..16: note = synthetic [barcode part1]
  source 1..16: mol_type = other DNA
tgattcttgacacgtc

SEQ ID NO: 31880 - DNA, 16 bp, synthetic construct
  misc_feature 1..16: note = synthetic [barcode part1]
  source 1..16: mol_type = other DNA
tgtcttgttgcggatt

SEQ ID NO: 31881 - DNA, 16 bp, synthetic construct
  misc_feature 1..16: note = synthetic [barcode part1]
  source 1..16: mol_type = other DNA
gacactaattgtggcc

SEQ ID NO: 31882 - DNA, 16 bp, synthetic construct
  misc_feature 1..16: note = synthetic [barcode part1]
  source 1..16: mol_type = other DNA
tgttgccttcagttcc

SEQ ID NO: 31883 - DNA, 16 bp, synthetic construct
  misc_feature 1..16: note = synthetic [barcode part1]
  source 1..16: mol_type = other DNA
gttcagtcaacgactg

SEQ ID NO: 31884 - DNA, 16 bp, synthetic construct
  misc_feature 1..16: note = synthetic [barcode part1]
  source 1..16: mol_type = other DNA
aggtacgtaataaccg

SEQ ID NO: 31885 - DNA, 16 bp, synthetic construct
  misc_feature 1..16: note = synthetic [barcode part1]
  source 1..16: mol_type = other DNA
ccttatagaggtgcac

SEQ ID NO: 31886 - DNA, 16 bp, synthetic construct
  misc_feature 1..16: note = synthetic [barcode part1]
  source 1..16: mol_type = other DNA
gtaacaaggtggcaag

SEQ ID NO: 31887 - DNA, 16 bp, synthetic construct
  misc_feature 1..16: note = synthetic [barcode part1]
  source 1..16: mol_type = other DNA
cactaccactcgagtc

SEQ ID NO: 31888 - DNA, 16 bp, synthetic construct
  misc_feature 1..16: note = synthetic [barcode part1]
  source 1..16: mol_type = other DNA
gtgagtcacactcagt

SEQ ID NO: 31889 - DNA, 16 bp, synthetic construct
  misc_feature 1..16: note = synthetic [barcode part1]
  source 1..16: mol_type = other DNA
gaacactcaggtatcc

SEQ ID NO: 31890 - DNA, 16 bp, synthetic construct
  misc_feature 1..16: note = synthetic [barcode part1]
  source 1..16: mol_type = other DNA
ccactactctgttacc

SEQ ID NO: 31891 - DNA, 16 bp, synthetic construct
  misc_feature 1..16: note = synthetic [barcode part1]
  source 1..16: mol_type = other DNA
agtgccgtaatcagtc

SEQ ID NO: 31892 - DNA, 16 bp, synthetic construct
  misc_feature 1..16: note = synthetic [barcode part1]
  source 1..16: mol_type = other DNA
taaggtccggttgatc

SEQ ID NO: 31893 - DNA, 16 bp, synthetic construct
  misc_feature 1..16: note = synthetic [barcode part1]
  source 1..16: mol_type = other DNA
gagaggttgttagtac

SEQ ID NO: 31894 - DNA, 16 bp, synthetic construct
  misc_feature 1..16: note = synthetic [barcode part1]
  source 1..16: mol_type = other DNA
cggtcacacggaatag

SEQ ID NO: 31895 - DNA, 16 bp, synthetic construct
  misc_feature 1..16: note = synthetic [barcode part1]
  source 1..16: mol_type = other DNA
aattgagttcacggag

SEQ ID NO: 31896 - DNA, 16 bp, synthetic construct
  misc_feature 1..16: note = synthetic [barcode part1]
  source 1..16: mol_type = other DNA
tcttgtacggttcggc

SEQ ID NO: 31897 - DNA, 16 bp, synthetic construct
  misc_feature 1..16: note = synthetic [barcode part1]
  source 1..16: mol_type = other DNA
ttaccagttaggccag

SEQ ID NO: 31898 - DNA, 16 bp, synthetic construct
  misc_feature 1..16: note = synthetic [barcode part1]
  source 1..16: mol_type = other DNA
ttcgattgcgtattgc

SEQ ID NO: 31899 - DNA, 16 bp, synthetic construct
  misc_feature 1..16: note = synthetic [barcode part1]
  source 1..16: mol_type = other DNA
ccgtactcaagttgcc

SEQ ID NO: 31900 - DNA, 16 bp, synthetic construct
  misc_feature 1..16: note = synthetic [barcode part1]
  source 1..16: mol_type = other DNA
agttatagtgtcggcc

SEQ ID NO: 31901 - DNA, 16 bp, synthetic construct
  misc_feature 1..16: note = synthetic [barcode part1]
  source 1..16: mol_type = other DNA
tgacggaagatccacg

SEQ ID NO: 31902 - DNA, 16 bp, synthetic construct
  misc_feature 1..16: note = synthetic [barcode part1]
  source 1..16: mol_type = other DNA
tcctgtatcaagtcgt

SEQ ID NO: 31903 - DNA, 16 bp, synthetic construct
  misc_feature 1..16: note = synthetic [barcode part1]
  source 1..16: mol_type = other DNA
cggtcgtgaatatctg

SEQ ID NO: 31904 - DNA, 16 bp, synthetic construct
  misc_feature 1..16: note = synthetic [barcode part1]
  source 1..16: mol_type = other DNA
cgagtgacagaatccg

SEQ ID NO: 31905 - DNA, 16 bp, synthetic construct
  misc_feature 1..16: note = synthetic [barcode part1]
  source 1..16: mol_type = other DNA
aacaacctcttcgtac

SEQ ID NO: 31906 - DNA, 16 bp, synthetic construct
  misc_feature 1..16: note = synthetic [barcode part1]
  source 1..16: mol_type = other DNA
cctcgcaaccgaactt

SEQ ID NO: 31907 - DNA, 16 bp, synthetic construct
  misc_feature 1..16: note = synthetic [barcode part1]
  source 1..16: mol_type = other DNA
gtgtaggcaagtcgtg

SEQ ID NO: 31908 - DNA, 16 bp, synthetic construct
  misc_feature 1..16: note = synthetic [barcode part1]
  source 1..16: mol_type = other DNA
tacggccaacctatag

SEQ ID NO: 31909 - DNA, 16 bp, synthetic construct
  misc_feature 1..16: note = synthetic [barcode part1]
  source 1..16: mol_type = other DNA
gttggtaggtagtaac

SEQ ID NO: 31910 - DNA, 16 bp, synthetic construct
  misc_feature 1..16: note = synthetic [barcode part1]
  source 1..16: mol_type = other DNA
gcagttaggtctcctc

SEQ ID NO: 31911 - DNA, 16 bp, synthetic construct
  misc_feature 1..16: note = synthetic [barcode part1]
  source 1..16: mol_type = other DNA
tcactaggttgagtcg

SEQ ID NO: 31912 - DNA, 16 bp, synthetic construct
  misc_feature 1..16: note = synthetic [barcode part1]
  source 1..16: mol_type = other DNA
tagtctcgcgttaact

SEQ ID NO: 31913 - DNA, 16 bp, synthetic construct
  misc_feature 1..16: note = synthetic [barcode part1]
  source 1..16: mol_type = other DNA
atcacaaggactccgt

SEQ ID NO: 31914 - DNA, 16 bp, synthetic construct
  misc_feature 1..16: note = synthetic [barcode part1]
  source 1..16: mol_type = other DNA
gcgcgactcaacttct

SEQ ID NO: 31915 - DNA, 16 bp, synthetic construct
  misc_feature 1..16: note = synthetic [barcode part1]
  source 1..16: mol_type = other DNA
gaacctaatccggatc

SEQ ID NO: 31916 - DNA, 16 bp, synthetic construct
  misc_feature 1..16: note = synthetic [barcode part1]
  source 1..16: mol_type = other DNA
tacgttgcagtgtacg

SEQ ID NO: 31917 - DNA, 16 bp, synthetic construct
  misc_feature 1..16: note = synthetic [barcode part1]
  source 1..16: mol_type = other DNA
tgacgttgcagtgttg

SEQ ID NO: 31918 - DNA, 16 bp, synthetic construct
  misc_feature 1..16: note = synthetic [barcode part1]
  source 1..16: mol_type = other DNA
tcagaggacgtaattg

SEQ ID NO: 31919 - DNA, 16 bp, synthetic construct
  misc_feature 1..16: note = synthetic [barcode part1]
  source 1..16: mol_type = other DNA
tctgaccttgaggaac

SEQ ID NO: 31920 - DNA, 16 bp, synthetic construct
  misc_feature 1..16: note = synthetic [barcode part1]
  source 1..16: mol_type = other DNA
gtaccgaaccgaaggt

SEQ ID NO: 31921 - DNA, 16 bp, synthetic construct
  misc_feature 1..16: note = synthetic [barcode part1]
  source 1..16: mol_type = other DNA
gaggtgaggtactcac

SEQ ID NO: 31922 - DNA, 16 bp, synthetic construct
  misc_feature 1..16: note = synthetic [barcode part1]
  source 1..16: mol_type = other DNA
cacctcttaacttgag

SEQ ID NO: 31923 - DNA, 16 bp, synthetic construct
  misc_feature 1..16: note = synthetic [barcode part1]
  source 1..16: mol_type = other DNA
gttacggcgcctatct

SEQ ID NO: 31924 - DNA, 16 bp, synthetic construct
  misc_feature 1..16: note = synthetic [barcode part1]
  source 1..16: mol_type = other DNA
gttcactggtgttact

SEQ ID NO: 31925 - DNA, 16 bp, synthetic construct
  misc_feature 1..16: note = synthetic [barcode part1]
  source 1..16: mol_type = other DNA
acgtctctaactcggc

SEQ ID NO: 31926 - DNA, 16 bp, synthetic construct
  misc_feature 1..16: note = synthetic [barcode part1]
  source 1..16: mol_type = other DNA
taccagacaaggacgc

SEQ ID NO: 31927 - DNA, 16 bp, synthetic construct
  misc_feature 1..16: note = synthetic [barcode part1]
  source 1..16: mol_type = other DNA
gaccaccagacacaag

SEQ ID NO: 31928 - DNA, 16 bp, synthetic construct
  misc_feature 1..16: note = synthetic [barcode part1]
  source 1..16: mol_type = other DNA
aaccaactcttgaggc

SEQ ID NO: 31929 - DNA, 16 bp, synthetic construct
  misc_feature 1..16: note = synthetic [barcode part1]
  source 1..16: mol_type = other DNA
accgttagtcgaactg

SEQ ID NO: 31930 - DNA, 16 bp, synthetic construct
  misc_feature 1..16: note = synthetic [barcode part1]
  source 1..16: mol_type = other DNA
gacagaacagtggagt

SEQ ID NO: 31931 - DNA, 16 bp, synthetic construct
  misc_feature 1..16: note = synthetic [barcode part1]
  source 1..16: mol_type = other DNA
acgagttccttattgc

SEQ ID NO: 31932 - DNA, 16 bp, synthetic construct
  misc_feature 1..16: note = synthetic [barcode part1]
  source 1..16: mol_type = other DNA
cacttactaggcgagt

SEQ ID NO: 31933 - DNA, 16 bp, synthetic construct
  misc_feature 1..16: note = synthetic [barcode part1]
  source 1..16: mol_type = other DNA
atccaaggagttcacc

SEQ ID NO: 31934 - DNA, 16 bp, synthetic construct
  misc_feature 1..16: note = synthetic [barcode part1]
  source 1..16: mol_type = other DNA
gccttaatcagagtcg

SEQ ID NO: 31935 - DNA, 16 bp, synthetic construct
  misc_feature 1..16: note = synthetic [barcode part1]
  source 1..16: mol_type = other DNA
gcacaacgttgacgtt

SEQ ID NO: 31936 - DNA, 16 bp, synthetic construct
  misc_feature 1..16: note = synthetic [barcode part1]
  source 1..16: mol_type = other DNA
cctagtcgttgtatac

SEQ ID NO: 31937 - DNA, 16 bp, synthetic construct
  misc_feature 1..16: note = synthetic [barcode part1]
  source 1..16: mol_type = other DNA
cgttagtagagtcaag

SEQ ID NO: 31938 - DNA, 16 bp, synthetic construct
  misc_feature 1..16: note = synthetic [barcode part1]
  source 1..16: mol_type = other DNA
acgcgacaatcaaggc

SEQ ID NO: 31939 - DNA, 16 bp, synthetic construct
  misc_feature 1..16: note = synthetic [barcode part1]
  source 1..16: mol_type = other DNA
aggagactgccaacac

SEQ ID NO: 31940 - DNA, 16 bp, synthetic construct
  misc_feature 1..16: note = synthetic [barcode part1]
  source 1..16: mol_type = other DNA
gacgaagttagacgcc

SEQ ID NO: 31941 - DNA, 16 bp, synthetic construct
  misc_feature 1..16: note = synthetic [barcode part1]
  source 1..16: mol_type = other DNA
tcctattgacgagacg

SEQ ID NO: 31942 - DNA, 16 bp, synthetic construct
  misc_feature 1..16: note = synthetic [barcode part1]
  source 1..16: mol_type = other DNA
acagtcgttaggaagt

SEQ ID NO: 31943 - DNA, 16 bp, synthetic construct
  misc_feature 1..16: note = synthetic [barcode part1]
  source 1..16: mol_type = other DNA
acttgactcttgtgtg

SEQ ID NO: 31944 - DNA, 16 bp, synthetic construct
  misc_feature 1..16: note = synthetic [barcode part1]
  source 1..16: mol_type = other DNA
gtcagtgttactacct

SEQ ID NO: 31945 - DNA, 16 bp, synthetic construct
  misc_feature 1..16: note = synthetic [barcode part1]
  source 1..16: mol_type = other DNA
tacgtccaggtcactc

SEQ ID NO: 31946 - DNA, 16 bp, synthetic construct
  misc_feature 1..16: note = synthetic [barcode part1]
  source 1..16: mol_type = other DNA
acggtacacgttacgt

SEQ ID NO: 31947 - DNA, 16 bp, synthetic construct
  misc_feature 1..16: note = synthetic [barcode part1]
  source 1..16: mol_type = other DNA
aggccaactagtcttg

SEQ ID NO: 31948 - DNA, 16 bp, synthetic construct
  misc_feature 1..16: note = synthetic [barcode part1]
  source 1..16: mol_type = other DNA
gaatctaccactgtct

SEQ ID NO: 31949 - DNA, 16 bp, synthetic construct
  misc_feature 1..16: note = synthetic [barcode part1]
  source 1..16: mol_type = other DNA
gtgactggtactggtt

SEQ ID NO: 31950 - DNA, 16 bp, synthetic construct
  misc_feature 1..16: note = synthetic [barcode part1]
  source 1..16: mol_type = other DNA
aactcctaacttgcgt

SEQ ID NO: 31951 - DNA, 16 bp, synthetic construct
  misc_feature 1..16: note = synthetic [barcode part1]
  source 1..16: mol_type = other DNA
gtacctcacacttctc

SEQ ID NO: 31952 - DNA, 16 bp, synthetic construct
  misc_feature 1..16: note = synthetic [barcode part1]
  source 1..16: mol_type = other DNA
agattatcggaagtgc

SEQ ID NO: 31953 - DNA, 16 bp, synthetic construct
  misc_feature 1..16: note = synthetic [barcode part1]
  source 1..16: mol_type = other DNA
tcggtatcacggttag

SEQ ID NO: 31954 - DNA, 16 bp, synthetic construct
  misc_feature 1..16: note = synthetic [barcode part1]
  source 1..16: mol_type = other DNA
actcaccgcaatattc

SEQ ID NO: 31955 - DNA, 16 bp, synthetic construct
  misc_feature 1..16: note = synthetic [barcode part1]
  source 1..16: mol_type = other DNA
gaggttcgtggacagt

SEQ ID NO: 31956 - DNA, 16 bp, synthetic construct
  misc_feature 1..16: note = synthetic [barcode part1]
  source 1..16: mol_type = other DNA
gagtgaactcaagact

SEQ ID NO: 31957 - DNA, 16 bp, synthetic construct
  misc_feature 1..16: note = synthetic [barcode part1]
  source 1..16: mol_type = other DNA
atcttactaggcctac

SEQ ID NO: 31958 - DNA, 16 bp, synthetic construct
  misc_feature 1..16: note = synthetic [barcode part1]
  source 1..16: mol_type = other DNA
ccaaggtaatagacgt

SEQ ID NO: 31959 - DNA, 16 bp, synthetic construct
  misc_feature 1..16: note = synthetic [barcode part1]
  source 1..16: mol_type = other DNA
atagagaatcaccgac

SEQ ID NO: 31960 - DNA, 16 bp, synthetic construct
  misc_feature 1..16: note = synthetic [barcode part1]
  source 1..16: mol_type = other DNA
acctaccgttccgaac

SEQ ID NO: 31961 - DNA, 16 bp, synthetic construct
  misc_feature 1..16: note = synthetic [barcode part1]
  source 1..16: mol_type = other DNA
agacacggtattcctg

SEQ ID NO: 31962 - DNA, 16 bp, synthetic construct
  misc_feature 1..16: note = synthetic [barcode part1]
  source 1..16: mol_type = other DNA
aatacgcctaaccttc

SEQ ID NO: 31963 - DNA, 16 bp, synthetic construct
  misc_feature 1..16: note = synthetic [barcode part1]
  source 1..16: mol_type = other DNA
tatcggaactcaacgc

SEQ ID NO: 31964 - DNA, 16 bp, synthetic construct
  misc_feature 1..16: note = synthetic [barcode part1]
  source 1..16: mol_type = other DNA
acctcgtctgtgcaac

SEQ ID NO: 31965 - DNA, 16 bp, synthetic construct
  misc_feature 1..16: note = synthetic [barcode part1]
  source 1..16: mol_type = other DNA
gattcgattaacggcc

SEQ ID NO: 31966 - DNA, 16 bp, synthetic construct
  misc_feature 1..16: note = synthetic [barcode part1]
  source 1..16: mol_type = other DNA
gtcgagtcgtcgaatt

SEQ ID NO: 31967 - DNA, 16 bp, synthetic construct
  misc_feature 1..16: note = synthetic [barcode part1]
  source 1..16: mol_type = other DNA
actcactgacgttact

SEQ ID NO: 31968 - DNA, 16 bp, synthetic construct
  misc_feature 1..16: note = synthetic [barcode part1]
  source 1..16: mol_type = other DNA
gatagttcgcaagagt

SEQ ID NO: 31969 - DNA, 16 bp, synthetic construct
  misc_feature 1..16: note = synthetic [barcode part1]
  source 1..16: mol_type = other DNA
tggtgccttacaacag

SEQ ID NO: 31970 - DNA, 16 bp, synthetic construct
  misc_feature 1..16: note = synthetic [barcode part1]
  source 1..16: mol_type = other DNA
tagtcgttgaagaacg

SEQ ID NO: 31971 - DNA, 16 bp, synthetic construct
  misc_feature 1..16: note = synthetic [barcode part1]
  source 1..16: mol_type = other DNA
gcactcttcaacaatc

SEQ ID NO: 31972 - DNA, 16 bp, synthetic construct
  misc_feature 1..16: note = synthetic [barcode part1]
  source 1..16: mol_type = other DNA
gcagacaggatcctag

SEQ ID NO: 31973 - DNA, 16 bp, synthetic construct
  misc_feature 1..16: note = synthetic [barcode part1]
  source 1..16: mol_type = other DNA
cgagaaggtatcgacc

SEQ ID NO: 31974 - DNA, 16 bp, synthetic construct
  misc_feature 1..16: note = synthetic [barcode part1]
  source 1..16: mol_type = other DNA
attccttagaggaccg

SEQ ID NO: 31975 - DNA, 16 bp, synthetic construct
  misc_feature 1..16: note = synthetic [barcode part1]
  source 1..16: mol_type = other DNA
gaagttcaagttccgc

SEQ ID NO: 31976 - DNA, 16 bp, synthetic construct
  misc_feature 1..16: note = synthetic [barcode part1]
  source 1..16: mol_type = other DNA
cgaataagaacctcag

SEQ ID NO: 31977 - DNA, 16 bp, synthetic construct
  misc_feature 1..16: note = synthetic [barcode part1]
  source 1..16: mol_type = other DNA
ttggcaaggtagttcc

SEQ ID NO: 31978 - DNA, 16 bp, synthetic construct
  misc_feature 1..16: note = synthetic [barcode part1]
  source 1..16: mol_type = other DNA
gttctgtcttggcctt

SEQ ID NO: 31979 - DNA, 16 bp, synthetic construct
  misc_feature 1..16: note = synthetic [barcode part1]
  source 1..16: mol_type = other DNA
tcaagacacgaacaac

SEQ ID NO: 31980 - DNA, 16 bp, synthetic construct
  misc_feature 1..16: note = synthetic [barcode part1]
  source 1..16: mol_type = other DNA
tctcaccgtaggttcg

SEQ ID NO: 31981 - DNA, 16 bp, synthetic construct
  misc_feature 1..16: note = synthetic [barcode part1]
  source 1..16: mol_type = other DNA
acgacacaagactcct

SEQ ID NO: 31982 - DNA, 16 bp, synthetic construct
  misc_feature 1..16: note = synthetic [barcode part1]
  source 1..16: mol_type = other DNA
tgatacaggtcgcact

SEQ ID NO: 31983 - DNA, 16 bp, synthetic construct
  misc_feature 1..16: note = synthetic [barcode part1]
  source 1..16: mol_type = other DNA
taacgcactcttgatc

SEQ ID NO: 31984 - DNA, 16 bp, synthetic construct
  misc_feature 1..16: note = synthetic [barcode part1]
  source 1..16: mol_type = other DNA
ttagataaggcggtac

SEQ ID NO: 31985 - DNA, 16 bp, synthetic construct
  misc_feature 1..16: note = synthetic [barcode part1]
  source 1..16: mol_type = other DNA
tcctcgatataactgc

SEQ ID NO: 31986 - DNA, 16 bp, synthetic construct
  misc_feature 1..16: note = synthetic [barcode part1]
  source 1..16: mol_type = other DNA
cctgttccactgcaag

SEQ ID NO: 31987 - DNA, 16 bp, synthetic construct
  misc_feature 1..16: note = synthetic [barcode part1]
  source 1..16: mol_type = other DNA
ccgttctagaacaacg

SEQ ID NO: 31988 - DNA, 16 bp, synthetic construct
  misc_feature 1..16: note = synthetic [barcode part1]
  source 1..16: mol_type = other DNA
tacggacacggcaagt

SEQ ID NO: 31989 - DNA, 16 bp, synthetic construct
  misc_feature 1..16: note = synthetic [barcode part1]
  source 1..16: mol_type = other DNA
tgccggtgaagagttg

SEQ ID NO: 31990 - DNA, 16 bp, synthetic construct
  misc_feature 1..16: note = synthetic [barcode part1]
  source 1..16: mol_type = other DNA
aagtccgagtggcagt

SEQ ID NO: 31991 - DNA, 16 bp, synthetic construct
  misc_feature 1..16: note = synthetic [barcode part1]
  source 1..16: mol_type = other DNA
taagtacgccgcctct

SEQ ID NO: 31992 - DNA, 16 bp, synthetic construct
  misc_feature 1..16: note = synthetic [barcode part1]
  source 1..16: mol_type = other DNA
tagtctgcgcctctag

SEQ ID NO: 31993 - DNA, 16 bp, synthetic construct
  misc_feature 1..16: note = synthetic [barcode part1]
  source 1..16: mol_type = other DNA
ccgaagatcagacacg

SEQ ID NO: 31994 - DNA, 16 bp, synthetic construct
  misc_feature 1..16: note = synthetic [barcode part1]
  source 1..16: mol_type = other DNA
aactcaccggaataag

SEQ ID NO: 31995 - DNA, 16 bp, synthetic construct
  misc_feature 1..16: note = synthetic [barcode part1]
  source 1..16: mol_type = other DNA
gtatcctatcaggtct

SEQ ID NO: 31996 - DNA, 16 bp, synthetic construct
  misc_feature 1..16: note = synthetic [barcode part1]
  source 1..16: mol_type = other DNA
gacttcactcgcctag

SEQ ID NO: 31997 - DNA, 16 bp, synthetic construct
  misc_feature 1..16: note = synthetic [barcode part1]
  source 1..16: mol_type = other DNA
tccgatccaactgcac

SEQ ID NO: 31998 - DNA, 16 bp, synthetic construct
  misc_feature 1..16: note = synthetic [barcode part1]
  source 1..16: mol_type = other DNA
tgtacgttcagagtcg

SEQ ID NO: 31999 - DNA, 16 bp, synthetic construct
  misc_feature 1..16: note = synthetic [barcode part1]
  source 1..16: mol_type = other DNA
gagacacttctcacag

SEQ ID NO: 32000 - DNA, 16 bp, synthetic construct
  misc_feature 1..16: note = synthetic [barcode part1]
  source 1..16: mol_type = other DNA
acacgtattggccaac

SEQ ID NO: 32001 - DNA, 16 bp, synthetic construct
  misc_feature 1..16: note = synthetic [barcode part1]
  source 1..16: mol_type = other DNA
atccttgtaccaggtt

SEQ ID NO: 32002 - DNA, 16 bp, synthetic construct
  misc_feature 1..16: note = synthetic [barcode part1]
  source 1..16: mol_type = other DNA
cgaacgtagtcacgtt

SEQ ID NO: 32003 - DNA, 16 bp, synthetic construct
  misc_feature 1..16: note = synthetic [barcode part1]
  source 1..16: mol_type = other DNA
tctgaacgtgaggcag

SEQ ID NO: 32004 - DNA, 16 bp, synthetic construct
  misc_feature 1..16: note = synthetic [barcode part1]
  source 1..16: mol_type = other DNA
acaagtacctaaggtg

SEQ ID NO: 32005 - DNA, 16 bp, synthetic construct
  misc_feature 1..16: note = synthetic [barcode part1]
  source 1..16: mol_type = other DNA
attcgaccttccgcag

SEQ ID NO: 32006 - DNA, 16 bp, synthetic construct
  misc_feature 1..16: note = synthetic [barcode part1]
  source 1..16: mol_type = other DNA
tattctgcggaacgac

SEQ ID NO: 32007 - DNA, 16 bp, synthetic construct
  misc_feature 1..16: note = synthetic [barcode part1]
  source 1..16: mol_type = other DNA
gatacggacaagagtg

SEQ ID NO: 32008 - DNA, 16 bp, synthetic construct
  misc_feature 1..16: note = synthetic [barcode part1]
  source 1..16: mol_type = other DNA
caagtaataccgtgag

SEQ ID NO: 32009 - DNA, 16 bp, synthetic construct
  misc_feature 1..16: note = synthetic [barcode part1]
  source 1..16: mol_type = other DNA
tactctatctaggcac

SEQ ID NO: 32010 - DNA, 16 bp, synthetic construct
  misc_feature 1..16: note = synthetic [barcode part1]
  source 1..16: mol_type = other DNA
tctgagacttcaggac

SEQ ID NO: 32011 - DNA, 16 bp, synthetic construct
  misc_feature 1..16: note = synthetic [barcode part1]
  source 1..16: mol_type = other DNA
tcaccactcgcagatc

SEQ ID NO: 32012 - DNA, 16 bp, synthetic construct
  misc_feature 1..16: note = synthetic [barcode part1]
  source 1..16: mol_type = other DNA
cgattctagaaggcct

SEQ ID NO: 32013 - DNA, 16 bp, synthetic construct
  misc_feature 1..16: note = synthetic [barcode part1]
  source 1..16: mol_type = other DNA
gacttcctgtattgac

SEQ ID NO: 32014 - DNA, 16 bp, synthetic construct
  misc_feature 1..16: note = synthetic [barcode part1]
  source 1..16: mol_type = other DNA
ttacggtgccagttag

SEQ ID NO: 32015 - DNA, 16 bp, synthetic construct
  misc_feature 1..16: note = synthetic [barcode part1]
  source 1..16: mol_type = other DNA
taggatagatacgtcg

SEQ ID NO: 32016 - DNA, 16 bp, synthetic construct
  misc_feature 1..16: note = synthetic [barcode part1]
  source 1..16: mol_type = other DNA
gcgttcggaataatag

SEQ ID NO: 32017 - DNA, 16 bp, synthetic construct
  misc_feature 1..16: note = synthetic [barcode part1]
  source 1..16: mol_type = other DNA
tcaccggactgaattg

SEQ ID NO: 32018 - DNA, 16 bp, synthetic construct
  misc_feature 1..16: note = synthetic [barcode part1]
  source 1..16: mol_type = other DNA
tggtgatagttgtcgc

SEQ ID NO: 32019 - DNA, 16 bp, synthetic construct
  misc_feature 1..16: note = synthetic [barcode part1]
  source 1..16: mol_type = other DNA
actcgtagatcacacg

SEQ ID NO: 32020 - DNA, 16 bp, synthetic construct
  misc_feature 1..16: note = synthetic [barcode part1]
  source 1..16: mol_type = other DNA
gccacgattacttgcc

SEQ ID NO: 32021 - DNA, 16 bp, synthetic construct
  misc_feature 1..16: note = synthetic [barcode part1]
  source 1..16: mol_type = other DNA
cgttccttagtccgag

SEQ ID NO: 32022 - DNA, 16 bp, synthetic construct
  misc_feature 1..16: note = synthetic [barcode part1]
  source 1..16: mol_type = other DNA
cgtcgaactgcactct

SEQ ID NO: 32023 - DNA, 16 bp, synthetic construct
  misc_feature 1..16: note = synthetic [barcode part1]
  source 1..16: mol_type = other DNA
tcctggcaggatagtt

SEQ ID NO: 32024 - DNA, 16 bp, synthetic construct
  misc_feature 1..16: note = synthetic [barcode part1]
  source 1..16: mol_type = other DNA
tccaacagtggttcag

SEQ ID NO: 32025 - DNA, 16 bp, synthetic construct
  misc_feature 1..16: note = synthetic [barcode part1]
  source 1..16: mol_type = other DNA
gatcgtgcacgattgt

SEQ ID NO: 32026 - DNA, 16 bp, synthetic construct
  misc_feature 1..16: note = synthetic [barcode part1]
  source 1..16: mol_type = other DNA
tgatcggattgcggtt

SEQ ID NO: 32027 - DNA, 16 bp, synthetic construct
  misc_feature 1..16: note = synthetic [barcode part1]
  source 1..16: mol_type = other DNA
gtctcaagaagaggag

SEQ ID NO: 32028 - DNA, 16 bp, synthetic construct
  misc_feature 1..16: note = synthetic [barcode part1]
  source 1..16: mol_type = other DNA
acggagttatcgtctg

SEQ ID NO: 32029 - DNA, 16 bp, synthetic construct
  misc_feature 1..16: note = synthetic [barcode part1]
  source 1..16: mol_type = other DNA
aggtcagacaccaacg

SEQ ID NO: 32030 - DNA, 16 bp, synthetic construct
  misc_feature 1..16: note = synthetic [barcode part1]
  source 1..16: mol_type = other DNA
ttgtcgagactcagtg

SEQ ID NO: 32031 - DNA, 16 bp, synthetic construct
  misc_feature 1..16: note = synthetic [barcode part1]
  source 1..16: mol_type = other DNA
tcaacaggtccttatc

SEQ ID NO: 32032 - DNA, 16 bp, synthetic construct
  misc_feature 1..16: note = synthetic [barcode part1]
  source 1..16: mol_type = other DNA
cggaatcagttccagt

SEQ ID NO: 32033 - DNA, 16 bp, synthetic construct
  misc_feature 1..16: note = synthetic [barcode part1]
  source 1..16: mol_type = other DNA
agtactggccgattac

SEQ ID NO: 32034 - DNA, 16 bp, synthetic construct
  misc_feature 1..16: note = synthetic [barcode part1]
  source 1..16: mol_type = other DNA
tgtgttccggaagtgt

SEQ ID NO: 32035 - DNA, 16 bp, synthetic construct
  misc_feature 1..16: note = synthetic [barcode part1]
  source 1..16: mol_type = other DNA
gtgtgtacacgtacac

SEQ ID NO: 32036 - DNA, 16 bp, synthetic construct
  misc_feature 1..16: note = synthetic [barcode part1]
  source 1..16: mol_type = other DNA
gttgttgcgtactccg

SEQ ID NO: 32037 - DNA, 16 bp, synthetic construct
  misc_feature 1..16: note = synthetic [barcode part1]
  source 1..16: mol_type = other DNA
tagtaagttgcgaacg

SEQ ID NO: 32038 - DNA, 16 bp, synthetic construct
  misc_feature 1..16: note = synthetic [barcode part1]
  source 1..16: mol_type = other DNA
atactcgccgtctcag

SEQ ID NO: 32039 - DNA, 16 bp, synthetic construct
  misc_feature 1..16: note = synthetic [barcode part1]
  source 1..16: mol_type = other DNA
agacgaattcaggact

SEQ ID NO: 32040 - DNA, 16 bp, synthetic construct
  misc_feature 1..16: note = synthetic [barcode part1]
  source 1..16: mol_type = other DNA
cgtacttccaccaggt

SEQ ID NO: 32041 - DNA, 16 bp, synthetic construct
  misc_feature 1..16: note = synthetic [barcode part1]
  source 1..16: mol_type = other DNA
cagtactccactcgtg

SEQ ID NO: 32042 - DNA, 16 bp, synthetic construct
  misc_feature 1..16: note = synthetic [barcode part1]
  source 1..16: mol_type = other DNA
ttgttgccgagacagt

SEQ ID NO: 32043 - DNA, 16 bp, synthetic construct
  misc_feature 1..16: note = synthetic [barcode part1]
  source 1..16: mol_type = other DNA
actcgtctgcctattc

SEQ ID NO: 32044 - DNA, 16 bp, synthetic construct
  misc_feature 1..16: note = synthetic [barcode part1]
  source 1..16: mol_type = other DNA
tgtcacttccacaagt

SEQ ID NO: 32045 - DNA, 16 bp, synthetic construct
  misc_feature 1..16: note = synthetic [barcode part1]
  source 1..16: mol_type = other DNA
ataaccacgcgcagtt

SEQ ID NO: 32046 - DNA, 16 bp, synthetic construct
  misc_feature 1..16: note = synthetic [barcode part1]
  source 1..16: mol_type = other DNA
ttggaacctcgcctac

SEQ ID NO: 32047 - DNA, 16 bp, synthetic construct
  misc_feature 1..16: note = synthetic [barcode part1]
  source 1..16: mol_type = other DNA
gcacgcgtaatactgt

SEQ ID NO: 32048 - DNA, 16 bp, synthetic construct
  misc_feature 1..16: note = synthetic [barcode part1]
  source 1..16: mol_type = other DNA
atagaggtcaggccgt

SEQ ID NO: 32049 - DNA, 16 bp, synthetic construct
  misc_feature 1..16: note = synthetic [barcode part1]
  source 1..16: mol_type = other DNA
ttgccaatcgacaacg

SEQ ID NO: 32050 - DNA, 16 bp, synthetic construct
  misc_feature 1..16: note = synthetic [barcode part1]
  source 1..16: mol_type = other DNA
tactactgcggttatc

SEQ ID NO: 32051 - DNA, 16 bp, synthetic construct
  misc_feature 1..16: note = synthetic [barcode part1]
  source 1..16: mol_type = other DNA
cgacaacgttgttggt

SEQ ID NO: 32052 - DNA, 16 bp, synthetic construct
  misc_feature 1..16: note = synthetic [barcode part1]
  source 1..16: mol_type = other DNA
atcttgtggtacactc

SEQ ID NO: 32053 - DNA, 16 bp, synthetic construct
  misc_feature 1..16: note = synthetic [barcode part1]
  source 1..16: mol_type = other DNA
gactcgagacttggtt

SEQ ID NO: 32054 - DNA, 16 bp, synthetic construct
  misc_feature 1..16: note = synthetic [barcode part1]
  source 1..16: mol_type = other DNA
tacgagtctgcagatc

SEQ ID NO: 32055 - DNA, 16 bp, synthetic construct
  misc_feature 1..16: note = synthetic [barcode part1]
  source 1..16: mol_type = other DNA
gttcttacaccaagtc

SEQ ID NO: 32056 - DNA, 16 bp, synthetic construct
  misc_feature 1..16: note = synthetic [barcode part1]
  source 1..16: mol_type = other DNA
gacgtaggaactgtcg

SEQ ID NO: 32057 - DNA, 16 bp, synthetic construct
  misc_feature 1..16: note = synthetic [barcode part1]
  source 1..16: mol_type = other DNA
tgtgaggcgatagtcg

SEQ ID NO: 32058 - DNA, 16 bp, synthetic construct
  misc_feature 1..16: note = synthetic [barcode part1]
  source 1..16: mol_type = other DNA
gcgcacttgaagagtg

SEQ ID NO: 32059 - DNA, 16 bp, synthetic construct
  misc_feature 1..16: note = synthetic [barcode part1]
  source 1..16: mol_type = other DNA
gactccgaatactgtg

SEQ ID NO: 32060 - DNA, 16 bp, synthetic construct
  misc_feature 1..16: note = synthetic [barcode part1]
  source 1..16: mol_type = other DNA
taggactgttgcagtc

SEQ ID NO: 32061 - DNA, 16 bp, synthetic construct
  misc_feature 1..16: note = synthetic [barcode part1]
  source 1..16: mol_type = other DNA
ttggcgcagaattaag

SEQ ID NO: 32062 - DNA, 16 bp, synthetic construct
  misc_feature 1..16: note = synthetic [barcode part1]
  source 1..16: mol_type = other DNA
tcttcgcgcaactcag

SEQ ID NO: 32063 - DNA, 16 bp, synthetic construct
  misc_feature 1..16: note = synthetic [barcode part1]
  source 1..16: mol_type = other DNA
cggcgtataataagac

SEQ ID NO: 32064 - DNA, 16 bp, synthetic construct
  misc_feature 1..16: note = synthetic [barcode part1]
  source 1..16: mol_type = other DNA
caatcctaccggcgtt

SEQ ID NO: 32065 - DNA, 16 bp, synthetic construct
  misc_feature 1..16: note = synthetic [barcode part1]
  source 1..16: mol_type = other DNA
aacgtaattcgcgtcg

SEQ ID NO: 32066 - DNA, 16 bp, synthetic construct
  misc_feature 1..16: note = synthetic [barcode part1]
  source 1..16: mol_type = other DNA
gtcttagtctcaggag

SEQ ID NO: 32067 - DNA, 16 bp, synthetic construct
  misc_feature 1..16: note = synthetic [barcode part1]
  source 1..16: mol_type = other DNA
tattctggtggcgaac

SEQ ID NO: 32068 - DNA, 16 bp, synthetic construct
  misc_feature 1..16: note = synthetic [barcode part1]
  source 1..16: mol_type = other DNA
gagacacttctacgtg

SEQ ID NO: 32069 - DNA, 16 bp, synthetic construct
  misc_feature 1..16: note = synthetic [barcode part1]
  source 1..16: mol_type = other DNA
agaggaatagtcgacg

SEQ ID NO: 32070 - DNA, 16 bp, synthetic construct
  misc_feature 1..16: note = synthetic [barcode part1]
  source 1..16: mol_type = other DNA
agtcgacgccaattgt

SEQ ID NO: 32071 - DNA, 16 bp, synthetic construct
  misc_feature 1..16: note = synthetic [barcode part1]
  source 1..16: mol_type = other DNA
actcacaacacctgag

SEQ ID NO: 32072 - DNA, 16 bp, synthetic construct
  misc_feature 1..16: note = synthetic [barcode part1]
  source 1..16: mol_type = other DNA
agtcgacactagtcgt

SEQ ID NO: 32073 - DNA, 16 bp, synthetic construct
  misc_feature 1..16: note = synthetic [barcode part1]
  source 1..16: mol_type = other DNA
gtggaacagacctacg

SEQ ID NO: 32074 - DNA, 16 bp, synthetic construct
  misc_feature 1..16: note = synthetic [barcode part1]
  source 1..16: mol_type = other DNA
acttggagtccgtaac

SEQ ID NO: 32075 - DNA, 16 bp, synthetic construct
  misc_feature 1..16: note = synthetic [barcode part1]
  source 1..16: mol_type = other DNA
tgagtcggtgccttct

SEQ ID NO: 32076 - DNA, 16 bp, synthetic construct
  misc_feature 1..16: note = synthetic [barcode part1]
  source 1..16: mol_type = other DNA
tgccgaattaccaggt

SEQ ID NO: 32077 - DNA, 16 bp, synthetic construct
  misc_feature 1..16: note = synthetic [barcode part1]
  source 1..16: mol_type = other DNA
taggatccagtgtcac

SEQ ID NO: 32078 - DNA, 16 bp, synthetic construct
  misc_feature 1..16: note = synthetic [barcode part1]
  source 1..16: mol_type = other DNA
ttcactagtcgaggac

SEQ ID NO: 32079 - DNA, 16 bp, synthetic construct
  misc_feature 1..16: note = synthetic [barcode part1]
  source 1..16: mol_type = other DNA
gactcgcaataggacg

SEQ ID NO: 32080 - DNA, 16 bp, synthetic construct
  misc_feature 1..16: note = synthetic [barcode part1]
  source 1..16: mol_type = other DNA
agtctccacacgactc

SEQ ID NO: 32081 - DNA, 16 bp, synthetic construct
  misc_feature 1..16: note = synthetic [barcode part1]
  source 1..16: mol_type = other DNA
caactactaaggaacg

SEQ ID NO: 32082 - DNA, 16 bp, synthetic construct
  misc_feature 1..16: note = synthetic [barcode part1]
  source 1..16: mol_type = other DNA
gactctcaatcgtatc

SEQ ID NO: 32083 - DNA, 16 bp, synthetic construct
  misc_feature 1..16: note = synthetic [barcode part1]
  source 1..16: mol_type = other DNA
gtacgacctctctggt

SEQ ID NO: 32084 - DNA, 16 bp, synthetic construct
  misc_feature 1..16: note = synthetic [barcode part1]
  source 1..16: mol_type = other DNA
cgaaccaactgagtct

SEQ ID NO: 32085 - DNA, 16 bp, synthetic construct
  misc_feature 1..16: note = synthetic [barcode part1]
  source 1..16: mol_type = other DNA
caggccaagttcaatc

SEQ ID NO: 32086 - DNA, 16 bp, synthetic construct
  misc_feature 1..16: note = synthetic [barcode part1]
  source 1..16: mol_type = other DNA
ttgtcgcgacaagatc

SEQ ID NO: 32087 - DNA, 16 bp, synthetic construct
  misc_feature 1..16: note = synthetic [barcode part1]
  source 1..16: mol_type = other DNA
tcaccactgttcaggc

SEQ ID NO: 32088 - DNA, 16 bp, synthetic construct
  misc_feature 1..16: note = synthetic [barcode part1]
  source 1..16: mol_type = other DNA
tgcagacttcagacgt

SEQ ID NO: 32089 - DNA, 16 bp, synthetic construct
  misc_feature 1..16: note = synthetic [barcode part1]
  source 1..16: mol_type = other DNA
tggtcaacggttgatc

SEQ ID NO: 32090 - DNA, 16 bp, synthetic construct
  misc_feature 1..16: note = synthetic [barcode part1]
  source 1..16: mol_type = other DNA
gtctctgtaccaggtc

SEQ ID NO: 32091 - DNA, 16 bp, synthetic construct
  misc_feature 1..16: note = synthetic [barcode part1]
  source 1..16: mol_type = other DNA
ttctgcggtcggattc

SEQ ID NO: 32092 - DNA, 16 bp, synthetic construct
  misc_feature 1..16: note = synthetic [barcode part1]
  source 1..16: mol_type = other DNA
aattcggacgcgagac

SEQ ID NO: 32093 - DNA, 16 bp, synthetic construct
  misc_feature 1..16: note = synthetic [barcode part1]
  source 1..16: mol_type = other DNA
gacacgcgtattaacc

SEQ ID NO: 32094 - DNA, 16 bp, synthetic construct
  misc_feature 1..16: note = synthetic [barcode part1]
  source 1..16: mol_type = other DNA
caggccgattagactt

SEQ ID NO: 32095 - DNA, 16 bp, synthetic construct
  misc_feature 1..16: note = synthetic [barcode part1]
  source 1..16: mol_type = other DNA
cgccttacagagtaac

SEQ ID NO: 32096 - DNA, 16 bp, synthetic construct
  misc_feature 1..16: note = synthetic [barcode part1]
  source 1..16: mol_type = other DNA
tctgttggccgttctt

SEQ ID NO: 32097 - DNA, 16 bp, synthetic construct
  misc_feature 1..16: note = synthetic [barcode part1]
  source 1..16: mol_type = other DNA
tggcgtagtgtgactt

SEQ ID NO: 32098 - DNA, 16 bp, synthetic construct
  misc_feature 1..16: note = synthetic [barcode part1]
  source 1..16: mol_type = other DNA
gcgcggtcaatatact

SEQ ID NO: 32099 - DNA, 16 bp, synthetic construct
  misc_feature 1..16: note = synthetic [barcode part1]
  source 1..16: mol_type = other DNA
tcacacaggccttctg

SEQ ID NO: 32100 - DNA, 16 bp, synthetic construct
  misc_feature 1..16: note = synthetic [barcode part1]
  source 1..16: mol_type = other DNA
cgtgaattaccacttc

SEQ ID NO: 32101 - DNA, 16 bp, synthetic construct
  misc_feature 1..16: note = synthetic [barcode part1]
  source 1..16: mol_type = other DNA
caccaagttacacctt

SEQ ID NO: 32102 - DNA, 16 bp, synthetic construct
  misc_feature 1..16: note = synthetic [barcode part1]
  source 1..16: mol_type = other DNA
cgaggtaggtacactg

SEQ ID NO: 32103 - DNA, 16 bp, synthetic construct
  misc_feature 1..16: note = synthetic [barcode part1]
  source 1..16: mol_type = other DNA
cggttagttagtcggt

SEQ ID NO: 32104 - DNA, 16 bp, synthetic construct
  misc_feature 1..16: note = synthetic [barcode part1]
  source 1..16: mol_type = other DNA
gagtataaccaggccg

SEQ ID NO: 32105 - DNA, 16 bp, synthetic construct
  misc_feature 1..16: note = synthetic [barcode part1]
  source 1..16: mol_type = other DNA
aatacaccgcgtgact

SEQ ID NO: 32106 - DNA, 16 bp, synthetic construct
  misc_feature 1..16: note = synthetic [barcode part1]
  source 1..16: mol_type = other DNA
cacttactaggatcct

SEQ ID NO: 32107 - DNA, 16 bp, synthetic construct
  misc_feature 1..16: note = synthetic [barcode part1]
  source 1..16: mol_type = other DNA
cgagacctaacactac

SEQ ID NO: 32108 - DNA, 16 bp, synthetic construct
  misc_feature 1..16: note = synthetic [barcode part1]
  source 1..16: mol_type = other DNA
acgcgacaatctctcc

SEQ ID NO: 32109 - DNA, 16 bp, synthetic construct
  misc_feature 1..16: note = synthetic [barcode part1]
  source 1..16: mol_type = other DNA
aacgtgtacactgacc

SEQ ID NO: 32110 - DNA, 16 bp, synthetic construct
  misc_feature 1..16: note = synthetic [barcode part1]
  source 1..16: mol_type = other DNA
cactgagatcttcgtt

SEQ ID NO: 32111 - DNA, 16 bp, synthetic construct
  misc_feature 1..16: note = synthetic [barcode part1]
  source 1..16: mol_type = other DNA
tctgtagattctaccg

SEQ ID NO: 32112 - DNA, 16 bp, synthetic construct
  misc_feature 1..16: note = synthetic [barcode part1]
  source 1..16: mol_type = other DNA
tcagagtgtccgtctc

SEQ ID NO: 32113 - DNA, 16 bp, synthetic construct
  misc_feature 1..16: note = synthetic [barcode part1]
  source 1..16: mol_type = other DNA
agaagtattgccgaac

SEQ ID NO: 32114 - DNA, 16 bp, synthetic construct
  misc_feature 1..16: note = synthetic [barcode part1]
  source 1..16: mol_type = other DNA
aaggtatcggtgattg

SEQ ID NO: 32115 - DNA, 16 bp, synthetic construct
  misc_feature 1..16: note = synthetic [barcode part1]
  source 1..16: mol_type = other DNA
tatagtacaggtggac

SEQ ID NO: 32116 - DNA, 16 bp, synthetic construct
  misc_feature 1..16: note = synthetic [barcode part1]
  source 1..16: mol_type = other DNA
tcactcgttgtgacgc

SEQ ID NO: 32117 - DNA, 16 bp, synthetic construct
  misc_feature 1..16: note = synthetic [barcode part1]
  source 1..16: mol_type = other DNA
tcgaacggtaggttct

SEQ ID NO: 32118 - DNA, 16 bp, synthetic construct
  misc_feature 1..16: note = synthetic [barcode part1]
  source 1..16: mol_type = other DNA
cacagttctaacgcag

SEQ ID NO: 32119 - DNA, 16 bp, synthetic construct
  misc_feature 1..16: note = synthetic [barcode part1]
  source 1..16: mol_type = other DNA
agtatattgaccgcgc

SEQ ID NO: 32120 - DNA, 16 bp, synthetic construct
  misc_feature 1..16: note = synthetic [barcode part1]
  source 1..16: mol_type = other DNA
taccttaccacaggcc

SEQ ID NO: 32121 - DNA, 16 bp, synthetic construct
  misc_feature 1..16: note = synthetic [barcode part1]
  source 1..16: mol_type = other DNA
actctgagatcaaccg

SEQ ID NO: 32122 - DNA, 16 bp, synthetic construct
  misc_feature 1..16: note = synthetic [barcode part1]
  source 1..16: mol_type = other DNA
tactgcacagtgtcag

SEQ ID NO: 32123 - DNA, 16 bp, synthetic construct
  misc_feature 1..16: note = synthetic [barcode part1]
  source 1..16: mol_type = other DNA
gtatagaggtgtggag

SEQ ID NO: 32124 - DNA, 16 bp, synthetic construct
  misc_feature 1..16: note = synthetic [barcode part1]
  source 1..16: mol_type = other DNA
cacgttactcttcaag

SEQ ID NO: 32125 - DNA, 16 bp, synthetic construct
  misc_feature 1..16: note = synthetic [barcode part1]
  source 1..16: mol_type = other DNA
gtacgttgtaatcgcg

SEQ ID NO: 32126 - DNA, 16 bp, synthetic construct
  misc_feature 1..16: note = synthetic [barcode part1]
  source 1..16: mol_type = other DNA
gataagtcgttgtgag

SEQ ID NO: 32127 - DNA, 16 bp, synthetic construct
  misc_feature 1..16: note = synthetic [barcode part1]
  source 1..16: mol_type = other DNA
cgaggtatccgtgaag

SEQ ID NO: 32128 - DNA, 16 bp, synthetic construct
  misc_feature 1..16: note = synthetic [barcode part1]
  source 1..16: mol_type = other DNA
gcggttacgtgtaact

SEQ ID NO: 32129 - DNA, 16 bp, synthetic construct
  misc_feature 1..16: note = synthetic [barcode part1]
  source 1..16: mol_type = other DNA
ttgacaggccttcgtc

SEQ ID NO: 32130 - DNA, 16 bp, synthetic construct
  misc_feature 1..16: note = synthetic [barcode part1]
  source 1..16: mol_type = other DNA
gtccacgtaacctctg

SEQ ID NO: 32131 - DNA, 16 bp, synthetic construct
  misc_feature 1..16: note = synthetic [barcode part1]
  source 1..16: mol_type = other DNA
cacacttagtggtctt

SEQ ID NO: 32132 - DNA, 16 bp, synthetic construct
  misc_feature 1..16: note = synthetic [barcode part1]
  source 1..16: mol_type = other DNA
ttcggttacaccaact

SEQ ID NO: 32133 - DNA, 16 bp, synthetic construct
  misc_feature 1..16: note = synthetic [barcode part1]
  source 1..16: mol_type = other DNA
tagttcttacggccgc

SEQ ID NO: 32134 - DNA, 16 bp, synthetic construct
  misc_feature 1..16: note = synthetic [barcode part1]
  source 1..16: mol_type = other DNA
tgtataaccacgcgac

SEQ ID NO: 32135 - DNA, 16 bp, synthetic construct
  misc_feature 1..16: note = synthetic [barcode part1]
  source 1..16: mol_type = other DNA
gaatccacacttcgcc

SEQ ID NO: 32136 - DNA, 16 bp, synthetic construct
  misc_feature 1..16: note = synthetic [barcode part1]
  source 1..16: mol_type = other DNA
ataacgacgaacctag

SEQ ID NO: 32137 - DNA, 16 bp, synthetic construct
  misc_feature 1..16: note = synthetic [barcode part1]
  source 1..16: mol_type = other DNA
agtactcgcaggacag

SEQ ID NO: 32138 - DNA, 16 bp, synthetic construct
  misc_feature 1..16: note = synthetic [barcode part1]
  source 1..16: mol_type = other DNA
gacttgacgacaactc

SEQ ID NO: 32139 - DNA, 16 bp, synthetic construct
  misc_feature 1..16: note = synthetic [barcode part1]
  source 1..16: mol_type = other DNA
attgaccgattccgag

SEQ ID NO: 32140 - DNA, 16 bp, synthetic construct
  misc_feature 1..16: note = synthetic [barcode part1]
  source 1..16: mol_type = other DNA
aactcaacggtgacct

SEQ ID NO: 32141 - DNA, 16 bp, synthetic construct
  misc_feature 1..16: note = synthetic [barcode part1]
  source 1..16: mol_type = other DNA
tgaaggatccttcggt

SEQ ID NO: 32142 - DNA, 16 bp, synthetic construct
  misc_feature 1..16: note = synthetic [barcode part1]
  source 1..16: mol_type = other DNA
aatagagtcggacgcc

SEQ ID NO: 32143 - DNA, 16 bp, synthetic construct
  misc_feature 1..16: note = synthetic [barcode part1]
  source 1..16: mol_type = other DNA
gtagtcggttacacgt

SEQ ID NO: 32144 - DNA, 16 bp, synthetic construct
  misc_feature 1..16: note = synthetic [barcode part1]
  source 1..16: mol_type = other DNA
cgcagacagtggaatc

SEQ ID NO: 32145 - DNA, 16 bp, synthetic construct
  misc_feature 1..16: note = synthetic [barcode part1]
  source 1..16: mol_type = other DNA
aagattgcgtgaatcg

SEQ ID NO: 32146 - DNA, 16 bp, synthetic construct
  misc_feature 1..16: note = synthetic [barcode part1]
  source 1..16: mol_type = other DNA
tatctctctggtagtg

SEQ ID NO: 32147 - DNA, 16 bp, synthetic construct
  misc_feature 1..16: note = synthetic [barcode part1]
  source 1..16: mol_type = other DNA
cgaatatctcctggtt

SEQ ID NO: 32148 - DNA, 16 bp, synthetic construct
  misc_feature 1..16: note = synthetic [barcode part1]
  source 1..16: mol_type = other DNA
acggacaatctacctg

SEQ ID NO: 32149 - DNA, 16 bp, synthetic construct
  misc_feature 1..16: note = synthetic [barcode part1]
  source 1..16: mol_type = other DNA
gaggaactactaacac

SEQ ID NO: 32150 - DNA, 16 bp, synthetic construct
  misc_feature 1..16: note = synthetic [barcode part1]
  source 1..16: mol_type = other DNA
gttaacgaacgtgtcc

SEQ ID NO: 32151 - DNA, 16 bp, synthetic construct
  misc_feature 1..16: note = synthetic [barcode part1]
  source 1..16: mol_type = other DNA
gagtccagtctgaact

SEQ ID NO: 32152 - DNA, 16 bp, synthetic construct
  misc_feature 1..16: note = synthetic [barcode part1]
  source 1..16: mol_type = other DNA
ccttcgattctggttc

SEQ ID NO: 32153 - DNA, 16 bp, synthetic construct
  misc_feature 1..16: note = synthetic [barcode part1]
  source 1..16: mol_type = other DNA
accaggagtcgtacag

SEQ ID NO: 32154 - DNA, 16 bp, synthetic construct
  misc_feature 1..16: note = synthetic [barcode part1]
  source 1..16: mol_type = other DNA
attcttggttcagtgc

SEQ ID NO: 32155 - DNA, 16 bp, synthetic construct
  misc_feature 1..16: note = synthetic [barcode part1]
  source 1..16: mol_type = other DNA
gatcactcttgcgtcg

SEQ ID NO: 32156 - DNA, 16 bp, synthetic construct
  misc_feature 1..16: note = synthetic [barcode part1]
  source 1..16: mol_type = other DNA
gtgaacgatctacctg

SEQ ID NO: 32157 - DNA, 16 bp, synthetic construct
  misc_feature 1..16: note = synthetic [barcode part1]
  source 1..16: mol_type = other DNA
tataacgccgttcgtt

SEQ ID NO: 32158 - DNA, 16 bp, synthetic construct
  misc_feature 1..16: note = synthetic [barcode part1]
  source 1..16: mol_type = other DNA
ttacctacgagattcc

SEQ ID NO: 32159 - DNA, 16 bp, synthetic construct
  misc_feature 1..16: note = synthetic [barcode part1]
  source 1..16: mol_type = other DNA
tgtactgacaccaacg

SEQ ID NO: 32160 - DNA, 16 bp, synthetic construct
  misc_feature 1..16: note = synthetic [barcode part1]
  source 1..16: mol_type = other DNA
tctggttgttgacgtt

SEQ ID NO: 32161 - DNA, 16 bp, synthetic construct
  misc_feature 1..16: note = synthetic [barcode part1]
  source 1..16: mol_type = other DNA
ccgcgttatagagact

SEQ ID NO: 32162 - DNA, 16 bp, synthetic construct
  misc_feature 1..16: note = synthetic [barcode part1]
  source 1..16: mol_type = other DNA
tgtgtaggacaacaac

SEQ ID NO: 32163 - DNA, 16 bp, synthetic construct
  misc_feature 1..16: note = synthetic [barcode part1]
  source 1..16: mol_type = other DNA
ttaccacgcggacctt

SEQ ID NO: 32164 - DNA, 16 bp, synthetic construct
  misc_feature 1..16: note = synthetic [barcode part1]
  source 1..16: mol_type = other DNA
aattctcgccactctc

SEQ ID NO: 32165 - DNA, 16 bp, synthetic construct
  misc_feature 1..16: note = synthetic [barcode part1]
  source 1..16: mol_type = other DNA
gattcttcctccgatc

SEQ ID NO: 32166 - DNA, 16 bp, synthetic construct
  misc_feature 1..16: note = synthetic [barcode part1]
  source 1..16: mol_type = other DNA
aaggtctgttcacttc

SEQ ID NO: 32167 - DNA, 16 bp, synthetic construct
  misc_feature 1..16: note = synthetic [barcode part1]
  source 1..16: mol_type = other DNA
aagtctgaagtgcctc

SEQ ID NO: 32168 - DNA, 16 bp, synthetic construct
  misc_feature 1..16: note = synthetic [barcode part1]
  source 1..16: mol_type = other DNA
taagagtgtgactcag

SEQ ID NO: 32169 - DNA, 16 bp, synthetic construct
  misc_feature 1..16: note = synthetic [barcode part1]
  source 1..16: mol_type = other DNA
agtctggcaatctggt

SEQ ID NO: 32170 - DNA, 16 bp, synthetic construct
  misc_feature 1..16: note = synthetic [barcode part1]
  source 1..16: mol_type = other DNA
ccagtctagatattcc

SEQ ID NO: 32171 - DNA, 16 bp, synthetic construct
  misc_feature 1..16: note = synthetic [barcode part1]
  source 1..16: mol_type = other DNA
tccgttccttggagtg

SEQ ID NO: 32172 - DNA, 16 bp, synthetic construct
  misc_feature 1..16: note = synthetic [barcode part1]
  source 1..16: mol_type = other DNA
aggtaggtctatctgc

SEQ ID NO: 32173 - DNA, 16 bp, synthetic construct
  misc_feature 1..16: note = synthetic [barcode part1]
  source 1..16: mol_type = other DNA
atcggttaagacctcg

SEQ ID NO: 32174 - DNA, 16 bp, synthetic construct
  misc_feature 1..16: note = synthetic [barcode part1]
  source 1..16: mol_type = other DNA
gttggtggtggttgtt

SEQ ID NO: 32175 - DNA, 16 bp, synthetic construct
  misc_feature 1..16: note = synthetic [barcode part1]
  source 1..16: mol_type = other DNA
tcctcgtcttgtactg

SEQ ID NO: 32176 - DNA, 16 bp, synthetic construct
  misc_feature 1..16: note = synthetic [barcode part1]
  source 1..16: mol_type = other DNA
caactccacgtactgc

SEQ ID NO: 32177 - DNA, 16 bp, synthetic construct
  misc_feature 1..16: note = synthetic [barcode part1]
  source 1..16: mol_type = other DNA
agatcaatacacgacg

SEQ ID NO: 32178 - DNA, 16 bp, synthetic construct
  misc_feature 1..16: note = synthetic [barcode part1]
  source 1..16: mol_type = other DNA
gcactagtcagtacgt

SEQ ID NO: 32179 - DNA, 16 bp, synthetic construct
  misc_feature 1..16: note = synthetic [barcode part1]
  source 1..16: mol_type = other DNA
ccgacgttcttaaccg

SEQ ID NO: 32180 - DNA, 16 bp, synthetic construct
  misc_feature 1..16: note = synthetic [barcode part1]
  source 1..16: mol_type = other DNA
cagtgacactggactt

SEQ ID NO: 32181 - DNA, 16 bp, synthetic construct
  misc_feature 1..16: note = synthetic [barcode part1]
  source 1..16: mol_type = other DNA
cacaccgaaggtcaag

SEQ ID NO: 32182 - DNA, 16 bp, synthetic construct
  misc_feature 1..16: note = synthetic [barcode part1]
  source 1..16: mol_type = other DNA
ccgttgcacctgtagt

SEQ ID NO: 32183 - DNA, 16 bp, synthetic construct
  misc_feature 1..16: note = synthetic [barcode part1]
  source 1..16: mol_type = other DNA
atactggtgataggac

SEQ ID NO: 32184 - DNA, 16 bp, synthetic construct
  misc_feature 1..16: note = synthetic [barcode part1]
  source 1..16: mol_type = other DNA
tgcaacgacttcaggt

SEQ ID NO: 32185 - DNA, 16 bp, synthetic construct
  misc_feature 1..16: note = synthetic [barcode part1]
  source 1..16: mol_type = other DNA
aggtacggacttggtg

SEQ ID NO: 32186 - DNA, 16 bp, synthetic construct
  misc_feature 1..16: note = synthetic [barcode part1]
  source 1..16: mol_type = other DNA
atataaccgtgtggcc

SEQ ID NO: 32187 - DNA, 16 bp, synthetic construct
  misc_feature 1..16: note = synthetic [barcode part1]
  source 1..16: mol_type = other DNA
tgcgcagagtatactc

SEQ ID NO: 32188 - DNA, 16 bp, synthetic construct
  misc_feature 1..16: note = synthetic [barcode part1]
  source 1..16: mol_type = other DNA
aagtgaacgaggcctc

SEQ ID NO: 32189 - DNA, 16 bp, synthetic construct
  misc_feature 1..16: note = synthetic [barcode part1]
  source 1..16: mol_type = other DNA
acttcgcgaacgtctc

SEQ ID NO: 32190 - DNA, 16 bp, synthetic construct
  misc_feature 1..16: note = synthetic [barcode part1]
  source 1..16: mol_type = other DNA
acgtaggatctctgtg

SEQ ID NO: 32191 - DNA, 16 bp, synthetic construct
  misc_feature 1..16: note = synthetic [barcode part1]
  source 1..16: mol_type = other DNA
tatcgcaaggaaggag

SEQ ID NO: 32192 - DNA, 16 bp, synthetic construct
  misc_feature 1..16: note = synthetic [barcode part1]
  source 1..16: mol_type = other DNA
cctcggtactactctt

SEQ ID NO: 32193 - DNA, 16 bp, synthetic construct
  misc_feature 1..16: note = synthetic [barcode part1]
  source 1..16: mol_type = other DNA
ataccagatcaaggac

SEQ ID NO: 32194 - DNA, 16 bp, synthetic construct
  misc_feature 1..16: note = synthetic [barcode part1]
  source 1..16: mol_type = other DNA
gatctcttctccgact

SEQ ID NO: 32195 - DNA, 16 bp, synthetic construct
  misc_feature 1..16: note = synthetic [barcode part1]
  source 1..16: mol_type = other DNA
acgcgattgtgcaact

SEQ ID NO: 32196 - DNA, 16 bp, synthetic construct
  misc_feature 1..16: note = synthetic [barcode part1]
  source 1..16: mol_type = other DNA
agtcacactgattctc

SEQ ID NO: 32197 - DNA, 16 bp, synthetic construct
  misc_feature 1..16: note = synthetic [barcode part1]
  source 1..16: mol_type = other DNA
cgatcgaatcggttgt

SEQ ID NO: 32198 - DNA, 16 bp, synthetic construct
  misc_feature 1..16: note = synthetic [barcode part1]
  source 1..16: mol_type = other DNA
cgcctagattacctcg

SEQ ID NO: 32199 - DNA, 16 bp, synthetic construct
  misc_feature 1..16: note = synthetic [barcode part1]
  source 1..16: mol_type = other DNA
gtacactaggccagag

SEQ ID NO: 32200 - DNA, 16 bp, synthetic construct
  misc_feature 1..16: note = synthetic [barcode part1]
  source 1..16: mol_type = other DNA
gtacctcgactaccac

SEQ ID NO: 32201 - DNA, 16 bp, synthetic construct
  misc_feature 1..16: note = synthetic [barcode part1]
  source 1..16: mol_type = other DNA
ttctcttgatcggcct

SEQ ID NO: 32202 - DNA, 16 bp, synthetic construct
  misc_feature 1..16: note = synthetic [barcode part1]
  source 1..16: mol_type = other DNA
tacgttgacacaccag

SEQ ID NO: 32203 - DNA, 16 bp, synthetic construct
  misc_feature 1..16: note = synthetic [barcode part1]
  source 1..16: mol_type = other DNA
agactgttcgtcgaac

SEQ ID NO: 32204 - DNA, 16 bp, synthetic construct
  misc_feature 1..16: note = synthetic [barcode part1]
  source 1..16: mol_type = other DNA
ttataccgtctggtac

SEQ ID NO: 32205 - DNA, 16 bp, synthetic construct
  misc_feature 1..16: note = synthetic [barcode part1]
  source 1..16: mol_type = other DNA
tgtcgcgtatagtgtg

SEQ ID NO: 32206 - DNA, 16 bp, synthetic construct
  misc_feature 1..16: note = synthetic [barcode part1]
  source 1..16: mol_type = other DNA
gatactcgtaaccacg

SEQ ID NO: 32207 - DNA, 16 bp, synthetic construct
  misc_feature 1..16: note = synthetic [barcode part1]
  source 1..16: mol_type = other DNA
ttactctgattgtgcg

SEQ ID NO: 32208 - DNA, 16 bp, synthetic construct
  misc_feature 1..16: note = synthetic [barcode part1]
  source 1..16: mol_type = other DNA
gtaagtcgactgtacc

SEQ ID NO: 32209 - DNA, 16 bp, synthetic construct
  misc_feature 1..16: note = synthetic [barcode part1]
  source 1..16: mol_type = other DNA
gtacacttattctgcg

SEQ ID NO: 32210 - DNA, 16 bp, synthetic construct
  misc_feature 1..16: note = synthetic [barcode part1]
  source 1..16: mol_type = other DNA
tcttcctcttcggaac

SEQ ID NO: 32211 - DNA, 16 bp, synthetic construct
  misc_feature 1..16: note = synthetic [barcode part1]
  source 1..16: mol_type = other DNA
gtgtatcctgccactg

SEQ ID NO: 32212 - DNA, 16 bp, synthetic construct
  misc_feature 1..16: note = synthetic [barcode part1]
  source 1..16: mol_type = other DNA
ttcgtagtgccacctg

SEQ ID NO: 32213 - DNA, 16 bp, synthetic construct
  misc_feature 1..16: note = synthetic [barcode part1]
  source 1..16: mol_type = other DNA
tgagactcgatcgatc

SEQ ID NO: 32214 - DNA, 16 bp, synthetic construct
  misc_feature 1..16: note = synthetic [barcode part1]
  source 1..16: mol_type = other DNA
cacttagtcctcggtg

SEQ ID NO: 32215 - DNA, 16 bp, synthetic construct
  misc_feature 1..16: note = synthetic [barcode part1]
  source 1..16: mol_type = other DNA
acttacctccagagtt

SEQ ID NO: 32216 - DNA, 16 bp, synthetic construct
  misc_feature 1..16: note = synthetic [barcode part1]
  source 1..16: mol_type = other DNA
gtcgttcacggatctc

SEQ ID NO: 32217 - DNA, 16 bp, synthetic construct
  misc_feature 1..16: note = synthetic [barcode part1]
  source 1..16: mol_type = other DNA
acacggcaagatcgac

SEQ ID NO: 32218 - DNA, 16 bp, synthetic construct
  misc_feature 1..16: note = synthetic [barcode part1]
  source 1..16: mol_type = other DNA
tctgagaccagaactc

SEQ ID NO: 32219 - DNA, 16 bp, synthetic construct
  misc_feature 1..16: note = synthetic [barcode part1]
  source 1..16: mol_type = other DNA
aacggactctgaggtg

SEQ ID NO: 32220 - DNA, 16 bp, synthetic construct
  misc_feature 1..16: note = synthetic [barcode part1]
  source 1..16: mol_type = other DNA
tggagttgtattgcgc

SEQ ID NO: 32221 - DNA, 16 bp, synthetic construct
  misc_feature 1..16: note = synthetic [barcode part1]
  source 1..16: mol_type = other DNA
acgcaccttgttattg

SEQ ID NO: 32222 - DNA, 16 bp, synthetic construct
  misc_feature 1..16: note = synthetic [barcode part1]
  source 1..16: mol_type = other DNA
actcgaatatcactcc

SEQ ID NO: 32223 - DNA, 16 bp, synthetic construct
  misc_feature 1..16: note = synthetic [barcode part1]
  source 1..16: mol_type = other DNA
tcgccactgagtacct

SEQ ID NO: 32224 - DNA, 16 bp, synthetic construct
  misc_feature 1..16: note = synthetic [barcode part1]
  source 1..16: mol_type = other DNA
caatctccgcaaccgt

SEQ ID NO: 32225 - DNA, 16 bp, synthetic construct
  misc_feature 1..16: note = synthetic [barcode part1]
  source 1..16: mol_type = other DNA
gtaatcaggtccttct

SEQ ID NO: 32226 - DNA, 16 bp, synthetic construct
  misc_feature 1..16: note = synthetic [barcode part1]
  source 1..16: mol_type = other DNA
tattgtcaagtgcctc

SEQ ID NO: 32227 - DNA, 16 bp, synthetic construct
  misc_feature 1..16: note = synthetic [barcode part1]
  source 1..16: mol_type = other DNA
ataggtcttgacacgc

SEQ ID NO: 32228 - DNA, 16 bp, synthetic construct
  misc_feature 1..16: note = synthetic [barcode part1]
  source 1..16: mol_type = other DNA
cactaactcctgaccg

SEQ ID NO: 32229 - DNA, 16 bp, synthetic construct
  misc_feature 1..16: note = synthetic [barcode part1]
  source 1..16: mol_type = other DNA
gtaacgttggtatcgc

SEQ ID NO: 32230 - DNA, 16 bp, synthetic construct
  misc_feature 1..16: note = synthetic [barcode part1]
  source 1..16: mol_type = other DNA
gttgccttacttagac

SEQ ID NO: 32231 - DNA, 16 bp, synthetic construct
  misc_feature 1..16: note = synthetic [barcode part1]
  source 1..16: mol_type = other DNA
actaacggtgagatac

SEQ ID NO: 32232 - DNA, 16 bp, synthetic construct
  misc_feature 1..16: note = synthetic [barcode part1]
  source 1..16: mol_type = other DNA
atcggtacctgtgaac

SEQ ID NO: 32233 - DNA, 16 bp, synthetic construct
  misc_feature 1..16: note = synthetic [barcode part1]
  source 1..16: mol_type = other DNA
gtcgtgaccgttcact

SEQ ID NO: 32234 - DNA, 16 bp, synthetic construct
  misc_feature 1..16: note = synthetic [barcode part1]
  source 1..16: mol_type = other DNA
aaccagtgactggttc

SEQ ID NO: 32235 - DNA, 16 bp, synthetic construct
  misc_feature 1..16: note = synthetic [barcode part1]
  source 1..16: mol_type = other DNA
tggtgacggttactgt

SEQ ID NO: 32236 - DNA, 16 bp, synthetic construct
  misc_feature 1..16: note = synthetic [barcode part1]
  source 1..16: mol_type = other DNA
attggaatagtgcgtg

SEQ ID NO: 32237 - DNA, 16 bp, synthetic construct
  misc_feature 1..16: note = synthetic [barcode part1]
  source 1..16: mol_type = other DNA
acaatccgttcttacg

SEQ ID NO: 32238 - DNA, 16 bp, synthetic construct
  misc_feature 1..16: note = synthetic [barcode part1]
  source 1..16: mol_type = other DNA
tgtcgttgtggttact

SEQ ID NO: 32239 - DNA, 16 bp, synthetic construct
  misc_feature 1..16: note = synthetic [barcode part1]
  source 1..16: mol_type = other DNA
gccttgcaacacacct

SEQ ID NO: 32240 - DNA, 16 bp, synthetic construct
  misc_feature 1..16: note = synthetic [barcode part1]
  source 1..16: mol_type = other DNA
cctcagttcgagtacc

SEQ ID NO: 32241 - DNA, 16 bp, synthetic construct
  misc_feature 1..16: note = synthetic [barcode part1]
  source 1..16: mol_type = other DNA
ccgatagatccagtgt

SEQ ID NO: 32242 - DNA, 16 bp, synthetic construct
  misc_feature 1..16: note = synthetic [barcode part1]
  source 1..16: mol_type = other DNA
aggcctcttaagatcg

SEQ ID NO: 32243 - DNA, 16 bp, synthetic construct
  misc_feature 1..16: note = synthetic [barcode part1]
  source 1..16: mol_type = other DNA
gtctgatcggtctaag

SEQ ID NO: 32244 - DNA, 16 bp, synthetic construct
  misc_feature 1..16: note = synthetic [barcode part1]
  source 1..16: mol_type = other DNA
agtgaggtcgagtgtc

SEQ ID NO: 32245 - DNA, 16 bp, synthetic construct
  misc_feature 1..16: note = synthetic [barcode part1]
  source 1..16: mol_type = other DNA
cgataacaaggtacac

SEQ ID NO: 32246 - DNA, 16 bp, synthetic construct
  misc_feature 1..16: note = synthetic [barcode part1]
  source 1..16: mol_type = other DNA
caagtgttcttgttgc

SEQ ID NO: 32247 - DNA, 16 bp, synthetic construct
  misc_feature 1..16: note = synthetic [barcode part1]
  source 1..16: mol_type = other DNA
gaacggttaacgagag

SEQ ID NO: 32248 - DNA, 16 bp, synthetic construct
  misc_feature 1..16: note = synthetic [barcode part1]
  source 1..16: mol_type = other DNA
caagtacttaacgcgc

SEQ ID NO: 32249 - DNA, 16 bp, synthetic construct
  misc_feature 1..16: note = synthetic [barcode part1]
  source 1..16: mol_type = other DNA
cactctctgtaggaag

SEQ ID NO: 32250 - DNA, 16 bp, synthetic construct
  misc_feature 1..16: note = synthetic [barcode part1]
  source 1..16: mol_type = other DNA
tacttctgttgaaccg

SEQ ID NO: 32251 - DNA, 16 bp, synthetic construct
  misc_feature 1..16: note = synthetic [barcode part1]
  source 1..16: mol_type = other DNA
cagagttctggaactc

SEQ ID NO: 32252 - DNA, 16 bp, synthetic construct
  misc_feature 1..16: note = synthetic [barcode part1]
  source 1..16: mol_type = other DNA
cgaattaggaggtact

SEQ ID NO: 32253 - DNA, 16 bp, synthetic construct
  misc_feature 1..16: note = synthetic [barcode part1]
  source 1..16: mol_type = other DNA
gcgaagtgtaacgaag

SEQ ID NO: 32254 - DNA, 16 bp, synthetic construct
  misc_feature 1..16: note = synthetic [barcode part1]
  source 1..16: mol_type = other DNA
attggacctcacgtcc

SEQ ID NO: 32255 - DNA, 16 bp, synthetic construct
  misc_feature 1..16: note = synthetic [barcode part1]
  source 1..16: mol_type = other DNA
tagttggagtcctgac

SEQ ID NO: 32256 - DNA, 16 bp, synthetic construct
  misc_feature 1..16: note = synthetic [barcode part1]
  source 1..16: mol_type = other DNA
gccacttctatctcac

SEQ ID NO: 32257 - DNA, 16 bp, synthetic construct
  misc_feature 1..16: note = synthetic [barcode part1]
  source 1..16: mol_type = other DNA
acgtatcgtaggatag

SEQ ID NO: 32258 - DNA, 16 bp, synthetic construct
  misc_feature 1..16: note = synthetic [barcode part1]
  source 1..16: mol_type = other DNA
gcacgattcttaacct

SEQ ID NO: 32259 - DNA, 16 bp, synthetic construct
  misc_feature 1..16: note = synthetic [barcode part1]
  source 1..16: mol_type = other DNA
ccggttgattacaacg

SEQ ID NO: 32260 - DNA, 16 bp, synthetic construct
  misc_feature 1..16: note = synthetic [barcode part1]
  source 1..16: mol_type = other DNA
cagttctagtcctcct

SEQ ID NO: 32261 - DNA, 16 bp, synthetic construct
  misc_feature 1..16: note = synthetic [barcode part1]
  source 1..16: mol_type = other DNA
aacttgcgttctactg

SEQ ID NO: 32262 - DNA, 16 bp, synthetic construct
  misc_feature 1..16: note = synthetic [barcode part1]
  source 1..16: mol_type = other DNA
aacacaacgttgaacg

SEQ ID NO: 32263 - DNA, 16 bp, synthetic construct
  misc_feature 1..16: note = synthetic [barcode part1]
  source 1..16: mol_type = other DNA
gtacggatagattacg

SEQ ID NO: 32264 - DNA, 16 bp, synthetic construct
  misc_feature 1..16: note = synthetic [barcode part1]
  source 1..16: mol_type = other DNA
gttattacgtacctcg

SEQ ID NO: 32265 - DNA, 16 bp, synthetic construct
  misc_feature 1..16: note = synthetic [barcode part1]
  source 1..16: mol_type = other DNA
cgcctacgtaatactt

SEQ ID NO: 32266 - DNA, 16 bp, synthetic construct
  misc_feature 1..16: note = synthetic [barcode part1]
  source 1..16: mol_type = other DNA
acacgtgccttcttct

SEQ ID NO: 32267 - DNA, 16 bp, synthetic construct
  misc_feature 1..16: note = synthetic [barcode part1]
  source 1..16: mol_type = other DNA
gccactcctacgagtt

SEQ ID NO: 32268 - DNA, 16 bp, synthetic construct
  misc_feature 1..16: note = synthetic [barcode part1]
  source 1..16: mol_type = other DNA
ttacttctctccgacg

SEQ ID NO: 32269 - DNA, 16 bp, synthetic construct
  misc_feature 1..16: note = synthetic [barcode part1]
  source 1..16: mol_type = other DNA
attgcgtgcgtaatcg

SEQ ID NO: 32270 - DNA, 16 bp, synthetic construct
  misc_feature 1..16: note = synthetic [barcode part1]
  source 1..16: mol_type = other DNA
gcaagtggtagacaag

SEQ ID NO: 32271 - DNA, 16 bp, synthetic construct
  misc_feature 1..16: note = synthetic [barcode part1]
  source 1..16: mol_type = other DNA
gacgtgttcgattctt

SEQ ID NO: 32272 - DNA, 16 bp, synthetic construct
  misc_feature 1..16: note = synthetic [barcode part1]
  source 1..16: mol_type = other DNA
cacttatcgccacgac

SEQ ID NO: 32273 - DNA, 16 bp, synthetic construct
  misc_feature 1..16: note = synthetic [barcode part1]
  source 1..16: mol_type = other DNA
ttcgattgcactagtc

SEQ ID NO: 32274 - DNA, 16 bp, synthetic construct
  misc_feature 1..16: note = synthetic [barcode part1]
  source 1..16: mol_type = other DNA
ttccggcgatcgtact

SEQ ID NO: 32275 - DNA, 16 bp, synthetic construct
  misc_feature 1..16: note = synthetic [barcode part1]
  source 1..16: mol_type = other DNA
tctctgacctcaacct

SEQ ID NO: 32276 - DNA, 16 bp, synthetic construct
  misc_feature 1..16: note = synthetic [barcode part1]
  source 1..16: mol_type = other DNA
attcgacaatcgccag

SEQ ID NO: 32277 - DNA, 16 bp, synthetic construct
  misc_feature 1..16: note = synthetic [barcode part1]
  source 1..16: mol_type = other DNA
tggttaagttggccgt

SEQ ID NO: 32278 - DNA, 16 bp, synthetic construct
  misc_feature 1..16: note = synthetic [barcode part1]
  source 1..16: mol_type = other DNA
tctataccttcacgcc

SEQ ID NO: 32279 - DNA, 16 bp, synthetic construct
  misc_feature 1..16: note = synthetic [barcode part1]
  source 1..16: mol_type = other DNA
atacaagaggtcgttg

SEQ ID NO: 32280 - DNA, 16 bp, synthetic construct
  misc_feature 1..16: note = synthetic [barcode part1]
  source 1..16: mol_type = other DNA
ttcgcacaactgttac

SEQ ID NO: 32281 - DNA, 16 bp, synthetic construct
  misc_feature 1..16: note = synthetic [barcode part1]
  source 1..16: mol_type = other DNA
gcgatattgtgtgcac

SEQ ID NO: 32282 - DNA, 16 bp, synthetic construct
  misc_feature 1..16: note = synthetic [barcode part1]
  source 1..16: mol_type = other DNA
gactctcgtatctggc

SEQ ID NO: 32283 - DNA, 16 bp, synthetic construct
  misc_feature 1..16: note = synthetic [barcode part1]
  source 1..16: mol_type = other DNA
gtcagacgtgaggact

SEQ ID NO: 32284 - DNA, 16 bp, synthetic construct
  misc_feature 1..16: note = synthetic [barcode part1]
  source 1..16: mol_type = other DNA
tacaacactgtccact

SEQ ID NO: 32285 - DNA, 16 bp, synthetic construct
  misc_feature 1..16: note = synthetic [barcode part1]
  source 1..16: mol_type = other DNA
cactaactgcgactag

SEQ ID NO: 32286 - DNA, 16 bp, synthetic construct
  misc_feature 1..16: note = synthetic [barcode part1]
  source 1..16: mol_type = other DNA
tacgtgatatcctacc

SEQ ID NO: 32287 - DNA, 16 bp, synthetic construct
  misc_feature 1..16: note = synthetic [barcode part1]
  source 1..16: mol_type = other DNA
gactaggacttaagtg

SEQ ID NO: 32288 - DNA, 16 bp, synthetic construct
  misc_feature 1..16: note = synthetic [barcode part1]
  source 1..16: mol_type = other DNA
tgatcactccaatctg

SEQ ID NO: 32289 - DNA, 16 bp, synthetic construct
  misc_feature 1..16: note = synthetic [barcode part1]
  source 1..16: mol_type = other DNA
aagtagagtctgcctc

SEQ ID NO: 32290 - DNA, 16 bp, synthetic construct
  misc_feature 1..16: note = synthetic [barcode part1]
  source 1..16: mol_type = other DNA
tgtgttgtgtgcaacg

SEQ ID NO: 32291 - DNA, 16 bp, synthetic construct
  misc_feature 1..16: note = synthetic [barcode part1]
  source 1..16: mol_type = other DNA
tctccgatagtcgcac

SEQ ID NO: 32292 - DNA, 16 bp, synthetic construct
  misc_feature 1..16: note = synthetic [barcode part1]
  source 1..16: mol_type = other DNA
ccgtaatacgtgtgtg

SEQ ID NO: 32293 - DNA, 16 bp, synthetic construct
  misc_feature 1..16: note = synthetic [barcode part1]
  source 1..16: mol_type = other DNA
agttctgtctgttcag

SEQ ID NO: 32294 - DNA, 16 bp, synthetic construct
  misc_feature 1..16: note = synthetic [barcode part1]
  source 1..16: mol_type = other DNA
caacgttctgtgacag

SEQ ID NO: 32295 - DNA, 16 bp, synthetic construct
  misc_feature 1..16: note = synthetic [barcode part1]
  source 1..16: mol_type = other DNA
agtggtctaacgacct

SEQ ID NO: 32296 - DNA, 16 bp, synthetic construct
  misc_feature 1..16: note = synthetic [barcode part1]
  source 1..16: mol_type = other DNA
acaacaccgatatcgc

SEQ ID NO: 32297 - DNA, 16 bp, synthetic construct
  misc_feature 1..16: note = synthetic [barcode part1]
  source 1..16: mol_type = other DNA
actgcgacgagattct

SEQ ID NO: 32298 - DNA, 16 bp, synthetic construct
  misc_feature 1..16: note = synthetic [barcode part1]
  source 1..16: mol_type = other DNA
accgagtcgaactgtt

SEQ ID NO: 32299 - DNA, 16 bp, synthetic construct
  misc_feature 1..16: note = synthetic [barcode part1]
  source 1..16: mol_type = other DNA
attgagaaccgcgcag

SEQ ID NO: 32300 - DNA, 16 bp, synthetic construct
  misc_feature 1..16: note = synthetic [barcode part1]
  source 1..16: mol_type = other DNA
ttacaggcactgacac

SEQ ID NO: 32301 - DNA, 16 bp, synthetic construct
  misc_feature 1..16: note = synthetic [barcode part1]
  source 1..16: mol_type = other DNA
ttacgtggagagaccg

SEQ ID NO: 32302 - DNA, 16 bp, synthetic construct
  misc_feature 1..16: note = synthetic [barcode part1]
  source 1..16: mol_type = other DNA
ttctgatagagaccgc

SEQ ID NO: 32303 - DNA, 16 bp, synthetic construct
  misc_feature 1..16: note = synthetic [barcode part1]
  source 1..16: mol_type = other DNA
ttggacgttatcctgt

SEQ ID NO: 32304 - DNA, 16 bp, synthetic construct
  misc_feature 1..16: note = synthetic [barcode part1]
  source 1..16: mol_type = other DNA
tgatagatccactgcg

SEQ ID NO: 32305 - DNA, 16 bp, synthetic construct
  misc_feature 1..16: note = synthetic [barcode part1]
  source 1..16: mol_type = other DNA
gtacagtcgatacacc

SEQ ID NO: 32306 - DNA, 16 bp, synthetic construct
  misc_feature 1..16: note = synthetic [barcode part1]
  source 1..16: mol_type = other DNA
gtgaggtagacctacg

SEQ ID NO: 32307 - DNA, 16 bp, synthetic construct
  misc_feature 1..16: note = synthetic [barcode part1]
  source 1..16: mol_type = other DNA
cagtgtatctcactac

SEQ ID NO: 32308 - DNA, 16 bp, synthetic construct
  misc_feature 1..16: note = synthetic [barcode part1]
  source 1..16: mol_type = other DNA
gtcaacaatccaggtc

SEQ ID NO: 32309 - DNA, 16 bp, synthetic construct
  misc_feature 1..16: note = synthetic [barcode part1]
  source 1..16: mol_type = other DNA
acagtgcaccgattgt

SEQ ID NO: 32310 - DNA, 16 bp, synthetic construct
  misc_feature 1..16: note = synthetic [barcode part1]
  source 1..16: mol_type = other DNA
tgtggtacttacttgc

SEQ ID NO: 32311 - DNA, 16 bp, synthetic construct
  misc_feature 1..16: note = synthetic [barcode part1]
  source 1..16: mol_type = other DNA
cacacgacaaggaatt

SEQ ID NO: 32312 - DNA, 16 bp, synthetic construct
  misc_feature 1..16: note = synthetic [barcode part1]
  source 1..16: mol_type = other DNA
ttccacactagtgact

SEQ ID NO: 32313 - DNA, 16 bp, synthetic construct
  misc_feature 1..16: note = synthetic [barcode part1]
  source 1..16: mol_type = other DNA
agacactacctacgac

SEQ ID NO: 32314 - DNA, 16 bp, synthetic construct
  misc_feature 1..16: note = synthetic [barcode part1]
  source 1..16: mol_type = other DNA
tgtagtgcagacaggc

SEQ ID NO: 32315 - DNA, 16 bp, synthetic construct
  misc_feature 1..16: note = synthetic [barcode part1]
  source 1..16: mol_type = other DNA
cacctaagaaggccag

SEQ ID NO: 32316 - DNA, 16 bp, synthetic construct
  misc_feature 1..16: note = synthetic [barcode part1]
  source 1..16: mol_type = other DNA
taactgaagtcggcct

SEQ ID NO: 32317 - DNA, 16 bp, synthetic construct
  misc_feature 1..16: note = synthetic [barcode part1]
  source 1..16: mol_type = other DNA
cggaattaccacaacc

SEQ ID NO: 32318 - DNA, 16 bp, synthetic construct
  misc_feature 1..16: note = synthetic [barcode part1]
  source 1..16: mol_type = other DNA
gacgagtagacaagtg

SEQ ID NO: 32319 - DNA, 16 bp, synthetic construct
  misc_feature 1..16: note = synthetic [barcode part1]
  source 1..16: mol_type = other DNA
tgtgtgactatcgttc

SEQ ID NO: 32320 - DNA, 16 bp, synthetic construct
  misc_feature 1..16: note = synthetic [barcode part1]
  source 1..16: mol_type = other DNA
aaggacgttatcgaac

SEQ ID NO: 32321 - DNA, 16 bp, synthetic construct
  misc_feature 1..16: note = synthetic [barcode part1]
  source 1..16: mol_type = other DNA
cggttaaggttggttc

SEQ ID NO: 32322 - DNA, 16 bp, synthetic construct
  misc_feature 1..16: note = synthetic [barcode part1]
  source 1..16: mol_type = other DNA
tagaaggtgtaaccgt

SEQ ID NO: 32323 - DNA, 16 bp, synthetic construct
  misc_feature 1..16: note = synthetic [barcode part1]
  source 1..16: mol_type = other DNA
cgtaagttctgttgtc

SEQ ID NO: 32324 - DNA, 16 bp, synthetic construct
  misc_feature 1..16: note = synthetic [barcode part1]
  source 1..16: mol_type = other DNA
gtgacactgtgacact

SEQ ID NO: 32325 - DNA, 16 bp, synthetic construct
  misc_feature 1..16: note = synthetic [barcode part1]
  source 1..16: mol_type = other DNA
taaccaccttagttcg

SEQ ID NO: 32326 - DNA, 16 bp, synthetic construct
  misc_feature 1..16: note = synthetic [barcode part1]
  source 1..16: mol_type = other DNA
atacggtcttcggtcc

SEQ ID NO: 32327 - DNA, 16 bp, synthetic construct
  misc_feature 1..16: note = synthetic [barcode part1]
  source 1..16: mol_type = other DNA
taatcaagtgccgtgc

SEQ ID NO: 32328 - DNA, 16 bp, synthetic construct
  misc_feature 1..16: note = synthetic [barcode part1]
  source 1..16: mol_type = other DNA
gaggaacttacacggc

SEQ ID NO: 32329 - DNA, 16 bp, synthetic construct
  misc_feature 1..16: note = synthetic [barcode part1]
  source 1..16: mol_type = other DNA
aacttcctggcagagt

SEQ ID NO: 32330 - DNA, 16 bp, synthetic construct
  misc_feature 1..16: note = synthetic [barcode part1]
  source 1..16: mol_type = other DNA
tgcgttcaagtgcaac

SEQ ID NO: 32331 - DNA, 16 bp, synthetic construct
  misc_feature 1..16: note = synthetic [barcode part1]
  source 1..16: mol_type = other DNA
aatacgcgtgccaatc

SEQ ID NO: 32332 - DNA, 16 bp, synthetic construct
  misc_feature 1..16: note = synthetic [barcode part1]
  source 1..16: mol_type = other DNA
gcgaatccggtctctt

SEQ ID NO: 32333 - DNA, 16 bp, synthetic construct
  misc_feature 1..16: note = synthetic [barcode part1]
  source 1..16: mol_type = other DNA
atccgtcttacttgcc

SEQ ID NO: 32334 - DNA, 16 bp, synthetic construct
  misc_feature 1..16: note = synthetic [barcode part1]
  source 1..16: mol_type = other DNA
caccagaagaccactt

SEQ ID NO: 32335 - DNA, 16 bp, synthetic construct
  misc_feature 1..16: note = synthetic [barcode part1]
  source 1..16: mol_type = other DNA
acgttaaccggacgtt

SEQ ID NO: 32336 - DNA, 16 bp, synthetic construct
  misc_feature 1..16: note = synthetic [barcode part1]
  source 1..16: mol_type = other DNA
agagtatattgccgag

SEQ ID NO: 32337 - DNA, 16 bp, synthetic construct
  misc_feature 1..16: note = synthetic [barcode part1]
  source 1..16: mol_type = other DNA
ttccgtagactactgt

SEQ ID NO: 32338 - DNA, 16 bp, synthetic construct
  misc_feature 1..16: note = synthetic [barcode part1]
  source 1..16: mol_type = other DNA
gcagtcagactctcct

SEQ ID NO: 32339 - DNA, 16 bp, synthetic construct
  misc_feature 1..16: note = synthetic [barcode part1]
  source 1..16: mol_type = other DNA
gtatcgaccggatatc

SEQ ID NO: 32340 - DNA, 16 bp, synthetic construct
  misc_feature 1..16: note = synthetic [barcode part1]
  source 1..16: mol_type = other DNA
cagacacagaacaact

SEQ ID NO: 32341 - DNA, 16 bp, synthetic construct
  misc_feature 1..16: note = synthetic [barcode part1]
  source 1..16: mol_type = other DNA
atctggagaacggtgc

SEQ ID NO: 32342 - DNA, 16 bp, synthetic construct
  misc_feature 1..16: note = synthetic [barcode part1]
  source 1..16: mol_type = other DNA
gtaaccactagaagac

SEQ ID NO: 32343 - DNA, 16 bp, synthetic construct
  misc_feature 1..16: note = synthetic [barcode part1]
  source 1..16: mol_type = other DNA
tgagtctgtcttgttg

SEQ ID NO: 32344 - DNA, 16 bp, synthetic construct
  misc_feature 1..16: note = synthetic [barcode part1]
  source 1..16: mol_type = other DNA
tggcgacttagtagtc

SEQ ID NO: 32345 - DNA, 16 bp, synthetic construct
  misc_feature 1..16: note = synthetic [barcode part1]
  source 1..16: mol_type = other DNA
ttgcggagacgacagt

SEQ ID NO: 32346 - DNA, 16 bp, synthetic construct
  misc_feature 1..16: note = synthetic [barcode part1]
  source 1..16: mol_type = other DNA
aaggacctcctaatcg

SEQ ID NO: 32347 - DNA, 16 bp, synthetic construct
  misc_feature 1..16: note = synthetic [barcode part1]
  source 1..16: mol_type = other DNA
cgaaccgagagtacac

SEQ ID NO: 32348 - DNA, 16 bp, synthetic construct
  misc_feature 1..16: note = synthetic [barcode part1]
  source 1..16: mol_type = other DNA
tcgtcgcacaggtctt

SEQ ID NO: 32349 - DNA, 16 bp, synthetic construct
  misc_feature 1..16: note = synthetic [barcode part1]
  source 1..16: mol_type = other DNA
taggtacgacttgtgc

SEQ ID NO: 32350 - DNA, 16 bp, synthetic construct
  misc_feature 1..16: note = synthetic [barcode part1]
  source 1..16: mol_type = other DNA
aataactcgactcggc

SEQ ID NO: 32351 - DNA, 16 bp, synthetic construct
  misc_feature 1..16: note = synthetic [barcode part1]
  source 1..16: mol_type = other DNA
ccaggtatatcgttct

SEQ ID NO: 32352 - DNA, 16 bp, synthetic construct
  misc_feature 1..16: note = synthetic [barcode part1]
  source 1..16: mol_type = other DNA
ccgattctactctgtc

SEQ ID NO: 32353 - DNA, 16 bp, synthetic construct
  misc_feature 1..16: note = synthetic [barcode part1]
  source 1..16: mol_type = other DNA
tcaacagagtgactcc

SEQ ID NO: 32354 - DNA, 16 bp, synthetic construct
  misc_feature 1..16: note = synthetic [barcode part1]
  source 1..16: mol_type = other DNA
cagacgaacttatccg

SEQ ID NO: 32355 - DNA, 16 bp, synthetic construct
  misc_feature 1..16: note = synthetic [barcode part1]
  source 1..16: mol_type = other DNA
aacacgtgttgacacc

SEQ ID NO: 32356 - DNA, 16 bp, synthetic construct
  misc_feature 1..16: note = synthetic [barcode part1]
  source 1..16: mol_type = other DNA
tataaggcggtctaag

SEQ ID NO: 32357 - DNA, 16 bp, synthetic construct
  misc_feature 1..16: note = synthetic [barcode part1]
  source 1..16: mol_type = other DNA
gagtactaacgaggcc

SEQ ID NO: 32358 - DNA, 16 bp, synthetic construct
  misc_feature 1..16: note = synthetic [barcode part1]
  source 1..16: mol_type = other DNA
actgtactcttcaacg

SEQ ID NO: 32359 - DNA, 16 bp, synthetic construct
  misc_feature 1..16: note = synthetic [barcode part1]
  source 1..16: mol_type = other DNA
gccacaggaacagatc

SEQ ID NO: 32360 - DNA, 16 bp, synthetic construct
  misc_feature 1..16: note = synthetic [barcode part1]
  source 1..16: mol_type = other DNA
gagatctacgagtggc

SEQ ID NO: 32361 - DNA, 16 bp, synthetic construct
  misc_feature 1..16: note = synthetic [barcode part1]
  source 1..16: mol_type = other DNA
tcggcgaataggaacc

SEQ ID NO: 32362 - DNA, 16 bp, synthetic construct
  misc_feature 1..16: note = synthetic [barcode part1]
  source 1..16: mol_type = other DNA
tcgtgtaacgcgttag

SEQ ID NO: 32363 - DNA, 16 bp, synthetic construct
  misc_feature 1..16: note = synthetic [barcode part1]
  source 1..16: mol_type = other DNA
gttgcaattgttcgtc

SEQ ID NO: 32364 - DNA, 16 bp, synthetic construct
  misc_feature 1..16: note = synthetic [barcode part1]
  source 1..16: mol_type = other DNA
gcgatagacaaggtag

SEQ ID NO: 32365 - DNA, 16 bp, synthetic construct
  misc_feature 1..16: note = synthetic [barcode part1]
  source 1..16: mol_type = other DNA
tacacgtgtaccacag

SEQ ID NO: 32366 - DNA, 16 bp, synthetic construct
  misc_feature 1..16: note = synthetic [barcode part1]
  source 1..16: mol_type = other DNA
tctggttacacactgt

SEQ ID NO: 32367 - DNA, 16 bp, synthetic construct
  misc_feature 1..16: note = synthetic [barcode part1]
  source 1..16: mol_type = other DNA
agtacaccacacagtc

SEQ ID NO: 32368 - DNA, 16 bp, synthetic construct
  misc_feature 1..16: note = synthetic [barcode part1]
  source 1..16: mol_type = other DNA
gccaacaggactaggt

SEQ ID NO: 32369 - DNA, 16 bp, synthetic construct
  misc_feature 1..16: note = synthetic [barcode part1]
  source 1..16: mol_type = other DNA
cgtcgttcttgatctc

SEQ ID NO: 32370 - DNA, 16 bp, synthetic construct
  misc_feature 1..16: note = synthetic [barcode part1]
  source 1..16: mol_type = other DNA
tggacgaagacaagtg

SEQ ID NO: 32371 - DNA, 16 bp, synthetic construct
  misc_feature 1..16: note = synthetic [barcode part1]
  source 1..16: mol_type = other DNA
cggttccgcgttaact

SEQ ID NO: 32372 - DNA, 16 bp, synthetic construct
  misc_feature 1..16: note = synthetic [barcode part1]
  source 1..16: mol_type = other DNA
ccacctgtgttcactt

SEQ ID NO: 32373 - DNA, 16 bp, synthetic construct
  misc_feature 1..16: note = synthetic [barcode part1]
  source 1..16: mol_type = other DNA
cctatatccggcagtc

SEQ ID NO: 32374 - DNA, 16 bp, synthetic construct
  misc_feature 1..16: note = synthetic [barcode part1]
  source 1..16: mol_type = other DNA
atcttgttaggaggcc

SEQ ID NO: 32375 - DNA, 16 bp, synthetic construct
  misc_feature 1..16: note = synthetic [barcode part1]
  source 1..16: mol_type = other DNA
tcctcgaattacacac

SEQ ID NO: 32376 - DNA, 16 bp, synthetic construct
  misc_feature 1..16: note = synthetic [barcode part1]
  source 1..16: mol_type = other DNA
gattcttctgaacgtc

SEQ ID NO: 32377 - DNA, 16 bp, synthetic construct
  misc_feature 1..16: note = synthetic [barcode part1]
  source 1..16: mol_type = other DNA
ataactatcggccttc

SEQ ID NO: 32378 - DNA, 16 bp, synthetic construct
  misc_feature 1..16: note = synthetic [barcode part1]
  source 1..16: mol_type = other DNA
gttctgcgcaattatc

SEQ ID NO: 32379 - DNA, 16 bp, synthetic construct
  misc_feature 1..16: note = synthetic [barcode part1]
  source 1..16: mol_type = other DNA
cgcctgttgaataggt

SEQ ID NO: 32380 - DNA, 16 bp, synthetic construct
  misc_feature 1..16: note = synthetic [barcode part1]
  source 1..16: mol_type = other DNA
agacaggcactgtgac

SEQ ID NO: 32381 - DNA, 16 bp, synthetic construct
  misc_feature 1..16: note = synthetic [barcode part1]
  source 1..16: mol_type = other DNA
accgtaagtcttggac

SEQ ID NO: 32382 - DNA, 16 bp, synthetic construct
  misc_feature 1..16: note = synthetic [barcode part1]
  source 1..16: mol_type = other DNA
tattaccgttcctcgc

SEQ ID NO: 32383 - DNA, 16 bp, synthetic construct
  misc_feature 1..16: note = synthetic [barcode part1]
  source 1..16: mol_type = other DNA
tgtggactctgccgtt

SEQ ID NO: 32384 - DNA, 16 bp, synthetic construct
  misc_feature 1..16: note = synthetic [barcode part1]
  source 1..16: mol_type = other DNA
atagactcagtcctct

SEQ ID NO: 32385 - DNA, 16 bp, synthetic construct
  misc_feature 1..16: note = synthetic [barcode part1]
  source 1..16: mol_type = other DNA
tgtcagattgtacctc

SEQ ID NO: 32386 - DNA, 16 bp, synthetic construct
  misc_feature 1..16: note = synthetic [barcode part1]
  source 1..16: mol_type = other DNA
acgttagtgtaggtcc

SEQ ID NO: 32387 - DNA, 16 bp, synthetic construct
  misc_feature 1..16: note = synthetic [barcode part1]
  source 1..16: mol_type = other DNA
tcttcaatctcggtcc

SEQ ID NO: 32388 - DNA, 16 bp, synthetic construct
  misc_feature 1..16: note = synthetic [barcode part1]
  source 1..16: mol_type = other DNA
gcaggaataacttgac

SEQ ID NO: 32389 - DNA, 16 bp, synthetic construct
  misc_feature 1..16: note = synthetic [barcode part1]
  source 1..16: mol_type = other DNA
tcacgtacaaccgtag

SEQ ID NO: 32390 - DNA, 16 bp, synthetic construct
  misc_feature 1..16: note = synthetic [barcode part1]
  source 1..16: mol_type = other DNA
aggacgtctagtggtg

SEQ ID NO: 32391 - DNA, 16 bp, synthetic construct
  misc_feature 1..16: note = synthetic [barcode part1]
  source 1..16: mol_type = other DNA
gaagaatcggaggatc

SEQ ID NO: 32392 - DNA, 16 bp, synthetic construct
  misc_feature 1..16: note = synthetic [barcode part1]
  source 1..16: mol_type = other DNA
gacagtctgcaggagt

SEQ ID NO: 32393 - DNA, 16 bp, synthetic construct
  misc_feature 1..16: note = synthetic [barcode part1]
  source 1..16: mol_type = other DNA
atccgtcttcaagatc

SEQ ID NO: 32394 - DNA, 16 bp, synthetic construct
  misc_feature 1..16: note = synthetic [barcode part1]
  source 1..16: mol_type = other DNA
cgaagttattggtcgc

SEQ ID NO: 32395 - DNA, 16 bp, synthetic construct
  misc_feature 1..16: note = synthetic [barcode part1]
  source 1..16: mol_type = other DNA
tgtagtctcagacgtg

SEQ ID NO: 32396 - DNA, 16 bp, synthetic construct
  misc_feature 1..16: note = synthetic [barcode part1]
  source 1..16: mol_type = other DNA
gcggaatataggcctg

SEQ ID NO: 32397 - DNA, 16 bp, synthetic construct
  misc_feature 1..16: note = synthetic [barcode part1]
  source 1..16: mol_type = other DNA
cagtgcgtcctactac

SEQ ID NO: 32398 - DNA, 16 bp, synthetic construct
  misc_feature 1..16: note = synthetic [barcode part1]
  source 1..16: mol_type = other DNA
cgtctcaggacttgtc

SEQ ID NO: 32399 - DNA, 16 bp, synthetic construct
  misc_feature 1..16: note = synthetic [barcode part1]
  source 1..16: mol_type = other DNA
gcaggaagattattgc

SEQ ID NO: 32400 - DNA, 16 bp, synthetic construct
  misc_feature 1..16: note = synthetic [barcode part1]
  source 1..16: mol_type = other DNA
gtgtgcacaacgttgt

SEQ ID NO: 32401 - DNA, 16 bp, synthetic construct
  misc_feature 1..16: note = synthetic [barcode part1]
  source 1..16: mol_type = other DNA
tattcctccagtggcg

SEQ ID NO: 32402 - DNA, 16 bp, synthetic construct
  misc_feature 1..16: note = synthetic [barcode part1]
  source 1..16: mol_type = other DNA
cgcggattccgttatc

SEQ ID NO: 32403 - DNA, 16 bp, synthetic construct
  misc_feature 1..16: note = synthetic [barcode part1]
  source 1..16: mol_type = other DNA
tcacactcggattact

SEQ ID NO: 32404 - DNA, 16 bp, synthetic construct
  misc_feature 1..16: note = synthetic [barcode part1]
  source 1..16: mol_type = other DNA
ttacgttgttcctgcc

SEQ ID NO: 32405 - DNA, 16 bp, synthetic construct
  misc_feature 1..16: note = synthetic [barcode part1]
  source 1..16: mol_type = other DNA
tagaccggtatctctt

SEQ ID NO: 32406 - DNA, 16 bp, synthetic construct
  misc_feature 1..16: note = synthetic [barcode part1]
  source 1..16: mol_type = other DNA
ttattgacgcaccttg

SEQ ID NO: 32407 - DNA, 16 bp, synthetic construct
  misc_feature 1..16: note = synthetic [barcode part1]
  source 1..16: mol_type = other DNA
aataccacctcgaggt

SEQ ID NO: 32408 - DNA, 16 bp, synthetic construct
  misc_feature 1..16: note = synthetic [barcode part1]
  source 1..16: mol_type = other DNA
cggatcacttccacgt

SEQ ID NO: 32409 - DNA, 16 bp, synthetic construct
  misc_feature 1..16: note = synthetic [barcode part1]
  source 1..16: mol_type = other DNA
gtaggttcacaggttc

SEQ ID NO: 32410 - DNA, 16 bp, synthetic construct
  misc_feature 1..16: note = synthetic [barcode part1]
  source 1..16: mol_type = other DNA
ttcgccgttggacgtt

SEQ ID NO: 32411 - DNA, 16 bp, synthetic construct
  misc_feature 1..16: note = synthetic [barcode part1]
  source 1..16: mol_type = other DNA
ccgcctcaagaattag

SEQ ID NO: 32412 - DNA, 16 bp, synthetic construct
  misc_feature 1..16: note = synthetic [barcode part1]
  source 1..16: mol_type = other DNA
aacaagtcgttcgtcg

SEQ ID NO: 32413 - DNA, 16 bp, synthetic construct
  misc_feature 1..16: note = synthetic [barcode part1]
  source 1..16: mol_type = other DNA
gtacagtgatcttctc

SEQ ID NO: 32414 - DNA, 16 bp, synthetic construct
  misc_feature 1..16: note = synthetic [barcode part1]
  source 1..16: mol_type = other DNA
ccaattgccagaactg

SEQ ID NO: 32415 - DNA, 16 bp, synthetic construct
  misc_feature 1..16: note = synthetic [barcode part1]
  source 1..16: mol_type = other DNA
aggtaagttcgtccgt

SEQ ID NO: 32416 - DNA, 16 bp, synthetic construct
  misc_feature 1..16: note = synthetic [barcode part1]
  source 1..16: mol_type = other DNA
tcactatccgtgaatc

SEQ ID NO: 32417 - DNA, 16 bp, synthetic construct
  misc_feature 1..16: note = synthetic [barcode part1]
  source 1..16: mol_type = other DNA
caaggtcctctctctt

SEQ ID NO: 32418 - DNA, 16 bp, synthetic construct
  misc_feature 1..16: note = synthetic [barcode part1]
  source 1..16: mol_type = other DNA
tctatcaaccgtcctc

SEQ ID NO: 32419 - DNA, 16 bp, synthetic construct
  misc_feature 1..16: note = synthetic [barcode part1]
  source 1..16: mol_type = other DNA
accagacaggtcactt

SEQ ID NO: 32420 - DNA, 16 bp, synthetic construct
  misc_feature 1..16: note = synthetic [barcode part1]
  source 1..16: mol_type = other DNA
cgtctcgccacagatt

SEQ ID NO: 32421 - DNA, 16 bp, synthetic construct
  misc_feature 1..16: note = synthetic [barcode part1]
  source 1..16: mol_type = other DNA
tccgaatcggattcag

SEQ ID NO: 32422 - DNA, 16 bp, synthetic construct
  misc_feature 1..16: note = synthetic [barcode part1]
  source 1..16: mol_type = other DNA
aacgcaccacgcaatt

SEQ ID NO: 32423 - DNA, 16 bp, synthetic construct
  misc_feature 1..16: note = synthetic [barcode part1]
  source 1..16: mol_type = other DNA
acacgaggaatacgag

SEQ ID NO: 32424 - DNA, 16 bp, synthetic construct
  misc_feature 1..16: note = synthetic [barcode part1]
  source 1..16: mol_type = other DNA
tgacggtcttccgtgt

SEQ ID NO: 32425 - DNA, 16 bp, synthetic construct
  misc_feature 1..16: note = synthetic [barcode part1]
  source 1..16: mol_type = other DNA
tatccgaatacgaccg

SEQ ID NO: 32426 - DNA, 16 bp, synthetic construct
  misc_feature 1..16: note = synthetic [barcode part1]
  source 1..16: mol_type = other DNA
cgatcaggatcagtct

SEQ ID NO: 32427 - DNA, 16 bp, synthetic construct
  misc_feature 1..16: note = synthetic [barcode part1]
  source 1..16: mol_type = other DNA
gagacagttgtaggcc

SEQ ID NO: 32428 - DNA, 16 bp, synthetic construct
  misc_feature 1..16: note = synthetic [barcode part1]
  source 1..16: mol_type = other DNA
tggtgagagtgaagtg

SEQ ID NO: 32429 - DNA, 16 bp, synthetic construct
  misc_feature 1..16: note = synthetic [barcode part1]
  source 1..16: mol_type = other DNA
acctagacactattcc

SEQ ID NO: 32430 - DNA, 16 bp, synthetic construct
  misc_feature 1..16: note = synthetic [barcode part1]
  source 1..16: mol_type = other DNA
cagttgactggaatcc

SEQ ID NO: 32431 - DNA, 16 bp, synthetic construct
  misc_feature 1..16: note = synthetic [barcode part1]
  source 1..16: mol_type = other DNA
tggtgtaggaacgacc

SEQ ID NO: 32432 - DNA, 16 bp, synthetic construct
  misc_feature 1..16: note = synthetic [barcode part1]
  source 1..16: mol_type = other DNA
cgactctgtatcaatc

SEQ ID NO: 32433 - DNA, 16 bp, synthetic construct
  misc_feature 1..16: note = synthetic [barcode part1]
  source 1..16: mol_type = other DNA
ttgcggcagaattctg

SEQ ID NO: 32434 - DNA, 16 bp, synthetic construct
  misc_feature 1..16: note = synthetic [barcode part1]
  source 1..16: mol_type = other DNA
gacctcttcctgttac

SEQ ID NO: 32435 - DNA, 16 bp, synthetic construct
  misc_feature 1..16: note = synthetic [barcode part1]
  source 1..16: mol_type = other DNA
tgatcttgcgccagtc

SEQ ID NO: 32436 - DNA, 16 bp, synthetic construct
  misc_feature 1..16: note = synthetic [barcode part1]
  source 1..16: mol_type = other DNA
actcgcgacacttaag

SEQ ID NO: 32437 - DNA, 16 bp, synthetic construct
  misc_feature 1..16: note = synthetic [barcode part1]
  source 1..16: mol_type = other DNA
taaccaacgcgtgtgt

SEQ ID NO: 32438 - DNA, 16 bp, synthetic construct
  misc_feature 1..16: note = synthetic [barcode part1]
  source 1..16: mol_type = other DNA
ttaacaatacctccgc

SEQ ID NO: 32439 - DNA, 16 bp, synthetic construct
  misc_feature 1..16: note = synthetic [barcode part1]
  source 1..16: mol_type = other DNA
cgaaggtcaaggatag

SEQ ID NO: 32440 - DNA, 16 bp, synthetic construct
  misc_feature 1..16: note = synthetic [barcode part1]
  source 1..16: mol_type = other DNA
tgataactcctcgtgt

SEQ ID NO: 32441 - DNA, 16 bp, synthetic construct
  misc_feature 1..16: note = synthetic [barcode part1]
  source 1..16: mol_type = other DNA
gtcggtctagtgttag

SEQ ID NO: 32442 - DNA, 16 bp, synthetic construct
  misc_feature 1..16: note = synthetic [barcode part1]
  source 1..16: mol_type = other DNA
tgcaagttctgtcgcc

SEQ ID NO: 32443 - DNA, 16 bp, synthetic construct
  misc_feature 1..16: note = synthetic [barcode part1]
  source 1..16: mol_type = other DNA
tccacctcggaatctg

SEQ ID NO: 32444 - DNA, 16 bp, synthetic construct
  misc_feature 1..16: note = synthetic [barcode part1]
  source 1..16: mol_type = other DNA
cgcacaagtctgagtt

SEQ ID NO: 32445 - DNA, 16 bp, synthetic construct
  misc_feature 1..16: note = synthetic [barcode part1]
  source 1..16: mol_type = other DNA
tatctggactagagag

SEQ ID NO: 32446 - DNA, 16 bp, synthetic construct
  misc_feature 1..16: note = synthetic [barcode part1]
  source 1..16: mol_type = other DNA
tctgtacaaccgttgt

SEQ ID NO: 32447 - DNA, 16 bp, synthetic construct
  misc_feature 1..16: note = synthetic [barcode part1]
  source 1..16: mol_type = other DNA
gcactatctgcctacg

SEQ ID NO: 32448 - DNA, 16 bp, synthetic construct
  misc_feature 1..16: note = synthetic [barcode part1]
  source 1..16: mol_type = other DNA
gcagacactgcagtag

SEQ ID NO: 32449 - DNA, 16 bp, synthetic construct
  misc_feature 1..16: note = synthetic [barcode part1]
  source 1..16: mol_type = other DNA
tgacgacaactcgact

SEQ ID NO: 32450 - DNA, 16 bp, synthetic construct
  misc_feature 1..16: note = synthetic [barcode part1]
  source 1..16: mol_type = other DNA
tattagacgccagacc

SEQ ID NO: 32451 - DNA, 16 bp, synthetic construct
  misc_feature 1..16: note = synthetic [barcode part1]
  source 1..16: mol_type = other DNA
ttgcagtctagagtcg

SEQ ID NO: 32452 - DNA, 16 bp, synthetic construct
  misc_feature 1..16: note = synthetic [barcode part1]
  source 1..16: mol_type = other DNA
tccactcctacttgtg

SEQ ID NO: 32453 - DNA, 16 bp, synthetic construct
  misc_feature 1..16: note = synthetic [barcode part1]
  source 1..16: mol_type = other DNA
aacctaccggatatcg

SEQ ID NO: 32454 - DNA, 16 bp, synthetic construct
  misc_feature 1..16: note = synthetic [barcode part1]
  source 1..16: mol_type = other DNA
tgcagagtgtaggaag

SEQ ID NO: 32455 - DNA, 16 bp, synthetic construct
  misc_feature 1..16: note = synthetic [barcode part1]
  source 1..16: mol_type = other DNA
agacctgtgagagatt

SEQ ID NO: 32456 - DNA, 16 bp, synthetic construct
  misc_feature 1..16: note = synthetic [barcode part1]
  source 1..16: mol_type = other DNA
atcgcctgacagaatc

SEQ ID NO: 32457 - DNA, 16 bp, synthetic construct
  misc_feature 1..16: note = synthetic [barcode part1]
  source 1..16: mol_type = other DNA
tataagtccgcaggtc

SEQ ID NO: 32458 - DNA, 16 bp, synthetic construct
  misc_feature 1..16: note = synthetic [barcode part1]
  source 1..16: mol_type = other DNA
ttggttctgaactcgt

SEQ ID NO: 32459 - DNA, 16 bp, synthetic construct
  misc_feature 1..16: note = synthetic [barcode part1]
  source 1..16: mol_type = other DNA
tactactccgtcgttc

SEQ ID NO: 32460 - DNA, 16 bp, synthetic construct
  misc_feature 1..16: note = synthetic [barcode part1]
  source 1..16: mol_type = other DNA
atcacactcagacacg

SEQ ID NO: 32461 - DNA, 16 bp, synthetic construct
  misc_feature 1..16: note = synthetic [barcode part1]
  source 1..16: mol_type = other DNA
tgaactcgtcttgttg

SEQ ID NO: 32462 - DNA, 16 bp, synthetic construct
  misc_feature 1..16: note = synthetic [barcode part1]
  source 1..16: mol_type = other DNA
gaattcgactcttcac

SEQ ID NO: 32463 - DNA, 16 bp, synthetic construct
  misc_feature 1..16: note = synthetic [barcode part1]
  source 1..16: mol_type = other DNA
tacaggtcagagtaac

SEQ ID NO: 32464 - DNA, 16 bp, synthetic construct
  misc_feature 1..16: note = synthetic [barcode part1]
  source 1..16: mol_type = other DNA
tgtctcaactccacct

SEQ ID NO: 32465 - DNA, 16 bp, synthetic construct
  misc_feature 1..16: note = synthetic [barcode part1]
  source 1..16: mol_type = other DNA
gttctaccgttaacgt

SEQ ID NO: 32466 - DNA, 16 bp, synthetic construct
  misc_feature 1..16: note = synthetic [barcode part1]
  source 1..16: mol_type = other DNA
tctccacacttctacg

SEQ ID NO: 32467 - DNA, 16 bp, synthetic construct
  misc_feature 1..16: note = synthetic [barcode part1]
  source 1..16: mol_type = other DNA
taagaacctcggtaag

SEQ ID NO: 32468 - DNA, 16 bp, synthetic construct
  misc_feature 1..16: note = synthetic [barcode part1]
  source 1..16: mol_type = other DNA
tagtagtcacggaagt

SEQ ID NO: 32469 - DNA, 16 bp, synthetic construct
  misc_feature 1..16: note = synthetic [barcode part1]
  source 1..16: mol_type = other DNA
acgttgacgacgagac

SEQ ID NO: 32470 - DNA, 16 bp, synthetic construct
  misc_feature 1..16: note = synthetic [barcode part1]
  source 1..16: mol_type = other DNA
gccgaacggattattc

SEQ ID NO: 32471 - DNA, 16 bp, synthetic construct
  misc_feature 1..16: note = synthetic [barcode part1]
  source 1..16: mol_type = other DNA
cagtacttggaacctg

SEQ ID NO: 32472 - DNA, 16 bp, synthetic construct
  misc_feature 1..16: note = synthetic [barcode part1]
  source 1..16: mol_type = other DNA
aaccagtctgaccaac

SEQ ID NO: 32473 - DNA, 16 bp, synthetic construct
  misc_feature 1..16: note = synthetic [barcode part1]
  source 1..16: mol_type = other DNA
tatcctatccaagtgc

SEQ ID NO: 32474 - DNA, 16 bp, synthetic construct
  misc_feature 1..16: note = synthetic [barcode part1]
  source 1..16: mol_type = other DNA
tattggaggtacaggt

SEQ ID NO: 32475 - DNA, 16 bp, synthetic construct
  misc_feature 1..16: note = synthetic [barcode part1]
  source 1..16: mol_type = other DNA
tgtcagtcagtgtacg

SEQ ID NO: 32476 - DNA, 16 bp, synthetic construct
  misc_feature 1..16: note = synthetic [barcode part1]
  source 1..16: mol_type = other DNA
agtgccagttagtcgt

SEQ ID NO: 32477 - DNA, 16 bp, synthetic construct
  misc_feature 1..16: note = synthetic [barcode part1]
  source 1..16: mol_type = other DNA
gttcgagtccactatt

SEQ ID NO: 32478 - DNA, 16 bp, synthetic construct
  misc_feature 1..16: note = synthetic [barcode part1]
  source 1..16: mol_type = other DNA
aacgcgaggtgatctg

SEQ ID NO: 32479 - DNA, 16 bp, synthetic construct
  misc_feature 1..16: note = synthetic [barcode part1]
  source 1..16: mol_type = other DNA
gcgaagacaacaattc

SEQ ID NO: 32480 - DNA, 16 bp, synthetic construct
  misc_feature 1..16: note = synthetic [barcode part1]
  source 1..16: mol_type = other DNA
aagtagtatacggtcg

SEQ ID NO: 32481 - DNA, 16 bp, synthetic construct
  misc_feature 1..16: note = synthetic [barcode part1]
  source 1..16: mol_type = other DNA
tattgtcgtctaggtc

SEQ ID NO: 32482 - DNA, 16 bp, synthetic construct
  misc_feature 1..16: note = synthetic [barcode part1]
  source 1..16: mol_type = other DNA
ttcacttccgtaacag

SEQ ID NO: 32483 - DNA, 16 bp, synthetic construct
  misc_feature 1..16: note = synthetic [barcode part1]
  source 1..16: mol_type = other DNA
cgattgtctcgatccg

SEQ ID NO: 32484 - DNA, 16 bp, synthetic construct
  misc_feature 1..16: note = synthetic [barcode part1]
  source 1..16: mol_type = other DNA
cactggcgttatacag

SEQ ID NO: 32485 - DNA, 16 bp, synthetic construct
  misc_feature 1..16: note = synthetic [barcode part1]
  source 1..16: mol_type = other DNA
atacacgccagaactc

SEQ ID NO: 32486 - DNA, 16 bp, synthetic construct
  misc_feature 1..16: note = synthetic [barcode part1]
  source 1..16: mol_type = other DNA
cacagttcttcgccag

SEQ ID NO: 32487 - DNA, 16 bp, synthetic construct
  misc_feature 1..16: note = synthetic [barcode part1]
  source 1..16: mol_type = other DNA
accacgacctggaatt

SEQ ID NO: 32488 - DNA, 16 bp, synthetic construct
  misc_feature 1..16: note = synthetic [barcode part1]
  source 1..16: mol_type = other DNA
tggttactccggttcg

SEQ ID NO: 32489 - DNA, 16 bp, synthetic construct
  misc_feature 1..16: note = synthetic [barcode part1]
  source 1..16: mol_type = other DNA
gtgtgacctccttggt

SEQ ID NO: 32490 - DNA, 16 bp, synthetic construct
  misc_feature 1..16: note = synthetic [barcode part1]
  source 1..16: mol_type = other DNA
atagaaggagacgcac

SEQ ID NO: 32491 - DNA, 16 bp, synthetic construct
  misc_feature 1..16: note = synthetic [barcode part1]
  source 1..16: mol_type = other DNA
tatattgccgattccg

SEQ ID NO: 32492 - DNA, 16 bp, synthetic construct
  misc_feature 1..16: note = synthetic [barcode part1]
  source 1..16: mol_type = other DNA
tccaaggaactccagt

SEQ ID NO: 32493 - DNA, 16 bp, synthetic construct
  misc_feature 1..16: note = synthetic [barcode part1]
  source 1..16: mol_type = other DNA
ttctgcagactgccgt

SEQ ID NO: 32494 - DNA, 16 bp, synthetic construct
  misc_feature 1..16: note = synthetic [barcode part1]
  source 1..16: mol_type = other DNA
aaccgcgatatcaacc

SEQ ID NO: 32495 - DNA, 16 bp, synthetic construct
  misc_feature 1..16: note = synthetic [barcode part1]
  source 1..16: mol_type = other DNA
tgatagagtctcgtcg

SEQ ID NO: 32496 - DNA, 16 bp, synthetic construct
  misc_feature 1..16: note = synthetic [barcode part1]
  source 1..16: mol_type = other DNA
tagacacgtcacctcc

SEQ ID NO: 32497 - DNA, 16 bp, synthetic construct
  misc_feature 1..16: note = synthetic [barcode part1]
  source 1..16: mol_type = other DNA
tgagagactggtcctt

SEQ ID NO: 32498 - DNA, 16 bp, synthetic construct
  misc_feature 1..16: note = synthetic [barcode part1]
  source 1..16: mol_type = other DNA
actaagactccgatcg

SEQ ID NO: 32499 - DNA, 16 bp, synthetic construct
  misc_feature 1..16: note = synthetic [barcode part1]
  source 1..16: mol_type = other DNA
cgcgtcaatattggtg

SEQ ID NO: 32500 - DNA, 16 bp, synthetic construct
  misc_feature 1..16: note = synthetic [barcode part1]
  source 1..16: mol_type = other DNA
cctgttgttggcgtac

SEQ ID NO: 32501 - DNA, 16 bp, synthetic construct
  misc_feature 1..16: note = synthetic [barcode part1]
  source 1..16: mol_type = other DNA
cggactcgatattcag

SEQ ID NO: 32502 - DNA, 16 bp, synthetic construct
  misc_feature 1..16: note = synthetic [barcode part1]
  source 1..16: mol_type = other DNA
tcttcaacacgatcac

SEQ ID NO: 32503 - DNA, 16 bp, synthetic construct
  misc_feature 1..16: note = synthetic [barcode part1]
  source 1..16: mol_type = other DNA
tcgtaaggcgattacc

SEQ ID NO: 32504 - DNA, 16 bp, synthetic construct
  misc_feature 1..16: note = synthetic [barcode part1]
  source 1..16: mol_type = other DNA
tgaacctacaagtccg

SEQ ID NO: 32505 - DNA, 16 bp, synthetic construct
  misc_feature 1..16: note = synthetic [barcode part1]
  source 1..16: mol_type = other DNA
acggtattagtgccac

SEQ ID NO: 32506 - DNA, 16 bp, synthetic construct
  misc_feature 1..16: note = synthetic [barcode part1]
  source 1..16: mol_type = other DNA
tcgattgccaggattg

SEQ ID NO: 32507 - DNA, 16 bp, synthetic construct
  misc_feature 1..16: note = synthetic [barcode part1]
  source 1..16: mol_type = other DNA
ccaatagactcagtgc

SEQ ID NO: 32508 - DNA, 16 bp, synthetic construct
  misc_feature 1..16: note = synthetic [barcode part1]
  source 1..16: mol_type = other DNA
tgtatccgtggaggtt

SEQ ID NO: 32509 - DNA, 16 bp, synthetic construct
  misc_feature 1..16: note = synthetic [barcode part1]
  source 1..16: mol_type = other DNA
gtcttgttccgacctt

SEQ ID NO: 32510 - DNA, 16 bp, synthetic construct
  misc_feature 1..16: note = synthetic [barcode part1]
  source 1..16: mol_type = other DNA
tgacctcagaatcgac

SEQ ID NO: 32511 - DNA, 16 bp, synthetic construct
  misc_feature 1..16: note = synthetic [barcode part1]
  source 1..16: mol_type = other DNA
attagaccttacgcct

SEQ ID NO: 32512 - DNA, 16 bp, synthetic construct
  misc_feature 1..16: note = synthetic [barcode part1]
  source 1..16: mol_type = other DNA
caactcttcggtctct

SEQ ID NO: 32513 - DNA, 16 bp, synthetic construct
  misc_feature 1..16: note = synthetic [barcode part1]
  source 1..16: mol_type = other DNA
acgcaattaacgcacc

SEQ ID NO: 32514 - DNA, 16 bp, synthetic construct
  misc_feature 1..16: note = synthetic [barcode part1]
  source 1..16: mol_type = other DNA
ttatcgcggcggaatt

SEQ ID NO: 32515 - DNA, 16 bp, synthetic construct
  misc_feature 1..16: note = synthetic [barcode part1]
  source 1..16: mol_type = other DNA
cgcctgttcacaacgt

SEQ ID NO: 32516 - DNA, 16 bp, synthetic construct
  misc_feature 1..16: note = synthetic [barcode part1]
  source 1..16: mol_type = other DNA
gaacacctggaacggt

SEQ ID NO: 32517 - DNA, 16 bp, synthetic construct
  misc_feature 1..16: note = synthetic [barcode part1]
  source 1..16: mol_type = other DNA
atacaagtaggttgcg

SEQ ID NO: 32518 - DNA, 16 bp, synthetic construct
  misc_feature 1..16: note = synthetic [barcode part1]
  source 1..16: mol_type = other DNA
gccttacttcagtctc

SEQ ID NO: 32519 - DNA, 16 bp, synthetic construct
  misc_feature 1..16: note = synthetic [barcode part1]
  source 1..16: mol_type = other DNA
gcgactcgttcttgtg

SEQ ID NO: 32520 - DNA, 16 bp, synthetic construct
  misc_feature 1..16: note = synthetic [barcode part1]
  source 1..16: mol_type = other DNA
actacgttcagtgcag

SEQ ID NO: 32521 - DNA, 16 bp, synthetic construct
  misc_feature 1..16: note = synthetic [barcode part1]
  source 1..16: mol_type = other DNA
atcctcgtatccttgc

SEQ ID NO: 32522 - DNA, 16 bp, synthetic construct
  misc_feature 1..16: note = synthetic [barcode part1]
  source 1..16: mol_type = other DNA
tgtggtgcgcctactt

SEQ ID NO: 32523 - DNA, 16 bp, synthetic construct
  misc_feature 1..16: note = synthetic [barcode part1]
  source 1..16: mol_type = other DNA
atcgcgacggaattct

SEQ ID NO: 32524 - DNA, 16 bp, synthetic construct
  misc_feature 1..16: note = synthetic [barcode part1]
  source 1..16: mol_type = other DNA
gactggcctaactaac

SEQ ID NO: 32525 - DNA, 16 bp, synthetic construct
  misc_feature 1..16: note = synthetic [barcode part1]
  source 1..16: mol_type = other DNA
cgttatctgagtctgt

SEQ ID NO: 32526 - DNA, 16 bp, synthetic construct
  misc_feature 1..16: note = synthetic [barcode part1]
  source 1..16: mol_type = other DNA
aataatatcgcaggcg

SEQ ID NO: 32527 - DNA, 16 bp, synthetic construct
  misc_feature 1..16: note = synthetic [barcode part1]
  source 1..16: mol_type = other DNA
aacgtgtcctcaattc

SEQ ID NO: 32528 - DNA, 16 bp, synthetic construct
  misc_feature 1..16: note = synthetic [barcode part1]
  source 1..16: mol_type = other DNA
tacgcctattcttgcc

SEQ ID NO: 32529 - DNA, 16 bp, synthetic construct
  misc_feature 1..16: note = synthetic [barcode part1]
  source 1..16: mol_type = other DNA
tgttggttggtcacag

SEQ ID NO: 32530 - DNA, 16 bp, synthetic construct
  misc_feature 1..16: note = synthetic [barcode part1]
  source 1..16: mol_type = other DNA
taacagacaagtgtcg

SEQ ID NO: 32531 - DNA, 16 bp, synthetic construct
  misc_feature 1..16: note = synthetic [barcode part1]
  source 1..16: mol_type = other DNA
ttcgaacgagttagag

SEQ ID NO: 32532 - DNA, 16 bp, synthetic construct
  misc_feature 1..16: note = synthetic [barcode part1]
  source 1..16: mol_type = other DNA
ttatattaggcgcggc

SEQ ID NO: 32533 - DNA, 16 bp, synthetic construct
  misc_feature 1..16: note = synthetic [barcode part1]
  source 1..16: mol_type = other DNA
agttgtcgttctcgcg

SEQ ID NO: 32534 - DNA, 16 bp, synthetic construct
  misc_feature 1..16: note = synthetic [barcode part1]
  source 1..16: mol_type = other DNA
tgttacgtcagtcgag

SEQ ID NO: 32535 - DNA, 16 bp, synthetic construct
  misc_feature 1..16: note = synthetic [barcode part1]
  source 1..16: mol_type = other DNA
tactgacacgttggtg

SEQ ID NO: 32536 - DNA, 16 bp, synthetic construct
  misc_feature 1..16: note = synthetic [barcode part1]
  source 1..16: mol_type = other DNA
cgttgtcggtgtgttc

SEQ ID NO: 32537 - DNA, 16 bp, synthetic construct
  misc_feature 1..16: note = synthetic [barcode part1]
  source 1..16: mol_type = other DNA
acgaattggcctgtgt

SEQ ID NO: 32538 - DNA, 16 bp, synthetic construct
  misc_feature 1..16: note = synthetic [barcode part1]
  source 1..16: mol_type = other DNA
tgttcttcggcctgag

SEQ ID NO: 32539 - DNA, 16 bp, synthetic construct
  misc_feature 1..16: note = synthetic [barcode part1]
  source 1..16: mol_type = other DNA
cctcagttcttcaacc

SEQ ID NO: 32540 - DNA, 16 bp, synthetic construct
  misc_feature 1..16: note = synthetic [barcode part1]
  source 1..16: mol_type = other DNA
caatcgttctggtccg

SEQ ID NO: 32541 - DNA, 16 bp, synthetic construct
  misc_feature 1..16: note = synthetic [barcode part1]
  source 1..16: mol_type = other DNA
tgagtcaagtctgacc

SEQ ID NO: 32542 - DNA, 16 bp, synthetic construct
  misc_feature 1..16: note = synthetic [barcode part1]
  source 1..16: mol_type = other DNA
aatcggtgtatcgcac

SEQ ID NO: 32543 - DNA, 16 bp, synthetic construct
  misc_feature 1..16: note = synthetic [barcode part1]
  source 1..16: mol_type = other DNA
aattgatacgcacgcc

SEQ ID NO: 32544 - DNA, 16 bp, synthetic construct
  misc_feature 1..16: note = synthetic [barcode part1]
  source 1..16: mol_type = other DNA
ttccgatccggacgtt

SEQ ID NO: 32545 - DNA, 16 bp, synthetic construct
  misc_feature 1..16: note = synthetic [barcode part1]
  source 1..16: mol_type = other DNA
attgtcgacgcggaag

SEQ ID NO: 32546 - DNA, 16 bp, synthetic construct
  misc_feature 1..16: note = synthetic [barcode part1]
  source 1..16: mol_type = other DNA
gacagaccaagacctg

SEQ ID NO: 32547 - DNA, 16 bp, synthetic construct
  misc_feature 1..16: note = synthetic [barcode part1]
  source 1..16: mol_type = other DNA
aaggacaacttgacgt

SEQ ID NO: 32548 - DNA, 16 bp, synthetic construct
  misc_feature 1..16: note = synthetic [barcode part1]
  source 1..16: mol_type = other DNA
acctgaagtggacttc

SEQ ID NO: 32549 - DNA, 16 bp, synthetic construct
  misc_feature 1..16: note = synthetic [barcode part1]
  source 1..16: mol_type = other DNA
taatacaccttcggtc

SEQ ID NO: 32550 - DNA, 16 bp, synthetic construct
  misc_feature 1..16: note = synthetic [barcode part1]
  source 1..16: mol_type = other DNA
cgacaagaggtgatag

SEQ ID NO: 32551 - DNA, 16 bp, synthetic construct
  misc_feature 1..16: note = synthetic [barcode part1]
  source 1..16: mol_type = other DNA
actaacgccgtcactc

SEQ ID NO: 32552 - DNA, 16 bp, synthetic construct
  misc_feature 1..16: note = synthetic [barcode part1]
  source 1..16: mol_type = other DNA
caaggagtggtgtgtc

SEQ ID NO: 32553 - DNA, 16 bp, synthetic construct
  misc_feature 1..16: note = synthetic [barcode part1]
  source 1..16: mol_type = other DNA
tagtcacctgttactg

SEQ ID NO: 32554 - DNA, 16 bp, synthetic construct
  misc_feature 1..16: note = synthetic [barcode part1]
  source 1..16: mol_type = other DNA
gagtagaggacggatt

SEQ ID NO: 32555 - DNA, 16 bp, synthetic construct
  misc_feature 1..16: note = synthetic [barcode part1]
  source 1..16: mol_type = other DNA
gacggaatagtgagac

SEQ ID NO: 32556 - DNA, 16 bp, synthetic construct
  misc_feature 1..16: note = synthetic [barcode part1]
  source 1..16: mol_type = other DNA
tgccttgcctattgtc

SEQ ID NO: 32557 - DNA, 16 bp, synthetic construct
  misc_feature 1..16: note = synthetic [barcode part1]
  source 1..16: mol_type = other DNA
gtcgagattcctcaag

SEQ ID NO: 32558 - DNA, 16 bp, synthetic construct
  misc_feature 1..16: note = synthetic [barcode part1]
  source 1..16: mol_type = other DNA
ttgcagttggtcagtg

SEQ ID NO: 32559 - DNA, 16 bp, synthetic construct
  misc_feature 1..16: note = synthetic [barcode part1]
  source 1..16: mol_type = other DNA
ttgattacgcgacgtg

SEQ ID NO: 32560 - DNA, 16 bp, synthetic construct
  misc_feature 1..16: note = synthetic [barcode part1]
  source 1..16: mol_type = other DNA
tctctaatcctggtcc

SEQ ID NO: 32561 - DNA, 16 bp, synthetic construct
  misc_feature 1..16: note = synthetic [barcode part1]
  source 1..16: mol_type = other DNA
gcactccaagatacgt

SEQ ID NO: 32562 - DNA, 16 bp, synthetic construct
  misc_feature 1..16: note = synthetic [barcode part1]
  source 1..16: mol_type = other DNA
tacggttccaagtgtg

SEQ ID NO: 32563 - DNA, 16 bp, synthetic construct
  misc_feature 1..16: note = synthetic [barcode part1]
  source 1..16: mol_type = other DNA
ttaacggtgtcagacc

SEQ ID NO: 32564 - DNA, 16 bp, synthetic construct
  misc_feature 1..16: note = synthetic [barcode part1]
  source 1..16: mol_type = other DNA
cgaactaccttcgcac

SEQ ID NO: 32565 - DNA, 16 bp, synthetic construct
  misc_feature 1..16: note = synthetic [barcode part1]
  source 1..16: mol_type = other DNA
cactgagacgattcgt

SEQ ID NO: 32566 - DNA, 16 bp, synthetic construct
  misc_feature 1..16: note = synthetic [barcode part1]
  source 1..16: mol_type = other DNA
tggcgaaggtactcag

SEQ ID NO: 32567 - DNA, 16 bp, synthetic construct
  misc_feature 1..16: note = synthetic [barcode part1]
  source 1..16: mol_type = other DNA
gaaggtaagtgacctt

SEQ ID NO: 32568 - DNA, 16 bp, synthetic construct
  misc_feature 1..16: note = synthetic [barcode part1]
  source 1..16: mol_type = other DNA
ccaccactacttaagt

SEQ ID NO: 32569 - DNA, 16 bp, synthetic construct
  misc_feature 1..16: note = synthetic [barcode part1]
  source 1..16: mol_type = other DNA
ccaagtattgcaggtc

SEQ ID NO: 32570 - DNA, 16 bp, synthetic construct
  misc_feature 1..16: note = synthetic [barcode part1]
  source 1..16: mol_type = other DNA
gtgcaattctctcggc

SEQ ID NO: 32571 - DNA, 16 bp, synthetic construct
  misc_feature 1..16: note = synthetic [barcode part1]
  source 1..16: mol_type = other DNA
ttgtcacaggcctatt

SEQ ID NO: 32572 - DNA, 16 bp, synthetic construct
  misc_feature 1..16: note = synthetic [barcode part1]
  source 1..16: mol_type = other DNA
gacgtacagaatcagt

SEQ ID NO: 32573 - DNA, 16 bp, synthetic construct
  misc_feature 1..16: note = synthetic [barcode part1]
  source 1..16: mol_type = other DNA
tacaggttgaggtaac

SEQ ID NO: 32574 - DNA, 16 bp, synthetic construct
  misc_feature 1..16: note = synthetic [barcode part1]
  source 1..16: mol_type = other DNA
cgtgaatatccacgac

SEQ ID NO: 32575 - DNA, 16 bp, synthetic construct
  misc_feature 1..16: note = synthetic [barcode part1]
  source 1..16: mol_type = other DNA
gaagttcctacctatc

SEQ ID NO: 32576 - DNA, 16 bp, synthetic construct
  misc_feature 1..16: note = synthetic [barcode part1]
  source 1..16: mol_type = other DNA
cgtggtctgattcctg

SEQ ID NO: 32577 - DNA, 16 bp, synthetic construct
  misc_feature 1..16: note = synthetic [barcode part1]
  source 1..16: mol_type = other DNA
taacggtccttgcgtc

SEQ ID NO: 32578 - DNA, 16 bp, synthetic construct
  misc_feature 1..16: note = synthetic [barcode part1]
  source 1..16: mol_type = other DNA
actactcgtggatctt

SEQ ID NO: 32579 - DNA, 16 bp, synthetic construct
  misc_feature 1..16: note = synthetic [barcode part1]
  source 1..16: mol_type = other DNA
cgaaggaatcacacgc

SEQ ID NO: 32580 - DNA, 16 bp, synthetic construct
  misc_feature 1..16: note = synthetic [barcode part1]
  source 1..16: mol_type = other DNA
gattccttggcagagt

SEQ ID NO: 32581 - DNA, 16 bp, synthetic construct
  misc_feature 1..16: note = synthetic [barcode part1]
  source 1..16: mol_type = other DNA
ttgtgaactgttgcct

SEQ ID NO: 32582 - DNA, 16 bp, synthetic construct
  misc_feature 1..16: note = synthetic [barcode part1]
  source 1..16: mol_type = other DNA
gaatcgtcacttccgc

SEQ ID NO: 32583 - DNA, 16 bp, synthetic construct
  misc_feature 1..16: note = synthetic [barcode part1]
  source 1..16: mol_type = other DNA
gtggtcctatcaagtg

SEQ ID NO: 32584 - DNA, 16 bp, synthetic construct
  misc_feature 1..16: note = synthetic [barcode part1]
  source 1..16: mol_type = other DNA
gacgtgcgtatatcac

SEQ ID NO: 32585 - DNA, 16 bp, synthetic construct
  misc_feature 1..16: note = synthetic [barcode part1]
  source 1..16: mol_type = other DNA
accggataggtatagt

SEQ ID NO: 32586 - DNA, 16 bp, synthetic construct
  misc_feature 1..16: note = synthetic [barcode part1]
  source 1..16: mol_type = other DNA
cggcgcacaattcctt

SEQ ID NO: 32587 - DNA, 16 bp, synthetic construct
  misc_feature 1..16: note = synthetic [barcode part1]
  source 1..16: mol_type = other DNA
cacaactccttcgacg

SEQ ID NO: 32588 - DNA, 16 bp, synthetic construct
  misc_feature 1..16: note = synthetic [barcode part1]
  source 1..16: mol_type = other DNA
cgtagtgacttgttct

SEQ ID NO: 32589 - DNA, 16 bp, synthetic construct
  misc_feature 1..16: note = synthetic [barcode part1]
  source 1..16: mol_type = other DNA
tgatcaacggtcgact

SEQ ID NO: 32590 - DNA, 16 bp, synthetic construct
  misc_feature 1..16: note = synthetic [barcode part1]
  source 1..16: mol_type = other DNA
tattctggtggtaggc

SEQ ID NO: 32591 - DNA, 16 bp, synthetic construct
  misc_feature 1..16: note = synthetic [barcode part1]
  source 1..16: mol_type = other DNA
gaccaatcggttgatc

SEQ ID NO: 32592 - DNA, 16 bp, synthetic construct
  misc_feature 1..16: note = synthetic [barcode part1]
  source 1..16: mol_type = other DNA
tatcctagaattcgcc

SEQ ID NO: 32593 - DNA, 16 bp, synthetic construct
  misc_feature 1..16: note = synthetic [barcode part1]
  source 1..16: mol_type = other DNA
gtcaccgtcaataacg

SEQ ID NO: 32594 - DNA, 16 bp, synthetic construct
  misc_feature 1..16: note = synthetic [barcode part1]
  source 1..16: mol_type = other DNA
tagaccggtcgaactt

SEQ ID NO: 32595 - DNA, 16 bp, synthetic construct
  misc_feature 1..16: note = synthetic [barcode part1]
  source 1..16: mol_type = other DNA
ataggccaccactcct

SEQ ID NO: 32596 - DNA, 16 bp, synthetic construct
  misc_feature 1..16: note = synthetic [barcode part1]
  source 1..16: mol_type = other DNA
gtggtaccaactgact

SEQ ID NO: 32597 - DNA, 16 bp, synthetic construct
  misc_feature 1..16: note = synthetic [barcode part1]
  source 1..16: mol_type = other DNA
gtccaatccttacgcg

SEQ ID NO: 32598 - DNA, 16 bp, synthetic construct
  misc_feature 1..16: note = synthetic [barcode part1]
  source 1..16: mol_type = other DNA
ttatcgtctgttccgc

SEQ ID NO: 32599 - DNA, 16 bp, synthetic construct
  misc_feature 1..16: note = synthetic [barcode part1]
  source 1..16: mol_type = other DNA
cgcagaacaacttaag

SEQ ID NO: 32600 - DNA, 16 bp, synthetic construct
  misc_feature 1..16: note = synthetic [barcode part1]
  source 1..16: mol_type = other DNA
tccttctccggaattc

SEQ ID NO: 32601 - DNA, 16 bp, synthetic construct
  misc_feature 1..16: note = synthetic [barcode part1]
  source 1..16: mol_type = other DNA
ccgtaggttcaacctc

SEQ ID NO: 32602 - DNA, 16 bp, synthetic construct
  misc_feature 1..16: note = synthetic [barcode part1]
  source 1..16: mol_type = other DNA
tcgtaagtattccacc

SEQ ID NO: 32603 - DNA, 16 bp, synthetic construct
  misc_feature 1..16: note = synthetic [barcode part1]
  source 1..16: mol_type = other DNA
cggtagtgtattcctt

SEQ ID NO: 32604 - DNA, 16 bp, synthetic construct
  misc_feature 1..16: note = synthetic [barcode part1]
  source 1..16: mol_type = other DNA
tcaggattaggcaggc

SEQ ID NO: 32605 - DNA, 16 bp, synthetic construct
  misc_feature 1..16: note = synthetic [barcode part1]
  source 1..16: mol_type = other DNA
ccgtaccgtctaacgt

SEQ ID NO: 32606 - DNA, 16 bp, synthetic construct
  misc_feature 1..16: note = synthetic [barcode part1]
  source 1..16: mol_type = other DNA
ataaggacggtccgac

SEQ ID NO: 32607 - DNA, 16 bp, synthetic construct
  misc_feature 1..16: note = synthetic [barcode part1]
  source 1..16: mol_type = other DNA
gtgaatcctctactac

SEQ ID NO: 32608 - DNA, 16 bp, synthetic construct
  misc_feature 1..16: note = synthetic [barcode part1]
  source 1..16: mol_type = other DNA
tattccggcggatcct

SEQ ID NO: 32609 - DNA, 16 bp, synthetic construct
  misc_feature 1..16: note = synthetic [barcode part1]
  source 1..16: mol_type = other DNA
ccagaccaacttagtg

SEQ ID NO: 32610 - DNA, 16 bp, synthetic construct
  misc_feature 1..16: note = synthetic [barcode part1]
  source 1..16: mol_type = other DNA
tcgacgacttaacggt

SEQ ID NO: 32611 - DNA, 16 bp, synthetic construct
  misc_feature 1..16: note = synthetic [barcode part1]
  source 1..16: mol_type = other DNA
ttcttaccaccggacg

SEQ ID NO: 32612 - DNA, 16 bp, synthetic construct
  misc_feature 1..16: note = synthetic [barcode part1]
  source 1..16: mol_type = other DNA
ttcaggaatcacgacc

SEQ ID NO: 32613 - DNA, 16 bp, synthetic construct
  misc_feature 1..16: note = synthetic [barcode part1]
  source 1..16: mol_type = other DNA
tacggtacttactcac

SEQ ID NO: 32614 - DNA, 16 bp, synthetic construct
  misc_feature 1..16: note = synthetic [barcode part1]
  source 1..16: mol_type = other DNA
acacgacgattaaggt

SEQ ID NO: 32615 - DNA, 16 bp, synthetic construct
  misc_feature 1..16: note = synthetic [barcode part1]
  source 1..16: mol_type = other DNA
caggaactatcctcag

SEQ ID NO: 32616 - DNA, 16 bp, synthetic construct
  misc_feature 1..16: note = synthetic [barcode part1]
  source 1..16: mol_type = other DNA
gtcacgaccacctgtt

SEQ ID NO: 32617 - DNA, 16 bp, synthetic construct
  misc_feature 1..16: note = synthetic [barcode part1]
  source 1..16: mol_type = other DNA
taatcgccgaatccag

SEQ ID NO: 32618 - DNA, 16 bp, synthetic construct
  misc_feature 1..16: note = synthetic [barcode part1]
  source 1..16: mol_type = other DNA
gagttcagagtgtctc

SEQ ID NO: 32619 - DNA, 16 bp, synthetic construct
  misc_feature 1..16: note = synthetic [barcode part1]
  source 1..16: mol_type = other DNA
ccagagattccgttag

SEQ ID NO: 32620 - DNA, 16 bp, synthetic construct
  misc_feature 1..16: note = synthetic [barcode part1]
  source 1..16: mol_type = other DNA
agacgtgtggcagttg

SEQ ID NO: 32621 - DNA, 16 bp, synthetic construct
  misc_feature 1..16: note = synthetic [barcode part1]
  source 1..16: mol_type = other DNA
attggcgcaagaagtt

SEQ ID NO: 32622 - DNA, 16 bp, synthetic construct
  misc_feature 1..16: note = synthetic [barcode part1]
  source 1..16: mol_type = other DNA
ttgcacttcaccaagt

SEQ ID NO: 32623 - DNA, 16 bp, synthetic construct
  misc_feature 1..16: note = synthetic [barcode part1]
  source 1..16: mol_type = other DNA
gtgagttgaaggtcgc

SEQ ID NO: 32624 - DNA, 16 bp, synthetic construct
  misc_feature 1..16: note = synthetic [barcode part1]
  source 1..16: mol_type = other DNA
gattgcagtcacgtac

SEQ ID NO: 32625 - DNA, 16 bp, synthetic construct
  misc_feature 1..16: note = synthetic [barcode part1]
  source 1..16: mol_type = other DNA
gtagtgtctcctcttc

SEQ ID NO: 32626 - DNA, 16 bp, synthetic construct
  misc_feature 1..16: note = synthetic [barcode part1]
  source 1..16: mol_type = other DNA
gcggtactggtattac

SEQ ID NO: 32627 - DNA, 16 bp, synthetic construct
  misc_feature 1..16: note = synthetic [barcode part1]
  source 1..16: mol_type = other DNA
ccgaagaggttacgtg

SEQ ID NO: 32628 - DNA, 16 bp, synthetic construct
  misc_feature 1..16: note = synthetic [barcode part1]
  source 1..16: mol_type = other DNA
tatcgccacaaggtac

SEQ ID NO: 32629 - DNA, 16 bp, synthetic construct
  misc_feature 1..16: note = synthetic [barcode part1]
  source 1..16: mol_type = other DNA
cgattccgttaatacc

SEQ ID NO: 32630 - DNA, 16 bp, synthetic construct
  misc_feature 1..16: note = synthetic [barcode part1]
  source 1..16: mol_type = other DNA
tggtagttctctgtac

SEQ ID NO: 32631 - DNA, 16 bp, synthetic construct
  misc_feature 1..16: note = synthetic [barcode part1]
  source 1..16: mol_type = other DNA
accttgaggaaggaag

SEQ ID NO: 32632 - DNA, 16 bp, synthetic construct
  misc_feature 1..16: note = synthetic [barcode part1]
  source 1..16: mol_type = other DNA
accgtctgttctgttc

SEQ ID NO: 32633 - DNA, 16 bp, synthetic construct
  misc_feature 1..16: note = synthetic [barcode part1]
  source 1..16: mol_type = other DNA
attggtaccgtgcagt

SEQ ID NO: 32634 - DNA, 16 bp, synthetic construct
  misc_feature 1..16: note = synthetic [barcode part1]
  source 1..16: mol_type = other DNA
gaggagtcaccgatac

SEQ ID NO: 32635 - DNA, 16 bp, synthetic construct
  misc_feature 1..16: note = synthetic [barcode part1]
  source 1..16: mol_type = other DNA
gaattattcgtgcctc

SEQ ID NO: 32636 - DNA, 16 bp, synthetic construct
  misc_feature 1..16: note = synthetic [barcode part1]
  source 1..16: mol_type = other DNA
caactcctgtgtgacc

SEQ ID NO: 32637 - DNA, 16 bp, synthetic construct
  misc_feature 1..16: note = synthetic [barcode part1]
  source 1..16: mol_type = other DNA
acgactgcgtacaact

SEQ ID NO: 32638 - DNA, 16 bp, synthetic construct
  misc_feature 1..16: note = synthetic [barcode part1]
  source 1..16: mol_type = other DNA
gaataggtctaggact

SEQ ID NO: 32639 - DNA, 16 bp, synthetic construct
  misc_feature 1..16: note = synthetic [barcode part1]
  source 1..16: mol_type = other DNA
cactcctaactgttag

SEQ ID NO: 32640 - DNA, 16 bp, synthetic construct
  misc_feature 1..16: note = synthetic [barcode part1]
  source 1..16: mol_type = other DNA
cctaacctgaccacac

SEQ ID NO: 32641 - DNA, 16 bp, synthetic construct
  misc_feature 1..16: note = synthetic [barcode part1]
  source 1..16: mol_type = other DNA
tataggaacgcctctg

SEQ ID NO: 32642 - DNA, 16 bp, synthetic construct
  misc_feature 1..16: note = synthetic [barcode part1]
  source 1..16: mol_type = other DNA
gcactgcaatactgtg

SEQ ID NO: 32643 - DNA, 16 bp, synthetic construct
  misc_feature 1..16: note = synthetic [barcode part1]
  source 1..16: mol_type = other DNA
tgttcacgaatctcgt

SEQ ID NO: 32644 - DNA, 16 bp, synthetic construct
  misc_feature 1..16: note = synthetic [barcode part1]
  source 1..16: mol_type = other DNA
tgacaggtgtcacttg

SEQ ID NO: 32645 - DNA, 16 bp, synthetic construct
  misc_feature 1..16: note = synthetic [barcode part1]
  source 1..16: mol_type = other DNA
agtgtcgaggagaagt

SEQ ID NO: 32646 - DNA, 16 bp, synthetic construct
  misc_feature 1..16: note = synthetic [barcode part1]
  source 1..16: mol_type = other DNA
gttggaccggactatt

SEQ ID NO: 32647 - DNA, 16 bp, synthetic construct
  misc_feature 1..16: note = synthetic [barcode part1]
  source 1..16: mol_type = other DNA
ccaacgaagacacggt

SEQ ID NO: 32648 - DNA, 16 bp, synthetic construct
  misc_feature 1..16: note = synthetic [barcode part1]
  source 1..16: mol_type = other DNA
tcgcgtcaataatcct

SEQ ID NO: 32649 - DNA, 16 bp, synthetic construct
  misc_feature 1..16: note = synthetic [barcode part1]
  source 1..16: mol_type = other DNA
agatctctggcgttag

SEQ ID NO: 32650 - DNA, 16 bp, synthetic construct
  misc_feature 1..16: note = synthetic [barcode part1]
  source 1..16: mol_type = other DNA
gtgattgtgcggttac

SEQ ID NO: 32651 - DNA, 16 bp, synthetic construct
  misc_feature 1..16: note = synthetic [barcode part1]
  source 1..16: mol_type = other DNA
tggtcggaacttcaac

SEQ ID NO: 32652 - DNA, 16 bp, synthetic construct
  misc_feature 1..16: note = synthetic [barcode part1]
  source 1..16: mol_type = other DNA
tacgaggttaacggcg

SEQ ID NO: 32653 - DNA, 16 bp, synthetic construct
  misc_feature 1..16: note = synthetic [barcode part1]
  source 1..16: mol_type = other DNA
attaggagaccaggag

SEQ ID NO: 32654 - DNA, 16 bp, synthetic construct
  misc_feature 1..16: note = synthetic [barcode part1]
  source 1..16: mol_type = other DNA
tcagacaacgagttcc

SEQ ID NO: 32655 - DNA, 16 bp, synthetic construct
  misc_feature 1..16: note = synthetic [barcode part1]
  source 1..16: mol_type = other DNA
gtgattctccgacaag

SEQ ID NO: 32656 - DNA, 16 bp, synthetic construct
  misc_feature 1..16: note = synthetic [barcode part1]
  source 1..16: mol_type = other DNA
gttgacaattctctgc

SEQ ID NO: 32657 - DNA, 16 bp, synthetic construct
  misc_feature 1..16: note = synthetic [barcode part1]
  source 1..16: mol_type = other DNA
tccacggtattcgaag

SEQ ID NO: 32658 - DNA, 16 bp, synthetic construct
  misc_feature 1..16: note = synthetic [barcode part1]
  source 1..16: mol_type = other DNA
ttccttcaatcggtcc

SEQ ID NO: 32659 - DNA, 16 bp, synthetic construct
  misc_feature 1..16: note = synthetic [barcode part1]
  source 1..16: mol_type = other DNA
tggtcaactcttcctc

SEQ ID NO: 32660 - DNA, 16 bp, synthetic construct
  misc_feature 1..16: note = synthetic [barcode part1]
  source 1..16: mol_type = other DNA
tagacgcgtgcaatct

SEQ ID NO: 32661 - DNA, 16 bp, synthetic construct
  misc_feature 1..16: note = synthetic [barcode part1]
  source 1..16: mol_type = other DNA
tcagtcaacgttgcag

SEQ ID NO: 32662 - DNA, 16 bp, synthetic construct
  misc_feature 1..16: note = synthetic [barcode part1]
  source 1..16: mol_type = other DNA
atccggacaggacagt

SEQ ID NO: 32663 - DNA, 16 bp, synthetic construct
  misc_feature 1..16: note = synthetic [barcode part1]
  source 1..16: mol_type = other DNA
gcggattgtgcaatct

SEQ ID NO: 32664 - DNA, 16 bp, synthetic construct
  misc_feature 1..16: note = synthetic [barcode part1]
  source 1..16: mol_type = other DNA
tattccagtctcgtcc

SEQ ID NO: 32665 - DNA, 16 bp, synthetic construct
  misc_feature 1..16: note = synthetic [barcode part1]
  source 1..16: mol_type = other DNA
tgcggaccaggataac

SEQ ID NO: 32666 - DNA, 16 bp, synthetic construct
  misc_feature 1..16: note = synthetic [barcode part1]
  source 1..16: mol_type = other DNA
aggtatcaacgaagtc

SEQ ID NO: 32667 - DNA, 16 bp, synthetic construct
  misc_feature 1..16: note = synthetic [barcode part1]
  source 1..16: mol_type = other DNA
taactctcacggccac

SEQ ID NO: 32668 - DNA, 16 bp, synthetic construct
  misc_feature 1..16: note = synthetic [barcode part1]
  source 1..16: mol_type = other DNA
gcagattacgcagttc

SEQ ID NO: 32669 - DNA, 16 bp, synthetic construct
  misc_feature 1..16: note = synthetic [barcode part1]
  source 1..16: mol_type = other DNA
aactccaaccttggag

SEQ ID NO: 32670 - DNA, 16 bp, synthetic construct
  misc_feature 1..16: note = synthetic [barcode part1]
  source 1..16: mol_type = other DNA
cctctgattggaagac

SEQ ID NO: 32671 - DNA, 16 bp, synthetic construct
  misc_feature 1..16: note = synthetic [barcode part1]
  source 1..16: mol_type = other DNA
agttcagtgtgttctc

SEQ ID NO: 32672 - DNA, 16 bp, synthetic construct
  misc_feature 1..16: note = synthetic [barcode part1]
  source 1..16: mol_type = other DNA
attgagttccgcgcct

SEQ ID NO: 32673 - DNA, 16 bp, synthetic construct
  misc_feature 1..16: note = synthetic [barcode part1]
  source 1..16: mol_type = other DNA
cctattatcgacgcgc

SEQ ID NO: 32674 - DNA, 16 bp, synthetic construct
  misc_feature 1..16: note = synthetic [barcode part1]
  source 1..16: mol_type = other DNA
agaaggaagttgaccg

SEQ ID NO: 32675 - DNA, 16 bp, synthetic construct
  misc_feature 1..16: note = synthetic [barcode part1]
  source 1..16: mol_type = other DNA
atacgtgcgactgatc

SEQ ID NO: 32676 - DNA, 16 bp, synthetic construct
  misc_feature 1..16: note = synthetic [barcode part1]
  source 1..16: mol_type = other DNA
tggtacacgtggattc

SEQ ID NO: 32677 - DNA, 16 bp, synthetic construct
  misc_feature 1..16: note = synthetic [barcode part1]
  source 1..16: mol_type = other DNA
ttgaaccgactcagtg

SEQ ID NO: 32678 - DNA, 16 bp, synthetic construct
  misc_feature 1..16: note = synthetic [barcode part1]
  source 1..16: mol_type = other DNA
cgtgtcctatcaagtt

SEQ ID NO: 32679 - DNA, 16 bp, synthetic construct
  misc_feature 1..16: note = synthetic [barcode part1]
  source 1..16: mol_type = other DNA
atcacgagtagacaac

SEQ ID NO: 32680 - DNA, 16 bp, synthetic construct
  misc_feature 1..16: note = synthetic [barcode part1]
  source 1..16: mol_type = other DNA
gtagacgacctacttg

SEQ ID NO: 32681 - DNA, 16 bp, synthetic construct
  misc_feature 1..16: note = synthetic [barcode part1]
  source 1..16: mol_type = other DNA
accaacacttgcgaac

SEQ ID NO: 32682 - DNA, 16 bp, synthetic construct
  misc_feature 1..16: note = synthetic [barcode part1]
  source 1..16: mol_type = other DNA
ttggcagttgcgtcct

SEQ ID NO: 32683 - DNA, 16 bp, synthetic construct
  misc_feature 1..16: note = synthetic [barcode part1]
  source 1..16: mol_type = other DNA
tgtacagttcagttcc

SEQ ID NO: 32684 - DNA, 16 bp, synthetic construct
  misc_feature 1..16: note = synthetic [barcode part1]
  source 1..16: mol_type = other DNA
cgatagtcggtctaac

SEQ ID NO: 32685 - DNA, 16 bp, synthetic construct
  misc_feature 1..16: note = synthetic [barcode part1]
  source 1..16: mol_type = other DNA
atctcacttcggcctt

SEQ ID NO: 32686 - DNA, 16 bp, synthetic construct
  misc_feature 1..16: note = synthetic [barcode part1]
  source 1..16: mol_type = other DNA
ttgataaggtacaggc

SEQ ID NO: 32687 - DNA, 16 bp, synthetic construct
  misc_feature 1..16: note = synthetic [barcode part1]
  source 1..16: mol_type = other DNA
cgtgaatcggagtgac

SEQ ID NO: 32688 - DNA, 16 bp, synthetic construct
  misc_feature 1..16: note = synthetic [barcode part1]
  source 1..16: mol_type = other DNA
taatatcggcgaacag

SEQ ID NO: 32689 - DNA, 16 bp, synthetic construct
  misc_feature 1..16: note = synthetic [barcode part1]
  source 1..16: mol_type = other DNA
gacaggttgccacaag

SEQ ID NO: 32690 - DNA, 16 bp, synthetic construct
  misc_feature 1..16: note = synthetic [barcode part1]
  source 1..16: mol_type = other DNA
tggaacgaatacgttg

SEQ ID NO: 32691 - DNA, 16 bp, synthetic construct
  misc_feature 1..16: note = synthetic [barcode part1]
  source 1..16: mol_type = other DNA
gtactcttaactcggt

SEQ ID NO: 32692 - DNA, 16 bp, synthetic construct
  misc_feature 1..16: note = synthetic [barcode part1]
  source 1..16: mol_type = other DNA
actgacaacgactacc

SEQ ID NO: 32693 - DNA, 16 bp, synthetic construct
  misc_feature 1..16: note = synthetic [barcode part1]
  source 1..16: mol_type = other DNA
tcggtctcggacttac

SEQ ID NO: 32694 - DNA, 16 bp, synthetic construct
  misc_feature 1..16: note = synthetic [barcode part1]
  source 1..16: mol_type = other DNA
acagacttcgaacgtc

SEQ ID NO: 32695 - DNA, 16 bp, synthetic construct
  misc_feature 1..16: note = synthetic [barcode part1]
  source 1..16: mol_type = other DNA
tacggttaccaagaag

SEQ ID NO: 32696 - DNA, 16 bp, synthetic construct
  misc_feature 1..16: note = synthetic [barcode part1]
  source 1..16: mol_type = other DNA
taatcggccttaggac

SEQ ID NO: 32697 - DNA, 16 bp, synthetic construct
  misc_feature 1..16: note = synthetic [barcode part1]
  source 1..16: mol_type = other DNA
tagatccgttctactg

SEQ ID NO: 32698 - DNA, 16 bp, synthetic construct
  misc_feature 1..16: note = synthetic [barcode part1]
  source 1..16: mol_type = other DNA
gcaggcgttacagtag

SEQ ID NO: 32699 - DNA, 16 bp, synthetic construct
  misc_feature 1..16: note = synthetic [barcode part1]
  source 1..16: mol_type = other DNA
ttaggacagtaagtgc

SEQ ID NO: 32700 - DNA, 16 bp, synthetic construct
  misc_feature 1..16: note = synthetic [barcode part1]
  source 1..16: mol_type = other DNA
gtgagacgtaggttcg

SEQ ID NO: 32701 - DNA, 16 bp, synthetic construct
  misc_feature 1..16: note = synthetic [barcode part1]
  source 1..16: mol_type = other DNA
cgtgatattcgcctgc

SEQ ID NO: 32702 - DNA, 16 bp, synthetic construct
  misc_feature 1..16: note = synthetic [barcode part1]
  source 1..16: mol_type = other DNA
tacggagagtctggtg

SEQ ID NO: 32703 - DNA, 16 bp, synthetic construct
  misc_feature 1..16: note = synthetic [barcode part1]
  source 1..16: mol_type = other DNA
tggttacacttctcag

SEQ ID NO: 32704 - DNA, 16 bp, synthetic construct
  misc_feature 1..16: note = synthetic [barcode part1]
  source 1..16: mol_type = other DNA
cacaacagtctacttc

SEQ ID NO: 32705 - DNA, 16 bp, synthetic construct
  misc_feature 1..16: note = synthetic [barcode part1]
  source 1..16: mol_type = other DNA
ccgtaggtatcctgtc

SEQ ID NO: 32706 - DNA, 16 bp, synthetic construct
  misc_feature 1..16: note = synthetic [barcode part1]
  source 1..16: mol_type = other DNA
gtgaccgaacttctcc

SEQ ID NO: 32707 - DNA, 16 bp, synthetic construct
  misc_feature 1..16: note = synthetic [barcode part1]
  source 1..16: mol_type = other DNA
gcaagacttacggacg

SEQ ID NO: 32708 - DNA, 16 bp, synthetic construct
  misc_feature 1..16: note = synthetic [barcode part1]
  source 1..16: mol_type = other DNA
ccttccacaggtctag

SEQ ID NO: 32709 - DNA, 16 bp, synthetic construct
  misc_feature 1..16: note = synthetic [barcode part1]
  source 1..16: mol_type = other DNA
cgcctactcgtctatt

SEQ ID NO: 32710 - DNA, 16 bp, synthetic construct
  misc_feature 1..16: note = synthetic [barcode part1]
  source 1..16: mol_type = other DNA
cacgtagtccgtaagt

SEQ ID NO: 32711 - DNA, 16 bp, synthetic construct
  misc_feature 1..16: note = synthetic [barcode part1]
  source 1..16: mol_type = other DNA
caagaggcagtatatc

SEQ ID NO: 32712 - DNA, 16 bp, synthetic construct
  misc_feature 1..16: note = synthetic [barcode part1]
  source 1..16: mol_type = other DNA
ccagtatctggtcctg

SEQ ID NO: 32713 - DNA, 16 bp, synthetic construct
  misc_feature 1..16: note = synthetic [barcode part1]
  source 1..16: mol_type = other DNA
acgtaggattctcgtg

SEQ ID NO: 32714 - DNA, 16 bp, synthetic construct
  misc_feature 1..16: note = synthetic [barcode part1]
  source 1..16: mol_type = other DNA
ttctgttgcggatccg

SEQ ID NO: 32715 - DNA, 16 bp, synthetic construct
  misc_feature 1..16: note = synthetic [barcode part1]
  source 1..16: mol_type = other DNA
tctctctaccgattgc

SEQ ID NO: 32716 - DNA, 16 bp, synthetic construct
  misc_feature 1..16: note = synthetic [barcode part1]
  source 1..16: mol_type = other DNA
actgtggagtaccact

SEQ ID NO: 32717 - DNA, 16 bp, synthetic construct
  misc_feature 1..16: note = synthetic [barcode part1]
  source 1..16: mol_type = other DNA
gagacttctgcctacc

SEQ ID NO: 32718 - DNA, 16 bp, synthetic construct
  misc_feature 1..16: note = synthetic [barcode part1]
  source 1..16: mol_type = other DNA
tgagaggtggtacacc

SEQ ID NO: 32719 - DNA, 16 bp, synthetic construct
  misc_feature 1..16: note = synthetic [barcode part1]
  source 1..16: mol_type = other DNA
atctgcctactgcgac

SEQ ID NO: 32720 - DNA, 16 bp, synthetic construct
  misc_feature 1..16: note = synthetic [barcode part1]
  source 1..16: mol_type = other DNA
ttactggccagactag

SEQ ID NO: 32721 - DNA, 16 bp, synthetic construct
  misc_feature 1..16: note = synthetic [barcode part1]
  source 1..16: mol_type = other DNA
gacttccttgagtatc

SEQ ID NO: 32722 - DNA, 16 bp, synthetic construct
  misc_feature 1..16: note = synthetic [barcode part1]
  source 1..16: mol_type = other DNA
cacacgacgaatctgt

SEQ ID NO: 32723 - DNA, 16 bp, synthetic construct
  misc_feature 1..16: note = synthetic [barcode part1]
  source 1..16: mol_type = other DNA
atctcaggtcaaccag

SEQ ID NO: 32724 - DNA, 16 bp, synthetic construct
  misc_feature 1..16: note = synthetic [barcode part1]
  source 1..16: mol_type = other DNA
tctagtgtgccaagtg

SEQ ID NO: 32725 - DNA, 16 bp, synthetic construct
  misc_feature 1..16: note = synthetic [barcode part1]
  source 1..16: mol_type = other DNA
gcacaaggaacgtaag

SEQ ID NO: 32726 - DNA, 16 bp, synthetic construct
  misc_feature 1..16: note = synthetic [barcode part1]
  source 1..16: mol_type = other DNA
caactcctgcacaacc

SEQ ID NO: 32727 - DNA, 16 bp, synthetic construct
  misc_feature 1..16: note = synthetic [barcode part1]
  source 1..16: mol_type = other DNA
gcaaggagattgtcgc

SEQ ID NO: 32728 - DNA, 16 bp, synthetic construct
  misc_feature 1..16: note = synthetic [barcode part1]
  source 1..16: mol_type = other DNA
ttcctctccttaggac

SEQ ID NO: 32729 - DNA, 16 bp, synthetic construct
  misc_feature 1..16: note = synthetic [barcode part1]
  source 1..16: mol_type = other DNA
attctctccagtcctg

SEQ ID NO: 32730 - DNA, 16 bp, synthetic construct
  misc_feature 1..16: note = synthetic [barcode part1]
  source 1..16: mol_type = other DNA
aggttcgtcactactt

SEQ ID NO: 32731 - DNA, 16 bp, synthetic construct
  misc_feature 1..16: note = synthetic [barcode part1]
  source 1..16: mol_type = other DNA
aactcggactatcggt

SEQ ID NO: 32732 - DNA, 16 bp, synthetic construct
  misc_feature 1..16: note = synthetic [barcode part1]
  source 1..16: mol_type = other DNA
ttacgtgcacgatcag

SEQ ID NO: 32733 - DNA, 16 bp, synthetic construct
  misc_feature 1..16: note = synthetic [barcode part1]
  source 1..16: mol_type = other DNA
taacgcagattcgtgc

SEQ ID NO: 32734 - DNA, 16 bp, synthetic construct
  misc_feature 1..16: note = synthetic [barcode part1]
  source 1..16: mol_type = other DNA
gttagtatccagtcct

SEQ ID NO: 32735 - DNA, 16 bp, synthetic construct
  misc_feature 1..16: note = synthetic [barcode part1]
  source 1..16: mol_type = other DNA
tatccgttactacggt

SEQ ID NO: 32736 - DNA, 16 bp, synthetic construct
  misc_feature 1..16: note = synthetic [barcode part1]
  source 1..16: mol_type = other DNA
gagtagattgcagtgt

SEQ ID NO: 32737 - DNA, 16 bp, synthetic construct
  misc_feature 1..16: note = synthetic [barcode part1]
  source 1..16: mol_type = other DNA
cgagaacaatacggag

SEQ ID NO: 32738 - DNA, 16 bp, synthetic construct
  misc_feature 1..16: note = synthetic [barcode part1]
  source 1..16: mol_type = other DNA
acagttgactgcacac

SEQ ID NO: 32739 - DNA, 16 bp, synthetic construct
  misc_feature 1..16: note = synthetic [barcode part1]
  source 1..16: mol_type = other DNA
tgcgagtgtgataagt

SEQ ID NO: 32740 - DNA, 16 bp, synthetic construct
  misc_feature 1..16: note = synthetic [barcode part1]
  source 1..16: mol_type = other DNA
agttcgacagtgatcc

SEQ ID NO: 32741 - DNA, 16 bp, synthetic construct
  misc_feature 1..16: note = synthetic [barcode part1]
  source 1..16: mol_type = other DNA
gcggactgtcaagaac

SEQ ID NO: 32742 - DNA, 16 bp, synthetic construct
  misc_feature 1..16: note = synthetic [barcode part1]
  source 1..16: mol_type = other DNA
gacacacacaccaact

SEQ ID NO: 32743 - DNA, 16 bp, synthetic construct
  misc_feature 1..16: note = synthetic [barcode part1]
  source 1..16: mol_type = other DNA
gcaagaactccacgtt

SEQ ID NO: 32744 - DNA, 16 bp, synthetic construct
  misc_feature 1..16: note = synthetic [barcode part1]
  source 1..16: mol_type = other DNA
cctagtccaactatac

SEQ ID NO: 32745 - DNA, 16 bp, synthetic construct
  misc_feature 1..16: note = synthetic [barcode part1]
  source 1..16: mol_type = other DNA
gatcggtcaatcgact

SEQ ID NO: 32746 - DNA, 16 bp, synthetic construct
  misc_feature 1..16: note = synthetic [barcode part1]
  source 1..16: mol_type = other DNA
acaattgtctcgacct

SEQ ID NO: 32747 - DNA, 16 bp, synthetic construct
  misc_feature 1..16: note = synthetic [barcode part1]
  source 1..16: mol_type = other DNA
ttcttgaattggcgtc

SEQ ID NO: 32748 - DNA, 16 bp, synthetic construct
  misc_feature 1..16: note = synthetic [barcode part1]
  source 1..16: mol_type = other DNA
tggtagtcgtgccttc

SEQ ID NO: 32749 - DNA, 16 bp, synthetic construct
  misc_feature 1..16: note = synthetic [barcode part1]
  source 1..16: mol_type = other DNA
atcggtggtctggatt

SEQ ID NO: 32750 - DNA, 16 bp, synthetic construct
  misc_feature 1..16: note = synthetic [barcode part1]
  source 1..16: mol_type = other DNA
cgatctcgtataccgc

SEQ ID NO: 32751 - DNA, 16 bp, synthetic construct
  misc_feature 1..16: note = synthetic [barcode part1]
  source 1..16: mol_type = other DNA
atctaggtatcacctc

SEQ ID NO: 32752 - DNA, 16 bp, synthetic construct
  misc_feature 1..16: note = synthetic [barcode part1]
  source 1..16: mol_type = other DNA
cgaggtatatcttgcg

SEQ ID NO: 32753 - DNA, 16 bp, synthetic construct
  misc_feature 1..16: note = synthetic [barcode part1]
  source 1..16: mol_type = other DNA
gcgttagactatctct

SEQ ID NO: 32754 - DNA, 16 bp, synthetic construct
  misc_feature 1..16: note = synthetic [barcode part1]
  source 1..16: mol_type = other DNA
actgtgaagacggacc

SEQ ID NO: 32755 - DNA, 16 bp, synthetic construct
  misc_feature 1..16: note = synthetic [barcode part1]
  source 1..16: mol_type = other DNA
cgcactggatcagaag

SEQ ID NO: 32756 - DNA, 16 bp, synthetic construct
  misc_feature 1..16: note = synthetic [barcode part1]
  source 1..16: mol_type = other DNA
cctaacaagtacgaag

SEQ ID NO: 32757 - DNA, 16 bp, synthetic construct
  misc_feature 1..16: note = synthetic [barcode part1]
  source 1..16: mol_type = other DNA
atctctacctgcactc

SEQ ID NO: 32758 - DNA, 16 bp, synthetic construct
  misc_feature 1..16: note = synthetic [barcode part1]
  source 1..16: mol_type = other DNA
cgagttagtgccttcc

SEQ ID NO: 32759 - DNA, 16 bp, synthetic construct
  misc_feature 1..16: note = synthetic [barcode part1]
  source 1..16: mol_type = other DNA
cagactgtgtgttctt

SEQ ID NO: 32760 - DNA, 16 bp, synthetic construct
  misc_feature 1..16: note = synthetic [barcode part1]
  source 1..16: mol_type = other DNA
tcttacgagtctggtt

SEQ ID NO: 32761 - DNA, 16 bp, synthetic construct
  misc_feature 1..16: note = synthetic [barcode part1]
  source 1..16: mol_type = other DNA
agtgaggcacactgac

SEQ ID NO: 32762 - DNA, 16 bp, synthetic construct
  misc_feature 1..16: note = synthetic [barcode part1]
  source 1..16: mol_type = other DNA
gaataggtgttcgcct

SEQ ID NO: 32763 - DNA, 16 bp, synthetic construct
  misc_feature 1..16: note = synthetic [barcode part1]
  source 1..16: mol_type = other DNA
tgtagacctcgagtac

SEQ ID NO: 32764 - DNA, 16 bp, synthetic construct
  misc_feature 1..16: note = synthetic [barcode part1]
  source 1..16: mol_type = other DNA
tgcggtctccttaacg

SEQ ID NO: 32765 - DNA, 16 bp, synthetic construct
  misc_feature 1..16: note = synthetic [barcode part1]
  source 1..16: mol_type = other DNA
tacgagttgagacaac

SEQ ID NO: 32766 - DNA, 16 bp, synthetic construct
  misc_feature 1..16: note = synthetic [barcode part1]
  source 1..16: mol_type = other DNA
agaactactggacgcg

SEQ ID NO: 32767 - DNA, 16 bp, synthetic construct
  misc_feature 1..16: note = synthetic [barcode part1]
  source 1..16: mol_type = other DNA
gtgaggtacaggttcg

SEQ ID NO: 32768 - DNA, 16 bp, synthetic construct
  misc_feature 1..16: note = synthetic [barcode part1]
  source 1..16: mol_type = other DNA
gagttgtgagttgtcc

SEQ ID NO: 32769 - DNA, 16 bp, synthetic construct
  misc_feature 1..16: note = synthetic [barcode part1]
  source 1..16: mol_type = other DNA
ttgaccacctctcttg

SEQ ID NO: 32770 - DNA, 16 bp, synthetic construct
  misc_feature 1..16: note = synthetic [barcode part1]
  source 1..16: mol_type = other DNA
tacgactacgtaaccg

SEQ ID NO: 32771 - DNA, 16 bp, synthetic construct
  misc_feature 1..16: note = synthetic [barcode part1]
  source 1..16: mol_type = other DNA
aggtctgcgagagact

SEQ ID NO: 32772 - DNA, 16 bp, synthetic construct
  misc_feature 1..16: note = synthetic [barcode part1]
  source 1..16: mol_type = other DNA
atcttacaacggtggc

SEQ ID NO: 32773 - DNA, 16 bp, synthetic construct
  misc_feature 1..16: note = synthetic [barcode part1]
  source 1..16: mol_type = other DNA
tctccttctctgagac

SEQ ID NO: 32774 - DNA, 16 bp, synthetic construct
  misc_feature 1..16: note = synthetic [barcode part1]
  source 1..16: mol_type = other DNA
gtagttatcctccagt

SEQ ID NO: 32775 - DNA, 16 bp, synthetic construct
  misc_feature 1..16: note = synthetic [barcode part1]
  source 1..16: mol_type = other DNA
accgattaggaaggag

SEQ ID NO: 32776 - DNA, 16 bp, synthetic construct
  misc_feature 1..16: note = synthetic [barcode part1]
  source 1..16: mol_type = other DNA
acgtcctaccgttgac

SEQ ID NO: 32777 - DNA, 16 bp, synthetic construct
  misc_feature 1..16: note = synthetic [barcode part1]
  source 1..16: mol_type = other DNA
aagatactcggatcag

SEQ ID NO: 32778 - DNA, 16 bp, synthetic construct
  misc_feature 1..16: note = synthetic [barcode part1]
  source 1..16: mol_type = other DNA
caggtcctatcgttcg

SEQ ID NO: 32779 - DNA, 16 bp, synthetic construct
  misc_feature 1..16: note = synthetic [barcode part1]
  source 1..16: mol_type = other DNA
gatctgttcaccttag

SEQ ID NO: 32780 - DNA, 16 bp, synthetic construct
  misc_feature 1..16: note = synthetic [barcode part1]
  source 1..16: mol_type = other DNA
tcaatccactcgagtt

SEQ ID NO: 32781 - DNA, 16 bp, synthetic construct
  misc_feature 1..16: note = synthetic [barcode part1]
  source 1..16: mol_type = other DNA
ttctctctcggaactc

SEQ ID NO: 32782 - DNA, 16 bp, synthetic construct
  misc_feature 1..16: note = synthetic [barcode part1]
  source 1..16: mol_type = other DNA
tggcgacaaggtgtac

SEQ ID NO: 32783 - DNA, 16 bp, synthetic construct
  misc_feature 1..16: note = synthetic [barcode part1]
  source 1..16: mol_type = other DNA
acctgtaatcaaggag

SEQ ID NO: 32784 - DNA, 16 bp, synthetic construct
  misc_feature 1..16: note = synthetic [barcode part1]
  source 1..16: mol_type = other DNA
atcctccaaccagaag

SEQ ID NO: 32785 - DNA, 16 bp, synthetic construct
  misc_feature 1..16: note = synthetic [barcode part1]
  source 1..16: mol_type = other DNA
gccttactctatagac

SEQ ID NO: 32786 - DNA, 16 bp, synthetic construct
  misc_feature 1..16: note = synthetic [barcode part1]
  source 1..16: mol_type = other DNA
atcacgagacaggcac

SEQ ID NO: 32787 - DNA, 16 bp, synthetic construct
  misc_feature 1..16: note = synthetic [barcode part1]
  source 1..16: mol_type = other DNA
acggtgactcgtgaag

SEQ ID NO: 32788 - DNA, 16 bp, synthetic construct
  misc_feature 1..16: note = synthetic [barcode part1]
  source 1..16: mol_type = other DNA
ccgtactagtgactcc

SEQ ID NO: 32789 - DNA, 16 bp, synthetic construct
  misc_feature 1..16: note = synthetic [barcode part1]
  source 1..16: mol_type = other DNA
tacacacgtgtgtacg

SEQ ID NO: 32790 - DNA, 16 bp, synthetic construct
  misc_feature 1..16: note = synthetic [barcode part1]
  source 1..16: mol_type = other DNA
actccaagatcgactg

SEQ ID NO: 32791 - DNA, 16 bp, synthetic construct
  misc_feature 1..16: note = synthetic [barcode part1]
  source 1..16: mol_type = other DNA
gacgtgcctaaggaac

SEQ ID NO: 32792 - DNA, 16 bp, synthetic construct
  misc_feature 1..16: note = synthetic [barcode part1]
  source 1..16: mol_type = other DNA
aagaatcgccaatacg

SEQ ID NO: 32793 - DNA, 16 bp, synthetic construct
  misc_feature 1..16: note = synthetic [barcode part1]
  source 1..16: mol_type = other DNA
tctatcgtgcaagtct

SEQ ID NO: 32794 - DNA, 16 bp, synthetic construct
  misc_feature 1..16: note = synthetic [barcode part1]
  source 1..16: mol_type = other DNA
attctcgcgtcagatt

SEQ ID NO: 32795 - DNA, 16 bp, synthetic construct
  misc_feature 1..16: note = synthetic [barcode part1]
  source 1..16: mol_type = other DNA
tcttgtgaaccgttgt

SEQ ID NO: 32796 - DNA, 16 bp, synthetic construct
  misc_feature 1..16: note = synthetic [barcode part1]
  source 1..16: mol_type = other DNA
caagttgttggcgatc

SEQ ID NO: 32797 - DNA, 16 bp, synthetic construct
  misc_feature 1..16: note = synthetic [barcode part1]
  source 1..16: mol_type = other DNA
gactctcgaagtaacc

SEQ ID NO: 32798 - DNA, 16 bp, synthetic construct
  misc_feature 1..16: note = synthetic [barcode part1]
  source 1..16: mol_type = other DNA
gcggattagttcgtgt

SEQ ID NO: 32799 - DNA, 16 bp, synthetic construct
  misc_feature 1..16: note = synthetic [barcode part1]
  source 1..16: mol_type = other DNA
gaccgatagaagaggt

SEQ ID NO: 32800 - DNA, 16 bp, synthetic construct
  misc_feature 1..16: note = synthetic [barcode part1]
  source 1..16: mol_type = other DNA
acggttattagaaggc

SEQ ID NO: 32801 - DNA, 16 bp, synthetic construct
  misc_feature 1..16: note = synthetic [barcode part1]
  source 1..16: mol_type = other DNA
taacacgtagtcttcc

SEQ ID NO: 32802 - DNA, 16 bp, synthetic construct
  misc_feature 1..16: note = synthetic [barcode part1]
  source 1..16: mol_type = other DNA
acgtactgtgagatag

SEQ ID NO: 32803 - DNA, 16 bp, synthetic construct
  misc_feature 1..16: note = synthetic [barcode part1]
  source 1..16: mol_type = other DNA
cgcacctcactagact

SEQ ID NO: 32804 - DNA, 16 bp, synthetic construct
  misc_feature 1..16: note = synthetic [barcode part1]
  source 1..16: mol_type = other DNA
agtaaccgttggactc

SEQ ID NO: 32805 - DNA, 16 bp, synthetic construct
  misc_feature 1..16: note = synthetic [barcode part1]
  source 1..16: mol_type = other DNA
ttgacttgcaatcacc

SEQ ID NO: 32806 - DNA, 16 bp, synthetic construct
  misc_feature 1..16: note = synthetic [barcode part1]
  source 1..16: mol_type = other DNA
agttcctccgaatact

SEQ ID NO: 32807 - DNA, 16 bp, synthetic construct
  misc_feature 1..16: note = synthetic [barcode part1]
  source 1..16: mol_type = other DNA
tcaagaagatccgtag

SEQ ID NO: 32808 - DNA, 16 bp, synthetic construct
  misc_feature 1..16: note = synthetic [barcode part1]
  source 1..16: mol_type = other DNA
ccacgccgataacttc

SEQ ID NO: 32809 - DNA, 16 bp, synthetic construct
  misc_feature 1..16: note = synthetic [barcode part1]
  source 1..16: mol_type = other DNA
caaccaaggccaattc

SEQ ID NO: 32810 - DNA, 16 bp, synthetic construct
  misc_feature 1..16: note = synthetic [barcode part1]
  source 1..16: mol_type = other DNA
tacgtagaggtactcc

SEQ ID NO: 32811 - DNA, 16 bp, synthetic construct
  misc_feature 1..16: note = synthetic [barcode part1]
  source 1..16: mol_type = other DNA
gttatagtccactcgt

SEQ ID NO: 32812 - DNA, 16 bp, synthetic construct
  misc_feature 1..16: note = synthetic [barcode part1]
  source 1..16: mol_type = other DNA
gcagagtcgaataccg

SEQ ID NO: 32813 - DNA, 16 bp, synthetic construct
  misc_feature 1..16: note = synthetic [barcode part1]
  source 1..16: mol_type = other DNA
gtcgtctgtcttatcc

SEQ ID NO: 32814 - DNA, 16 bp, synthetic construct
  misc_feature 1..16: note = synthetic [barcode part1]
  source 1..16: mol_type = other DNA
aactggccttctcctt

SEQ ID NO: 32815 - DNA, 16 bp, synthetic construct
  misc_feature 1..16: note = synthetic [barcode part1]
  source 1..16: mol_type = other DNA
acgccgagttatctcc

SEQ ID NO: 32816 - DNA, 16 bp, synthetic construct
  misc_feature 1..16: note = synthetic [barcode part1]
  source 1..16: mol_type = other DNA
cgtataacaccggtgt

SEQ ID NO: 32817 - DNA, 16 bp, synthetic construct
  misc_feature 1..16: note = synthetic [barcode part1]
  source 1..16: mol_type = other DNA
acgtggttgactacgt

SEQ ID NO: 32818 - DNA, 16 bp, synthetic construct
  misc_feature 1..16: note = synthetic [barcode part1]
  source 1..16: mol_type = other DNA
taggccgttaacgatc

SEQ ID NO: 32819 - DNA, 16 bp, synthetic construct
  misc_feature 1..16: note = synthetic [barcode part1]
  source 1..16: mol_type = other DNA
ccgattcgtaggatac

SEQ ID NO: 32820 - DNA, 16 bp, synthetic construct
  misc_feature 1..16: note = synthetic [barcode part1]
  source 1..16: mol_type = other DNA
cgcaagtgataagact

SEQ ID NO: 32821 - DNA, 16 bp, synthetic construct
  misc_feature 1..16: note = synthetic [barcode part1]
  source 1..16: mol_type = other DNA
cggtaagaacagagtg

SEQ ID NO: 32822 - DNA, 16 bp, synthetic construct
  misc_feature 1..16: note = synthetic [barcode part1]
  source 1..16: mol_type = other DNA
tcagacagaacctacc

SEQ ID NO: 32823 - DNA, 16 bp, synthetic construct
  misc_feature 1..16: note = synthetic [barcode part1]
  source 1..16: mol_type = other DNA
cggtcgtagatattcg

SEQ ID NO: 32824 - DNA, 16 bp, synthetic construct
  misc_feature 1..16: note = synthetic [barcode part1]
  source 1..16: mol_type = other DNA
actcgttacctgtcct

SEQ ID NO: 32825 - DNA, 16 bp, synthetic construct
  misc_feature 1..16: note = synthetic [barcode part1]
  source 1..16: mol_type = other DNA
attgtatcgacgagag

SEQ ID NO: 32826 - DNA, 16 bp, synthetic construct
  misc_feature 1..16: note = synthetic [barcode part1]
  source 1..16: mol_type = other DNA
tcgaatcttcctgtag

SEQ ID NO: 32827 - DNA, 16 bp, synthetic construct
  misc_feature 1..16: note = synthetic [barcode part1]
  source 1..16: mol_type = other DNA
tgacgacaatccggtt

SEQ ID NO: 32828 - DNA, 16 bp, synthetic construct
  misc_feature 1..16: note = synthetic [barcode part1]
  source 1..16: mol_type = other DNA
acgaacgttactcgtg

SEQ ID NO: 32829 - DNA, 16 bp, synthetic construct
  misc_feature 1..16: note = synthetic [barcode part1]
  source 1..16: mol_type = other DNA
cgttaccgaatacttc

SEQ ID NO: 32830 - DNA, 16 bp, synthetic construct
  misc_feature 1..16: note = synthetic [barcode part1]
  source 1..16: mol_type = other DNA
cgtgtcgcaatatacg

SEQ ID NO: 32831 - DNA, 16 bp, synthetic construct
  misc_feature 1..16: note = synthetic [barcode part1]
  source 1..16: mol_type = other DNA
aggcaagacgagtaac

SEQ ID NO: 32832 - DNA, 16 bp, synthetic construct
  misc_feature 1..16: note = synthetic [barcode part1]
  source 1..16: mol_type = other DNA
acgccacctattcacg

SEQ ID NO: 32833 - DNA, 16 bp, synthetic construct
  misc_feature 1..16: note = synthetic [barcode part1]
  source 1..16: mol_type = other DNA
acctatcacgagtggt

SEQ ID NO: 32834 - DNA, 16 bp, synthetic construct
  misc_feature 1..16: note = synthetic [barcode part1]
  source 1..16: mol_type = other DNA
attcgcaagagtggcg

SEQ ID NO: 32835 - DNA, 16 bp, synthetic construct
  misc_feature 1..16: note = synthetic [barcode part1]
  source 1..16: mol_type = other DNA
cgataggtccgagtag

SEQ ID NO: 32836 - DNA, 16 bp, synthetic construct
  misc_feature 1..16: note = synthetic [barcode part1]
  source 1..16: mol_type = other DNA
gatctcagacgttgtg

SEQ ID NO: 32837 - DNA, 16 bp, synthetic construct
  misc_feature 1..16: note = synthetic [barcode part1]
  source 1..16: mol_type = other DNA
tgatcctcgtgcggtt

SEQ ID NO: 32838 - DNA, 16 bp, synthetic construct
  misc_feature 1..16: note = synthetic [barcode part1]
  source 1..16: mol_type = other DNA
cacgaacgtgaactct

SEQ ID NO: 32839 - DNA, 16 bp, synthetic construct
  misc_feature 1..16: note = synthetic [barcode part1]
  source 1..16: mol_type = other DNA
gagatattgacctgag

SEQ ID NO: 32840 - DNA, 16 bp, synthetic construct
  misc_feature 1..16: note = synthetic [barcode part1]
  source 1..16: mol_type = other DNA
ttgtccgtaggactcc

SEQ ID NO: 32841 - DNA, 16 bp, synthetic construct
  misc_feature 1..16: note = synthetic [barcode part1]
  source 1..16: mol_type = other DNA
tcactgatacgaagag

SEQ ID NO: 32842 - DNA, 16 bp, synthetic construct
  misc_feature 1..16: note = synthetic [barcode part1]
  source 1..16: mol_type = other DNA
tatactccgcctctac

SEQ ID NO: 32843 - DNA, 16 bp, synthetic construct
  misc_feature 1..16: note = synthetic [barcode part1]
  source 1..16: mol_type = other DNA
gactgatattgtggcc

SEQ ID NO: 32844 - DNA, 16 bp, synthetic construct
  misc_feature 1..16: note = synthetic [barcode part1]
  source 1..16: mol_type = other DNA
tcggtggtagactatc

SEQ ID NO: 32845 - DNA, 16 bp, synthetic construct
  misc_feature 1..16: note = synthetic [barcode part1]
  source 1..16: mol_type = other DNA
aacagtccagtggttc

SEQ ID NO: 32846 - DNA, 16 bp, synthetic construct
  misc_feature 1..16: note = synthetic [barcode part1]
  source 1..16: mol_type = other DNA
ttctaacgtcgaaggc

SEQ ID NO: 32847 - DNA, 16 bp, synthetic construct
  misc_feature 1..16: note = synthetic [barcode part1]
  source 1..16: mol_type = other DNA
gcgaccaccaattctc

SEQ ID NO: 32848 - DNA, 16 bp, synthetic construct
  misc_feature 1..16: note = synthetic [barcode part1]
  source 1..16: mol_type = other DNA
gacgtgtgtactgact

SEQ ID NO: 32849 - DNA, 16 bp, synthetic construct
  misc_feature 1..16: note = synthetic [barcode part1]
  source 1..16: mol_type = other DNA
gattcgtgacgaggtg

SEQ ID NO: 32850 - DNA, 16 bp, synthetic construct
  misc_feature 1..16: note = synthetic [barcode part1]
  source 1..16: mol_type = other DNA
gccaacgtaggagatc

SEQ ID NO: 32851 - DNA, 16 bp, synthetic construct
  misc_feature 1..16: note = synthetic [barcode part1]
  source 1..16: mol_type = other DNA
cactccggtgaatcct

SEQ ID NO: 32852 - DNA, 16 bp, synthetic construct
  misc_feature 1..16: note = synthetic [barcode part1]
  source 1..16: mol_type = other DNA
agaagaggaagaggag

SEQ ID NO: 32853 - DNA, 16 bp, synthetic construct
  misc_feature 1..16: note = synthetic [barcode part1]
  source 1..16: mol_type = other DNA
agtctacgtggacttg

SEQ ID NO: 32854 - DNA, 16 bp, synthetic construct
  misc_feature 1..16: note = synthetic [barcode part1]
  source 1..16: mol_type = other DNA
gttcctgcaccgaatc

SEQ ID NO: 32855 - DNA, 16 bp, synthetic construct
  misc_feature 1..16: note = synthetic [barcode part1]
  source 1..16: mol_type = other DNA
agacctgatctggact

SEQ ID NO: 32856 - DNA, 16 bp, synthetic construct
  misc_feature 1..16: note = synthetic [barcode part1]
  source 1..16: mol_type = other DNA
tcgtctgcgttgtgac

SEQ ID NO: 32857 - DNA, 16 bp, synthetic construct
  misc_feature 1..16: note = synthetic [barcode part1]
  source 1..16: mol_type = other DNA
gttcgaggttccgtct

SEQ ID NO: 32858 - DNA, 16 bp, synthetic construct
  misc_feature 1..16: note = synthetic [barcode part1]
  source 1..16: mol_type = other DNA
cgtgtaagttcctcgc

SEQ ID NO: 32859 - DNA, 16 bp, synthetic construct
  misc_feature 1..16: note = synthetic [barcode part1]
  source 1..16: mol_type = other DNA
cactctgaagtagtgc

SEQ ID NO: 32860 - DNA, 16 bp, synthetic construct
  misc_feature 1..16: note = synthetic [barcode part1]
  source 1..16: mol_type = other DNA
gcgtagtgagattagt

SEQ ID NO: 32861 - DNA, 16 bp, synthetic construct
  misc_feature 1..16: note = synthetic [barcode part1]
  source 1..16: mol_type = other DNA
gagatatcgcgttctg

SEQ ID NO: 32862 - DNA, 16 bp, synthetic construct
  misc_feature 1..16: note = synthetic [barcode part1]
  source 1..16: mol_type = other DNA
tactccagtggcaagt

SEQ ID NO: 32863 - DNA, 16 bp, synthetic construct
  misc_feature 1..16: note = synthetic [barcode part1]
  source 1..16: mol_type = other DNA
tggactaaccgttgac

SEQ ID NO: 32864 - DNA, 16 bp, synthetic construct
  misc_feature 1..16: note = synthetic [barcode part1]
  source 1..16: mol_type = other DNA
gacagtcttctcgcgt

SEQ ID NO: 32865 - DNA, 16 bp, synthetic construct
  misc_feature 1..16: note = synthetic [barcode part1]
  source 1..16: mol_type = other DNA
aggcactgataagact

SEQ ID NO: 32866 - DNA, 16 bp, synthetic construct
  misc_feature 1..16: note = synthetic [barcode part1]
  source 1..16: mol_type = other DNA
ttccaacacacctagt

SEQ ID NO: 32867 - DNA, 16 bp, synthetic construct
  misc_feature 1..16: note = synthetic [barcode part1]
  source 1..16: mol_type = other DNA
ttacaccttaccgagt

SEQ ID NO: 32868 - DNA, 16 bp, synthetic construct
  misc_feature 1..16: note = synthetic [barcode part1]
  source 1..16: mol_type = other DNA
tgcctacctgtctatc

SEQ ID NO: 32869 - DNA, 16 bp, synthetic construct
  misc_feature 1..16: note = synthetic [barcode part1]
  source 1..16: mol_type = other DNA
cctatccgcgatactg

SEQ ID NO: 32870 - DNA, 16 bp, synthetic construct
  misc_feature 1..16: note = synthetic [barcode part1]
  source 1..16: mol_type = other DNA
gaagaccttgatctcg

SEQ ID NO: 32871 - DNA, 16 bp, synthetic construct
  misc_feature 1..16: note = synthetic [barcode part1]
  source 1..16: mol_type = other DNA
gacttgtgagttcgtg

SEQ ID NO: 32872 - DNA, 16 bp, synthetic construct
  misc_feature 1..16: note = synthetic [barcode part1]
  source 1..16: mol_type = other DNA
tagtctgtaagtcgcg

SEQ ID NO: 32873 - DNA, 16 bp, synthetic construct
  misc_feature 1..16: note = synthetic [barcode part1]
  source 1..16: mol_type = other DNA
accaacgttactacct

SEQ ID NO: 32874 - DNA, 16 bp, synthetic construct
  misc_feature 1..16: note = synthetic [barcode part1]
  source 1..16: mol_type = other DNA
gttggtacttacaggc

SEQ ID NO: 32875 - DNA, 16 bp, synthetic construct
  misc_feature 1..16: note = synthetic [barcode part1]
  source 1..16: mol_type = other DNA
agattgcgcgaagacc

SEQ ID NO: 32876 - DNA, 16 bp, synthetic construct
  misc_feature 1..16: note = synthetic [barcode part1]
  source 1..16: mol_type = other DNA
gattgcgcacgtgatt

SEQ ID NO: 32877 - DNA, 16 bp, synthetic construct
  misc_feature 1..16: note = synthetic [barcode part1]
  source 1..16: mol_type = other DNA
gatctccaaccacacc

SEQ ID NO: 32878 - DNA, 16 bp, synthetic construct
  misc_feature 1..16: note = synthetic [barcode part1]
  source 1..16: mol_type = other DNA
acgtgatacgccaatc

SEQ ID NO: 32879 - DNA, 16 bp, synthetic construct
  misc_feature 1..16: note = synthetic [barcode part1]
  source 1..16: mol_type = other DNA
ttcctcttcaactggc

SEQ ID NO: 32880 - DNA, 16 bp, synthetic construct
  misc_feature 1..16: note = synthetic [barcode part1]
  source 1..16: mol_type = other DNA
ccgaacgttactctgc

SEQ ID NO: 32881 - DNA, 16 bp, synthetic construct
  misc_feature 1..16: note = synthetic [barcode part1]
  source 1..16: mol_type = other DNA
gcgccttcaatctggt

SEQ ID NO: 32882 - DNA, 16 bp, synthetic construct
  misc_feature 1..16: note = synthetic [barcode part1]
  source 1..16: mol_type = other DNA
tccgtacacacttctc

SEQ ID NO: 32883 - DNA, 16 bp, synthetic construct
  misc_feature 1..16: note = synthetic [barcode part1]
  source 1..16: mol_type = other DNA
agattgactctggtcg

SEQ ID NO: 32884 - DNA, 16 bp, synthetic construct
  misc_feature 1..16: note = synthetic [barcode part1]
  source 1..16: mol_type = other DNA
acgtagtcggtgtatc

SEQ ID NO: 32885 - DNA, 16 bp, synthetic construct
  misc_feature 1..16: note = synthetic [barcode part1]
  source 1..16: mol_type = other DNA
taatagttctctgcgc

SEQ ID NO: 32886 - DNA, 16 bp, synthetic construct
  misc_feature 1..16: note = synthetic [barcode part1]
  source 1..16: mol_type = other DNA
tctccgataacgcgtc

SEQ ID NO: 32887 - DNA, 16 bp, synthetic construct
  misc_feature 1..16: note = synthetic [barcode part1]
  source 1..16: mol_type = other DNA
ttaggcgagactcact

SEQ ID NO: 32888 - DNA, 16 bp, synthetic construct
  misc_feature 1..16: note = synthetic [barcode part1]
  source 1..16: mol_type = other DNA
atcgcaacgtcgtaac

SEQ ID NO: 32889 - DNA, 16 bp, synthetic construct
  misc_feature 1..16: note = synthetic [barcode part1]
  source 1..16: mol_type = other DNA
ttctcctgtatcgcac

SEQ ID NO: 32890 - DNA, 16 bp, synthetic construct
  misc_feature 1..16: note = synthetic [barcode part1]
  source 1..16: mol_type = other DNA
accacgaggtaggtgt

SEQ ID NO: 32891 - DNA, 16 bp, synthetic construct
  misc_feature 1..16: note = synthetic [barcode part1]
  source 1..16: mol_type = other DNA
caagtcagaggatatc

SEQ ID NO: 32892 - DNA, 16 bp, synthetic construct
  misc_feature 1..16: note = synthetic [barcode part1]
  source 1..16: mol_type = other DNA
acaccggcctctaatc

SEQ ID NO: 32893 - DNA, 16 bp, synthetic construct
  misc_feature 1..16: note = synthetic [barcode part1]
  source 1..16: mol_type = other DNA
atcgagtacgaggacc

SEQ ID NO: 32894 - DNA, 16 bp, synthetic construct
  misc_feature 1..16: note = synthetic [barcode part1]
  source 1..16: mol_type = other DNA
ccttccagtaactgcg

SEQ ID NO: 32895 - DNA, 16 bp, synthetic construct
  misc_feature 1..16: note = synthetic [barcode part1]
  source 1..16: mol_type = other DNA
tcagaggcacactgag

SEQ ID NO: 32896 - DNA, 16 bp, synthetic construct
  misc_feature 1..16: note = synthetic [barcode part1]
  source 1..16: mol_type = other DNA
acttacgttggacacg

SEQ ID NO: 32897 - DNA, 16 bp, synthetic construct
  misc_feature 1..16: note = synthetic [barcode part1]
  source 1..16: mol_type = other DNA
tgttgtcgtctctcgt

SEQ ID NO: 32898 - DNA, 16 bp, synthetic construct
  misc_feature 1..16: note = synthetic [barcode part1]
  source 1..16: mol_type = other DNA
caggatcacacgtgtt

SEQ ID NO: 32899 - DNA, 16 bp, synthetic construct
  misc_feature 1..16: note = synthetic [barcode part1]
  source 1..16: mol_type = other DNA
ccaagacaggttctgt

SEQ ID NO: 32900 - DNA, 16 bp, synthetic construct
  misc_feature 1..16: note = synthetic [barcode part1]
  source 1..16: mol_type = other DNA
cgtactatcctggtcg

SEQ ID NO: 32901 - DNA, 16 bp, synthetic construct
  misc_feature 1..16: note = synthetic [barcode part1]
  source 1..16: mol_type = other DNA
gccttctcagtacgtg

SEQ ID NO: 32902 - DNA, 16 bp, synthetic construct
  misc_feature 1..16: note = synthetic [barcode part1]
  source 1..16: mol_type = other DNA
tatcactacggagtgc

SEQ ID NO: 32903 - DNA, 16 bp, synthetic construct
  misc_feature 1..16: note = synthetic [barcode part1]
  source 1..16: mol_type = other DNA
atcgtactgacctccg

SEQ ID NO: 32904 - DNA, 16 bp, synthetic construct
  misc_feature 1..16: note = synthetic [barcode part1]
  source 1..16: mol_type = other DNA
ccaacgcaatctcctg

SEQ ID NO: 32905 - DNA, 16 bp, synthetic construct
  misc_feature 1..16: note = synthetic [barcode part1]
  source 1..16: mol_type = other DNA
aattcctcgcaggtcc

SEQ ID NO: 32906 - DNA, 16 bp, synthetic construct
  misc_feature 1..16: note = synthetic [barcode part1]
  source 1..16: mol_type = other DNA
taccagacaccgaatc

SEQ ID NO: 32907 - DNA, 16 bp, synthetic construct
  misc_feature 1..16: note = synthetic [barcode part1]
  source 1..16: mol_type = other DNA
tgcgtcctactagatt

SEQ ID NO: 32908 - DNA, 16 bp, synthetic construct
  misc_feature 1..16: note = synthetic [barcode part1]
  source 1..16: mol_type = other DNA
gaatcctctcttcctg

SEQ ID NO: 32909 - DNA, 16 bp, synthetic construct
  misc_feature 1..16: note = synthetic [barcode part1]
  source 1..16: mol_type = other DNA
tacaacgtcgcctacc

SEQ ID NO: 32910 - DNA, 16 bp, synthetic construct
  misc_feature 1..16: note = synthetic [barcode part1]
  source 1..16: mol_type = other DNA
aagacaagtctgtgac

SEQ ID NO: 32911 - DNA, 16 bp, synthetic construct
  misc_feature 1..16: note = synthetic [barcode part1]
  source 1..16: mol_type = other DNA
aggcagtatatccaag

SEQ ID NO: 32912 - DNA, 16 bp, synthetic construct
  misc_feature 1..16: note = synthetic [barcode part1]
  source 1..16: mol_type = other DNA
agtgaccaccgttagt

SEQ ID NO: 32913 - DNA, 16 bp, synthetic construct
  misc_feature 1..16: note = synthetic [barcode part1]
  source 1..16: mol_type = other DNA
aacgaggcgtaagtcc

SEQ ID NO: 32914 - DNA, 16 bp, synthetic construct
  misc_feature 1..16: note = synthetic [barcode part1]
  source 1..16: mol_type = other DNA
acctaggttaccttgt

SEQ ID NO: 32915 - DNA, 16 bp, synthetic construct
  misc_feature 1..16: note = synthetic [barcode part1]
  source 1..16: mol_type = other DNA
ttggtcctaggtccac

SEQ ID NO: 32916 - DNA, 16 bp, synthetic construct
  misc_feature 1..16: note = synthetic [barcode part1]
  source 1..16: mol_type = other DNA
gattcagatcgagtcc

SEQ ID NO: 32917 - DNA, 16 bp, synthetic construct
  misc_feature 1..16: note = synthetic [barcode part1]
  source 1..16: mol_type = other DNA
gatctgtcactcgaag

SEQ ID NO: 32918 - DNA, 16 bp, synthetic construct
  misc_feature 1..16: note = synthetic [barcode part1]
  source 1..16: mol_type = other DNA
gtgatcaaggactaac

SEQ ID NO: 32919 - DNA, 16 bp, synthetic construct
  misc_feature 1..16: note = synthetic [barcode part1]
  source 1..16: mol_type = other DNA
tggtcgacgcgatatt

SEQ ID NO: 32920 - DNA, 16 bp, synthetic construct
  misc_feature 1..16: note = synthetic [barcode part1]
  source 1..16: mol_type = other DNA
taggttgtgtggaggc

SEQ ID NO: 32921 - DNA, 16 bp, synthetic construct
  misc_feature 1..16: note = synthetic [barcode part1]
  source 1..16: mol_type = other DNA
ttggtgtgttggtacg

SEQ ID NO: 32922 - DNA, 16 bp, synthetic construct
  misc_feature 1..16: note = synthetic [barcode part1]
  source 1..16: mol_type = other DNA
gaccgcgtcttctagt

SEQ ID NO: 32923 - DNA, 16 bp, synthetic construct
  misc_feature 1..16: note = synthetic [barcode part1]
  source 1..16: mol_type = other DNA
attgacctcaaggtcg

SEQ ID NO: 32924 - DNA, 16 bp, synthetic construct
  misc_feature 1..16: note = synthetic [barcode part1]
  source 1..16: mol_type = other DNA
aggcagatccggaatc

SEQ ID NO: 32925 - DNA, 16 bp, synthetic construct
  misc_feature 1..16: note = synthetic [barcode part1]
  source 1..16: mol_type = other DNA
aacgtcagatcctgac

SEQ ID NO: 32926 - DNA, 16 bp, synthetic construct
  misc_feature 1..16: note = synthetic [barcode part1]
  source 1..16: mol_type = other DNA
gtacaacaacctcttc

SEQ ID NO: 32927 - DNA, 16 bp, synthetic construct
  misc_feature 1..16: note = synthetic [barcode part1]
  source 1..16: mol_type = other DNA
tactacttcgcacggc

SEQ ID NO: 32928 - DNA, 16 bp, synthetic construct
  misc_feature 1..16: note = synthetic [barcode part1]
  source 1..16: mol_type = other DNA
atagtaccgcggtact

SEQ ID NO: 32929 - DNA, 16 bp, synthetic construct
  misc_feature 1..16: note = synthetic [barcode part1]
  source 1..16: mol_type = other DNA
cacagtaatccacttc

SEQ ID NO: 32930 - DNA, 16 bp, synthetic construct
  misc_feature 1..16: note = synthetic [barcode part1]
  source 1..16: mol_type = other DNA
ttaacctacggttgtc

SEQ ID NO: 32931 - DNA, 16 bp, synthetic construct
  misc_feature 1..16: note = synthetic [barcode part1]
  source 1..16: mol_type = other DNA
tcaggagttggacgtg

SEQ ID NO: 32932 - DNA, 16 bp, synthetic construct
  misc_feature 1..16: note = synthetic [barcode part1]
  source 1..16: mol_type = other DNA
taaccgtctgcacaag

SEQ ID NO: 32933 - DNA, 16 bp, synthetic construct
  misc_feature 1..16: note = synthetic [barcode part1]
  source 1..16: mol_type = other DNA
tatcgtctactggtgt

SEQ ID NO: 32934 - DNA, 16 bp, synthetic construct
  misc_feature 1..16: note = synthetic [barcode part1]
  source 1..16: mol_type = other DNA
gcacctccgatagtct

SEQ ID NO: 32935 - DNA, 16 bp, synthetic construct
  misc_feature 1..16: note = synthetic [barcode part1]
  source 1..16: mol_type = other DNA
accgcactgtagattg

SEQ ID NO: 32936 - DNA, 16 bp, synthetic construct
  misc_feature 1..16: note = synthetic [barcode part1]
  source 1..16: mol_type = other DNA
ttcagactggaggacg

SEQ ID NO: 32937 - DNA, 16 bp, synthetic construct
  misc_feature 1..16: note = synthetic [barcode part1]
  source 1..16: mol_type = other DNA
actgacagtgactgtc

SEQ ID NO: 32938 - DNA, 16 bp, synthetic construct
  misc_feature 1..16: note = synthetic [barcode part1]
  source 1..16: mol_type = other DNA
tgtggaccttgttgtt

SEQ ID NO: 32939 - DNA, 16 bp, synthetic construct
  misc_feature 1..16: note = synthetic [barcode part1]
  source 1..16: mol_type = other DNA
aggattacctctggtg

SEQ ID NO: 32940 - DNA, 16 bp, synthetic construct
  misc_feature 1..16: note = synthetic [barcode part1]
  source 1..16: mol_type = other DNA
taacctcaagaggcct

SEQ ID NO: 32941 - DNA, 16 bp, synthetic construct
  misc_feature 1..16: note = synthetic [barcode part1]
  source 1..16: mol_type = other DNA
tcgtgttcagatcact

SEQ ID NO: 32942 - DNA, 16 bp, synthetic construct
  misc_feature 1..16: note = synthetic [barcode part1]
  source 1..16: mol_type = other DNA
tgaaggcacctggtag

SEQ ID NO: 32943 - DNA, 16 bp, synthetic construct
  misc_feature 1..16: note = synthetic [barcode part1]
  source 1..16: mol_type = other DNA
acgcgtgattgactac

SEQ ID NO: 32944 - DNA, 16 bp, synthetic construct
  misc_feature 1..16: note = synthetic [barcode part1]
  source 1..16: mol_type = other DNA
gtattcggtggcagag

SEQ ID NO: 32945 - DNA, 16 bp, synthetic construct
  misc_feature 1..16: note = synthetic [barcode part1]
  source 1..16: mol_type = other DNA
cgtcggaagatacgac

SEQ ID NO: 32946 - DNA, 16 bp, synthetic construct
  misc_feature 1..16: note = synthetic [barcode part1]
  source 1..16: mol_type = other DNA
tatactaggtcaggag

SEQ ID NO: 32947 - DNA, 16 bp, synthetic construct
  misc_feature 1..16: note = synthetic [barcode part1]
  source 1..16: mol_type = other DNA
ttgtatccagactgtc

SEQ ID NO: 32948 - DNA, 16 bp, synthetic construct
  misc_feature 1..16: note = synthetic [barcode part1]
  source 1..16: mol_type = other DNA
gagtggactattcgtc

SEQ ID NO: 32949 - DNA, 16 bp, synthetic construct
  misc_feature 1..16: note = synthetic [barcode part1]
  source 1..16: mol_type = other DNA
tatcgacgaagagttg

SEQ ID NO: 32950 - DNA, 16 bp, synthetic construct
  misc_feature 1..16: note = synthetic [barcode part1]
  source 1..16: mol_type = other DNA
atataggcgaactacg

SEQ ID NO: 32951 - DNA, 16 bp, synthetic construct
  misc_feature 1..16: note = synthetic [barcode part1]
  source 1..16: mol_type = other DNA
agacaataggacgacg

SEQ ID NO: 32952 - DNA, 16 bp, synthetic construct
  misc_feature 1..16: note = synthetic [barcode part1]
  source 1..16: mol_type = other DNA
tgtccaatcttcaacg

SEQ ID NO: 32953 - DNA, 16 bp, synthetic construct
  misc_feature 1..16: note = synthetic [barcode part1]
  source 1..16: mol_type = other DNA
ccggacgcctactatt

SEQ ID NO: 32954 - DNA, 16 bp, synthetic construct
  misc_feature 1..16: note = synthetic [barcode part1]
  source 1..16: mol_type = other DNA
acaacgtactgcaacc

SEQ ID NO: 32955 - DNA, 16 bp, synthetic construct
  misc_feature 1..16: note = synthetic [barcode part1]
  source 1..16: mol_type = other DNA
cgcaccaagaagactg

SEQ ID NO: 32956 - DNA, 16 bp, synthetic construct
  misc_feature 1..16: note = synthetic [barcode part1]
  source 1..16: mol_type = other DNA
cactagtctctccgag

SEQ ID NO: 32957 - DNA, 16 bp, synthetic construct
  misc_feature 1..16: note = synthetic [barcode part1]
  source 1..16: mol_type = other DNA
cgtgagtaacggaatt

SEQ ID NO: 32958 - DNA, 16 bp, synthetic construct
  misc_feature 1..16: note = synthetic [barcode part1]
  source 1..16: mol_type = other DNA
cgaaggacgactgtac

SEQ ID NO: 32959 - DNA, 16 bp, synthetic construct
  misc_feature 1..16: note = synthetic [barcode part1]
  source 1..16: mol_type = other DNA
caggcgtaaggatcac

SEQ ID NO: 32960 - DNA, 16 bp, synthetic construct
  misc_feature 1..16: note = synthetic [barcode part1]
  source 1..16: mol_type = other DNA
cgagaagaactctctc

SEQ ID NO: 32961 - DNA, 16 bp, synthetic construct
  misc_feature 1..16: note = synthetic [barcode part1]
  source 1..16: mol_type = other DNA
ccttaacctggcacgt

SEQ ID NO: 32962 - DNA, 16 bp, synthetic construct
  misc_feature 1..16: note = synthetic [barcode part1]
  source 1..16: mol_type = other DNA
actgtaacggagtcct

SEQ ID NO: 32963 - DNA, 16 bp, synthetic construct
  misc_feature 1..16: note = synthetic [barcode part1]
  source 1..16: mol_type = other DNA
agactcgtgcctcgtt

SEQ ID NO: 32964 - DNA, 16 bp, synthetic construct
  misc_feature 1..16: note = synthetic [barcode part1]
  source 1..16: mol_type = other DNA
tcttcaaccgagagac

SEQ ID NO: 32965 - DNA, 16 bp, synthetic construct
  misc_feature 1..16: note = synthetic [barcode part1]
  source 1..16: mol_type = other DNA
aaccacaagtcaagac

SEQ ID NO: 32966 - DNA, 16 bp, synthetic construct
  misc_feature 1..16: note = synthetic [barcode part1]
  source 1..16: mol_type = other DNA
tgacaataggacgtgt

SEQ ID NO: 32967 - DNA, 16 bp, synthetic construct
  misc_feature 1..16: note = synthetic [barcode part1]
  source 1..16: mol_type = other DNA
gtcgaaggtcgtgtag

SEQ ID NO: 32968 - DNA, 16 bp, synthetic construct
  misc_feature 1..16: note = synthetic [barcode part1]
  source 1..16: mol_type = other DNA
gtgtctatccgaacag

SEQ ID NO: 32969 - DNA, 16 bp, synthetic construct
  misc_feature 1..16: note = synthetic [barcode part1]
  source 1..16: mol_type = other DNA
gacaccgttgagattc

SEQ ID NO: 32970 - DNA, 16 bp, synthetic construct
  misc_feature 1..16: note = synthetic [barcode part1]
  source 1..16: mol_type = other DNA
atctgcctctagaatc

SEQ ID NO: 32971 - DNA, 16 bp, synthetic construct
  misc_feature 1..16: note = synthetic [barcode part1]
  source 1..16: mol_type = other DNA
cgcagtacgcctatct

SEQ ID NO: 32972 - DNA, 16 bp, synthetic construct
  misc_feature 1..16: note = synthetic [barcode part1]
  source 1..16: mol_type = other DNA
gcacaagataatccag

SEQ ID NO: 32973 - DNA, 16 bp, synthetic construct
  misc_feature 1..16: note = synthetic [barcode part1]
  source 1..16: mol_type = other DNA
taggacttggttgacc

SEQ ID NO: 32974 - DNA, 16 bp, synthetic construct
  misc_feature 1..16: note = synthetic [barcode part1]
  source 1..16: mol_type = other DNA
cggagtaagattggag

SEQ ID NO: 32975 - DNA, 16 bp, synthetic construct
  misc_feature 1..16: note = synthetic [barcode part1]
  source 1..16: mol_type = other DNA
gcgccttcgacttagt

SEQ ID NO: 32976 - DNA, 16 bp, synthetic construct
  misc_feature 1..16: note = synthetic [barcode part1]
  source 1..16: mol_type = other DNA
gcggttattgactctt

SEQ ID NO: 32977 - DNA, 16 bp, synthetic construct
  misc_feature 1..16: note = synthetic [barcode part1]
  source 1..16: mol_type = other DNA
atcctgtgcgaagtgt

SEQ ID NO: 32978 - DNA, 16 bp, synthetic construct
  misc_feature 1..16: note = synthetic [barcode part1]
  source 1..16: mol_type = other DNA
cgagtgtacgtgatct

SEQ ID NO: 32979 - DNA, 16 bp, synthetic construct
  misc_feature 1..16: note = synthetic [barcode part1]
  source 1..16: mol_type = other DNA
tcaagacacgagtggc

SEQ ID NO: 32980 - DNA, 16 bp, synthetic construct
  misc_feature 1..16: note = synthetic [barcode part1]
  source 1..16: mol_type = other DNA
aatcgaccgaccaatc

SEQ ID NO: 32981 - DNA, 16 bp, synthetic construct
  misc_feature 1..16: note = synthetic [barcode part1]
  source 1..16: mol_type = other DNA
cggagagaactgaagt

SEQ ID NO: 32982 - DNA, 16 bp, synthetic construct
  misc_feature 1..16: note = synthetic [barcode part1]
  source 1..16: mol_type = other DNA
gccaggtgtgaagatc

SEQ ID NO: 32983 - DNA, 16 bp, synthetic construct
  misc_feature 1..16: note = synthetic [barcode part1]
  source 1..16: mol_type = other DNA
atccaaggtaggttcc

SEQ ID NO: 32984 - DNA, 16 bp, synthetic construct
  misc_feature 1..16: note = synthetic [barcode part1]
  source 1..16: mol_type = other DNA
accacttgcctacggt

SEQ ID NO: 32985 - DNA, 16 bp, synthetic construct
  misc_feature 1..16: note = synthetic [barcode part1]
  source 1..16: mol_type = other DNA
ccttacctcacaggtg

SEQ ID NO: 32986 - DNA, 16 bp, synthetic construct
  misc_feature 1..16: note = synthetic [barcode part1]
  source 1..16: mol_type = other DNA
tcctaatacacctgac

SEQ ID NO: 32987 - DNA, 16 bp, synthetic construct
  misc_feature 1..16: note = synthetic [barcode part1]
  source 1..16: mol_type = other DNA
aagtagtaccgttccg

SEQ ID NO: 32988 - DNA, 16 bp, synthetic construct
  misc_feature 1..16: note = synthetic [barcode part1]
  source 1..16: mol_type = other DNA
tgatagagaatccacg

SEQ ID NO: 32989 - DNA, 16 bp, synthetic construct
  misc_feature 1..16: note = synthetic [barcode part1]
  source 1..16: mol_type = other DNA
tgtacttctcggcgac

SEQ ID NO: 32990 - DNA, 16 bp, synthetic construct
  misc_feature 1..16: note = synthetic [barcode part1]
  source 1..16: mol_type = other DNA
agtcgcagagatcggt

SEQ ID NO: 32991 - DNA, 16 bp, synthetic construct
  misc_feature 1..16: note = synthetic [barcode part1]
  source 1..16: mol_type = other DNA
gtcgtataatcgcacg

SEQ ID NO: 32992 - DNA, 16 bp, synthetic construct
  misc_feature 1..16: note = synthetic [barcode part1]
  source 1..16: mol_type = other DNA
gactgacgttgcaact

SEQ ID NO: 32993 - DNA, 16 bp, synthetic construct
  misc_feature 1..16: note = synthetic [barcode part1]
  source 1..16: mol_type = other DNA
atctggagtgagtctc

SEQ ID NO: 32994 - DNA, 16 bp, synthetic construct
  misc_feature 1..16: note = synthetic [barcode part1]
  source 1..16: mol_type = other DNA
actatcttgcctagac

SEQ ID NO: 32995 - DNA, 16 bp, synthetic construct
  misc_feature 1..16: note = synthetic [barcode part1]
  source 1..16: mol_type = other DNA
gtgactacttcctaac

SEQ ID NO: 32996 - DNA, 16 bp, synthetic construct
  misc_feature 1..16: note = synthetic [barcode part1]
  source 1..16: mol_type = other DNA
tgtcagaacagaggcc

SEQ ID NO: 32997 - DNA, 16 bp, synthetic construct
  misc_feature 1..16: note = synthetic [barcode part1]
  source 1..16: mol_type = other DNA
cagatactagtggaac

SEQ ID NO: 32998 - DNA, 16 bp, synthetic construct
  misc_feature 1..16: note = synthetic [barcode part1]
  source 1..16: mol_type = other DNA
tcttcggtcaaggaac

SEQ ID NO: 32999 - DNA, 16 bp, synthetic construct
  misc_feature 1..16: note = synthetic [barcode part1]
  source 1..16: mol_type = other DNA
tcaatccgatacacct

SEQ ID NO: 33000 - DNA, 16 bp, synthetic construct
  misc_feature 1..16: note = synthetic [barcode part1]
  source 1..16: mol_type = other DNA
cacagtggcaatacct

SEQ ID NO: 33001 - DNA, 16 bp, synthetic construct
  misc_feature 1..16: note = synthetic [barcode part1]
  source 1..16: mol_type = other DNA
gtagtctcttgcgtcg

SEQ ID NO: 33002 - DNA, 16 bp, synthetic construct
  misc_feature 1..16: note = synthetic [barcode part1]
  source 1..16: mol_type = other DNA
cagaagacggcgtgtt

SEQ ID NO: 33003 - DNA, 16 bp, synthetic construct
  misc_feature 1..16: note = synthetic [barcode part1]
  source 1..16: mol_type = other DNA
tgcaccttgtcgaacc

SEQ ID NO: 33004 - DNA, 16 bp, synthetic construct
  misc_feature 1..16: note = synthetic [barcode part1]
  source 1..16: mol_type = other DNA
tctgaactgcctcacg

SEQ ID NO: 33005 - DNA, 16 bp, synthetic construct
  misc_feature 1..16: note = synthetic [barcode part1]
  source 1..16: mol_type = other DNA
tctgaccgccaatacc

SEQ ID NO: 33006 - DNA, 16 bp, synthetic construct
  misc_feature 1..16: note = synthetic [barcode part1]
  source 1..16: mol_type = other DNA
caagaggcacacgatc

SEQ ID NO: 33007 - DNA, 16 bp, synthetic construct
  misc_feature 1..16: note = synthetic [barcode part1]
  source 1..16: mol_type = other DNA
gttgatcactgtgacg

SEQ ID NO: 33008 - DNA, 16 bp, synthetic construct
  misc_feature 1..16: note = synthetic [barcode part1]
  source 1..16: mol_type = other DNA
caactagttggtcgac

SEQ ID NO: 33009 - DNA, 16 bp, synthetic construct
  misc_feature 1..16: note = synthetic [barcode part1]
  source 1..16: mol_type = other DNA
tgtagacgagttcgtc

SEQ ID NO: 33010 - DNA, 16 bp, synthetic construct
  misc_feature 1..16: note = synthetic [barcode part1]
  source 1..16: mol_type = other DNA
tcggttcgaatcagac

SEQ ID NO: 33011 - DNA, 16 bp, synthetic construct
  misc_feature 1..16: note = synthetic [barcode part1]
  source 1..16: mol_type = other DNA
ccgaagacacaggttg

SEQ ID NO: 33012 - DNA, 16 bp, synthetic construct
  misc_feature 1..16: note = synthetic [barcode part1]
  source 1..16: mol_type = other DNA
caattagaccgaccgt

SEQ ID NO: 33013 - DNA, 16 bp, synthetic construct
  misc_feature 1..16: note = synthetic [barcode part1]
  source 1..16: mol_type = other DNA
tcaccactctaagtac

SEQ ID NO: 33014 - DNA, 16 bp, synthetic construct
  misc_feature 1..16: note = synthetic [barcode part1]
  source 1..16: mol_type = other DNA
ataccttcggtgattc

SEQ ID NO: 33015 - DNA, 16 bp, synthetic construct
  misc_feature 1..16: note = synthetic [barcode part1]
  source 1..16: mol_type = other DNA
actgtcactagtggtg

SEQ ID NO: 33016 - DNA, 16 bp, synthetic construct
  misc_feature 1..16: note = synthetic [barcode part1]
  source 1..16: mol_type = other DNA
cagtgttctgcaacag

SEQ ID NO: 33017 - DNA, 16 bp, synthetic construct
  misc_feature 1..16: note = synthetic [barcode part1]
  source 1..16: mol_type = other DNA
aatcggtaatcggtcc

SEQ ID NO: 33018 - DNA, 16 bp, synthetic construct
  misc_feature 1..16: note = synthetic [barcode part1]
  source 1..16: mol_type = other DNA
gagtatcacttcactc

SEQ ID NO: 33019 - DNA, 16 bp, synthetic construct
  misc_feature 1..16: note = synthetic [barcode part1]
  source 1..16: mol_type = other DNA
taccgatcgtaaccag

SEQ ID NO: 33020 - DNA, 16 bp, synthetic construct
  misc_feature 1..16: note = synthetic [barcode part1]
  source 1..16: mol_type = other DNA
ataggtcgttaaggac

SEQ ID NO: 33021 - DNA, 16 bp, synthetic construct
  misc_feature 1..16: note = synthetic [barcode part1]
  source 1..16: mol_type = other DNA
atctccggcaatctgc

SEQ ID NO: 33022 - DNA, 16 bp, synthetic construct
  misc_feature 1..16: note = synthetic [barcode part1]
  source 1..16: mol_type = other DNA
agtcgagtagatctag

SEQ ID NO: 33023 - DNA, 16 bp, synthetic construct
  misc_feature 1..16: note = synthetic [barcode part1]
  source 1..16: mol_type = other DNA
actcacactgaacacg

SEQ ID NO: 33024 - DNA, 16 bp, synthetic construct
  misc_feature 1..16: note = synthetic [barcode part1]
  source 1..16: mol_type = other DNA
caggagttactggacg

SEQ ID NO: 33025 - DNA, 16 bp, synthetic construct
  misc_feature 1..16: note = synthetic [barcode part1]
  source 1..16: mol_type = other DNA
accaaggttagtcctg

SEQ ID NO: 33026 - DNA, 16 bp, synthetic construct
  misc_feature 1..16: note = synthetic [barcode part1]
  source 1..16: mol_type = other DNA
gaagagtcacctcact

SEQ ID NO: 33027 - DNA, 16 bp, synthetic construct
  misc_feature 1..16: note = synthetic [barcode part1]
  source 1..16: mol_type = other DNA
tgcactaaggatcaag

SEQ ID NO: 33028 - DNA, 16 bp, synthetic construct
  misc_feature 1..16: note = synthetic [barcode part1]
  source 1..16: mol_type = other DNA
tattcacgcgagtgac

SEQ ID NO: 33029 - DNA, 16 bp, synthetic construct
  misc_feature 1..16: note = synthetic [barcode part1]
  source 1..16: mol_type = other DNA
ccaagtggagttcgtt

SEQ ID NO: 33030 - DNA, 16 bp, synthetic construct
  misc_feature 1..16: note = synthetic [barcode part1]
  source 1..16: mol_type = other DNA
tgtactgcctcggttg

SEQ ID NO: 33031 - DNA, 16 bp, synthetic construct
  misc_feature 1..16: note = synthetic [barcode part1]
  source 1..16: mol_type = other DNA
cagtagtccaggttac

SEQ ID NO: 33032 - DNA, 16 bp, synthetic construct
  misc_feature 1..16: note = synthetic [barcode part1]
  source 1..16: mol_type = other DNA
tcacaagttaccactc

SEQ ID NO: 33033 - DNA, 16 bp, synthetic construct
  misc_feature 1..16: note = synthetic [barcode part1]
  source 1..16: mol_type = other DNA
tacgttgcagtcacag

SEQ ID NO: 33034 - DNA, 16 bp, synthetic construct
  misc_feature 1..16: note = synthetic [barcode part1]
  source 1..16: mol_type = other DNA
aataggaacgcctggc

SEQ ID NO: 33035 - DNA, 16 bp, synthetic construct
  misc_feature 1..16: note = synthetic [barcode part1]
  source 1..16: mol_type = other DNA
agtgcagttcgacgag

SEQ ID NO: 33036 - DNA, 16 bp, synthetic construct
  misc_feature 1..16: note = synthetic [barcode part1]
  source 1..16: mol_type = other DNA
aagaactcggtgcacg

SEQ ID NO: 33037 - DNA, 16 bp, synthetic construct
  misc_feature 1..16: note = synthetic [barcode part1]
  source 1..16: mol_type = other DNA
caagacgacaattacg

SEQ ID NO: 33038 - DNA, 16 bp, synthetic construct
  misc_feature 1..16: note = synthetic [barcode part1]
  source 1..16: mol_type = other DNA
tccggttcagttatac

SEQ ID NO: 33039 - DNA, 16 bp, synthetic construct
  misc_feature 1..16: note = synthetic [barcode part1]
  source 1..16: mol_type = other DNA
ttaacaacaggccacc

SEQ ID NO: 33040 - DNA, 16 bp, synthetic construct
  misc_feature 1..16: note = synthetic [barcode part1]
  source 1..16: mol_type = other DNA
ttgttacagacctacc

SEQ ID NO: 33041 - DNA, 16 bp, synthetic construct
  misc_feature 1..16: note = synthetic [barcode part1]
  source 1..16: mol_type = other DNA
acgaaccagtctacgt

SEQ ID NO: 33042 - DNA, 16 bp, synthetic construct
  misc_feature 1..16: note = synthetic [barcode part1]
  source 1..16: mol_type = other DNA
tcgccgttggaatagt

SEQ ID NO: 33043 - DNA, 16 bp, synthetic construct
  misc_feature 1..16: note = synthetic [barcode part1]
  source 1..16: mol_type = other DNA
gcaaccacaacacgtt

SEQ ID NO: 33044 - DNA, 16 bp, synthetic construct
  misc_feature 1..16: note = synthetic [barcode part1]
  source 1..16: mol_type = other DNA
acagacctaactctct

SEQ ID NO: 33045 - DNA, 16 bp, synthetic construct
  misc_feature 1..16: note = synthetic [barcode part1]
  source 1..16: mol_type = other DNA
tgactctgaccaaggt

SEQ ID NO: 33046 - DNA, 16 bp, synthetic construct
  misc_feature 1..16: note = synthetic [barcode part1]
  source 1..16: mol_type = other DNA
tgcagattctgccgtc

SEQ ID NO: 33047 - DNA, 16 bp, synthetic construct
  misc_feature 1..16: note = synthetic [barcode part1]
  source 1..16: mol_type = other DNA
caaggtcttccagagt

SEQ ID NO: 33048 - DNA, 16 bp, synthetic construct
  misc_feature 1..16: note = synthetic [barcode part1]
  source 1..16: mol_type = other DNA
tgttcgtctgtagtgt

SEQ ID NO: 33049 - DNA, 16 bp, synthetic construct
  misc_feature 1..16: note = synthetic [barcode part1]
  source 1..16: mol_type = other DNA
cgccgttgaattaggt

SEQ ID NO: 33050 - DNA, 16 bp, synthetic construct
  misc_feature 1..16: note = synthetic [barcode part1]
  source 1..16: mol_type = other DNA
gtccaagtggagtggt

SEQ ID NO: 33051 - DNA, 16 bp, synthetic construct
  misc_feature 1..16: note = synthetic [barcode part1]
  source 1..16: mol_type = other DNA
ccggtgacctgtattc

SEQ ID NO: 33052 - DNA, 16 bp, synthetic construct
  misc_feature 1..16: note = synthetic [barcode part1]
  source 1..16: mol_type = other DNA
taggtcagatctgacc

SEQ ID NO: 33053 - DNA, 16 bp, synthetic construct
  misc_feature 1..16: note = synthetic [barcode part1]
  source 1..16: mol_type = other DNA
ttatagtcgactggcg

SEQ ID NO: 33054 - DNA, 16 bp, synthetic construct
  misc_feature 1..16: note = synthetic [barcode part1]
  source 1..16: mol_type = other DNA
gatagtctggtagtcc

SEQ ID NO: 33055 - DNA, 16 bp, synthetic construct
  misc_feature 1..16: note = synthetic [barcode part1]
  source 1..16: mol_type = other DNA
ttgcacagtgttggtg

SEQ ID NO: 33056 - DNA, 16 bp, synthetic construct
  misc_feature 1..16: note = synthetic [barcode part1]
  source 1..16: mol_type = other DNA
agtcggagtggttgtg

SEQ ID NO: 33057 - DNA, 16 bp, synthetic construct
  misc_feature 1..16: note = synthetic [barcode part1]
  source 1..16: mol_type = other DNA
tagacctactctgttg

SEQ ID NO: 33058 - DNA, 16 bp, synthetic construct
  misc_feature 1..16: note = synthetic [barcode part1]
  source 1..16: mol_type = other DNA
cgcgaggtatatcttg

SEQ ID NO: 33059 - DNA, 16 bp, synthetic construct
  misc_feature 1..16: note = synthetic [barcode part1]
  source 1..16: mol_type = other DNA
cctaagaccaactgac

SEQ ID NO: 33060 - DNA, 16 bp, synthetic construct
  misc_feature 1..16: note = synthetic [barcode part1]
  source 1..16: mol_type = other DNA
ccgatccagtacgtct

SEQ ID NO: 33061 - DNA, 16 bp, synthetic construct
  misc_feature 1..16: note = synthetic [barcode part1]
  source 1..16: mol_type = other DNA
tcacagtctgaagtcg

SEQ ID NO: 33062 - DNA, 16 bp, synthetic construct
  misc_feature 1..16: note = synthetic [barcode part1]
  source 1..16: mol_type = other DNA
acggcgtctaactaac

SEQ ID NO: 33063 - DNA, 16 bp, synthetic construct
  misc_feature 1..16: note = synthetic [barcode part1]
  source 1..16: mol_type = other DNA
atcgccgtatactccg

SEQ ID NO: 33064 - DNA, 16 bp, synthetic construct
  misc_feature 1..16: note = synthetic [barcode part1]
  source 1..16: mol_type = other DNA
gtggttaggtcctctc

SEQ ID NO: 33065 - DNA, 16 bp, synthetic construct
  misc_feature 1..16: note = synthetic [barcode part1]
  source 1..16: mol_type = other DNA
acctacagaagactag

SEQ ID NO: 33066 - DNA, 16 bp, synthetic construct
  misc_feature 1..16: note = synthetic [barcode part1]
  source 1..16: mol_type = other DNA
gagaacgacttggcac

SEQ ID NO: 33067 - DNA, 16 bp, synthetic construct
  misc_feature 1..16: note = synthetic [barcode part1]
  source 1..16: mol_type = other DNA
ccgacggaacaatctt

SEQ ID NO: 33068 - DNA, 16 bp, synthetic construct
  misc_feature 1..16: note = synthetic [barcode part1]
  source 1..16: mol_type = other DNA
agttgaccacagtgtc

SEQ ID NO: 33069 - DNA, 16 bp, synthetic construct
  misc_feature 1..16: note = synthetic [barcode part1]
  source 1..16: mol_type = other DNA
aggcaagtgagacctc

SEQ ID NO: 33070 - DNA, 16 bp, synthetic construct
  misc_feature 1..16: note = synthetic [barcode part1]
  source 1..16: mol_type = other DNA
caatagacggatatcg

SEQ ID NO: 33071 - DNA, 16 bp, synthetic construct
  misc_feature 1..16: note = synthetic [barcode part1]
  source 1..16: mol_type = other DNA
cgtacgacaccttatt

SEQ ID NO: 33072 - DNA, 16 bp, synthetic construct
  misc_feature 1..16: note = synthetic [barcode part1]
  source 1..16: mol_type = other DNA
aggatctgagtcctac

SEQ ID NO: 33073 - DNA, 16 bp, synthetic construct
  misc_feature 1..16: note = synthetic [barcode part1]
  source 1..16: mol_type = other DNA
cgaacagattcacctg

SEQ ID NO: 33074 - DNA, 16 bp, synthetic construct
  misc_feature 1..16: note = synthetic [barcode part1]
  source 1..16: mol_type = other DNA
attgacggcaggacac

SEQ ID NO: 33075 - DNA, 16 bp, synthetic construct
  misc_feature 1..16: note = synthetic [barcode part1]
  source 1..16: mol_type = other DNA
gccttcaataaggacc

SEQ ID NO: 33076 - DNA, 16 bp, synthetic construct
  misc_feature 1..16: note = synthetic [barcode part1]
  source 1..16: mol_type = other DNA
cgatagtgaaggtatc

SEQ ID NO: 33077 - DNA, 16 bp, synthetic construct
  misc_feature 1..16: note = synthetic [barcode part1]
  source 1..16: mol_type = other DNA
taaggatacgaaggcg

SEQ ID NO: 33078 - DNA, 16 bp, synthetic construct
  misc_feature 1..16: note = synthetic [barcode part1]
  source 1..16: mol_type = other DNA
agaacgcaactgttag

SEQ ID NO: 33079 - DNA, 16 bp, synthetic construct
  misc_feature 1..16: note = synthetic [barcode part1]
  source 1..16: mol_type = other DNA
tacctcacttgagtgt

SEQ ID NO: 33080 - DNA, 16 bp, synthetic construct
  misc_feature 1..16: note = synthetic [barcode part1]
  source 1..16: mol_type = other DNA
gatctctgcgtaatct

SEQ ID NO: 33081 - DNA, 16 bp, synthetic construct
  misc_feature 1..16: note = synthetic [barcode part1]
  source 1..16: mol_type = other DNA
cgatatccaaggttcg

SEQ ID NO: 33082 - DNA, 16 bp, synthetic construct
  misc_feature 1..16: note = synthetic [barcode part1]
  source 1..16: mol_type = other DNA
tcactccgcgcaattg

SEQ ID NO: 33083 - DNA, 16 bp, synthetic construct
  misc_feature 1..16: note = synthetic [barcode part1]
  source 1..16: mol_type = other DNA
ttgacgtcaacacacg

SEQ ID NO: 33084 - DNA, 16 bp, synthetic construct
  misc_feature 1..16: note = synthetic [barcode part1]
  source 1..16: mol_type = other DNA
tctgaacggtacactg

SEQ ID NO: 33085 - DNA, 16 bp, synthetic construct
  misc_feature 1..16: note = synthetic [barcode part1]
  source 1..16: mol_type = other DNA
ccttcactccaacgag

SEQ ID NO: 33086 - DNA, 16 bp, synthetic construct
  misc_feature 1..16: note = synthetic [barcode part1]
  source 1..16: mol_type = other DNA
agtcacgaccgatact

SEQ ID NO: 33087 - DNA, 16 bp, synthetic construct
  misc_feature 1..16: note = synthetic [barcode part1]
  source 1..16: mol_type = other DNA
cagtcaagaccaactc

SEQ ID NO: 33088 - DNA, 16 bp, synthetic construct
  misc_feature 1..16: note = synthetic [barcode part1]
  source 1..16: mol_type = other DNA
aatctcgcagagttcg

SEQ ID NO: 33089 - DNA, 16 bp, synthetic construct
  misc_feature 1..16: note = synthetic [barcode part1]
  source 1..16: mol_type = other DNA
cgtataccttcgagag

SEQ ID NO: 33090 - DNA, 16 bp, synthetic construct
  misc_feature 1..16: note = synthetic [barcode part1]
  source 1..16: mol_type = other DNA
ccaataatccggtggt

SEQ ID NO: 33091 - DNA, 16 bp, synthetic construct
  misc_feature 1..16: note = synthetic [barcode part1]
  source 1..16: mol_type = other DNA
acgttgtcgaagtctg

SEQ ID NO: 33092 - DNA, 16 bp, synthetic construct
  misc_feature 1..16: note = synthetic [barcode part1]
  source 1..16: mol_type = other DNA
gacacgcaatcctctc

SEQ ID NO: 33093 - DNA, 16 bp, synthetic construct
  misc_feature 1..16: note = synthetic [barcode part1]
  source 1..16: mol_type = other DNA
cgtctgtctcagagtc

SEQ ID NO: 33094 - DNA, 16 bp, synthetic construct
  misc_feature 1..16: note = synthetic [barcode part1]
  source 1..16: mol_type = other DNA
aacggacacctcagag

SEQ ID NO: 33095 - DNA, 16 bp, synthetic construct
  misc_feature 1..16: note = synthetic [barcode part1]
  source 1..16: mol_type = other DNA
gtccacgtaacggaag

SEQ ID NO: 33096 - DNA, 16 bp, synthetic construct
  misc_feature 1..16: note = synthetic [barcode part1]
  source 1..16: mol_type = other DNA
gcggtaatcgttatcg

SEQ ID NO: 33097 - DNA, 16 bp, synthetic construct
  misc_feature 1..16: note = synthetic [barcode part1]
  source 1..16: mol_type = other DNA
cgtcacgattgactag

SEQ ID NO: 33098 - DNA, 16 bp, synthetic construct
  misc_feature 1..16: note = synthetic [barcode part1]
  source 1..16: mol_type = other DNA
acactggagttgcact

SEQ ID NO: 33099 - DNA, 16 bp, synthetic construct
  misc_feature 1..16: note = synthetic [barcode part1]
  source 1..16: mol_type = other DNA
tggcacgatcaggaac

SEQ ID NO: 33100 - DNA, 16 bp, synthetic construct
  misc_feature 1..16: note = synthetic [barcode part1]
  source 1..16: mol_type = other DNA
ttgttcagtagtgtcc

SEQ ID NO: 33101 - DNA, 16 bp, synthetic construct
  misc_feature 1..16: note = synthetic [barcode part1]
  source 1..16: mol_type = other DNA
gactgacttggaacct

SEQ ID NO: 33102 - DNA, 16 bp, synthetic construct
  misc_feature 1..16: note = synthetic [barcode part1]
  source 1..16: mol_type = other DNA
tggcgactgtatctcc

SEQ ID NO: 33103 - DNA, 16 bp, synthetic construct
  misc_feature 1..16: note = synthetic [barcode part1]
  source 1..16: mol_type = other DNA
tgcactacgtgatcag

SEQ ID NO: 33104 - DNA, 16 bp, synthetic construct
  misc_feature 1..16: note = synthetic [barcode part1]
  source 1..16: mol_type = other DNA
gagactgagtcacacg

SEQ ID NO: 33105 - DNA, 16 bp, synthetic construct
  misc_feature 1..16: note = synthetic [barcode part1]
  source 1..16: mol_type = other DNA
tcgaagtctcaggatc

SEQ ID NO: 33106 - DNA, 16 bp, synthetic construct
  misc_feature 1..16: note = synthetic [barcode part1]
  source 1..16: mol_type = other DNA
atagagtacttgcgag

SEQ ID NO: 33107 - DNA, 16 bp, synthetic construct
  misc_feature 1..16: note = synthetic [barcode part1]
  source 1..16: mol_type = other DNA
aggcactcactattct

SEQ ID NO: 33108 - DNA, 16 bp, synthetic construct
  misc_feature 1..16: note = synthetic [barcode part1]
  source 1..16: mol_type = other DNA
ttccgactctccaatc

SEQ ID NO: 33109 - DNA, 16 bp, synthetic construct
  misc_feature 1..16: note = synthetic [barcode part1]
  source 1..16: mol_type = other DNA
attacgaccacgacgt

SEQ ID NO: 33110 - DNA, 16 bp, synthetic construct
  misc_feature 1..16: note = synthetic [barcode part1]
  source 1..16: mol_type = other DNA
gtagatcctgatacgc

SEQ ID NO: 33111 - DNA, 16 bp, synthetic construct
  misc_feature 1..16: note = synthetic [barcode part1]
  source 1..16: mol_type = other DNA
ccaacaataccaggtc

SEQ ID NO: 33112 - DNA, 16 bp, synthetic construct
  misc_feature 1..16: note = synthetic [barcode part1]
  source 1..16: mol_type = other DNA
aagttccttccaggag

SEQ ID NO: 33113 - DNA, 16 bp, synthetic construct
  misc_feature 1..16: note = synthetic [barcode part1]
  source 1..16: mol_type = other DNA
tagtctgtcaccgaag

SEQ ID NO: 33114 - DNA, 16 bp, synthetic construct
  misc_feature 1..16: note = synthetic [barcode part1]
  source 1..16: mol_type = other DNA
tcgcctgattcgttct

SEQ ID NO: 33115 - DNA, 16 bp, synthetic construct
  misc_feature 1..16: note = synthetic [barcode part1]
  source 1..16: mol_type = other DNA
aggaaccacgtaccag

SEQ ID NO: 33116 - DNA, 16 bp, synthetic construct
  misc_feature 1..16: note = synthetic [barcode part1]
  source 1..16: mol_type = other DNA
cacaactgtgcctaag

SEQ ID NO: 33117 - DNA, 16 bp, synthetic construct
  misc_feature 1..16: note = synthetic [barcode part1]
  source 1..16: mol_type = other DNA
caacctctcgatcttc

SEQ ID NO: 33118 - DNA, 16 bp, synthetic construct
  misc_feature 1..16: note = synthetic [barcode part1]
  source 1..16: mol_type = other DNA
gtagaggtggtgactc

SEQ ID NO: 33119 - DNA, 16 bp, synthetic construct
  misc_feature 1..16: note = synthetic [barcode part1]
  source 1..16: mol_type = other DNA
acctatccagaactct

SEQ ID NO: 33120 - DNA, 16 bp, synthetic construct
  misc_feature 1..16: note = synthetic [barcode part1]
  source 1..16: mol_type = other DNA
taattctgtcacgcgt

SEQ ID NO: 33121 - DNA, 16 bp, synthetic construct
  misc_feature 1..16: note = synthetic [barcode part1]
  source 1..16: mol_type = other DNA
tagaagtgtctccacg

SEQ ID NO: 33122 - DNA, 16 bp, synthetic construct
  misc_feature 1..16: note = synthetic [barcode part1]
  source 1..16: mol_type = other DNA
ttctccggtaggatag

SEQ ID NO: 33123 - DNA, 16 bp, synthetic construct
  misc_feature 1..16: note = synthetic [barcode part1]
  source 1..16: mol_type = other DNA
ttgcaccgtagttcgc

SEQ ID NO: 33124 - DNA, 16 bp, synthetic construct
  misc_feature 1..16: note = synthetic [barcode part1]
  source 1..16: mol_type = other DNA
tcgccacgtgataagt

SEQ ID NO: 33125 - DNA, 16 bp, synthetic construct
  misc_feature 1..16: note = synthetic [barcode part1]
  source 1..16: mol_type = other DNA
tgcaatctaacggaag

SEQ ID NO: 33126 - DNA, 16 bp, synthetic construct
  misc_feature 1..16: note = synthetic [barcode part1]
  source 1..16: mol_type = other DNA
gcaataccttcaggac

SEQ ID NO: 33127 - DNA, 16 bp, synthetic construct
  misc_feature 1..16: note = synthetic [barcode part1]
  source 1..16: mol_type = other DNA
caacacaactgtcttc

SEQ ID NO: 33128 - DNA, 16 bp, synthetic construct
  misc_feature 1..16: note = synthetic [barcode part1]
  source 1..16: mol_type = other DNA
gcgtccttaacaactt

SEQ ID NO: 33129 - DNA, 16 bp, synthetic construct
  misc_feature 1..16: note = synthetic [barcode part1]
  source 1..16: mol_type = other DNA
tcgttgcctcagacac

SEQ ID NO: 33130 - DNA, 16 bp, synthetic construct
  misc_feature 1..16: note = synthetic [barcode part1]
  source 1..16: mol_type = other DNA
cagaacgacttggacg

SEQ ID NO: 33131 - DNA, 16 bp, synthetic construct
  misc_feature 1..16: note = synthetic [barcode part1]
  source 1..16: mol_type = other DNA
gtcaatcaggaaggag

SEQ ID NO: 33132 - DNA, 16 bp, synthetic construct
  misc_feature 1..16: note = synthetic [barcode part1]
  source 1..16: mol_type = other DNA
tggatacttcctagtc

SEQ ID NO: 33133 - DNA, 16 bp, synthetic construct
  misc_feature 1..16: note = synthetic [barcode part1]
  source 1..16: mol_type = other DNA
agactactcactaggc

SEQ ID NO: 33134 - DNA, 16 bp, synthetic construct
  misc_feature 1..16: note = synthetic [barcode part1]
  source 1..16: mol_type = other DNA
cctacgcctggtaact

SEQ ID NO: 33135 - DNA, 16 bp, synthetic construct
  misc_feature 1..16: note = synthetic [barcode part1]
  source 1..16: mol_type = other DNA
gaggtaagatactcgt

SEQ ID NO: 33136 - DNA, 16 bp, synthetic construct
  misc_feature 1..16: note = synthetic [barcode part1]
  source 1..16: mol_type = other DNA
gcgcagttggttatac

SEQ ID NO: 33137 - DNA, 16 bp, synthetic construct
  misc_feature 1..16: note = synthetic [barcode part1]
  source 1..16: mol_type = other DNA
ttacaccgacaatcct

SEQ ID NO: 33138 - DNA, 16 bp, synthetic construct
  misc_feature 1..16: note = synthetic [barcode part1]
  source 1..16: mol_type = other DNA
tcggttcacctgagtc

SEQ ID NO: 33139 - DNA, 16 bp, synthetic construct
  misc_feature 1..16: note = synthetic [barcode part1]
  source 1..16: mol_type = other DNA
aacttaggcactcctt

SEQ ID NO: 33140 - DNA, 16 bp, synthetic construct
  misc_feature 1..16: note = synthetic [barcode part1]
  source 1..16: mol_type = other DNA
tgcgtatatcacgacg

SEQ ID NO: 33141 - DNA, 16 bp, synthetic construct
  misc_feature 1..16: note = synthetic [barcode part1]
  source 1..16: mol_type = other DNA
tagattggccactggt

SEQ ID NO: 33142 - DNA, 16 bp, synthetic construct
  misc_feature 1..16: note = synthetic [barcode part1]
  source 1..16: mol_type = other DNA
tgaactgactggactc

SEQ ID NO: 33143 - DNA, 16 bp, synthetic construct
  misc_feature 1..16: note = synthetic [barcode part1]
  source 1..16: mol_type = other DNA
gtaactacgacgcact

SEQ ID NO: 33144 - DNA, 16 bp, synthetic construct
  misc_feature 1..16: note = synthetic [barcode part1]
  source 1..16: mol_type = other DNA
gtaccgatcctgtcgt

SEQ ID NO: 33145 - DNA, 16 bp, synthetic construct
  misc_feature 1..16: note = synthetic [barcode part1]
  source 1..16: mol_type = other DNA
tacggcgttacgatac

SEQ ID NO: 33146 - DNA, 16 bp, synthetic construct
  misc_feature 1..16: note = synthetic [barcode part1]
  source 1..16: mol_type = other DNA
agagagtagacgtctt

SEQ ID NO: 33147 - DNA, 16 bp, synthetic construct
  misc_feature 1..16: note = synthetic [barcode part1]
  source 1..16: mol_type = other DNA
cagttacagacgtctg

SEQ ID NO: 33148 - DNA, 16 bp, synthetic construct
  misc_feature 1..16: note = synthetic [barcode part1]
  source 1..16: mol_type = other DNA
aggtgtcaagtggcgt

SEQ ID NO: 33149 - DNA, 16 bp, synthetic construct
  misc_feature 1..16: note = synthetic [barcode part1]
  source 1..16: mol_type = other DNA
caaggtgtattccgtg

SEQ ID NO: 33150 - DNA, 16 bp, synthetic construct
  misc_feature 1..16: note = synthetic [barcode part1]
  source 1..16: mol_type = other DNA
cagacgtccaagtact

SEQ ID NO: 33151 - DNA, 16 bp, synthetic construct
  misc_feature 1..16: note = synthetic [barcode part1]
  source 1..16: mol_type = other DNA
atctcgacctctcttg

SEQ ID NO: 33152 - DNA, 16 bp, synthetic construct
  misc_feature 1..16: note = synthetic [barcode part1]
  source 1..16: mol_type = other DNA
ccgtaattggtaccag

SEQ ID NO: 33153 - DNA, 16 bp, synthetic construct
  misc_feature 1..16: note = synthetic [barcode part1]
  source 1..16: mol_type = other DNA
acgccttgtcgtcaac

SEQ ID NO: 33154 - DNA, 16 bp, synthetic construct
  misc_feature 1..16: note = synthetic [barcode part1]
  source 1..16: mol_type = other DNA
tcttctacgtcctgtg

SEQ ID NO: 33155 - DNA, 16 bp, synthetic construct
  misc_feature 1..16: note = synthetic [barcode part1]
  source 1..16: mol_type = other DNA
tgtcactctactgcct

SEQ ID NO: 33156 - DNA, 16 bp, synthetic construct
  misc_feature 1..16: note = synthetic [barcode part1]
  source 1..16: mol_type = other DNA
gaacggagatactgcc

SEQ ID NO: 33157 - DNA, 16 bp, synthetic construct
  misc_feature 1..16: note = synthetic [barcode part1]
  source 1..16: mol_type = other DNA
atctccgtatcctcac

SEQ ID NO: 33158 - DNA, 16 bp, synthetic construct
  misc_feature 1..16: note = synthetic [barcode part1]
  source 1..16: mol_type = other DNA
gcctaatcgcgagaag

SEQ ID NO: 33159 - DNA, 16 bp, synthetic construct
  misc_feature 1..16: note = synthetic [barcode part1]
  source 1..16: mol_type = other DNA
gtggaagactaccgac

SEQ ID NO: 33160 - DNA, 16 bp, synthetic construct
  misc_feature 1..16: note = synthetic [barcode part1]
  source 1..16: mol_type = other DNA
gtgaggaatcaggtcc

SEQ ID NO: 33161 - DNA, 16 bp, synthetic construct
  misc_feature 1..16: note = synthetic [barcode part1]
  source 1..16: mol_type = other DNA
tggttcctacacgacc

SEQ ID NO: 33162 - DNA, 16 bp, synthetic construct
  misc_feature 1..16: note = synthetic [barcode part1]
  source 1..16: mol_type = other DNA
ttggtgacgaaggcac

SEQ ID NO: 33163 - DNA, 16 bp, synthetic construct
  misc_feature 1..16: note = synthetic [barcode part1]
  source 1..16: mol_type = other DNA
atagacctgtactggc

SEQ ID NO: 33164 - DNA, 16 bp, synthetic construct
  misc_feature 1..16: note = synthetic [barcode part1]
  source 1..16: mol_type = other DNA
cacaagtcctatcgcc

SEQ ID NO: 33165 - DNA, 16 bp, synthetic construct
  misc_feature 1..16: note = synthetic [barcode part1]
  source 1..16: mol_type = other DNA
tccttctgtcagtcac

SEQ ID NO: 33166 - DNA, 16 bp, synthetic construct
  misc_feature 1..16: note = synthetic [barcode part1]
  source 1..16: mol_type = other DNA
cgtgattccttactag

SEQ ID NO: 33167 - DNA, 16 bp, synthetic construct
  misc_feature 1..16: note = synthetic [barcode part1]
  source 1..16: mol_type = other DNA
ttgaccagtacgtgtg

SEQ ID NO: 33168 - DNA, 16 bp, synthetic construct
  misc_feature 1..16: note = synthetic [barcode part1]
  source 1..16: mol_type = other DNA
tcgacagagtgcgagt

SEQ ID NO: 33169 - DNA, 16 bp, synthetic construct
  misc_feature 1..16: note = synthetic [barcode part1]
  source 1..16: mol_type = other DNA
tatccgagaagatcag

SEQ ID NO: 33170 - DNA, 16 bp, synthetic construct
  misc_feature 1..16: note = synthetic [barcode part1]
  source 1..16: mol_type = other DNA
gtatacgcagtgttgc

SEQ ID NO: 33171 - DNA, 16 bp, synthetic construct
  misc_feature 1..16: note = synthetic [barcode part1]
  source 1..16: mol_type = other DNA
tagattagaggcgtac

SEQ ID NO: 33172 - DNA, 16 bp, synthetic construct
  misc_feature 1..16: note = synthetic [barcode part1]
  source 1..16: mol_type = other DNA
attggacttcgacgac

SEQ ID NO: 33173 - DNA, 16 bp, synthetic construct
  misc_feature 1..16: note = synthetic [barcode part1]
  source 1..16: mol_type = other DNA
gtccggataaggcaac

SEQ ID NO: 33174 - DNA, 16 bp, synthetic construct
  misc_feature 1..16: note = synthetic [barcode part1]
  source 1..16: mol_type = other DNA
caccacctatcctact

SEQ ID NO: 33175 - DNA, 16 bp, synthetic construct
  misc_feature 1..16: note = synthetic [barcode part1]
  source 1..16: mol_type = other DNA
tcaccactgagtgtcc

SEQ ID NO: 33176 - DNA, 16 bp, synthetic construct
  misc_feature 1..16: note = synthetic [barcode part1]
  source 1..16: mol_type = other DNA
tcttcgaacgttggtt

SEQ ID NO: 33177 - DNA, 16 bp, synthetic construct
  misc_feature 1..16: note = synthetic [barcode part1]
  source 1..16: mol_type = other DNA
actctagaaccagtcg

SEQ ID NO: 33178 - DNA, 16 bp, synthetic construct
  misc_feature 1..16: note = synthetic [barcode part1]
  source 1..16: mol_type = other DNA
tgcgcctattcctact

SEQ ID NO: 33179 - DNA, 16 bp, synthetic construct
  misc_feature 1..16: note = synthetic [barcode part1]
  source 1..16: mol_type = other DNA
cgacaacggttatcgt

SEQ ID NO: 33180 - DNA, 16 bp, synthetic construct
  misc_feature 1..16: note = synthetic [barcode part1]
  source 1..16: mol_type = other DNA
ttacgcaggaatcaag

SEQ ID NO: 33181 - DNA, 16 bp, synthetic construct
  misc_feature 1..16: note = synthetic [barcode part1]
  source 1..16: mol_type = other DNA
gagacgtcgataattg

SEQ ID NO: 33182 - DNA, 16 bp, synthetic construct
  misc_feature 1..16: note = synthetic [barcode part1]
  source 1..16: mol_type = other DNA
tcgaacacactgcctc

SEQ ID NO: 33183 - DNA, 16 bp, synthetic construct
  misc_feature 1..16: note = synthetic [barcode part1]
  source 1..16: mol_type = other DNA
cggattgaccgaatct

SEQ ID NO: 33184 - DNA, 16 bp, synthetic construct
  misc_feature 1..16: note = synthetic [barcode part1]
  source 1..16: mol_type = other DNA
ttggtactgacgtacg

SEQ ID NO: 33185 - DNA, 16 bp, synthetic construct
  misc_feature 1..16: note = synthetic [barcode part1]
  source 1..16: mol_type = other DNA
cagaccaccaacagtt

SEQ ID NO: 33186 - DNA, 16 bp, synthetic construct
  misc_feature 1..16: note = synthetic [barcode part1]
  source 1..16: mol_type = other DNA
cgaggaggttgtacgt

SEQ ID NO: 33187 - DNA, 16 bp, synthetic construct
  misc_feature 1..16: note = synthetic [barcode part1]
  source 1..16: mol_type = other DNA
ttcggattccgtagag

SEQ ID NO: 33188 - DNA, 16 bp, synthetic construct
  misc_feature 1..16: note = synthetic [barcode part1]
  source 1..16: mol_type = other DNA
gtggtcctatcctcag

SEQ ID NO: 33189 - DNA, 16 bp, synthetic construct
  misc_feature 1..16: note = synthetic [barcode part1]
  source 1..16: mol_type = other DNA
accaacgtggatctgt

SEQ ID NO: 33190 - DNA, 16 bp, synthetic construct
  misc_feature 1..16: note = synthetic [barcode part1]
  source 1..16: mol_type = other DNA
ttacgtgagttgagag

SEQ ID NO: 33191 - DNA, 16 bp, synthetic construct
  misc_feature 1..16: note = synthetic [barcode part1]
  source 1..16: mol_type = other DNA
aggcacaattagactg

SEQ ID NO: 33192 - DNA, 16 bp, synthetic construct
  misc_feature 1..16: note = synthetic [barcode part1]
  source 1..16: mol_type = other DNA
cctctgtgatacgaag

SEQ ID NO: 33193 - DNA, 16 bp, synthetic construct
  misc_feature 1..16: note = synthetic [barcode part1]
  source 1..16: mol_type = other DNA
cctaagtaagttggag

SEQ ID NO: 33194 - DNA, 16 bp, synthetic construct
  misc_feature 1..16: note = synthetic [barcode part1]
  source 1..16: mol_type = other DNA
agtgataggactcgcg

SEQ ID NO: 33195 - DNA, 16 bp, synthetic construct
  misc_feature 1..16: note = synthetic [barcode part1]
  source 1..16: mol_type = other DNA
cgtgaccgttattccg

SEQ ID NO: 33196 - DNA, 16 bp, synthetic construct
  misc_feature 1..16: note = synthetic [barcode part1]
  source 1..16: mol_type = other DNA
tgtggtgtccaaggtt

SEQ ID NO: 33197 - DNA, 16 bp, synthetic construct
  misc_feature 1..16: note = synthetic [barcode part1]
  source 1..16: mol_type = other DNA
gcagaacagtgtccag

SEQ ID NO: 33198 - DNA, 16 bp, synthetic construct
  misc_feature 1..16: note = synthetic [barcode part1]
  source 1..16: mol_type = other DNA
tagagtcgtacgtacc

SEQ ID NO: 33199 - DNA, 16 bp, synthetic construct
  misc_feature 1..16: note = synthetic [barcode part1]
  source 1..16: mol_type = other DNA
cgtcagagtgattcgt

SEQ ID NO: 33200 - DNA, 16 bp, synthetic construct
  misc_feature 1..16: note = synthetic [barcode part1]
  source 1..16: mol_type = other DNA
tgttctgtgtcgtcct

SEQ ID NO: 33201 - DNA, 16 bp, synthetic construct
  misc_feature 1..16: note = synthetic [barcode part1]
  source 1..16: mol_type = other DNA
gacggtatctactgtg

SEQ ID NO: 33202 - DNA, 16 bp, synthetic construct
  misc_feature 1..16: note = synthetic [barcode part1]
  source 1..16: mol_type = other DNA
tcttatccgtcgtctg

SEQ ID NO: 33203 - DNA, 16 bp, synthetic construct
  misc_feature 1..16: note = synthetic [barcode part1]
  source 1..16: mol_type = other DNA
gcagtatattgaccgc

SEQ ID NO: 33204 - DNA, 16 bp, synthetic construct
  misc_feature 1..16: note = synthetic [barcode part1]
  source 1..16: mol_type = other DNA
tactccgtatcacctc

SEQ ID NO: 33205 - DNA, 16 bp, synthetic construct
  misc_feature 1..16: note = synthetic [barcode part1]
  source 1..16: mol_type = other DNA
cgatagtgattgtcgc

SEQ ID NO: 33206 - DNA, 16 bp, synthetic construct
  misc_feature 1..16: note = synthetic [barcode part1]
  source 1..16: mol_type = other DNA
acaccttgcgtcttct

SEQ ID NO: 33207 - DNA, 16 bp, synthetic construct
  misc_feature 1..16: note = synthetic [barcode part1]
  source 1..16: mol_type = other DNA
tgtctaggaggcagtg

SEQ ID NO: 33208 - DNA, 16 bp, synthetic construct
  misc_feature 1..16: note = synthetic [barcode part1]
  source 1..16: mol_type = other DNA
aacgccagagatctct

SEQ ID NO: 33209 - DNA, 16 bp, synthetic construct
  misc_feature 1..16: note = synthetic [barcode part1]
  source 1..16: mol_type = other DNA
gtgatcggtgtcgatt

SEQ ID NO: 33210 - DNA, 16 bp, synthetic construct
  misc_feature 1..16: note = synthetic [barcode part1]
  source 1..16: mol_type = other DNA
atagattcgacaggac

SEQ ID NO: 33211 - DNA, 16 bp, synthetic construct
  misc_feature 1..16: note = synthetic [barcode part1]
  source 1..16: mol_type = other DNA
cgatacgcaacctcct

SEQ ID NO: 33212 - DNA, 16 bp, synthetic construct
  misc_feature 1..16: note = synthetic [barcode part1]
  source 1..16: mol_type = other DNA
tactaggtaggttgcc

SEQ ID NO: 33213 - DNA, 16 bp, synthetic construct
  misc_feature 1..16: note = synthetic [barcode part1]
  source 1..16: mol_type = other DNA
acgagactgttcggag

SEQ ID NO: 33214 - DNA, 16 bp, synthetic construct
  misc_feature 1..16: note = synthetic [barcode part1]
  source 1..16: mol_type = other DNA
caattaacgcgtgtgc

SEQ ID NO: 33215 - DNA, 16 bp, synthetic construct
  misc_feature 1..16: note = synthetic [barcode part1]
  source 1..16: mol_type = other DNA
cgacgaagaacaacag

SEQ ID NO: 33216 - DNA, 16 bp, synthetic construct
  misc_feature 1..16: note = synthetic [barcode part1]
  source 1..16: mol_type = other DNA
tcagtgtccggaagag

SEQ ID NO: 33217 - DNA, 16 bp, synthetic construct
  misc_feature 1..16: note = synthetic [barcode part1]
  source 1..16: mol_type = other DNA
aggacaacaggtactt

SEQ ID NO: 33218 - DNA, 16 bp, synthetic construct
  misc_feature 1..16: note = synthetic [barcode part1]
  source 1..16: mol_type = other DNA
ccaactctaccttacc

SEQ ID NO: 33219 - DNA, 16 bp, synthetic construct
  misc_feature 1..16: note = synthetic [barcode part1]
  source 1..16: mol_type = other DNA
aggtgtgtcgacaacg

SEQ ID NO: 33220 - DNA, 16 bp, synthetic construct
  misc_feature 1..16: note = synthetic [barcode part1]
  source 1..16: mol_type = other DNA
tggagagacgcactac

SEQ ID NO: 33221 - DNA, 16 bp, synthetic construct
  misc_feature 1..16: note = synthetic [barcode part1]
  source 1..16: mol_type = other DNA
gcgtcggatacaatct

SEQ ID NO: 33222 - DNA, 16 bp, synthetic construct
  misc_feature 1..16: note = synthetic [barcode part1]
  source 1..16: mol_type = other DNA
cgtactctagattgtc

SEQ ID NO: 33223 - DNA, 16 bp, synthetic construct
  misc_feature 1..16: note = synthetic [barcode part1]
  source 1..16: mol_type = other DNA
tcaccgcgaatagtgt

SEQ ID NO: 33224 - DNA, 16 bp, synthetic construct
  misc_feature 1..16: note = synthetic [barcode part1]
  source 1..16: mol_type = other DNA
atcttcgtgtcgagtt

SEQ ID NO: 33225 - DNA, 16 bp, synthetic construct
  misc_feature 1..16: note = synthetic [barcode part1]
  source 1..16: mol_type = other DNA
acttctaacagttcgc

SEQ ID NO: 33226 - DNA, 16 bp, synthetic construct
  misc_feature 1..16: note = synthetic [barcode part1]
  source 1..16: mol_type = other DNA
ttcggtaccgtactcg

SEQ ID NO: 33227 - DNA, 16 bp, synthetic construct
  misc_feature 1..16: note = synthetic [barcode part1]
  source 1..16: mol_type = other DNA
cacctggcaatctctg

SEQ ID NO: 33228 - DNA, 16 bp, synthetic construct
  misc_feature 1..16: note = synthetic [barcode part1]
  source 1..16: mol_type = other DNA
gaagaattctggcctc

SEQ ID NO: 33229 - DNA, 16 bp, synthetic construct
  misc_feature 1..16: note = synthetic [barcode part1]
  source 1..16: mol_type = other DNA
attaggcgtaatccgc

SEQ ID NO: 33230 - DNA, 16 bp, synthetic construct
  misc_feature 1..16: note = synthetic [barcode part1]
  source 1..16: mol_type = other DNA
tgttggacgaactgtc

SEQ ID NO: 33231 - DNA, 16 bp, synthetic construct
  misc_feature 1..16: note = synthetic [barcode part1]
  source 1..16: mol_type = other DNA
ttacttcgcacggtcg

SEQ ID NO: 33232 - DNA, 16 bp, synthetic construct
  misc_feature 1..16: note = synthetic [barcode part1]
  source 1..16: mol_type = other DNA
tggtgttacttactcg

SEQ ID NO: 33233 - DNA, 16 bp, synthetic construct
  misc_feature 1..16: note = synthetic [barcode part1]
  source 1..16: mol_type = other DNA
tcgttatctgtagacc

SEQ ID NO: 33234 - DNA, 16 bp, synthetic construct
  misc_feature 1..16: note = synthetic [barcode part1]
  source 1..16: mol_type = other DNA
gactgactgcaacgtt

SEQ ID NO: 33235 - DNA, 16 bp, synthetic construct
  misc_feature 1..16: note = synthetic [barcode part1]
  source 1..16: mol_type = other DNA
tacgttggtcaacgtg

SEQ ID NO: 33236 - DNA, 16 bp, synthetic construct
  misc_feature 1..16: note = synthetic [barcode part1]
  source 1..16: mol_type = other DNA
tagtaaccgactcggt

SEQ ID NO: 33237 - DNA, 16 bp, synthetic construct
  misc_feature 1..16: note = synthetic [barcode part1]
  source 1..16: mol_type = other DNA
tctgtgtgtcactagt

SEQ ID NO: 33238 - DNA, 16 bp, synthetic construct
  misc_feature 1..16: note = synthetic [barcode part1]
  source 1..16: mol_type = other DNA
gaagtctcctattcac

SEQ ID NO: 33239 - DNA, 16 bp, synthetic construct
  misc_feature 1..16: note = synthetic [barcode part1]
  source 1..16: mol_type = other DNA
actggagtcttgatcg

SEQ ID NO: 33240 - DNA, 16 bp, synthetic construct
  misc_feature 1..16: note = synthetic [barcode part1]
  source 1..16: mol_type = other DNA
agtccaacctccgtac

SEQ ID NO: 33241 - DNA, 16 bp, synthetic construct
  misc_feature 1..16: note = synthetic [barcode part1]
  source 1..16: mol_type = other DNA
aggcgaatactgtggc

SEQ ID NO: 33242 - DNA, 16 bp, synthetic construct
  misc_feature 1..16: note = synthetic [barcode part1]
  source 1..16: mol_type = other DNA
acctcgtaagtattcc

SEQ ID NO: 33243 - DNA, 16 bp, synthetic construct
  misc_feature 1..16: note = synthetic [barcode part1]
  source 1..16: mol_type = other DNA
gtgcgtcctatcactg

SEQ ID NO: 33244 - DNA, 16 bp, synthetic construct
  misc_feature 1..16: note = synthetic [barcode part1]
  source 1..16: mol_type = other DNA
actatctaacgtccac

SEQ ID NO: 33245 - DNA, 16 bp, synthetic construct
  misc_feature 1..16: note = synthetic [barcode part1]
  source 1..16: mol_type = other DNA
atcactgtggtctgag

SEQ ID NO: 33246 - DNA, 16 bp, synthetic construct
  misc_feature 1..16: note = synthetic [barcode part1]
  source 1..16: mol_type = other DNA
cacctctgtattctcg

SEQ ID NO: 33247 - DNA, 16 bp, synthetic construct
  misc_feature 1..16: note = synthetic [barcode part1]
  source 1..16: mol_type = other DNA
ttgcgaaccgtcgttc

SEQ ID NO: 33248 - DNA, 16 bp, synthetic construct
  misc_feature 1..16: note = synthetic [barcode part1]
  source 1..16: mol_type = other DNA
ttggaacctgcagtac

SEQ ID NO: 33249 - DNA, 16 bp, synthetic construct
  misc_feature 1..16: note = synthetic [barcode part1]
  source 1..16: mol_type = other DNA
ttacttccgcactaag

SEQ ID NO: 33250 - DNA, 16 bp, synthetic construct
  misc_feature 1..16: note = synthetic [barcode part1]
  source 1..16: mol_type = other DNA
ttggtgacgaactgtc

SEQ ID NO: 33251 - DNA, 16 bp, synthetic construct
  misc_feature 1..16: note = synthetic [barcode part1]
  source 1..16: mol_type = other DNA
tccggaattcctctct

SEQ ID NO: 33252 - DNA, 16 bp, synthetic construct
  misc_feature 1..16: note = synthetic [barcode part1]
  source 1..16: mol_type = other DNA
cacagaccgaatacct

SEQ ID NO: 33253 - DNA, 16 bp, synthetic construct
  misc_feature 1..16: note = synthetic [barcode part1]
  source 1..16: mol_type = other DNA
aagtcgtgtctccgtc

SEQ ID NO: 33254 - DNA, 16 bp, synthetic construct
  misc_feature 1..16: note = synthetic [barcode part1]
  source 1..16: mol_type = other DNA
gttcgtcctatagtac

SEQ ID NO: 33255 - DNA, 16 bp, synthetic construct
  misc_feature 1..16: note = synthetic [barcode part1]
  source 1..16: mol_type = other DNA
actgtgtatcgcctcg

SEQ ID NO: 33256 - DNA, 16 bp, synthetic construct
  misc_feature 1..16: note = synthetic [barcode part1]
  source 1..16: mol_type = other DNA
ttcggtccacgatcac

SEQ ID NO: 33257 - DNA, 16 bp, synthetic construct
  misc_feature 1..16: note = synthetic [barcode part1]
  source 1..16: mol_type = other DNA
gaggtgaggattcgtc

SEQ ID NO: 33258 - DNA, 16 bp, synthetic construct
  misc_feature 1..16: note = synthetic [barcode part1]
  source 1..16: mol_type = other DNA
tcgactctaagtccgc

SEQ ID NO: 33259 - DNA, 16 bp, synthetic construct
  misc_feature 1..16: note = synthetic [barcode part1]
  source 1..16: mol_type = other DNA
aacacgttgcacaacc

SEQ ID NO: 33260 - DNA, 16 bp, synthetic construct
  misc_feature 1..16: note = synthetic [barcode part1]
  source 1..16: mol_type = other DNA
tgcggatcagaacggt

SEQ ID NO: 33261 - DNA, 16 bp, synthetic construct
  misc_feature 1..16: note = synthetic [barcode part1]
  source 1..16: mol_type = other DNA
agttaattgtggcgcc

SEQ ID NO: 33262 - DNA, 16 bp, synthetic construct
  misc_feature 1..16: note = synthetic [barcode part1]
  source 1..16: mol_type = other DNA
gtaaggcaagtccgtg

SEQ ID NO: 33263 - DNA, 16 bp, synthetic construct
  misc_feature 1..16: note = synthetic [barcode part1]
  source 1..16: mol_type = other DNA
gcactagtcttcgatt

SEQ ID NO: 33264 - DNA, 16 bp, synthetic construct
  misc_feature 1..16: note = synthetic [barcode part1]
  source 1..16: mol_type = other DNA
attgtaacctactcgc

SEQ ID NO: 33265 - DNA, 16 bp, synthetic construct
  misc_feature 1..16: note = synthetic [barcode part1]
  source 1..16: mol_type = other DNA
tcggtcctaggagatt

SEQ ID NO: 33266 - DNA, 16 bp, synthetic construct
  misc_feature 1..16: note = synthetic [barcode part1]
  source 1..16: mol_type = other DNA
cacttgcgtaacgtcc

SEQ ID NO: 33267 - DNA, 16 bp, synthetic construct
  misc_feature 1..16: note = synthetic [barcode part1]
  source 1..16: mol_type = other DNA
gcctgtctaagattct

SEQ ID NO: 33268 - DNA, 16 bp, synthetic construct
  misc_feature 1..16: note = synthetic [barcode part1]
  source 1..16: mol_type = other DNA
attaccgccttcgcag

SEQ ID NO: 33269 - DNA, 16 bp, synthetic construct
  misc_feature 1..16: note = synthetic [barcode part1]
  source 1..16: mol_type = other DNA
aggcctgtctagtctc

SEQ ID NO: 33270 - DNA, 16 bp, synthetic construct
  misc_feature 1..16: note = synthetic [barcode part1]
  source 1..16: mol_type = other DNA
tgccttaccgtcttgt

SEQ ID NO: 33271 - DNA, 16 bp, synthetic construct
  misc_feature 1..16: note = synthetic [barcode part1]
  source 1..16: mol_type = other DNA
gtggaccgttaccttc

SEQ ID NO: 33272 - DNA, 16 bp, synthetic construct
  misc_feature 1..16: note = synthetic [barcode part1]
  source 1..16: mol_type = other DNA
cgaagtctacgtacgt

SEQ ID NO: 33273 - DNA, 16 bp, synthetic construct
  misc_feature 1..16: note = synthetic [barcode part1]
  source 1..16: mol_type = other DNA
ttaccacacttcgcct

SEQ ID NO: 33274 - DNA, 16 bp, synthetic construct
  misc_feature 1..16: note = synthetic [barcode part1]
  source 1..16: mol_type = other DNA
gtcttgtggatactct

SEQ ID NO: 33275 - DNA, 16 bp, synthetic construct
  misc_feature 1..16: note = synthetic [barcode part1]
  source 1..16: mol_type = other DNA
tgtcactgacgtatct

SEQ ID NO: 33276 - DNA, 16 bp, synthetic construct
  misc_feature 1..16: note = synthetic [barcode part1]
  source 1..16: mol_type = other DNA
gcctaggatctcgttc

SEQ ID NO: 33277 - DNA, 16 bp, synthetic construct
  misc_feature 1..16: note = synthetic [barcode part1]
  source 1..16: mol_type = other DNA
tccaagaatcgactgc

SEQ ID NO: 33278 - DNA, 16 bp, synthetic construct
  misc_feature 1..16: note = synthetic [barcode part1]
  source 1..16: mol_type = other DNA
tcttcggtagttgcgc

SEQ ID NO: 33279 - DNA, 16 bp, synthetic construct
  misc_feature 1..16: note = synthetic [barcode part1]
  source 1..16: mol_type = other DNA
agtaggcaacaggtag

SEQ ID NO: 33280 - DNA, 16 bp, synthetic construct
  misc_feature 1..16: note = synthetic [barcode part1]
  source 1..16: mol_type = other DNA
gttaccacgataaccg

SEQ ID NO: 33281 - DNA, 16 bp, synthetic construct
  misc_feature 1..16: note = synthetic [barcode part1]
  source 1..16: mol_type = other DNA
gatctcactacctgcg

SEQ ID NO: 33282 - DNA, 16 bp, synthetic construct
  misc_feature 1..16: note = synthetic [barcode part1]
  source 1..16: mol_type = other DNA
tatcaccaggtatcct

SEQ ID NO: 33283 - DNA, 16 bp, synthetic construct
  misc_feature 1..16: note = synthetic [barcode part1]
  source 1..16: mol_type = other DNA
cctatagtctgttacg

SEQ ID NO: 33284 - DNA, 16 bp, synthetic construct
  misc_feature 1..16: note = synthetic [barcode part1]
  source 1..16: mol_type = other DNA
agatcacactcgacac

SEQ ID NO: 33285 - DNA, 16 bp, synthetic construct
  misc_feature 1..16: note = synthetic [barcode part1]
  source 1..16: mol_type = other DNA
caggtcacctctgtgt

SEQ ID NO: 33286 - DNA, 16 bp, synthetic construct
  misc_feature 1..16: note = synthetic [barcode part1]
  source 1..16: mol_type = other DNA
taccaggtcgtcaagt

SEQ ID NO: 33287 - DNA, 16 bp, synthetic construct
  misc_feature 1..16: note = synthetic [barcode part1]
  source 1..16: mol_type = other DNA
cggtcttacaccagtc

SEQ ID NO: 33288 - DNA, 16 bp, synthetic construct
  misc_feature 1..16: note = synthetic [barcode part1]
  source 1..16: mol_type = other DNA
tacacactaatcggcg

SEQ ID NO: 33289 - DNA, 16 bp, synthetic construct
  misc_feature 1..16: note = synthetic [barcode part1]
  source 1..16: mol_type = other DNA
gtacctcttcttgcac

SEQ ID NO: 33290 - DNA, 16 bp, synthetic construct
  misc_feature 1..16: note = synthetic [barcode part1]
  source 1..16: mol_type = other DNA
acagatccgatagaac

SEQ ID NO: 33291 - DNA, 16 bp, synthetic construct
  misc_feature 1..16: note = synthetic [barcode part1]
  source 1..16: mol_type = other DNA
tctctctgaccgattc

SEQ ID NO: 33292 - DNA, 16 bp, synthetic construct
  misc_feature 1..16: note = synthetic [barcode part1]
  source 1..16: mol_type = other DNA
tctcacggccactaac

SEQ ID NO: 33293 - DNA, 16 bp, synthetic construct
  misc_feature 1..16: note = synthetic [barcode part1]
  source 1..16: mol_type = other DNA
cctctggaactcttct

SEQ ID NO: 33294 - DNA, 16 bp, synthetic construct
  misc_feature 1..16: note = synthetic [barcode part1]
  source 1..16: mol_type = other DNA
tagtcaacggtcggtt

SEQ ID NO: 33295 - DNA, 16 bp, synthetic construct
  misc_feature 1..16: note = synthetic [barcode part1]
  source 1..16: mol_type = other DNA
tggtaactgcgtctcc

SEQ ID NO: 33296 - DNA, 16 bp, synthetic construct
  misc_feature 1..16: note = synthetic [barcode part1]
  source 1..16: mol_type = other DNA
gttacggatccgcctt

SEQ ID NO: 33297 - DNA, 16 bp, synthetic construct
  misc_feature 1..16: note = synthetic [barcode part1]
  source 1..16: mol_type = other DNA
ttgttgttgccactcc

SEQ ID NO: 33298 - DNA, 16 bp, synthetic construct
  misc_feature 1..16: note = synthetic [barcode part1]
  source 1..16: mol_type = other DNA
gtccaaggcaataagt

SEQ ID NO: 33299 - DNA, 16 bp, synthetic construct
  misc_feature 1..16: note = synthetic [barcode part1]
  source 1..16: mol_type = other DNA
ccttcagtgtgtggtc

SEQ ID NO: 33300 - DNA, 16 bp, synthetic construct
  misc_feature 1..16: note = synthetic [barcode part1]
  source 1..16: mol_type = other DNA
aacggagacgtagtcc

SEQ ID NO: 33301 - DNA, 16 bp, synthetic construct
  misc_feature 1..16: note = synthetic [barcode part1]
  source 1..16: mol_type = other DNA
atacgaccacgtagtc

SEQ ID NO: 33302 - DNA, 16 bp, synthetic construct
  misc_feature 1..16: note = synthetic [barcode part1]
  source 1..16: mol_type = other DNA
tacggccgtcaagaag

SEQ ID NO: 33303 - DNA, 16 bp, synthetic construct
  misc_feature 1..16: note = synthetic [barcode part1]
  source 1..16: mol_type = other DNA
tgtgaacggcgagatc

SEQ ID NO: 33304 - DNA, 16 bp, synthetic construct
  misc_feature 1..16: note = synthetic [barcode part1]
  source 1..16: mol_type = other DNA
ccttcgaactggtacc

SEQ ID NO: 33305 - DNA, 16 bp, synthetic construct
  misc_feature 1..16: note = synthetic [barcode part1]
  source 1..16: mol_type = other DNA
aggaataacttgacgc

SEQ ID NO: 33306 - DNA, 16 bp, synthetic construct
  misc_feature 1..16: note = synthetic [barcode part1]
  source 1..16: mol_type = other DNA
cagaatcaccgactac

SEQ ID NO: 33307 - DNA, 16 bp, synthetic construct
  misc_feature 1..16: note = synthetic [barcode part1]
  source 1..16: mol_type = other DNA
cgtacttctcggcagt

SEQ ID NO: 33308 - DNA, 16 bp, synthetic construct
  misc_feature 1..16: note = synthetic [barcode part1]
  source 1..16: mol_type = other DNA
aatccttccgacgtgc

SEQ ID NO: 33309 - DNA, 16 bp, synthetic construct
  misc_feature 1..16: note = synthetic [barcode part1]
  source 1..16: mol_type = other DNA
aacactgtgactggtc

SEQ ID NO: 33310 - DNA, 16 bp, synthetic construct
  misc_feature 1..16: note = synthetic [barcode part1]
  source 1..16: mol_type = other DNA
tgaggcaaggcacttg

SEQ ID NO: 33311 - DNA, 16 bp, synthetic construct
  misc_feature 1..16: note = synthetic [barcode part1]
  source 1..16: mol_type = other DNA
cgcacagaatacactc

SEQ ID NO: 33312 - DNA, 16 bp, synthetic construct
  misc_feature 1..16: note = synthetic [barcode part1]
  source 1..16: mol_type = other DNA
gatctaatcggcggtt

SEQ ID NO: 33313 - DNA, 16 bp, synthetic construct
  misc_feature 1..16: note = synthetic [barcode part1]
  source 1..16: mol_type = other DNA
ttcagagatcacggtc

SEQ ID NO: 33314 - DNA, 16 bp, synthetic construct
  misc_feature 1..16: note = synthetic [barcode part1]
  source 1..16: mol_type = other DNA
gaccacgaatctctcc

SEQ ID NO: 33315 - DNA, 16 bp, synthetic construct
  misc_feature 1..16: note = synthetic [barcode part1]
  source 1..16: mol_type = other DNA
tagtgacgtcaccaac

SEQ ID NO: 33316 - DNA, 16 bp, synthetic construct
  misc_feature 1..16: note = synthetic [barcode part1]
  source 1..16: mol_type = other DNA
cgaagacttgtactcg

SEQ ID NO: 33317 - DNA, 16 bp, synthetic construct
  misc_feature 1..16: note = synthetic [barcode part1]
  source 1..16: mol_type = other DNA
cagtaggcagagtaag

SEQ ID NO: 33318 - DNA, 16 bp, synthetic construct
  misc_feature 1..16: note = synthetic [barcode part1]
  source 1..16: mol_type = other DNA
tcaacgtgttggtacg

SEQ ID NO: 33319 - DNA, 16 bp, synthetic construct
  misc_feature 1..16: note = synthetic [barcode part1]
  source 1..16: mol_type = other DNA
tgcgcaagtaggacgt

SEQ ID NO: 33320 - DNA, 16 bp, synthetic construct
  misc_feature 1..16: note = synthetic [barcode part1]
  source 1..16: mol_type = other DNA
taaccactctaactcg

SEQ ID NO: 33321 - DNA, 16 bp, synthetic construct
  misc_feature 1..16: note = synthetic [barcode part1]
  source 1..16: mol_type = other DNA
aatcacggacctctcc

SEQ ID NO: 33322 - DNA, 16 bp, synthetic construct
  misc_feature 1..16: note = synthetic [barcode part1]
  source 1..16: mol_type = other DNA
tatcgccagatatctc

SEQ ID NO: 33323 - DNA, 16 bp, synthetic construct
  misc_feature 1..16: note = synthetic [barcode part1]
  source 1..16: mol_type = other DNA
gcaacagagacacctg

SEQ ID NO: 33324 - DNA, 16 bp, synthetic construct
  misc_feature 1..16: note = synthetic [barcode part1]
  source 1..16: mol_type = other DNA
tgtgtcagaggaaccg

SEQ ID NO: 33325 - DNA, 16 bp, synthetic construct
  misc_feature 1..16: note = synthetic [barcode part1]
  source 1..16: mol_type = other DNA
gatcacaatcggtgtc

SEQ ID NO: 33326 - DNA, 16 bp, synthetic construct
  misc_feature 1..16: note = synthetic [barcode part1]
  source 1..16: mol_type = other DNA
taagtatctctcggtc

SEQ ID NO: 33327 - DNA, 16 bp, synthetic construct
  misc_feature 1..16: note = synthetic [barcode part1]
  source 1..16: mol_type = other DNA
tcaacacggagttaag

SEQ ID NO: 33328 - DNA, 16 bp, synthetic construct
  misc_feature 1..16: note = synthetic [barcode part1]
  source 1..16: mol_type = other DNA
aagttaggccagtgcg

SEQ ID NO: 33329 - DNA, 16 bp, synthetic construct
  misc_feature 1..16: note = synthetic [barcode part1]
  source 1..16: mol_type = other DNA
cggtgtgtaatagaac

SEQ ID NO: 33330 - DNA, 16 bp, synthetic construct
  misc_feature 1..16: note = synthetic [barcode part1]
  source 1..16: mol_type = other DNA
tgtagtcttggcgtag

SEQ ID NO: 33331 - DNA, 16 bp, synthetic construct
  misc_feature 1..16: note = synthetic [barcode part1]
  source 1..16: mol_type = other DNA
ccgtctagagttccac

SEQ ID NO: 33332 - DNA, 16 bp, synthetic construct
  misc_feature 1..16: note = synthetic [barcode part1]
  source 1..16: mol_type = other DNA
gttcctgttcaacaac

SEQ ID NO: 33333 - DNA, 16 bp, synthetic construct
  misc_feature 1..16: note = synthetic [barcode part1]
  source 1..16: mol_type = other DNA
agacgccgataaggtc

SEQ ID NO: 33334 - DNA, 16 bp, synthetic construct
  misc_feature 1..16: note = synthetic [barcode part1]
  source 1..16: mol_type = other DNA
aaccacttccagtgag

SEQ ID NO: 33335 - DNA, 16 bp, synthetic construct
  misc_feature 1..16: note = synthetic [barcode part1]
  source 1..16: mol_type = other DNA
acaatagatagtcgcg

SEQ ID NO: 33336 - DNA, 16 bp, synthetic construct
  misc_feature 1..16: note = synthetic [barcode part1]
  source 1..16: mol_type = other DNA
aggcacctgttacctc

SEQ ID NO: 33337 - DNA, 16 bp, synthetic construct
  misc_feature 1..16: note = synthetic [barcode part1]
  source 1..16: mol_type = other DNA
tcttggccttctagtc

SEQ ID NO: 33338 - DNA, 16 bp, synthetic construct
  misc_feature 1..16: note = synthetic [barcode part1]
  source 1..16: mol_type = other DNA
aaggacgttcgataac

SEQ ID NO: 33339 - DNA, 16 bp, synthetic construct
  misc_feature 1..16: note = synthetic [barcode part1]
  source 1..16: mol_type = other DNA
gaggtacgttgttaag

SEQ ID NO: 33340 - DNA, 16 bp, synthetic construct
  misc_feature 1..16: note = synthetic [barcode part1]
  source 1..16: mol_type = other DNA
acgccaatcagtacgt

SEQ ID NO: 33341 - DNA, 16 bp, synthetic construct
  misc_feature 1..16: note = synthetic [barcode part1]
  source 1..16: mol_type = other DNA
tctatcggatctgtgt

SEQ ID NO: 33342 - DNA, 16 bp, synthetic construct
  misc_feature 1..16: note = synthetic [barcode part1]
  source 1..16: mol_type = other DNA
agattgatcggtctcg

SEQ ID NO: 33343 - DNA, 16 bp, synthetic construct
  misc_feature 1..16: note = synthetic [barcode part1]
  source 1..16: mol_type = other DNA
ttgccgcgtaataggt

SEQ ID NO: 33344 - DNA, 16 bp, synthetic construct
  misc_feature 1..16: note = synthetic [barcode part1]
  source 1..16: mol_type = other DNA
ttcctgagtgttgact

SEQ ID NO: 33345 - DNA, 16 bp, synthetic construct
  misc_feature 1..16: note = synthetic [barcode part1]
  source 1..16: mol_type = other DNA
cggcagtagtctaatc

SEQ ID NO: 33346 - DNA, 16 bp, synthetic construct
  misc_feature 1..16: note = synthetic [barcode part1]
  source 1..16: mol_type = other DNA
acaaggacgtgaaggt

SEQ ID NO: 33347 - DNA, 16 bp, synthetic construct
  misc_feature 1..16: note = synthetic [barcode part1]
  source 1..16: mol_type = other DNA
cggtccttgcgtaact

SEQ ID NO: 33348 - DNA, 16 bp, synthetic construct
  misc_feature 1..16: note = synthetic [barcode part1]
  source 1..16: mol_type = other DNA
agaagattgtcggcgc

SEQ ID NO: 33349 - DNA, 16 bp, synthetic construct
  misc_feature 1..16: note = synthetic [barcode part1]
  source 1..16: mol_type = other DNA
tgagtcagttgttggc

SEQ ID NO: 33350 - DNA, 16 bp, synthetic construct
  misc_feature 1..16: note = synthetic [barcode part1]
  source 1..16: mol_type = other DNA
atagtaggcaaccgcg

SEQ ID NO: 33351 - DNA, 16 bp, synthetic construct
  misc_feature 1..16: note = synthetic [barcode part1]
  source 1..16: mol_type = other DNA
gtggttattgaaggac

SEQ ID NO: 33352 - DNA, 16 bp, synthetic construct
  misc_feature 1..16: note = synthetic [barcode part1]
  source 1..16: mol_type = other DNA
cgagtgttacgtcagt

SEQ ID NO: 33353 - DNA, 16 bp, synthetic construct
  misc_feature 1..16: note = synthetic [barcode part1]
  source 1..16: mol_type = other DNA
gtacttctgcggaagt

SEQ ID NO: 33354 - DNA, 16 bp, synthetic construct
  misc_feature 1..16: note = synthetic [barcode part1]
  source 1..16: mol_type = other DNA
acgtagtgagagattc

SEQ ID NO: 33355 - DNA, 16 bp, synthetic construct
  misc_feature 1..16: note = synthetic [barcode part1]
  source 1..16: mol_type = other DNA
tgcctctactagaccg

SEQ ID NO: 33356 - DNA, 16 bp, synthetic construct
  misc_feature 1..16: note = synthetic [barcode part1]
  source 1..16: mol_type = other DNA
acaactgtgcacagtc

SEQ ID NO: 33357 - DNA, 16 bp, synthetic construct
  misc_feature 1..16: note = synthetic [barcode part1]
  source 1..16: mol_type = other DNA
cgtcaggtaagttacc

SEQ ID NO: 33358 - DNA, 16 bp, synthetic construct
  misc_feature 1..16: note = synthetic [barcode part1]
  source 1..16: mol_type = other DNA
cgatatcttgttcgtg

SEQ ID NO: 33359 - DNA, 16 bp, synthetic construct
  misc_feature 1..16: note = synthetic [barcode part1]
  source 1..16: mol_type = other DNA
gatcaggtattggtag

SEQ ID NO: 33360 - DNA, 16 bp, synthetic construct
  misc_feature 1..16: note = synthetic [barcode part1]
  source 1..16: mol_type = other DNA
gacaactcggtagttc

SEQ ID NO: 33361 - DNA, 16 bp, synthetic construct
  misc_feature 1..16: note = synthetic [barcode part1]
  source 1..16: mol_type = other DNA
taggatatcaccaccg

SEQ ID NO: 33362 - DNA, 16 bp, synthetic construct
  misc_feature 1..16: note = synthetic [barcode part1]
  source 1..16: mol_type = other DNA
attctacggactaggc

SEQ ID NO: 33363 - DNA, 16 bp, synthetic construct
  misc_feature 1..16: note = synthetic [barcode part1]
  source 1..16: mol_type = other DNA
tgacggttagtctggt

SEQ ID NO: 33364 - DNA, 16 bp, synthetic construct
  misc_feature 1..16: note = synthetic [barcode part1]
  source 1..16: mol_type = other DNA
aatagtgtggacgccg

SEQ ID NO: 33365 - DNA, 16 bp, synthetic construct
  misc_feature 1..16: note = synthetic [barcode part1]
  source 1..16: mol_type = other DNA
gcgcctagaataatag

SEQ ID NO: 33366 - DNA, 16 bp, synthetic construct
  misc_feature 1..16: note = synthetic [barcode part1]
  source 1..16: mol_type = other DNA
tattacacgcagtgcg

SEQ ID NO: 33367 - DNA, 16 bp, synthetic construct
  misc_feature 1..16: note = synthetic [barcode part1]
  source 1..16: mol_type = other DNA
gtgtcagacacgactt

SEQ ID NO: 33368 - DNA, 16 bp, synthetic construct
  misc_feature 1..16: note = synthetic [barcode part1]
  source 1..16: mol_type = other DNA
ttgagtgttactctgc

SEQ ID NO: 33369 - DNA, 16 bp, synthetic construct
  misc_feature 1..16: note = synthetic [barcode part1]
  source 1..16: mol_type = other DNA
gtccgttagtatcgcc

SEQ ID NO: 33370 - DNA, 16 bp, synthetic construct
  misc_feature 1..16: note = synthetic [barcode part1]
  source 1..16: mol_type = other DNA
gattccagacgttacg

SEQ ID NO: 33371 - DNA, 16 bp, synthetic construct
  misc_feature 1..16: note = synthetic [barcode part1]
  source 1..16: mol_type = other DNA
taaggcggcaatcgtg

SEQ ID NO: 33372 - DNA, 16 bp, synthetic construct
  misc_feature 1..16: note = synthetic [barcode part1]
  source 1..16: mol_type = other DNA
gcctatcgtagtgtcc

SEQ ID NO: 33373 - DNA, 16 bp, synthetic construct
  misc_feature 1..16: note = synthetic [barcode part1]
  source 1..16: mol_type = other DNA
acctgtaacgcaactg

SEQ ID NO: 33374 - DNA, 16 bp, synthetic construct
  misc_feature 1..16: note = synthetic [barcode part1]
  source 1..16: mol_type = other DNA
actagaactgactccg

SEQ ID NO: 33375 - DNA, 16 bp, synthetic construct
  misc_feature 1..16: note = synthetic [barcode part1]
  source 1..16: mol_type = other DNA
tcagtcctaggaagtc

SEQ ID NO: 33376 - DNA, 16 bp, synthetic construct
  misc_feature 1..16: note = synthetic [barcode part1]
  source 1..16: mol_type = other DNA
tgcacagtgttggtgt

SEQ ID NO: 33377 - DNA, 16 bp, synthetic construct
  misc_feature 1..16: note = synthetic [barcode part1]
  source 1..16: mol_type = other DNA
tctaatctctctcggc

SEQ ID NO: 33378 - DNA, 16 bp, synthetic construct
  misc_feature 1..16: note = synthetic [barcode part1]
  source 1..16: mol_type = other DNA
tgaattgttcctgcgt

SEQ ID NO: 33379 - DNA, 16 bp, synthetic construct
  misc_feature 1..16: note = synthetic [barcode part1]
  source 1..16: mol_type = other DNA
aaccgtaactgtacgc

SEQ ID NO: 33380 - DNA, 16 bp, synthetic construct
  misc_feature 1..16: note = synthetic [barcode part1]
  source 1..16: mol_type = other DNA
gtctgattcctgcgtg

SEQ ID NO: 33381 - DNA, 16 bp, synthetic construct
  misc_feature 1..16: note = synthetic [barcode part1]
  source 1..16: mol_type = other DNA
tcttctcaactctggc

SEQ ID NO: 33382 - DNA, 16 bp, synthetic construct
  misc_feature 1..16: note = synthetic [barcode part1]
  source 1..16: mol_type = other DNA
gaccagttcaggactt

SEQ ID NO: 33383 - DNA, 16 bp, synthetic construct
  misc_feature 1..16: note = synthetic [barcode part1]
  source 1..16: mol_type = other DNA
cgcgtgaataagatac

SEQ ID NO: 33384 - DNA, 16 bp, synthetic construct
  misc_feature 1..16: note = synthetic [barcode part1]
  source 1..16: mol_type = other DNA
tggtgcaccggatatt

SEQ ID NO: 33385 - DNA, 16 bp, synthetic construct
  misc_feature 1..16: note = synthetic [barcode part1]
  source 1..16: mol_type = other DNA
tccacaagacgtctag

SEQ ID NO: 33386 - DNA, 16 bp, synthetic construct
  misc_feature 1..16: note = synthetic [barcode part1]
  source 1..16: mol_type = other DNA
caaccgataaccggtt

SEQ ID NO: 33387 - DNA, 16 bp, synthetic construct
  misc_feature 1..16: note = synthetic [barcode part1]
  source 1..16: mol_type = other DNA
accaacgagtgtacct

SEQ ID NO: 33388 - DNA, 16 bp, synthetic construct
  misc_feature 1..16: note = synthetic [barcode part1]
  source 1..16: mol_type = other DNA
gacacgcaactcttcc

SEQ ID NO: 33389 - DNA, 16 bp, synthetic construct
  misc_feature 1..16: note = synthetic [barcode part1]
  source 1..16: mol_type = other DNA
tctcaagtactcgttg

SEQ ID NO: 33390 - DNA, 16 bp, synthetic construct
  misc_feature 1..16: note = synthetic [barcode part1]
  source 1..16: mol_type = other DNA
cgataactcaacggtc

SEQ ID NO: 33391 - DNA, 16 bp, synthetic construct
  misc_feature 1..16: note = synthetic [barcode part1]
  source 1..16: mol_type = other DNA
accgaacctatcgagt

SEQ ID NO: 33392 - DNA, 16 bp, synthetic construct
  misc_feature 1..16: note = synthetic [barcode part1]
  source 1..16: mol_type = other DNA
gagtaccgttccgtct

SEQ ID NO: 33393 - DNA, 16 bp, synthetic construct
  misc_feature 1..16: note = synthetic [barcode part1]
  source 1..16: mol_type = other DNA
tagacactgacgaggc

SEQ ID NO: 33394 - DNA, 16 bp, synthetic construct
  misc_feature 1..16: note = synthetic [barcode part1]
  source 1..16: mol_type = other DNA
tataatcgaagtggcg

SEQ ID NO: 33395 - DNA, 16 bp, synthetic construct
  misc_feature 1..16: note = synthetic [barcode part1]
  source 1..16: mol_type = other DNA
gttacacttggacgtg

SEQ ID NO: 33396 - DNA, 16 bp, synthetic construct
  misc_feature 1..16: note = synthetic [barcode part1]
  source 1..16: mol_type = other DNA
aagttcgtaccgacac

SEQ ID NO: 33397 - DNA, 16 bp, synthetic construct
  misc_feature 1..16: note = synthetic [barcode part1]
  source 1..16: mol_type = other DNA
gattcgttcactctag

SEQ ID NO: 33398 - DNA, 16 bp, synthetic construct
  misc_feature 1..16: note = synthetic [barcode part1]
  source 1..16: mol_type = other DNA
ttccacgtgtaccttc

SEQ ID NO: 33399 - DNA, 16 bp, synthetic construct
  misc_feature 1..16: note = synthetic [barcode part1]
  source 1..16: mol_type = other DNA
gatcggtccgattagt

SEQ ID NO: 33400 - DNA, 16 bp, synthetic construct
  misc_feature 1..16: note = synthetic [barcode part1]
  source 1..16: mol_type = other DNA
ccaacagattcggtgt

SEQ ID NO: 33401 - DNA, 16 bp, synthetic construct
  misc_feature 1..16: note = synthetic [barcode part1]
  source 1..16: mol_type = other DNA
gcagtcaattacgcgt

SEQ ID NO: 33402 - DNA, 16 bp, synthetic construct
  misc_feature 1..16: note = synthetic [barcode part1]
  source 1..16: mol_type = other DNA
gtcctatcaccgacgt

SEQ ID NO: 33403 - DNA, 16 bp, synthetic construct
  misc_feature 1..16: note = synthetic [barcode part1]
  source 1..16: mol_type = other DNA
agtgcacaggactggt

SEQ ID NO: 33404 - DNA, 16 bp, synthetic construct
  misc_feature 1..16: note = synthetic [barcode part1]
  source 1..16: mol_type = other DNA
gcaatactaacgccac

SEQ ID NO: 33405 - DNA, 16 bp, synthetic construct
  misc_feature 1..16: note = synthetic [barcode part1]
  source 1..16: mol_type = other DNA
tcaggtgactcacagt

SEQ ID NO: 33406 - DNA, 16 bp, synthetic construct
  misc_feature 1..16: note = synthetic [barcode part1]
  source 1..16: mol_type = other DNA
cgaccagaactaatcc

SEQ ID NO: 33407 - DNA, 16 bp, synthetic construct
  misc_feature 1..16: note = synthetic [barcode part1]
  source 1..16: mol_type = other DNA
atctggttggttcgag

SEQ ID NO: 33408 - DNA, 16 bp, synthetic construct
  misc_feature 1..16: note = synthetic [barcode part1]
  source 1..16: mol_type = other DNA
aggtatacctcgtacg

SEQ ID NO: 33409 - DNA, 16 bp, synthetic construct
  misc_feature 1..16: note = synthetic [barcode part1]
  source 1..16: mol_type = other DNA
ttgcctcctgagtgtg

SEQ ID NO: 33410 - DNA, 16 bp, synthetic construct
  misc_feature 1..16: note = synthetic [barcode part1]
  source 1..16: mol_type = other DNA
gagtgccttgtgaatc

SEQ ID NO: 33411 - DNA, 16 bp, synthetic construct
  misc_feature 1..16: note = synthetic [barcode part1]
  source 1..16: mol_type = other DNA
acgcctcaacctaatt

SEQ ID NO: 33412 - DNA, 16 bp, synthetic construct
  misc_feature 1..16: note = synthetic [barcode part1]
  source 1..16: mol_type = other DNA
gcctctggtaagagtt

SEQ ID NO: 33413 - DNA, 16 bp, synthetic construct
  misc_feature 1..16: note = synthetic [barcode part1]
  source 1..16: mol_type = other DNA
atcgtgacttattcgc

SEQ ID NO: 33414 - DNA, 16 bp, synthetic construct
  misc_feature 1..16: note = synthetic [barcode part1]
  source 1..16: mol_type = other DNA
gtcttgcctgttactc

SEQ ID NO: 33415 - DNA, 16 bp, synthetic construct
  misc_feature 1..16: note = synthetic [barcode part1]
  source 1..16: mol_type = other DNA
acacgcgattaaccac

SEQ ID NO: 33416 - DNA, 16 bp, synthetic construct
  misc_feature 1..16: note = synthetic [barcode part1]
  source 1..16: mol_type = other DNA
aagtcctaggatcctg

SEQ ID NO: 33417 - DNA, 16 bp, synthetic construct
  misc_feature 1..16: note = synthetic [barcode part1]
  source 1..16: mol_type = other DNA
aatccacacttcgccg

SEQ ID NO: 33418 - DNA, 16 bp, synthetic construct
  misc_feature 1..16: note = synthetic [barcode part1]
  source 1..16: mol_type = other DNA
ttgacaacttgcacct

SEQ ID NO: 33419 - DNA, 16 bp, synthetic construct
  misc_feature 1..16: note = synthetic [barcode part1]
  source 1..16: mol_type = other DNA
tctatcggtacgatct

SEQ ID NO: 33420 - DNA, 16 bp, synthetic construct
  misc_feature 1..16: note = synthetic [barcode part1]
  source 1..16: mol_type = other DNA
taggaggttggaagac

SEQ ID NO: 33421 - DNA, 16 bp, synthetic construct
  misc_feature 1..16: note = synthetic [barcode part1]
  source 1..16: mol_type = other DNA
ataacgcgagactctc

SEQ ID NO: 33422 - DNA, 16 bp, synthetic construct
  misc_feature 1..16: note = synthetic [barcode part1]
  source 1..16: mol_type = other DNA
gtgtgcgtgatatcac

SEQ ID NO: 33423 - DNA, 16 bp, synthetic construct
  misc_feature 1..16: note = synthetic [barcode part1]
  source 1..16: mol_type = other DNA
tgtgagtgtcctgtcc

SEQ ID NO: 33424 - DNA, 16 bp, synthetic construct
  misc_feature 1..16: note = synthetic [barcode part1]
  source 1..16: mol_type = other DNA
caggaggattacgcgt

SEQ ID NO: 33425 - DNA, 16 bp, synthetic construct
  misc_feature 1..16: note = synthetic [barcode part1]
  source 1..16: mol_type = other DNA
gcagtgaccacacaag

SEQ ID NO: 33426 - DNA, 16 bp, synthetic construct
  misc_feature 1..16: note = synthetic [barcode part1]
  source 1..16: mol_type = other DNA
ataacgtcggccaact

SEQ ID NO: 33427 - DNA, 16 bp, synthetic construct
  misc_feature 1..16: note = synthetic [barcode part1]
  source 1..16: mol_type = other DNA
ttacgagttcggcctc

SEQ ID NO: 33428 - DNA, 16 bp, synthetic construct
  misc_feature 1..16: note = synthetic [barcode part1]
  source 1..16: mol_type = other DNA
gcggccgttctaattc

SEQ ID NO: 33429 - DNA, 16 bp, synthetic construct
  misc_feature 1..16: note = synthetic [barcode part1]
  source 1..16: mol_type = other DNA
aattcctcgcactaac

SEQ ID NO: 33430 - DNA, 16 bp, synthetic construct
  misc_feature 1..16: note = synthetic [barcode part1]
  source 1..16: mol_type = other DNA
agaaccgtgtaggtcg

SEQ ID NO: 33431 - DNA, 16 bp, synthetic construct
  misc_feature 1..16: note = synthetic [barcode part1]
  source 1..16: mol_type = other DNA
gccttcgttattaggt

SEQ ID NO: 33432 - DNA, 16 bp, synthetic construct
  misc_feature 1..16: note = synthetic [barcode part1]
  source 1..16: mol_type = other DNA
gtggccgagtcttctt

SEQ ID NO: 33433 - DNA, 16 bp, synthetic construct
  misc_feature 1..16: note = synthetic [barcode part1]
  source 1..16: mol_type = other DNA
tattcggaccgccttg

SEQ ID NO: 33434 - DNA, 16 bp, synthetic construct
  misc_feature 1..16: note = synthetic [barcode part1]
  source 1..16: mol_type = other DNA
gcactaagattgcgtc

SEQ ID NO: 33435 - DNA, 16 bp, synthetic construct
  misc_feature 1..16: note = synthetic [barcode part1]
  source 1..16: mol_type = other DNA
actgtccacttacaac

SEQ ID NO: 33436 - DNA, 16 bp, synthetic construct
  misc_feature 1..16: note = synthetic [barcode part1]
  source 1..16: mol_type = other DNA
ttgtgtgcctcggttg

SEQ ID NO: 33437 - DNA, 16 bp, synthetic construct
  misc_feature 1..16: note = synthetic [barcode part1]
  source 1..16: mol_type = other DNA
tggtccgataatccag

SEQ ID NO: 33438 - DNA, 16 bp, synthetic construct
  misc_feature 1..16: note = synthetic [barcode part1]
  source 1..16: mol_type = other DNA
tcagtgtcacagtcag

SEQ ID NO: 33439 - DNA, 16 bp, synthetic construct
  misc_feature 1..16: note = synthetic [barcode part1]
  source 1..16: mol_type = other DNA
tccggcctatacaacc

SEQ ID NO: 33440 - DNA, 16 bp, synthetic construct
  misc_feature 1..16: note = synthetic [barcode part1]
  source 1..16: mol_type = other DNA
caagttcgtcttatcg

SEQ ID NO: 33441 - DNA, 16 bp, synthetic construct
  misc_feature 1..16: note = synthetic [barcode part1]
  source 1..16: mol_type = other DNA
tcaactctagacctgt

SEQ ID NO: 33442 - DNA, 16 bp, synthetic construct
  misc_feature 1..16: note = synthetic [barcode part1]
  source 1..16: mol_type = other DNA
cgattacggtataccg

SEQ ID NO: 33443 - DNA, 16 bp, synthetic construct
  misc_feature 1..16: note = synthetic [barcode part1]
  source 1..16: mol_type = other DNA
aatccttgagacggtc

SEQ ID NO: 33444 - DNA, 16 bp, synthetic construct
  misc_feature 1..16: note = synthetic [barcode part1]
  source 1..16: mol_type = other DNA
tacgagtcaccgttcc

SEQ ID NO: 33445 - DNA, 16 bp, synthetic construct
  misc_feature 1..16: note = synthetic [barcode part1]
  source 1..16: mol_type = other DNA
taattccgtgcactac

SEQ ID NO: 33446 - DNA, 16 bp, synthetic construct
  misc_feature 1..16: note = synthetic [barcode part1]
  source 1..16: mol_type = other DNA
tcgtgttggcggtctt

SEQ ID NO: 33447 - DNA, 16 bp, synthetic construct
  misc_feature 1..16: note = synthetic [barcode part1]
  source 1..16: mol_type = other DNA
gagttcgtccacaagt

SEQ ID NO: 33448 - DNA, 16 bp, synthetic construct
  misc_feature 1..16: note = synthetic [barcode part1]
  source 1..16: mol_type = other DNA
gagtgcaattactgag

SEQ ID NO: 33449 - DNA, 16 bp, synthetic construct
  misc_feature 1..16: note = synthetic [barcode part1]
  source 1..16: mol_type = other DNA
agattgtggtacgagt

SEQ ID NO: 33450 - DNA, 16 bp, synthetic construct
  misc_feature 1..16: note = synthetic [barcode part1]
  source 1..16: mol_type = other DNA
ttgcactgacgatctt

SEQ ID NO: 33451 - DNA, 16 bp, synthetic construct
  misc_feature 1..16: note = synthetic [barcode part1]
  source 1..16: mol_type = other DNA
acttcacgcgaccact

SEQ ID NO: 33452 - DNA, 16 bp, synthetic construct
  misc_feature 1..16: note = synthetic [barcode part1]
  source 1..16: mol_type = other DNA
gatacgcaatcagagt

SEQ ID NO: 33453 - DNA, 16 bp, synthetic construct
  misc_feature 1..16: note = synthetic [barcode part1]
  source 1..16: mol_type = other DNA
gatccaattggcaacc

SEQ ID NO: 33454 - DNA, 16 bp, synthetic construct
  misc_feature 1..16: note = synthetic [barcode part1]
  source 1..16: mol_type = other DNA
aagaggcgatacgtcc

SEQ ID NO: 33455 - DNA, 16 bp, synthetic construct
  misc_feature 1..16: note = synthetic [barcode part1]
  source 1..16: mol_type = other DNA
aagacgatccgtcact

SEQ ID NO: 33456 - DNA, 16 bp, synthetic construct
  misc_feature 1..16: note = synthetic [barcode part1]
  source 1..16: mol_type = other DNA
tgtcggaagatacagt

SEQ ID NO: 33457 - DNA, 16 bp, synthetic construct
  misc_feature 1..16: note = synthetic [barcode part1]
  source 1..16: mol_type = other DNA
gcacgtactagtcagt

SEQ ID NO: 33458 - DNA, 16 bp, synthetic construct
  misc_feature 1..16: note = synthetic [barcode part1]
  source 1..16: mol_type = other DNA
caacgcgtaattcttc

SEQ ID NO: 33459 - DNA, 16 bp, synthetic construct
  misc_feature 1..16: note = synthetic [barcode part1]
  source 1..16: mol_type = other DNA
caagaagtcctgacct

SEQ ID NO: 33460 - DNA, 16 bp, synthetic construct
  misc_feature 1..16: note = synthetic [barcode part1]
  source 1..16: mol_type = other DNA
ccgatatactggtacg

SEQ ID NO: 33461 - DNA, 16 bp, synthetic construct
  misc_feature 1..16: note = synthetic [barcode part1]
  source 1..16: mol_type = other DNA
gtctgagttcactgtt

SEQ ID NO: 33462 - DNA, 16 bp, synthetic construct
  misc_feature 1..16: note = synthetic [barcode part1]
  source 1..16: mol_type = other DNA
gtgaccaaccaacact

SEQ ID NO: 33463 - DNA, 16 bp, synthetic construct
  misc_feature 1..16: note = synthetic [barcode part1]
  source 1..16: mol_type = other DNA
tcgtagatattccgtc

SEQ ID NO: 33464 - DNA, 16 bp, synthetic construct
  misc_feature 1..16: note = synthetic [barcode part1]
  source 1..16: mol_type = other DNA
cgacgattcgacaact

SEQ ID NO: 33465 - DNA, 16 bp, synthetic construct
  misc_feature 1..16: note = synthetic [barcode part1]
  source 1..16: mol_type = other DNA
ttacaccgtgacttgt

SEQ ID NO: 33466 - DNA, 16 bp, synthetic construct
  misc_feature 1..16: note = synthetic [barcode part1]
  source 1..16: mol_type = other DNA
agaggacgaattggac

SEQ ID NO: 33467 - DNA, 16 bp, synthetic construct
  misc_feature 1..16: note = synthetic [barcode part1]
  source 1..16: mol_type = other DNA
aatcttccggtcttcc

SEQ ID NO: 33468 - DNA, 16 bp, synthetic construct
  misc_feature 1..16: note = synthetic [barcode part1]
  source 1..16: mol_type = other DNA
gaatcctccgaagttg

SEQ ID NO: 33469 - DNA, 16 bp, synthetic construct
  misc_feature 1..16: note = synthetic [barcode part1]
  source 1..16: mol_type = other DNA
gaggagtcgaatctgc

SEQ ID NO: 33470 - DNA, 16 bp, synthetic construct
  misc_feature 1..16: note = synthetic [barcode part1]
  source 1..16: mol_type = other DNA
ttgatctagaccggac

SEQ ID NO: 33471 - DNA, 16 bp, synthetic construct
  misc_feature 1..16: note = synthetic [barcode part1]
  source 1..16: mol_type = other DNA
cgccgttcactaacgt

SEQ ID NO: 33472 - DNA, 16 bp, synthetic construct
  misc_feature 1..16: note = synthetic [barcode part1]
  source 1..16: mol_type = other DNA
ttgattaggccaaccg

SEQ ID NO: 33473 - DNA, 16 bp, synthetic construct
  misc_feature 1..16: note = synthetic [barcode part1]
  source 1..16: mol_type = other DNA
tcacagtaagacctcg

SEQ ID NO: 33474 - DNA, 16 bp, synthetic construct
  misc_feature 1..16: note = synthetic [barcode part1]
  source 1..16: mol_type = other DNA
gcaattgtaacgcgtc

SEQ ID NO: 33475 - DNA, 16 bp, synthetic construct
  misc_feature 1..16: note = synthetic [barcode part1]
  source 1..16: mol_type = other DNA
ttcaggttctaactcg

SEQ ID NO: 33476 - DNA, 16 bp, synthetic construct
  misc_feature 1..16: note = synthetic [barcode part1]
  source 1..16: mol_type = other DNA
aggatcgagtcacacg

SEQ ID NO: 33477 - DNA, 16 bp, synthetic construct
  misc_feature 1..16: note = synthetic [barcode part1]
  source 1..16: mol_type = other DNA
aagttatcgagagtgc

SEQ ID NO: 33478 - DNA, 16 bp, synthetic construct
  misc_feature 1..16: note = synthetic [barcode part1]
  source 1..16: mol_type = other DNA
ccgacgaattcttgcc

SEQ ID NO: 33479 - DNA, 16 bp, synthetic construct
  misc_feature 1..16: note = synthetic [barcode part1]
  source 1..16: mol_type = other DNA
acctgtcgcagtatcc

SEQ ID NO: 33480 - DNA, 16 bp, synthetic construct
  misc_feature 1..16: note = synthetic [barcode part1]
  source 1..16: mol_type = other DNA
ttacgaaccgtacggt

SEQ ID NO: 33481 - DNA, 16 bp, synthetic construct
  misc_feature 1..16: note = synthetic [barcode part1]
  source 1..16: mol_type = other DNA
ataccttctggaccgc

SEQ ID NO: 33482 - DNA, 16 bp, synthetic construct
  misc_feature 1..16: note = synthetic [barcode part1]
  source 1..16: mol_type = other DNA
aacctcacctacttag

SEQ ID NO: 33483 - DNA, 16 bp, synthetic construct
  misc_feature 1..16: note = synthetic [barcode part1]
  source 1..16: mol_type = other DNA
cactcgcaataggtgt

SEQ ID NO: 33484 - DNA, 16 bp, synthetic construct
  misc_feature 1..16: note = synthetic [barcode part1]
  source 1..16: mol_type = other DNA
cgaagagttgaccttc

SEQ ID NO: 33485 - DNA, 16 bp, synthetic construct
  misc_feature 1..16: note = synthetic [barcode part1]
  source 1..16: mol_type = other DNA
accttgtggcgatagt

SEQ ID NO: 33486 - DNA, 16 bp, synthetic construct
  misc_feature 1..16: note = synthetic [barcode part1]
  source 1..16: mol_type = other DNA
acgaactccttgttac

SEQ ID NO: 33487 - DNA, 16 bp, synthetic construct
  misc_feature 1..16: note = synthetic [barcode part1]
  source 1..16: mol_type = other DNA
aagacgcaactactag

SEQ ID NO: 33488 - DNA, 16 bp, synthetic construct
  misc_feature 1..16: note = synthetic [barcode part1]
  source 1..16: mol_type = other DNA
ttccggcacacgactt

SEQ ID NO: 33489 - DNA, 16 bp, synthetic construct
  misc_feature 1..16: note = synthetic [barcode part1]
  source 1..16: mol_type = other DNA
tggaatcaccgatcac

SEQ ID NO: 33490 - DNA, 16 bp, synthetic construct
  misc_feature 1..16: note = synthetic [barcode part1]
  source 1..16: mol_type = other DNA
ttgtccgaatatcgtc

SEQ ID NO: 33491 - DNA, 16 bp, synthetic construct
  misc_feature 1..16: note = synthetic [barcode part1]
  source 1..16: mol_type = other DNA
taattgtgcggttgcg

SEQ ID NO: 33492 - DNA, 16 bp, synthetic construct
  misc_feature 1..16: note = synthetic [barcode part1]
  source 1..16: mol_type = other DNA
accttccgattgagag

SEQ ID NO: 33493 - DNA, 16 bp, synthetic construct
  misc_feature 1..16: note = synthetic [barcode part1]
  source 1..16: mol_type = other DNA
ttagacgtcgtcctgc

SEQ ID NO: 33494 - DNA, 16 bp, synthetic construct
  misc_feature 1..16: note = synthetic [barcode part1]
  source 1..16: mol_type = other DNA
agattgaattggtgcg

SEQ ID NO: 33495 - DNA, 16 bp, synthetic construct
  misc_feature 1..16: note = synthetic [barcode part1]
  source 1..16: mol_type = other DNA
gaccttctgtactaac

SEQ ID NO: 33496 - DNA, 16 bp, synthetic construct
  misc_feature 1..16: note = synthetic [barcode part1]
  source 1..16: mol_type = other DNA
ttgacactcagttctg

SEQ ID NO: 33497 - DNA, 16 bp, synthetic construct
  misc_feature 1..16: note = synthetic [barcode part1]
  source 1..16: mol_type = other DNA
acacggtcacgtgatt

SEQ ID NO: 33498 - DNA, 16 bp, synthetic construct
  misc_feature 1..16: note = synthetic [barcode part1]
  source 1..16: mol_type = other DNA
gtgactaatacaccgc

SEQ ID NO: 33499 - DNA, 16 bp, synthetic construct
  misc_feature 1..16: note = synthetic [barcode part1]
  source 1..16: mol_type = other DNA
gtacggttctctcggt

SEQ ID NO: 33500 - DNA, 16 bp, synthetic construct
  misc_feature 1..16: note = synthetic [barcode part1]
  source 1..16: mol_type = other DNA
tacggcacttgaggtt

SEQ ID NO: 33501 - DNA, 16 bp, synthetic construct
  misc_feature 1..16: note = synthetic [barcode part1]
  source 1..16: mol_type = other DNA
caggagacgtgtgatc

SEQ ID NO: 33502 - DNA, 16 bp, synthetic construct
  misc_feature 1..16: note = synthetic [barcode part1]
  source 1..16: mol_type = other DNA
gttgactcacagtacg

SEQ ID NO: 33503 - DNA, 16 bp, synthetic construct
  misc_feature 1..16: note = synthetic [barcode part1]
  source 1..16: mol_type = other DNA
tacacttgtagaggcc

SEQ ID NO: 33504 - DNA, 16 bp, synthetic construct
  misc_feature 1..16: note = synthetic [barcode part1]
  source 1..16: mol_type = other DNA
gagaagtacctgaact

SEQ ID NO: 33505 - DNA, 16 bp, synthetic construct
  misc_feature 1..16: note = synthetic [barcode part1]
  source 1..16: mol_type = other DNA
cagtgtactctactac

SEQ ID NO: 33506 - DNA, 16 bp, synthetic construct
  misc_feature 1..16: note = synthetic [barcode part1]
  source 1..16: mol_type = other DNA
tggcgtgatcaccttc

SEQ ID NO: 33507 - DNA, 16 bp, synthetic construct
  misc_feature 1..16: note = synthetic [barcode part1]
  source 1..16: mol_type = other DNA
tgcagtaagatctcgc

SEQ ID NO: 33508 - DNA, 16 bp, synthetic construct
  misc_feature 1..16: note = synthetic [barcode part1]
  source 1..16: mol_type = other DNA
tctctaatccttcggc

SEQ ID NO: 33509 - DNA, 16 bp, synthetic construct
  misc_feature 1..16: note = synthetic [barcode part1]
  source 1..16: mol_type = other DNA
tctggaacgactgatc

SEQ ID NO: 33510 - DNA, 16 bp, synthetic construct
  misc_feature 1..16: note = synthetic [barcode part1]
  source 1..16: mol_type = other DNA
cagtctccacgtgatc

SEQ ID NO: 33511 - DNA, 16 bp, synthetic construct
  misc_feature 1..16: note = synthetic [barcode part1]
  source 1..16: mol_type = other DNA
caagtacctgaacgtc

SEQ ID NO: 33512 - DNA, 16 bp, synthetic construct
  misc_feature 1..16: note = synthetic [barcode part1]
  source 1..16: mol_type = other DNA
aaggtaactacagacc

SEQ ID NO: 33513 - DNA, 16 bp, synthetic construct
  misc_feature 1..16: note = synthetic [barcode part1]
  source 1..16: mol_type = other DNA
tgtggcggaacagatc

SEQ ID NO: 33514 - DNA, 16 bp, synthetic construct
  misc_feature 1..16: note = synthetic [barcode part1]
  source 1..16: mol_type = other DNA
ttcctctgcgttgtac

SEQ ID NO: 33515 - DNA, 16 bp, synthetic construct
  misc_feature 1..16: note = synthetic [barcode part1]
  source 1..16: mol_type = other DNA
tgtgtggacctctcgt

SEQ ID NO: 33516 - DNA, 16 bp, synthetic construct
  misc_feature 1..16: note = synthetic [barcode part1]
  source 1..16: mol_type = other DNA
cgcaccttcgtatctt

SEQ ID NO: 33517 - DNA, 16 bp, synthetic construct
  misc_feature 1..16: note = synthetic [barcode part1]
  source 1..16: mol_type = other DNA
ttctggttataccggt

SEQ ID NO: 33518 - DNA, 16 bp, synthetic construct
  misc_feature 1..16: note = synthetic [barcode part1]
  source 1..16: mol_type = other DNA
cgagtgaagtgttgcg

SEQ ID NO: 33519 - DNA, 16 bp, synthetic construct
  misc_feature 1..16: note = synthetic [barcode part1]
  source 1..16: mol_type = other DNA
atctacgttctgtcag

SEQ ID NO: 33520 - DNA, 16 bp, synthetic construct
  misc_feature 1..16: note = synthetic [barcode part1]
  source 1..16: mol_type = other DNA
ccttacgttctcacac

SEQ ID NO: 33521 - DNA, 16 bp, synthetic construct
  misc_feature 1..16: note = synthetic [barcode part1]
  source 1..16: mol_type = other DNA
gaaggatccgtgtggt

SEQ ID NO: 33522 - DNA, 16 bp, synthetic construct
  misc_feature 1..16: note = synthetic [barcode part1]
  source 1..16: mol_type = other DNA
ttaggaccacttactc

SEQ ID NO: 33523 - DNA, 16 bp, synthetic construct
  misc_feature 1..16: note = synthetic [barcode part1]
  source 1..16: mol_type = other DNA
tagaatcgtcggtcgt

SEQ ID NO: 33524 - DNA, 16 bp, synthetic construct
  misc_feature 1..16: note = synthetic [barcode part1]
  source 1..16: mol_type = other DNA
atccttagaacacggc

SEQ ID NO: 33525 - DNA, 16 bp, synthetic construct
  misc_feature 1..16: note = synthetic [barcode part1]
  source 1..16: mol_type = other DNA
cgagacacttaatccg

SEQ ID NO: 33526 - DNA, 16 bp, synthetic construct
  misc_feature 1..16: note = synthetic [barcode part1]
  source 1..16: mol_type = other DNA
caattggcgtaacgtc

SEQ ID NO: 33527 - DNA, 16 bp, synthetic construct
  misc_feature 1..16: note = synthetic [barcode part1]
  source 1..16: mol_type = other DNA
aattgcggtataccgc

SEQ ID NO: 33528 - DNA, 16 bp, synthetic construct
  misc_feature 1..16: note = synthetic [barcode part1]
  source 1..16: mol_type = other DNA
agttccacaggtggag

SEQ ID NO: 33529 - DNA, 16 bp, synthetic construct
  misc_feature 1..16: note = synthetic [barcode part1]
  source 1..16: mol_type = other DNA
attacctcctactgcc

SEQ ID NO: 33530 - DNA, 16 bp, synthetic construct
  misc_feature 1..16: note = synthetic [barcode part1]
  source 1..16: mol_type = other DNA
ttcacacggcctgact

SEQ ID NO: 33531 - DNA, 16 bp, synthetic construct
  misc_feature 1..16: note = synthetic [barcode part1]
  source 1..16: mol_type = other DNA
gcaattggagactggc

SEQ ID NO: 33532 - DNA, 16 bp, synthetic construct
  misc_feature 1..16: note = synthetic [barcode part1]
  source 1..16: mol_type = other DNA
ttaagatatccgcctc

SEQ ID NO: 33533 - DNA, 16 bp, synthetic construct
  misc_feature 1..16: note = synthetic [barcode part1]
  source 1..16: mol_type = other DNA
attgtcctactcaggt

SEQ ID NO: 33534 - DNA, 16 bp, synthetic construct
  misc_feature 1..16: note = synthetic [barcode part1]
  source 1..16: mol_type = other DNA
gagagtacggattact

SEQ ID NO: 33535 - DNA, 16 bp, synthetic construct
  misc_feature 1..16: note = synthetic [barcode part1]
  source 1..16: mol_type = other DNA
tgtagtgcgaatagac

SEQ ID NO: 33536 - DNA, 16 bp, synthetic construct
  misc_feature 1..16: note = synthetic [barcode part1]
  source 1..16: mol_type = other DNA
agactgttacctctac

SEQ ID NO: 33537 - DNA, 16 bp, synthetic construct
  misc_feature 1..16: note = synthetic [barcode part1]
  source 1..16: mol_type = other DNA
caaccagaccgtgatt

SEQ ID NO: 33538 - DNA, 16 bp, synthetic construct
  misc_feature 1..16: note = synthetic [barcode part1]
  source 1..16: mol_type = other DNA
ttcgttatcctgccac

SEQ ID NO: 33539 - DNA, 16 bp, synthetic construct
  misc_feature 1..16: note = synthetic [barcode part1]
  source 1..16: mol_type = other DNA
tcttaaccggtgagac

SEQ ID NO: 33540 - DNA, 16 bp, synthetic construct
  misc_feature 1..16: note = synthetic [barcode part1]
  source 1..16: mol_type = other DNA
gacaggagacctgtac

SEQ ID NO: 33541 - DNA, 16 bp, synthetic construct
  misc_feature 1..16: note = synthetic [barcode part1]
  source 1..16: mol_type = other DNA
aggcgataacctatag

SEQ ID NO: 33542 - DNA, 16 bp, synthetic construct
  misc_feature 1..16: note = synthetic [barcode part1]
  source 1..16: mol_type = other DNA
tactaggtgagtcacc

SEQ ID NO: 33543 - DNA, 16 bp, synthetic construct
  misc_feature 1..16: note = synthetic [barcode part1]
  source 1..16: mol_type = other DNA
atcaatacaccgacgc

SEQ ID NO: 33544 - DNA, 16 bp, synthetic construct
  misc_feature 1..16: note = synthetic [barcode part1]
  source 1..16: mol_type = other DNA
ccaccacacagactct

SEQ ID NO: 33545 - DNA, 16 bp, synthetic construct
  misc_feature 1..16: note = synthetic [barcode part1]
  source 1..16: mol_type = other DNA
ttcactacggtctctc

SEQ ID NO: 33546 - DNA, 16 bp, synthetic construct
  misc_feature 1..16: note = synthetic [barcode part1]
  source 1..16: mol_type = other DNA
cagtggaacagatccg

SEQ ID NO: 33547 - DNA, 16 bp, synthetic construct
  misc_feature 1..16: note = synthetic [barcode part1]
  source 1..16: mol_type = other DNA
tgccaatcgcaatcag

SEQ ID NO: 33548 - DNA, 16 bp, synthetic construct
  misc_feature 1..16: note = synthetic [barcode part1]
  source 1..16: mol_type = other DNA
tagattgtgcggaagt

SEQ ID NO: 33549 - DNA, 16 bp, synthetic construct
  misc_feature 1..16: note = synthetic [barcode part1]
  source 1..16: mol_type = other DNA
tccgaggtacgtatac

SEQ ID NO: 33550 - DNA, 16 bp, synthetic construct
  misc_feature 1..16: note = synthetic [barcode part1]
  source 1..16: mol_type = other DNA
ttcctggactacgcac

SEQ ID NO: 33551 - DNA, 16 bp, synthetic construct
  misc_feature 1..16: note = synthetic [barcode part1]
  source 1..16: mol_type = other DNA
tgacacgattggaagt

SEQ ID NO: 33552 - DNA, 16 bp, synthetic construct
  misc_feature 1..16: note = synthetic [barcode part1]
  source 1..16: mol_type = other DNA
gagttcgtgaactcgt

SEQ ID NO: 33553 - DNA, 16 bp, synthetic construct
  misc_feature 1..16: note = synthetic [barcode part1]
  source 1..16: mol_type = other DNA
tctactacgcactaac

SEQ ID NO: 33554 - DNA, 16 bp, synthetic construct
  misc_feature 1..16: note = synthetic [barcode part1]
  source 1..16: mol_type = other DNA
tagatcgttggatcgc

SEQ ID NO: 33555 - DNA, 16 bp, synthetic construct
  misc_feature 1..16: note = synthetic [barcode part1]
  source 1..16: mol_type = other DNA
taagagtccgtcggag

SEQ ID NO: 33556 - DNA, 16 bp, synthetic construct
  misc_feature 1..16: note = synthetic [barcode part1]
  source 1..16: mol_type = other DNA
atcactgaagagtacg

SEQ ID NO: 33557 - DNA, 16 bp, synthetic construct
  misc_feature 1..16: note = synthetic [barcode part1]
  source 1..16: mol_type = other DNA
tactgccttgttgtcc

SEQ ID NO: 33558 - DNA, 16 bp, synthetic construct
  misc_feature 1..16: note = synthetic [barcode part1]
  source 1..16: mol_type = other DNA
caattggtacgacgtc

SEQ ID NO: 33559 - DNA, 16 bp, synthetic construct
  misc_feature 1..16: note = synthetic [barcode part1]
  source 1..16: mol_type = other DNA
aggattagatcgtgtg

SEQ ID NO: 33560 - DNA, 16 bp, synthetic construct
  misc_feature 1..16: note = synthetic [barcode part1]
  source 1..16: mol_type = other DNA
cgccttggttctatct

SEQ ID NO: 33561 - DNA, 16 bp, synthetic construct
  misc_feature 1..16: note = synthetic [barcode part1]
  source 1..16: mol_type = other DNA
ttaggtggttcgcaac

SEQ ID NO: 33562 - DNA, 16 bp, synthetic construct
  misc_feature 1..16: note = synthetic [barcode part1]
  source 1..16: mol_type = other DNA
tactctggcgaattct

SEQ ID NO: 33563 - DNA, 16 bp, synthetic construct
  misc_feature 1..16: note = synthetic [barcode part1]
  source 1..16: mol_type = other DNA
acttcactctgtgagt

SEQ ID NO: 33564 - DNA, 16 bp, synthetic construct
  misc_feature 1..16: note = synthetic [barcode part1]
  source 1..16: mol_type = other DNA
aagtaggtccgagatt

SEQ ID NO: 33565 - DNA, 16 bp, synthetic construct
  misc_feature 1..16: note = synthetic [barcode part1]
  source 1..16: mol_type = other DNA
agacgaacaaggttct

SEQ ID NO: 33566 - DNA, 16 bp, synthetic construct
  misc_feature 1..16: note = synthetic [barcode part1]
  source 1..16: mol_type = other DNA
tagtcctggaagacct

SEQ ID NO: 33567 - DNA, 16 bp, synthetic construct
  misc_feature 1..16: note = synthetic [barcode part1]
  source 1..16: mol_type = other DNA
acgcgtcttaccactg

SEQ ID NO: 33568 - DNA, 16 bp, synthetic construct
  misc_feature 1..16: note = synthetic [barcode part1]
  source 1..16: mol_type = other DNA
gacttcaagacctcag

SEQ ID NO: 33569 - DNA, 16 bp, synthetic construct
  misc_feature 1..16: note = synthetic [barcode part1]
  source 1..16: mol_type = other DNA
ttacttgttgcgacac

SEQ ID NO: 33570 - DNA, 16 bp, synthetic construct
  misc_feature 1..16: note = synthetic [barcode part1]
  source 1..16: mol_type = other DNA
tattctcctggatcag

SEQ ID NO: 33571 - DNA, 16 bp, synthetic construct
  misc_feature 1..16: note = synthetic [barcode part1]
  source 1..16: mol_type = other DNA
cgagtgattacttgcg

SEQ ID NO: 33572 - DNA, 16 bp, synthetic construct
  misc_feature 1..16: note = synthetic [barcode part1]
  source 1..16: mol_type = other DNA
ttgtaccaagtgcggt

SEQ ID NO: 33573 - DNA, 16 bp, synthetic construct
  misc_feature 1..16: note = synthetic [barcode part1]
  source 1..16: mol_type = other DNA
tgaataggtggtactg

SEQ ID NO: 33574 - DNA, 16 bp, synthetic construct
  misc_feature 1..16: note = synthetic [barcode part1]
  source 1..16: mol_type = other DNA
aacctccagaacaacc

SEQ ID NO: 33575 - DNA, 16 bp, synthetic construct
  misc_feature 1..16: note = synthetic [barcode part1]
  source 1..16: mol_type = other DNA
cctgcgaatcctactg

SEQ ID NO: 33576 - DNA, 16 bp, synthetic construct
  misc_feature 1..16: note = synthetic [barcode part1]
  source 1..16: mol_type = other DNA
ccaagagtacactaag

SEQ ID NO: 33577 - DNA, 16 bp, synthetic construct
  misc_feature 1..16: note = synthetic [barcode part1]
  source 1..16: mol_type = other DNA
gacaggatctctaacc

SEQ ID NO: 33578 - DNA, 16 bp, synthetic construct
  misc_feature 1..16: note = synthetic [barcode part1]
  source 1..16: mol_type = other DNA
tgaaggaaccgcgtgt

SEQ ID NO: 33579 - DNA, 16 bp, synthetic construct
  misc_feature 1..16: note = synthetic [barcode part1]
  source 1..16: mol_type = other DNA
aacaacctcttgcgcc

SEQ ID NO: 33580 - DNA, 16 bp, synthetic construct
  misc_feature 1..16: note = synthetic [barcode part1]
  source 1..16: mol_type = other DNA
gaccagttcgattggt

SEQ ID NO: 33581 - DNA, 16 bp, synthetic construct
  misc_feature 1..16: note = synthetic [barcode part1]
  source 1..16: mol_type = other DNA
cctacctcaggatctg

SEQ ID NO: 33582 - DNA, 16 bp, synthetic construct
  misc_feature 1..16: note = synthetic [barcode part1]
  source 1..16: mol_type = other DNA
aactgcagttgacgtc

SEQ ID NO: 33583 - DNA, 16 bp, synthetic construct
  misc_feature 1..16: note = synthetic [barcode part1]
  source 1..16: mol_type = other DNA
gtcacctctcactatc

SEQ ID NO: 33584 - DNA, 16 bp, synthetic construct
  misc_feature 1..16: note = synthetic [barcode part1]
  source 1..16: mol_type = other DNA
tgtcagataggaacac

SEQ ID NO: 33585 - DNA, 16 bp, synthetic construct
  misc_feature 1..16: note = synthetic [barcode part1]
  source 1..16: mol_type = other DNA
tgacgagatccacgag

SEQ ID NO: 33586 - DNA, 16 bp, synthetic construct
  misc_feature 1..16: note = synthetic [barcode part1]
  source 1..16: mol_type = other DNA
gtatcagtcgaacacc

SEQ ID NO: 33587 - DNA, 16 bp, synthetic construct
  misc_feature 1..16: note = synthetic [barcode part1]
  source 1..16: mol_type = other DNA
aatccgttcgcctcag

SEQ ID NO: 33588 - DNA, 16 bp, synthetic construct
  misc_feature 1..16: note = synthetic [barcode part1]
  source 1..16: mol_type = other DNA
cctagtctatagttgc

SEQ ID NO: 33589 - DNA, 16 bp, synthetic construct
  misc_feature 1..16: note = synthetic [barcode part1]
  source 1..16: mol_type = other DNA
gagatcttctacctac

SEQ ID NO: 33590 - DNA, 16 bp, synthetic construct
  misc_feature 1..16: note = synthetic [barcode part1]
  source 1..16: mol_type = other DNA
agtgcactgcgcaatt

SEQ ID NO: 33591 - DNA, 16 bp, synthetic construct
  misc_feature 1..16: note = synthetic [barcode part1]
  source 1..16: mol_type = other DNA
gtgattccaccaagtg

SEQ ID NO: 33592 - DNA, 16 bp, synthetic construct
  misc_feature 1..16: note = synthetic [barcode part1]
  source 1..16: mol_type = other DNA
gtactggaggacaatt

SEQ ID NO: 33593 - DNA, 16 bp, synthetic construct
  misc_feature 1..16: note = synthetic [barcode part1]
  source 1..16: mol_type = other DNA
gtatattcggaaggtg

SEQ ID NO: 33594 - DNA, 16 bp, synthetic construct
  misc_feature 1..16: note = synthetic [barcode part1]
  source 1..16: mol_type = other DNA
gccgtgttcagtatag

SEQ ID NO: 33595 - DNA, 16 bp, synthetic construct
  misc_feature 1..16: note = synthetic [barcode part1]
  source 1..16: mol_type = other DNA
tctcgcacaatctggc

SEQ ID NO: 33596 - DNA, 16 bp, synthetic construct
  misc_feature 1..16: note = synthetic [barcode part1]
  source 1..16: mol_type = other DNA
tgtcgccacctagact

SEQ ID NO: 33597 - DNA, 16 bp, synthetic construct
  misc_feature 1..16: note = synthetic [barcode part1]
  source 1..16: mol_type = other DNA
acgtcaaccaggtatc

SEQ ID NO: 33598 - DNA, 16 bp, synthetic construct
  misc_feature 1..16: note = synthetic [barcode part1]
  source 1..16: mol_type = other DNA
cactactgtgatcgtt

SEQ ID NO: 33599 - DNA, 16 bp, synthetic construct
  misc_feature 1..16: note = synthetic [barcode part1]
  source 1..16: mol_type = other DNA
acacgtaccggttaac

SEQ ID NO: 33600 - DNA, 16 bp, synthetic construct
  misc_feature 1..16: note = synthetic [barcode part1]
  source 1..16: mol_type = other DNA
cctagattctggcctg

SEQ ID NO: 33601 - DNA, 16 bp, synthetic construct
  misc_feature 1..16: note = synthetic [barcode part1]
  source 1..16: mol_type = other DNA
ttggactaaccgtcag

SEQ ID NO: 33602 - DNA, 16 bp, synthetic construct
  misc_feature 1..16: note = synthetic [barcode part1]
  source 1..16: mol_type = other DNA
aaggatagtctctgcc

SEQ ID NO: 33603 - DNA, 16 bp, synthetic construct
  misc_feature 1..16: note = synthetic [barcode part1]
  source 1..16: mol_type = other DNA
ttaacctacaaccgtc

SEQ ID NO: 33604 - DNA, 16 bp, synthetic construct
  misc_feature 1..16: note = synthetic [barcode part1]
  source 1..16: mol_type = other DNA
attaacacactccacc

SEQ ID NO: 33605 - DNA, 16 bp, synthetic construct
  misc_feature 1..16: note = synthetic [barcode part1]
  source 1..16: mol_type = other DNA
ttcgcacttaggccac

SEQ ID NO: 33606 - DNA, 16 bp, synthetic construct
  misc_feature 1..16: note = synthetic [barcode part1]
  source 1..16: mol_type = other DNA
tgtgtcacgatcgtag

SEQ ID NO: 33607 - DNA, 16 bp, synthetic construct
  misc_feature 1..16: note = synthetic [barcode part1]
  source 1..16: mol_type = other DNA
tggacacagtctacgt

SEQ ID NO: 33608 - DNA, 16 bp, synthetic construct
  misc_feature 1..16: note = synthetic [barcode part1]
  source 1..16: mol_type = other DNA
cggtgatcgcactctt

SEQ ID NO: 33609 - DNA, 16 bp, synthetic construct
  misc_feature 1..16: note = synthetic [barcode part1]
  source 1..16: mol_type = other DNA
tacaccaggttagaag

SEQ ID NO: 33610 - DNA, 16 bp, synthetic construct
  misc_feature 1..16: note = synthetic [barcode part1]
  source 1..16: mol_type = other DNA
tagtggcgattcggtt

SEQ ID NO: 33611 - DNA, 16 bp, synthetic construct
  misc_feature 1..16: note = synthetic [barcode part1]
  source 1..16: mol_type = other DNA
cgaggagatattggtt

SEQ ID NO: 33612 - DNA, 16 bp, synthetic construct
  misc_feature 1..16: note = synthetic [barcode part1]
  source 1..16: mol_type = other DNA
gcacaaggtgacctag

SEQ ID NO: 33613 - DNA, 16 bp, synthetic construct
  misc_feature 1..16: note = synthetic [barcode part1]
  source 1..16: mol_type = other DNA
ttggaacttactcacc

SEQ ID NO: 33614 - DNA, 16 bp, synthetic construct
  misc_feature 1..16: note = synthetic [barcode part1]
  source 1..16: mol_type = other DNA
tgacgtaacacggttc

SEQ ID NO: 33615 - DNA, 16 bp, synthetic construct
  misc_feature 1..16: note = synthetic [barcode part1]
  source 1..16: mol_type = other DNA
tatctactctgtccgc

SEQ ID NO: 33616 - DNA, 16 bp, synthetic construct
  misc_feature 1..16: note = synthetic [barcode part1]
  source 1..16: mol_type = other DNA
cgaactggacttggtt

SEQ ID NO: 33617 - DNA, 16 bp, synthetic construct
  misc_feature 1..16: note = synthetic [barcode part1]
  source 1..16: mol_type = other DNA
tatactacgtggccag

SEQ ID NO: 33618 - DNA, 16 bp, synthetic construct
  misc_feature 1..16: note = synthetic [barcode part1]
  source 1..16: mol_type = other DNA
gacgcgttcctagttc

SEQ ID NO: 33619 - DNA, 16 bp, synthetic construct
  misc_feature 1..16: note = synthetic [barcode part1]
  source 1..16: mol_type = other DNA
gcgtctcactagacct

SEQ ID NO: 33620 - DNA, 16 bp, synthetic construct
  misc_feature 1..16: note = synthetic [barcode part1]
  source 1..16: mol_type = other DNA
atccgttcgcctactt

SEQ ID NO: 33621 - DNA, 16 bp, synthetic construct
  misc_feature 1..16: note = synthetic [barcode part1]
  source 1..16: mol_type = other DNA
atagtcgcacgtgatc

SEQ ID NO: 33622 - DNA, 16 bp, synthetic construct
  misc_feature 1..16: note = synthetic [barcode part1]
  source 1..16: mol_type = other DNA
gcactgattctcaact

SEQ ID NO: 33623 - DNA, 16 bp, synthetic construct
  misc_feature 1..16: note = synthetic [barcode part1]
  source 1..16: mol_type = other DNA
agttggtcacaacgtc

SEQ ID NO: 33624 - DNA, 16 bp, synthetic construct
  misc_feature 1..16: note = synthetic [barcode part1]
  source 1..16: mol_type = other DNA
taattcacgtcaggcg

SEQ ID NO: 33625 - DNA, 16 bp, synthetic construct
  misc_feature 1..16: note = synthetic [barcode part1]
  source 1..16: mol_type = other DNA
ttggagtctcggaatc

SEQ ID NO: 33626 - DNA, 16 bp, synthetic construct
  misc_feature 1..16: note = synthetic [barcode part1]
  source 1..16: mol_type = other DNA
cgttgttaggtcaggt

SEQ ID NO: 33627 - DNA, 16 bp, synthetic construct
  misc_feature 1..16: note = synthetic [barcode part1]
  source 1..16: mol_type = other DNA
tgtgttgcaaccacag

SEQ ID NO: 33628 - DNA, 16 bp, synthetic construct
  misc_feature 1..16: note = synthetic [barcode part1]
  source 1..16: mol_type = other DNA
taggcagatagtgccg

SEQ ID NO: 33629 - DNA, 16 bp, synthetic construct
  misc_feature 1..16: note = synthetic [barcode part1]
  source 1..16: mol_type = other DNA
ccgtacttactggacc

SEQ ID NO: 33630 - DNA, 16 bp, synthetic construct
  misc_feature 1..16: note = synthetic [barcode part1]
  source 1..16: mol_type = other DNA
aagtaggtgttacggt

SEQ ID NO: 33631 - DNA, 16 bp, synthetic construct
  misc_feature 1..16: note = synthetic [barcode part1]
  source 1..16: mol_type = other DNA
tatcttgtgtctaggc

SEQ ID NO: 33632 - DNA, 16 bp, synthetic construct
  misc_feature 1..16: note = synthetic [barcode part1]
  source 1..16: mol_type = other DNA
ttggttgacgttgcag

SEQ ID NO: 33633 - DNA, 16 bp, synthetic construct
  misc_feature 1..16: note = synthetic [barcode part1]
  source 1..16: mol_type = other DNA
gttgttgactgagtcg

SEQ ID NO: 33634 - DNA, 16 bp, synthetic construct
  misc_feature 1..16: note = synthetic [barcode part1]
  source 1..16: mol_type = other DNA
ataacttccgtatccg

SEQ ID NO: 33635 - DNA, 16 bp, synthetic construct
  misc_feature 1..16: note = synthetic [barcode part1]
  source 1..16: mol_type = other DNA
gtctcactattgacac

SEQ ID NO: 33636 - DNA, 16 bp, synthetic construct
  misc_feature 1..16: note = synthetic [barcode part1]
  source 1..16: mol_type = other DNA
cgatcggttgatcaac

SEQ ID NO: 33637 - DNA, 16 bp, synthetic construct
  misc_feature 1..16: note = synthetic [barcode part1]
  source 1..16: mol_type = other DNA
tgccaagttgtatcct

SEQ ID NO: 33638 - DNA, 16 bp, synthetic construct
  misc_feature 1..16: note = synthetic [barcode part1]
  source 1..16: mol_type = other DNA
cgagtaccacagactt

SEQ ID NO: 33639 - DNA, 16 bp, synthetic construct
  misc_feature 1..16: note = synthetic [barcode part1]
  source 1..16: mol_type = other DNA
agacgttagtagaacc

SEQ ID NO: 33640 - DNA, 16 bp, synthetic construct
  misc_feature 1..16: note = synthetic [barcode part1]
  source 1..16: mol_type = other DNA
aggcctagtggttact

SEQ ID NO: 33641 - DNA, 16 bp, synthetic construct
  misc_feature 1..16: note = synthetic [barcode part1]
  source 1..16: mol_type = other DNA
aactgtgagtcaagac

SEQ ID NO: 33642 - DNA, 16 bp, synthetic construct
  misc_feature 1..16: note = synthetic [barcode part1]
  source 1..16: mol_type = other DNA
ccgttaagacttgacg

SEQ ID NO: 33643 - DNA, 16 bp, synthetic construct
  misc_feature 1..16: note = synthetic [barcode part1]
  source 1..16: mol_type = other DNA
atacgacggaactaac

SEQ ID NO: 33644 - DNA, 16 bp, synthetic construct
  misc_feature 1..16: note = synthetic [barcode part1]
  source 1..16: mol_type = other DNA
ccggttctattaacgt

SEQ ID NO: 33645 - DNA, 16 bp, synthetic construct
  misc_feature 1..16: note = synthetic [barcode part1]
  source 1..16: mol_type = other DNA
acggatcaagacgatt

SEQ ID NO: 33646 - DNA, 16 bp, synthetic construct
  misc_feature 1..16: note = synthetic [barcode part1]
  source 1..16: mol_type = other DNA
cggcagtgtgtaagac

SEQ ID NO: 33647 - DNA, 16 bp, synthetic construct
  misc_feature 1..16: note = synthetic [barcode part1]
  source 1..16: mol_type = other DNA
cggcagttataagaac

SEQ ID NO: 33648 - DNA, 16 bp, synthetic construct
  misc_feature 1..16: note = synthetic [barcode part1]
  source 1..16: mol_type = other DNA
gtgactggttgtgtgt

SEQ ID NO: 33649 - DNA, 16 bp, synthetic construct
  misc_feature 1..16: note = synthetic [barcode part1]
  source 1..16: mol_type = other DNA
tgatcgactgatcgac

SEQ ID NO: 33650 - DNA, 16 bp, synthetic construct
  misc_feature 1..16: note = synthetic [barcode part1]
  source 1..16: mol_type = other DNA
ttgaagatcttcggcg

SEQ ID NO: 33651 - DNA, 16 bp, synthetic construct
  misc_feature 1..16: note = synthetic [barcode part1]
  source 1..16: mol_type = other DNA
actaggtagacgcgac

SEQ ID NO: 33652 - DNA, 16 bp, synthetic construct
  misc_feature 1..16: note = synthetic [barcode part1]
  source 1..16: mol_type = other DNA
gtaggtcaccgttcct

SEQ ID NO: 33653 - DNA, 16 bp, synthetic construct
  misc_feature 1..16: note = synthetic [barcode part1]
  source 1..16: mol_type = other DNA
tcctacgtcgacaacc

SEQ ID NO: 33654 - DNA, 16 bp, synthetic construct
  misc_feature 1..16: note = synthetic [barcode part1]
  source 1..16: mol_type = other DNA
gttgaggttggaagag

SEQ ID NO: 33655 - DNA, 16 bp, synthetic construct
  misc_feature 1..16: note = synthetic [barcode part1]
  source 1..16: mol_type = other DNA
gttgaactgttcctac

SEQ ID NO: 33656 - DNA, 16 bp, synthetic construct
  misc_feature 1..16: note = synthetic [barcode part1]
  source 1..16: mol_type = other DNA
agtaccgtcaactggt

SEQ ID NO: 33657 - DNA, 16 bp, synthetic construct
  misc_feature 1..16: note = synthetic [barcode part1]
  source 1..16: mol_type = other DNA
ccaagacttcacttgt

SEQ ID NO: 33658 - DNA, 16 bp, synthetic construct
  misc_feature 1..16: note = synthetic [barcode part1]
  source 1..16: mol_type = other DNA
agaattgtcctcgacg

SEQ ID NO: 33659 - DNA, 16 bp, synthetic construct
  misc_feature 1..16: note = synthetic [barcode part1]
  source 1..16: mol_type = other DNA
cagaggaagttaggac

SEQ ID NO: 33660 - DNA, 16 bp, synthetic construct
  misc_feature 1..16: note = synthetic [barcode part1]
  source 1..16: mol_type = other DNA
cacgtcttagaccgtc

SEQ ID NO: 33661 - DNA, 16 bp, synthetic construct
  misc_feature 1..16: note = synthetic [barcode part1]
  source 1..16: mol_type = other DNA
gtcaacggagtgttct

SEQ ID NO: 33662 - DNA, 16 bp, synthetic construct
  misc_feature 1..16: note = synthetic [barcode part1]
  source 1..16: mol_type = other DNA
cgacaaccgtaggagt

SEQ ID NO: 33663 - DNA, 16 bp, synthetic construct
  misc_feature 1..16: note = synthetic [barcode part1]
  source 1..16: mol_type = other DNA
aaccttcgtgcaactt

SEQ ID NO: 33664 - DNA, 16 bp, synthetic construct
  misc_feature 1..16: note = synthetic [barcode part1]
  source 1..16: mol_type = other DNA
cgttagtaatcttccg

SEQ ID NO: 33665 - DNA, 16 bp, synthetic construct
  misc_feature 1..16: note = synthetic [barcode part1]
  source 1..16: mol_type = other DNA
agaacgagtgaatcct

SEQ ID NO: 33666 - DNA, 16 bp, synthetic construct
  misc_feature 1..16: note = synthetic [barcode part1]
  source 1..16: mol_type = other DNA
gtagtggtaccaatag

SEQ ID NO: 33667 - DNA, 16 bp, synthetic construct
  misc_feature 1..16: note = synthetic [barcode part1]
  source 1..16: mol_type = other DNA
cctacggtaaggtgag

SEQ ID NO: 33668 - DNA, 16 bp, synthetic construct
  misc_feature 1..16: note = synthetic [barcode part1]
  source 1..16: mol_type = other DNA
tccgtatcacgtcctt

SEQ ID NO: 33669 - DNA, 16 bp, synthetic construct
  misc_feature 1..16: note = synthetic [barcode part1]
  source 1..16: mol_type = other DNA
gacgatctggttcagt

SEQ ID NO: 33670 - DNA, 16 bp, synthetic construct
  misc_feature 1..16: note = synthetic [barcode part1]
  source 1..16: mol_type = other DNA
tcgaacgacgaacctt

SEQ ID NO: 33671 - DNA, 16 bp, synthetic construct
  misc_feature 1..16: note = synthetic [barcode part1]
  source 1..16: mol_type = other DNA
taagactgcgcacgtt

SEQ ID NO: 33672 - DNA, 16 bp, synthetic construct
  misc_feature 1..16: note = synthetic [barcode part1]
  source 1..16: mol_type = other DNA
aatcacaggttctcct

SEQ ID NO: 33673 - DNA, 16 bp, synthetic construct
  misc_feature 1..16: note = synthetic [barcode part1]
  source 1..16: mol_type = other DNA
gagatattcgacaacg

SEQ ID NO: 33674 - DNA, 16 bp, synthetic construct
  misc_feature 1..16: note = synthetic [barcode part1]
  source 1..16: mol_type = other DNA
cgtcgagtgaattgtc

SEQ ID NO: 33675 - DNA, 16 bp, synthetic construct
  misc_feature 1..16: note = synthetic [barcode part1]
  source 1..16: mol_type = other DNA
acacgacaggaggtct

SEQ ID NO: 33676 - DNA, 16 bp, synthetic construct
  misc_feature 1..16: note = synthetic [barcode part1]
  source 1..16: mol_type = other DNA
attgtgcactacttcg

SEQ ID NO: 33677 - DNA, 16 bp, synthetic construct
  misc_feature 1..16: note = synthetic [barcode part1]
  source 1..16: mol_type = other DNA
taccgtcgtagtcgtc

SEQ ID NO: 33678 - DNA, 16 bp, synthetic construct
  misc_feature 1..16: note = synthetic [barcode part1]
  source 1..16: mol_type = other DNA
agtgtatcttcggtct

SEQ ID NO: 33679 - DNA, 16 bp, synthetic construct
  misc_feature 1..16: note = synthetic [barcode part1]
  source 1..16: mol_type = other DNA
cctaactcacgtagtt

SEQ ID NO: 33680 - DNA, 16 bp, synthetic construct
  misc_feature 1..16: note = synthetic [barcode part1]
  source 1..16: mol_type = other DNA
tcaaggtggataggcc

SEQ ID NO: 33681 - DNA, 16 bp, synthetic construct
  misc_feature 1..16: note = synthetic [barcode part1]
  source 1..16: mol_type = other DNA
ccttgcacagtctgac

SEQ ID NO: 33682 - DNA, 16 bp, synthetic construct
  misc_feature 1..16: note = synthetic [barcode part1]
  source 1..16: mol_type = other DNA
ccaggtggatacttac

SEQ ID NO: 33683 - DNA, 16 bp, synthetic construct
  misc_feature 1..16: note = synthetic [barcode part1]
  source 1..16: mol_type = other DNA
aggacactgacaaccg

SEQ ID NO: 33684 - DNA, 16 bp, synthetic construct
  misc_feature 1..16: note = synthetic [barcode part1]
  source 1..16: mol_type = other DNA
cggtagtcaattcggt

SEQ ID NO: 33685 - DNA, 16 bp, synthetic construct
  misc_feature 1..16: note = synthetic [barcode part1]
  source 1..16: mol_type = other DNA
atcctacaccttccgt

SEQ ID NO: 33686 - DNA, 16 bp, synthetic construct
  misc_feature 1..16: note = synthetic [barcode part1]
  source 1..16: mol_type = other DNA
tgactgtcttgcgaag

SEQ ID NO: 33687 - DNA, 16 bp, synthetic construct
  misc_feature 1..16: note = synthetic [barcode part1]
  source 1..16: mol_type = other DNA
actccactctagtctc

SEQ ID NO: 33688 - DNA, 16 bp, synthetic construct
  misc_feature 1..16: note = synthetic [barcode part1]
  source 1..16: mol_type = other DNA
cgacgtcttacctacg

SEQ ID NO: 33689 - DNA, 16 bp, synthetic construct
  misc_feature 1..16: note = synthetic [barcode part1]
  source 1..16: mol_type = other DNA
gttcgaggtcttatct

SEQ ID NO: 33690 - DNA, 16 bp, synthetic construct
  misc_feature 1..16: note = synthetic [barcode part1]
  source 1..16: mol_type = other DNA
gacgattatacaaggc

SEQ ID NO: 33691 - DNA, 16 bp, synthetic construct
  misc_feature 1..16: note = synthetic [barcode part1]
  source 1..16: mol_type = other DNA
tgtgtcttgtcggatt

SEQ ID NO: 33692 - DNA, 16 bp, synthetic construct
  misc_feature 1..16: note = synthetic [barcode part1]
  source 1..16: mol_type = other DNA
aaggcggatctatagt

SEQ ID NO: 33693 - DNA, 16 bp, synthetic construct
  misc_feature 1..16: note = synthetic [barcode part1]
  source 1..16: mol_type = other DNA
ttcgagtaacgcactg

SEQ ID NO: 33694 - DNA, 16 bp, synthetic construct
  misc_feature 1..16: note = synthetic [barcode part1]
  source 1..16: mol_type = other DNA
acgagagttagattgc

SEQ ID NO: 33695 - DNA, 16 bp, synthetic construct
  misc_feature 1..16: note = synthetic [barcode part1]
  source 1..16: mol_type = other DNA
gatcactgacgtggag

SEQ ID NO: 33696 - DNA, 16 bp, synthetic construct
  misc_feature 1..16: note = synthetic [barcode part1]
  source 1..16: mol_type = other DNA
tgcgcaacgaacttgt

SEQ ID NO: 33697 - DNA, 16 bp, synthetic construct
  misc_feature 1..16: note = synthetic [barcode part1]
  source 1..16: mol_type = other DNA
agactcgtgttctgtt

SEQ ID NO: 33698 - DNA, 16 bp, synthetic construct
  misc_feature 1..16: note = synthetic [barcode part1]
  source 1..16: mol_type = other DNA
acctaaggtggattcc

SEQ ID NO: 33699 - DNA, 16 bp, synthetic construct
  misc_feature 1..16: note = synthetic [barcode part1]
  source 1..16: mol_type = other DNA
tgcgcaagaaccaggt

SEQ ID NO: 33700 - DNA, 16 bp, synthetic construct
  misc_feature 1..16: note = synthetic [barcode part1]
  source 1..16: mol_type = other DNA
gtcaactcttcctctg

SEQ ID NO: 33701 - DNA, 16 bp, synthetic construct
  misc_feature 1..16: note = synthetic [barcode part1]
  source 1..16: mol_type = other DNA
tcctaagactcgcctg

SEQ ID NO: 33702 - DNA, 16 bp, synthetic construct
  misc_feature 1..16: note = synthetic [barcode part1]
  source 1..16: mol_type = other DNA
cggtacagagaattgt

SEQ ID NO: 33703 - DNA, 16 bp, synthetic construct
  misc_feature 1..16: note = synthetic [barcode part1]
  source 1..16: mol_type = other DNA
agtgacttcagtgacc

SEQ ID NO: 33704 - DNA, 16 bp, synthetic construct
  misc_feature 1..16: note = synthetic [barcode part1]
  source 1..16: mol_type = other DNA
gcgaattaagagttgc

SEQ ID NO: 33705 - DNA, 16 bp, synthetic construct
  misc_feature 1..16: note = synthetic [barcode part1]
  source 1..16: mol_type = other DNA
aggcggaagattccgt

SEQ ID NO: 33706 - DNA, 16 bp, synthetic construct
  misc_feature 1..16: note = synthetic [barcode part1]
  source 1..16: mol_type = other DNA
cacgacgtcgtaatac

SEQ ID NO: 33707 - DNA, 16 bp, synthetic construct
  misc_feature 1..16: note = synthetic [barcode part1]
  source 1..16: mol_type = other DNA
attgtcggcgtgagag

SEQ ID NO: 33708 - DNA, 16 bp, synthetic construct
  misc_feature 1..16: note = synthetic [barcode part1]
  source 1..16: mol_type = other DNA
gtcacttgcggtaagt

SEQ ID NO: 33709 - DNA, 16 bp, synthetic construct
  misc_feature 1..16: note = synthetic [barcode part1]
  source 1..16: mol_type = other DNA
tacctgcgacagatac

SEQ ID NO: 33710 - DNA, 16 bp, synthetic construct
  misc_feature 1..16: note = synthetic [barcode part1]
  source 1..16: mol_type = other DNA
aatagaggacctacac

SEQ ID NO: 33711 - DNA, 16 bp, synthetic construct
  misc_feature 1..16: note = synthetic [barcode part1]
  source 1..16: mol_type = other DNA
tctgtacggaggtgtt

SEQ ID NO: 33712 - DNA, 16 bp, synthetic construct
  misc_feature 1..16: note = synthetic [barcode part1]
  source 1..16: mol_type = other DNA
tatccacggtatcact

SEQ ID NO: 33713 - DNA, 16 bp, synthetic construct
  misc_feature 1..16: note = synthetic [barcode part1]
  source 1..16: mol_type = other DNA
caggagtcgaatcgtg

SEQ ID NO: 33714 - DNA, 16 bp, synthetic construct
  misc_feature 1..16: note = synthetic [barcode part1]
  source 1..16: mol_type = other DNA
ttatcgtggacctatc

SEQ ID NO: 33715 - DNA, 16 bp, synthetic construct
  misc_feature 1..16: note = synthetic [barcode part1]
  source 1..16: mol_type = other DNA
tcaatctgcaaccgcc

SEQ ID NO: 33716 - DNA, 16 bp, synthetic construct
  misc_feature 1..16: note = synthetic [barcode part1]
  source 1..16: mol_type = other DNA
caagtggatagtgttg

SEQ ID NO: 33717 - DNA, 16 bp, synthetic construct
  misc_feature 1..16: note = synthetic [barcode part1]
  source 1..16: mol_type = other DNA
aataacgtgccgttcg

SEQ ID NO: 33718 - DNA, 16 bp, synthetic construct
  misc_feature 1..16: note = synthetic [barcode part1]
  source 1..16: mol_type = other DNA
gattggtctgactgac

SEQ ID NO: 33719 - DNA, 16 bp, synthetic construct
  misc_feature 1..16: note = synthetic [barcode part1]
  source 1..16: mol_type = other DNA
cgacggtattgaatcc

SEQ ID NO: 33720 - DNA, 16 bp, synthetic construct
  misc_feature 1..16: note = synthetic [barcode part1]
  source 1..16: mol_type = other DNA
tctagttccgatcctc

SEQ ID NO: 33721 - DNA, 16 bp, synthetic construct
  misc_feature 1..16: note = synthetic [barcode part1]
  source 1..16: mol_type = other DNA
aatccaacctcacact

SEQ ID NO: 33722 - DNA, 16 bp, synthetic construct
  misc_feature 1..16: note = synthetic [barcode part1]
  source 1..16: mol_type = other DNA
tcgttgacgtgttccg

SEQ ID NO: 33723 - DNA, 16 bp, synthetic construct
  misc_feature 1..16: note = synthetic [barcode part1]
  source 1..16: mol_type = other DNA
gccttatctcagtcct

SEQ ID NO: 33724 - DNA, 16 bp, synthetic construct
  misc_feature 1..16: note = synthetic [barcode part1]
  source 1..16: mol_type = other DNA
aagaccttgtcgtgac

SEQ ID NO: 33725 - DNA, 16 bp, synthetic construct
  misc_feature 1..16: note = synthetic [barcode part1]
  source 1..16: mol_type = other DNA
ttggatacggagtagt

SEQ ID NO: 33726 - DNA, 16 bp, synthetic construct
  misc_feature 1..16: note = synthetic [barcode part1]
  source 1..16: mol_type = other DNA
gtatctctcctcgtgt

SEQ ID NO: 33727 - DNA, 16 bp, synthetic construct
  misc_feature 1..16: note = synthetic [barcode part1]
  source 1..16: mol_type = other DNA
cgtgtgactatcgcct

SEQ ID NO: 33728 - DNA, 16 bp, synthetic construct
  misc_feature 1..16: note = synthetic [barcode part1]
  source 1..16: mol_type = other DNA
acgtcaatagttctcc

SEQ ID NO: 33729 - DNA, 16 bp, synthetic construct
  misc_feature 1..16: note = synthetic [barcode part1]
  source 1..16: mol_type = other DNA
cgaagagtaacacgcc

SEQ ID NO: 33730 - DNA, 16 bp, synthetic construct
  misc_feature 1..16: note = synthetic [barcode part1]
  source 1..16: mol_type = other DNA
cagtcgagatcgactt

SEQ ID NO: 33731 - DNA, 16 bp, synthetic construct
  misc_feature 1..16: note = synthetic [barcode part1]
  source 1..16: mol_type = other DNA
cgactaacacggtatc

SEQ ID NO: 33732 - DNA, 16 bp, synthetic construct
  misc_feature 1..16: note = synthetic [barcode part1]
  source 1..16: mol_type = other DNA
cagaggtcctgacaag

SEQ ID NO: 33733 - DNA, 16 bp, synthetic construct
  misc_feature 1..16: note = synthetic [barcode part1]
  source 1..16: mol_type = other DNA
ccactggaatcactag

SEQ ID NO: 33734 - DNA, 16 bp, synthetic construct
  misc_feature 1..16: note = synthetic [barcode part1]
  source 1..16: mol_type = other DNA
tcaaggtacaggtggc

SEQ ID NO: 33735 - DNA, 16 bp, synthetic construct
  misc_feature 1..16: note = synthetic [barcode part1]
  source 1..16: mol_type = other DNA
gttcgtatcagacacg

SEQ ID NO: 33736 - DNA, 16 bp, synthetic construct
  misc_feature 1..16: note = synthetic [barcode part1]
  source 1..16: mol_type = other DNA
tgccttcgattactag

SEQ ID NO: 33737 - DNA, 16 bp, synthetic construct
  misc_feature 1..16: note = synthetic [barcode part1]
  source 1..16: mol_type = other DNA
tatagactccgtcgtt

SEQ ID NO: 33738 - DNA, 16 bp, synthetic construct
  misc_feature 1..16: note = synthetic [barcode part1]
  source 1..16: mol_type = other DNA
cgtcttcagagatacg

SEQ ID NO: 33739 - DNA, 16 bp, synthetic construct
  misc_feature 1..16: note = synthetic [barcode part1]
  source 1..16: mol_type = other DNA
acactgacctcactgc

SEQ ID NO: 33740 - DNA, 16 bp, synthetic construct
  misc_feature 1..16: note = synthetic [barcode part1]
  source 1..16: mol_type = other DNA
atagactcagtgaggt

SEQ ID NO: 33741 - DNA, 16 bp, synthetic construct
  misc_feature 1..16: note = synthetic [barcode part1]
  source 1..16: mol_type = other DNA
gttataggcagtgcct

SEQ ID NO: 33742 - DNA, 16 bp, synthetic construct
  misc_feature 1..16: note = synthetic [barcode part1]
  source 1..16: mol_type = other DNA
cgattctacgttggtt

SEQ ID NO: 33743 - DNA, 16 bp, synthetic construct
  misc_feature 1..16: note = synthetic [barcode part1]
  source 1..16: mol_type = other DNA
cggtgtgtaatcctcc

SEQ ID NO: 33744 - DNA, 16 bp, synthetic construct
  misc_feature 1..16: note = synthetic [barcode part1]
  source 1..16: mol_type = other DNA
tacctcgtactgttcc

SEQ ID NO: 33745 - DNA, 16 bp, synthetic construct
  misc_feature 1..16: note = synthetic [barcode part1]
  source 1..16: mol_type = other DNA
acgtccttagtggtcc

SEQ ID NO: 33746 - DNA, 16 bp, synthetic construct
  misc_feature 1..16: note = synthetic [barcode part1]
  source 1..16: mol_type = other DNA
acagactgaggattac

SEQ ID NO: 33747 - DNA, 16 bp, synthetic construct
  misc_feature 1..16: note = synthetic [barcode part1]
  source 1..16: mol_type = other DNA
cctatcagtgcaatct

SEQ ID NO: 33748 - DNA, 16 bp, synthetic construct
  misc_feature 1..16: note = synthetic [barcode part1]
  source 1..16: mol_type = other DNA
aactgtgtgcacaacc

SEQ ID NO: 33749 - DNA, 16 bp, synthetic construct
  misc_feature 1..16: note = synthetic [barcode part1]
  source 1..16: mol_type = other DNA
ccttacgaccagatcc

SEQ ID NO: 33750 - DNA, 16 bp, synthetic construct
  misc_feature 1..16: note = synthetic [barcode part1]
  source 1..16: mol_type = other DNA
cagagtgagtgacaag

SEQ ID NO: 33751 - DNA, 16 bp, synthetic construct
  misc_feature 1..16: note = synthetic [barcode part1]
  source 1..16: mol_type = other DNA
ccgtctaagtgtcgtc

SEQ ID NO: 33752 - DNA, 16 bp, synthetic construct
  misc_feature 1..16: note = synthetic [barcode part1]
  source 1..16: mol_type = other DNA
taaccttccgatcctc

SEQ ID NO: 33753 - DNA, 16 bp, synthetic construct
  misc_feature 1..16: note = synthetic [barcode part1]
  source 1..16: mol_type = other DNA
accaatacagaggact

SEQ ID NO: 33754 - DNA, 16 bp, synthetic construct
  misc_feature 1..16: note = synthetic [barcode part1]
  source 1..16: mol_type = other DNA
agacaatccttgccag

SEQ ID NO: 33755 - DNA, 16 bp, synthetic construct
  misc_feature 1..16: note = synthetic [barcode part1]
  source 1..16: mol_type = other DNA
aactgtgtgacacgtc

SEQ ID NO: 33756 - DNA, 16 bp, synthetic construct
  misc_feature 1..16: note = synthetic [barcode part1]
  source 1..16: mol_type = other DNA
aagaccgccagtacag

SEQ ID NO: 33757 - DNA, 16 bp, synthetic construct
  misc_feature 1..16: note = synthetic [barcode part1]
  source 1..16: mol_type = other DNA
tcacggcactgattag

SEQ ID NO: 33758 - DNA, 16 bp, synthetic construct
  misc_feature 1..16: note = synthetic [barcode part1]
  source 1..16: mol_type = other DNA
cagatctcttattgcg

SEQ ID NO: 33759 - DNA, 16 bp, synthetic construct
  misc_feature 1..16: note = synthetic [barcode part1]
  source 1..16: mol_type = other DNA
cagaacgttgtcgttg

SEQ ID NO: 33760 - DNA, 16 bp, synthetic construct
  misc_feature 1..16: note = synthetic [barcode part1]
  source 1..16: mol_type = other DNA
tcaggttggagtatag

SEQ ID NO: 33761 - DNA, 16 bp, synthetic construct
  misc_feature 1..16: note = synthetic [barcode part1]
  source 1..16: mol_type = other DNA
tactatcttgtgcgac

SEQ ID NO: 33762 - DNA, 16 bp, synthetic construct
  misc_feature 1..16: note = synthetic [barcode part1]
  source 1..16: mol_type = other DNA
gtctcacgtcttctac

SEQ ID NO: 33763 - DNA, 16 bp, synthetic construct
  misc_feature 1..16: note = synthetic [barcode part1]
  source 1..16: mol_type = other DNA
attagtagttctccgc

SEQ ID NO: 33764 - DNA, 16 bp, synthetic construct
  misc_feature 1..16: note = synthetic [barcode part1]
  source 1..16: mol_type = other DNA
aatcacgagttctctc

SEQ ID NO: 33765 - DNA, 16 bp, synthetic construct
  misc_feature 1..16: note = synthetic [barcode part1]
  source 1..16: mol_type = other DNA
gccagaattcttcgag

SEQ ID NO: 33766 - DNA, 16 bp, synthetic construct
  misc_feature 1..16: note = synthetic [barcode part1]
  source 1..16: mol_type = other DNA
atactctcggtaatcc

SEQ ID NO: 33767 - DNA, 16 bp, synthetic construct
  misc_feature 1..16: note = synthetic [barcode part1]
  source 1..16: mol_type = other DNA
tcgaacggaactcgtt

SEQ ID NO: 33768 - DNA, 16 bp, synthetic construct
  misc_feature 1..16: note = synthetic [barcode part1]
  source 1..16: mol_type = other DNA
tgtgacggaataggtt

SEQ ID NO: 33769 - DNA, 16 bp, synthetic construct
  misc_feature 1..16: note = synthetic [barcode part1]
  source 1..16: mol_type = other DNA
tcgaaggtagtctctg

SEQ ID NO: 33770 - DNA, 16 bp, synthetic construct
  misc_feature 1..16: note = synthetic [barcode part1]
  source 1..16: mol_type = other DNA
ttaatacgtgccggtg

SEQ ID NO: 33771 - DNA, 16 bp, synthetic construct
  misc_feature 1..16: note = synthetic [barcode part1]
  source 1..16: mol_type = other DNA
tccttccggaactctt

SEQ ID NO: 33772 - DNA, 16 bp, synthetic construct
  misc_feature 1..16: note = synthetic [barcode part1]
  source 1..16: mol_type = other DNA
gtgtccttgtaggaac

SEQ ID NO: 33773 - DNA, 16 bp, synthetic construct
  misc_feature 1..16: note = synthetic [barcode part1]
  source 1..16: mol_type = other DNA
ttcagtggagtcgttg

SEQ ID NO: 33774 - DNA, 16 bp, synthetic construct
  misc_feature 1..16: note = synthetic [barcode part1]
  source 1..16: mol_type = other DNA
aattcgcagtgaagtg

SEQ ID NO: 33775 - DNA, 16 bp, synthetic construct
  misc_feature 1..16: note = synthetic [barcode part1]
  source 1..16: mol_type = other DNA
gatctagagaacgcgc

SEQ ID NO: 33776 - DNA, 16 bp, synthetic construct
  misc_feature 1..16: note = synthetic [barcode part1]
  source 1..16: mol_type = other DNA
gtcggtaaggtactct

SEQ ID NO: 33777 - DNA, 16 bp, synthetic construct
  misc_feature 1..16: note = synthetic [barcode part1]
  source 1..16: mol_type = other DNA
ttcagtggtgatccag

SEQ ID NO: 33778 - DNA, 16 bp, synthetic construct
  misc_feature 1..16: note = synthetic [barcode part1]
  source 1..16: mol_type = other DNA
tcactgtcgagtactt

SEQ ID NO: 33779 - DNA, 16 bp, synthetic construct
  misc_feature 1..16: note = synthetic [barcode part1]
  source 1..16: mol_type = other DNA
tccgtaatccagacag

SEQ ID NO: 33780 - DNA, 16 bp, synthetic construct
  misc_feature 1..16: note = synthetic [barcode part1]
  source 1..16: mol_type = other DNA
gttgaactatccttgc

SEQ ID NO: 33781 - DNA, 16 bp, synthetic construct
  misc_feature 1..16: note = synthetic [barcode part1]
  source 1..16: mol_type = other DNA
cgatagttcctgcgtc

SEQ ID NO: 33782 - DNA, 16 bp, synthetic construct
  misc_feature 1..16: note = synthetic [barcode part1]
  source 1..16: mol_type = other DNA
accacgaacgaatagt

SEQ ID NO: 33783 - DNA, 16 bp, synthetic construct
  misc_feature 1..16: note = synthetic [barcode part1]
  source 1..16: mol_type = other DNA
tggtgatccttgtatc

SEQ ID NO: 33784 - DNA, 16 bp, synthetic construct
  misc_feature 1..16: note = synthetic [barcode part1]
  source 1..16: mol_type = other DNA
tacctccgacttggtg

SEQ ID NO: 33785 - DNA, 16 bp, synthetic construct
  misc_feature 1..16: note = synthetic [barcode part1]
  source 1..16: mol_type = other DNA
caccgtcgaactaagt

SEQ ID NO: 33786 - DNA, 16 bp, synthetic construct
  misc_feature 1..16: note = synthetic [barcode part1]
  source 1..16: mol_type = other DNA
gattcgtgtctgcaag

SEQ ID NO: 33787 - DNA, 16 bp, synthetic construct
  misc_feature 1..16: note = synthetic [barcode part1]
  source 1..16: mol_type = other DNA
agacgtggccactaag

SEQ ID NO: 33788 - DNA, 16 bp, synthetic construct
  misc_feature 1..16: note = synthetic [barcode part1]
  source 1..16: mol_type = other DNA
aacttccgccactctt

SEQ ID NO: 33789 - DNA, 16 bp, synthetic construct
  misc_feature 1..16: note = synthetic [barcode part1]
  source 1..16: mol_type = other DNA
tcttcctaacttcggc

SEQ ID NO: 33790 - DNA, 16 bp, synthetic construct
  misc_feature 1..16: note = synthetic [barcode part1]
  source 1..16: mol_type = other DNA
ttgttgcctgtctcgt

SEQ ID NO: 33791 - DNA, 16 bp, synthetic construct
  misc_feature 1..16: note = synthetic [barcode part1]
  source 1..16: mol_type = other DNA
agtcgttacctccgtg

SEQ ID NO: 33792 - DNA, 16 bp, synthetic construct
  misc_feature 1..16: note = synthetic [barcode part1]
  source 1..16: mol_type = other DNA
ttccaacgtgtctagt

SEQ ID NO: 33793 - DNA, 16 bp, synthetic construct
  misc_feature 1..16: note = synthetic [barcode part1]
  source 1..16: mol_type = other DNA
agtgatctcttacgtc

SEQ ID NO: 33794 - DNA, 16 bp, synthetic construct
  misc_feature 1..16: note = synthetic [barcode part1]
  source 1..16: mol_type = other DNA
atacggttctctcaac

SEQ ID NO: 33795 - DNA, 16 bp, synthetic construct
  misc_feature 1..16: note = synthetic [barcode part1]
  source 1..16: mol_type = other DNA
gaatcaaggaaggtcg

SEQ ID NO: 33796 - DNA, 16 bp, synthetic construct
  misc_feature 1..16: note = synthetic [barcode part1]
  source 1..16: mol_type = other DNA
cgttctggtctgtgac

SEQ ID NO: 33797 - DNA, 16 bp, synthetic construct
  misc_feature 1..16: note = synthetic [barcode part1]
  source 1..16: mol_type = other DNA
cctgtaagtaacgaag

SEQ ID NO: 33798 - DNA, 16 bp, synthetic construct
  misc_feature 1..16: note = synthetic [barcode part1]
  source 1..16: mol_type = other DNA
aacgttgtggtcaacc

SEQ ID NO: 33799 - DNA, 16 bp, synthetic construct
  misc_feature 1..16: note = synthetic [barcode part1]
  source 1..16: mol_type = other DNA
acgccgttggatagag

SEQ ID NO: 33800 - DNA, 16 bp, synthetic construct
  misc_feature 1..16: note = synthetic [barcode part1]
  source 1..16: mol_type = other DNA
tcggcagagattactc

SEQ ID NO: 33801 - DNA, 16 bp, synthetic construct
  misc_feature 1..16: note = synthetic [barcode part1]
  source 1..16: mol_type = other DNA
cgtgaagaatctaacg

SEQ ID NO: 33802 - DNA, 16 bp, synthetic construct
  misc_feature 1..16: note = synthetic [barcode part1]
  source 1..16: mol_type = other DNA
tcctcctccagaatct

SEQ ID NO: 33803 - DNA, 16 bp, synthetic construct
  misc_feature 1..16: note = synthetic [barcode part1]
  source 1..16: mol_type = other DNA
ttccgcgaattcgatt

SEQ ID NO: 33804 - DNA, 16 bp, synthetic construct
  misc_feature 1..16: note = synthetic [barcode part1]
  source 1..16: mol_type = other DNA
tctcaccttactccag

SEQ ID NO: 33805 - DNA, 16 bp, synthetic construct
  misc_feature 1..16: note = synthetic [barcode part1]
  source 1..16: mol_type = other DNA
ttgtatctccgcactc

SEQ ID NO: 33806 - DNA, 16 bp, synthetic construct
  misc_feature 1..16: note = synthetic [barcode part1]
  source 1..16: mol_type = other DNA
tagtattgcgagtgag

SEQ ID NO: 33807 - DNA, 16 bp, synthetic construct
  misc_feature 1..16: note = synthetic [barcode part1]
  source 1..16: mol_type = other DNA
gcacaacaattcctct

SEQ ID NO: 33808 - DNA, 16 bp, synthetic construct
  misc_feature 1..16: note = synthetic [barcode part1]
  source 1..16: mol_type = other DNA
tgccagatcgcgtctt

SEQ ID NO: 33809 - DNA, 16 bp, synthetic construct
  misc_feature 1..16: note = synthetic [barcode part1]
  source 1..16: mol_type = other DNA
ttcaaccgtgtcaact

SEQ ID NO: 33810 - DNA, 16 bp, synthetic construct
  misc_feature 1..16: note = synthetic [barcode part1]
  source 1..16: mol_type = other DNA
aggaataagtggtctc

SEQ ID NO: 33811 - DNA, 16 bp, synthetic construct
  misc_feature 1..16: note = synthetic [barcode part1]
  source 1..16: mol_type = other DNA
ccgcggaagatatctt

SEQ ID NO: 33812 - DNA, 16 bp, synthetic construct
  misc_feature 1..16: note = synthetic [barcode part1]
  source 1..16: mol_type = other DNA
gtcgcaggtaagtgac

SEQ ID NO: 33813 - DNA, 16 bp, synthetic construct
  misc_feature 1..16: note = synthetic [barcode part1]
  source 1..16: mol_type = other DNA
ccgttacggtatctgc

SEQ ID NO: 33814 - DNA, 16 bp, synthetic construct
  misc_feature 1..16: note = synthetic [barcode part1]
  source 1..16: mol_type = other DNA
agagacggacgattcc

SEQ ID NO: 33815 - DNA, 16 bp, synthetic construct
  misc_feature 1..16: note = synthetic [barcode part1]
  source 1..16: mol_type = other DNA
gaacgaatactgtggt

SEQ ID NO: 33816 - DNA, 16 bp, synthetic construct
  misc_feature 1..16: note = synthetic [barcode part1]
  source 1..16: mol_type = other DNA
acgactggatcttctt

SEQ ID NO: 33817 - DNA, 16 bp, synthetic construct
  misc_feature 1..16: note = synthetic [barcode part1]
  source 1..16: mol_type = other DNA
acagacgtacctgttg

SEQ ID NO: 33818 - DNA, 16 bp, synthetic construct
  misc_feature 1..16: note = synthetic [barcode part1]
  source 1..16: mol_type = other DNA
cgtaactgacctacag

SEQ ID NO: 33819 - DNA, 16 bp, synthetic construct
  misc_feature 1..16: note = synthetic [barcode part1]
  source 1..16: mol_type = other DNA
tagtcggactaaccgt

SEQ ID NO: 33820 - DNA, 16 bp, synthetic construct
  misc_feature 1..16: note = synthetic [barcode part1]
  source 1..16: mol_type = other DNA
ccgagtgataagtctc

SEQ ID NO: 33821 - DNA, 16 bp, synthetic construct
  misc_feature 1..16: note = synthetic [barcode part1]
  source 1..16: mol_type = other DNA
aacaagtggtgccgtg

SEQ ID NO: 33822 - DNA, 16 bp, synthetic construct
  misc_feature 1..16: note = synthetic [barcode part1]
  source 1..16: mol_type = other DNA
cacaccttctggtgac

SEQ ID NO: 33823 - DNA, 16 bp, synthetic construct
  misc_feature 1..16: note = synthetic [barcode part1]
  source 1..16: mol_type = other DNA
cgattctccaaggagt

SEQ ID NO: 33824 - DNA, 16 bp, synthetic construct
  misc_feature 1..16: note = synthetic [barcode part1]
  source 1..16: mol_type = other DNA
cgttatcgtgactact

SEQ ID NO: 33825 - DNA, 16 bp, synthetic construct
  misc_feature 1..16: note = synthetic [barcode part1]
  source 1..16: mol_type = other DNA
aagtgttgcggcaggt

SEQ ID NO: 33826 - DNA, 16 bp, synthetic construct
  misc_feature 1..16: note = synthetic [barcode part1]
  source 1..16: mol_type = other DNA
cctacctgatattacg

SEQ ID NO: 33827 - DNA, 16 bp, synthetic construct
  misc_feature 1..16: note = synthetic [barcode part1]
  source 1..16: mol_type = other DNA
taggcgttcctcgact

SEQ ID NO: 33828 - DNA, 16 bp, synthetic construct
  misc_feature 1..16: note = synthetic [barcode part1]
  source 1..16: mol_type = other DNA
gaaggattcgcgcagt

SEQ ID NO: 33829 - DNA, 16 bp, synthetic construct
  misc_feature 1..16: note = synthetic [barcode part1]
  source 1..16: mol_type = other DNA
cgaatcagtcggattc

SEQ ID NO: 33830 - DNA, 16 bp, synthetic construct
  misc_feature 1..16: note = synthetic [barcode part1]
  source 1..16: mol_type = other DNA
tatatacgtcggccag

SEQ ID NO: 33831 - DNA, 16 bp, synthetic construct
  misc_feature 1..16: note = synthetic [barcode part1]
  source 1..16: mol_type = other DNA
gtggtccggattattg

SEQ ID NO: 33832 - DNA, 16 bp, synthetic construct
  misc_feature 1..16: note = synthetic [barcode part1]
  source 1..16: mol_type = other DNA
ccttagaagtatcgcg

SEQ ID NO: 33833 - DNA, 16 bp, synthetic construct
  misc_feature 1..16: note = synthetic [barcode part1]
  source 1..16: mol_type = other DNA
tggtacactcttgatc

SEQ ID NO: 33834 - DNA, 16 bp, synthetic construct
  misc_feature 1..16: note = synthetic [barcode part1]
  source 1..16: mol_type = other DNA
taatagtctctgtgcc

SEQ ID NO: 33835 - DNA, 16 bp, synthetic construct
  misc_feature 1..16: note = synthetic [barcode part1]
  source 1..16: mol_type = other DNA
gtacggatctgacgag

SEQ ID NO: 33836 - DNA, 16 bp, synthetic construct
  misc_feature 1..16: note = synthetic [barcode part1]
  source 1..16: mol_type = other DNA
gtgaactaaggcaatc

SEQ ID NO: 33837 - DNA, 16 bp, synthetic construct
  misc_feature 1..16: note = synthetic [barcode part1]
  source 1..16: mol_type = other DNA
tggcaatcgcaggaac

SEQ ID NO: 33838 - DNA, 16 bp, synthetic construct
  misc_feature 1..16: note = synthetic [barcode part1]
  source 1..16: mol_type = other DNA
tgatcgtctgtcgtcg

SEQ ID NO: 33839 - DNA, 16 bp, synthetic construct
  misc_feature 1..16: note = synthetic [barcode part1]
  source 1..16: mol_type = other DNA
tacgttggttgtgcag

SEQ ID NO: 33840 - DNA, 16 bp, synthetic construct
  misc_feature 1..16: note = synthetic [barcode part1]
  source 1..16: mol_type = other DNA
accttcagacagttct

SEQ ID NO: 33841 - DNA, 16 bp, synthetic construct
  misc_feature 1..16: note = synthetic [barcode part1]
  source 1..16: mol_type = other DNA
acgccgatctccaatc

SEQ ID NO: 33842 - DNA, 16 bp, synthetic construct
  misc_feature 1..16: note = synthetic [barcode part1]
  source 1..16: mol_type = other DNA
gaaggacacctcttac

SEQ ID NO: 33843 - DNA, 16 bp, synthetic construct
  misc_feature 1..16: note = synthetic [barcode part1]
  source 1..16: mol_type = other DNA
tgcctatagacggact

SEQ ID NO: 33844 - DNA, 16 bp, synthetic construct
  misc_feature 1..16: note = synthetic [barcode part1]
  source 1..16: mol_type = other DNA
gacgtcagttgcaact

SEQ ID NO: 33845 - DNA, 16 bp, synthetic construct
  misc_feature 1..16: note = synthetic [barcode part1]
  source 1..16: mol_type = other DNA
gtgcgcgcaactaatt

SEQ ID NO: 33846 - DNA, 16 bp, synthetic construct
  misc_feature 1..16: note = synthetic [barcode part1]
  source 1..16: mol_type = other DNA
tgcagaggttatcaag

SEQ ID NO: 33847 - DNA, 16 bp, synthetic construct
  misc_feature 1..16: note = synthetic [barcode part1]
  source 1..16: mol_type = other DNA
atactccggagacgtt

SEQ ID NO: 33848 - DNA, 16 bp, synthetic construct
  misc_feature 1..16: note = synthetic [barcode part1]
  source 1..16: mol_type = other DNA
gcagtactgactgact

SEQ ID NO: 33849 - DNA, 16 bp, synthetic construct
  misc_feature 1..16: note = synthetic [barcode part1]
  source 1..16: mol_type = other DNA
acgtaactagtcacgc

SEQ ID NO: 33850 - DNA, 16 bp, synthetic construct
  misc_feature 1..16: note = synthetic [barcode part1]
  source 1..16: mol_type = other DNA
gtccgtgaggatagtg

SEQ ID NO: 33851 - DNA, 16 bp, synthetic construct
  misc_feature 1..16: note = synthetic [barcode part1]
  source 1..16: mol_type = other DNA
ttcggataggtgtctg

SEQ ID NO: 33852 - DNA, 16 bp, synthetic construct
  misc_feature 1..16: note = synthetic [barcode part1]
  source 1..16: mol_type = other DNA
aataataggcgcctag

SEQ ID NO: 33853 - DNA, 16 bp, synthetic construct
  misc_feature 1..16: note = synthetic [barcode part1]
  source 1..16: mol_type = other DNA
attaccgcacgtcctg

SEQ ID NO: 33854 - DNA, 16 bp, synthetic construct
  misc_feature 1..16: note = synthetic [barcode part1]
  source 1..16: mol_type = other DNA
agaatctccgtctgtt

SEQ ID NO: 33855 - DNA, 16 bp, synthetic construct
  misc_feature 1..16: note = synthetic [barcode part1]
  source 1..16: mol_type = other DNA
gtcgtgaccactcgtt

SEQ ID NO: 33856 - DNA, 16 bp, synthetic construct
  misc_feature 1..16: note = synthetic [barcode part1]
  source 1..16: mol_type = other DNA
cacttatactctaggc

SEQ ID NO: 33857 - DNA, 16 bp, synthetic construct
  misc_feature 1..16: note = synthetic [barcode part1]
  source 1..16: mol_type = other DNA
tcctaccttcgttgtg

SEQ ID NO: 33858 - DNA, 16 bp, synthetic construct
  misc_feature 1..16: note = synthetic [barcode part1]
  source 1..16: mol_type = other DNA
ttgtggttcgaccaag

SEQ ID NO: 33859 - DNA, 16 bp, synthetic construct
  misc_feature 1..16: note = synthetic [barcode part1]
  source 1..16: mol_type = other DNA
acgcaatcttcttgac

SEQ ID NO: 33860 - DNA, 16 bp, synthetic construct
  misc_feature 1..16: note = synthetic [barcode part1]
  source 1..16: mol_type = other DNA
tcaaccaacgtacgtg

SEQ ID NO: 33861 - DNA, 16 bp, synthetic construct
  misc_feature 1..16: note = synthetic [barcode part1]
  source 1..16: mol_type = other DNA
gcgtgaacaggttacg

SEQ ID NO: 33862 - DNA, 16 bp, synthetic construct
  misc_feature 1..16: note = synthetic [barcode part1]
  source 1..16: mol_type = other DNA
caggtacgactacact

SEQ ID NO: 33863 - DNA, 16 bp, synthetic construct
  misc_feature 1..16: note = synthetic [barcode part1]
  source 1..16: mol_type = other DNA
aagagtatcgtcagac

SEQ ID NO: 33864 - DNA, 16 bp, synthetic construct
  misc_feature 1..16: note = synthetic [barcode part1]
  source 1..16: mol_type = other DNA
tgtgagtagtgtctgc

SEQ ID NO: 33865 - DNA, 16 bp, synthetic construct
  misc_feature 1..16: note = synthetic [barcode part1]
  source 1..16: mol_type = other DNA
aggtcaggtacgtcag

SEQ ID NO: 33866 - DNA, 16 bp, synthetic construct
  misc_feature 1..16: note = synthetic [barcode part1]
  source 1..16: mol_type = other DNA
attcctgacgattcgt

SEQ ID NO: 33867 - DNA, 16 bp, synthetic construct
  misc_feature 1..16: note = synthetic [barcode part1]
  source 1..16: mol_type = other DNA
atagagtctcgaacag

SEQ ID NO: 33868 - DNA, 16 bp, synthetic construct
  misc_feature 1..16: note = synthetic [barcode part1]
  source 1..16: mol_type = other DNA
tactgtgtgactggtg

SEQ ID NO: 33869 - DNA, 16 bp, synthetic construct
  misc_feature 1..16: note = synthetic [barcode part1]
  source 1..16: mol_type = other DNA
taggaagtctcggtct

SEQ ID NO: 33870 - DNA, 16 bp, synthetic construct
  misc_feature 1..16: note = synthetic [barcode part1]
  source 1..16: mol_type = other DNA
gagacgattgtcctac

SEQ ID NO: 33871 - DNA, 16 bp, synthetic construct
  misc_feature 1..16: note = synthetic [barcode part1]
  source 1..16: mol_type = other DNA
gcctgaggtagtagac

SEQ ID NO: 33872 - DNA, 16 bp, synthetic construct
  misc_feature 1..16: note = synthetic [barcode part1]
  source 1..16: mol_type = other DNA
tccgcgttacacttct

SEQ ID NO: 33873 - DNA, 16 bp, synthetic construct
  misc_feature 1..16: note = synthetic [barcode part1]
  source 1..16: mol_type = other DNA
ttcaggttccggttcg

SEQ ID NO: 33874 - DNA, 16 bp, synthetic construct
  misc_feature 1..16: note = synthetic [barcode part1]
  source 1..16: mol_type = other DNA
atatcctccgagttac

SEQ ID NO: 33875 - DNA, 16 bp, synthetic construct
  misc_feature 1..16: note = synthetic [barcode part1]
  source 1..16: mol_type = other DNA
gtataatatcggcgcc

SEQ ID NO: 33876 - DNA, 16 bp, synthetic construct
  misc_feature 1..16: note = synthetic [barcode part1]
  source 1..16: mol_type = other DNA
cgaatattggtggagt

SEQ ID NO: 33877 - DNA, 16 bp, synthetic construct
  misc_feature 1..16: note = synthetic [barcode part1]
  source 1..16: mol_type = other DNA
gtcaactaggaccttg

SEQ ID NO: 33878 - DNA, 16 bp, synthetic construct
  misc_feature 1..16: note = synthetic [barcode part1]
  source 1..16: mol_type = other DNA
gaaggcgacaggaatt

SEQ ID NO: 33879 - DNA, 16 bp, synthetic construct
  misc_feature 1..16: note = synthetic [barcode part1]
  source 1..16: mol_type = other DNA
cgttcgtctacttacc

SEQ ID NO: 33880 - DNA, 16 bp, synthetic construct
  misc_feature 1..16: note = synthetic [barcode part1]
  source 1..16: mol_type = other DNA
gtgcagacagagatag

SEQ ID NO: 33881 - DNA, 16 bp, synthetic construct
  misc_feature 1..16: note = synthetic [barcode part1]
  source 1..16: mol_type = other DNA
cggataccacgaactt

SEQ ID NO: 33882 - DNA, 16 bp, synthetic construct
  misc_feature 1..16: note = synthetic [barcode part1]
  source 1..16: mol_type = other DNA
gtcgtccacgagttct

SEQ ID NO: 33883 - DNA, 16 bp, synthetic construct
  misc_feature 1..16: note = synthetic [barcode part1]
  source 1..16: mol_type = other DNA
caatacgtcagtacgc

SEQ ID NO: 33884 - DNA, 16 bp, synthetic construct
  misc_feature 1..16: note = synthetic [barcode part1]
  source 1..16: mol_type = other DNA
cacgaattcgtcttac

SEQ ID NO: 33885 - DNA, 16 bp, synthetic construct
  misc_feature 1..16: note = synthetic [barcode part1]
  source 1..16: mol_type = other DNA
tgtccgcgaataggtt

SEQ ID NO: 33886 - DNA, 16 bp, synthetic construct
  misc_feature 1..16: note = synthetic [barcode part1]
  source 1..16: mol_type = other DNA
cagtcttaccacgcgt

SEQ ID NO: 33887 - DNA, 16 bp, synthetic construct
  misc_feature 1..16: note = synthetic [barcode part1]
  source 1..16: mol_type = other DNA
tactgttcgtctcgtc

SEQ ID NO: 33888 - DNA, 16 bp, synthetic construct
  misc_feature 1..16: note = synthetic [barcode part1]
  source 1..16: mol_type = other DNA
gcgaggaattggacct

SEQ ID NO: 33889 - DNA, 16 bp, synthetic construct
  misc_feature 1..16: note = synthetic [barcode part1]
  source 1..16: mol_type = other DNA
agtggccgtacttctc

SEQ ID NO: 33890 - DNA, 16 bp, synthetic construct
  misc_feature 1..16: note = synthetic [barcode part1]
  source 1..16: mol_type = other DNA
ccacttgtgtcgtgac

SEQ ID NO: 33891 - DNA, 16 bp, synthetic construct
  misc_feature 1..16: note = synthetic [barcode part1]
  source 1..16: mol_type = other DNA
caatctggtcttcgcg

SEQ ID NO: 33892 - DNA, 16 bp, synthetic construct
  misc_feature 1..16: note = synthetic [barcode part1]
  source 1..16: mol_type = other DNA
tataacgtggacaggt

SEQ ID NO: 33893 - DNA, 16 bp, synthetic construct
  misc_feature 1..16: note = synthetic [barcode part1]
  source 1..16: mol_type = other DNA
cactcctcgacttgag

SEQ ID NO: 33894 - DNA, 16 bp, synthetic construct
  misc_feature 1..16: note = synthetic [barcode part1]
  source 1..16: mol_type = other DNA
tggacgagtagacaag

SEQ ID NO: 33895 - DNA, 16 bp, synthetic construct
  misc_feature 1..16: note = synthetic [barcode part1]
  source 1..16: mol_type = other DNA
tgtagtcactgaagag

SEQ ID NO: 33896 - DNA, 16 bp, synthetic construct
  misc_feature 1..16: note = synthetic [barcode part1]
  source 1..16: mol_type = other DNA
actatctgcctgtaac

SEQ ID NO: 33897 - DNA, 16 bp, synthetic construct
  misc_feature 1..16: note = synthetic [barcode part1]
  source 1..16: mol_type = other DNA
attgcgaatccacttc

SEQ ID NO: 33898 - DNA, 16 bp, synthetic construct
  misc_feature 1..16: note = synthetic [barcode part1]
  source 1..16: mol_type = other DNA
ttagttccaggagacc

SEQ ID NO: 33899 - DNA, 16 bp, synthetic construct
  misc_feature 1..16: note = synthetic [barcode part1]
  source 1..16: mol_type = other DNA
tacagaactcctgcag

SEQ ID NO: 33900 - DNA, 16 bp, synthetic construct
  misc_feature 1..16: note = synthetic [barcode part1]
  source 1..16: mol_type = other DNA
gaatcaagtcgatacg

SEQ ID NO: 33901 - DNA, 16 bp, synthetic construct
  misc_feature 1..16: note = synthetic [barcode part1]
  source 1..16: mol_type = other DNA
atcggttattacggcg

SEQ ID NO: 33902 - DNA, 16 bp, synthetic construct
  misc_feature 1..16: note = synthetic [barcode part1]
  source 1..16: mol_type = other DNA
tcactacactcacagt

SEQ ID NO: 33903 - DNA, 16 bp, synthetic construct
  misc_feature 1..16: note = synthetic [barcode part1]
  source 1..16: mol_type = other DNA
tcgtctacgtcgcagt

SEQ ID NO: 33904 - DNA, 16 bp, synthetic construct
  misc_feature 1..16: note = synthetic [barcode part1]
  source 1..16: mol_type = other DNA
gaatccgagtgtgtct

SEQ ID NO: 33905 - DNA, 16 bp, synthetic construct
  misc_feature 1..16: note = synthetic [barcode part1]
  source 1..16: mol_type = other DNA
gatctgttagaacgag

SEQ ID NO: 33906 - DNA, 16 bp, synthetic construct
  misc_feature 1..16: note = synthetic [barcode part1]
  source 1..16: mol_type = other DNA
gattgcaagtcagaac

SEQ ID NO: 33907 - DNA, 16 bp, synthetic construct
  misc_feature 1..16: note = synthetic [barcode part1]
  source 1..16: mol_type = other DNA
agacctataagaggtc

SEQ ID NO: 33908 - DNA, 16 bp, synthetic construct
  misc_feature 1..16: note = synthetic [barcode part1]
  source 1..16: mol_type = other DNA
aacttgcgataagacg

SEQ ID NO: 33909 - DNA, 16 bp, synthetic construct
  misc_feature 1..16: note = synthetic [barcode part1]
  source 1..16: mol_type = other DNA
gtctgaactgtctcgc

SEQ ID NO: 33910 - DNA, 16 bp, synthetic construct
  misc_feature 1..16: note = synthetic [barcode part1]
  source 1..16: mol_type = other DNA
gtcagttccgactaag

SEQ ID NO: 33911 - DNA, 16 bp, synthetic construct
  misc_feature 1..16: note = synthetic [barcode part1]
  source 1..16: mol_type = other DNA
agtcaggttcgcgaag

SEQ ID NO: 33912 - DNA, 16 bp, synthetic construct
  misc_feature 1..16: note = synthetic [barcode part1]
  source 1..16: mol_type = other DNA
aactgaagacgtactg

SEQ ID NO: 33913 - DNA, 16 bp, synthetic construct
  misc_feature 1..16: note = synthetic [barcode part1]
  source 1..16: mol_type = other DNA
ttattgcctacaggtc

SEQ ID NO: 33914 - DNA, 16 bp, synthetic construct
  misc_feature 1..16: note = synthetic [barcode part1]
  source 1..16: mol_type = other DNA
tcagaggtcttcagtg

SEQ ID NO: 33915 - DNA, 16 bp, synthetic construct
  misc_feature 1..16: note = synthetic [barcode part1]
  source 1..16: mol_type = other DNA
ttcagagtgattggcc

SEQ ID NO: 33916 - DNA, 16 bp, synthetic construct
  misc_feature 1..16: note = synthetic [barcode part1]
  source 1..16: mol_type = other DNA
gccttcggtctctatt

SEQ ID NO: 33917 - DNA, 16 bp, synthetic construct
  misc_feature 1..16: note = synthetic [barcode part1]
  source 1..16: mol_type = other DNA
ccaagttgaccactag

SEQ ID NO: 33918 - DNA, 16 bp, synthetic construct
  misc_feature 1..16: note = synthetic [barcode part1]
  source 1..16: mol_type = other DNA
ttgatctagtggcgac

SEQ ID NO: 33919 - DNA, 16 bp, synthetic construct
  misc_feature 1..16: note = synthetic [barcode part1]
  source 1..16: mol_type = other DNA
gccttgcagtatactt

SEQ ID NO: 33920 - DNA, 16 bp, synthetic construct
  misc_feature 1..16: note = synthetic [barcode part1]
  source 1..16: mol_type = other DNA
tacgaacagacaacac

SEQ ID NO: 33921 - DNA, 16 bp, synthetic construct
  misc_feature 1..16: note = synthetic [barcode part1]
  source 1..16: mol_type = other DNA
tgcgagatctctgtag

SEQ ID NO: 33922 - DNA, 16 bp, synthetic construct
  misc_feature 1..16: note = synthetic [barcode part1]
  source 1..16: mol_type = other DNA
gaagtagacgaacctt

SEQ ID NO: 33923 - DNA, 16 bp, synthetic construct
  misc_feature 1..16: note = synthetic [barcode part1]
  source 1..16: mol_type = other DNA
ccacctaggaccttac

SEQ ID NO: 33924 - DNA, 16 bp, synthetic construct
  misc_feature 1..16: note = synthetic [barcode part1]
  source 1..16: mol_type = other DNA
tactggtactgcacag

SEQ ID NO: 33925 - DNA, 16 bp, synthetic construct
  misc_feature 1..16: note = synthetic [barcode part1]
  source 1..16: mol_type = other DNA
attgcctagactcact

SEQ ID NO: 33926 - DNA, 16 bp, synthetic construct
  misc_feature 1..16: note = synthetic [barcode part1]
  source 1..16: mol_type = other DNA
gacggattctactcag

SEQ ID NO: 33927 - DNA, 16 bp, synthetic construct
  misc_feature 1..16: note = synthetic [barcode part1]
  source 1..16: mol_type = other DNA
tgtgttggtgttgacg

SEQ ID NO: 33928 - DNA, 16 bp, synthetic construct
  misc_feature 1..16: note = synthetic [barcode part1]
  source 1..16: mol_type = other DNA
ttggccgtaatcaacg

SEQ ID NO: 33929 - DNA, 16 bp, synthetic construct
  misc_feature 1..16: note = synthetic [barcode part1]
  source 1..16: mol_type = other DNA
gcacaacacacactgt

SEQ ID NO: 33930 - DNA, 16 bp, synthetic construct
  misc_feature 1..16: note = synthetic [barcode part1]
  source 1..16: mol_type = other DNA
gtattcctggcggtct

SEQ ID NO: 33931 - DNA, 16 bp, synthetic construct
  misc_feature 1..16: note = synthetic [barcode part1]
  source 1..16: mol_type = other DNA
cgatatacgatcctct

SEQ ID NO: 33932 - DNA, 16 bp, synthetic construct
  misc_feature 1..16: note = synthetic [barcode part1]
  source 1..16: mol_type = other DNA
actgtagaacgagtac

SEQ ID NO: 33933 - DNA, 16 bp, synthetic construct
  misc_feature 1..16: note = synthetic [barcode part1]
  source 1..16: mol_type = other DNA
accaacgtccgactct

SEQ ID NO: 33934 - DNA, 16 bp, synthetic construct
  misc_feature 1..16: note = synthetic [barcode part1]
  source 1..16: mol_type = other DNA
gagttgtcagagacgc

SEQ ID NO: 33935 - DNA, 16 bp, synthetic construct
  misc_feature 1..16: note = synthetic [barcode part1]
  source 1..16: mol_type = other DNA
cctatcgtcgaatatc

SEQ ID NO: 33936 - DNA, 16 bp, synthetic construct
  misc_feature 1..16: note = synthetic [barcode part1]
  source 1..16: mol_type = other DNA
cactaagttgcacttc

SEQ ID NO: 33937 - DNA, 16 bp, synthetic construct
  misc_feature 1..16: note = synthetic [barcode part1]
  source 1..16: mol_type = other DNA
tggcacacgatcctct

SEQ ID NO: 33938 - DNA, 16 bp, synthetic construct
  misc_feature 1..16: note = synthetic [barcode part1]
  source 1..16: mol_type = other DNA
tctgtcgagagtgatc

SEQ ID NO: 33939 - DNA, 16 bp, synthetic construct
  misc_feature 1..16: note = synthetic [barcode part1]
  source 1..16: mol_type = other DNA
ccaagactgaggttct

SEQ ID NO: 33940 - DNA, 16 bp, synthetic construct
  misc_feature 1..16: note = synthetic [barcode part1]
  source 1..16: mol_type = other DNA
tcagtcaaccacaacg

SEQ ID NO: 33941 - DNA, 16 bp, synthetic construct
  misc_feature 1..16: note = synthetic [barcode part1]
  source 1..16: mol_type = other DNA
gagacaatcgtagact

SEQ ID NO: 33942 - DNA, 16 bp, synthetic construct
  misc_feature 1..16: note = synthetic [barcode part1]
  source 1..16: mol_type = other DNA
ttattcgagattccgc

SEQ ID NO: 33943 - DNA, 16 bp, synthetic construct
  misc_feature 1..16: note = synthetic [barcode part1]
  source 1..16: mol_type = other DNA
caacttgttgccgaag

SEQ ID NO: 33944 - DNA, 16 bp, synthetic construct
  misc_feature 1..16: note = synthetic [barcode part1]
  source 1..16: mol_type = other DNA
acagttctcgtcagag

SEQ ID NO: 33945 - DNA, 16 bp, synthetic construct
  misc_feature 1..16: note = synthetic [barcode part1]
  source 1..16: mol_type = other DNA
ttgcagtgactggttg

SEQ ID NO: 33946 - DNA, 16 bp, synthetic construct
  misc_feature 1..16: note = synthetic [barcode part1]
  source 1..16: mol_type = other DNA
tgacctccgtaatcgc

SEQ ID NO: 33947 - DNA, 16 bp, synthetic construct
  misc_feature 1..16: note = synthetic [barcode part1]
  source 1..16: mol_type = other DNA
cgaactgccaacagtt

SEQ ID NO: 33948 - DNA, 16 bp, synthetic construct
  misc_feature 1..16: note = synthetic [barcode part1]
  source 1..16: mol_type = other DNA
gattcgaatcggatcc

SEQ ID NO: 33949 - DNA, 16 bp, synthetic construct
  misc_feature 1..16: note = synthetic [barcode part1]
  source 1..16: mol_type = other DNA
tgagagacgcacaatt

SEQ ID NO: 33950 - DNA, 16 bp, synthetic construct
  misc_feature 1..16: note = synthetic [barcode part1]
  source 1..16: mol_type = other DNA
tgccaccttgtatagt

SEQ ID NO: 33951 - DNA, 16 bp, synthetic construct
  misc_feature 1..16: note = synthetic [barcode part1]
  source 1..16: mol_type = other DNA
gcacacgagttgattc

SEQ ID NO: 33952 - DNA, 16 bp, synthetic construct
  misc_feature 1..16: note = synthetic [barcode part1]
  source 1..16: mol_type = other DNA
cactgtatctcctctg

SEQ ID NO: 33953 - DNA, 16 bp, synthetic construct
  misc_feature 1..16: note = synthetic [barcode part1]
  source 1..16: mol_type = other DNA
tcttgcgaactcgacc

SEQ ID NO: 33954 - DNA, 16 bp, synthetic construct
  misc_feature 1..16: note = synthetic [barcode part1]
  source 1..16: mol_type = other DNA
aataggacacgtcaac

SEQ ID NO: 33955 - DNA, 16 bp, synthetic construct
  misc_feature 1..16: note = synthetic [barcode part1]
  source 1..16: mol_type = other DNA
tcgtagtgtcgatcag

SEQ ID NO: 33956 - DNA, 16 bp, synthetic construct
  misc_feature 1..16: note = synthetic [barcode part1]
  source 1..16: mol_type = other DNA
actctatcgtcctacc

SEQ ID NO: 33957 - DNA, 16 bp, synthetic construct
  misc_feature 1..16: note = synthetic [barcode part1]
  source 1..16: mol_type = other DNA
tacctcagtggtgagt

SEQ ID NO: 33958 - DNA, 16 bp, synthetic construct
  misc_feature 1..16: note = synthetic [barcode part1]
  source 1..16: mol_type = other DNA
acgattcgaacacaag

SEQ ID NO: 33959 - DNA, 16 bp, synthetic construct
  misc_feature 1..16: note = synthetic [barcode part1]
  source 1..16: mol_type = other DNA
gacctggtagtagttc

SEQ ID NO: 33960 - DNA, 16 bp, synthetic construct
  misc_feature 1..16: note = synthetic [barcode part1]
  source 1..16: mol_type = other DNA
ccggcgatattgaact

SEQ ID NO: 33961 - DNA, 16 bp, synthetic construct
  misc_feature 1..16: note = synthetic [barcode part1]
  source 1..16: mol_type = other DNA
tggagtcaagactcct

SEQ ID NO: 33962 - DNA, 16 bp, synthetic construct
  misc_feature 1..16: note = synthetic [barcode part1]
  source 1..16: mol_type = other DNA
cgcgtggtcactactt

SEQ ID NO: 33963 - DNA, 16 bp, synthetic construct
  misc_feature 1..16: note = synthetic [barcode part1]
  source 1..16: mol_type = other DNA
taacgcaagttgcacc

SEQ ID NO: 33964 - DNA, 16 bp, synthetic construct
  misc_feature 1..16: note = synthetic [barcode part1]
  source 1..16: mol_type = other DNA
tgtcctatacctgagt

SEQ ID NO: 33965 - DNA, 16 bp, synthetic construct
  misc_feature 1..16: note = synthetic [barcode part1]
  source 1..16: mol_type = other DNA
tggacgtgatctacgt

SEQ ID NO: 33966 - DNA, 16 bp, synthetic construct
  misc_feature 1..16: note = synthetic [barcode part1]
  source 1..16: mol_type = other DNA
aagtgtacttcgtgcg

SEQ ID NO: 33967 - DNA, 16 bp, synthetic construct
  misc_feature 1..16: note = synthetic [barcode part1]
  source 1..16: mol_type = other DNA
gactgcgaaggaactc

SEQ ID NO: 33968 - DNA, 16 bp, synthetic construct
  misc_feature 1..16: note = synthetic [barcode part1]
  source 1..16: mol_type = other DNA
tcgtaggtatctcgtt

SEQ ID NO: 33969 - DNA, 16 bp, synthetic construct
  misc_feature 1..16: note = synthetic [barcode part1]
  source 1..16: mol_type = other DNA
tcttaacgccaccttc

SEQ ID NO: 33970 - DNA, 16 bp, synthetic construct
  misc_feature 1..16: note = synthetic [barcode part1]
  source 1..16: mol_type = other DNA
gataccgccagaatct

SEQ ID NO: 33971 - DNA, 16 bp, synthetic construct
  misc_feature 1..16: note = synthetic [barcode part1]
  source 1..16: mol_type = other DNA
gagaccaggcctatag

SEQ ID NO: 33972 - DNA, 16 bp, synthetic construct
  misc_feature 1..16: note = synthetic [barcode part1]
  source 1..16: mol_type = other DNA
agacaataaggtggcg

SEQ ID NO: 33973 - DNA, 16 bp, synthetic construct
  misc_feature 1..16: note = synthetic [barcode part1]
  source 1..16: mol_type = other DNA
gcctgtgagaagtcag

SEQ ID NO: 33974 - DNA, 16 bp, synthetic construct
  misc_feature 1..16: note = synthetic [barcode part1]
  source 1..16: mol_type = other DNA
gcgaccgaatcttcct

SEQ ID NO: 33975 - DNA, 16 bp, synthetic construct
  misc_feature 1..16: note = synthetic [barcode part1]
  source 1..16: mol_type = other DNA
gtggattaatccgtgc

SEQ ID NO: 33976 - DNA, 16 bp, synthetic construct
  misc_feature 1..16: note = synthetic [barcode part1]
  source 1..16: mol_type = other DNA
cagataccttcgccac

SEQ ID NO: 33977 - DNA, 16 bp, synthetic construct
  misc_feature 1..16: note = synthetic [barcode part1]
  source 1..16: mol_type = other DNA
acagattcgacctctt

SEQ ID NO: 33978 - DNA, 16 bp, synthetic construct
  misc_feature 1..16: note = synthetic [barcode part1]
  source 1..16: mol_type = other DNA
tctgactcgcgtgact

SEQ ID NO: 33979 - DNA, 16 bp, synthetic construct
  misc_feature 1..16: note = synthetic [barcode part1]
  source 1..16: mol_type = other DNA
tgcaggtattccactt

SEQ ID NO: 33980 - DNA, 16 bp, synthetic construct
  misc_feature 1..16: note = synthetic [barcode part1]
  source 1..16: mol_type = other DNA
tcgttagagaggcacg

SEQ ID NO: 33981 - DNA, 16 bp, synthetic construct
  misc_feature 1..16: note = synthetic [barcode part1]
  source 1..16: mol_type = other DNA
agacggaacggtactc

SEQ ID NO: 33982 - DNA, 16 bp, synthetic construct
  misc_feature 1..16: note = synthetic [barcode part1]
  source 1..16: mol_type = other DNA
cgtccttctggtagtg

SEQ ID NO: 33983 - DNA, 16 bp, synthetic construct
  misc_feature 1..16: note = synthetic [barcode part1]
  source 1..16: mol_type = other DNA
cactgcgtgtaatacg

SEQ ID NO: 33984 - DNA, 16 bp, synthetic construct
  misc_feature 1..16: note = synthetic [barcode part1]
  source 1..16: mol_type = other DNA
gtggagagattactac

SEQ ID NO: 33985 - DNA, 16 bp, synthetic construct
  misc_feature 1..16: note = synthetic [barcode part1]
  source 1..16: mol_type = other DNA
tacacgatatcggcac

SEQ ID NO: 33986 - DNA, 16 bp, synthetic construct
  misc_feature 1..16: note = synthetic [barcode part1]
  source 1..16: mol_type = other DNA
gccacgaattcgttcc

SEQ ID NO: 33987 - DNA, 16 bp, synthetic construct
  misc_feature 1..16: note = synthetic [barcode part1]
  source 1..16: mol_type = other DNA
accgacaataaggtgt

SEQ ID NO: 33988 - DNA, 16 bp, synthetic construct
  misc_feature 1..16: note = synthetic [barcode part1]
  source 1..16: mol_type = other DNA
aggtcgccaagagtac

SEQ ID NO: 33989 - DNA, 16 bp, synthetic construct
  misc_feature 1..16: note = synthetic [barcode part1]
  source 1..16: mol_type = other DNA
gtccaatagagacgcg

SEQ ID NO: 33990 - DNA, 16 bp, synthetic construct
  misc_feature 1..16: note = synthetic [barcode part1]
  source 1..16: mol_type = other DNA
gcaaggataactcggc

SEQ ID NO: 33991 - DNA, 16 bp, synthetic construct
  misc_feature 1..16: note = synthetic [barcode part1]
  source 1..16: mol_type = other DNA
cggtcctactaatact

SEQ ID NO: 33992 - DNA, 16 bp, synthetic construct
  misc_feature 1..16: note = synthetic [barcode part1]
  source 1..16: mol_type = other DNA
tagtctgtccacgtcg

SEQ ID NO: 33993 - DNA, 16 bp, synthetic construct
  misc_feature 1..16: note = synthetic [barcode part1]
  source 1..16: mol_type = other DNA
gttccgtcaccttatc

SEQ ID NO: 33994 - DNA, 16 bp, synthetic construct
  misc_feature 1..16: note = synthetic [barcode part1]
  source 1..16: mol_type = other DNA
tccgtgcgtatctctt

SEQ ID NO: 33995 - DNA, 16 bp, synthetic construct
  misc_feature 1..16: note = synthetic [barcode part1]
  source 1..16: mol_type = other DNA
tagtcgtagtacaccg

SEQ ID NO: 33996 - DNA, 16 bp, synthetic construct
  misc_feature 1..16: note = synthetic [barcode part1]
  source 1..16: mol_type = other DNA
aacggcctgcaagaac

SEQ ID NO: 33997 - DNA, 16 bp, synthetic construct
  misc_feature 1..16: note = synthetic [barcode part1]
  source 1..16: mol_type = other DNA
gtagatcttggcacac

SEQ ID NO: 33998 - DNA, 16 bp, synthetic construct
  misc_feature 1..16: note = synthetic [barcode part1]
  source 1..16: mol_type = other DNA
atatccgccgttccag

SEQ ID NO: 33999 - DNA, 16 bp, synthetic construct
  misc_feature 1..16: note = synthetic [barcode part1]
  source 1..16: mol_type = other DNA
atcgtgtgtacggttg

SEQ ID NO: 34000 - DNA, 16 bp, synthetic construct
  misc_feature 1..16: note = synthetic [barcode part1]
  source 1..16: mol_type = other DNA
actacacactgtcttg

SEQ ID NO: 34001 - DNA, 16 bp, synthetic construct
  misc_feature 1..16: note = synthetic [barcode part1]
  source 1..16: mol_type = other DNA
cagtactaacggatag

SEQ ID NO: 34002 - DNA, 16 bp, synthetic construct
  misc_feature 1..16: note = synthetic [barcode part1]
  source 1..16: mol_type = other DNA
ccttagttgtaggtct

SEQ ID NO: 34003 - DNA, 16 bp, synthetic construct
  misc_feature 1..16: note = synthetic [barcode part1]
  source 1..16: mol_type = other DNA
tgtagacgcggtagac

SEQ ID NO: 34004 - DNA, 16 bp, synthetic construct
  misc_feature 1..16: note = synthetic [barcode part1]
  source 1..16: mol_type = other DNA
ttgtctgtctggaact

SEQ ID NO: 34005 - DNA, 16 bp, synthetic construct
  misc_feature 1..16: note = synthetic [barcode part1]
  source 1..16: mol_type = other DNA
tgccactgtaaccacc

SEQ ID NO: 34006 - DNA, 16 bp, synthetic construct
  misc_feature 1..16: note = synthetic [barcode part1]
  source 1..16: mol_type = other DNA
acaccaaggttacacc

SEQ ID NO: 34007 - DNA, 16 bp, synthetic construct
  misc_feature 1..16: note = synthetic [barcode part1]
  source 1..16: mol_type = other DNA
tatatccactcggcgc

SEQ ID NO: 34008 - DNA, 16 bp, synthetic construct
  misc_feature 1..16: note = synthetic [barcode part1]
  source 1..16: mol_type = other DNA
tatccacctgcctact

SEQ ID NO: 34009 - DNA, 16 bp, synthetic construct
  misc_feature 1..16: note = synthetic [barcode part1]
  source 1..16: mol_type = other DNA
caggatcagtcctagt

SEQ ID NO: 34010 - DNA, 16 bp, synthetic construct
  misc_feature 1..16: note = synthetic [barcode part1]
  source 1..16: mol_type = other DNA
ccgaacgaatagaatc

SEQ ID NO: 34011 - DNA, 16 bp, synthetic construct
  misc_feature 1..16: note = synthetic [barcode part1]
  source 1..16: mol_type = other DNA
tgaactctccaccacg

SEQ ID NO: 34012 - DNA, 16 bp, synthetic construct
  misc_feature 1..16: note = synthetic [barcode part1]
  source 1..16: mol_type = other DNA
gaacggtgacctacag

SEQ ID NO: 34013 - DNA, 16 bp, synthetic construct
  misc_feature 1..16: note = synthetic [barcode part1]
  source 1..16: mol_type = other DNA
cctcctagtggttgtg

SEQ ID NO: 34014 - DNA, 16 bp, synthetic construct
  misc_feature 1..16: note = synthetic [barcode part1]
  source 1..16: mol_type = other DNA
actggtaatctcttgc

SEQ ID NO: 34015 - DNA, 16 bp, synthetic construct
  misc_feature 1..16: note = synthetic [barcode part1]
  source 1..16: mol_type = other DNA
ttgtgtctgtcggatt

SEQ ID NO: 34016 - DNA, 16 bp, synthetic construct
  misc_feature 1..16: note = synthetic [barcode part1]
  source 1..16: mol_type = other DNA
tacgatcggttgtgtg

SEQ ID NO: 34017 - DNA, 16 bp, synthetic construct
  misc_feature 1..16: note = synthetic [barcode part1]
  source 1..16: mol_type = other DNA
aagtgatctcttggcg

SEQ ID NO: 34018 - DNA, 16 bp, synthetic construct
  misc_feature 1..16: note = synthetic [barcode part1]
  source 1..16: mol_type = other DNA
aatacgacctggcgag

SEQ ID NO: 34019 - DNA, 16 bp, synthetic construct
  misc_feature 1..16: note = synthetic [barcode part1]
  source 1..16: mol_type = other DNA
ttcgatcctgaggagt

SEQ ID NO: 34020 - DNA, 16 bp, synthetic construct
  misc_feature 1..16: note = synthetic [barcode part1]
  source 1..16: mol_type = other DNA
agtcaggaagtcagag

SEQ ID NO: 34021 - DNA, 16 bp, synthetic construct
  misc_feature 1..16: note = synthetic [barcode part1]
  source 1..16: mol_type = other DNA
tcaatcggaggttctg

SEQ ID NO: 34022 - DNA, 16 bp, synthetic construct
  misc_feature 1..16: note = synthetic [barcode part1]
  source 1..16: mol_type = other DNA
tagtctcaggaggtct

SEQ ID NO: 34023 - DNA, 16 bp, synthetic construct
  misc_feature 1..16: note = synthetic [barcode part1]
  source 1..16: mol_type = other DNA
tgcagagatcaagttg

SEQ ID NO: 34024 - DNA, 16 bp, synthetic construct
  misc_feature 1..16: note = synthetic [barcode part1]
  source 1..16: mol_type = other DNA
tccacggaacaaggtg

SEQ ID NO: 34025 - DNA, 16 bp, synthetic construct
  misc_feature 1..16: note = synthetic [barcode part1]
  source 1..16: mol_type = other DNA
cctgtgttgacctgac

SEQ ID NO: 34026 - DNA, 16 bp, synthetic construct
  misc_feature 1..16: note = synthetic [barcode part1]
  source 1..16: mol_type = other DNA
cctgtcagtgtaattc

SEQ ID NO: 34027 - DNA, 16 bp, synthetic construct
  misc_feature 1..16: note = synthetic [barcode part1]
  source 1..16: mol_type = other DNA
ttcaaccacgtcagtt

SEQ ID NO: 34028 - DNA, 16 bp, synthetic construct
  misc_feature 1..16: note = synthetic [barcode part1]
  source 1..16: mol_type = other DNA
gattgtgcgattgcac

SEQ ID NO: 34029 - DNA, 16 bp, synthetic construct
  misc_feature 1..16: note = synthetic [barcode part1]
  source 1..16: mol_type = other DNA
gtctagacctactgcc

SEQ ID NO: 34030 - DNA, 16 bp, synthetic construct
  misc_feature 1..16: note = synthetic [barcode part1]
  source 1..16: mol_type = other DNA
actcgtccttactcac

SEQ ID NO: 34031 - DNA, 16 bp, synthetic construct
  misc_feature 1..16: note = synthetic [barcode part1]
  source 1..16: mol_type = other DNA
tggccagatactacac

SEQ ID NO: 34032 - DNA, 16 bp, synthetic construct
  misc_feature 1..16: note = synthetic [barcode part1]
  source 1..16: mol_type = other DNA
atagaagaaggtgcgc

SEQ ID NO: 34033 - DNA, 16 bp, synthetic construct
  misc_feature 1..16: note = synthetic [barcode part1]
  source 1..16: mol_type = other DNA
gttccgtacttgaatc

SEQ ID NO: 34034 - DNA, 16 bp, synthetic construct
  misc_feature 1..16: note = synthetic [barcode part1]
  source 1..16: mol_type = other DNA
gtctaccttattcgcc

SEQ ID NO: 34035 - DNA, 16 bp, synthetic construct
  misc_feature 1..16: note = synthetic [barcode part1]
  source 1..16: mol_type = other DNA
aggaagacaacaccag

SEQ ID NO: 34036 - DNA, 16 bp, synthetic construct
  misc_feature 1..16: note = synthetic [barcode part1]
  source 1..16: mol_type = other DNA
tccgtgtggttcgatc

SEQ ID NO: 34037 - DNA, 16 bp, synthetic construct
  misc_feature 1..16: note = synthetic [barcode part1]
  source 1..16: mol_type = other DNA
acagtggagatcgaag

SEQ ID NO: 34038 - DNA, 16 bp, synthetic construct
  misc_feature 1..16: note = synthetic [barcode part1]
  source 1..16: mol_type = other DNA
ttatctggtggtatcc

SEQ ID NO: 34039 - DNA, 16 bp, synthetic construct
  misc_feature 1..16: note = synthetic [barcode part1]
  source 1..16: mol_type = other DNA
gtccaattacaggaag

SEQ ID NO: 34040 - DNA, 16 bp, synthetic construct
  misc_feature 1..16: note = synthetic [barcode part1]
  source 1..16: mol_type = other DNA
gtagactgaggtggtc

SEQ ID NO: 34041 - DNA, 16 bp, synthetic construct
  misc_feature 1..16: note = synthetic [barcode part1]
  source 1..16: mol_type = other DNA
ccacctgttgttcact

SEQ ID NO: 34042 - DNA, 16 bp, synthetic construct
  misc_feature 1..16: note = synthetic [barcode part1]
  source 1..16: mol_type = other DNA
cactccggaacttatt

SEQ ID NO: 34043 - DNA, 16 bp, synthetic construct
  misc_feature 1..16: note = synthetic [barcode part1]
  source 1..16: mol_type = other DNA
gcctaggaataaggcc

SEQ ID NO: 34044 - DNA, 16 bp, synthetic construct
  misc_feature 1..16: note = synthetic [barcode part1]
  source 1..16: mol_type = other DNA
gcggcgtgttaattgt

SEQ ID NO: 34045 - DNA, 16 bp, synthetic construct
  misc_feature 1..16: note = synthetic [barcode part1]
  source 1..16: mol_type = other DNA
cggaccagtacaagac

SEQ ID NO: 34046 - DNA, 16 bp, synthetic construct
  misc_feature 1..16: note = synthetic [barcode part1]
  source 1..16: mol_type = other DNA
gatcttgaggcagacg

SEQ ID NO: 34047 - DNA, 16 bp, synthetic construct
  misc_feature 1..16: note = synthetic [barcode part1]
  source 1..16: mol_type = other DNA
gtacctctcgaattac

SEQ ID NO: 34048 - DNA, 16 bp, synthetic construct
  misc_feature 1..16: note = synthetic [barcode part1]
  source 1..16: mol_type = other DNA
tgtctattctaggacc

SEQ ID NO: 34049 - DNA, 16 bp, synthetic construct
  misc_feature 1..16: note = synthetic [barcode part1]
  source 1..16: mol_type = other DNA
gtcgttcttatagacc

SEQ ID NO: 34050 - DNA, 16 bp, synthetic construct
  misc_feature 1..16: note = synthetic [barcode part1]
  source 1..16: mol_type = other DNA
cgaaccagatcgttgt

SEQ ID NO: 34051 - DNA, 16 bp, synthetic construct
  misc_feature 1..16: note = synthetic [barcode part1]
  source 1..16: mol_type = other DNA
tagtccttgcgcaatt

SEQ ID NO: 34052 - DNA, 16 bp, synthetic construct
  misc_feature 1..16: note = synthetic [barcode part1]
  source 1..16: mol_type = other DNA
tagaccgccagattgt

SEQ ID NO: 34053 - DNA, 16 bp, synthetic construct
  misc_feature 1..16: note = synthetic [barcode part1]
  source 1..16: mol_type = other DNA
tctcgaccacgtcaac

SEQ ID NO: 34054 - DNA, 16 bp, synthetic construct
  misc_feature 1..16: note = synthetic [barcode part1]
  source 1..16: mol_type = other DNA
tgtctccgttgccaag

SEQ ID NO: 34055 - DNA, 16 bp, synthetic construct
  misc_feature 1..16: note = synthetic [barcode part1]
  source 1..16: mol_type = other DNA
tccgcacttccgtatt

SEQ ID NO: 34056 - DNA, 16 bp, synthetic construct
  misc_feature 1..16: note = synthetic [barcode part1]
  source 1..16: mol_type = other DNA
taatctcgccaacgcc

SEQ ID NO: 34057 - DNA, 16 bp, synthetic construct
  misc_feature 1..16: note = synthetic [barcode part1]
  source 1..16: mol_type = other DNA
tgtcacacagtgtcag

SEQ ID NO: 34058 - DNA, 16 bp, synthetic construct
  misc_feature 1..16: note = synthetic [barcode part1]
  source 1..16: mol_type = other DNA
cagatcggaggatatt

SEQ ID NO: 34059 - DNA, 16 bp, synthetic construct
  misc_feature 1..16: note = synthetic [barcode part1]
  source 1..16: mol_type = other DNA
acaaccggagattagt

SEQ ID NO: 34060 - DNA, 16 bp, synthetic construct
  misc_feature 1..16: note = synthetic [barcode part1]
  source 1..16: mol_type = other DNA
tacgcggaatagtggc

SEQ ID NO: 34061 - DNA, 16 bp, synthetic construct
  misc_feature 1..16: note = synthetic [barcode part1]
  source 1..16: mol_type = other DNA
cggatcaagaggcact

SEQ ID NO: 34062 - DNA, 16 bp, synthetic construct
  misc_feature 1..16: note = synthetic [barcode part1]
  source 1..16: mol_type = other DNA
agagagaggaaggaag

SEQ ID NO: 34063 - DNA, 16 bp, synthetic construct
  misc_feature 1..16: note = synthetic [barcode part1]
  source 1..16: mol_type = other DNA
tagtcctcgtgtagtt

SEQ ID NO: 34064 - DNA, 16 bp, synthetic construct
  misc_feature 1..16: note = synthetic [barcode part1]
  source 1..16: mol_type = other DNA
acggtgtcctcttctt

SEQ ID NO: 34065 - DNA, 16 bp, synthetic construct
  misc_feature 1..16: note = synthetic [barcode part1]
  source 1..16: mol_type = other DNA
aacacctacctcttag

SEQ ID NO: 34066 - DNA, 16 bp, synthetic construct
  misc_feature 1..16: note = synthetic [barcode part1]
  source 1..16: mol_type = other DNA
cgcacaagtaaccact

SEQ ID NO: 34067 - DNA, 16 bp, synthetic construct
  misc_feature 1..16: note = synthetic [barcode part1]
  source 1..16: mol_type = other DNA
tcggagttaggactct

SEQ ID NO: 34068 - DNA, 16 bp, synthetic construct
  misc_feature 1..16: note = synthetic [barcode part1]
  source 1..16: mol_type = other DNA
cctgaggcagtattac

SEQ ID NO: 34069 - DNA, 16 bp, synthetic construct
  misc_feature 1..16: note = synthetic [barcode part1]
  source 1..16: mol_type = other DNA
acctcacaagtatctc

SEQ ID NO: 34070 - DNA, 16 bp, synthetic construct
  misc_feature 1..16: note = synthetic [barcode part1]
  source 1..16: mol_type = other DNA
acgtcttggaggtgtt

SEQ ID NO: 34071 - DNA, 16 bp, synthetic construct
  misc_feature 1..16: note = synthetic [barcode part1]
  source 1..16: mol_type = other DNA
cgtagtgagtgtcgtt

SEQ ID NO: 34072 - DNA, 16 bp, synthetic construct
  misc_feature 1..16: note = synthetic [barcode part1]
  source 1..16: mol_type = other DNA
aagacggtacctaggc

SEQ ID NO: 34073 - DNA, 16 bp, synthetic construct
  misc_feature 1..16: note = synthetic [barcode part1]
  source 1..16: mol_type = other DNA
gtgattccaagtcacg

SEQ ID NO: 34074 - DNA, 16 bp, synthetic construct
  misc_feature 1..16: note = synthetic [barcode part1]
  source 1..16: mol_type = other DNA
tctgaggtgaccgatt

SEQ ID NO: 34075 - DNA, 16 bp, synthetic construct
  misc_feature 1..16: note = synthetic [barcode part1]
  source 1..16: mol_type = other DNA
ttccgtacgatctagt

SEQ ID NO: 34076 - DNA, 16 bp, synthetic construct
  misc_feature 1..16: note = synthetic [barcode part1]
  source 1..16: mol_type = other DNA
gtctcgtcactctatc

SEQ ID NO: 34077 - DNA, 16 bp, synthetic construct
  misc_feature 1..16: note = synthetic [barcode part1]
  source 1..16: mol_type = other DNA
tgtgagtaggtggcac

SEQ ID NO: 34078 - DNA, 16 bp, synthetic construct
  misc_feature 1..16: note = synthetic [barcode part1]
  source 1..16: mol_type = other DNA
gtgcgtgtgatcaatc

SEQ ID NO: 34079 - DNA, 16 bp, synthetic construct
  misc_feature 1..16: note = synthetic [barcode part1]
  source 1..16: mol_type = other DNA
attacaattgcctgcc

SEQ ID NO: 34080 - DNA, 16 bp, synthetic construct
  misc_feature 1..16: note = synthetic [barcode part1]
  source 1..16: mol_type = other DNA
ttgcacctctacgttc

SEQ ID NO: 34081 - DNA, 16 bp, synthetic construct
  misc_feature 1..16: note = synthetic [barcode part1]
  source 1..16: mol_type = other DNA
gtgtgagattctcgtg

SEQ ID NO: 34082 - DNA, 16 bp, synthetic construct
  misc_feature 1..16: note = synthetic [barcode part1]
  source 1..16: mol_type = other DNA
cgagatcactgactgt

SEQ ID NO: 34083 - DNA, 16 bp, synthetic construct
  misc_feature 1..16: note = synthetic [barcode part1]
  source 1..16: mol_type = other DNA
gacgcacgaagaatcc

SEQ ID NO: 34084 - DNA, 16 bp, synthetic construct
  misc_feature 1..16: note = synthetic [barcode part1]
  source 1..16: mol_type = other DNA
ccggaatactcgtcct

SEQ ID NO: 34085 - DNA, 16 bp, synthetic construct
  misc_feature 1..16: note = synthetic [barcode part1]
  source 1..16: mol_type = other DNA
aactcgattggcaacc

SEQ ID NO: 34086 - DNA, 16 bp, synthetic construct
  misc_feature 1..16: note = synthetic [barcode part1]
  source 1..16: mol_type = other DNA
gaggcgcaattcagtg

SEQ ID NO: 34087 - DNA, 16 bp, synthetic construct
  misc_feature 1..16: note = synthetic [barcode part1]
  source 1..16: mol_type = other DNA
tagactgtgcacctcc

SEQ ID NO: 34088 - DNA, 16 bp, synthetic construct
  misc_feature 1..16: note = synthetic [barcode part1]
  source 1..16: mol_type = other DNA
tgacctaggtgcagag

SEQ ID NO: 34089 - DNA, 16 bp, synthetic construct
  misc_feature 1..16: note = synthetic [barcode part1]
  source 1..16: mol_type = other DNA
taggtgtcagtagaac

SEQ ID NO: 34090 - DNA, 16 bp, synthetic construct
  misc_feature 1..16: note = synthetic [barcode part1]
  source 1..16: mol_type = other DNA
tctctgaacgtactgt

SEQ ID NO: 34091 - DNA, 16 bp, synthetic construct
  misc_feature 1..16: note = synthetic [barcode part1]
  source 1..16: mol_type = other DNA
cacagatcaggtactc

SEQ ID NO: 34092 - DNA, 16 bp, synthetic construct
  misc_feature 1..16: note = synthetic [barcode part1]
  source 1..16: mol_type = other DNA
accttattgtcaacgc

SEQ ID NO: 34093 - DNA, 16 bp, synthetic construct
  misc_feature 1..16: note = synthetic [barcode part1]
  source 1..16: mol_type = other DNA
gtaagtacttgagacg

SEQ ID NO: 34094 - DNA, 16 bp, synthetic construct
  misc_feature 1..16: note = synthetic [barcode part1]
  source 1..16: mol_type = other DNA
accaacaatcctccgc

SEQ ID NO: 34095 - DNA, 16 bp, synthetic construct
  misc_feature 1..16: note = synthetic [barcode part1]
  source 1..16: mol_type = other DNA
gtgcgaccaattgtac

SEQ ID NO: 34096 - DNA, 16 bp, synthetic construct
  misc_feature 1..16: note = synthetic [barcode part1]
  source 1..16: mol_type = other DNA
agattcctcctcttcg

SEQ ID NO: 34097 - DNA, 16 bp, synthetic construct
  misc_feature 1..16: note = synthetic [barcode part1]
  source 1..16: mol_type = other DNA
gactctattcacctag

SEQ ID NO: 34098 - DNA, 16 bp, synthetic construct
  misc_feature 1..16: note = synthetic [barcode part1]
  source 1..16: mol_type = other DNA
gaatcggcggttgtag

SEQ ID NO: 34099 - DNA, 16 bp, synthetic construct
  misc_feature 1..16: note = synthetic [barcode part1]
  source 1..16: mol_type = other DNA
ccgagtaactccacct

SEQ ID NO: 34100 - DNA, 16 bp, synthetic construct
  misc_feature 1..16: note = synthetic [barcode part1]
  source 1..16: mol_type = other DNA
taccagaaggtacggc

SEQ ID NO: 34101 - DNA, 16 bp, synthetic construct
  misc_feature 1..16: note = synthetic [barcode part1]
  source 1..16: mol_type = other DNA
gcaaccaactggtgtt

SEQ ID NO: 34102 - DNA, 16 bp, synthetic construct
  misc_feature 1..16: note = synthetic [barcode part1]
  source 1..16: mol_type = other DNA
aatctctgcgttcggc

SEQ ID NO: 34103 - DNA, 16 bp, synthetic construct
  misc_feature 1..16: note = synthetic [barcode part1]
  source 1..16: mol_type = other DNA
gcaagttccttgtcgc

SEQ ID NO: 34104 - DNA, 16 bp, synthetic construct
  misc_feature 1..16: note = synthetic [barcode part1]
  source 1..16: mol_type = other DNA
cacgacgagtattgtc

SEQ ID NO: 34105 - DNA, 16 bp, synthetic construct
  misc_feature 1..16: note = synthetic [barcode part1]
  source 1..16: mol_type = other DNA
tcagacgacctcgtct

SEQ ID NO: 34106 - DNA, 16 bp, synthetic construct
  misc_feature 1..16: note = synthetic [barcode part1]
  source 1..16: mol_type = other DNA
taagaactgagtcgtg

SEQ ID NO: 34107 - DNA, 16 bp, synthetic construct
  misc_feature 1..16: note = synthetic [barcode part1]
  source 1..16: mol_type = other DNA
tggaatccacgatacc

SEQ ID NO: 34108 - DNA, 16 bp, synthetic construct
  misc_feature 1..16: note = synthetic [barcode part1]
  source 1..16: mol_type = other DNA
caacttgacctggtag

SEQ ID NO: 34109 - DNA, 16 bp, synthetic construct
  misc_feature 1..16: note = synthetic [barcode part1]
  source 1..16: mol_type = other DNA
tcgaatcgcgtggaag

SEQ ID NO: 34110 - DNA, 16 bp, synthetic construct
  misc_feature 1..16: note = synthetic [barcode part1]
  source 1..16: mol_type = other DNA
caaccttcgtgcgact

SEQ ID NO: 34111 - DNA, 16 bp, synthetic construct
  misc_feature 1..16: note = synthetic [barcode part1]
  source 1..16: mol_type = other DNA
gcgcggaactcaatag

SEQ ID NO: 34112 - DNA, 16 bp, synthetic construct
  misc_feature 1..16: note = synthetic [barcode part1]
  source 1..16: mol_type = other DNA
gccggccaattaattg

SEQ ID NO: 34113 - DNA, 16 bp, synthetic construct
  misc_feature 1..16: note = synthetic [barcode part1]
  source 1..16: mol_type = other DNA
tgccgtcagacactct

SEQ ID NO: 34114 - DNA, 16 bp, synthetic construct
  misc_feature 1..16: note = synthetic [barcode part1]
  source 1..16: mol_type = other DNA
gttcgaacaccacctc

SEQ ID NO: 34115 - DNA, 16 bp, synthetic construct
  misc_feature 1..16: note = synthetic [barcode part1]
  source 1..16: mol_type = other DNA
acacgatctccaattc

SEQ ID NO: 34116 - DNA, 16 bp, synthetic construct
  misc_feature 1..16: note = synthetic [barcode part1]
  source 1..16: mol_type = other DNA
tacagacgtgagtctc

SEQ ID NO: 34117 - DNA, 16 bp, synthetic construct
  misc_feature 1..16: note = synthetic [barcode part1]
  source 1..16: mol_type = other DNA
tctggagtcttgaggt

SEQ ID NO: 34118 - DNA, 16 bp, synthetic construct
  misc_feature 1..16: note = synthetic [barcode part1]
  source 1..16: mol_type = other DNA
gtattgcactcacttg

SEQ ID NO: 34119 - DNA, 16 bp, synthetic construct
  misc_feature 1..16: note = synthetic [barcode part1]
  source 1..16: mol_type = other DNA
tcaggatcttacttgc

SEQ ID NO: 34120 - DNA, 16 bp, synthetic construct
  misc_feature 1..16: note = synthetic [barcode part1]
  source 1..16: mol_type = other DNA
tgacttgtcgtattcg

SEQ ID NO: 34121 - DNA, 16 bp, synthetic construct
  misc_feature 1..16: note = synthetic [barcode part1]
  source 1..16: mol_type = other DNA
tccgaggagtcaattc

SEQ ID NO: 34122 - DNA, 16 bp, synthetic construct
  misc_feature 1..16: note = synthetic [barcode part1]
  source 1..16: mol_type = other DNA
gtgtgacgatcggagt

SEQ ID NO: 34123 - DNA, 16 bp, synthetic construct
  misc_feature 1..16: note = synthetic [barcode part1]
  source 1..16: mol_type = other DNA
acgacgaacgatcgtg

SEQ ID NO: 34124 - DNA, 16 bp, synthetic construct
  misc_feature 1..16: note = synthetic [barcode part1]
  source 1..16: mol_type = other DNA
gcgaccggaagaactt

SEQ ID NO: 34125 - DNA, 16 bp, synthetic construct
  misc_feature 1..16: note = synthetic [barcode part1]
  source 1..16: mol_type = other DNA
gtgatctcttacactg

SEQ ID NO: 34126 - DNA, 16 bp, synthetic construct
  misc_feature 1..16: note = synthetic [barcode part1]
  source 1..16: mol_type = other DNA
gaggatcgtgtcaacg

SEQ ID NO: 34127 - DNA, 16 bp, synthetic construct
  misc_feature 1..16: note = synthetic [barcode part1]
  source 1..16: mol_type = other DNA
ttgcaacacgtacacg

SEQ ID NO: 34128 - DNA, 16 bp, synthetic construct
  misc_feature 1..16: note = synthetic [barcode part1]
  source 1..16: mol_type = other DNA
gagtgaatctggagtt

SEQ ID NO: 34129 - DNA, 16 bp, synthetic construct
  misc_feature 1..16: note = synthetic [barcode part1]
  source 1..16: mol_type = other DNA
gtctgatagaggtgcg

SEQ ID NO: 34130 - DNA, 16 bp, synthetic construct
  misc_feature 1..16: note = synthetic [barcode part1]
  source 1..16: mol_type = other DNA
tctggatcaccttgcg

SEQ ID NO: 34131 - DNA, 16 bp, synthetic construct
  misc_feature 1..16: note = synthetic [barcode part1]
  source 1..16: mol_type = other DNA
gccgagtgaacacaac

SEQ ID NO: 34132 - DNA, 16 bp, synthetic construct
  misc_feature 1..16: note = synthetic [barcode part1]
  source 1..16: mol_type = other DNA
attattgaccggaccg

SEQ ID NO: 34133 - DNA, 16 bp, synthetic construct
  misc_feature 1..16: note = synthetic [barcode part1]
  source 1..16: mol_type = other DNA
tcggcggtatctctgt

SEQ ID NO: 34134 - DNA, 16 bp, synthetic construct
  misc_feature 1..16: note = synthetic [barcode part1]
  source 1..16: mol_type = other DNA
gtgtaacaactgagac

SEQ ID NO: 34135 - DNA, 16 bp, synthetic construct
  misc_feature 1..16: note = synthetic [barcode part1]
  source 1..16: mol_type = other DNA
gtatcaacgcaggtct

SEQ ID NO: 34136 - DNA, 16 bp, synthetic construct
  misc_feature 1..16: note = synthetic [barcode part1]
  source 1..16: mol_type = other DNA
tgttgtctgaactcgt

SEQ ID NO: 34137 - DNA, 16 bp, synthetic construct
  misc_feature 1..16: note = synthetic [barcode part1]
  source 1..16: mol_type = other DNA
gaactgtcgttgagtc

SEQ ID NO: 34138 - DNA, 16 bp, synthetic construct
  misc_feature 1..16: note = synthetic [barcode part1]
  source 1..16: mol_type = other DNA
ttcacttggtaccgcg

SEQ ID NO: 34139 - DNA, 16 bp, synthetic construct
  misc_feature 1..16: note = synthetic [barcode part1]
  source 1..16: mol_type = other DNA
gttcgtataatcctcg

SEQ ID NO: 34140 - DNA, 16 bp, synthetic construct
  misc_feature 1..16: note = synthetic [barcode part1]
  source 1..16: mol_type = other DNA
cggaactaggaagagt

SEQ ID NO: 34141 - DNA, 16 bp, synthetic construct
  misc_feature 1..16: note = synthetic [barcode part1]
  source 1..16: mol_type = other DNA
gttaacggtcctccac

SEQ ID NO: 34142 - DNA, 16 bp, synthetic construct
  misc_feature 1..16: note = synthetic [barcode part1]
  source 1..16: mol_type = other DNA
tcttatcgtgacggag

SEQ ID NO: 34143 - DNA, 16 bp, synthetic construct
  misc_feature 1..16: note = synthetic [barcode part1]
  source 1..16: mol_type = other DNA
ccagtagataaggact

SEQ ID NO: 34144 - DNA, 16 bp, synthetic construct
  misc_feature 1..16: note = synthetic [barcode part1]
  source 1..16: mol_type = other DNA
gttgtgtacgtccaag

SEQ ID NO: 34145 - DNA, 16 bp, synthetic construct
  misc_feature 1..16: note = synthetic [barcode part1]
  source 1..16: mol_type = other DNA
tactggttgcaaccag

SEQ ID NO: 34146 - DNA, 16 bp, synthetic construct
  misc_feature 1..16: note = synthetic [barcode part1]
  source 1..16: mol_type = other DNA
acgtgataggatcggc

SEQ ID NO: 34147 - DNA, 16 bp, synthetic construct
  misc_feature 1..16: note = synthetic [barcode part1]
  source 1..16: mol_type = other DNA
cagaattcgcggtgtt

SEQ ID NO: 34148 - DNA, 16 bp, synthetic construct
  misc_feature 1..16: note = synthetic [barcode part1]
  source 1..16: mol_type = other DNA
gtaacacactgatcgc

SEQ ID NO: 34149 - DNA, 16 bp, synthetic construct
  misc_feature 1..16: note = synthetic [barcode part1]
  source 1..16: mol_type = other DNA
gaacaccgaactcgtt

SEQ ID NO: 34150 - DNA, 16 bp, synthetic construct
  misc_feature 1..16: note = synthetic [barcode part1]
  source 1..16: mol_type = other DNA
gcagtacttaaggcct

SEQ ID NO: 34151 - DNA, 16 bp, synthetic construct
  misc_feature 1..16: note = synthetic [barcode part1]
  source 1..16: mol_type = other DNA
gaatcgcaggtcactt

SEQ ID NO: 34152 - DNA, 16 bp, synthetic construct
  misc_feature 1..16: note = synthetic [barcode part1]
  source 1..16: mol_type = other DNA
tgaacaactcagaacg

SEQ ID NO: 34153 - DNA, 16 bp, synthetic construct
  misc_feature 1..16: note = synthetic [barcode part1]
  source 1..16: mol_type = other DNA
acacaacgtgtgttgc

SEQ ID NO: 34154 - DNA, 16 bp, synthetic construct
  misc_feature 1..16: note = synthetic [barcode part1]
  source 1..16: mol_type = other DNA
agtaccaacacacacc

SEQ ID NO: 34155 - DNA, 16 bp, synthetic construct
  misc_feature 1..16: note = synthetic [barcode part1]
  source 1..16: mol_type = other DNA
tgcgagaccagtaacg

SEQ ID NO: 34156 - DNA, 16 bp, synthetic construct
  misc_feature 1..16: note = synthetic [barcode part1]
  source 1..16: mol_type = other DNA
tcaagtgaggtggtgc

SEQ ID NO: 34157 - DNA, 16 bp, synthetic construct
  misc_feature 1..16: note = synthetic [barcode part1]
  source 1..16: mol_type = other DNA
acgttgtgtgacgttg

SEQ ID NO: 34158 - DNA, 16 bp, synthetic construct
  misc_feature 1..16: note = synthetic [barcode part1]
  source 1..16: mol_type = other DNA
cgattcaggcgtagag

SEQ ID NO: 34159 - DNA, 16 bp, synthetic construct
  misc_feature 1..16: note = synthetic [barcode part1]
  source 1..16: mol_type = other DNA
gcacaacgtacgttgt

SEQ ID NO: 34160 - DNA, 16 bp, synthetic construct
  misc_feature 1..16: note = synthetic [barcode part1]
  source 1..16: mol_type = other DNA
cactacagtcgactag

SEQ ID NO: 34161 - DNA, 16 bp, synthetic construct
  misc_feature 1..16: note = synthetic [barcode part1]
  source 1..16: mol_type = other DNA
atatcctagttaccgc

SEQ ID NO: 34162 - DNA, 16 bp, synthetic construct
  misc_feature 1..16: note = synthetic [barcode part1]
  source 1..16: mol_type = other DNA
gcaacgcaacttcaac

SEQ ID NO: 34163 - DNA, 16 bp, synthetic construct
  misc_feature 1..16: note = synthetic [barcode part1]
  source 1..16: mol_type = other DNA
tggtagtctggcaatc

SEQ ID NO: 34164 - DNA, 16 bp, synthetic construct
  misc_feature 1..16: note = synthetic [barcode part1]
  source 1..16: mol_type = other DNA
aggccggtcttaattg

SEQ ID NO: 34165 - DNA, 16 bp, synthetic construct
  misc_feature 1..16: note = synthetic [barcode part1]
  source 1..16: mol_type = other DNA
tcgtaggcgtctcact

SEQ ID NO: 34166 - DNA, 16 bp, synthetic construct
  misc_feature 1..16: note = synthetic [barcode part1]
  source 1..16: mol_type = other DNA
cgtcgactcaattccg

SEQ ID NO: 34167 - DNA, 16 bp, synthetic construct
  misc_feature 1..16: note = synthetic [barcode part1]
  source 1..16: mol_type = other DNA
tctgaaggcgttacac

SEQ ID NO: 34168 - DNA, 16 bp, synthetic construct
  misc_feature 1..16: note = synthetic [barcode part1]
  source 1..16: mol_type = other DNA
ttattccgcgtccgag

SEQ ID NO: 34169 - DNA, 16 bp, synthetic construct
  misc_feature 1..16: note = synthetic [barcode part1]
  source 1..16: mol_type = other DNA
taggtgttgtggatcc

SEQ ID NO: 34170 - DNA, 16 bp, synthetic construct
  misc_feature 1..16: note = synthetic [barcode part1]
  source 1..16: mol_type = other DNA
cgatatcagacggacg

SEQ ID NO: 34171 - DNA, 16 bp, synthetic construct
  misc_feature 1..16: note = synthetic [barcode part1]
  source 1..16: mol_type = other DNA
gagtccgattcttcgc

SEQ ID NO: 34172 - DNA, 16 bp, synthetic construct
  misc_feature 1..16: note = synthetic [barcode part1]
  source 1..16: mol_type = other DNA
tatccacggattctgt

SEQ ID NO: 34173 - DNA, 16 bp, synthetic construct
  misc_feature 1..16: note = synthetic [barcode part1]
  source 1..16: mol_type = other DNA
cacctattgttgcagt

SEQ ID NO: 34174 - DNA, 16 bp, synthetic construct
  misc_feature 1..16: note = synthetic [barcode part1]
  source 1..16: mol_type = other DNA
tactgtcgcgaccgtt

SEQ ID NO: 34175 - DNA, 16 bp, synthetic construct
  misc_feature 1..16: note = synthetic [barcode part1]
  source 1..16: mol_type = other DNA
gcgataggatacgtcg

SEQ ID NO: 34176 - DNA, 16 bp, synthetic construct
  misc_feature 1..16: note = synthetic [barcode part1]
  source 1..16: mol_type = other DNA
tgatacggaggatcgc

SEQ ID NO: 34177 - DNA, 16 bp, synthetic construct
  misc_feature 1..16: note = synthetic [barcode part1]
  source 1..16: mol_type = other DNA
acaactactctctggt

SEQ ID NO: 34178 - DNA, 16 bp, synthetic construct
  misc_feature 1..16: note = synthetic [barcode part1]
  source 1..16: mol_type = other DNA
acctagactgtctcgc

SEQ ID NO: 34179 - DNA, 16 bp, synthetic construct
  misc_feature 1..16: note = synthetic [barcode part1]
  source 1..16: mol_type = other DNA
gttgtagtgttcgttc

SEQ ID NO: 34180 - DNA, 16 bp, synthetic construct
  misc_feature 1..16: note = synthetic [barcode part1]
  source 1..16: mol_type = other DNA
caagttgtgacctgac

SEQ ID NO: 34181 - DNA, 16 bp, synthetic construct
  misc_feature 1..16: note = synthetic [barcode part1]
  source 1..16: mol_type = other DNA
aacgttaggtcctggt

SEQ ID NO: 34182 - DNA, 16 bp, synthetic construct
  misc_feature 1..16: note = synthetic [barcode part1]
  source 1..16: mol_type = other DNA
cgaggccttaagatct

SEQ ID NO: 34183 - DNA, 16 bp, synthetic construct
  misc_feature 1..16: note = synthetic [barcode part1]
  source 1..16: mol_type = other DNA
tgaccaactagagtcc

SEQ ID NO: 34184 - DNA, 16 bp, synthetic construct
  misc_feature 1..16: note = synthetic [barcode part1]
  source 1..16: mol_type = other DNA
aattcggaatcgccac

SEQ ID NO: 34185 - DNA, 16 bp, synthetic construct
  misc_feature 1..16: note = synthetic [barcode part1]
  source 1..16: mol_type = other DNA
gtgactacgcaactac

SEQ ID NO: 34186 - DNA, 16 bp, synthetic construct
  misc_feature 1..16: note = synthetic [barcode part1]
  source 1..16: mol_type = other DNA
attgtgcaggacgacg

SEQ ID NO: 34187 - DNA, 16 bp, synthetic construct
  misc_feature 1..16: note = synthetic [barcode part1]
  source 1..16: mol_type = other DNA
gaggcgaaccttactt

SEQ ID NO: 34188 - DNA, 16 bp, synthetic construct
  misc_feature 1..16: note = synthetic [barcode part1]
  source 1..16: mol_type = other DNA
tatacctggactactc

SEQ ID NO: 34189 - DNA, 16 bp, synthetic construct
  misc_feature 1..16: note = synthetic [barcode part1]
  source 1..16: mol_type = other DNA
tgattggcaacgtcac

SEQ ID NO: 34190 - DNA, 16 bp, synthetic construct
  misc_feature 1..16: note = synthetic [barcode part1]
  source 1..16: mol_type = other DNA
tgcagttccttatcag

SEQ ID NO: 34191 - DNA, 16 bp, synthetic construct
  misc_feature 1..16: note = synthetic [barcode part1]
  source 1..16: mol_type = other DNA
gaacactgatagagtc

SEQ ID NO: 34192 - DNA, 16 bp, synthetic construct
  misc_feature 1..16: note = synthetic [barcode part1]
  source 1..16: mol_type = other DNA
acgcaagatctagtag

SEQ ID NO: 34193 - DNA, 16 bp, synthetic construct
  misc_feature 1..16: note = synthetic [barcode part1]
  source 1..16: mol_type = other DNA
gaacaatcggttctcg

SEQ ID NO: 34194 - DNA, 16 bp, synthetic construct
  misc_feature 1..16: note = synthetic [barcode part1]
  source 1..16: mol_type = other DNA
acttctgtaccgaact

SEQ ID NO: 34195 - DNA, 16 bp, synthetic construct
  misc_feature 1..16: note = synthetic [barcode part1]
  source 1..16: mol_type = other DNA
tgataatcctccgcgc

SEQ ID NO: 34196 - DNA, 16 bp, synthetic construct
  misc_feature 1..16: note = synthetic [barcode part1]
  source 1..16: mol_type = other DNA
acactcaccgccttag

SEQ ID NO: 34197 - DNA, 16 bp, synthetic construct
  misc_feature 1..16: note = synthetic [barcode part1]
  source 1..16: mol_type = other DNA
tggtaattgcacctct

SEQ ID NO: 34198 - DNA, 16 bp, synthetic construct
  misc_feature 1..16: note = synthetic [barcode part1]
  source 1..16: mol_type = other DNA
gaacgtgtacaaggag

SEQ ID NO: 34199 - DNA, 16 bp, synthetic construct
  misc_feature 1..16: note = synthetic [barcode part1]
  source 1..16: mol_type = other DNA
taattagtcggccgac

SEQ ID NO: 34200 - DNA, 16 bp, synthetic construct
  misc_feature 1..16: note = synthetic [barcode part1]
  source 1..16: mol_type = other DNA
acgacagattcaggcg

SEQ ID NO: 34201 - DNA, 16 bp, synthetic construct
  misc_feature 1..16: note = synthetic [barcode part1]
  source 1..16: mol_type = other DNA
tctatcaggaagtcgc

SEQ ID NO: 34202 - DNA, 16 bp, synthetic construct
  misc_feature 1..16: note = synthetic [barcode part1]
  source 1..16: mol_type = other DNA
ttcgtataccgttgac

SEQ ID NO: 34203 - DNA, 16 bp, synthetic construct
  misc_feature 1..16: note = synthetic [barcode part1]
  source 1..16: mol_type = other DNA
acggttacacgactac

SEQ ID NO: 34204 - DNA, 16 bp, synthetic construct
  misc_feature 1..16: note = synthetic [barcode part1]
  source 1..16: mol_type = other DNA
actcaaccgatagtcg

SEQ ID NO: 34205 - DNA, 16 bp, synthetic construct
  misc_feature 1..16: note = synthetic [barcode part1]
  source 1..16: mol_type = other DNA
taagattccagtcggc

SEQ ID NO: 34206 - DNA, 16 bp, synthetic construct
  misc_feature 1..16: note = synthetic [barcode part1]
  source 1..16: mol_type = other DNA
cacaggtagactcact

SEQ ID NO: 34207 - DNA, 16 bp, synthetic construct
  misc_feature 1..16: note = synthetic [barcode part1]
  source 1..16: mol_type = other DNA
caacgtagaggcagtc

SEQ ID NO: 34208 - DNA, 16 bp, synthetic construct
  misc_feature 1..16: note = synthetic [barcode part1]
  source 1..16: mol_type = other DNA
gcacaataccgatacc

SEQ ID NO: 34209 - DNA, 16 bp, synthetic construct
  misc_feature 1..16: note = synthetic [barcode part1]
  source 1..16: mol_type = other DNA
cagacagtgttcgttg

SEQ ID NO: 34210 - DNA, 16 bp, synthetic construct
  misc_feature 1..16: note = synthetic [barcode part1]
  source 1..16: mol_type = other DNA
ttagaccgacctagtg

SEQ ID NO: 34211 - DNA, 16 bp, synthetic construct
  misc_feature 1..16: note = synthetic [barcode part1]
  source 1..16: mol_type = other DNA
attggcagacgtgttc

SEQ ID NO: 34212 - DNA, 16 bp, synthetic construct
  misc_feature 1..16: note = synthetic [barcode part1]
  source 1..16: mol_type = other DNA
tgccggagaattactc

SEQ ID NO: 34213 - DNA, 16 bp, synthetic construct
  misc_feature 1..16: note = synthetic [barcode part1]
  source 1..16: mol_type = other DNA
tgcctggtgataggag

SEQ ID NO: 34214 - DNA, 16 bp, synthetic construct
  misc_feature 1..16: note = synthetic [barcode part1]
  source 1..16: mol_type = other DNA
ccaacgcggaactaag

SEQ ID NO: 34215 - DNA, 16 bp, synthetic construct
  misc_feature 1..16: note = synthetic [barcode part1]
  source 1..16: mol_type = other DNA
atactggttccgttac

SEQ ID NO: 34216 - DNA, 16 bp, synthetic construct
  misc_feature 1..16: note = synthetic [barcode part1]
  source 1..16: mol_type = other DNA
cctgtgcggtctaact

SEQ ID NO: 34217 - DNA, 16 bp, synthetic construct
  misc_feature 1..16: note = synthetic [barcode part1]
  source 1..16: mol_type = other DNA
gaggagtgtgattatc

SEQ ID NO: 34218 - DNA, 16 bp, synthetic construct
  misc_feature 1..16: note = synthetic [barcode part1]
  source 1..16: mol_type = other DNA
tccgcgtccgacaatt

SEQ ID NO: 34219 - DNA, 16 bp, synthetic construct
  misc_feature 1..16: note = synthetic [barcode part1]
  source 1..16: mol_type = other DNA
caggagacgactgtac

SEQ ID NO: 34220 - DNA, 16 bp, synthetic construct
  misc_feature 1..16: note = synthetic [barcode part1]
  source 1..16: mol_type = other DNA
tattgatctggttccg

SEQ ID NO: 34221 - DNA, 16 bp, synthetic construct
  misc_feature 1..16: note = synthetic [barcode part1]
  source 1..16: mol_type = other DNA
tataccttcacgcctc

SEQ ID NO: 34222 - DNA, 16 bp, synthetic construct
  misc_feature 1..16: note = synthetic [barcode part1]
  source 1..16: mol_type = other DNA
taacggtactatcggc

SEQ ID NO: 34223 - DNA, 16 bp, synthetic construct
  misc_feature 1..16: note = synthetic [barcode part1]
  source 1..16: mol_type = other DNA
cctgtcaacacctgac

SEQ ID NO: 34224 - DNA, 16 bp, synthetic construct
  misc_feature 1..16: note = synthetic [barcode part1]
  source 1..16: mol_type = other DNA
accttgttgagttcgt

SEQ ID NO: 34225 - DNA, 16 bp, synthetic construct
  misc_feature 1..16: note = synthetic [barcode part1]
  source 1..16: mol_type = other DNA
aattaaccgcacacgc

SEQ ID NO: 34226 - DNA, 16 bp, synthetic construct
  misc_feature 1..16: note = synthetic [barcode part1]
  source 1..16: mol_type = other DNA
aactcggccagattgt

SEQ ID NO: 34227 - DNA, 16 bp, synthetic construct
  misc_feature 1..16: note = synthetic [barcode part1]
  source 1..16: mol_type = other DNA
cgtcgacttcctcaag

SEQ ID NO: 34228 - DNA, 16 bp, synthetic construct
  misc_feature 1..16: note = synthetic [barcode part1]
  source 1..16: mol_type = other DNA
taagtgtatcggaggt

SEQ ID NO: 34229 - DNA, 16 bp, synthetic construct
  misc_feature 1..16: note = synthetic [barcode part1]
  source 1..16: mol_type = other DNA
gcagaagtcctatacc

SEQ ID NO: 34230 - DNA, 16 bp, synthetic construct
  misc_feature 1..16: note = synthetic [barcode part1]
  source 1..16: mol_type = other DNA
acgtactccgtgtaag

SEQ ID NO: 34231 - DNA, 16 bp, synthetic construct
  misc_feature 1..16: note = synthetic [barcode part1]
  source 1..16: mol_type = other DNA
aaggtggagtacttac

SEQ ID NO: 34232 - DNA, 16 bp, synthetic construct
  misc_feature 1..16: note = synthetic [barcode part1]
  source 1..16: mol_type = other DNA
aaccgatccaaccaac

SEQ ID NO: 34233 - DNA, 16 bp, synthetic construct
  misc_feature 1..16: note = synthetic [barcode part1]
  source 1..16: mol_type = other DNA
attccttctggtcctg

SEQ ID NO: 34234 - DNA, 16 bp, synthetic construct
  misc_feature 1..16: note = synthetic [barcode part1]
  source 1..16: mol_type = other DNA
acgttaggattcgcac

SEQ ID NO: 34235 - DNA, 16 bp, synthetic construct
  misc_feature 1..16: note = synthetic [barcode part1]
  source 1..16: mol_type = other DNA
tccagagtaacaccgt

SEQ ID NO: 34236 - DNA, 16 bp, synthetic construct
  misc_feature 1..16: note = synthetic [barcode part1]
  source 1..16: mol_type = other DNA
tgagtatctggcacgt

SEQ ID NO: 34237 - DNA, 16 bp, synthetic construct
  misc_feature 1..16: note = synthetic [barcode part1]
  source 1..16: mol_type = other DNA
gtccgtgtaacttccg

SEQ ID NO: 34238 - DNA, 16 bp, synthetic construct
  misc_feature 1..16: note = synthetic [barcode part1]
  source 1..16: mol_type = other DNA
tcgaacttggcagttg

SEQ ID NO: 34239 - DNA, 16 bp, synthetic construct
  misc_feature 1..16: note = synthetic [barcode part1]
  source 1..16: mol_type = other DNA
caacaacctccgtgtc

SEQ ID NO: 34240 - DNA, 16 bp, synthetic construct
  misc_feature 1..16: note = synthetic [barcode part1]
  source 1..16: mol_type = other DNA
tagttattgtctcgcg

SEQ ID NO: 34241 - DNA, 16 bp, synthetic construct
  misc_feature 1..16: note = synthetic [barcode part1]
  source 1..16: mol_type = other DNA
tgtgcgacactccact

SEQ ID NO: 34242 - DNA, 16 bp, synthetic construct
  misc_feature 1..16: note = synthetic [barcode part1]
  source 1..16: mol_type = other DNA
gtggcctattcgatag

SEQ ID NO: 34243 - DNA, 16 bp, synthetic construct
  misc_feature 1..16: note = synthetic [barcode part1]
  source 1..16: mol_type = other DNA
tgcctgttcgtggtac

SEQ ID NO: 34244 - DNA, 16 bp, synthetic construct
  misc_feature 1..16: note = synthetic [barcode part1]
  source 1..16: mol_type = other DNA
cgtcaggtattgagtc

SEQ ID NO: 34245 - DNA, 16 bp, synthetic construct
  misc_feature 1..16: note = synthetic [barcode part1]
  source 1..16: mol_type = other DNA
cacaaggcaattcaag

SEQ ID NO: 34246 - DNA, 16 bp, synthetic construct
  misc_feature 1..16: note = synthetic [barcode part1]
  source 1..16: mol_type = other DNA
gactaggaatacactg

SEQ ID NO: 34247 - DNA, 16 bp, synthetic construct
  misc_feature 1..16: note = synthetic [barcode part1]
  source 1..16: mol_type = other DNA
ttctatcggtatccag

SEQ ID NO: 34248 - DNA, 16 bp, synthetic construct
  misc_feature 1..16: note = synthetic [barcode part1]
  source 1..16: mol_type = other DNA
actcgtacaacagaag

SEQ ID NO: 34249 - DNA, 16 bp, synthetic construct
  misc_feature 1..16: note = synthetic [barcode part1]
  source 1..16: mol_type = other DNA
gagttgcaagtcacct

SEQ ID NO: 34250 - DNA, 16 bp, synthetic construct
  misc_feature 1..16: note = synthetic [barcode part1]
  source 1..16: mol_type = other DNA
tctcagaagtgtcacg

SEQ ID NO: 34251 - DNA, 16 bp, synthetic construct
  misc_feature 1..16: note = synthetic [barcode part1]
  source 1..16: mol_type = other DNA
aacgtctactccttag

SEQ ID NO: 34252 - DNA, 16 bp, synthetic construct
  misc_feature 1..16: note = synthetic [barcode part1]
  source 1..16: mol_type = other DNA
tgtaagtggtgcctgt

SEQ ID NO: 34253 - DNA, 16 bp, synthetic construct
  misc_feature 1..16: note = synthetic [barcode part1]
  source 1..16: mol_type = other DNA
tggtacaaggacggtc

SEQ ID NO: 34254 - DNA, 16 bp, synthetic construct
  misc_feature 1..16: note = synthetic [barcode part1]
  source 1..16: mol_type = other DNA
agagacgcggattacc

SEQ ID NO: 34255 - DNA, 16 bp, synthetic construct
  misc_feature 1..16: note = synthetic [barcode part1]
  source 1..16: mol_type = other DNA
taccagatccgcgttc

SEQ ID NO: 34256 - DNA, 16 bp, synthetic construct
  misc_feature 1..16: note = synthetic [barcode part1]
  source 1..16: mol_type = other DNA
taaggtaaggtactcg

SEQ ID NO: 34257 - DNA, 16 bp, synthetic construct
  misc_feature 1..16: note = synthetic [barcode part1]
  source 1..16: mol_type = other DNA
actcctgcgaagatac

SEQ ID NO: 34258 - DNA, 16 bp, synthetic construct
  misc_feature 1..16: note = synthetic [barcode part1]
  source 1..16: mol_type = other DNA
ccttgcgtcggtaact

SEQ ID NO: 34259 - DNA, 16 bp, synthetic construct
  misc_feature 1..16: note = synthetic [barcode part1]
  source 1..16: mol_type = other DNA
tggtactcagaatccg

SEQ ID NO: 34260 - DNA, 16 bp, synthetic construct
  misc_feature 1..16: note = synthetic [barcode part1]
  source 1..16: mol_type = other DNA
cactgaactaccagac

SEQ ID NO: 34261 - DNA, 16 bp, synthetic construct
  misc_feature 1..16: note = synthetic [barcode part1]
  source 1..16: mol_type = other DNA
acgaacggagttccag

SEQ ID NO: 34262 - DNA, 16 bp, synthetic construct
  misc_feature 1..16: note = synthetic [barcode part1]
  source 1..16: mol_type = other DNA
ccgaagtctacctatt

SEQ ID NO: 34263 - DNA, 16 bp, synthetic construct
  misc_feature 1..16: note = synthetic [barcode part1]
  source 1..16: mol_type = other DNA
tccgatcttcttcgac

SEQ ID NO: 34264 - DNA, 16 bp, synthetic construct
  misc_feature 1..16: note = synthetic [barcode part1]
  source 1..16: mol_type = other DNA
acgagactgagtattg

SEQ ID NO: 34265 - DNA, 16 bp, synthetic construct
  misc_feature 1..16: note = synthetic [barcode part1]
  source 1..16: mol_type = other DNA
gagtgtcctgtcctgt

SEQ ID NO: 34266 - DNA, 16 bp, synthetic construct
  misc_feature 1..16: note = synthetic [barcode part1]
  source 1..16: mol_type = other DNA
attgataccgccgtcc

SEQ ID NO: 34267 - DNA, 16 bp, synthetic construct
  misc_feature 1..16: note = synthetic [barcode part1]
  source 1..16: mol_type = other DNA
gtgttaggccactctc

SEQ ID NO: 34268 - DNA, 16 bp, synthetic construct
  misc_feature 1..16: note = synthetic [barcode part1]
  source 1..16: mol_type = other DNA
gccacaactacttact

SEQ ID NO: 34269 - DNA, 16 bp, synthetic construct
  misc_feature 1..16: note = synthetic [barcode part1]
  source 1..16: mol_type = other DNA
taacttacgtcggacg

SEQ ID NO: 34270 - DNA, 16 bp, synthetic construct
  misc_feature 1..16: note = synthetic [barcode part1]
  source 1..16: mol_type = other DNA
gacttgtacaggttcg

SEQ ID NO: 34271 - DNA, 16 bp, synthetic construct
  misc_feature 1..16: note = synthetic [barcode part1]
  source 1..16: mol_type = other DNA
tcggcaagacagtctt

SEQ ID NO: 34272 - DNA, 16 bp, synthetic construct
  misc_feature 1..16: note = synthetic [barcode part1]
  source 1..16: mol_type = other DNA
cggtcgaatatcgtac

SEQ ID NO: 34273 - DNA, 16 bp, synthetic construct
  misc_feature 1..16: note = synthetic [barcode part1]
  source 1..16: mol_type = other DNA
gcactctctctgtatc

SEQ ID NO: 34274 - DNA, 16 bp, synthetic construct
  misc_feature 1..16: note = synthetic [barcode part1]
  source 1..16: mol_type = other DNA
gattcactaccgtccg

SEQ ID NO: 34275 - DNA, 16 bp, synthetic construct
  misc_feature 1..16: note = synthetic [barcode part1]
  source 1..16: mol_type = other DNA
cgcacagttactattc

SEQ ID NO: 34276 - DNA, 16 bp, synthetic construct
  misc_feature 1..16: note = synthetic [barcode part1]
  source 1..16: mol_type = other DNA
aagactccgagattcc

SEQ ID NO: 34277 - DNA, 16 bp, synthetic construct
  misc_feature 1..16: note = synthetic [barcode part1]
  source 1..16: mol_type = other DNA
cctgatccgtaaccac

SEQ ID NO: 34278 - DNA, 16 bp, synthetic construct
  misc_feature 1..16: note = synthetic [barcode part1]
  source 1..16: mol_type = other DNA
tccgttaaccgtctct

SEQ ID NO: 34279 - DNA, 16 bp, synthetic construct
  misc_feature 1..16: note = synthetic [barcode part1]
  source 1..16: mol_type = other DNA
tcagtagattctcgtc

SEQ ID NO: 34280 - DNA, 16 bp, synthetic construct
  misc_feature 1..16: note = synthetic [barcode part1]
  source 1..16: mol_type = other DNA
ttctaacaatccacgc

SEQ ID NO: 34281 - DNA, 16 bp, synthetic construct
  misc_feature 1..16: note = synthetic [barcode part1]
  source 1..16: mol_type = other DNA
cgttgtatcggaactg

SEQ ID NO: 34282 - DNA, 16 bp, synthetic construct
  misc_feature 1..16: note = synthetic [barcode part1]
  source 1..16: mol_type = other DNA
cagtaacgttaccgac

SEQ ID NO: 34283 - DNA, 16 bp, synthetic construct
  misc_feature 1..16: note = synthetic [barcode part1]
  source 1..16: mol_type = other DNA
cggaagacagtgtgtc

SEQ ID NO: 34284 - DNA, 16 bp, synthetic construct
  misc_feature 1..16: note = synthetic [barcode part1]
  source 1..16: mol_type = other DNA
taggttgcctcgtacc

SEQ ID NO: 34285 - DNA, 16 bp, synthetic construct
  misc_feature 1..16: note = synthetic [barcode part1]
  source 1..16: mol_type = other DNA
tccagatcgagttcag

SEQ ID NO: 34286 - DNA, 16 bp, synthetic construct
  misc_feature 1..16: note = synthetic [barcode part1]
  source 1..16: mol_type = other DNA
ccacaagatctggact

SEQ ID NO: 34287 - DNA, 16 bp, synthetic construct
  misc_feature 1..16: note = synthetic [barcode part1]
  source 1..16: mol_type = other DNA
ttctggccgtgtcaac

SEQ ID NO: 34288 - DNA, 16 bp, synthetic construct
  misc_feature 1..16: note = synthetic [barcode part1]
  source 1..16: mol_type = other DNA
atcgtacgtcactccg

SEQ ID NO: 34289 - DNA, 16 bp, synthetic construct
  misc_feature 1..16: note = synthetic [barcode part1]
  source 1..16: mol_type = other DNA
aatcagaagtgcgttg

SEQ ID NO: 34290 - DNA, 16 bp, synthetic construct
  misc_feature 1..16: note = synthetic [barcode part1]
  source 1..16: mol_type = other DNA
aaggacgcggattgtc

SEQ ID NO: 34291 - DNA, 16 bp, synthetic construct
  misc_feature 1..16: note = synthetic [barcode part1]
  source 1..16: mol_type = other DNA
tccgaccaaggaatct

SEQ ID NO: 34292 - DNA, 16 bp, synthetic construct
  misc_feature 1..16: note = synthetic [barcode part1]
  source 1..16: mol_type = other DNA
ttatccgtggagttct

SEQ ID NO: 34293 - DNA, 16 bp, synthetic construct
  misc_feature 1..16: note = synthetic [barcode part1]
  source 1..16: mol_type = other DNA
acgtaacggtctctcc

SEQ ID NO: 34294 - DNA, 16 bp, synthetic construct
  misc_feature 1..16: note = synthetic [barcode part1]
  source 1..16: mol_type = other DNA
gcaactacaatcgcac

SEQ ID NO: 34295 - DNA, 16 bp, synthetic construct
  misc_feature 1..16: note = synthetic [barcode part1]
  source 1..16: mol_type = other DNA
agttcacacggacttg

SEQ ID NO: 34296 - DNA, 16 bp, synthetic construct
  misc_feature 1..16: note = synthetic [barcode part1]
  source 1..16: mol_type = other DNA
atacaataggatcggc

SEQ ID NO: 34297 - DNA, 16 bp, synthetic construct
  misc_feature 1..16: note = synthetic [barcode part1]
  source 1..16: mol_type = other DNA
ccaagtattcgagtgc

SEQ ID NO: 34298 - DNA, 16 bp, synthetic construct
  misc_feature 1..16: note = synthetic [barcode part1]
  source 1..16: mol_type = other DNA
acgcgtctactctacg

SEQ ID NO: 34299 - DNA, 16 bp, synthetic construct
  misc_feature 1..16: note = synthetic [barcode part1]
  source 1..16: mol_type = other DNA
tcaagtggtaggttcc

SEQ ID NO: 34300 - DNA, 16 bp, synthetic construct
  misc_feature 1..16: note = synthetic [barcode part1]
  source 1..16: mol_type = other DNA
caaggtgtcgtgtgag

SEQ ID NO: 34301 - DNA, 16 bp, synthetic construct
  misc_feature 1..16: note = synthetic [barcode part1]
  source 1..16: mol_type = other DNA
acgtgacggagtcagt

SEQ ID NO: 34302 - DNA, 16 bp, synthetic construct
  misc_feature 1..16: note = synthetic [barcode part1]
  source 1..16: mol_type = other DNA
ccgataattacgtctc

SEQ ID NO: 34303 - DNA, 16 bp, synthetic construct
  misc_feature 1..16: note = synthetic [barcode part1]
  source 1..16: mol_type = other DNA
aggaatagagttgtcc

SEQ ID NO: 34304 - DNA, 16 bp, synthetic construct
  misc_feature 1..16: note = synthetic [barcode part1]
  source 1..16: mol_type = other DNA
ttggttcgtctctcgt

SEQ ID NO: 34305 - DNA, 16 bp, synthetic construct
  misc_feature 1..16: note = synthetic [barcode part1]
  source 1..16: mol_type = other DNA
aagtaccttcggacac

SEQ ID NO: 34306 - DNA, 16 bp, synthetic construct
  misc_feature 1..16: note = synthetic [barcode part1]
  source 1..16: mol_type = other DNA
attggtctaacgccag

SEQ ID NO: 34307 - DNA, 16 bp, synthetic construct
  misc_feature 1..16: note = synthetic [barcode part1]
  source 1..16: mol_type = other DNA
tgtcgtcgtccaagtc

SEQ ID NO: 34308 - DNA, 16 bp, synthetic construct
  misc_feature 1..16: note = synthetic [barcode part1]
  source 1..16: mol_type = other DNA
tggccactgttaacag

SEQ ID NO: 34309 - DNA, 16 bp, synthetic construct
  misc_feature 1..16: note = synthetic [barcode part1]
  source 1..16: mol_type = other DNA
atccagaaggttcacc

SEQ ID NO: 34310 - DNA, 16 bp, synthetic construct
  misc_feature 1..16: note = synthetic [barcode part1]
  source 1..16: mol_type = other DNA
cagaaggaatcaggac

SEQ ID NO: 34311 - DNA, 16 bp, synthetic construct
  misc_feature 1..16: note = synthetic [barcode part1]
  source 1..16: mol_type = other DNA
acacactacaactgcg

SEQ ID NO: 34312 - DNA, 16 bp, synthetic construct
  misc_feature 1..16: note = synthetic [barcode part1]
  source 1..16: mol_type = other DNA
ttcggccgtcagtgtt

SEQ ID NO: 34313 - DNA, 16 bp, synthetic construct
  misc_feature 1..16: note = synthetic [barcode part1]
  source 1..16: mol_type = other DNA
atcttcagtgatccac

SEQ ID NO: 34314 - DNA, 16 bp, synthetic construct
  misc_feature 1..16: note = synthetic [barcode part1]
  source 1..16: mol_type = other DNA
tggtgcgtagttcctc

SEQ ID NO: 34315 - DNA, 16 bp, synthetic construct
  misc_feature 1..16: note = synthetic [barcode part1]
  source 1..16: mol_type = other DNA
aagactcctcagaacc

SEQ ID NO: 34316 - DNA, 16 bp, synthetic construct
  misc_feature 1..16: note = synthetic [barcode part1]
  source 1..16: mol_type = other DNA
aatacgcgttagtgcc

SEQ ID NO: 34317 - DNA, 16 bp, synthetic construct
  misc_feature 1..16: note = synthetic [barcode part1]
  source 1..16: mol_type = other DNA
tgcgtgcaatcttgag

SEQ ID NO: 34318 - DNA, 16 bp, synthetic construct
  misc_feature 1..16: note = synthetic [barcode part1]
  source 1..16: mol_type = other DNA
gcagaaggtcgttgac

SEQ ID NO: 34319 - DNA, 16 bp, synthetic construct
  misc_feature 1..16: note = synthetic [barcode part1]
  source 1..16: mol_type = other DNA
gaactggccttagttg

SEQ ID NO: 34320 - DNA, 16 bp, synthetic construct
  misc_feature 1..16: note = synthetic [barcode part1]
  source 1..16: mol_type = other DNA
tagtctcaggatcggt

SEQ ID NO: 34321 - DNA, 16 bp, synthetic construct
  misc_feature 1..16: note = synthetic [barcode part1]
  source 1..16: mol_type = other DNA
gcgagttgattcgtgt

SEQ ID NO: 34322 - DNA, 16 bp, synthetic construct
  misc_feature 1..16: note = synthetic [barcode part1]
  source 1..16: mol_type = other DNA
aggaggtgcaagatac

SEQ ID NO: 34323 - DNA, 16 bp, synthetic construct
  misc_feature 1..16: note = synthetic [barcode part1]
  source 1..16: mol_type = other DNA
atattggtcttgccgt

SEQ ID NO: 34324 - DNA, 16 bp, synthetic construct
  misc_feature 1..16: note = synthetic [barcode part1]
  source 1..16: mol_type = other DNA
acgtgactgcacgatt

SEQ ID NO: 34325 - DNA, 16 bp, synthetic construct
  misc_feature 1..16: note = synthetic [barcode part1]
  source 1..16: mol_type = other DNA
gtgaccacacacagtt

SEQ ID NO: 34326 - DNA, 16 bp, synthetic construct
  misc_feature 1..16: note = synthetic [barcode part1]
  source 1..16: mol_type = other DNA
aatcgtcaatacggag

SEQ ID NO: 34327 - DNA, 16 bp, synthetic construct
  misc_feature 1..16: note = synthetic [barcode part1]
  source 1..16: mol_type = other DNA
tacgtccagacacaac

SEQ ID NO: 34328 - DNA, 16 bp, synthetic construct
  misc_feature 1..16: note = synthetic [barcode part1]
  source 1..16: mol_type = other DNA
cgattctggccttctt

SEQ ID NO: 34329 - DNA, 16 bp, synthetic construct
  misc_feature 1..16: note = synthetic [barcode part1]
  source 1..16: mol_type = other DNA
aggaagaacacacgtg

SEQ ID NO: 34330 - DNA, 16 bp, synthetic construct
  misc_feature 1..16: note = synthetic [barcode part1]
  source 1..16: mol_type = other DNA
tgtcttaagacttgcc

SEQ ID NO: 34331 - DNA, 16 bp, synthetic construct
  misc_feature 1..16: note = synthetic [barcode part1]
  source 1..16: mol_type = other DNA
cgtacggcctaattcc

SEQ ID NO: 34332 - DNA, 16 bp, synthetic construct
  misc_feature 1..16: note = synthetic [barcode part1]
  source 1..16: mol_type = other DNA
tgtgtacaccacaacg

SEQ ID NO: 34333 - DNA, 16 bp, synthetic construct
  misc_feature 1..16: note = synthetic [barcode part1]
  source 1..16: mol_type = other DNA
gagacctggacgaact

SEQ ID NO: 34334 - DNA, 16 bp, synthetic construct
  misc_feature 1..16: note = synthetic [barcode part1]
  source 1..16: mol_type = other DNA
gtagtctcttgtactg

SEQ ID NO: 34335 - DNA, 16 bp, synthetic construct
  misc_feature 1..16: note = synthetic [barcode part1]
  source 1..16: mol_type = other DNA
aacgtacgaggtcgac

SEQ ID NO: 34336 - DNA, 16 bp, synthetic construct
  misc_feature 1..16: note = synthetic [barcode part1]
  source 1..16: mol_type = other DNA
ataattgtggcgcgtc

SEQ ID NO: 34337 - DNA, 16 bp, synthetic construct
  misc_feature 1..16: note = synthetic [barcode part1]
  source 1..16: mol_type = other DNA
cgccgtcttacgtaac

SEQ ID NO: 34338 - DNA, 16 bp, synthetic construct
  misc_feature 1..16: note = synthetic [barcode part1]
  source 1..16: mol_type = other DNA
tagaggcgtaatctag

SEQ ID NO: 34339 - DNA, 16 bp, synthetic construct
  misc_feature 1..16: note = synthetic [barcode part1]
  source 1..16: mol_type = other DNA
tggccgaatcaatcac

SEQ ID NO: 34340 - DNA, 16 bp, synthetic construct
  misc_feature 1..16: note = synthetic [barcode part1]
  source 1..16: mol_type = other DNA
atccacaacgtctgag

SEQ ID NO: 34341 - DNA, 16 bp, synthetic construct
  misc_feature 1..16: note = synthetic [barcode part1]
  source 1..16: mol_type = other DNA
cgtcgtccagacttgt

SEQ ID NO: 34342 - DNA, 16 bp, synthetic construct
  misc_feature 1..16: note = synthetic [barcode part1]
  source 1..16: mol_type = other DNA
cgaaccaatcgaacct

SEQ ID NO: 34343 - DNA, 16 bp, synthetic construct
  misc_feature 1..16: note = synthetic [barcode part1]
  source 1..16: mol_type = other DNA
cgtaacaggtgagtgc

SEQ ID NO: 34344 - DNA, 16 bp, synthetic construct
  misc_feature 1..16: note = synthetic [barcode part1]
  source 1..16: mol_type = other DNA
ccgtcgttgaatactt

SEQ ID NO: 34345 - DNA, 16 bp, synthetic construct
  misc_feature 1..16: note = synthetic [barcode part1]
  source 1..16: mol_type = other DNA
cgtacttcaaggacgt

SEQ ID NO: 34346 - DNA, 16 bp, synthetic construct
  misc_feature 1..16: note = synthetic [barcode part1]
  source 1..16: mol_type = other DNA
tgcgtattaaccggtg

SEQ ID NO: 34347 - DNA, 16 bp, synthetic construct
  misc_feature 1..16: note = synthetic [barcode part1]
  source 1..16: mol_type = other DNA
ttgccgttgttgtctc

SEQ ID NO: 34348 - DNA, 16 bp, synthetic construct
  misc_feature 1..16: note = synthetic [barcode part1]
  source 1..16: mol_type = other DNA
atcgtgactatccgcc

SEQ ID NO: 34349 - DNA, 16 bp, synthetic construct
  misc_feature 1..16: note = synthetic [barcode part1]
  source 1..16: mol_type = other DNA
agaatagttgcgagtc

SEQ ID NO: 34350 - DNA, 16 bp, synthetic construct
  misc_feature 1..16: note = synthetic [barcode part1]
  source 1..16: mol_type = other DNA
cctaactccgattcct

SEQ ID NO: 34351 - DNA, 16 bp, synthetic construct
  misc_feature 1..16: note = synthetic [barcode part1]
  source 1..16: mol_type = other DNA
gacgcgtgagatcaac

SEQ ID NO: 34352 - DNA, 16 bp, synthetic construct
  misc_feature 1..16: note = synthetic [barcode part1]
  source 1..16: mol_type = other DNA
tgcacaagatagtgac

SEQ ID NO: 34353 - DNA, 16 bp, synthetic construct
  misc_feature 1..16: note = synthetic [barcode part1]
  source 1..16: mol_type = other DNA
aatcgactaacgtcgc

SEQ ID NO: 34354 - DNA, 16 bp, synthetic construct
  misc_feature 1..16: note = synthetic [barcode part1]
  source 1..16: mol_type = other DNA
taagtaccgcgttggt

SEQ ID NO: 34355 - DNA, 16 bp, synthetic construct
  misc_feature 1..16: note = synthetic [barcode part1]
  source 1..16: mol_type = other DNA
gtcggtagagtacctt

SEQ ID NO: 34356 - DNA, 16 bp, synthetic construct
  misc_feature 1..16: note = synthetic [barcode part1]
  source 1..16: mol_type = other DNA
agtacgttggtcacac

SEQ ID NO: 34357 - DNA, 16 bp, synthetic construct
  misc_feature 1..16: note = synthetic [barcode part1]
  source 1..16: mol_type = other DNA
ttcgttgcgatcctct

SEQ ID NO: 34358 - DNA, 16 bp, synthetic construct
  misc_feature 1..16: note = synthetic [barcode part1]
  source 1..16: mol_type = other DNA
agattcctctcctctg

SEQ ID NO: 34359 - DNA, 16 bp, synthetic construct
  misc_feature 1..16: note = synthetic [barcode part1]
  source 1..16: mol_type = other DNA
cacttcacgaatacct

SEQ ID NO: 34360 - DNA, 16 bp, synthetic construct
  misc_feature 1..16: note = synthetic [barcode part1]
  source 1..16: mol_type = other DNA
accgtggtagaatctc

SEQ ID NO: 34361 - DNA, 16 bp, synthetic construct
  misc_feature 1..16: note = synthetic [barcode part1]
  source 1..16: mol_type = other DNA
gtacctcaccaagtcc

SEQ ID NO: 34362 - DNA, 16 bp, synthetic construct
  misc_feature 1..16: note = synthetic [barcode part1]
  source 1..16: mol_type = other DNA
cgacttcgattcttcc

SEQ ID NO: 34363 - DNA, 16 bp, synthetic construct
  misc_feature 1..16: note = synthetic [barcode part1]
  source 1..16: mol_type = other DNA
gtcgcctacttatagt

SEQ ID NO: 34364 - DNA, 16 bp, synthetic construct
  misc_feature 1..16: note = synthetic [barcode part1]
  source 1..16: mol_type = other DNA
agtgatacgcctggag

SEQ ID NO: 34365 - DNA, 16 bp, synthetic construct
  misc_feature 1..16: note = synthetic [barcode part1]
  source 1..16: mol_type = other DNA
cagactgttctacgtt

SEQ ID NO: 34366 - DNA, 16 bp, synthetic construct
  misc_feature 1..16: note = synthetic [barcode part1]
  source 1..16: mol_type = other DNA
ttatacagaccgagag

SEQ ID NO: 34367 - DNA, 16 bp, synthetic construct
  misc_feature 1..16: note = synthetic [barcode part1]
  source 1..16: mol_type = other DNA
cgccgttaacacacct

SEQ ID NO: 34368 - DNA, 16 bp, synthetic construct
  misc_feature 1..16: note = synthetic [barcode part1]
  source 1..16: mol_type = other DNA
gttccaagtcacagtg

SEQ ID NO: 34369 - DNA, 16 bp, synthetic construct
  misc_feature 1..16: note = synthetic [barcode part1]
  source 1..16: mol_type = other DNA
gtcttgccggacttac

SEQ ID NO: 34370 - DNA, 16 bp, synthetic construct
  misc_feature 1..16: note = synthetic [barcode part1]
  source 1..16: mol_type = other DNA
tgaactgaagatacgc

SEQ ID NO: 34371 - DNA, 16 bp, synthetic construct
  misc_feature 1..16: note = synthetic [barcode part1]
  source 1..16: mol_type = other DNA
tggtctctaactgcgc

SEQ ID NO: 34372 - DNA, 16 bp, synthetic construct
  misc_feature 1..16: note = synthetic [barcode part1]
  source 1..16: mol_type = other DNA
tgcggtggataagtgc

SEQ ID NO: 34373 - DNA, 16 bp, synthetic construct
  misc_feature 1..16: note = synthetic [barcode part1]
  source 1..16: mol_type = other DNA
atcacgtgatccgtag

SEQ ID NO: 34374 - DNA, 16 bp, synthetic construct
  misc_feature 1..16: note = synthetic [barcode part1]
  source 1..16: mol_type = other DNA
aagatccgacggacac

SEQ ID NO: 34375 - DNA, 16 bp, synthetic construct
  misc_feature 1..16: note = synthetic [barcode part1]
  source 1..16: mol_type = other DNA
acagtacgtgtacacc

SEQ ID NO: 34376 - DNA, 16 bp, synthetic construct
  misc_feature 1..16: note = synthetic [barcode part1]
  source 1..16: mol_type = other DNA
tattccgaggttcact

SEQ ID NO: 34377 - DNA, 16 bp, synthetic construct
  misc_feature 1..16: note = synthetic [barcode part1]
  source 1..16: mol_type = other DNA
tgtcgttccgcacagt

SEQ ID NO: 34378 - DNA, 16 bp, synthetic construct
  misc_feature 1..16: note = synthetic [barcode part1]
  source 1..16: mol_type = other DNA
tacctgcgcaagtaac

SEQ ID NO: 34379 - DNA, 16 bp, synthetic construct
  misc_feature 1..16: note = synthetic [barcode part1]
  source 1..16: mol_type = other DNA
aacgaggtataccaac

SEQ ID NO: 34380 - DNA, 16 bp, synthetic construct
  misc_feature 1..16: note = synthetic [barcode part1]
  source 1..16: mol_type = other DNA
aataacgccgtctcag

SEQ ID NO: 34381 - DNA, 16 bp, synthetic construct
  misc_feature 1..16: note = synthetic [barcode part1]
  source 1..16: mol_type = other DNA
tacggcggagtagatc

SEQ ID NO: 34382 - DNA, 16 bp, synthetic construct
  misc_feature 1..16: note = synthetic [barcode part1]
  source 1..16: mol_type = other DNA
cactgatcgtgactag

SEQ ID NO: 34383 - DNA, 16 bp, synthetic construct
  misc_feature 1..16: note = synthetic [barcode part1]
  source 1..16: mol_type = other DNA
agtcacgatacaccgt

SEQ ID NO: 34384 - DNA, 16 bp, synthetic construct
  misc_feature 1..16: note = synthetic [barcode part1]
  source 1..16: mol_type = other DNA
gtaattacctctcgac

SEQ ID NO: 34385 - DNA, 16 bp, synthetic construct
  misc_feature 1..16: note = synthetic [barcode part1]
  source 1..16: mol_type = other DNA
tctattgtggcctctc

SEQ ID NO: 34386 - DNA, 16 bp, synthetic construct
  misc_feature 1..16: note = synthetic [barcode part1]
  source 1..16: mol_type = other DNA
tgtggcgttcagaatc

SEQ ID NO: 34387 - DNA, 16 bp, synthetic construct
  misc_feature 1..16: note = synthetic [barcode part1]
  source 1..16: mol_type = other DNA
ttcactagacctgtac

SEQ ID NO: 34388 - DNA, 16 bp, synthetic construct
  misc_feature 1..16: note = synthetic [barcode part1]
  source 1..16: mol_type = other DNA
gccagactatctccac

SEQ ID NO: 34389 - DNA, 16 bp, synthetic construct
  misc_feature 1..16: note = synthetic [barcode part1]
  source 1..16: mol_type = other DNA
ccacaagtgagagatt

SEQ ID NO: 34390 - DNA, 16 bp, synthetic construct
  misc_feature 1..16: note = synthetic [barcode part1]
  source 1..16: mol_type = other DNA
aacctaccactgtccg

SEQ ID NO: 34391 - DNA, 16 bp, synthetic construct
  misc_feature 1..16: note = synthetic [barcode part1]
  source 1..16: mol_type = other DNA
tcctcttatcgtgacc

SEQ ID NO: 34392 - DNA, 16 bp, synthetic construct
  misc_feature 1..16: note = synthetic [barcode part1]
  source 1..16: mol_type = other DNA
tagactgttggactgc

SEQ ID NO: 34393 - DNA, 16 bp, synthetic construct
  misc_feature 1..16: note = synthetic [barcode part1]
  source 1..16: mol_type = other DNA
tggtcgatcagagtct

SEQ ID NO: 34394 - DNA, 16 bp, synthetic construct
  misc_feature 1..16: note = synthetic [barcode part1]
  source 1..16: mol_type = other DNA
acgtaacaggagattc

SEQ ID NO: 34395 - DNA, 16 bp, synthetic construct
  misc_feature 1..16: note = synthetic [barcode part1]
  source 1..16: mol_type = other DNA
aggtgacacgtctgag

SEQ ID NO: 34396 - DNA, 16 bp, synthetic construct
  misc_feature 1..16: note = synthetic [barcode part1]
  source 1..16: mol_type = other DNA
gtaggactccaggtag

SEQ ID NO: 34397 - DNA, 16 bp, synthetic construct
  misc_feature 1..16: note = synthetic [barcode part1]
  source 1..16: mol_type = other DNA
ttcgcacaatcgtcgc

SEQ ID NO: 34398 - DNA, 16 bp, synthetic construct
  misc_feature 1..16: note = synthetic [barcode part1]
  source 1..16: mol_type = other DNA
ataggccggttacgtt

SEQ ID NO: 34399 - DNA, 16 bp, synthetic construct
  misc_feature 1..16: note = synthetic [barcode part1]
  source 1..16: mol_type = other DNA
acttgagttgttctgc

SEQ ID NO: 34400 - DNA, 16 bp, synthetic construct
  misc_feature 1..16: note = synthetic [barcode part1]
  source 1..16: mol_type = other DNA
gcacagtagtcggagt

SEQ ID NO: 34401 - DNA, 16 bp, synthetic construct
  misc_feature 1..16: note = synthetic [barcode part1]
  source 1..16: mol_type = other DNA
tcgtctcctaacgcag

SEQ ID NO: 34402 - DNA, 16 bp, synthetic construct
  misc_feature 1..16: note = synthetic [barcode part1]
  source 1..16: mol_type = other DNA
gacttagaggaacgcc

SEQ ID NO: 34403 - DNA, 16 bp, synthetic construct
  misc_feature 1..16: note = synthetic [barcode part1]
  source 1..16: mol_type = other DNA
tacgatcggagtgacg

SEQ ID NO: 34404 - DNA, 16 bp, synthetic construct
  misc_feature 1..16: note = synthetic [barcode part1]
  source 1..16: mol_type = other DNA
acgagtcgtacgactt

SEQ ID NO: 34405 - DNA, 16 bp, synthetic construct
  misc_feature 1..16: note = synthetic [barcode part1]
  source 1..16: mol_type = other DNA
tgtcagtcctcggttg

SEQ ID NO: 34406 - DNA, 16 bp, synthetic construct
  misc_feature 1..16: note = synthetic [barcode part1]
  source 1..16: mol_type = other DNA
gcggtggaacaataag

SEQ ID NO: 34407 - DNA, 16 bp, synthetic construct
  misc_feature 1..16: note = synthetic [barcode part1]
  source 1..16: mol_type = other DNA
aggttgtgtccaacac

SEQ ID NO: 34408 - DNA, 16 bp, synthetic construct
  misc_feature 1..16: note = synthetic [barcode part1]
  source 1..16: mol_type = other DNA
accgccttctagacgt

SEQ ID NO: 34409 - DNA, 16 bp, synthetic construct
  misc_feature 1..16: note = synthetic [barcode part1]
  source 1..16: mol_type = other DNA
aagtgtagattcggtg

SEQ ID NO: 34410 - DNA, 16 bp, synthetic construct
  misc_feature 1..16: note = synthetic [barcode part1]
  source 1..16: mol_type = other DNA
gcgttatcttgaggtg

SEQ ID NO: 34411 - DNA, 16 bp, synthetic construct
  misc_feature 1..16: note = synthetic [barcode part1]
  source 1..16: mol_type = other DNA
gcacggtagagaatcc

SEQ ID NO: 34412 - DNA, 16 bp, synthetic construct
  misc_feature 1..16: note = synthetic [barcode part1]
  source 1..16: mol_type = other DNA
tctaaccactgacact

SEQ ID NO: 34413 - DNA, 16 bp, synthetic construct
  misc_feature 1..16: note = synthetic [barcode part1]
  source 1..16: mol_type = other DNA
atccaggtcgtctcgt

SEQ ID NO: 34414 - DNA, 16 bp, synthetic construct
  misc_feature 1..16: note = synthetic [barcode part1]
  source 1..16: mol_type = other DNA
atataaccttcggtcc

SEQ ID NO: 34415 - DNA, 16 bp, synthetic construct
  misc_feature 1..16: note = synthetic [barcode part1]
  source 1..16: mol_type = other DNA
tataactccgaacgcg

SEQ ID NO: 34416 - DNA, 16 bp, synthetic construct
  misc_feature 1..16: note = synthetic [barcode part1]
  source 1..16: mol_type = other DNA
tggcgaatctactacg

SEQ ID NO: 34417 - DNA, 16 bp, synthetic construct
  misc_feature 1..16: note = synthetic [barcode part1]
  source 1..16: mol_type = other DNA
agtcctcgacttatac

SEQ ID NO: 34418 - DNA, 16 bp, synthetic construct
  misc_feature 1..16: note = synthetic [barcode part1]
  source 1..16: mol_type = other DNA
gccggcactcaattct

SEQ ID NO: 34419 - DNA, 16 bp, synthetic construct
  misc_feature 1..16: note = synthetic [barcode part1]
  source 1..16: mol_type = other DNA
aatcggttaactggcc

SEQ ID NO: 34420 - DNA, 16 bp, synthetic construct
  misc_feature 1..16: note = synthetic [barcode part1]
  source 1..16: mol_type = other DNA
tagatatcgcggatcc

SEQ ID NO: 34421 - DNA, 16 bp, synthetic construct
  misc_feature 1..16: note = synthetic [barcode part1]
  source 1..16: mol_type = other DNA
ccgatccaagtcaagt

SEQ ID NO: 34422 - DNA, 16 bp, synthetic construct
  misc_feature 1..16: note = synthetic [barcode part1]
  source 1..16: mol_type = other DNA
accttcagtgattcgt

SEQ ID NO: 34423 - DNA, 16 bp, synthetic construct
  misc_feature 1..16: note = synthetic [barcode part1]
  source 1..16: mol_type = other DNA
tcctcctataccgtgt

SEQ ID NO: 34424 - DNA, 16 bp, synthetic construct
  misc_feature 1..16: note = synthetic [barcode part1]
  source 1..16: mol_type = other DNA
gacctgacaacgatct

SEQ ID NO: 34425 - DNA, 16 bp, synthetic construct
  misc_feature 1..16: note = synthetic [barcode part1]
  source 1..16: mol_type = other DNA
acggacaattcgtctg

SEQ ID NO: 34426 - DNA, 16 bp, synthetic construct
  misc_feature 1..16: note = synthetic [barcode part1]
  source 1..16: mol_type = other DNA
cggccaggattaactt

SEQ ID NO: 34427 - DNA, 16 bp, synthetic construct
  misc_feature 1..16: note = synthetic [barcode part1]
  source 1..16: mol_type = other DNA
acggcaattcaactcg

SEQ ID NO: 34428 - DNA, 16 bp, synthetic construct
  misc_feature 1..16: note = synthetic [barcode part1]
  source 1..16: mol_type = other DNA
tcttccggacagtaag

SEQ ID NO: 34429 - DNA, 16 bp, synthetic construct
  misc_feature 1..16: note = synthetic [barcode part1]
  source 1..16: mol_type = other DNA
gaatccacttgacttc

SEQ ID NO: 34430 - DNA, 16 bp, synthetic construct
  misc_feature 1..16: note = synthetic [barcode part1]
  source 1..16: mol_type = other DNA
agtcaaccacaacgtc

SEQ ID NO: 34431 - DNA, 16 bp, synthetic construct
  misc_feature 1..16: note = synthetic [barcode part1]
  source 1..16: mol_type = other DNA
taacaaggaacctgtg

SEQ ID NO: 34432 - DNA, 16 bp, synthetic construct
  misc_feature 1..16: note = synthetic [barcode part1]
  source 1..16: mol_type = other DNA
acttgacgtgttcttg

SEQ ID NO: 34433 - DNA, 16 bp, synthetic construct
  misc_feature 1..16: note = synthetic [barcode part1]
  source 1..16: mol_type = other DNA
acgccgatcctactac

SEQ ID NO: 34434 - DNA, 16 bp, synthetic construct
  misc_feature 1..16: note = synthetic [barcode part1]
  source 1..16: mol_type = other DNA
gactcctctaagtatc

SEQ ID NO: 34435 - DNA, 16 bp, synthetic construct
  misc_feature 1..16: note = synthetic [barcode part1]
  source 1..16: mol_type = other DNA
gcgagagactatcggt

SEQ ID NO: 34436 - DNA, 16 bp, synthetic construct
  misc_feature 1..16: note = synthetic [barcode part1]
  source 1..16: mol_type = other DNA
taacgcaaggacggtc

SEQ ID NO: 34437 - DNA, 16 bp, synthetic construct
  misc_feature 1..16: note = synthetic [barcode part1]
  source 1..16: mol_type = other DNA
attcttccgacgcacg

SEQ ID NO: 34438 - DNA, 16 bp, synthetic construct
  misc_feature 1..16: note = synthetic [barcode part1]
  source 1..16: mol_type = other DNA
caagactcgtagtgtc

SEQ ID NO: 34439 - DNA, 16 bp, synthetic construct
  misc_feature 1..16: note = synthetic [barcode part1]
  source 1..16: mol_type = other DNA
tctctcgaatacgttg

SEQ ID NO: 34440 - DNA, 16 bp, synthetic construct
  misc_feature 1..16: note = synthetic [barcode part1]
  source 1..16: mol_type = other DNA
attccacgcctggact

SEQ ID NO: 34441 - DNA, 16 bp, synthetic construct
  misc_feature 1..16: note = synthetic [barcode part1]
  source 1..16: mol_type = other DNA
ttccgtaactggactt

SEQ ID NO: 34442 - DNA, 16 bp, synthetic construct
  misc_feature 1..16: note = synthetic [barcode part1]
  source 1..16: mol_type = other DNA
acaccgacttctagtt

SEQ ID NO: 34443 - DNA, 16 bp, synthetic construct
  misc_feature 1..16: note = synthetic [barcode part1]
  source 1..16: mol_type = other DNA
gtccttgagtacgaac

SEQ ID NO: 34444 - DNA, 16 bp, synthetic construct
  misc_feature 1..16: note = synthetic [barcode part1]
  source 1..16: mol_type = other DNA
cgttgttcaagttcgt

SEQ ID NO: 34445 - DNA, 16 bp, synthetic construct
  misc_feature 1..16: note = synthetic [barcode part1]
  source 1..16: mol_type = other DNA
taacttcggaatcggc

SEQ ID NO: 34446 - DNA, 16 bp, synthetic construct
  misc_feature 1..16: note = synthetic [barcode part1]
  source 1..16: mol_type = other DNA
tcggtcgaactgattg

SEQ ID NO: 34447 - DNA, 16 bp, synthetic construct
  misc_feature 1..16: note = synthetic [barcode part1]
  source 1..16: mol_type = other DNA
tacctagattactccg

SEQ ID NO: 34448 - DNA, 16 bp, synthetic construct
  misc_feature 1..16: note = synthetic [barcode part1]
  source 1..16: mol_type = other DNA
cgagaggtgacgtgtt

SEQ ID NO: 34449 - DNA, 16 bp, synthetic construct
  misc_feature 1..16: note = synthetic [barcode part1]
  source 1..16: mol_type = other DNA
gtagatcgaggtgacc

SEQ ID NO: 34450 - DNA, 16 bp, synthetic construct
  misc_feature 1..16: note = synthetic [barcode part1]
  source 1..16: mol_type = other DNA
tcgcctgcaagtaagt

SEQ ID NO: 34451 - DNA, 16 bp, synthetic construct
  misc_feature 1..16: note = synthetic [barcode part1]
  source 1..16: mol_type = other DNA
taccaggcacttccgt

SEQ ID NO: 34452 - DNA, 16 bp, synthetic construct
  misc_feature 1..16: note = synthetic [barcode part1]
  source 1..16: mol_type = other DNA
gcggaccaggataact

SEQ ID NO: 34453 - DNA, 16 bp, synthetic construct
  misc_feature 1..16: note = synthetic [barcode part1]
  source 1..16: mol_type = other DNA
tagattggcgtctctt

SEQ ID NO: 34454 - DNA, 16 bp, synthetic construct
  misc_feature 1..16: note = synthetic [barcode part1]
  source 1..16: mol_type = other DNA
ccgactcaacacgtct

SEQ ID NO: 34455 - DNA, 16 bp, synthetic construct
  misc_feature 1..16: note = synthetic [barcode part1]
  source 1..16: mol_type = other DNA
ccactctacgcaactg

SEQ ID NO: 34456 - DNA, 16 bp, synthetic construct
  misc_feature 1..16: note = synthetic [barcode part1]
  source 1..16: mol_type = other DNA
tgtctgcggtatcgtc

SEQ ID NO: 34457 - DNA, 16 bp, synthetic construct
  misc_feature 1..16: note = synthetic [barcode part1]
  source 1..16: mol_type = other DNA
ccgttgtagacttgcc

SEQ ID NO: 34458 - DNA, 16 bp, synthetic construct
  misc_feature 1..16: note = synthetic [barcode part1]
  source 1..16: mol_type = other DNA
gttacgactattcgtc

SEQ ID NO: 34459 - DNA, 16 bp, synthetic construct
  misc_feature 1..16: note = synthetic [barcode part1]
  source 1..16: mol_type = other DNA
aaggagaaggagagag

SEQ ID NO: 34460 - DNA, 16 bp, synthetic construct
  misc_feature 1..16: note = synthetic [barcode part1]
  source 1..16: mol_type = other DNA
accttagtcggaactg

SEQ ID NO: 34461 - DNA, 16 bp, synthetic construct
  misc_feature 1..16: note = synthetic [barcode part1]
  source 1..16: mol_type = other DNA
accgtgactcgtctgt

SEQ ID NO: 34462 - DNA, 16 bp, synthetic construct
  misc_feature 1..16: note = synthetic [barcode part1]
  source 1..16: mol_type = other DNA
tgttggtggccttctg

SEQ ID NO: 34463 - DNA, 16 bp, synthetic construct
  misc_feature 1..16: note = synthetic [barcode part1]
  source 1..16: mol_type = other DNA
gcgtgtctctgatctg

SEQ ID NO: 34464 - DNA, 16 bp, synthetic construct
  misc_feature 1..16: note = synthetic [barcode part1]
  source 1..16: mol_type = other DNA
gcgagtagtaagtgag

SEQ ID NO: 34465 - DNA, 16 bp, synthetic construct
  misc_feature 1..16: note = synthetic [barcode part1]
  source 1..16: mol_type = other DNA
acgcctcgacttggtt

SEQ ID NO: 34466 - DNA, 16 bp, synthetic construct
  misc_feature 1..16: note = synthetic [barcode part1]
  source 1..16: mol_type = other DNA
gcactcttagtccgac

SEQ ID NO: 34467 - DNA, 16 bp, synthetic construct
  misc_feature 1..16: note = synthetic [barcode part1]
  source 1..16: mol_type = other DNA
tggtgactcttgtact

SEQ ID NO: 34468 - DNA, 16 bp, synthetic construct
  misc_feature 1..16: note = synthetic [barcode part1]
  source 1..16: mol_type = other DNA
gcaagagtgatagttc

SEQ ID NO: 34469 - DNA, 16 bp, synthetic construct
  misc_feature 1..16: note = synthetic [barcode part1]
  source 1..16: mol_type = other DNA
gcgtctgagtagagtg

SEQ ID NO: 34470 - DNA, 16 bp, synthetic construct
  misc_feature 1..16: note = synthetic [barcode part1]
  source 1..16: mol_type = other DNA
gttcgtatacgagtcg

SEQ ID NO: 34471 - DNA, 16 bp, synthetic construct
  misc_feature 1..16: note = synthetic [barcode part1]
  source 1..16: mol_type = other DNA
gatatcctctggtccg

SEQ ID NO: 34472 - DNA, 16 bp, synthetic construct
  misc_feature 1..16: note = synthetic [barcode part1]
  source 1..16: mol_type = other DNA
aattacaggtcaaggc

SEQ ID NO: 34473 - DNA, 16 bp, synthetic construct
  misc_feature 1..16: note = synthetic [barcode part1]
  source 1..16: mol_type = other DNA
gcagtacacacacgtt

SEQ ID NO: 34474 - DNA, 16 bp, synthetic construct
  misc_feature 1..16: note = synthetic [barcode part1]
  source 1..16: mol_type = other DNA
cgattactggacctag

SEQ ID NO: 34475 - DNA, 16 bp, synthetic construct
  misc_feature 1..16: note = synthetic [barcode part1]
  source 1..16: mol_type = other DNA
actaacgaacgcgttc

SEQ ID NO: 34476 - DNA, 16 bp, synthetic construct
  misc_feature 1..16: note = synthetic [barcode part1]
  source 1..16: mol_type = other DNA
gacaggaccttgttac

SEQ ID NO: 34477 - DNA, 16 bp, synthetic construct
  misc_feature 1..16: note = synthetic [barcode part1]
  source 1..16: mol_type = other DNA
aactggtaattccggc

SEQ ID NO: 34478 - DNA, 16 bp, synthetic construct
  misc_feature 1..16: note = synthetic [barcode part1]
  source 1..16: mol_type = other DNA
tcctgcgatacttcct

SEQ ID NO: 34479 - DNA, 16 bp, synthetic construct
  misc_feature 1..16: note = synthetic [barcode part1]
  source 1..16: mol_type = other DNA
cacggacaggcaatac

SEQ ID NO: 34480 - DNA, 16 bp, synthetic construct
  misc_feature 1..16: note = synthetic [barcode part1]
  source 1..16: mol_type = other DNA
aacggcagttctgttg

SEQ ID NO: 34481 - DNA, 16 bp, synthetic construct
  misc_feature 1..16: note = synthetic [barcode part1]
  source 1..16: mol_type = other DNA
atcctaggtgtcacag

SEQ ID NO: 34482 - DNA, 16 bp, synthetic construct
  misc_feature 1..16: note = synthetic [barcode part1]
  source 1..16: mol_type = other DNA
cagacttcagacgttg

SEQ ID NO: 34483 - DNA, 16 bp, synthetic construct
  misc_feature 1..16: note = synthetic [barcode part1]
  source 1..16: mol_type = other DNA
actgtggcctacctgt

SEQ ID NO: 34484 - DNA, 16 bp, synthetic construct
  misc_feature 1..16: note = synthetic [barcode part1]
  source 1..16: mol_type = other DNA
tctacgaagacctgtg

SEQ ID NO: 34485 - DNA, 16 bp, synthetic construct
  misc_feature 1..16: note = synthetic [barcode part1]
  source 1..16: mol_type = other DNA
caatcttatcgcgtac

SEQ ID NO: 34486 - DNA, 16 bp, synthetic construct
  misc_feature 1..16: note = synthetic [barcode part1]
  source 1..16: mol_type = other DNA
ttggtaactcacacct

SEQ ID NO: 34487 - DNA, 16 bp, synthetic construct
  misc_feature 1..16: note = synthetic [barcode part1]
  source 1..16: mol_type = other DNA
cactactagtggcagt

SEQ ID NO: 34488 - DNA, 16 bp, synthetic construct
  misc_feature 1..16: note = synthetic [barcode part1]
  source 1..16: mol_type = other DNA
cagattcacagtgaag

SEQ ID NO: 34489 - DNA, 16 bp, synthetic construct
  misc_feature 1..16: note = synthetic [barcode part1]
  source 1..16: mol_type = other DNA
caggaagaacttcctc

SEQ ID NO: 34490 - DNA, 16 bp, synthetic construct
  misc_feature 1..16: note = synthetic [barcode part1]
  source 1..16: mol_type = other DNA
acaaggacacgagagt

SEQ ID NO: 34491 - DNA, 16 bp, synthetic construct
  misc_feature 1..16: note = synthetic [barcode part1]
  source 1..16: mol_type = other DNA
acgcacagtactacgt

SEQ ID NO: 34492 - DNA, 16 bp, synthetic construct
  misc_feature 1..16: note = synthetic [barcode part1]
  source 1..16: mol_type = other DNA
gttatctgtaggttcc

SEQ ID NO: 34493 - DNA, 16 bp, synthetic construct
  misc_feature 1..16: note = synthetic [barcode part1]
  source 1..16: mol_type = other DNA
cctgaggcacaatatc

SEQ ID NO: 34494 - DNA, 16 bp, synthetic construct
  misc_feature 1..16: note = synthetic [barcode part1]
  source 1..16: mol_type = other DNA
acctctcttcctcaag

SEQ ID NO: 34495 - DNA, 16 bp, synthetic construct
  misc_feature 1..16: note = synthetic [barcode part1]
  source 1..16: mol_type = other DNA
ttatcgtcgcctggac

SEQ ID NO: 34496 - DNA, 16 bp, synthetic construct
  misc_feature 1..16: note = synthetic [barcode part1]
  source 1..16: mol_type = other DNA
cctgttggtgttcgac

SEQ ID NO: 34497 - DNA, 16 bp, synthetic construct
  misc_feature 1..16: note = synthetic [barcode part1]
  source 1..16: mol_type = other DNA
cacgagaattgtcaag

SEQ ID NO: 34498 - DNA, 16 bp, synthetic construct
  misc_feature 1..16: note = synthetic [barcode part1]
  source 1..16: mol_type = other DNA
acttggactcgttatc

SEQ ID NO: 34499 - DNA, 16 bp, synthetic construct
  misc_feature 1..16: note = synthetic [barcode part1]
  source 1..16: mol_type = other DNA
cctcgttaggcaatag

SEQ ID NO: 34500 - DNA, 16 bp, synthetic construct
  misc_feature 1..16: note = synthetic [barcode part1]
  source 1..16: mol_type = other DNA
actacgagtgaacaac

SEQ ID NO: 34501 - DNA, 16 bp, synthetic construct
  misc_feature 1..16: note = synthetic [barcode part1]
  source 1..16: mol_type = other DNA
cactaccaagttaggc

SEQ ID NO: 34502 - DNA, 16 bp, synthetic construct
  misc_feature 1..16: note = synthetic [barcode part1]
  source 1..16: mol_type = other DNA
atcttaccgaacctac

SEQ ID NO: 34503 - DNA, 16 bp, synthetic construct
  misc_feature 1..16: note = synthetic [barcode part1]
  source 1..16: mol_type = other DNA
tatccgcctacagtgc

SEQ ID NO: 34504 - DNA, 16 bp, synthetic construct
  misc_feature 1..16: note = synthetic [barcode part1]
  source 1..16: mol_type = other DNA
ttgcaacacgtgtgtg

SEQ ID NO: 34505 - DNA, 16 bp, synthetic construct
  misc_feature 1..16: note = synthetic [barcode part1]
  source 1..16: mol_type = other DNA
ccgaataggtagaatc

SEQ ID NO: 34506 - DNA, 16 bp, synthetic construct
  misc_feature 1..16: note = synthetic [barcode part1]
  source 1..16: mol_type = other DNA
aggactgcgcgttaag

SEQ ID NO: 34507 - DNA, 16 bp, synthetic construct
  misc_feature 1..16: note = synthetic [barcode part1]
  source 1..16: mol_type = other DNA
gcacgaacaagtcacg

SEQ ID NO: 34508 - DNA, 16 bp, synthetic construct
  misc_feature 1..16: note = synthetic [barcode part1]
  source 1..16: mol_type = other DNA
gtggattgattcacgc

SEQ ID NO: 34509 - DNA, 16 bp, synthetic construct
  misc_feature 1..16: note = synthetic [barcode part1]
  source 1..16: mol_type = other DNA
tattgtctcgtgcggc

SEQ ID NO: 34510 - DNA, 16 bp, synthetic construct
  misc_feature 1..16: note = synthetic [barcode part1]
  source 1..16: mol_type = other DNA
cgccttgcaggtactt

SEQ ID NO: 34511 - DNA, 16 bp, synthetic construct
  misc_feature 1..16: note = synthetic [barcode part1]
  source 1..16: mol_type = other DNA
tgtgacaggtagatac

SEQ ID NO: 34512 - DNA, 16 bp, synthetic construct
  misc_feature 1..16: note = synthetic [barcode part1]
  source 1..16: mol_type = other DNA
gaatctggtcttctac

SEQ ID NO: 34513 - DNA, 16 bp, synthetic construct
  misc_feature 1..16: note = synthetic [barcode part1]
  source 1..16: mol_type = other DNA
gactcctggtcgtatc

SEQ ID NO: 34514 - DNA, 16 bp, synthetic construct
  misc_feature 1..16: note = synthetic [barcode part1]
  source 1..16: mol_type = other DNA
gaagaataagtgcctc

SEQ ID NO: 34515 - DNA, 16 bp, synthetic construct
  misc_feature 1..16: note = synthetic [barcode part1]
  source 1..16: mol_type = other DNA
actctcacggattact

SEQ ID NO: 34516 - DNA, 16 bp, synthetic construct
  misc_feature 1..16: note = synthetic [barcode part1]
  source 1..16: mol_type = other DNA
ttatcaatctccgcag

SEQ ID NO: 34517 - DNA, 16 bp, synthetic construct
  misc_feature 1..16: note = synthetic [barcode part1]
  source 1..16: mol_type = other DNA
tcgatactgatcgcag

SEQ ID NO: 34518 - DNA, 16 bp, synthetic construct
  misc_feature 1..16: note = synthetic [barcode part1]
  source 1..16: mol_type = other DNA
agacaagacgatacct

SEQ ID NO: 34519 - DNA, 16 bp, synthetic construct
  misc_feature 1..16: note = synthetic [barcode part1]
  source 1..16: mol_type = other DNA
cacgaaggattactag

SEQ ID NO: 34520 - DNA, 16 bp, synthetic construct
  misc_feature 1..16: note = synthetic [barcode part1]
  source 1..16: mol_type = other DNA
gcgtgtgtatagtacc

SEQ ID NO: 34521 - DNA, 16 bp, synthetic construct
  misc_feature 1..16: note = synthetic [barcode part1]
  source 1..16: mol_type = other DNA
tcgtaaccacgtacag

SEQ ID NO: 34522 - DNA, 16 bp, synthetic construct
  misc_feature 1..16: note = synthetic [barcode part1]
  source 1..16: mol_type = other DNA
cgcgttcacaagaact

SEQ ID NO: 34523 - DNA, 16 bp, synthetic construct
  misc_feature 1..16: note = synthetic [barcode part1]
  source 1..16: mol_type = other DNA
atacgtgaggaaggac

SEQ ID NO: 34524 - DNA, 16 bp, synthetic construct
  misc_feature 1..16: note = synthetic [barcode part1]
  source 1..16: mol_type = other DNA
tctgcactgtaggaac

SEQ ID NO: 34525 - DNA, 16 bp, synthetic construct
  misc_feature 1..16: note = synthetic [barcode part1]
  source 1..16: mol_type = other DNA
tcagagtacttactcc

SEQ ID NO: 34526 - DNA, 16 bp, synthetic construct
  misc_feature 1..16: note = synthetic [barcode part1]
  source 1..16: mol_type = other DNA
tgttctacgaacactc

SEQ ID NO: 34527 - DNA, 16 bp, synthetic construct
  misc_feature 1..16: note = synthetic [barcode part1]
  source 1..16: mol_type = other DNA
gaacagaccacggtgt

SEQ ID NO: 34528 - DNA, 16 bp, synthetic construct
  misc_feature 1..16: note = synthetic [barcode part1]
  source 1..16: mol_type = other DNA
acagttcttcgtactg

SEQ ID NO: 34529 - DNA, 16 bp, synthetic construct
  misc_feature 1..16: note = synthetic [barcode part1]
  source 1..16: mol_type = other DNA
gtagacgtctgaggtg

SEQ ID NO: 34530 - DNA, 16 bp, synthetic construct
  misc_feature 1..16: note = synthetic [barcode part1]
  source 1..16: mol_type = other DNA
cgtacggtccaacttc

SEQ ID NO: 34531 - DNA, 16 bp, synthetic construct
  misc_feature 1..16: note = synthetic [barcode part1]
  source 1..16: mol_type = other DNA
cgttccaagatctatc

SEQ ID NO: 34532 - DNA, 16 bp, synthetic construct
  misc_feature 1..16: note = synthetic [barcode part1]
  source 1..16: mol_type = other DNA
tacacaatcgttgcct

SEQ ID NO: 34533 - DNA, 16 bp, synthetic construct
  misc_feature 1..16: note = synthetic [barcode part1]
  source 1..16: mol_type = other DNA
ttcacacaccactagt

SEQ ID NO: 34534 - DNA, 16 bp, synthetic construct
  misc_feature 1..16: note = synthetic [barcode part1]
  source 1..16: mol_type = other DNA
tcttggttacggactt

SEQ ID NO: 34535 - DNA, 16 bp, synthetic construct
  misc_feature 1..16: note = synthetic [barcode part1]
  source 1..16: mol_type = other DNA
gactgtaatacaccgc

SEQ ID NO: 34536 - DNA, 16 bp, synthetic construct
  misc_feature 1..16: note = synthetic [barcode part1]
  source 1..16: mol_type = other DNA
agtacgcaacttcctt

SEQ ID NO: 34537 - DNA, 16 bp, synthetic construct
  misc_feature 1..16: note = synthetic [barcode part1]
  source 1..16: mol_type = other DNA
gtgaccaacgtcagtt

SEQ ID NO: 34538 - DNA, 16 bp, synthetic construct
  misc_feature 1..16: note = synthetic [barcode part1]
  source 1..16: mol_type = other DNA
agtgccgttaagactc

SEQ ID NO: 34539 - DNA, 16 bp, synthetic construct
  misc_feature 1..16: note = synthetic [barcode part1]
  source 1..16: mol_type = other DNA
ccgttcaggattccac

SEQ ID NO: 34540 - DNA, 16 bp, synthetic construct
  misc_feature 1..16: note = synthetic [barcode part1]
  source 1..16: mol_type = other DNA
tgccgtgttagttgag

SEQ ID NO: 34541 - DNA, 16 bp, synthetic construct
  misc_feature 1..16: note = synthetic [barcode part1]
  source 1..16: mol_type = other DNA
tgcgttcgcagtctac

SEQ ID NO: 34542 - DNA, 16 bp, synthetic construct
  misc_feature 1..16: note = synthetic [barcode part1]
  source 1..16: mol_type = other DNA
gtagatactgtgacag

SEQ ID NO: 34543 - DNA, 16 bp, synthetic construct
  misc_feature 1..16: note = synthetic [barcode part1]
  source 1..16: mol_type = other DNA
ccgaacctaatccaag

SEQ ID NO: 34544 - DNA, 16 bp, synthetic construct
  misc_feature 1..16: note = synthetic [barcode part1]
  source 1..16: mol_type = other DNA
gaggccgcgtattaag

SEQ ID NO: 34545 - DNA, 16 bp, synthetic construct
  misc_feature 1..16: note = synthetic [barcode part1]
  source 1..16: mol_type = other DNA
ccgtatagtcaacacg

SEQ ID NO: 34546 - DNA, 16 bp, synthetic construct
  misc_feature 1..16: note = synthetic [barcode part1]
  source 1..16: mol_type = other DNA
taggatcttggtcgac

SEQ ID NO: 34547 - DNA, 16 bp, synthetic construct
  misc_feature 1..16: note = synthetic [barcode part1]
  source 1..16: mol_type = other DNA
tatcggtgcgtactag

SEQ ID NO: 34548 - DNA, 16 bp, synthetic construct
  misc_feature 1..16: note = synthetic [barcode part1]
  source 1..16: mol_type = other DNA
gtgaggagtatccttc

SEQ ID NO: 34549 - DNA, 16 bp, synthetic construct
  misc_feature 1..16: note = synthetic [barcode part1]
  source 1..16: mol_type = other DNA
cacactatccttcaag

SEQ ID NO: 34550 - DNA, 16 bp, synthetic construct
  misc_feature 1..16: note = synthetic [barcode part1]
  source 1..16: mol_type = other DNA
taccaccacagttgcc

SEQ ID NO: 34551 - DNA, 16 bp, synthetic construct
  misc_feature 1..16: note = synthetic [barcode part1]
  source 1..16: mol_type = other DNA
cgcgagtgaacttatc

SEQ ID NO: 34552 - DNA, 16 bp, synthetic construct
  misc_feature 1..16: note = synthetic [barcode part1]
  source 1..16: mol_type = other DNA
caggactacactgtgt

SEQ ID NO: 34553 - DNA, 16 bp, synthetic construct
  misc_feature 1..16: note = synthetic [barcode part1]
  source 1..16: mol_type = other DNA
cgacgtggtatagttc

SEQ ID NO: 34554 - DNA, 16 bp, synthetic construct
  misc_feature 1..16: note = synthetic [barcode part1]
  source 1..16: mol_type = other DNA
tccttctcagtactgc

SEQ ID NO: 34555 - DNA, 16 bp, synthetic construct
  misc_feature 1..16: note = synthetic [barcode part1]
  source 1..16: mol_type = other DNA
cagtagtaatcgccac

SEQ ID NO: 34556 - DNA, 16 bp, synthetic construct
  misc_feature 1..16: note = synthetic [barcode part1]
  source 1..16: mol_type = other DNA
ccacacgttgaaggag

SEQ ID NO: 34557 - DNA, 16 bp, synthetic construct
  misc_feature 1..16: note = synthetic [barcode part1]
  source 1..16: mol_type = other DNA
tgttacgcgtagtgtg

SEQ ID NO: 34558 - DNA, 16 bp, synthetic construct
  misc_feature 1..16: note = synthetic [barcode part1]
  source 1..16: mol_type = other DNA
acacggaagtacagag

SEQ ID NO: 34559 - DNA, 16 bp, synthetic construct
  misc_feature 1..16: note = synthetic [barcode part1]
  source 1..16: mol_type = other DNA
aacgactcctccgtac

SEQ ID NO: 34560 - DNA, 16 bp, synthetic construct
  misc_feature 1..16: note = synthetic [barcode part1]
  source 1..16: mol_type = other DNA
gagtcgaatcgtgcag

SEQ ID NO: 34561 - DNA, 16 bp, synthetic construct
  misc_feature 1..16: note = synthetic [barcode part1]
  source 1..16: mol_type = other DNA
tataatccggtcttcg

SEQ ID NO: 34562 - DNA, 16 bp, synthetic construct
  misc_feature 1..16: note = synthetic [barcode part1]
  source 1..16: mol_type = other DNA
ttagaaggcgtgattg

SEQ ID NO: 34563 - DNA, 16 bp, synthetic construct
  misc_feature 1..16: note = synthetic [barcode part1]
  source 1..16: mol_type = other DNA
acaacgtactgtggtc

SEQ ID NO: 34564 - DNA, 16 bp, synthetic construct
  misc_feature 1..16: note = synthetic [barcode part1]
  source 1..16: mol_type = other DNA
gtactaacgactcctt

SEQ ID NO: 34565 - DNA, 16 bp, synthetic construct
  misc_feature 1..16: note = synthetic [barcode part1]
  source 1..16: mol_type = other DNA
gtacttgtctgtcgcg

SEQ ID NO: 34566 - DNA, 16 bp, synthetic construct
  misc_feature 1..16: note = synthetic [barcode part1]
  source 1..16: mol_type = other DNA
ccgtaagaccttccgt

SEQ ID NO: 34567 - DNA, 16 bp, synthetic construct
  misc_feature 1..16: note = synthetic [barcode part1]
  source 1..16: mol_type = other DNA
attccgtcctgcaggt

SEQ ID NO: 34568 - DNA, 16 bp, synthetic construct
  misc_feature 1..16: note = synthetic [barcode part1]
  source 1..16: mol_type = other DNA
gtctcaacggtgttag

SEQ ID NO: 34569 - DNA, 16 bp, synthetic construct
  misc_feature 1..16: note = synthetic [barcode part1]
  source 1..16: mol_type = other DNA
ttactctaccgttccg

SEQ ID NO: 34570 - DNA, 16 bp, synthetic construct
  misc_feature 1..16: note = synthetic [barcode part1]
  source 1..16: mol_type = other DNA
agttaatcagtcggcc

SEQ ID NO: 34571 - DNA, 16 bp, synthetic construct
  misc_feature 1..16: note = synthetic [barcode part1]
  source 1..16: mol_type = other DNA
tgattgcggtgtgttg

SEQ ID NO: 34572 - DNA, 16 bp, synthetic construct
  misc_feature 1..16: note = synthetic [barcode part1]
  source 1..16: mol_type = other DNA
gcgtcgaatcgagaac

SEQ ID NO: 34573 - DNA, 16 bp, synthetic construct
  misc_feature 1..16: note = synthetic [barcode part1]
  source 1..16: mol_type = other DNA
tgcgttcctgtcgaac

SEQ ID NO: 34574 - DNA, 16 bp, synthetic construct
  misc_feature 1..16: note = synthetic [barcode part1]
  source 1..16: mol_type = other DNA
taggcgtcaatagagt

SEQ ID NO: 34575 - DNA, 16 bp, synthetic construct
  misc_feature 1..16: note = synthetic [barcode part1]
  source 1..16: mol_type = other DNA
gaatacaccgacggtg

SEQ ID NO: 34576 - DNA, 16 bp, synthetic construct
  misc_feature 1..16: note = synthetic [barcode part1]
  source 1..16: mol_type = other DNA
ccaacgaagtgcaggt

SEQ ID NO: 34577 - DNA, 16 bp, synthetic construct
  misc_feature 1..16: note = synthetic [barcode part1]
  source 1..16: mol_type = other DNA
gattgcgttgatcctt

SEQ ID NO: 34578 - DNA, 16 bp, synthetic construct
  misc_feature 1..16: note = synthetic [barcode part1]
  source 1..16: mol_type = other DNA
gtcttacaacgcactt

SEQ ID NO: 34579 - DNA, 16 bp, synthetic construct
  misc_feature 1..16: note = synthetic [barcode part1]
  source 1..16: mol_type = other DNA
gtgtaatcaaccgcgt

SEQ ID NO: 34580 - DNA, 16 bp, synthetic construct
  misc_feature 1..16: note = synthetic [barcode part1]
  source 1..16: mol_type = other DNA
aacggccgttgttaac

SEQ ID NO: 34581 - DNA, 16 bp, synthetic construct
  misc_feature 1..16: note = synthetic [barcode part1]
  source 1..16: mol_type = other DNA
aactaacgtcggtcgt

SEQ ID NO: 34582 - DNA, 16 bp, synthetic construct
  misc_feature 1..16: note = synthetic [barcode part1]
  source 1..16: mol_type = other DNA
tgtgaacctcggatac

SEQ ID NO: 34583 - DNA, 16 bp, synthetic construct
  misc_feature 1..16: note = synthetic [barcode part1]
  source 1..16: mol_type = other DNA
acagtcacctcaattc

SEQ ID NO: 34584 - DNA, 16 bp, synthetic construct
  misc_feature 1..16: note = synthetic [barcode part1]
  source 1..16: mol_type = other DNA
gacactggtgtacgtt

SEQ ID NO: 34585 - DNA, 16 bp, synthetic construct
  misc_feature 1..16: note = synthetic [barcode part1]
  source 1..16: mol_type = other DNA
tccttctgactctgac

SEQ ID NO: 34586 - DNA, 16 bp, synthetic construct
  misc_feature 1..16: note = synthetic [barcode part1]
  source 1..16: mol_type = other DNA
tgaaggacaatcgtgt

SEQ ID NO: 34587 - DNA, 16 bp, synthetic construct
  misc_feature 1..16: note = synthetic [barcode part1]
  source 1..16: mol_type = other DNA
aagtcactgtcgaacc

SEQ ID NO: 34588 - DNA, 16 bp, synthetic construct
  misc_feature 1..16: note = synthetic [barcode part1]
  source 1..16: mol_type = other DNA
agttcggaggacgtgt

SEQ ID NO: 34589 - DNA, 16 bp, synthetic construct
  misc_feature 1..16: note = synthetic [barcode part1]
  source 1..16: mol_type = other DNA
cacgccttctagtggt

SEQ ID NO: 34590 - DNA, 16 bp, synthetic construct
  misc_feature 1..16: note = synthetic [barcode part1]
  source 1..16: mol_type = other DNA
ccttacaagaggcgtt

SEQ ID NO: 34591 - DNA, 16 bp, synthetic construct
  misc_feature 1..16: note = synthetic [barcode part1]
  source 1..16: mol_type = other DNA
ttcgaccttagaaggc

SEQ ID NO: 34592 - DNA, 16 bp, synthetic construct
  misc_feature 1..16: note = synthetic [barcode part1]
  source 1..16: mol_type = other DNA
aagtctatcgcacggt

SEQ ID NO: 34593 - DNA, 16 bp, synthetic construct
  misc_feature 1..16: note = synthetic [barcode part1]
  source 1..16: mol_type = other DNA
cggtagactacaggtg

SEQ ID NO: 34594 - DNA, 16 bp, synthetic construct
  misc_feature 1..16: note = synthetic [barcode part1]
  source 1..16: mol_type = other DNA
tgacctcacgttgacc

SEQ ID NO: 34595 - DNA, 16 bp, synthetic construct
  misc_feature 1..16: note = synthetic [barcode part1]
  source 1..16: mol_type = other DNA
caatcgtgatacgtcg

SEQ ID NO: 34596 - DNA, 16 bp, synthetic construct
  misc_feature 1..16: note = synthetic [barcode part1]
  source 1..16: mol_type = other DNA
tgaggttatcgcagtc

SEQ ID NO: 34597 - DNA, 16 bp, synthetic construct
  misc_feature 1..16: note = synthetic [barcode part1]
  source 1..16: mol_type = other DNA
gatatcgcaacaccac

SEQ ID NO: 34598 - DNA, 16 bp, synthetic construct
  misc_feature 1..16: note = synthetic [barcode part1]
  source 1..16: mol_type = other DNA
gagaataagaccgttc

SEQ ID NO: 34599 - DNA, 16 bp, synthetic construct
  misc_feature 1..16: note = synthetic [barcode part1]
  source 1..16: mol_type = other DNA
tccagttctggtctct

SEQ ID NO: 34600 - DNA, 16 bp, synthetic construct
  misc_feature 1..16: note = synthetic [barcode part1]
  source 1..16: mol_type = other DNA
aggtcgcgagtacaac

SEQ ID NO: 34601 - DNA, 16 bp, synthetic construct
  misc_feature 1..16: note = synthetic [barcode part1]
  source 1..16: mol_type = other DNA
taacgactcaagtcgc

SEQ ID NO: 34602 - DNA, 16 bp, synthetic construct
  misc_feature 1..16: note = synthetic [barcode part1]
  source 1..16: mol_type = other DNA
actccgcaagtattct

SEQ ID NO: 34603 - DNA, 16 bp, synthetic construct
  misc_feature 1..16: note = synthetic [barcode part1]
  source 1..16: mol_type = other DNA
tggtgcgtaacggaac

SEQ ID NO: 34604 - DNA, 16 bp, synthetic construct
  misc_feature 1..16: note = synthetic [barcode part1]
  source 1..16: mol_type = other DNA
taattccgccaatacc

SEQ ID NO: 34605 - DNA, 16 bp, synthetic construct
  misc_feature 1..16: note = synthetic [barcode part1]
  source 1..16: mol_type = other DNA
gttaggcctcagtagt

SEQ ID NO: 34606 - DNA, 16 bp, synthetic construct
  misc_feature 1..16: note = synthetic [barcode part1]
  source 1..16: mol_type = other DNA
tcgaggataacttccg

SEQ ID NO: 34607 - DNA, 16 bp, synthetic construct
  misc_feature 1..16: note = synthetic [barcode part1]
  source 1..16: mol_type = other DNA
tctgaccgttaacgcc

SEQ ID NO: 34608 - DNA, 16 bp, synthetic construct
  misc_feature 1..16: note = synthetic [barcode part1]
  source 1..16: mol_type = other DNA
gttgttgttctgtacg

SEQ ID NO: 34609 - DNA, 16 bp, synthetic construct
  misc_feature 1..16: note = synthetic [barcode part1]
  source 1..16: mol_type = other DNA
tagaccggacctagtt

SEQ ID NO: 34610 - DNA, 16 bp, synthetic construct
  misc_feature 1..16: note = synthetic [barcode part1]
  source 1..16: mol_type = other DNA
taggtaccaacgaggc

SEQ ID NO: 34611 - DNA, 16 bp, synthetic construct
  misc_feature 1..16: note = synthetic [barcode part1]
  source 1..16: mol_type = other DNA
gcgtagacgttagacg

SEQ ID NO: 34612 - DNA, 16 bp, synthetic construct
  misc_feature 1..16: note = synthetic [barcode part1]
  source 1..16: mol_type = other DNA
agagaccgattgagag

SEQ ID NO: 34613 - DNA, 16 bp, synthetic construct
  misc_feature 1..16: note = synthetic [barcode part1]
  source 1..16: mol_type = other DNA
cgtgacgtaagacttc

SEQ ID NO: 34614 - DNA, 16 bp, synthetic construct
  misc_feature 1..16: note = synthetic [barcode part1]
  source 1..16: mol_type = other DNA
aaggcgagacgttcac

SEQ ID NO: 34615 - DNA, 16 bp, synthetic construct
  misc_feature 1..16: note = synthetic [barcode part1]
  source 1..16: mol_type = other DNA
gagtgacaattcgtag

SEQ ID NO: 34616 - DNA, 16 bp, synthetic construct
  misc_feature 1..16: note = synthetic [barcode part1]
  source 1..16: mol_type = other DNA
ttccggcagtcacact

SEQ ID NO: 34617 - DNA, 16 bp, synthetic construct
  misc_feature 1..16: note = synthetic [barcode part1]
  source 1..16: mol_type = other DNA
ttctcggtacagtcgc

SEQ ID NO: 34618 - DNA, 16 bp, synthetic construct
  misc_feature 1..16: note = synthetic [barcode part1]
  source 1..16: mol_type = other DNA
atattgattccgccac

SEQ ID NO: 34619 - DNA, 16 bp, synthetic construct
  misc_feature 1..16: note = synthetic [barcode part1]
  source 1..16: mol_type = other DNA
gaaggtggtctaatac

SEQ ID NO: 34620 - DNA, 16 bp, synthetic construct
  misc_feature 1..16: note = synthetic [barcode part1]
  source 1..16: mol_type = other DNA
taaggaatccttcggc

SEQ ID NO: 34621 - DNA, 16 bp, synthetic construct
  misc_feature 1..16: note = synthetic [barcode part1]
  source 1..16: mol_type = other DNA
tgtacgttcgaccaag

SEQ ID NO: 34622 - DNA, 16 bp, synthetic construct
  misc_feature 1..16: note = synthetic [barcode part1]
  source 1..16: mol_type = other DNA
gcgagaattctacgtc

SEQ ID NO: 34623 - DNA, 16 bp, synthetic construct
  misc_feature 1..16: note = synthetic [barcode part1]
  source 1..16: mol_type = other DNA
tacgtgagagtgtctc

SEQ ID NO: 34624 - DNA, 16 bp, synthetic construct
  misc_feature 1..16: note = synthetic [barcode part1]
  source 1..16: mol_type = other DNA
ttgtgacactgaccag

SEQ ID NO: 34625 - DNA, 16 bp, synthetic construct
  misc_feature 1..16: note = synthetic [barcode part1]
  source 1..16: mol_type = other DNA
caacgttgcagtactg

SEQ ID NO: 34626 - DNA, 16 bp, synthetic construct
  misc_feature 1..16: note = synthetic [barcode part1]
  source 1..16: mol_type = other DNA
atctctgttcggcggt

SEQ ID NO: 34627 - DNA, 16 bp, synthetic construct
  misc_feature 1..16: note = synthetic [barcode part1]
  source 1..16: mol_type = other DNA
cagtgacgaggtgtgt

SEQ ID NO: 34628 - DNA, 16 bp, synthetic construct
  misc_feature 1..16: note = synthetic [barcode part1]
  source 1..16: mol_type = other DNA
ttcggtaacgacctag

SEQ ID NO: 34629 - DNA, 16 bp, synthetic construct
  misc_feature 1..16: note = synthetic [barcode part1]
  source 1..16: mol_type = other DNA
atcgtacaaccacacg

SEQ ID NO: 34630 - DNA, 16 bp, synthetic construct
  misc_feature 1..16: note = synthetic [barcode part1]
  source 1..16: mol_type = other DNA
gacctggaatcgttac

SEQ ID NO: 34631 - DNA, 16 bp, synthetic construct
  misc_feature 1..16: note = synthetic [barcode part1]
  source 1..16: mol_type = other DNA
tccacacggttatcgc

SEQ ID NO: 34632 - DNA, 16 bp, synthetic construct
  misc_feature 1..16: note = synthetic [barcode part1]
  source 1..16: mol_type = other DNA
atctgaagtctgcggt

SEQ ID NO: 34633 - DNA, 16 bp, synthetic construct
  misc_feature 1..16: note = synthetic [barcode part1]
  source 1..16: mol_type = other DNA
tctggttcaacacgtt

SEQ ID NO: 34634 - DNA, 16 bp, synthetic construct
  misc_feature 1..16: note = synthetic [barcode part1]
  source 1..16: mol_type = other DNA
ataggaactggattgc

SEQ ID NO: 34635 - DNA, 16 bp, synthetic construct
  misc_feature 1..16: note = synthetic [barcode part1]
  source 1..16: mol_type = other DNA
atactgacgtaccggt

SEQ ID NO: 34636 - DNA, 16 bp, synthetic construct
  misc_feature 1..16: note = synthetic [barcode part1]
  source 1..16: mol_type = other DNA
caattctaccacgcgc

SEQ ID NO: 34637 - DNA, 16 bp, synthetic construct
  misc_feature 1..16: note = synthetic [barcode part1]
  source 1..16: mol_type = other DNA
gcaagttaaggcgacc

SEQ ID NO: 34638 - DNA, 16 bp, synthetic construct
  misc_feature 1..16: note = synthetic [barcode part1]
  source 1..16: mol_type = other DNA
gcgtcggtagtaaggt

SEQ ID NO: 34639 - DNA, 16 bp, synthetic construct
  misc_feature 1..16: note = synthetic [barcode part1]
  source 1..16: mol_type = other DNA
ataggatcgtctagag

SEQ ID NO: 34640 - DNA, 16 bp, synthetic construct
  misc_feature 1..16: note = synthetic [barcode part1]
  source 1..16: mol_type = other DNA
accgttcttgccttac

SEQ ID NO: 34641 - DNA, 16 bp, synthetic construct
  misc_feature 1..16: note = synthetic [barcode part1]
  source 1..16: mol_type = other DNA
cacgtattgtacgcag

SEQ ID NO: 34642 - DNA, 16 bp, synthetic construct
  misc_feature 1..16: note = synthetic [barcode part1]
  source 1..16: mol_type = other DNA
atcgtgtgccgttctg

SEQ ID NO: 34643 - DNA, 16 bp, synthetic construct
  misc_feature 1..16: note = synthetic [barcode part1]
  source 1..16: mol_type = other DNA
cggcaggtattacttg

SEQ ID NO: 34644 - DNA, 16 bp, synthetic construct
  misc_feature 1..16: note = synthetic [barcode part1]
  source 1..16: mol_type = other DNA
gcaacaccacaacgtt

SEQ ID NO: 34645 - DNA, 16 bp, synthetic construct
  misc_feature 1..16: note = synthetic [barcode part1]
  source 1..16: mol_type = other DNA
cagaagaggttggagt

SEQ ID NO: 34646 - DNA, 16 bp, synthetic construct
  misc_feature 1..16: note = synthetic [barcode part1]
  source 1..16: mol_type = other DNA
atccgagtattgcctt

SEQ ID NO: 34647 - DNA, 16 bp, synthetic construct
  misc_feature 1..16: note = synthetic [barcode part1]
  source 1..16: mol_type = other DNA
tactggaggatcgttc

SEQ ID NO: 34648 - DNA, 16 bp, synthetic construct
  misc_feature 1..16: note = synthetic [barcode part1]
  source 1..16: mol_type = other DNA
tggccagattgtagtc

SEQ ID NO: 34649 - DNA, 16 bp, synthetic construct
  misc_feature 1..16: note = synthetic [barcode part1]
  source 1..16: mol_type = other DNA
acgtggcaactccttc

SEQ ID NO: 34650 - DNA, 16 bp, synthetic construct
  misc_feature 1..16: note = synthetic [barcode part1]
  source 1..16: mol_type = other DNA
gagtcgcctatacctc

SEQ ID NO: 34651 - DNA, 16 bp, synthetic construct
  misc_feature 1..16: note = synthetic [barcode part1]
  source 1..16: mol_type = other DNA
tggtaatacacgaggt

SEQ ID NO: 34652 - DNA, 16 bp, synthetic construct
  misc_feature 1..16: note = synthetic [barcode part1]
  source 1..16: mol_type = other DNA
gagtatactccacgtg

SEQ ID NO: 34653 - DNA, 16 bp, synthetic construct
  misc_feature 1..16: note = synthetic [barcode part1]
  source 1..16: mol_type = other DNA
gagtggatacttgtcc

SEQ ID NO: 34654 - DNA, 16 bp, synthetic construct
  misc_feature 1..16: note = synthetic [barcode part1]
  source 1..16: mol_type = other DNA
gttgcagacggtatct

SEQ ID NO: 34655 - DNA, 16 bp, synthetic construct
  misc_feature 1..16: note = synthetic [barcode part1]
  source 1..16: mol_type = other DNA
ataccaccgtctgtcg

SEQ ID NO: 34656 - DNA, 16 bp, synthetic construct
  misc_feature 1..16: note = synthetic [barcode part1]
  source 1..16: mol_type = other DNA
cagactgcctctgtgt

SEQ ID NO: 34657 - DNA, 16 bp, synthetic construct
  misc_feature 1..16: note = synthetic [barcode part1]
  source 1..16: mol_type = other DNA
cgacaataatcaccgc

SEQ ID NO: 34658 - DNA, 16 bp, synthetic construct
  misc_feature 1..16: note = synthetic [barcode part1]
  source 1..16: mol_type = other DNA
gaacttgtccacagac

SEQ ID NO: 34659 - DNA, 16 bp, synthetic construct
  misc_feature 1..16: note = synthetic [barcode part1]
  source 1..16: mol_type = other DNA
gtgcgaacttagtaag

SEQ ID NO: 34660 - DNA, 16 bp, synthetic construct
  misc_feature 1..16: note = synthetic [barcode part1]
  source 1..16: mol_type = other DNA
aactgcagtacgttgc

SEQ ID NO: 34661 - DNA, 16 bp, synthetic construct
  misc_feature 1..16: note = synthetic [barcode part1]
  source 1..16: mol_type = other DNA
ccgtcgagtactcttg

SEQ ID NO: 34662 - DNA, 16 bp, synthetic construct
  misc_feature 1..16: note = synthetic [barcode part1]
  source 1..16: mol_type = other DNA
tgtcaactggtcacag

SEQ ID NO: 34663 - DNA, 16 bp, synthetic construct
  misc_feature 1..16: note = synthetic [barcode part1]
  source 1..16: mol_type = other DNA
acggtgagagtatccg

SEQ ID NO: 34664 - DNA, 16 bp, synthetic construct
  misc_feature 1..16: note = synthetic [barcode part1]
  source 1..16: mol_type = other DNA
agtggcagtctacgag

SEQ ID NO: 34665 - DNA, 16 bp, synthetic construct
  misc_feature 1..16: note = synthetic [barcode part1]
  source 1..16: mol_type = other DNA
actagacacgatccac

SEQ ID NO: 34666 - DNA, 16 bp, synthetic construct
  misc_feature 1..16: note = synthetic [barcode part1]
  source 1..16: mol_type = other DNA
aacaccttcaccaccg

SEQ ID NO: 34667 - DNA, 16 bp, synthetic construct
  misc_feature 1..16: note = synthetic [barcode part1]
  source 1..16: mol_type = other DNA
cagataccaataggac

SEQ ID NO: 34668 - DNA, 16 bp, synthetic construct
  misc_feature 1..16: note = synthetic [barcode part1]
  source 1..16: mol_type = other DNA
tggtgattcaacggtc

SEQ ID NO: 34669 - DNA, 16 bp, synthetic construct
  misc_feature 1..16: note = synthetic [barcode part1]
  source 1..16: mol_type = other DNA
ccaatccacaaccacc

SEQ ID NO: 34670 - DNA, 16 bp, synthetic construct
  misc_feature 1..16: note = synthetic [barcode part1]
  source 1..16: mol_type = other DNA
cggttctcgtacaacc

SEQ ID NO: 34671 - DNA, 16 bp, synthetic construct
  misc_feature 1..16: note = synthetic [barcode part1]
  source 1..16: mol_type = other DNA
taagtccgagtctgtg

SEQ ID NO: 34672 - DNA, 16 bp, synthetic construct
  misc_feature 1..16: note = synthetic [barcode part1]
  source 1..16: mol_type = other DNA
acagatacgagacttg

SEQ ID NO: 34673 - DNA, 16 bp, synthetic construct
  misc_feature 1..16: note = synthetic [barcode part1]
  source 1..16: mol_type = other DNA
gacacgactcgtattg

SEQ ID NO: 34674 - DNA, 16 bp, synthetic construct
  misc_feature 1..16: note = synthetic [barcode part1]
  source 1..16: mol_type = other DNA
aaccacttagaccgtg

SEQ ID NO: 34675 - DNA, 16 bp, synthetic construct
  misc_feature 1..16: note = synthetic [barcode part1]
  source 1..16: mol_type = other DNA
gaccttccgcagattc

SEQ ID NO: 34676 - DNA, 16 bp, synthetic construct
  misc_feature 1..16: note = synthetic [barcode part1]
  source 1..16: mol_type = other DNA
tcggttaagttggtcg

SEQ ID NO: 34677 - DNA, 16 bp, synthetic construct
  misc_feature 1..16: note = synthetic [barcode part1]
  source 1..16: mol_type = other DNA
tgaaccgtgtacttct

SEQ ID NO: 34678 - DNA, 16 bp, synthetic construct
  misc_feature 1..16: note = synthetic [barcode part1]
  source 1..16: mol_type = other DNA
gaccttatcgcctacg

SEQ ID NO: 34679 - DNA, 16 bp, synthetic construct
  misc_feature 1..16: note = synthetic [barcode part1]
  source 1..16: mol_type = other DNA
cgttcgttgtctgttc

SEQ ID NO: 34680 - DNA, 16 bp, synthetic construct
  misc_feature 1..16: note = synthetic [barcode part1]
  source 1..16: mol_type = other DNA
gtgtaacctggaggac

SEQ ID NO: 34681 - DNA, 16 bp, synthetic construct
  misc_feature 1..16: note = synthetic [barcode part1]
  source 1..16: mol_type = other DNA
gactcaagacctagtc

SEQ ID NO: 34682 - DNA, 16 bp, synthetic construct
  misc_feature 1..16: note = synthetic [barcode part1]
  source 1..16: mol_type = other DNA
atctgcaacgttcgag

SEQ ID NO: 34683 - DNA, 16 bp, synthetic construct
  misc_feature 1..16: note = synthetic [barcode part1]
  source 1..16: mol_type = other DNA
cgagtgtcagtcctct

SEQ ID NO: 34684 - DNA, 16 bp, synthetic construct
  misc_feature 1..16: note = synthetic [barcode part1]
  source 1..16: mol_type = other DNA
gtaataggacgtactg

SEQ ID NO: 34685 - DNA, 16 bp, synthetic construct
  misc_feature 1..16: note = synthetic [barcode part1]
  source 1..16: mol_type = other DNA
gtcacttccacaagtt

SEQ ID NO: 34686 - DNA, 16 bp, synthetic construct
  misc_feature 1..16: note = synthetic [barcode part1]
  source 1..16: mol_type = other DNA
atacaagaacgacctg

SEQ ID NO: 34687 - DNA, 16 bp, synthetic construct
  misc_feature 1..16: note = synthetic [barcode part1]
  source 1..16: mol_type = other DNA
ttcaccggagaactac

SEQ ID NO: 34688 - DNA, 16 bp, synthetic construct
  misc_feature 1..16: note = synthetic [barcode part1]
  source 1..16: mol_type = other DNA
tctggaatctcctctc

SEQ ID NO: 34689 - DNA, 16 bp, synthetic construct
  misc_feature 1..16: note = synthetic [barcode part1]
  source 1..16: mol_type = other DNA
tcaccgcaccttactt

SEQ ID NO: 34690 - DNA, 16 bp, synthetic construct
  misc_feature 1..16: note = synthetic [barcode part1]
  source 1..16: mol_type = other DNA
tcgatcaggaaggaag

SEQ ID NO: 34691 - DNA, 16 bp, synthetic construct
  misc_feature 1..16: note = synthetic [barcode part1]
  source 1..16: mol_type = other DNA
cggatacactacttct

SEQ ID NO: 34692 - DNA, 16 bp, synthetic construct
  misc_feature 1..16: note = synthetic [barcode part1]
  source 1..16: mol_type = other DNA
atactccggttcagtt

SEQ ID NO: 34693 - DNA, 16 bp, synthetic construct
  misc_feature 1..16: note = synthetic [barcode part1]
  source 1..16: mol_type = other DNA
cgtctctaatcactag

SEQ ID NO: 34694 - DNA, 16 bp, synthetic construct
  misc_feature 1..16: note = synthetic [barcode part1]
  source 1..16: mol_type = other DNA
accggaacggttacag

SEQ ID NO: 34695 - DNA, 16 bp, synthetic construct
  misc_feature 1..16: note = synthetic [barcode part1]
  source 1..16: mol_type = other DNA
agaaccttaagtaggc

SEQ ID NO: 34696 - DNA, 16 bp, synthetic construct
  misc_feature 1..16: note = synthetic [barcode part1]
  source 1..16: mol_type = other DNA
cctactggtacggttc

SEQ ID NO: 34697 - DNA, 16 bp, synthetic construct
  misc_feature 1..16: note = synthetic [barcode part1]
  source 1..16: mol_type = other DNA
caggatcgactaacct

SEQ ID NO: 34698 - DNA, 16 bp, synthetic construct
  misc_feature 1..16: note = synthetic [barcode part1]
  source 1..16: mol_type = other DNA
cagtgcctgttcgttg

SEQ ID NO: 34699 - DNA, 16 bp, synthetic construct
  misc_feature 1..16: note = synthetic [barcode part1]
  source 1..16: mol_type = other DNA
gtaggcaagtattgtg

SEQ ID NO: 34700 - DNA, 16 bp, synthetic construct
  misc_feature 1..16: note = synthetic [barcode part1]
  source 1..16: mol_type = other DNA
actggtataggtccac

SEQ ID NO: 34701 - DNA, 16 bp, synthetic construct
  misc_feature 1..16: note = synthetic [barcode part1]
  source 1..16: mol_type = other DNA
cggtgactcttgtgtc

SEQ ID NO: 34702 - DNA, 16 bp, synthetic construct
  misc_feature 1..16: note = synthetic [barcode part1]
  source 1..16: mol_type = other DNA
ttacggagacggcaac

SEQ ID NO: 34703 - DNA, 16 bp, synthetic construct
  misc_feature 1..16: note = synthetic [barcode part1]
  source 1..16: mol_type = other DNA
actaacgcaagttcgc

SEQ ID NO: 34704 - DNA, 16 bp, synthetic construct
  misc_feature 1..16: note = synthetic [barcode part1]
  source 1..16: mol_type = other DNA
tccgtctgttctggag

SEQ ID NO: 34705 - DNA, 16 bp, synthetic construct
  misc_feature 1..16: note = synthetic [barcode part1]
  source 1..16: mol_type = other DNA
gtgtactccgttaccg

SEQ ID NO: 34706 - DNA, 16 bp, synthetic construct
  misc_feature 1..16: note = synthetic [barcode part1]
  source 1..16: mol_type = other DNA
tgattcgtcgtacttg

SEQ ID NO: 34707 - DNA, 16 bp, synthetic construct
  misc_feature 1..16: note = synthetic [barcode part1]
  source 1..16: mol_type = other DNA
cctattagtacttggc

SEQ ID NO: 34708 - DNA, 16 bp, synthetic construct
  misc_feature 1..16: note = synthetic [barcode part1]
  source 1..16: mol_type = other DNA
ccgaggtattcacctc

SEQ ID NO: 34709 - DNA, 16 bp, synthetic construct
  misc_feature 1..16: note = synthetic [barcode part1]
  source 1..16: mol_type = other DNA
aaggattccaggagag

SEQ ID NO: 34710 - DNA, 16 bp, synthetic construct
  misc_feature 1..16: note = synthetic [barcode part1]
  source 1..16: mol_type = other DNA
aactcggccttcgtgt

SEQ ID NO: 34711 - DNA, 16 bp, synthetic construct
  misc_feature 1..16: note = synthetic [barcode part1]
  source 1..16: mol_type = other DNA
cgtgaagaaggatacg

SEQ ID NO: 34712 - DNA, 16 bp, synthetic construct
  misc_feature 1..16: note = synthetic [barcode part1]
  source 1..16: mol_type = other DNA
tgcggtggtctatctc

SEQ ID NO: 34713 - DNA, 16 bp, synthetic construct
  misc_feature 1..16: note = synthetic [barcode part1]
  source 1..16: mol_type = other DNA
taccaaggacaactcc

SEQ ID NO: 34714 - DNA, 16 bp, synthetic construct
  misc_feature 1..16: note = synthetic [barcode part1]
  source 1..16: mol_type = other DNA
tcgaacgccacaagtt

SEQ ID NO: 34715 - DNA, 16 bp, synthetic construct
  misc_feature 1..16: note = synthetic [barcode part1]
  source 1..16: mol_type = other DNA
tgtgaacacttgtggc

SEQ ID NO: 34716 - DNA, 16 bp, synthetic construct
  misc_feature 1..16: note = synthetic [barcode part1]
  source 1..16: mol_type = other DNA
ccgagattctggaact

SEQ ID NO: 34717 - DNA, 16 bp, synthetic construct
  misc_feature 1..16: note = synthetic [barcode part1]
  source 1..16: mol_type = other DNA
taacgaccgtgaggac

SEQ ID NO: 34718 - DNA, 16 bp, synthetic construct
  misc_feature 1..16: note = synthetic [barcode part1]
  source 1..16: mol_type = other DNA
tctcgtgccgaattgc

SEQ ID NO: 34719 - DNA, 16 bp, synthetic construct
  misc_feature 1..16: note = synthetic [barcode part1]
  source 1..16: mol_type = other DNA
aagaaggtgattggcg

SEQ ID NO: 34720 - DNA, 16 bp, synthetic construct
  misc_feature 1..16: note = synthetic [barcode part1]
  source 1..16: mol_type = other DNA
atatctatccgttgcg

SEQ ID NO: 34721 - DNA, 16 bp, synthetic construct
  misc_feature 1..16: note = synthetic [barcode part1]
  source 1..16: mol_type = other DNA
tcctattcaggcgtcg

SEQ ID NO: 34722 - DNA, 16 bp, synthetic construct
  misc_feature 1..16: note = synthetic [barcode part1]
  source 1..16: mol_type = other DNA
actggatacgaaggcc

SEQ ID NO: 34723 - DNA, 16 bp, synthetic construct
  misc_feature 1..16: note = synthetic [barcode part1]
  source 1..16: mol_type = other DNA
aatctatcaccgtctg

SEQ ID NO: 34724 - DNA, 16 bp, synthetic construct
  misc_feature 1..16: note = synthetic [barcode part1]
  source 1..16: mol_type = other DNA
ttgcaggatagagtgt

SEQ ID NO: 34725 - DNA, 16 bp, synthetic construct
  misc_feature 1..16: note = synthetic [barcode part1]
  source 1..16: mol_type = other DNA
aaccagtacacgtgtc

SEQ ID NO: 34726 - DNA, 16 bp, synthetic construct
  misc_feature 1..16: note = synthetic [barcode part1]
  source 1..16: mol_type = other DNA
gtatctgcggaacgag

SEQ ID NO: 34727 - DNA, 16 bp, synthetic construct
  misc_feature 1..16: note = synthetic [barcode part1]
  source 1..16: mol_type = other DNA
gattggtgactgactc

SEQ ID NO: 34728 - DNA, 16 bp, synthetic construct
  misc_feature 1..16: note = synthetic [barcode part1]
  source 1..16: mol_type = other DNA
acagtaataccgacag

SEQ ID NO: 34729 - DNA, 16 bp, synthetic construct
  misc_feature 1..16: note = synthetic [barcode part1]
  source 1..16: mol_type = other DNA
ttcgattgcgttaacc

SEQ ID NO: 34730 - DNA, 16 bp, synthetic construct
  misc_feature 1..16: note = synthetic [barcode part1]
  source 1..16: mol_type = other DNA
cgttagatcactaggc

SEQ ID NO: 34731 - DNA, 16 bp, synthetic construct
  misc_feature 1..16: note = synthetic [barcode part1]
  source 1..16: mol_type = other DNA
cgaagtctgcagtgtt

SEQ ID NO: 34732 - DNA, 16 bp, synthetic construct
  misc_feature 1..16: note = synthetic [barcode part1]
  source 1..16: mol_type = other DNA
cgtcgttcgccaatac

SEQ ID NO: 34733 - DNA, 16 bp, synthetic construct
  misc_feature 1..16: note = synthetic [barcode part1]
  source 1..16: mol_type = other DNA
gcagttgtgacacact

SEQ ID NO: 34734 - DNA, 16 bp, synthetic construct
  misc_feature 1..16: note = synthetic [barcode part1]
  source 1..16: mol_type = other DNA
ttgtgtgagaaggttg

SEQ ID NO: 34735 - DNA, 16 bp, synthetic construct
  misc_feature 1..16: note = synthetic [barcode part1]
  source 1..16: mol_type = other DNA
aaccgattacgcacac

SEQ ID NO: 34736 - DNA, 16 bp, synthetic construct
  misc_feature 1..16: note = synthetic [barcode part1]
  source 1..16: mol_type = other DNA
cagtgcacaacttctt

SEQ ID NO: 34737 - DNA, 16 bp, synthetic construct
  misc_feature 1..16: note = synthetic [barcode part1]
  source 1..16: mol_type = other DNA
ttcctaggtcaacgtt

SEQ ID NO: 34738 - DNA, 16 bp, synthetic construct
  misc_feature 1..16: note = synthetic [barcode part1]
  source 1..16: mol_type = other DNA
ttgcggaagtaacagt

SEQ ID NO: 34739 - DNA, 16 bp, synthetic construct
  misc_feature 1..16: note = synthetic [barcode part1]
  source 1..16: mol_type = other DNA
aaggcctctcgagatt

SEQ ID NO: 34740 - DNA, 16 bp, synthetic construct
  misc_feature 1..16: note = synthetic [barcode part1]
  source 1..16: mol_type = other DNA
agagttagtcgtcctg

SEQ ID NO: 34741 - DNA, 16 bp, synthetic construct
  misc_feature 1..16: note = synthetic [barcode part1]
  source 1..16: mol_type = other DNA
agttcgtggtggaacg

SEQ ID NO: 34742 - DNA, 16 bp, synthetic construct
  misc_feature 1..16: note = synthetic [barcode part1]
  source 1..16: mol_type = other DNA
aacgagatcctcgact

SEQ ID NO: 34743 - DNA, 16 bp, synthetic construct
  misc_feature 1..16: note = synthetic [barcode part1]
  source 1..16: mol_type = other DNA
tacttactcgcgacgc

SEQ ID NO: 34744 - DNA, 16 bp, synthetic construct
  misc_feature 1..16: note = synthetic [barcode part1]
  source 1..16: mol_type = other DNA
tagtgactgacttggc

SEQ ID NO: 34745 - DNA, 16 bp, synthetic construct
  misc_feature 1..16: note = synthetic [barcode part1]
  source 1..16: mol_type = other DNA
agttgcgaactctctt

SEQ ID NO: 34746 - DNA, 16 bp, synthetic construct
  misc_feature 1..16: note = synthetic [barcode part1]
  source 1..16: mol_type = other DNA
tcggtgagtagaagtt

SEQ ID NO: 34747 - DNA, 16 bp, synthetic construct
  misc_feature 1..16: note = synthetic [barcode part1]
  source 1..16: mol_type = other DNA
gatcttccttccgact

SEQ ID NO: 34748 - DNA, 16 bp, synthetic construct
  misc_feature 1..16: note = synthetic [barcode part1]
  source 1..16: mol_type = other DNA
agtgaatctacggtag

SEQ ID NO: 34749 - DNA, 16 bp, synthetic construct
  misc_feature 1..16: note = synthetic [barcode part1]
  source 1..16: mol_type = other DNA
tatacctacggcctgc

SEQ ID NO: 34750 - DNA, 16 bp, synthetic construct
  misc_feature 1..16: note = synthetic [barcode part1]
  source 1..16: mol_type = other DNA
acgttggtgtggatct

SEQ ID NO: 34751 - DNA, 16 bp, synthetic construct
  misc_feature 1..16: note = synthetic [barcode part1]
  source 1..16: mol_type = other DNA
gtccacctaggtaagt

SEQ ID NO: 34752 - DNA, 16 bp, synthetic construct
  misc_feature 1..16: note = synthetic [barcode part1]
  source 1..16: mol_type = other DNA
cgattccactacgcac

SEQ ID NO: 34753 - DNA, 16 bp, synthetic construct
  misc_feature 1..16: note = synthetic [barcode part1]
  source 1..16: mol_type = other DNA
cgtcttgtgtccagac

SEQ ID NO: 34754 - DNA, 16 bp, synthetic construct
  misc_feature 1..16: note = synthetic [barcode part1]
  source 1..16: mol_type = other DNA
aagacgcgattcggtg

SEQ ID NO: 34755 - DNA, 16 bp, synthetic construct
  misc_feature 1..16: note = synthetic [barcode part1]
  source 1..16: mol_type = other DNA
aaggatattcggcaac

SEQ ID NO: 34756 - DNA, 16 bp, synthetic construct
  misc_feature 1..16: note = synthetic [barcode part1]
  source 1..16: mol_type = other DNA
ccgacgtcaactatag

SEQ ID NO: 34757 - DNA, 16 bp, synthetic construct
  misc_feature 1..16: note = synthetic [barcode part1]
  source 1..16: mol_type = other DNA
atacaaggtagtccag

SEQ ID NO: 34758 - DNA, 16 bp, synthetic construct
  misc_feature 1..16: note = synthetic [barcode part1]
  source 1..16: mol_type = other DNA
actacgatactgcgac

SEQ ID NO: 34759 - DNA, 16 bp, synthetic construct
  misc_feature 1..16: note = synthetic [barcode part1]
  source 1..16: mol_type = other DNA
gtagaataccttgccg

SEQ ID NO: 34760 - DNA, 16 bp, synthetic construct
  misc_feature 1..16: note = synthetic [barcode part1]
  source 1..16: mol_type = other DNA
tacttcactgcagatc

SEQ ID NO: 34761 - DNA, 16 bp, synthetic construct
  misc_feature 1..16: note = synthetic [barcode part1]
  source 1..16: mol_type = other DNA
ccaacgcctctaactg

SEQ ID NO: 34762 - DNA, 16 bp, synthetic construct
  misc_feature 1..16: note = synthetic [barcode part1]
  source 1..16: mol_type = other DNA
tcaagattcgtggcgt

SEQ ID NO: 34763 - DNA, 16 bp, synthetic construct
  misc_feature 1..16: note = synthetic [barcode part1]
  source 1..16: mol_type = other DNA
cgtgaatactctactc

SEQ ID NO: 34764 - DNA, 16 bp, synthetic construct
  misc_feature 1..16: note = synthetic [barcode part1]
  source 1..16: mol_type = other DNA
ttctggatctacctag

SEQ ID NO: 34765 - DNA, 16 bp, synthetic construct
  misc_feature 1..16: note = synthetic [barcode part1]
  source 1..16: mol_type = other DNA
aactcgagactactgc

SEQ ID NO: 34766 - DNA, 16 bp, synthetic construct
  misc_feature 1..16: note = synthetic [barcode part1]
  source 1..16: mol_type = other DNA
gatctctcgacaaggt

SEQ ID NO: 34767 - DNA, 16 bp, synthetic construct
  misc_feature 1..16: note = synthetic [barcode part1]
  source 1..16: mol_type = other DNA
tatagttgccaccttg

SEQ ID NO: 34768 - DNA, 16 bp, synthetic construct
  misc_feature 1..16: note = synthetic [barcode part1]
  source 1..16: mol_type = other DNA
gtatcggcgaccttct

SEQ ID NO: 34769 - DNA, 16 bp, synthetic construct
  misc_feature 1..16: note = synthetic [barcode part1]
  source 1..16: mol_type = other DNA
gtgttacgtgaacaag

SEQ ID NO: 34770 - DNA, 16 bp, synthetic construct
  misc_feature 1..16: note = synthetic [barcode part1]
  source 1..16: mol_type = other DNA
ttcaacttagtacgcc

SEQ ID NO: 34771 - DNA, 16 bp, synthetic construct
  misc_feature 1..16: note = synthetic [barcode part1]
  source 1..16: mol_type = other DNA
actctaccggaagact

SEQ ID NO: 34772 - DNA, 16 bp, synthetic construct
  misc_feature 1..16: note = synthetic [barcode part1]
  source 1..16: mol_type = other DNA
acacttcaccgaatct

SEQ ID NO: 34773 - DNA, 16 bp, synthetic construct
  misc_feature 1..16: note = synthetic [barcode part1]
  source 1..16: mol_type = other DNA
ccaggtaccacgaatt

SEQ ID NO: 34774 - DNA, 16 bp, synthetic construct
  misc_feature 1..16: note = synthetic [barcode part1]
  source 1..16: mol_type = other DNA
gaggatcgttgacacg

SEQ ID NO: 34775 - DNA, 16 bp, synthetic construct
  misc_feature 1..16: note = synthetic [barcode part1]
  source 1..16: mol_type = other DNA
acgaattggccacgtt

SEQ ID NO: 34776 - DNA, 16 bp, synthetic construct
  misc_feature 1..16: note = synthetic [barcode part1]
  source 1..16: mol_type = other DNA
tcagatcggagacgtg

SEQ ID NO: 34777 - DNA, 16 bp, synthetic construct
  misc_feature 1..16: note = synthetic [barcode part1]
  source 1..16: mol_type = other DNA
tcaacaggagtcactc

SEQ ID NO: 34778 - DNA, 16 bp, synthetic construct
  misc_feature 1..16: note = synthetic [barcode part1]
  source 1..16: mol_type = other DNA
gtaggacgcagacttg

SEQ ID NO: 34779 - DNA, 16 bp, synthetic construct
  misc_feature 1..16: note = synthetic [barcode part1]
  source 1..16: mol_type = other DNA
atccagagtagtgaac

SEQ ID NO: 34780 - DNA, 16 bp, synthetic construct
  misc_feature 1..16: note = synthetic [barcode part1]
  source 1..16: mol_type = other DNA
cactattggtgtactc

SEQ ID NO: 34781 - DNA, 16 bp, synthetic construct
  misc_feature 1..16: note = synthetic [barcode part1]
  source 1..16: mol_type = other DNA
aattggactcgactcg

SEQ ID NO: 34782 - DNA, 16 bp, synthetic construct
  misc_feature 1..16: note = synthetic [barcode part1]
  source 1..16: mol_type = other DNA
acttgtgagaacggcg

SEQ ID NO: 34783 - DNA, 16 bp, synthetic construct
  misc_feature 1..16: note = synthetic [barcode part1]
  source 1..16: mol_type = other DNA
attcctagacgatctc

SEQ ID NO: 34784 - DNA, 16 bp, synthetic construct
  misc_feature 1..16: note = synthetic [barcode part1]
  source 1..16: mol_type = other DNA
tgtggattgaggcgac

SEQ ID NO: 34785 - DNA, 16 bp, synthetic construct
  misc_feature 1..16: note = synthetic [barcode part1]
  source 1..16: mol_type = other DNA
accgcaacagagtctt

SEQ ID NO: 34786 - DNA, 16 bp, synthetic construct
  misc_feature 1..16: note = synthetic [barcode part1]
  source 1..16: mol_type = other DNA
tcgtccagtaatactc

SEQ ID NO: 34787 - DNA, 16 bp, synthetic construct
  misc_feature 1..16: note = synthetic [barcode part1]
  source 1..16: mol_type = other DNA
caggtcgtcaacaatc

SEQ ID NO: 34788 - DNA, 16 bp, synthetic construct
  misc_feature 1..16: note = synthetic [barcode part1]
  source 1..16: mol_type = other DNA
ttggagtggtaagtac

SEQ ID NO: 34789 - DNA, 16 bp, synthetic construct
  misc_feature 1..16: note = synthetic [barcode part1]
  source 1..16: mol_type = other DNA
aacctactctggacag

SEQ ID NO: 34790 - DNA, 16 bp, synthetic construct
  misc_feature 1..16: note = synthetic [barcode part1]
  source 1..16: mol_type = other DNA
agtacacctccagtcc

SEQ ID NO: 34791 - DNA, 16 bp, synthetic construct
  misc_feature 1..16: note = synthetic [barcode part1]
  source 1..16: mol_type = other DNA
attgcggagtgtcact

SEQ ID NO: 34792 - DNA, 16 bp, synthetic construct
  misc_feature 1..16: note = synthetic [barcode part1]
  source 1..16: mol_type = other DNA
cgaagaggaagagttc

SEQ ID NO: 34793 - DNA, 16 bp, synthetic construct
  misc_feature 1..16: note = synthetic [barcode part1]
  source 1..16: mol_type = other DNA
aggacacacgtaagag

SEQ ID NO: 34794 - DNA, 16 bp, synthetic construct
  misc_feature 1..16: note = synthetic [barcode part1]
  source 1..16: mol_type = other DNA
tatatcctcaccagac

SEQ ID NO: 34795 - DNA, 16 bp, synthetic construct
  misc_feature 1..16: note = synthetic [barcode part1]
  source 1..16: mol_type = other DNA
cggagttgagacttct

SEQ ID NO: 34796 - DNA, 16 bp, synthetic construct
  misc_feature 1..16: note = synthetic [barcode part1]
  source 1..16: mol_type = other DNA
cggccagtgattgatt

SEQ ID NO: 34797 - DNA, 16 bp, synthetic construct
  misc_feature 1..16: note = synthetic [barcode part1]
  source 1..16: mol_type = other DNA
atccggataccgcctt

SEQ ID NO: 34798 - DNA, 16 bp, synthetic construct
  misc_feature 1..16: note = synthetic [barcode part1]
  source 1..16: mol_type = other DNA
tcgaataacgacaggt

SEQ ID NO: 34799 - DNA, 16 bp, synthetic construct
  misc_feature 1..16: note = synthetic [barcode part1]
  source 1..16: mol_type = other DNA
tgcaatcaccgttccg

SEQ ID NO: 34800 - DNA, 16 bp, synthetic construct
  misc_feature 1..16: note = synthetic [barcode part1]
  source 1..16: mol_type = other DNA
cgcagaacgatctgag

SEQ ID NO: 34801 - DNA, 16 bp, synthetic construct
  misc_feature 1..16: note = synthetic [barcode part1]
  source 1..16: mol_type = other DNA
ttgactcactctccgt

SEQ ID NO: 34802 - DNA, 16 bp, synthetic construct
  misc_feature 1..16: note = synthetic [barcode part1]
  source 1..16: mol_type = other DNA
cgactagagtcgactt

SEQ ID NO: 34803 - DNA, 16 bp, synthetic construct
  misc_feature 1..16: note = synthetic [barcode part1]
  source 1..16: mol_type = other DNA
tccgattccaggaagt

SEQ ID NO: 34804 - DNA, 16 bp, synthetic construct
  misc_feature 1..16: note = synthetic [barcode part1]
  source 1..16: mol_type = other DNA
aattccttcctcggtc

SEQ ID NO: 34805 - DNA, 16 bp, synthetic construct
  misc_feature 1..16: note = synthetic [barcode part1]
  source 1..16: mol_type = other DNA
aggcctgtaggagatc

SEQ ID NO: 34806 - DNA, 16 bp, synthetic construct
  misc_feature 1..16: note = synthetic [barcode part1]
  source 1..16: mol_type = other DNA
gatcggcaattccaac

SEQ ID NO: 34807 - DNA, 16 bp, synthetic construct
  misc_feature 1..16: note = synthetic [barcode part1]
  source 1..16: mol_type = other DNA
tcagaactgttacggc

SEQ ID NO: 34808 - DNA, 16 bp, synthetic construct
  misc_feature 1..16: note = synthetic [barcode part1]
  source 1..16: mol_type = other DNA
gtggcacctaattgac

SEQ ID NO: 34809 - DNA, 16 bp, synthetic construct
  misc_feature 1..16: note = synthetic [barcode part1]
  source 1..16: mol_type = other DNA
gacttagttcctgcgc

SEQ ID NO: 34810 - DNA, 16 bp, synthetic construct
  misc_feature 1..16: note = synthetic [barcode part1]
  source 1..16: mol_type = other DNA
ttggcggacttaacac

SEQ ID NO: 34811 - DNA, 16 bp, synthetic construct
  misc_feature 1..16: note = synthetic [barcode part1]
  source 1..16: mol_type = other DNA
caattgcctgttatcg

SEQ ID NO: 34812 - DNA, 16 bp, synthetic construct
  misc_feature 1..16: note = synthetic [barcode part1]
  source 1..16: mol_type = other DNA
cacggacctacttcac

SEQ ID NO: 34813 - DNA, 16 bp, synthetic construct
  misc_feature 1..16: note = synthetic [barcode part1]
  source 1..16: mol_type = other DNA
tctctccgttgtggtt

SEQ ID NO: 34814 - DNA, 16 bp, synthetic construct
  misc_feature 1..16: note = synthetic [barcode part1]
  source 1..16: mol_type = other DNA
tagaccaccaacaacc

SEQ ID NO: 34815 - DNA, 16 bp, synthetic construct
  misc_feature 1..16: note = synthetic [barcode part1]
  source 1..16: mol_type = other DNA
taaccagaccgcaatc

SEQ ID NO: 34816 - DNA, 16 bp, synthetic construct
  misc_feature 1..16: note = synthetic [barcode part1]
  source 1..16: mol_type = other DNA
gccgaattctgacagt

SEQ ID NO: 34817 - DNA, 16 bp, synthetic construct
  misc_feature 1..16: note = synthetic [barcode part1]
  source 1..16: mol_type = other DNA
caacgtacagtgaggc

SEQ ID NO: 34818 - DNA, 16 bp, synthetic construct
  misc_feature 1..16: note = synthetic [barcode part1]
  source 1..16: mol_type = other DNA
gataggaagttgcgtt

SEQ ID NO: 34819 - DNA, 16 bp, synthetic construct
  misc_feature 1..16: note = synthetic [barcode part1]
  source 1..16: mol_type = other DNA
aaggaaggccagttag

SEQ ID NO: 34820 - DNA, 16 bp, synthetic construct
  misc_feature 1..16: note = synthetic [barcode part1]
  source 1..16: mol_type = other DNA
gatctgatcagaccac

SEQ ID NO: 34821 - DNA, 16 bp, synthetic construct
  misc_feature 1..16: note = synthetic [barcode part1]
  source 1..16: mol_type = other DNA
gttgtactgtgagtcg

SEQ ID NO: 34822 - DNA, 16 bp, synthetic construct
  misc_feature 1..16: note = synthetic [barcode part1]
  source 1..16: mol_type = other DNA
ttagagtcacctacct

SEQ ID NO: 34823 - DNA, 16 bp, synthetic construct
  misc_feature 1..16: note = synthetic [barcode part1]
  source 1..16: mol_type = other DNA
aaccggttaaccggtt

SEQ ID NO: 34824 - DNA, 16 bp, synthetic construct
  misc_feature 1..16: note = synthetic [barcode part1]
  source 1..16: mol_type = other DNA
cggttgatcaagacct

SEQ ID NO: 34825 - DNA, 16 bp, synthetic construct
  misc_feature 1..16: note = synthetic [barcode part1]
  source 1..16: mol_type = other DNA
cgtgaagattgaatcg

SEQ ID NO: 34826 - DNA, 16 bp, synthetic construct
  misc_feature 1..16: note = synthetic [barcode part1]
  source 1..16: mol_type = other DNA
gaagagtctgcacggt

SEQ ID NO: 34827 - DNA, 16 bp, synthetic construct
  misc_feature 1..16: note = synthetic [barcode part1]
  source 1..16: mol_type = other DNA
cgcaatagagtggacc

SEQ ID NO: 34828 - DNA, 16 bp, synthetic construct
  misc_feature 1..16: note = synthetic [barcode part1]
  source 1..16: mol_type = other DNA
taatagtcgcagagac

SEQ ID NO: 34829 - DNA, 16 bp, synthetic construct
  misc_feature 1..16: note = synthetic [barcode part1]
  source 1..16: mol_type = other DNA
tctgttaccgacacgc

SEQ ID NO: 34830 - DNA, 16 bp, synthetic construct
  misc_feature 1..16: note = synthetic [barcode part1]
  source 1..16: mol_type = other DNA
gtacggcggagttaac

SEQ ID NO: 34831 - DNA, 16 bp, synthetic construct
  misc_feature 1..16: note = synthetic [barcode part1]
  source 1..16: mol_type = other DNA
gcgcgatctagagaac

SEQ ID NO: 34832 - DNA, 16 bp, synthetic construct
  misc_feature 1..16: note = synthetic [barcode part1]
  source 1..16: mol_type = other DNA
tacaattcgatctccg

SEQ ID NO: 34833 - DNA, 16 bp, synthetic construct
  misc_feature 1..16: note = synthetic [barcode part1]
  source 1..16: mol_type = other DNA
gtattggagtcgtgtc

SEQ ID NO: 34834 - DNA, 16 bp, synthetic construct
  misc_feature 1..16: note = synthetic [barcode part1]
  source 1..16: mol_type = other DNA
gtgttagtctctaacc

SEQ ID NO: 34835 - DNA, 16 bp, synthetic construct
  misc_feature 1..16: note = synthetic [barcode part1]
  source 1..16: mol_type = other DNA
agtggacaacaccacg

SEQ ID NO: 34836 - DNA, 16 bp, synthetic construct
  misc_feature 1..16: note = synthetic [barcode part1]
  source 1..16: mol_type = other DNA
ccaacgaccgtactct

SEQ ID NO: 34837 - DNA, 16 bp, synthetic construct
  misc_feature 1..16: note = synthetic [barcode part1]
  source 1..16: mol_type = other DNA
cggcgtgtagtgaagt

SEQ ID NO: 34838 - DNA, 16 bp, synthetic construct
  misc_feature 1..16: note = synthetic [barcode part1]
  source 1..16: mol_type = other DNA
aagatcctcgttcgcc

SEQ ID NO: 34839 - DNA, 16 bp, synthetic construct
  misc_feature 1..16: note = synthetic [barcode part1]
  source 1..16: mol_type = other DNA
tctgacctaaccgtgc

SEQ ID NO: 34840 - DNA, 16 bp, synthetic construct
  misc_feature 1..16: note = synthetic [barcode part1]
  source 1..16: mol_type = other DNA
cacaatcgaagtagtg

SEQ ID NO: 34841 - DNA, 16 bp, synthetic construct
  misc_feature 1..16: note = synthetic [barcode part1]
  source 1..16: mol_type = other DNA
ccgttggttaacaacg

SEQ ID NO: 34842 - DNA, 16 bp, synthetic construct
  misc_feature 1..16: note = synthetic [barcode part1]
  source 1..16: mol_type = other DNA
cggtcgttattccacg

SEQ ID NO: 34843 - DNA, 16 bp, synthetic construct
  misc_feature 1..16: note = synthetic [barcode part1]
  source 1..16: mol_type = other DNA
tcttgtaattgtcggc

SEQ ID NO: 34844 - DNA, 16 bp, synthetic construct
  misc_feature 1..16: note = synthetic [barcode part1]
  source 1..16: mol_type = other DNA
tcgtgttgagtcgcct

SEQ ID NO: 34845 - DNA, 16 bp, synthetic construct
  misc_feature 1..16: note = synthetic [barcode part1]
  source 1..16: mol_type = other DNA
gagagaagtgtcacag

SEQ ID NO: 34846 - DNA, 16 bp, synthetic construct
  misc_feature 1..16: note = synthetic [barcode part1]
  source 1..16: mol_type = other DNA
ttcagttgcacgccac

SEQ ID NO: 34847 - DNA, 16 bp, synthetic construct
  misc_feature 1..16: note = synthetic [barcode part1]
  source 1..16: mol_type = other DNA
gtgactatctctcaac

SEQ ID NO: 34848 - DNA, 16 bp, synthetic construct
  misc_feature 1..16: note = synthetic [barcode part1]
  source 1..16: mol_type = other DNA
tatcactgacgtgttc

SEQ ID NO: 34849 - DNA, 16 bp, synthetic construct
  misc_feature 1..16: note = synthetic [barcode part1]
  source 1..16: mol_type = other DNA
tacagactccgttatc

SEQ ID NO: 34850 - DNA, 16 bp, synthetic construct
  misc_feature 1..16: note = synthetic [barcode part1]
  source 1..16: mol_type = other DNA
tcaccaagtactcttg

SEQ ID NO: 34851 - DNA, 16 bp, synthetic construct
  misc_feature 1..16: note = synthetic [barcode part1]
  source 1..16: mol_type = other DNA
tattgcctatcgacgt

SEQ ID NO: 34852 - DNA, 16 bp, synthetic construct
  misc_feature 1..16: note = synthetic [barcode part1]
  source 1..16: mol_type = other DNA
attctctcggtgcacg

SEQ ID NO: 34853 - DNA, 16 bp, synthetic construct
  misc_feature 1..16: note = synthetic [barcode part1]
  source 1..16: mol_type = other DNA
aaggttcgtggacgac

SEQ ID NO: 34854 - DNA, 16 bp, synthetic construct
  misc_feature 1..16: note = synthetic [barcode part1]
  source 1..16: mol_type = other DNA
accaatcaggatcctg

SEQ ID NO: 34855 - DNA, 16 bp, synthetic construct
  misc_feature 1..16: note = synthetic [barcode part1]
  source 1..16: mol_type = other DNA
ttccgattggtcctct

SEQ ID NO: 34856 - DNA, 16 bp, synthetic construct
  misc_feature 1..16: note = synthetic [barcode part1]
  source 1..16: mol_type = other DNA
tccttgaagaggacct

SEQ ID NO: 34857 - DNA, 16 bp, synthetic construct
  misc_feature 1..16: note = synthetic [barcode part1]
  source 1..16: mol_type = other DNA
tgaacaacgcctatcg

SEQ ID NO: 34858 - DNA, 16 bp, synthetic construct
  misc_feature 1..16: note = synthetic [barcode part1]
  source 1..16: mol_type = other DNA
tgaggttagtcgatcc

SEQ ID NO: 34859 - DNA, 16 bp, synthetic construct
  misc_feature 1..16: note = synthetic [barcode part1]
  source 1..16: mol_type = other DNA
atacgtcgcaactacg

SEQ ID NO: 34860 - DNA, 16 bp, synthetic construct
  misc_feature 1..16: note = synthetic [barcode part1]
  source 1..16: mol_type = other DNA
gaacagagtaggtggt

SEQ ID NO: 34861 - DNA, 16 bp, synthetic construct
  misc_feature 1..16: note = synthetic [barcode part1]
  source 1..16: mol_type = other DNA
cagtgatcgtggagac

SEQ ID NO: 34862 - DNA, 16 bp, synthetic construct
  misc_feature 1..16: note = synthetic [barcode part1]
  source 1..16: mol_type = other DNA
gtcgcctaacgaagtt

SEQ ID NO: 34863 - DNA, 16 bp, synthetic construct
  misc_feature 1..16: note = synthetic [barcode part1]
  source 1..16: mol_type = other DNA
cgtctggtagtgagag

SEQ ID NO: 34864 - DNA, 16 bp, synthetic construct
  misc_feature 1..16: note = synthetic [barcode part1]
  source 1..16: mol_type = other DNA
tgaatacctggcgtgt

SEQ ID NO: 34865 - DNA, 16 bp, synthetic construct
  misc_feature 1..16: note = synthetic [barcode part1]
  source 1..16: mol_type = other DNA
caattgagaccggtct

SEQ ID NO: 34866 - DNA, 16 bp, synthetic construct
  misc_feature 1..16: note = synthetic [barcode part1]
  source 1..16: mol_type = other DNA
gtcgtaagacggacac

SEQ ID NO: 34867 - DNA, 16 bp, synthetic construct
  misc_feature 1..16: note = synthetic [barcode part1]
  source 1..16: mol_type = other DNA
tgaccttggtcctctt

SEQ ID NO: 34868 - DNA, 16 bp, synthetic construct
  misc_feature 1..16: note = synthetic [barcode part1]
  source 1..16: mol_type = other DNA
gacggttgatcactgt

SEQ ID NO: 34869 - DNA, 16 bp, synthetic construct
  misc_feature 1..16: note = synthetic [barcode part1]
  source 1..16: mol_type = other DNA
gccgataatccaggtt

SEQ ID NO: 34870 - DNA, 16 bp, synthetic construct
  misc_feature 1..16: note = synthetic [barcode part1]
  source 1..16: mol_type = other DNA
agacgagtgtcgcaac

SEQ ID NO: 34871 - DNA, 16 bp, synthetic construct
  misc_feature 1..16: note = synthetic [barcode part1]
  source 1..16: mol_type = other DNA
cacgattattgtctcg

SEQ ID NO: 34872 - DNA, 16 bp, synthetic construct
  misc_feature 1..16: note = synthetic [barcode part1]
  source 1..16: mol_type = other DNA
ccgtggtaccaattag

SEQ ID NO: 34873 - DNA, 16 bp, synthetic construct
  misc_feature 1..16: note = synthetic [barcode part1]
  source 1..16: mol_type = other DNA
tgcgacactcgaagtt

SEQ ID NO: 34874 - DNA, 16 bp, synthetic construct
  misc_feature 1..16: note = synthetic [barcode part1]
  source 1..16: mol_type = other DNA
gcggatcctgatatac

SEQ ID NO: 34875 - DNA, 16 bp, synthetic construct
  misc_feature 1..16: note = synthetic [barcode part1]
  source 1..16: mol_type = other DNA
acggagatcaagtcgc

SEQ ID NO: 34876 - DNA, 16 bp, synthetic construct
  misc_feature 1..16: note = synthetic [barcode part1]
  source 1..16: mol_type = other DNA
gtaactccactgaacg

SEQ ID NO: 34877 - DNA, 16 bp, synthetic construct
  misc_feature 1..16: note = synthetic [barcode part1]
  source 1..16: mol_type = other DNA
cctgattctctccagt

SEQ ID NO: 34878 - DNA, 16 bp, synthetic construct
  misc_feature 1..16: note = synthetic [barcode part1]
  source 1..16: mol_type = other DNA
gttctgactgatcgag

SEQ ID NO: 34879 - DNA, 16 bp, synthetic construct
  misc_feature 1..16: note = synthetic [barcode part1]
  source 1..16: mol_type = other DNA
atatacaacgccgcac

SEQ ID NO: 34880 - DNA, 16 bp, synthetic construct
  misc_feature 1..16: note = synthetic [barcode part1]
  source 1..16: mol_type = other DNA
gataattctccacgtc

SEQ ID NO: 34881 - DNA, 16 bp, synthetic construct
  misc_feature 1..16: note = synthetic [barcode part1]
  source 1..16: mol_type = other DNA
aagtaagacctgcctc

SEQ ID NO: 34882 - DNA, 16 bp, synthetic construct
  misc_feature 1..16: note = synthetic [barcode part1]
  source 1..16: mol_type = other DNA
taccttaccgtcctac

SEQ ID NO: 34883 - DNA, 16 bp, synthetic construct
  misc_feature 1..16: note = synthetic [barcode part1]
  source 1..16: mol_type = other DNA
tagttcgcggattacg

SEQ ID NO: 34884 - DNA, 16 bp, synthetic construct
  misc_feature 1..16: note = synthetic [barcode part1]
  source 1..16: mol_type = other DNA
aaggaacaacggcagt

SEQ ID NO: 34885 - DNA, 16 bp, synthetic construct
  misc_feature 1..16: note = synthetic [barcode part1]
  source 1..16: mol_type = other DNA
gccactccgagtactt

SEQ ID NO: 34886 - DNA, 16 bp, synthetic construct
  misc_feature 1..16: note = synthetic [barcode part1]
  source 1..16: mol_type = other DNA
tcactactcacgagtt

SEQ ID NO: 34887 - DNA, 16 bp, synthetic construct
  misc_feature 1..16: note = synthetic [barcode part1]
  source 1..16: mol_type = other DNA
acaatagtccacgaag

SEQ ID NO: 34888 - DNA, 16 bp, synthetic construct
  misc_feature 1..16: note = synthetic [barcode part1]
  source 1..16: mol_type = other DNA
aaccacgtctcaactt

SEQ ID NO: 34889 - DNA, 16 bp, synthetic construct
  misc_feature 1..16: note = synthetic [barcode part1]
  source 1..16: mol_type = other DNA
cggtacacgacgaagt

SEQ ID NO: 34890 - DNA, 16 bp, synthetic construct
  misc_feature 1..16: note = synthetic [barcode part1]
  source 1..16: mol_type = other DNA
ttagattcgcagagag

SEQ ID NO: 34891 - DNA, 16 bp, synthetic construct
  misc_feature 1..16: note = synthetic [barcode part1]
  source 1..16: mol_type = other DNA
agtgtcagatctcgac

SEQ ID NO: 34892 - DNA, 16 bp, synthetic construct
  misc_feature 1..16: note = synthetic [barcode part1]
  source 1..16: mol_type = other DNA
aacacgttcgattctc

SEQ ID NO: 34893 - DNA, 16 bp, synthetic construct
  misc_feature 1..16: note = synthetic [barcode part1]
  source 1..16: mol_type = other DNA
tattccgcgtccgagt

SEQ ID NO: 34894 - DNA, 16 bp, synthetic construct
  misc_feature 1..16: note = synthetic [barcode part1]
  source 1..16: mol_type = other DNA
tgcgtcggattcttcg

SEQ ID NO: 34895 - DNA, 16 bp, synthetic construct
  misc_feature 1..16: note = synthetic [barcode part1]
  source 1..16: mol_type = other DNA
tggtctaagtgtgaag

SEQ ID NO: 34896 - DNA, 16 bp, synthetic construct
  misc_feature 1..16: note = synthetic [barcode part1]
  source 1..16: mol_type = other DNA
gtaatagtcgtacgag

SEQ ID NO: 34897 - DNA, 16 bp, synthetic construct
  misc_feature 1..16: note = synthetic [barcode part1]
  source 1..16: mol_type = other DNA
attccacggtatacct

SEQ ID NO: 34898 - DNA, 16 bp, synthetic construct
  misc_feature 1..16: note = synthetic [barcode part1]
  source 1..16: mol_type = other DNA
acacgactaaccgtgt

SEQ ID NO: 34899 - DNA, 16 bp, synthetic construct
  misc_feature 1..16: note = synthetic [barcode part1]
  source 1..16: mol_type = other DNA
ttacaatcgtggcacg

SEQ ID NO: 34900 - DNA, 16 bp, synthetic construct
  misc_feature 1..16: note = synthetic [barcode part1]
  source 1..16: mol_type = other DNA
acctaaggttcgcaac

SEQ ID NO: 34901 - DNA, 16 bp, synthetic construct
  misc_feature 1..16: note = synthetic [barcode part1]
  source 1..16: mol_type = other DNA
gcgttagtctcgtcgt

SEQ ID NO: 34902 - DNA, 16 bp, synthetic construct
  misc_feature 1..16: note = synthetic [barcode part1]
  source 1..16: mol_type = other DNA
caggaacttcaacaag

SEQ ID NO: 34903 - DNA, 16 bp, synthetic construct
  misc_feature 1..16: note = synthetic [barcode part1]
  source 1..16: mol_type = other DNA
cgttatcggcgtgtct

SEQ ID NO: 34904 - DNA, 16 bp, synthetic construct
  misc_feature 1..16: note = synthetic [barcode part1]
  source 1..16: mol_type = other DNA
tgtgtagacgagatac

SEQ ID NO: 34905 - DNA, 16 bp, synthetic construct
  misc_feature 1..16: note = synthetic [barcode part1]
  source 1..16: mol_type = other DNA
tgcaccttctgtatcc

SEQ ID NO: 34906 - DNA, 16 bp, synthetic construct
  misc_feature 1..16: note = synthetic [barcode part1]
  source 1..16: mol_type = other DNA
acctactcgtctacct

SEQ ID NO: 34907 - DNA, 16 bp, synthetic construct
  misc_feature 1..16: note = synthetic [barcode part1]
  source 1..16: mol_type = other DNA
tctcgtctgttcggag

SEQ ID NO: 34908 - DNA, 16 bp, synthetic construct
  misc_feature 1..16: note = synthetic [barcode part1]
  source 1..16: mol_type = other DNA
agacaaggtgacgcct

SEQ ID NO: 34909 - DNA, 16 bp, synthetic construct
  misc_feature 1..16: note = synthetic [barcode part1]
  source 1..16: mol_type = other DNA
tacttgtccactcgtc

SEQ ID NO: 34910 - DNA, 16 bp, synthetic construct
  misc_feature 1..16: note = synthetic [barcode part1]
  source 1..16: mol_type = other DNA
cagacgttgcagactt

SEQ ID NO: 34911 - DNA, 16 bp, synthetic construct
  misc_feature 1..16: note = synthetic [barcode part1]
  source 1..16: mol_type = other DNA
gacagtgttcaggcag

SEQ ID NO: 34912 - DNA, 16 bp, synthetic construct
  misc_feature 1..16: note = synthetic [barcode part1]
  source 1..16: mol_type = other DNA
ccaggtaacagtaagt

SEQ ID NO: 34913 - DNA, 16 bp, synthetic construct
  misc_feature 1..16: note = synthetic [barcode part1]
  source 1..16: mol_type = other DNA
taactgaccggtcagt

SEQ ID NO: 34914 - DNA, 16 bp, synthetic construct
  misc_feature 1..16: note = synthetic [barcode part1]
  source 1..16: mol_type = other DNA
ttggtcaactgaccag

SEQ ID NO: 34915 - DNA, 16 bp, synthetic construct
  misc_feature 1..16: note = synthetic [barcode part1]
  source 1..16: mol_type = other DNA
gattgtgacaccgatc

SEQ ID NO: 34916 - DNA, 16 bp, synthetic construct
  misc_feature 1..16: note = synthetic [barcode part1]
  source 1..16: mol_type = other DNA
atcggcacgagaggtt

SEQ ID NO: 34917 - DNA, 16 bp, synthetic construct
  misc_feature 1..16: note = synthetic [barcode part1]
  source 1..16: mol_type = other DNA
atcctgccagagaatc

SEQ ID NO: 34918 - DNA, 16 bp, synthetic construct
  misc_feature 1..16: note = synthetic [barcode part1]
  source 1..16: mol_type = other DNA
aacgtgttggtgtacc

SEQ ID NO: 34919 - DNA, 16 bp, synthetic construct
  misc_feature 1..16: note = synthetic [barcode part1]
  source 1..16: mol_type = other DNA
gtgcaagataaggacg

SEQ ID NO: 34920 - DNA, 16 bp, synthetic construct
  misc_feature 1..16: note = synthetic [barcode part1]
  source 1..16: mol_type = other DNA
tcgttatacctacgac

SEQ ID NO: 34921 - DNA, 16 bp, synthetic construct
  misc_feature 1..16: note = synthetic [barcode part1]
  source 1..16: mol_type = other DNA
tattcgcgcggtacct

SEQ ID NO: 34922 - DNA, 16 bp, synthetic construct
  misc_feature 1..16: note = synthetic [barcode part1]
  source 1..16: mol_type = other DNA
cgtgacggaatagacc

SEQ ID NO: 34923 - DNA, 16 bp, synthetic construct
  misc_feature 1..16: note = synthetic [barcode part1]
  source 1..16: mol_type = other DNA
aacgcgtggtcttcct

SEQ ID NO: 34924 - DNA, 16 bp, synthetic construct
  misc_feature 1..16: note = synthetic [barcode part1]
  source 1..16: mol_type = other DNA
tcctgaagacgaatag

SEQ ID NO: 34925 - DNA, 16 bp, synthetic construct
  misc_feature 1..16: note = synthetic [barcode part1]
  source 1..16: mol_type = other DNA
acgtacgtgtgacgtt

SEQ ID NO: 34926 - DNA, 16 bp, synthetic construct
  misc_feature 1..16: note = synthetic [barcode part1]
  source 1..16: mol_type = other DNA
gtcacttgtagacctt

SEQ ID NO: 34927 - DNA, 16 bp, synthetic construct
  misc_feature 1..16: note = synthetic [barcode part1]
  source 1..16: mol_type = other DNA
gactgtggtactggtt

SEQ ID NO: 34928 - DNA, 16 bp, synthetic construct
  misc_feature 1..16: note = synthetic [barcode part1]
  source 1..16: mol_type = other DNA
atattgacgacaggac

SEQ ID NO: 34929 - DNA, 16 bp, synthetic construct
  misc_feature 1..16: note = synthetic [barcode part1]
  source 1..16: mol_type = other DNA
ttcgtcacacactagt

SEQ ID NO: 34930 - DNA, 16 bp, synthetic construct
  misc_feature 1..16: note = synthetic [barcode part1]
  source 1..16: mol_type = other DNA
caatctcttccgacct

SEQ ID NO: 34931 - DNA, 16 bp, synthetic construct
  misc_feature 1..16: note = synthetic [barcode part1]
  source 1..16: mol_type = other DNA
tcgtccgtctagaatt

SEQ ID NO: 34932 - DNA, 16 bp, synthetic construct
  misc_feature 1..16: note = synthetic [barcode part1]
  source 1..16: mol_type = other DNA
ttgccgtagactcgtc

SEQ ID NO: 34933 - DNA, 16 bp, synthetic construct
  misc_feature 1..16: note = synthetic [barcode part1]
  source 1..16: mol_type = other DNA
cctatcgtgcagatcc

SEQ ID NO: 34934 - DNA, 16 bp, synthetic construct
  misc_feature 1..16: note = synthetic [barcode part1]
  source 1..16: mol_type = other DNA
taggtggtagaatctg

SEQ ID NO: 34935 - DNA, 16 bp, synthetic construct
  misc_feature 1..16: note = synthetic [barcode part1]
  source 1..16: mol_type = other DNA
cgattaatcgaccggt

SEQ ID NO: 34936 - DNA, 16 bp, synthetic construct
  misc_feature 1..16: note = synthetic [barcode part1]
  source 1..16: mol_type = other DNA
tagtcgactagtcgac

SEQ ID NO: 34937 - DNA, 16 bp, synthetic construct
  misc_feature 1..16: note = synthetic [barcode part1]
  source 1..16: mol_type = other DNA
gttgtcctccgaacac

SEQ ID NO: 34938 - DNA, 16 bp, synthetic construct
  misc_feature 1..16: note = synthetic [barcode part1]
  source 1..16: mol_type = other DNA
tcgacagacttctact

SEQ ID NO: 34939 - DNA, 16 bp, synthetic construct
  misc_feature 1..16: note = synthetic [barcode part1]
  source 1..16: mol_type = other DNA
caacttgcactcttag

SEQ ID NO: 34940 - DNA, 16 bp, synthetic construct
  misc_feature 1..16: note = synthetic [barcode part1]
  source 1..16: mol_type = other DNA
cacggtccaattcctg

SEQ ID NO: 34941 - DNA, 16 bp, synthetic construct
  misc_feature 1..16: note = synthetic [barcode part1]
  source 1..16: mol_type = other DNA
gtataaggacgatctg

SEQ ID NO: 34942 - DNA, 16 bp, synthetic construct
  misc_feature 1..16: note = synthetic [barcode part1]
  source 1..16: mol_type = other DNA
tatccttcgacttgag

SEQ ID NO: 34943 - DNA, 16 bp, synthetic construct
  misc_feature 1..16: note = synthetic [barcode part1]
  source 1..16: mol_type = other DNA
tgcgttatcggaggag

SEQ ID NO: 34944 - DNA, 16 bp, synthetic construct
  misc_feature 1..16: note = synthetic [barcode part1]
  source 1..16: mol_type = other DNA
gtactaactctcggtt

SEQ ID NO: 34945 - DNA, 16 bp, synthetic construct
  misc_feature 1..16: note = synthetic [barcode part1]
  source 1..16: mol_type = other DNA
tagttggtgacgtcac

SEQ ID NO: 34946 - DNA, 16 bp, synthetic construct
  misc_feature 1..16: note = synthetic [barcode part1]
  source 1..16: mol_type = other DNA
agaggacctgttactc

SEQ ID NO: 34947 - DNA, 16 bp, synthetic construct
  misc_feature 1..16: note = synthetic [barcode part1]
  source 1..16: mol_type = other DNA
agaactcaccttggac

SEQ ID NO: 34948 - DNA, 16 bp, synthetic construct
  misc_feature 1..16: note = synthetic [barcode part1]
  source 1..16: mol_type = other DNA
tggtaacagaggcacc

SEQ ID NO: 34949 - DNA, 16 bp, synthetic construct
  misc_feature 1..16: note = synthetic [barcode part1]
  source 1..16: mol_type = other DNA
cgacaacgtacgaggt

SEQ ID NO: 34950 - DNA, 16 bp, synthetic construct
  misc_feature 1..16: note = synthetic [barcode part1]
  source 1..16: mol_type = other DNA
agaatactgcgttccg

SEQ ID NO: 34951 - DNA, 16 bp, synthetic construct
  misc_feature 1..16: note = synthetic [barcode part1]
  source 1..16: mol_type = other DNA
tgtgaattcgttccgt

SEQ ID NO: 34952 - DNA, 16 bp, synthetic construct
  misc_feature 1..16: note = synthetic [barcode part1]
  source 1..16: mol_type = other DNA
aaggcgagtggattcc

SEQ ID NO: 34953 - DNA, 16 bp, synthetic construct
  misc_feature 1..16: note = synthetic [barcode part1]
  source 1..16: mol_type = other DNA
tccgcacgacctgatt

SEQ ID NO: 34954 - DNA, 16 bp, synthetic construct
  misc_feature 1..16: note = synthetic [barcode part1]
  source 1..16: mol_type = other DNA
gtggtccacttgatag

SEQ ID NO: 34955 - DNA, 16 bp, synthetic construct
  misc_feature 1..16: note = synthetic [barcode part1]
  source 1..16: mol_type = other DNA
tgcacaagaatcagac

SEQ ID NO: 34956 - DNA, 16 bp, synthetic construct
  misc_feature 1..16: note = synthetic [barcode part1]
  source 1..16: mol_type = other DNA
attcagactcgtcgtt

SEQ ID NO: 34957 - DNA, 16 bp, synthetic construct
  misc_feature 1..16: note = synthetic [barcode part1]
  source 1..16: mol_type = other DNA
gaaggacctacgtgac

SEQ ID NO: 34958 - DNA, 16 bp, synthetic construct
  misc_feature 1..16: note = synthetic [barcode part1]
  source 1..16: mol_type = other DNA
tactactcctgcggac

SEQ ID NO: 34959 - DNA, 16 bp, synthetic construct
  misc_feature 1..16: note = synthetic [barcode part1]
  source 1..16: mol_type = other DNA
agtaccgagttgacct

SEQ ID NO: 34960 - DNA, 16 bp, synthetic construct
  misc_feature 1..16: note = synthetic [barcode part1]
  source 1..16: mol_type = other DNA
acgtactgaacactcg

SEQ ID NO: 34961 - DNA, 16 bp, synthetic construct
  misc_feature 1..16: note = synthetic [barcode part1]
  source 1..16: mol_type = other DNA
cgtactaagagttgag

SEQ ID NO: 34962 - DNA, 16 bp, synthetic construct
  misc_feature 1..16: note = synthetic [barcode part1]
  source 1..16: mol_type = other DNA
tgtgcctacgatccac

SEQ ID NO: 34963 - DNA, 16 bp, synthetic construct
  misc_feature 1..16: note = synthetic [barcode part1]
  source 1..16: mol_type = other DNA
tctcgcgatatctcct

SEQ ID NO: 34964 - DNA, 16 bp, synthetic construct
  misc_feature 1..16: note = synthetic [barcode part1]
  source 1..16: mol_type = other DNA
ttagtggtccacgtcc

SEQ ID NO: 34965 - DNA, 16 bp, synthetic construct
  misc_feature 1..16: note = synthetic [barcode part1]
  source 1..16: mol_type = other DNA
tattcacctacctgcc

SEQ ID NO: 34966 - DNA, 16 bp, synthetic construct
  misc_feature 1..16: note = synthetic [barcode part1]
  source 1..16: mol_type = other DNA
tggtgacctgacaact

SEQ ID NO: 34967 - DNA, 16 bp, synthetic construct
  misc_feature 1..16: note = synthetic [barcode part1]
  source 1..16: mol_type = other DNA
tcaggtgaggcctatt

SEQ ID NO: 34968 - DNA, 16 bp, synthetic construct
  misc_feature 1..16: note = synthetic [barcode part1]
  source 1..16: mol_type = other DNA
tcctcagtacggtcac

SEQ ID NO: 34969 - DNA, 16 bp, synthetic construct
  misc_feature 1..16: note = synthetic [barcode part1]
  source 1..16: mol_type = other DNA
ttcaaggattggtcgc

SEQ ID NO: 34970 - DNA, 16 bp, synthetic construct
  misc_feature 1..16: note = synthetic [barcode part1]
  source 1..16: mol_type = other DNA
tggcgtggttatcctc

SEQ ID NO: 34971 - DNA, 16 bp, synthetic construct
  misc_feature 1..16: note = synthetic [barcode part1]
  source 1..16: mol_type = other DNA
tgtcttatctaggcac

SEQ ID NO: 34972 - DNA, 16 bp, synthetic construct
  misc_feature 1..16: note = synthetic [barcode part1]
  source 1..16: mol_type = other DNA
tcacctccgtagatcg

SEQ ID NO: 34973 - DNA, 16 bp, synthetic construct
  misc_feature 1..16: note = synthetic [barcode part1]
  source 1..16: mol_type = other DNA
ttggactaccactgag

SEQ ID NO: 34974 - DNA, 16 bp, synthetic construct
  misc_feature 1..16: note = synthetic [barcode part1]
  source 1..16: mol_type = other DNA
caacaggcactatctg

SEQ ID NO: 34975 - DNA, 16 bp, synthetic construct
  misc_feature 1..16: note = synthetic [barcode part1]
  source 1..16: mol_type = other DNA
tctggttgatcggagt

SEQ ID NO: 34976 - DNA, 16 bp, synthetic construct
  misc_feature 1..16: note = synthetic [barcode part1]
  source 1..16: mol_type = other DNA
taccgtcgtgatcacc

SEQ ID NO: 34977 - DNA, 16 bp, synthetic construct
  misc_feature 1..16: note = synthetic [barcode part1]
  source 1..16: mol_type = other DNA
cgtcaattgtacgacg

SEQ ID NO: 34978 - DNA, 16 bp, synthetic construct
  misc_feature 1..16: note = synthetic [barcode part1]
  source 1..16: mol_type = other DNA
tgagacgagatcgaag

SEQ ID NO: 34979 - DNA, 16 bp, synthetic construct
  misc_feature 1..16: note = synthetic [barcode part1]
  source 1..16: mol_type = other DNA
tccaatcgtcgcacgt

SEQ ID NO: 34980 - DNA, 16 bp, synthetic construct
  misc_feature 1..16: note = synthetic [barcode part1]
  source 1..16: mol_type = other DNA
tggaacctgcagtact

SEQ ID NO: 34981 - DNA, 16 bp, synthetic construct
  misc_feature 1..16: note = synthetic [barcode part1]
  source 1..16: mol_type = other DNA
actggtaagtgcactc

SEQ ID NO: 34982 - DNA, 16 bp, synthetic construct
  misc_feature 1..16: note = synthetic [barcode part1]
  source 1..16: mol_type = other DNA
ttgtgcagaggaattg

SEQ ID NO: 34983 - DNA, 16 bp, synthetic construct
  misc_feature 1..16: note = synthetic [barcode part1]
  source 1..16: mol_type = other DNA
gtgtcttactggatct

SEQ ID NO: 34984 - DNA, 16 bp, synthetic construct
  misc_feature 1..16: note = synthetic [barcode part1]
  source 1..16: mol_type = other DNA
cgtctaacacgaactg

SEQ ID NO: 34985 - DNA, 16 bp, synthetic construct
  misc_feature 1..16: note = synthetic [barcode part1]
  source 1..16: mol_type = other DNA
tgcgtagttgttacct

SEQ ID NO: 34986 - DNA, 16 bp, synthetic construct
  misc_feature 1..16: note = synthetic [barcode part1]
  source 1..16: mol_type = other DNA
gatcaggtccaattcg

SEQ ID NO: 34987 - DNA, 16 bp, synthetic construct
  misc_feature 1..16: note = synthetic [barcode part1]
  source 1..16: mol_type = other DNA
tgtacttccacacctc

SEQ ID NO: 34988 - DNA, 16 bp, synthetic construct
  misc_feature 1..16: note = synthetic [barcode part1]
  source 1..16: mol_type = other DNA
ttacgacggtcctaag

SEQ ID NO: 34989 - DNA, 16 bp, synthetic construct
  misc_feature 1..16: note = synthetic [barcode part1]
  source 1..16: mol_type = other DNA
agaggcgacttctact

SEQ ID NO: 34990 - DNA, 16 bp, synthetic construct
  misc_feature 1..16: note = synthetic [barcode part1]
  source 1..16: mol_type = other DNA
gtgatcaacgcgttac

SEQ ID NO: 34991 - DNA, 16 bp, synthetic construct
  misc_feature 1..16: note = synthetic [barcode part1]
  source 1..16: mol_type = other DNA
atcgtagacttcaggc

SEQ ID NO: 34992 - DNA, 16 bp, synthetic construct
  misc_feature 1..16: note = synthetic [barcode part1]
  source 1..16: mol_type = other DNA
atacgactgcgattgc

SEQ ID NO: 34993 - DNA, 16 bp, synthetic construct
  misc_feature 1..16: note = synthetic [barcode part1]
  source 1..16: mol_type = other DNA
gttccacaggtacctc

SEQ ID NO: 34994 - DNA, 16 bp, synthetic construct
  misc_feature 1..16: note = synthetic [barcode part1]
  source 1..16: mol_type = other DNA
acaagttgcgtggtct

SEQ ID NO: 34995 - DNA, 16 bp, synthetic construct
  misc_feature 1..16: note = synthetic [barcode part1]
  source 1..16: mol_type = other DNA
tgtcacacagtcagtg

SEQ ID NO: 34996 - DNA, 16 bp, synthetic construct
  misc_feature 1..16: note = synthetic [barcode part1]
  source 1..16: mol_type = other DNA
attgtgccaattctcg

SEQ ID NO: 34997 - DNA, 16 bp, synthetic construct
  misc_feature 1..16: note = synthetic [barcode part1]
  source 1..16: mol_type = other DNA
attgttcgcagatctc

SEQ ID NO: 34998 - DNA, 16 bp, synthetic construct
  misc_feature 1..16: note = synthetic [barcode part1]
  source 1..16: mol_type = other DNA
actattcgcaagttcc

SEQ ID NO: 34999 - DNA, 16 bp, synthetic construct
  misc_feature 1..16: note = synthetic [barcode part1]
  source 1..16: mol_type = other DNA
tgacacttgtctgccg

SEQ ID NO: 35000 - DNA, 16 bp, synthetic construct
  misc_feature 1..16: note = synthetic [barcode part1]
  source 1..16: mol_type = other DNA
ttggtgagtgaagatc

SEQ ID NO: 35001 - DNA, 16 bp, synthetic construct
  misc_feature 1..16: note = synthetic [barcode part1]
  source 1..16: mol_type = other DNA
gaccgtgagagaatcc

SEQ ID NO: 35002 - DNA, 16 bp, synthetic construct
  misc_feature 1..16: note = synthetic [barcode part1]
  source 1..16: mol_type = other DNA
gattgtcacggaggtg

SEQ ID NO: 35003 - DNA, 16 bp, synthetic construct
  misc_feature 1..16: note = synthetic [barcode part1]
  source 1..16: mol_type = other DNA
cagacacgaggtggtt

SEQ ID NO: 35004 - DNA, 16 bp, synthetic construct
  misc_feature 1..16: note = synthetic [barcode part1]
  source 1..16: mol_type = other DNA
cacttcactcggacgt

SEQ ID NO: 35005 - DNA, 16 bp, synthetic construct
  misc_feature 1..16: note = synthetic [barcode part1]
  source 1..16: mol_type = other DNA
gtacgagtcacacttg

SEQ ID NO: 35006 - DNA, 16 bp, synthetic construct
  misc_feature 1..16: note = synthetic [barcode part1]
  source 1..16: mol_type = other DNA
taacacgattgtctcc

SEQ ID NO: 35007 - DNA, 16 bp, synthetic construct
  misc_feature 1..16: note = synthetic [barcode part1]
  source 1..16: mol_type = other DNA
tgtagtctgacctccg

SEQ ID NO: 35008 - DNA, 16 bp, synthetic construct
  misc_feature 1..16: note = synthetic [barcode part1]
  source 1..16: mol_type = other DNA
caactagtgactgacc

SEQ ID NO: 35009 - DNA, 16 bp, synthetic construct
  misc_feature 1..16: note = synthetic [barcode part1]
  source 1..16: mol_type = other DNA
tgcgagttgttatcct

SEQ ID NO: 35010 - DNA, 16 bp, synthetic construct
  misc_feature 1..16: note = synthetic [barcode part1]
  source 1..16: mol_type = other DNA
tattattccgcgcaac

SEQ ID NO: 35011 - DNA, 16 bp, synthetic construct
  misc_feature 1..16: note = synthetic [barcode part1]
  source 1..16: mol_type = other DNA
cctgtggtcactctag

SEQ ID NO: 35012 - DNA, 16 bp, synthetic construct
  misc_feature 1..16: note = synthetic [barcode part1]
  source 1..16: mol_type = other DNA
tctaggaagttggtcc

SEQ ID NO: 35013 - DNA, 16 bp, synthetic construct
  misc_feature 1..16: note = synthetic [barcode part1]
  source 1..16: mol_type = other DNA
ccggagtatctgttcc

SEQ ID NO: 35014 - DNA, 16 bp, synthetic construct
  misc_feature 1..16: note = synthetic [barcode part1]
  source 1..16: mol_type = other DNA
aagtgaagataggcgc

SEQ ID NO: 35015 - DNA, 16 bp, synthetic construct
  misc_feature 1..16: note = synthetic [barcode part1]
  source 1..16: mol_type = other DNA
tgccggtaatcggaag

SEQ ID NO: 35016 - DNA, 16 bp, synthetic construct
  misc_feature 1..16: note = synthetic [barcode part1]
  source 1..16: mol_type = other DNA
gttggccttaaccaag

SEQ ID NO: 35017 - DNA, 16 bp, synthetic construct
  misc_feature 1..16: note = synthetic [barcode part1]
  source 1..16: mol_type = other DNA
aggtgagtctaagatc

SEQ ID NO: 35018 - DNA, 16 bp, synthetic construct
  misc_feature 1..16: note = synthetic [barcode part1]
  source 1..16: mol_type = other DNA
cgaacaggtgataccg

SEQ ID NO: 35019 - DNA, 16 bp, synthetic construct
  misc_feature 1..16: note = synthetic [barcode part1]
  source 1..16: mol_type = other DNA
aaggagaccagttgag

SEQ ID NO: 35020 - DNA, 16 bp, synthetic construct
  misc_feature 1..16: note = synthetic [barcode part1]
  source 1..16: mol_type = other DNA
gaagtggcgttcagac

SEQ ID NO: 35021 - DNA, 16 bp, synthetic construct
  misc_feature 1..16: note = synthetic [barcode part1]
  source 1..16: mol_type = other DNA
tatcacctgttggtgt

SEQ ID NO: 35022 - DNA, 16 bp, synthetic construct
  misc_feature 1..16: note = synthetic [barcode part1]
  source 1..16: mol_type = other DNA
tggaagaaccagtgtt

SEQ ID NO: 35023 - DNA, 16 bp, synthetic construct
  misc_feature 1..16: note = synthetic [barcode part1]
  source 1..16: mol_type = other DNA
taggtgtcacaccaac

SEQ ID NO: 35024 - DNA, 16 bp, synthetic construct
  misc_feature 1..16: note = synthetic [barcode part1]
  source 1..16: mol_type = other DNA
tcctaagacggataag

SEQ ID NO: 35025 - DNA, 16 bp, synthetic construct
  misc_feature 1..16: note = synthetic [barcode part1]
  source 1..16: mol_type = other DNA
tgcaggagtcgaatcg

SEQ ID NO: 35026 - DNA, 16 bp, synthetic construct
  misc_feature 1..16: note = synthetic [barcode part1]
  source 1..16: mol_type = other DNA
cctcacacagtggttc

SEQ ID NO: 35027 - DNA, 16 bp, synthetic construct
  misc_feature 1..16: note = synthetic [barcode part1]
  source 1..16: mol_type = other DNA
tccagttccagagagt

SEQ ID NO: 35028 - DNA, 16 bp, synthetic construct
  misc_feature 1..16: note = synthetic [barcode part1]
  source 1..16: mol_type = other DNA
aggcgaatactacaac

SEQ ID NO: 35029 - DNA, 16 bp, synthetic construct
  misc_feature 1..16: note = synthetic [barcode part1]
  source 1..16: mol_type = other DNA
agttcgacgcgaagac

SEQ ID NO: 35030 - DNA, 16 bp, synthetic construct
  misc_feature 1..16: note = synthetic [barcode part1]
  source 1..16: mol_type = other DNA
ccagtaattcgcgtcc

SEQ ID NO: 35031 - DNA, 16 bp, synthetic construct
  misc_feature 1..16: note = synthetic [barcode part1]
  source 1..16: mol_type = other DNA
ccgattagactctgag

SEQ ID NO: 35032 - DNA, 16 bp, synthetic construct
  misc_feature 1..16: note = synthetic [barcode part1]
  source 1..16: mol_type = other DNA
gaggtacacacttctg

SEQ ID NO: 35033 - DNA, 16 bp, synthetic construct
  misc_feature 1..16: note = synthetic [barcode part1]
  source 1..16: mol_type = other DNA
gtgcctgcaaggtaag

SEQ ID NO: 35034 - DNA, 16 bp, synthetic construct
  misc_feature 1..16: note = synthetic [barcode part1]
  source 1..16: mol_type = other DNA
cggactctattcagag

SEQ ID NO: 35035 - DNA, 16 bp, synthetic construct
  misc_feature 1..16: note = synthetic [barcode part1]
  source 1..16: mol_type = other DNA
gcaggatcagataccg

SEQ ID NO: 35036 - DNA, 16 bp, synthetic construct
  misc_feature 1..16: note = synthetic [barcode part1]
  source 1..16: mol_type = other DNA
tcaactctcgttgcct

SEQ ID NO: 35037 - DNA, 16 bp, synthetic construct
  misc_feature 1..16: note = synthetic [barcode part1]
  source 1..16: mol_type = other DNA
acaattgcgacgcgtt

SEQ ID NO: 35038 - DNA, 16 bp, synthetic construct
  misc_feature 1..16: note = synthetic [barcode part1]
  source 1..16: mol_type = other DNA
aggaaccaccagtacg

SEQ ID NO: 35039 - DNA, 16 bp, synthetic construct
  misc_feature 1..16: note = synthetic [barcode part1]
  source 1..16: mol_type = other DNA
tctgccttgcctattg

SEQ ID NO: 35040 - DNA, 16 bp, synthetic construct
  misc_feature 1..16: note = synthetic [barcode part1]
  source 1..16: mol_type = other DNA
tgcagattgtccagac

SEQ ID NO: 35041 - DNA, 16 bp, synthetic construct
  misc_feature 1..16: note = synthetic [barcode part1]
  source 1..16: mol_type = other DNA
cgatacgcgtaagtct

SEQ ID NO: 35042 - DNA, 16 bp, synthetic construct
  misc_feature 1..16: note = synthetic [barcode part1]
  source 1..16: mol_type = other DNA
agtcgtacgtaaccac

SEQ ID NO: 35043 - DNA, 16 bp, synthetic construct
  misc_feature 1..16: note = synthetic [barcode part1]
  source 1..16: mol_type = other DNA
cctcctctcagaattc

SEQ ID NO: 35044 - DNA, 16 bp, synthetic construct
  misc_feature 1..16: note = synthetic [barcode part1]
  source 1..16: mol_type = other DNA
taggtaactcaaggtg

SEQ ID NO: 35045 - DNA, 16 bp, synthetic construct
  misc_feature 1..16: note = synthetic [barcode part1]
  source 1..16: mol_type = other DNA
gaccacgatacgttac

SEQ ID NO: 35046 - DNA, 16 bp, synthetic construct
  misc_feature 1..16: note = synthetic [barcode part1]
  source 1..16: mol_type = other DNA
tgcaggtgcaacaggt

SEQ ID NO: 35047 - DNA, 16 bp, synthetic construct
  misc_feature 1..16: note = synthetic [barcode part1]
  source 1..16: mol_type = other DNA
tctgaccagttcttcc

SEQ ID NO: 35048 - DNA, 16 bp, synthetic construct
  misc_feature 1..16: note = synthetic [barcode part1]
  source 1..16: mol_type = other DNA
tggtgccgtaggtaag

SEQ ID NO: 35049 - DNA, 16 bp, synthetic construct
  misc_feature 1..16: note = synthetic [barcode part1]
  source 1..16: mol_type = other DNA
acagttcaacagtccg

SEQ ID NO: 35050 - DNA, 16 bp, synthetic construct
  misc_feature 1..16: note = synthetic [barcode part1]
  source 1..16: mol_type = other DNA
tctctcgagacgtctg

SEQ ID NO: 35051 - DNA, 16 bp, synthetic construct
  misc_feature 1..16: note = synthetic [barcode part1]
  source 1..16: mol_type = other DNA
tgtcttgacaagtcct

SEQ ID NO: 35052 - DNA, 16 bp, synthetic construct
  misc_feature 1..16: note = synthetic [barcode part1]
  source 1..16: mol_type = other DNA
cgatcaactctccttc

SEQ ID NO: 35053 - DNA, 16 bp, synthetic construct
  misc_feature 1..16: note = synthetic [barcode part1]
  source 1..16: mol_type = other DNA
gaactcaatccgagtc

SEQ ID NO: 35054 - DNA, 16 bp, synthetic construct
  misc_feature 1..16: note = synthetic [barcode part1]
  source 1..16: mol_type = other DNA
gaggagttgagttcgc

SEQ ID NO: 35055 - DNA, 16 bp, synthetic construct
  misc_feature 1..16: note = synthetic [barcode part1]
  source 1..16: mol_type = other DNA
acgaaggcaatagttc

SEQ ID NO: 35056 - DNA, 16 bp, synthetic construct
  misc_feature 1..16: note = synthetic [barcode part1]
  source 1..16: mol_type = other DNA
taggtacaccaagaac

SEQ ID NO: 35057 - DNA, 16 bp, synthetic construct
  misc_feature 1..16: note = synthetic [barcode part1]
  source 1..16: mol_type = other DNA
acgaatccgcactaac

SEQ ID NO: 35058 - DNA, 16 bp, synthetic construct
  misc_feature 1..16: note = synthetic [barcode part1]
  source 1..16: mol_type = other DNA
tgatcctgtcgtgcgt

SEQ ID NO: 35059 - DNA, 16 bp, synthetic construct
  misc_feature 1..16: note = synthetic [barcode part1]
  source 1..16: mol_type = other DNA
atccgtaagtcacacg

SEQ ID NO: 35060 - DNA, 16 bp, synthetic construct
  misc_feature 1..16: note = synthetic [barcode part1]
  source 1..16: mol_type = other DNA
gactcagacgtgaggt

SEQ ID NO: 35061 - DNA, 16 bp, synthetic construct
  misc_feature 1..16: note = synthetic [barcode part1]
  source 1..16: mol_type = other DNA
gtccactctacctatc

SEQ ID NO: 35062 - DNA, 16 bp, synthetic construct
  misc_feature 1..16: note = synthetic [barcode part1]
  source 1..16: mol_type = other DNA
cgaactatctcgtgcc

SEQ ID NO: 35063 - DNA, 16 bp, synthetic construct
  misc_feature 1..16: note = synthetic [barcode part1]
  source 1..16: mol_type = other DNA
atacgacggtctctcc

SEQ ID NO: 35064 - DNA, 16 bp, synthetic construct
  misc_feature 1..16: note = synthetic [barcode part1]
  source 1..16: mol_type = other DNA
agtgtcggcacgtatt

SEQ ID NO: 35065 - DNA, 16 bp, synthetic construct
  misc_feature 1..16: note = synthetic [barcode part1]
  source 1..16: mol_type = other DNA
cgaatctgccttaccg

SEQ ID NO: 35066 - DNA, 16 bp, synthetic construct
  misc_feature 1..16: note = synthetic [barcode part1]
  source 1..16: mol_type = other DNA
cgtggatcttatcgtt

SEQ ID NO: 35067 - DNA, 16 bp, synthetic construct
  misc_feature 1..16: note = synthetic [barcode part1]
  source 1..16: mol_type = other DNA
actcgtaacgtagtcg

SEQ ID NO: 35068 - DNA, 16 bp, synthetic construct
  misc_feature 1..16: note = synthetic [barcode part1]
  source 1..16: mol_type = other DNA
cctcacgtaacctggt

SEQ ID NO: 35069 - DNA, 16 bp, synthetic construct
  misc_feature 1..16: note = synthetic [barcode part1]
  source 1..16: mol_type = other DNA
ttgtgtgttctggttg

SEQ ID NO: 35070 - DNA, 16 bp, synthetic construct
  misc_feature 1..16: note = synthetic [barcode part1]
  source 1..16: mol_type = other DNA
cgaagttactacggtc

SEQ ID NO: 35071 - DNA, 16 bp, synthetic construct
  misc_feature 1..16: note = synthetic [barcode part1]
  source 1..16: mol_type = other DNA
gtcgttcgtctataac

SEQ ID NO: 35072 - DNA, 16 bp, synthetic construct
  misc_feature 1..16: note = synthetic [barcode part1]
  source 1..16: mol_type = other DNA
gaagtcgtccttaacg

SEQ ID NO: 35073 - DNA, 16 bp, synthetic construct
  misc_feature 1..16: note = synthetic [barcode part1]
  source 1..16: mol_type = other DNA
tacggtgtaagtaggt

SEQ ID NO: 35074 - DNA, 16 bp, synthetic construct
  misc_feature 1..16: note = synthetic [barcode part1]
  source 1..16: mol_type = other DNA
cgttagatattctcgc

SEQ ID NO: 35075 - DNA, 16 bp, synthetic construct
  misc_feature 1..16: note = synthetic [barcode part1]
  source 1..16: mol_type = other DNA
acgtcgcgaacaagtg

SEQ ID NO: 35076 - DNA, 16 bp, synthetic construct
  misc_feature 1..16: note = synthetic [barcode part1]
  source 1..16: mol_type = other DNA
gtggtattagttggcc

SEQ ID NO: 35077 - DNA, 16 bp, synthetic construct
  misc_feature 1..16: note = synthetic [barcode part1]
  source 1..16: mol_type = other DNA
tgtctccaattcggcg

SEQ ID NO: 35078 - DNA, 16 bp, synthetic construct
  misc_feature 1..16: note = synthetic [barcode part1]
  source 1..16: mol_type = other DNA
tgagaggtacgatcgc

SEQ ID NO: 35079 - DNA, 16 bp, synthetic construct
  misc_feature 1..16: note = synthetic [barcode part1]
  source 1..16: mol_type = other DNA
taggttgtgtgagaac

SEQ ID NO: 35080 - DNA, 16 bp, synthetic construct
  misc_feature 1..16: note = synthetic [barcode part1]
  source 1..16: mol_type = other DNA
acgtcggtagtcttcc

SEQ ID NO: 35081 - DNA, 16 bp, synthetic construct
  misc_feature 1..16: note = synthetic [barcode part1]
  source 1..16: mol_type = other DNA
gtgaaggaactaccgc

SEQ ID NO: 35082 - DNA, 16 bp, synthetic construct
  misc_feature 1..16: note = synthetic [barcode part1]
  source 1..16: mol_type = other DNA
cctatcggtgtccaac

SEQ ID NO: 35083 - DNA, 16 bp, synthetic construct
  misc_feature 1..16: note = synthetic [barcode part1]
  source 1..16: mol_type = other DNA
ccgtactaggtacaac

SEQ ID NO: 35084 - DNA, 16 bp, synthetic construct
  misc_feature 1..16: note = synthetic [barcode part1]
  source 1..16: mol_type = other DNA
ttgtccactcaagact

SEQ ID NO: 35085 - DNA, 16 bp, synthetic construct
  misc_feature 1..16: note = synthetic [barcode part1]
  source 1..16: mol_type = other DNA
attgtcgaatctggcg

SEQ ID NO: 35086 - DNA, 16 bp, synthetic construct
  misc_feature 1..16: note = synthetic [barcode part1]
  source 1..16: mol_type = other DNA
agtctgaacgtgaggc

SEQ ID NO: 35087 - DNA, 16 bp, synthetic construct
  misc_feature 1..16: note = synthetic [barcode part1]
  source 1..16: mol_type = other DNA
agtggagtatatcgac

SEQ ID NO: 35088 - DNA, 16 bp, synthetic construct
  misc_feature 1..16: note = synthetic [barcode part1]
  source 1..16: mol_type = other DNA
aattgcgccttctggc

SEQ ID NO: 35089 - DNA, 16 bp, synthetic construct
  misc_feature 1..16: note = synthetic [barcode part1]
  source 1..16: mol_type = other DNA
actacactcgaacacg

SEQ ID NO: 35090 - DNA, 16 bp, synthetic construct
  misc_feature 1..16: note = synthetic [barcode part1]
  source 1..16: mol_type = other DNA
cgtatacaggatctcg

SEQ ID NO: 35091 - DNA, 16 bp, synthetic construct
  misc_feature 1..16: note = synthetic [barcode part1]
  source 1..16: mol_type = other DNA
gagttcttaatcggcg

SEQ ID NO: 35092 - DNA, 16 bp, synthetic construct
  misc_feature 1..16: note = synthetic [barcode part1]
  source 1..16: mol_type = other DNA
aagaccgagttgcacg

SEQ ID NO: 35093 - DNA, 16 bp, synthetic construct
  misc_feature 1..16: note = synthetic [barcode part1]
  source 1..16: mol_type = other DNA
cgttcctaccgtcaag

SEQ ID NO: 35094 - DNA, 16 bp, synthetic construct
  misc_feature 1..16: note = synthetic [barcode part1]
  source 1..16: mol_type = other DNA
tattcgcgcggatagt

SEQ ID NO: 35095 - DNA, 16 bp, synthetic construct
  misc_feature 1..16: note = synthetic [barcode part1]
  source 1..16: mol_type = other DNA
agaatagtgtcgcctc

SEQ ID NO: 35096 - DNA, 16 bp, synthetic construct
  misc_feature 1..16: note = synthetic [barcode part1]
  source 1..16: mol_type = other DNA
tcggagtcgaagtctt

SEQ ID NO: 35097 - DNA, 16 bp, synthetic construct
  misc_feature 1..16: note = synthetic [barcode part1]
  source 1..16: mol_type = other DNA
caccgacagttctctg

SEQ ID NO: 35098 - DNA, 16 bp, synthetic construct
  misc_feature 1..16: note = synthetic [barcode part1]
  source 1..16: mol_type = other DNA
gccgtaatccaaggtt

SEQ ID NO: 35099 - DNA, 16 bp, synthetic construct
  misc_feature 1..16: note = synthetic [barcode part1]
  source 1..16: mol_type = other DNA
attggcgtccggtctt

SEQ ID NO: 35100 - DNA, 16 bp, synthetic construct
  misc_feature 1..16: note = synthetic [barcode part1]
  source 1..16: mol_type = other DNA
atattcaggcgtccag

SEQ ID NO: 35101 - DNA, 16 bp, synthetic construct
  misc_feature 1..16: note = synthetic [barcode part1]
  source 1..16: mol_type = other DNA
cgacagagtgaatccg

SEQ ID NO: 35102 - DNA, 16 bp, synthetic construct
  misc_feature 1..16: note = synthetic [barcode part1]
  source 1..16: mol_type = other DNA
gtggatcttggtacgt

SEQ ID NO: 35103 - DNA, 16 bp, synthetic construct
  misc_feature 1..16: note = synthetic [barcode part1]
  source 1..16: mol_type = other DNA
aactacaagagtcggt

SEQ ID NO: 35104 - DNA, 16 bp, synthetic construct
  misc_feature 1..16: note = synthetic [barcode part1]
  source 1..16: mol_type = other DNA
cgtctggatacttgag

SEQ ID NO: 35105 - DNA, 16 bp, synthetic construct
  misc_feature 1..16: note = synthetic [barcode part1]
  source 1..16: mol_type = other DNA
agtgccgacactatac

SEQ ID NO: 35106 - DNA, 16 bp, synthetic construct
  misc_feature 1..16: note = synthetic [barcode part1]
  source 1..16: mol_type = other DNA
ttctcagtgacgtgtt

SEQ ID NO: 35107 - DNA, 16 bp, synthetic construct
  misc_feature 1..16: note = synthetic [barcode part1]
  source 1..16: mol_type = other DNA
atctcgccgaactcac

SEQ ID NO: 35108 - DNA, 16 bp, synthetic construct
  misc_feature 1..16: note = synthetic [barcode part1]
  source 1..16: mol_type = other DNA
tctcctgttgtcgttg

SEQ ID NO: 35109 - DNA, 16 bp, synthetic construct
  misc_feature 1..16: note = synthetic [barcode part1]
  source 1..16: mol_type = other DNA
agtgcgtccttaatct

SEQ ID NO: 35110 - DNA, 16 bp, synthetic construct
  misc_feature 1..16: note = synthetic [barcode part1]
  source 1..16: mol_type = other DNA
ccacacttgtcggatc

SEQ ID NO: 35111 - DNA, 16 bp, synthetic construct
  misc_feature 1..16: note = synthetic [barcode part1]
  source 1..16: mol_type = other DNA
cctggttagaaggttc

SEQ ID NO: 35112 - DNA, 16 bp, synthetic construct
  misc_feature 1..16: note = synthetic [barcode part1]
  source 1..16: mol_type = other DNA
accgttcgatatccgc

SEQ ID NO: 35113 - DNA, 16 bp, synthetic construct
  misc_feature 1..16: note = synthetic [barcode part1]
  source 1..16: mol_type = other DNA
ttccacgccgaactac

SEQ ID NO: 35114 - DNA, 16 bp, synthetic construct
  misc_feature 1..16: note = synthetic [barcode part1]
  source 1..16: mol_type = other DNA
acgaatcgtcggagac

SEQ ID NO: 35115 - DNA, 16 bp, synthetic construct
  misc_feature 1..16: note = synthetic [barcode part1]
  source 1..16: mol_type = other DNA
gtatcagtcaggtacc

SEQ ID NO: 35116 - DNA, 16 bp, synthetic construct
  misc_feature 1..16: note = synthetic [barcode part1]
  source 1..16: mol_type = other DNA
ttgagacaggtggacc

SEQ ID NO: 35117 - DNA, 16 bp, synthetic construct
  misc_feature 1..16: note = synthetic [barcode part1]
  source 1..16: mol_type = other DNA
ttacgagtaaggagtc

SEQ ID NO: 35118 - DNA, 16 bp, synthetic construct
  misc_feature 1..16: note = synthetic [barcode part1]
  source 1..16: mol_type = other DNA
gtggtatagagaggac

SEQ ID NO: 35119 - DNA, 16 bp, synthetic construct
  misc_feature 1..16: note = synthetic [barcode part1]
  source 1..16: mol_type = other DNA
atagtgcctaaccgac

SEQ ID NO: 35120 - DNA, 16 bp, synthetic construct
  misc_feature 1..16: note = synthetic [barcode part1]
  source 1..16: mol_type = other DNA
gaacacgtcaacgacg

SEQ ID NO: 35121 - DNA, 16 bp, synthetic construct
  misc_feature 1..16: note = synthetic [barcode part1]
  source 1..16: mol_type = other DNA
ttgagaagactgcgcg

SEQ ID NO: 35122 - DNA, 16 bp, synthetic construct
  misc_feature 1..16: note = synthetic [barcode part1]
  source 1..16: mol_type = other DNA
caccactctacgtgac

SEQ ID NO: 35123 - DNA, 16 bp, synthetic construct
  misc_feature 1..16: note = synthetic [barcode part1]
  source 1..16: mol_type = other DNA
actcaagacgagtctc

SEQ ID NO: 35124 - DNA, 16 bp, synthetic construct
  misc_feature 1..16: note = synthetic [barcode part1]
  source 1..16: mol_type = other DNA
cgactccgtgtcgatt

SEQ ID NO: 35125 - DNA, 16 bp, synthetic construct
  misc_feature 1..16: note = synthetic [barcode part1]
  source 1..16: mol_type = other DNA
gcgatccgaattatcg

SEQ ID NO: 35126 - DNA, 16 bp, synthetic construct
  misc_feature 1..16: note = synthetic [barcode part1]
  source 1..16: mol_type = other DNA
caagtgttggttcttc

SEQ ID NO: 35127 - DNA, 16 bp, synthetic construct
  misc_feature 1..16: note = synthetic [barcode part1]
  source 1..16: mol_type = other DNA
cgcagtcttaagtacg

SEQ ID NO: 35128 - DNA, 16 bp, synthetic construct
  misc_feature 1..16: note = synthetic [barcode part1]
  source 1..16: mol_type = other DNA
cgtgcaactcggtctt

SEQ ID NO: 35129 - DNA, 16 bp, synthetic construct
  misc_feature 1..16: note = synthetic [barcode part1]
  source 1..16: mol_type = other DNA
gaacactcactattcc

SEQ ID NO: 35130 - DNA, 16 bp, synthetic construct
  misc_feature 1..16: note = synthetic [barcode part1]
  source 1..16: mol_type = other DNA
aggtccgagtggtaac

SEQ ID NO: 35131 - DNA, 16 bp, synthetic construct
  misc_feature 1..16: note = synthetic [barcode part1]
  source 1..16: mol_type = other DNA
ataccttgccagattc

SEQ ID NO: 35132 - DNA, 16 bp, synthetic construct
  misc_feature 1..16: note = synthetic [barcode part1]
  source 1..16: mol_type = other DNA
caagttcttgcagacg

SEQ ID NO: 35133 - DNA, 16 bp, synthetic construct
  misc_feature 1..16: note = synthetic [barcode part1]
  source 1..16: mol_type = other DNA
gccactgagaacacag

SEQ ID NO: 35134 - DNA, 16 bp, synthetic construct
  misc_feature 1..16: note = synthetic [barcode part1]
  source 1..16: mol_type = other DNA
ttatagaggactggac

SEQ ID NO: 35135 - DNA, 16 bp, synthetic construct
  misc_feature 1..16: note = synthetic [barcode part1]
  source 1..16: mol_type = other DNA
aactagaacctagacg

SEQ ID NO: 35136 - DNA, 16 bp, synthetic construct
  misc_feature 1..16: note = synthetic [barcode part1]
  source 1..16: mol_type = other DNA
gcgatactaacaccgt

SEQ ID NO: 35137 - DNA, 16 bp, synthetic construct
  misc_feature 1..16: note = synthetic [barcode part1]
  source 1..16: mol_type = other DNA
cgtctattccgtctgt

SEQ ID NO: 35138 - DNA, 16 bp, synthetic construct
  misc_feature 1..16: note = synthetic [barcode part1]
  source 1..16: mol_type = other DNA
cgttaacttccaactg

SEQ ID NO: 35139 - DNA, 16 bp, synthetic construct
  misc_feature 1..16: note = synthetic [barcode part1]
  source 1..16: mol_type = other DNA
gagaccaattactccg

SEQ ID NO: 35140 - DNA, 16 bp, synthetic construct
  misc_feature 1..16: note = synthetic [barcode part1]
  source 1..16: mol_type = other DNA
acaacgtgttgtgacc

SEQ ID NO: 35141 - DNA, 16 bp, synthetic construct
  misc_feature 1..16: note = synthetic [barcode part1]
  source 1..16: mol_type = other DNA
gcgttctcacaagaac

SEQ ID NO: 35142 - DNA, 16 bp, synthetic construct
  misc_feature 1..16: note = synthetic [barcode part1]
  source 1..16: mol_type = other DNA
cacttcgttatcctgc

SEQ ID NO: 35143 - DNA, 16 bp, synthetic construct
  misc_feature 1..16: note = synthetic [barcode part1]
  source 1..16: mol_type = other DNA
tgcaacacacttatcc

SEQ ID NO: 35144 - DNA, 16 bp, synthetic construct
  misc_feature 1..16: note = synthetic [barcode part1]
  source 1..16: mol_type = other DNA
cggtcagtacgtatac

SEQ ID NO: 35145 - DNA, 16 bp, synthetic construct
  misc_feature 1..16: note = synthetic [barcode part1]
  source 1..16: mol_type = other DNA
ttacgacaggattccg

SEQ ID NO: 35146 - DNA, 16 bp, synthetic construct
  misc_feature 1..16: note = synthetic [barcode part1]
  source 1..16: mol_type = other DNA
cacaagtctcaccgtc

SEQ ID NO: 35147 - DNA, 16 bp, synthetic construct
  misc_feature 1..16: note = synthetic [barcode part1]
  source 1..16: mol_type = other DNA
attcttgtgtcgaacc

SEQ ID NO: 35148 - DNA, 16 bp, synthetic construct
  misc_feature 1..16: note = synthetic [barcode part1]
  source 1..16: mol_type = other DNA
tagtcacttgcacgag

SEQ ID NO: 35149 - DNA, 16 bp, synthetic construct
  misc_feature 1..16: note = synthetic [barcode part1]
  source 1..16: mol_type = other DNA
cgagttaaccgtcaac

SEQ ID NO: 35150 - DNA, 16 bp, synthetic construct
  misc_feature 1..16: note = synthetic [barcode part1]
  source 1..16: mol_type = other DNA
atactctgattaccgc

SEQ ID NO: 35151 - DNA, 16 bp, synthetic construct
  misc_feature 1..16: note = synthetic [barcode part1]
  source 1..16: mol_type = other DNA
gtccaccttgttcact

SEQ ID NO: 35152 - DNA, 16 bp, synthetic construct
  misc_feature 1..16: note = synthetic [barcode part1]
  source 1..16: mol_type = other DNA
gtattccgcacagagt

SEQ ID NO: 35153 - DNA, 16 bp, synthetic construct
  misc_feature 1..16: note = synthetic [barcode part1]
  source 1..16: mol_type = other DNA
tgagactattacggcc

SEQ ID NO: 35154 - DNA, 16 bp, synthetic construct
  misc_feature 1..16: note = synthetic [barcode part1]
  source 1..16: mol_type = other DNA
cagatctatcttaccg

SEQ ID NO: 35155 - DNA, 16 bp, synthetic construct
  misc_feature 1..16: note = synthetic [barcode part1]
  source 1..16: mol_type = other DNA
acaatcggttgcgtac

SEQ ID NO: 35156 - DNA, 16 bp, synthetic construct
  misc_feature 1..16: note = synthetic [barcode part1]
  source 1..16: mol_type = other DNA
aaccgaggcagaatag

SEQ ID NO: 35157 - DNA, 16 bp, synthetic construct
  misc_feature 1..16: note = synthetic [barcode part1]
  source 1..16: mol_type = other DNA
cgcactcaacaattct

SEQ ID NO: 35158 - DNA, 16 bp, synthetic construct
  misc_feature 1..16: note = synthetic [barcode part1]
  source 1..16: mol_type = other DNA
aatctctgaccgtatc

SEQ ID NO: 35159 - DNA, 16 bp, synthetic construct
  misc_feature 1..16: note = synthetic [barcode part1]
  source 1..16: mol_type = other DNA
agaagttccagttccg

SEQ ID NO: 35160 - DNA, 16 bp, synthetic construct
  misc_feature 1..16: note = synthetic [barcode part1]
  source 1..16: mol_type = other DNA
ttcgaacggcggtaag

SEQ ID NO: 35161 - DNA, 16 bp, synthetic construct
  misc_feature 1..16: note = synthetic [barcode part1]
  source 1..16: mol_type = other DNA
tgtggaggacttgacg

SEQ ID NO: 35162 - DNA, 16 bp, synthetic construct
  misc_feature 1..16: note = synthetic [barcode part1]
  source 1..16: mol_type = other DNA
agaagactgagttcgt

SEQ ID NO: 35163 - DNA, 16 bp, synthetic construct
  misc_feature 1..16: note = synthetic [barcode part1]
  source 1..16: mol_type = other DNA
tggaatagacacactg

SEQ ID NO: 35164 - DNA, 16 bp, synthetic construct
  misc_feature 1..16: note = synthetic [barcode part1]
  source 1..16: mol_type = other DNA
cgatcagttggagtct

SEQ ID NO: 35165 - DNA, 16 bp, synthetic construct
  misc_feature 1..16: note = synthetic [barcode part1]
  source 1..16: mol_type = other DNA
acgactatcctccgac

SEQ ID NO: 35166 - DNA, 16 bp, synthetic construct
  misc_feature 1..16: note = synthetic [barcode part1]
  source 1..16: mol_type = other DNA
tcaggagttctcagtg

SEQ ID NO: 35167 - DNA, 16 bp, synthetic construct
  misc_feature 1..16: note = synthetic [barcode part1]
  source 1..16: mol_type = other DNA
aagtaagtcacggtac

SEQ ID NO: 35168 - DNA, 16 bp, synthetic construct
  misc_feature 1..16: note = synthetic [barcode part1]
  source 1..16: mol_type = other DNA
cggtggtcaacaattc

SEQ ID NO: 35169 - DNA, 16 bp, synthetic construct
  misc_feature 1..16: note = synthetic [barcode part1]
  source 1..16: mol_type = other DNA
ccgagaacgtaggttg

SEQ ID NO: 35170 - DNA, 16 bp, synthetic construct
  misc_feature 1..16: note = synthetic [barcode part1]
  source 1..16: mol_type = other DNA
tacgtagtacttcgtc

SEQ ID NO: 35171 - DNA, 16 bp, synthetic construct
  misc_feature 1..16: note = synthetic [barcode part1]
  source 1..16: mol_type = other DNA
tcactattccgaacac

SEQ ID NO: 35172 - DNA, 16 bp, synthetic construct
  misc_feature 1..16: note = synthetic [barcode part1]
  source 1..16: mol_type = other DNA
gtaactaccttctggt

SEQ ID NO: 35173 - DNA, 16 bp, synthetic construct
  misc_feature 1..16: note = synthetic [barcode part1]
  source 1..16: mol_type = other DNA
atccacctatcgcgac

SEQ ID NO: 35174 - DNA, 16 bp, synthetic construct
  misc_feature 1..16: note = synthetic [barcode part1]
  source 1..16: mol_type = other DNA
cgtcaggatccttgtc

SEQ ID NO: 35175 - DNA, 16 bp, synthetic construct
  misc_feature 1..16: note = synthetic [barcode part1]
  source 1..16: mol_type = other DNA
cgtgatacttgtccgc

SEQ ID NO: 35176 - DNA, 16 bp, synthetic construct
  misc_feature 1..16: note = synthetic [barcode part1]
  source 1..16: mol_type = other DNA
tccgactctgattctc

SEQ ID NO: 35177 - DNA, 16 bp, synthetic construct
  misc_feature 1..16: note = synthetic [barcode part1]
  source 1..16: mol_type = other DNA
tgactaggaggttctc

SEQ ID NO: 35178 - DNA, 16 bp, synthetic construct
  misc_feature 1..16: note = synthetic [barcode part1]
  source 1..16: mol_type = other DNA
cctcgcacaataactt

SEQ ID NO: 35179 - DNA, 16 bp, synthetic construct
  misc_feature 1..16: note = synthetic [barcode part1]
  source 1..16: mol_type = other DNA
gtcgagtcaagtcgtt

SEQ ID NO: 35180 - DNA, 16 bp, synthetic construct
  misc_feature 1..16: note = synthetic [barcode part1]
  source 1..16: mol_type = other DNA
gttaggttactggacc

SEQ ID NO: 35181 - DNA, 16 bp, synthetic construct
  misc_feature 1..16: note = synthetic [barcode part1]
  source 1..16: mol_type = other DNA
tagacgtgtgtgatcc

SEQ ID NO: 35182 - DNA, 16 bp, synthetic construct
  misc_feature 1..16: note = synthetic [barcode part1]
  source 1..16: mol_type = other DNA
cgaacaggacagatag

SEQ ID NO: 35183 - DNA, 16 bp, synthetic construct
  misc_feature 1..16: note = synthetic [barcode part1]
  source 1..16: mol_type = other DNA
aggcactgcagtgagt

SEQ ID NO: 35184 - DNA, 16 bp, synthetic construct
  misc_feature 1..16: note = synthetic [barcode part1]
  source 1..16: mol_type = other DNA
taacttcgtgccggtc

SEQ ID NO: 35185 - DNA, 16 bp, synthetic construct
  misc_feature 1..16: note = synthetic [barcode part1]
  source 1..16: mol_type = other DNA
cactctcgtatctctg

SEQ ID NO: 35186 - DNA, 16 bp, synthetic construct
  misc_feature 1..16: note = synthetic [barcode part1]
  source 1..16: mol_type = other DNA
ccagtgccaattacag

SEQ ID NO: 35187 - DNA, 16 bp, synthetic construct
  misc_feature 1..16: note = synthetic [barcode part1]
  source 1..16: mol_type = other DNA
agatcacagtacagac

SEQ ID NO: 35188 - DNA, 16 bp, synthetic construct
  misc_feature 1..16: note = synthetic [barcode part1]
  source 1..16: mol_type = other DNA
tgttcgcggatctcac

SEQ ID NO: 35189 - DNA, 16 bp, synthetic construct
  misc_feature 1..16: note = synthetic [barcode part1]
  source 1..16: mol_type = other DNA
aagttccaaggtcctg

SEQ ID NO: 35190 - DNA, 16 bp, synthetic construct
  misc_feature 1..16: note = synthetic [barcode part1]
  source 1..16: mol_type = other DNA
tgcgtgactcgacctt

SEQ ID NO: 35191 - DNA, 16 bp, synthetic construct
  misc_feature 1..16: note = synthetic [barcode part1]
  source 1..16: mol_type = other DNA
gcgtatagtacacgtc

SEQ ID NO: 35192 - DNA, 16 bp, synthetic construct
  misc_feature 1..16: note = synthetic [barcode part1]
  source 1..16: mol_type = other DNA
tctattcacgataccg

SEQ ID NO: 35193 - DNA, 16 bp, synthetic construct
  misc_feature 1..16: note = synthetic [barcode part1]
  source 1..16: mol_type = other DNA
acagttgtcgacctcc

SEQ ID NO: 35194 - DNA, 16 bp, synthetic construct
  misc_feature 1..16: note = synthetic [barcode part1]
  source 1..16: mol_type = other DNA
cgatcaattcctctcc

SEQ ID NO: 35195 - DNA, 16 bp, synthetic construct
  misc_feature 1..16: note = synthetic [barcode part1]
  source 1..16: mol_type = other DNA
gtccgcctaagattcc

SEQ ID NO: 35196 - DNA, 16 bp, synthetic construct
  misc_feature 1..16: note = synthetic [barcode part1]
  source 1..16: mol_type = other DNA
tctagttgcgttaacc

SEQ ID NO: 35197 - DNA, 16 bp, synthetic construct
  misc_feature 1..16: note = synthetic [barcode part1]
  source 1..16: mol_type = other DNA
tcttgcgatacggaac

SEQ ID NO: 35198 - DNA, 16 bp, synthetic construct
  misc_feature 1..16: note = synthetic [barcode part1]
  source 1..16: mol_type = other DNA
tgagattgcgtcacgt

SEQ ID NO: 35199 - DNA, 16 bp, synthetic construct
  misc_feature 1..16: note = synthetic [barcode part1]
  source 1..16: mol_type = other DNA
ttgtgtgtgcacaacg

SEQ ID NO: 35200 - DNA, 16 bp, synthetic construct
  misc_feature 1..16: note = synthetic [barcode part1]
  source 1..16: mol_type = other DNA
taggtcagactcaacc

SEQ ID NO: 35201 - DNA, 16 bp, synthetic construct
  misc_feature 1..16: note = synthetic [barcode part1]
  source 1..16: mol_type = other DNA
aggacgaagacctgtc

SEQ ID NO: 35202 - DNA, 16 bp, synthetic construct
  misc_feature 1..16: note = synthetic [barcode part1]
  source 1..16: mol_type = other DNA
gacctgattggtggtt

SEQ ID NO: 35203 - DNA, 16 bp, synthetic construct
  misc_feature 1..16: note = synthetic [barcode part1]
  source 1..16: mol_type = other DNA
tgttcgccagatagac

SEQ ID NO: 35204 - DNA, 16 bp, synthetic construct
  misc_feature 1..16: note = synthetic [barcode part1]
  source 1..16: mol_type = other DNA
ttgagaccgtccgttc

SEQ ID NO: 35205 - DNA, 16 bp, synthetic construct
  misc_feature 1..16: note = synthetic [barcode part1]
  source 1..16: mol_type = other DNA
gtcgtcttattcagac

SEQ ID NO: 35206 - DNA, 16 bp, synthetic construct
  misc_feature 1..16: note = synthetic [barcode part1]
  source 1..16: mol_type = other DNA
gatataggacggcctg

SEQ ID NO: 35207 - DNA, 16 bp, synthetic construct
  misc_feature 1..16: note = synthetic [barcode part1]
  source 1..16: mol_type = other DNA
aataagattggcgcgt

SEQ ID NO: 35208 - DNA, 16 bp, synthetic construct
  misc_feature 1..16: note = synthetic [barcode part1]
  source 1..16: mol_type = other DNA
tcggtaatagactgcc

SEQ ID NO: 35209 - DNA, 16 bp, synthetic construct
  misc_feature 1..16: note = synthetic [barcode part1]
  source 1..16: mol_type = other DNA
gacgcaattcacgttg

SEQ ID NO: 35210 - DNA, 16 bp, synthetic construct
  misc_feature 1..16: note = synthetic [barcode part1]
  source 1..16: mol_type = other DNA
tcgcctatccaaggtc

SEQ ID NO: 35211 - DNA, 16 bp, synthetic construct
  misc_feature 1..16: note = synthetic [barcode part1]
  source 1..16: mol_type = other DNA
taggtcgccgaattgt

SEQ ID NO: 35212 - DNA, 16 bp, synthetic construct
  misc_feature 1..16: note = synthetic [barcode part1]
  source 1..16: mol_type = other DNA
ttgcgagacggttact

SEQ ID NO: 35213 - DNA, 16 bp, synthetic construct
  misc_feature 1..16: note = synthetic [barcode part1]
  source 1..16: mol_type = other DNA
gtatcttccaacgatc

SEQ ID NO: 35214 - DNA, 16 bp, synthetic construct
  misc_feature 1..16: note = synthetic [barcode part1]
  source 1..16: mol_type = other DNA
gtcaggtaacgactct

SEQ ID NO: 35215 - DNA, 16 bp, synthetic construct
  misc_feature 1..16: note = synthetic [barcode part1]
  source 1..16: mol_type = other DNA
gtgcaatccgagagac

SEQ ID NO: 35216 - DNA, 16 bp, synthetic construct
  misc_feature 1..16: note = synthetic [barcode part1]
  source 1..16: mol_type = other DNA
cctcacttgaatactg

SEQ ID NO: 35217 - DNA, 16 bp, synthetic construct
  misc_feature 1..16: note = synthetic [barcode part1]
  source 1..16: mol_type = other DNA
ttcttggcgtacaact

SEQ ID NO: 35218 - DNA, 16 bp, synthetic construct
  misc_feature 1..16: note = synthetic [barcode part1]
  source 1..16: mol_type = other DNA
gtactcagtggatctg

SEQ ID NO: 35219 - DNA, 16 bp, synthetic construct
  misc_feature 1..16: note = synthetic [barcode part1]
  source 1..16: mol_type = other DNA
attgagtgagtacggt

SEQ ID NO: 35220 - DNA, 16 bp, synthetic construct
  misc_feature 1..16: note = synthetic [barcode part1]
  source 1..16: mol_type = other DNA
acagaggaagaacacc

SEQ ID NO: 35221 - DNA, 16 bp, synthetic construct
  misc_feature 1..16: note = synthetic [barcode part1]
  source 1..16: mol_type = other DNA
cgttagtcgtgtaacg

SEQ ID NO: 35222 - DNA, 16 bp, synthetic construct
  misc_feature 1..16: note = synthetic [barcode part1]
  source 1..16: mol_type = other DNA
gccacttaacgaagtc

SEQ ID NO: 35223 - DNA, 16 bp, synthetic construct
  misc_feature 1..16: note = synthetic [barcode part1]
  source 1..16: mol_type = other DNA
agtgttggtaccacac

SEQ ID NO: 35224 - DNA, 16 bp, synthetic construct
  misc_feature 1..16: note = synthetic [barcode part1]
  source 1..16: mol_type = other DNA
ttaggcaatagtggac

SEQ ID NO: 35225 - DNA, 16 bp, synthetic construct
  misc_feature 1..16: note = synthetic [barcode part1]
  source 1..16: mol_type = other DNA
gtgttactgttcactg

SEQ ID NO: 35226 - DNA, 16 bp, synthetic construct
  misc_feature 1..16: note = synthetic [barcode part1]
  source 1..16: mol_type = other DNA
aagttatcgccaggtc

SEQ ID NO: 35227 - DNA, 16 bp, synthetic construct
  misc_feature 1..16: note = synthetic [barcode part1]
  source 1..16: mol_type = other DNA
cctgacttgaccgtac

SEQ ID NO: 35228 - DNA, 16 bp, synthetic construct
  misc_feature 1..16: note = synthetic [barcode part1]
  source 1..16: mol_type = other DNA
tgtcgcctctgattct

SEQ ID NO: 35229 - DNA, 16 bp, synthetic construct
  misc_feature 1..16: note = synthetic [barcode part1]
  source 1..16: mol_type = other DNA
tctaactgcactgatc

SEQ ID NO: 35230 - DNA, 16 bp, synthetic construct
  misc_feature 1..16: note = synthetic [barcode part1]
  source 1..16: mol_type = other DNA
cggcgatagaagtgtc

SEQ ID NO: 35231 - DNA, 16 bp, synthetic construct
  misc_feature 1..16: note = synthetic [barcode part1]
  source 1..16: mol_type = other DNA
aactgtgcgcgattac

SEQ ID NO: 35232 - DNA, 16 bp, synthetic construct
  misc_feature 1..16: note = synthetic [barcode part1]
  source 1..16: mol_type = other DNA
gacaaggatacttgac

SEQ ID NO: 35233 - DNA, 16 bp, synthetic construct
  misc_feature 1..16: note = synthetic [barcode part1]
  source 1..16: mol_type = other DNA
aacaggcgatagacag

SEQ ID NO: 35234 - DNA, 16 bp, synthetic construct
  misc_feature 1..16: note = synthetic [barcode part1]
  source 1..16: mol_type = other DNA
ccgcaagattcgaatc

SEQ ID NO: 35235 - DNA, 16 bp, synthetic construct
  misc_feature 1..16: note = synthetic [barcode part1]
  source 1..16: mol_type = other DNA
acgagacacagtagag

SEQ ID NO: 35236 - DNA, 16 bp, synthetic construct
  misc_feature 1..16: note = synthetic [barcode part1]
  source 1..16: mol_type = other DNA
cgtactcctactggac

SEQ ID NO: 35237 - DNA, 16 bp, synthetic construct
  misc_feature 1..16: note = synthetic [barcode part1]
  source 1..16: mol_type = other DNA
tgcaggttggaatagt

SEQ ID NO: 35238 - DNA, 16 bp, synthetic construct
  misc_feature 1..16: note = synthetic [barcode part1]
  source 1..16: mol_type = other DNA
gttatcgttaacggcg

SEQ ID NO: 35239 - DNA, 16 bp, synthetic construct
  misc_feature 1..16: note = synthetic [barcode part1]
  source 1..16: mol_type = other DNA
cctataggcgaatctg

SEQ ID NO: 35240 - DNA, 16 bp, synthetic construct
  misc_feature 1..16: note = synthetic [barcode part1]
  source 1..16: mol_type = other DNA
cgattacaacgcgttg

SEQ ID NO: 35241 - DNA, 16 bp, synthetic construct
  misc_feature 1..16: note = synthetic [barcode part1]
  source 1..16: mol_type = other DNA
cctcaacttctatcgc

SEQ ID NO: 35242 - DNA, 16 bp, synthetic construct
  misc_feature 1..16: note = synthetic [barcode part1]
  source 1..16: mol_type = other DNA
gcagtagtacttcacg

SEQ ID NO: 35243 - DNA, 16 bp, synthetic construct
  misc_feature 1..16: note = synthetic [barcode part1]
  source 1..16: mol_type = other DNA
gtgaaccagaagttgt

SEQ ID NO: 35244 - DNA, 16 bp, synthetic construct
  misc_feature 1..16: note = synthetic [barcode part1]
  source 1..16: mol_type = other DNA
gttgactgacttcgag

SEQ ID NO: 35245 - DNA, 16 bp, synthetic construct
  misc_feature 1..16: note = synthetic [barcode part1]
  source 1..16: mol_type = other DNA
tcgatacaccgtacag

SEQ ID NO: 35246 - DNA, 16 bp, synthetic construct
  misc_feature 1..16: note = synthetic [barcode part1]
  source 1..16: mol_type = other DNA
aggtagaacctcaagt

SEQ ID NO: 35247 - DNA, 16 bp, synthetic construct
  misc_feature 1..16: note = synthetic [barcode part1]
  source 1..16: mol_type = other DNA
atcttatcgccaacgt

SEQ ID NO: 35248 - DNA, 16 bp, synthetic construct
  misc_feature 1..16: note = synthetic [barcode part1]
  source 1..16: mol_type = other DNA
tgatccaggacgcaag

SEQ ID NO: 35249 - DNA, 16 bp, synthetic construct
  misc_feature 1..16: note = synthetic [barcode part1]
  source 1..16: mol_type = other DNA
gcaactgaccaacact

SEQ ID NO: 35250 - DNA, 16 bp, synthetic construct
  misc_feature 1..16: note = synthetic [barcode part1]
  source 1..16: mol_type = other DNA
tgttggttcagttctg

SEQ ID NO: 35251 - DNA, 16 bp, synthetic construct
  misc_feature 1..16: note = synthetic [barcode part1]
  source 1..16: mol_type = other DNA
cacagtgcaagacctt

SEQ ID NO: 35252 - DNA, 16 bp, synthetic construct
  misc_feature 1..16: note = synthetic [barcode part1]
  source 1..16: mol_type = other DNA
accggtgatagaacgc

SEQ ID NO: 35253 - DNA, 16 bp, synthetic construct
  misc_feature 1..16: note = synthetic [barcode part1]
  source 1..16: mol_type = other DNA
tgtggactcgtgagtt

SEQ ID NO: 35254 - DNA, 16 bp, synthetic construct
  misc_feature 1..16: note = synthetic [barcode part1]
  source 1..16: mol_type = other DNA
acaacggtcgttgttg

SEQ ID NO: 35255 - DNA, 16 bp, synthetic construct
  misc_feature 1..16: note = synthetic [barcode part1]
  source 1..16: mol_type = other DNA
attcgtcgagttctgt

SEQ ID NO: 35256 - DNA, 16 bp, synthetic construct
  misc_feature 1..16: note = synthetic [barcode part1]
  source 1..16: mol_type = other DNA
cgaccttaacttcctc

SEQ ID NO: 35257 - DNA, 16 bp, synthetic construct
  misc_feature 1..16: note = synthetic [barcode part1]
  source 1..16: mol_type = other DNA
ttggagttgaggttcc

SEQ ID NO: 35258 - DNA, 16 bp, synthetic construct
  misc_feature 1..16: note = synthetic [barcode part1]
  source 1..16: mol_type = other DNA
tgtgtctcgttagact

SEQ ID NO: 35259 - DNA, 16 bp, synthetic construct
  misc_feature 1..16: note = synthetic [barcode part1]
  source 1..16: mol_type = other DNA
ttgttgtctcggatac

SEQ ID NO: 35260 - DNA, 16 bp, synthetic construct
  misc_feature 1..16: note = synthetic [barcode part1]
  source 1..16: mol_type = other DNA
gcgatattgacactgc

SEQ ID NO: 35261 - DNA, 16 bp, synthetic construct
  misc_feature 1..16: note = synthetic [barcode part1]
  source 1..16: mol_type = other DNA
acctcgtaagtgcctc

SEQ ID NO: 35262 - DNA, 16 bp, synthetic construct
  misc_feature 1..16: note = synthetic [barcode part1]
  source 1..16: mol_type = other DNA
ataaccgtaacgcgtc

SEQ ID NO: 35263 - DNA, 16 bp, synthetic construct
  misc_feature 1..16: note = synthetic [barcode part1]
  source 1..16: mol_type = other DNA
gaactgtctcaacgac

SEQ ID NO: 35264 - DNA, 16 bp, synthetic construct
  misc_feature 1..16: note = synthetic [barcode part1]
  source 1..16: mol_type = other DNA
tgacaggatcctactg

SEQ ID NO: 35265 - DNA, 16 bp, synthetic construct
  misc_feature 1..16: note = synthetic [barcode part1]
  source 1..16: mol_type = other DNA
tggattcgagtgatag

SEQ ID NO: 35266 - DNA, 16 bp, synthetic construct
  misc_feature 1..16: note = synthetic [barcode part1]
  source 1..16: mol_type = other DNA
ataactgcctcgactt

SEQ ID NO: 35267 - DNA, 16 bp, synthetic construct
  misc_feature 1..16: note = synthetic [barcode part1]
  source 1..16: mol_type = other DNA
tgtagaatacgcctcg

SEQ ID NO: 35268 - DNA, 16 bp, synthetic construct
  misc_feature 1..16: note = synthetic [barcode part1]
  source 1..16: mol_type = other DNA
acactccgttgagtcc

SEQ ID NO: 35269 - DNA, 16 bp, synthetic construct
  misc_feature 1..16: note = synthetic [barcode part1]
  source 1..16: mol_type = other DNA
accactcgcgaattcc

SEQ ID NO: 35270 - DNA, 16 bp, synthetic construct
  misc_feature 1..16: note = synthetic [barcode part1]
  source 1..16: mol_type = other DNA
gccaatatctaacctc

SEQ ID NO: 35271 - DNA, 16 bp, synthetic construct
  misc_feature 1..16: note = synthetic [barcode part1]
  source 1..16: mol_type = other DNA
gacacacttaactcct

SEQ ID NO: 35272 - DNA, 16 bp, synthetic construct
  misc_feature 1..16: note = synthetic [barcode part1]
  source 1..16: mol_type = other DNA
acacctcacacaagac

SEQ ID NO: 35273 - DNA, 16 bp, synthetic construct
  misc_feature 1..16: note = synthetic [barcode part1]
  source 1..16: mol_type = other DNA
acacttgtgaacaccg

SEQ ID NO: 35274 - DNA, 16 bp, synthetic construct
  misc_feature 1..16: note = synthetic [barcode part1]
  source 1..16: mol_type = other DNA
aaggcctacttcaggt

SEQ ID NO: 35275 - DNA, 16 bp, synthetic construct
  misc_feature 1..16: note = synthetic [barcode part1]
  source 1..16: mol_type = other DNA
gtctcctgcgtactag

SEQ ID NO: 35276 - DNA, 16 bp, synthetic construct
  misc_feature 1..16: note = synthetic [barcode part1]
  source 1..16: mol_type = other DNA
taccacacaactgacg

SEQ ID NO: 35277 - DNA, 16 bp, synthetic construct
  misc_feature 1..16: note = synthetic [barcode part1]
  source 1..16: mol_type = other DNA
tacctcgataagttcc

SEQ ID NO: 35278 - DNA, 16 bp, synthetic construct
  misc_feature 1..16: note = synthetic [barcode part1]
  source 1..16: mol_type = other DNA
acagtaccagtaccac

SEQ ID NO: 35279 - DNA, 16 bp, synthetic construct
  misc_feature 1..16: note = synthetic [barcode part1]
  source 1..16: mol_type = other DNA
ataggcctggtggagt

SEQ ID NO: 35280 - DNA, 16 bp, synthetic construct
  misc_feature 1..16: note = synthetic [barcode part1]
  source 1..16: mol_type = other DNA
atcgcaggtaacacct

SEQ ID NO: 35281 - DNA, 16 bp, synthetic construct
  misc_feature 1..16: note = synthetic [barcode part1]
  source 1..16: mol_type = other DNA
gacgactaaccgttgt

SEQ ID NO: 35282 - DNA, 16 bp, synthetic construct
  misc_feature 1..16: note = synthetic [barcode part1]
  source 1..16: mol_type = other DNA
ccaagtaggtgtctac

SEQ ID NO: 35283 - DNA, 16 bp, synthetic construct
  misc_feature 1..16: note = synthetic [barcode part1]
  source 1..16: mol_type = other DNA
ttggatctcttacacg

SEQ ID NO: 35284 - DNA, 16 bp, synthetic construct
  misc_feature 1..16: note = synthetic [barcode part1]
  source 1..16: mol_type = other DNA
tagttcgtgaactgcg

SEQ ID NO: 35285 - DNA, 16 bp, synthetic construct
  misc_feature 1..16: note = synthetic [barcode part1]
  source 1..16: mol_type = other DNA
gccaaccgtactatag

SEQ ID NO: 35286 - DNA, 16 bp, synthetic construct
  misc_feature 1..16: note = synthetic [barcode part1]
  source 1..16: mol_type = other DNA
gtggttatcctaatcc

SEQ ID NO: 35287 - DNA, 16 bp, synthetic construct
  misc_feature 1..16: note = synthetic [barcode part1]
  source 1..16: mol_type = other DNA
ttcggttggttgaggt

SEQ ID NO: 35288 - DNA, 16 bp, synthetic construct
  misc_feature 1..16: note = synthetic [barcode part1]
  source 1..16: mol_type = other DNA
gtcgcctcagaatagt

SEQ ID NO: 35289 - DNA, 16 bp, synthetic construct
  misc_feature 1..16: note = synthetic [barcode part1]
  source 1..16: mol_type = other DNA
tatacttagaccgcct

SEQ ID NO: 35290 - DNA, 16 bp, synthetic construct
  misc_feature 1..16: note = synthetic [barcode part1]
  source 1..16: mol_type = other DNA
tgccggatattagacc

SEQ ID NO: 35291 - DNA, 16 bp, synthetic construct
  misc_feature 1..16: note = synthetic [barcode part1]
  source 1..16: mol_type = other DNA
cctaacactcacaccg

SEQ ID NO: 35292 - DNA, 16 bp, synthetic construct
  misc_feature 1..16: note = synthetic [barcode part1]
  source 1..16: mol_type = other DNA
aggtcttcacaacacg

SEQ ID NO: 35293 - DNA, 16 bp, synthetic construct
  misc_feature 1..16: note = synthetic [barcode part1]
  source 1..16: mol_type = other DNA
tactggaagtggtctc

SEQ ID NO: 35294 - DNA, 16 bp, synthetic construct
  misc_feature 1..16: note = synthetic [barcode part1]
  source 1..16: mol_type = other DNA
aacaccttcgtgtgag

SEQ ID NO: 35295 - DNA, 16 bp, synthetic construct
  misc_feature 1..16: note = synthetic [barcode part1]
  source 1..16: mol_type = other DNA
ccggaatcctaggatt

SEQ ID NO: 35296 - DNA, 16 bp, synthetic construct
  misc_feature 1..16: note = synthetic [barcode part1]
  source 1..16: mol_type = other DNA
ttgaggcgacgttgtt

SEQ ID NO: 35297 - DNA, 16 bp, synthetic construct
  misc_feature 1..16: note = synthetic [barcode part1]
  source 1..16: mol_type = other DNA
atactggcgaccttcc

SEQ ID NO: 35298 - DNA, 16 bp, synthetic construct
  misc_feature 1..16: note = synthetic [barcode part1]
  source 1..16: mol_type = other DNA
atccaagttaccttgc

SEQ ID NO: 35299 - DNA, 16 bp, synthetic construct
  misc_feature 1..16: note = synthetic [barcode part1]
  source 1..16: mol_type = other DNA
cctcacggattcaatt

SEQ ID NO: 35300 - DNA, 16 bp, synthetic construct
  misc_feature 1..16: note = synthetic [barcode part1]
  source 1..16: mol_type = other DNA
tctaacggagtacaag

SEQ ID NO: 35301 - DNA, 16 bp, synthetic construct
  misc_feature 1..16: note = synthetic [barcode part1]
  source 1..16: mol_type = other DNA
agactacgcagtctac

SEQ ID NO: 35302 - DNA, 16 bp, synthetic construct
  misc_feature 1..16: note = synthetic [barcode part1]
  source 1..16: mol_type = other DNA
aaccaaccacaacacc

SEQ ID NO: 35303 - DNA, 16 bp, synthetic construct
  misc_feature 1..16: note = synthetic [barcode part1]
  source 1..16: mol_type = other DNA
cctattactgatacgc

SEQ ID NO: 35304 - DNA, 16 bp, synthetic construct
  misc_feature 1..16: note = synthetic [barcode part1]
  source 1..16: mol_type = other DNA
gaggactagaactgag

SEQ ID NO: 35305 - DNA, 16 bp, synthetic construct
  misc_feature 1..16: note = synthetic [barcode part1]
  source 1..16: mol_type = other DNA
attcttcaccgacgcg

SEQ ID NO: 35306 - DNA, 16 bp, synthetic construct
  misc_feature 1..16: note = synthetic [barcode part1]
  source 1..16: mol_type = other DNA
gaggtgaaggtgatac

SEQ ID NO: 35307 - DNA, 16 bp, synthetic construct
  misc_feature 1..16: note = synthetic [barcode part1]
  source 1..16: mol_type = other DNA
tgtgtactgcagtacg

SEQ ID NO: 35308 - DNA, 16 bp, synthetic construct
  misc_feature 1..16: note = synthetic [barcode part1]
  source 1..16: mol_type = other DNA
tcggtggaagttactc

SEQ ID NO: 35309 - DNA, 16 bp, synthetic construct
  misc_feature 1..16: note = synthetic [barcode part1]
  source 1..16: mol_type = other DNA
tccacactacgaagac

SEQ ID NO: 35310 - DNA, 16 bp, synthetic construct
  misc_feature 1..16: note = synthetic [barcode part1]
  source 1..16: mol_type = other DNA
taggtctcgaggcaag

SEQ ID NO: 35311 - DNA, 16 bp, synthetic construct
  misc_feature 1..16: note = synthetic [barcode part1]
  source 1..16: mol_type = other DNA
agagtctcttgaggtc

SEQ ID NO: 35312 - DNA, 16 bp, synthetic construct
  misc_feature 1..16: note = synthetic [barcode part1]
  source 1..16: mol_type = other DNA
tccacaagtaacagag

SEQ ID NO: 35313 - DNA, 16 bp, synthetic construct
  misc_feature 1..16: note = synthetic [barcode part1]
  source 1..16: mol_type = other DNA
ataggaacgtgaaggc

SEQ ID NO: 35314 - DNA, 16 bp, synthetic construct
  misc_feature 1..16: note = synthetic [barcode part1]
  source 1..16: mol_type = other DNA
cgcgtggttatacagt

SEQ ID NO: 35315 - DNA, 16 bp, synthetic construct
  misc_feature 1..16: note = synthetic [barcode part1]
  source 1..16: mol_type = other DNA
aaccacaacgtgtcac

SEQ ID NO: 35316 - DNA, 16 bp, synthetic construct
  misc_feature 1..16: note = synthetic [barcode part1]
  source 1..16: mol_type = other DNA
gaatcaagaccgagag

SEQ ID NO: 35317 - DNA, 16 bp, synthetic construct
  misc_feature 1..16: note = synthetic [barcode part1]
  source 1..16: mol_type = other DNA
ttcgagtatctaggcg

SEQ ID NO: 35318 - DNA, 16 bp, synthetic construct
  misc_feature 1..16: note = synthetic [barcode part1]
  source 1..16: mol_type = other DNA
aagtggatctaggact

SEQ ID NO: 35319 - DNA, 16 bp, synthetic construct
  misc_feature 1..16: note = synthetic [barcode part1]
  source 1..16: mol_type = other DNA
ttgcgtacgatacgtg

SEQ ID NO: 35320 - DNA, 16 bp, synthetic construct
  misc_feature 1..16: note = synthetic [barcode part1]
  source 1..16: mol_type = other DNA
tgcgcgaacaactatc

SEQ ID NO: 35321 - DNA, 16 bp, synthetic construct
  misc_feature 1..16: note = synthetic [barcode part1]
  source 1..16: mol_type = other DNA
ttgcagacctggttcc

SEQ ID NO: 35322 - DNA, 16 bp, synthetic construct
  misc_feature 1..16: note = synthetic [barcode part1]
  source 1..16: mol_type = other DNA
cgtgaagtcaataacg

SEQ ID NO: 35323 - DNA, 16 bp, synthetic construct
  misc_feature 1..16: note = synthetic [barcode part1]
  source 1..16: mol_type = other DNA
gcgattagatcaagac

SEQ ID NO: 35324 - DNA, 16 bp, synthetic construct
  misc_feature 1..16: note = synthetic [barcode part1]
  source 1..16: mol_type = other DNA
taagtcaacacctcct

SEQ ID NO: 35325 - DNA, 16 bp, synthetic construct
  misc_feature 1..16: note = synthetic [barcode part1]
  source 1..16: mol_type = other DNA
gtggaaccttattgcg

SEQ ID NO: 35326 - DNA, 16 bp, synthetic construct
  misc_feature 1..16: note = synthetic [barcode part1]
  source 1..16: mol_type = other DNA
ttacactccgcacttc

SEQ ID NO: 35327 - DNA, 16 bp, synthetic construct
  misc_feature 1..16: note = synthetic [barcode part1]
  source 1..16: mol_type = other DNA
tctaccaggagtggtt

SEQ ID NO: 35328 - DNA, 16 bp, synthetic construct
  misc_feature 1..16: note = synthetic [barcode part1]
  source 1..16: mol_type = other DNA
cgacgtctacttaccg

SEQ ID NO: 35329 - DNA, 16 bp, synthetic construct
  misc_feature 1..16: note = synthetic [barcode part1]
  source 1..16: mol_type = other DNA
attcactctgtagtgc

SEQ ID NO: 35330 - DNA, 16 bp, synthetic construct
  misc_feature 1..16: note = synthetic [barcode part1]
  source 1..16: mol_type = other DNA
acacacagtgtgtgtc

SEQ ID NO: 35331 - DNA, 16 bp, synthetic construct
  misc_feature 1..16: note = synthetic [barcode part1]
  source 1..16: mol_type = other DNA
gcaagttgtgcagttc

SEQ ID NO: 35332 - DNA, 16 bp, synthetic construct
  misc_feature 1..16: note = synthetic [barcode part1]
  source 1..16: mol_type = other DNA
gtccttcgtatatcag

SEQ ID NO: 35333 - DNA, 16 bp, synthetic construct
  misc_feature 1..16: note = synthetic [barcode part1]
  source 1..16: mol_type = other DNA
atcagtcttctcctcg

SEQ ID NO: 35334 - DNA, 16 bp, synthetic construct
  misc_feature 1..16: note = synthetic [barcode part1]
  source 1..16: mol_type = other DNA
tcctattggcacttag

SEQ ID NO: 35335 - DNA, 16 bp, synthetic construct
  misc_feature 1..16: note = synthetic [barcode part1]
  source 1..16: mol_type = other DNA
cggattaagtcactgc

SEQ ID NO: 35336 - DNA, 16 bp, synthetic construct
  misc_feature 1..16: note = synthetic [barcode part1]
  source 1..16: mol_type = other DNA
cgtagttaggaactag

SEQ ID NO: 35337 - DNA, 16 bp, synthetic construct
  misc_feature 1..16: note = synthetic [barcode part1]
  source 1..16: mol_type = other DNA
accgagattccttgag

SEQ ID NO: 35338 - DNA, 16 bp, synthetic construct
  misc_feature 1..16: note = synthetic [barcode part1]
  source 1..16: mol_type = other DNA
cctagaggtatcacgt

SEQ ID NO: 35339 - DNA, 16 bp, synthetic construct
  misc_feature 1..16: note = synthetic [barcode part1]
  source 1..16: mol_type = other DNA
tggatcggaggtgtgt

SEQ ID NO: 35340 - DNA, 16 bp, synthetic construct
  misc_feature 1..16: note = synthetic [barcode part1]
  source 1..16: mol_type = other DNA
cgcgtgacttagttcc

SEQ ID NO: 35341 - DNA, 16 bp, synthetic construct
  misc_feature 1..16: note = synthetic [barcode part1]
  source 1..16: mol_type = other DNA
acacagttggtacgtc

SEQ ID NO: 35342 - DNA, 16 bp, synthetic construct
  misc_feature 1..16: note = synthetic [barcode part1]
  source 1..16: mol_type = other DNA
agtcactcttgtgttg

SEQ ID NO: 35343 - DNA, 16 bp, synthetic construct
  misc_feature 1..16: note = synthetic [barcode part1]
  source 1..16: mol_type = other DNA
cgaactgagtctggtt

SEQ ID NO: 35344 - DNA, 16 bp, synthetic construct
  misc_feature 1..16: note = synthetic [barcode part1]
  source 1..16: mol_type = other DNA
cacttactgccacggt

SEQ ID NO: 35345 - DNA, 16 bp, synthetic construct
  misc_feature 1..16: note = synthetic [barcode part1]
  source 1..16: mol_type = other DNA
cacctgtagatcttac

SEQ ID NO: 35346 - DNA, 16 bp, synthetic construct
  misc_feature 1..16: note = synthetic [barcode part1]
  source 1..16: mol_type = other DNA
gtctcgttgaacttac

SEQ ID NO: 35347 - DNA, 16 bp, synthetic construct
  misc_feature 1..16: note = synthetic [barcode part1]
  source 1..16: mol_type = other DNA
cgtacgaagacgttct

SEQ ID NO: 35348 - DNA, 16 bp, synthetic construct
  misc_feature 1..16: note = synthetic [barcode part1]
  source 1..16: mol_type = other DNA
cacctcttagtccgag

SEQ ID NO: 35349 - DNA, 16 bp, synthetic construct
  misc_feature 1..16: note = synthetic [barcode part1]
  source 1..16: mol_type = other DNA
gaacctagttcaggtc

SEQ ID NO: 35350 - DNA, 16 bp, synthetic construct
  misc_feature 1..16: note = synthetic [barcode part1]
  source 1..16: mol_type = other DNA
tggtggagaacctacg

SEQ ID NO: 35351 - DNA, 16 bp, synthetic construct
  misc_feature 1..16: note = synthetic [barcode part1]
  source 1..16: mol_type = other DNA
attccgaattgtggcg

SEQ ID NO: 35352 - DNA, 16 bp, synthetic construct
  misc_feature 1..16: note = synthetic [barcode part1]
  source 1..16: mol_type = other DNA
ccgcgagtagaaggtt

SEQ ID NO: 35353 - DNA, 16 bp, synthetic construct
  misc_feature 1..16: note = synthetic [barcode part1]
  source 1..16: mol_type = other DNA
atactggtgcgttgac

SEQ ID NO: 35354 - DNA, 16 bp, synthetic construct
  misc_feature 1..16: note = synthetic [barcode part1]
  source 1..16: mol_type = other DNA
gagactgtgcagactg

SEQ ID NO: 35355 - DNA, 16 bp, synthetic construct
  misc_feature 1..16: note = synthetic [barcode part1]
  source 1..16: mol_type = other DNA
ttgagacagactccac

SEQ ID NO: 35356 - DNA, 16 bp, synthetic construct
  misc_feature 1..16: note = synthetic [barcode part1]
  source 1..16: mol_type = other DNA
tgtcacaaccacaacg

SEQ ID NO: 35357 - DNA, 16 bp, synthetic construct
  misc_feature 1..16: note = synthetic [barcode part1]
  source 1..16: mol_type = other DNA
agagtaacggatactc

SEQ ID NO: 35358 - DNA, 16 bp, synthetic construct
  misc_feature 1..16: note = synthetic [barcode part1]
  source 1..16: mol_type = other DNA
ttcagaaccggagtct

SEQ ID NO: 35359 - DNA, 16 bp, synthetic construct
  misc_feature 1..16: note = synthetic [barcode part1]
  source 1..16: mol_type = other DNA
ttaaccgataccgcag

SEQ ID NO: 35360 - DNA, 16 bp, synthetic construct
  misc_feature 1..16: note = synthetic [barcode part1]
  source 1..16: mol_type = other DNA
aacggaaccgacgtgt

SEQ ID NO: 35361 - DNA, 16 bp, synthetic construct
  misc_feature 1..16: note = synthetic [barcode part1]
  source 1..16: mol_type = other DNA
agatctgtctgtaggc

SEQ ID NO: 35362 - DNA, 16 bp, synthetic construct
  misc_feature 1..16: note = synthetic [barcode part1]
  source 1..16: mol_type = other DNA
gtgtgcaagtctcagt

SEQ ID NO: 35363 - DNA, 16 bp, synthetic construct
  misc_feature 1..16: note = synthetic [barcode part1]
  source 1..16: mol_type = other DNA
caacggagtggacttg

SEQ ID NO: 35364 - DNA, 16 bp, synthetic construct
  misc_feature 1..16: note = synthetic [barcode part1]
  source 1..16: mol_type = other DNA
agacgccttatcctgc

SEQ ID NO: 35365 - DNA, 16 bp, synthetic construct
  misc_feature 1..16: note = synthetic [barcode part1]
  source 1..16: mol_type = other DNA
acgatcaaccgtacac

SEQ ID NO: 35366 - DNA, 16 bp, synthetic construct
  misc_feature 1..16: note = synthetic [barcode part1]
  source 1..16: mol_type = other DNA
tgatataagtcgcgcc

SEQ ID NO: 35367 - DNA, 16 bp, synthetic construct
  misc_feature 1..16: note = synthetic [barcode part1]
  source 1..16: mol_type = other DNA
tccggagtggtattac

SEQ ID NO: 35368 - DNA, 16 bp, synthetic construct
  misc_feature 1..16: note = synthetic [barcode part1]
  source 1..16: mol_type = other DNA
cctgaagttcctctct

SEQ ID NO: 35369 - DNA, 16 bp, synthetic construct
  misc_feature 1..16: note = synthetic [barcode part1]
  source 1..16: mol_type = other DNA
accagtaagtacgtcc

SEQ ID NO: 35370 - DNA, 16 bp, synthetic construct
  misc_feature 1..16: note = synthetic [barcode part1]
  source 1..16: mol_type = other DNA
agtacactgacgtacc

SEQ ID NO: 35371 - DNA, 16 bp, synthetic construct
  misc_feature 1..16: note = synthetic [barcode part1]
  source 1..16: mol_type = other DNA
gtcctcagataatctc

SEQ ID NO: 35372 - DNA, 16 bp, synthetic construct
  misc_feature 1..16: note = synthetic [barcode part1]
  source 1..16: mol_type = other DNA
aattggcaggatcctc

SEQ ID NO: 35373 - DNA, 16 bp, synthetic construct
  misc_feature 1..16: note = synthetic [barcode part1]
  source 1..16: mol_type = other DNA
ccgtgcaagaagatcg

SEQ ID NO: 35374 - DNA, 16 bp, synthetic construct
  misc_feature 1..16: note = synthetic [barcode part1]
  source 1..16: mol_type = other DNA
ccgtaggacttgaatc

SEQ ID NO: 35375 - DNA, 16 bp, synthetic construct
  misc_feature 1..16: note = synthetic [barcode part1]
  source 1..16: mol_type = other DNA
aacgtcgtctccttct

SEQ ID NO: 35376 - DNA, 16 bp, synthetic construct
  misc_feature 1..16: note = synthetic [barcode part1]
  source 1..16: mol_type = other DNA
tcggcaaggcgtaagt

SEQ ID NO: 35377 - DNA, 16 bp, synthetic construct
  misc_feature 1..16: note = synthetic [barcode part1]
  source 1..16: mol_type = other DNA
cgaatacaccgccttc

SEQ ID NO: 35378 - DNA, 16 bp, synthetic construct
  misc_feature 1..16: note = synthetic [barcode part1]
  source 1..16: mol_type = other DNA
tacgttccgagagtgt

SEQ ID NO: 35379 - DNA, 16 bp, synthetic construct
  misc_feature 1..16: note = synthetic [barcode part1]
  source 1..16: mol_type = other DNA
atcggagactgacgtg

SEQ ID NO: 35380 - DNA, 16 bp, synthetic construct
  misc_feature 1..16: note = synthetic [barcode part1]
  source 1..16: mol_type = other DNA
gtgaactcgacaggac

SEQ ID NO: 35381 - DNA, 16 bp, synthetic construct
  misc_feature 1..16: note = synthetic [barcode part1]
  source 1..16: mol_type = other DNA
actctaccgttccgtt

SEQ ID NO: 35382 - DNA, 16 bp, synthetic construct
  misc_feature 1..16: note = synthetic [barcode part1]
  source 1..16: mol_type = other DNA
gtgattacggcacact

SEQ ID NO: 35383 - DNA, 16 bp, synthetic construct
  misc_feature 1..16: note = synthetic [barcode part1]
  source 1..16: mol_type = other DNA
aatccgtggataacag

SEQ ID NO: 35384 - DNA, 16 bp, synthetic construct
  misc_feature 1..16: note = synthetic [barcode part1]
  source 1..16: mol_type = other DNA
tgtgcgcaccaattag

SEQ ID NO: 35385 - DNA, 16 bp, synthetic construct
  misc_feature 1..16: note = synthetic [barcode part1]
  source 1..16: mol_type = other DNA
tcgtggaggtaacggt

SEQ ID NO: 35386 - DNA, 16 bp, synthetic construct
  misc_feature 1..16: note = synthetic [barcode part1]
  source 1..16: mol_type = other DNA
aatccggaattgccgt

SEQ ID NO: 35387 - DNA, 16 bp, synthetic construct
  misc_feature 1..16: note = synthetic [barcode part1]
  source 1..16: mol_type = other DNA
acgaggtagtgcctag

SEQ ID NO: 35388 - DNA, 16 bp, synthetic construct
  misc_feature 1..16: note = synthetic [barcode part1]
  source 1..16: mol_type = other DNA
cgagtataaggtggcc

SEQ ID NO: 35389 - DNA, 16 bp, synthetic construct
  misc_feature 1..16: note = synthetic [barcode part1]
  source 1..16: mol_type = other DNA
ccgtgtcagtagtcct

SEQ ID NO: 35390 - DNA, 16 bp, synthetic construct
  misc_feature 1..16: note = synthetic [barcode part1]
  source 1..16: mol_type = other DNA
tcggttctcacgcaac

SEQ ID NO: 35391 - DNA, 16 bp, synthetic construct
  misc_feature 1..16: note = synthetic [barcode part1]
  source 1..16: mol_type = other DNA
acgaaggaatctagtc

SEQ ID NO: 35392 - DNA, 16 bp, synthetic construct
  misc_feature 1..16: note = synthetic [barcode part1]
  source 1..16: mol_type = other DNA
tcgttgttccgtcact

SEQ ID NO: 35393 - DNA, 16 bp, synthetic construct
  misc_feature 1..16: note = synthetic [barcode part1]
  source 1..16: mol_type = other DNA
cctgacgtaagaatag

SEQ ID NO: 35394 - DNA, 16 bp, synthetic construct
  misc_feature 1..16: note = synthetic [barcode part1]
  source 1..16: mol_type = other DNA
tctaacgtggaagtag

SEQ ID NO: 35395 - DNA, 16 bp, synthetic construct
  misc_feature 1..16: note = synthetic [barcode part1]
  source 1..16: mol_type = other DNA
ttggtggtattcctgt

SEQ ID NO: 35396 - DNA, 16 bp, synthetic construct
  misc_feature 1..16: note = synthetic [barcode part1]
  source 1..16: mol_type = other DNA
cgaacgaatctacctg

SEQ ID NO: 35397 - DNA, 16 bp, synthetic construct
  misc_feature 1..16: note = synthetic [barcode part1]
  source 1..16: mol_type = other DNA
caatctctctctcggt

SEQ ID NO: 35398 - DNA, 16 bp, synthetic construct
  misc_feature 1..16: note = synthetic [barcode part1]
  source 1..16: mol_type = other DNA
tctgatcaccacgcgt

SEQ ID NO: 35399 - DNA, 16 bp, synthetic construct
  misc_feature 1..16: note = synthetic [barcode part1]
  source 1..16: mol_type = other DNA
gattagagacggcaag

SEQ ID NO: 35400 - DNA, 16 bp, synthetic construct
  misc_feature 1..16: note = synthetic [barcode part1]
  source 1..16: mol_type = other DNA
ttactgttgtcgcctc

SEQ ID NO: 35401 - DNA, 16 bp, synthetic construct
  misc_feature 1..16: note = synthetic [barcode part1]
  source 1..16: mol_type = other DNA
attctaccaggagacc

SEQ ID NO: 35402 - DNA, 16 bp, synthetic construct
  misc_feature 1..16: note = synthetic [barcode part1]
  source 1..16: mol_type = other DNA
atcacctgatacctgt

SEQ ID NO: 35403 - DNA, 16 bp, synthetic construct
  misc_feature 1..16: note = synthetic [barcode part1]
  source 1..16: mol_type = other DNA
tgccaaggagtgcagt

SEQ ID NO: 35404 - DNA, 16 bp, synthetic construct
  misc_feature 1..16: note = synthetic [barcode part1]
  source 1..16: mol_type = other DNA
gaattgtccgtatcct

SEQ ID NO: 35405 - DNA, 16 bp, synthetic construct
  misc_feature 1..16: note = synthetic [barcode part1]
  source 1..16: mol_type = other DNA
tcagtcagttgtggtg

SEQ ID NO: 35406 - DNA, 16 bp, synthetic construct
  misc_feature 1..16: note = synthetic [barcode part1]
  source 1..16: mol_type = other DNA
cctactacacgttagt

SEQ ID NO: 35407 - DNA, 16 bp, synthetic construct
  misc_feature 1..16: note = synthetic [barcode part1]
  source 1..16: mol_type = other DNA
taattccgcgtattgc

SEQ ID NO: 35408 - DNA, 16 bp, synthetic construct
  misc_feature 1..16: note = synthetic [barcode part1]
  source 1..16: mol_type = other DNA
gttatctgaactcgtc

SEQ ID NO: 35409 - DNA, 16 bp, synthetic construct
  misc_feature 1..16: note = synthetic [barcode part1]
  source 1..16: mol_type = other DNA
gtacggttgcgtaact

SEQ ID NO: 35410 - DNA, 16 bp, synthetic construct
  misc_feature 1..16: note = synthetic [barcode part1]
  source 1..16: mol_type = other DNA
tctgttgtacgagtct

SEQ ID NO: 35411 - DNA, 16 bp, synthetic construct
  misc_feature 1..16: note = synthetic [barcode part1]
  source 1..16: mol_type = other DNA
acttcgtgttcggatt

SEQ ID NO: 35412 - DNA, 16 bp, synthetic construct
  misc_feature 1..16: note = synthetic [barcode part1]
  source 1..16: mol_type = other DNA
aattaacgtcgcgacc

SEQ ID NO: 35413 - DNA, 16 bp, synthetic construct
  misc_feature 1..16: note = synthetic [barcode part1]
  source 1..16: mol_type = other DNA
agagtaagaattcgcc

SEQ ID NO: 35414 - DNA, 16 bp, synthetic construct
  misc_feature 1..16: note = synthetic [barcode part1]
  source 1..16: mol_type = other DNA
tacgtaccaacgtcag

SEQ ID NO: 35415 - DNA, 16 bp, synthetic construct
  misc_feature 1..16: note = synthetic [barcode part1]
  source 1..16: mol_type = other DNA
tggaggaaccggtatc

SEQ ID NO: 35416 - DNA, 16 bp, synthetic construct
  misc_feature 1..16: note = synthetic [barcode part1]
  source 1..16: mol_type = other DNA
acgaacgcagaacctg

SEQ ID NO: 35417 - DNA, 16 bp, synthetic construct
  misc_feature 1..16: note = synthetic [barcode part1]
  source 1..16: mol_type = other DNA
ccgtgcactccaattg

SEQ ID NO: 35418 - DNA, 16 bp, synthetic construct
  misc_feature 1..16: note = synthetic [barcode part1]
  source 1..16: mol_type = other DNA
gtagaatacggcagag

SEQ ID NO: 35419 - DNA, 16 bp, synthetic construct
  misc_feature 1..16: note = synthetic [barcode part1]
  source 1..16: mol_type = other DNA
tgttgagttacgtctc

SEQ ID NO: 35420 - DNA, 16 bp, synthetic construct
  misc_feature 1..16: note = synthetic [barcode part1]
  source 1..16: mol_type = other DNA
atagtaccaacgccgt

SEQ ID NO: 35421 - DNA, 16 bp, synthetic construct
  misc_feature 1..16: note = synthetic [barcode part1]
  source 1..16: mol_type = other DNA
gaatctagacagtggt

SEQ ID NO: 35422 - DNA, 16 bp, synthetic construct
  misc_feature 1..16: note = synthetic [barcode part1]
  source 1..16: mol_type = other DNA
agtactctagaagacg

SEQ ID NO: 35423 - DNA, 16 bp, synthetic construct
  misc_feature 1..16: note = synthetic [barcode part1]
  source 1..16: mol_type = other DNA
ccgtccgaatattatc

SEQ ID NO: 35424 - DNA, 16 bp, synthetic construct
  misc_feature 1..16: note = synthetic [barcode part1]
  source 1..16: mol_type = other DNA
gatatccgtcttctag

SEQ ID NO: 35425 - DNA, 16 bp, synthetic construct
  misc_feature 1..16: note = synthetic [barcode part1]
  source 1..16: mol_type = other DNA
acaggccgtcaagaac

SEQ ID NO: 35426 - DNA, 16 bp, synthetic construct
  misc_feature 1..16: note = synthetic [barcode part1]
  source 1..16: mol_type = other DNA
atagagacaatctggc

SEQ ID NO: 35427 - DNA, 16 bp, synthetic construct
  misc_feature 1..16: note = synthetic [barcode part1]
  source 1..16: mol_type = other DNA
tcactccaattgcgcg

SEQ ID NO: 35428 - DNA, 16 bp, synthetic construct
  misc_feature 1..16: note = synthetic [barcode part1]
  source 1..16: mol_type = other DNA
actcaccaacgttatc

SEQ ID NO: 35429 - DNA, 16 bp, synthetic construct
  misc_feature 1..16: note = synthetic [barcode part1]
  source 1..16: mol_type = other DNA
aactctgaagtgaacg

SEQ ID NO: 35430 - DNA, 16 bp, synthetic construct
  misc_feature 1..16: note = synthetic [barcode part1]
  source 1..16: mol_type = other DNA
gtgtggcctaaggaac

SEQ ID NO: 35431 - DNA, 16 bp, synthetic construct
  misc_feature 1..16: note = synthetic [barcode part1]
  source 1..16: mol_type = other DNA
gacggttgtgtgaggt

SEQ ID NO: 35432 - DNA, 16 bp, synthetic construct
  misc_feature 1..16: note = synthetic [barcode part1]
  source 1..16: mol_type = other DNA
tcagtacacgtaccag

SEQ ID NO: 35433 - DNA, 16 bp, synthetic construct
  misc_feature 1..16: note = synthetic [barcode part1]
  source 1..16: mol_type = other DNA
tgattcgacggtctag

SEQ ID NO: 35434 - DNA, 16 bp, synthetic construct
  misc_feature 1..16: note = synthetic [barcode part1]
  source 1..16: mol_type = other DNA
cgaccacttgtgtaag

SEQ ID NO: 35435 - DNA, 16 bp, synthetic construct
  misc_feature 1..16: note = synthetic [barcode part1]
  source 1..16: mol_type = other DNA
tccgttgagtctgtgc

SEQ ID NO: 35436 - DNA, 16 bp, synthetic construct
  misc_feature 1..16: note = synthetic [barcode part1]
  source 1..16: mol_type = other DNA
tgactctataccgact

SEQ ID NO: 35437 - DNA, 16 bp, synthetic construct
  misc_feature 1..16: note = synthetic [barcode part1]
  source 1..16: mol_type = other DNA
taactcgacgaaggcg

SEQ ID NO: 35438 - DNA, 16 bp, synthetic construct
  misc_feature 1..16: note = synthetic [barcode part1]
  source 1..16: mol_type = other DNA
tcaacacgccgtatag

SEQ ID NO: 35439 - DNA, 16 bp, synthetic construct
  misc_feature 1..16: note = synthetic [barcode part1]
  source 1..16: mol_type = other DNA
gtcttaggcgtatacg

SEQ ID NO: 35440 - DNA, 16 bp, synthetic construct
  misc_feature 1..16: note = synthetic [barcode part1]
  source 1..16: mol_type = other DNA
gttaccaacgtcctcg

SEQ ID NO: 35441 - DNA, 16 bp, synthetic construct
  misc_feature 1..16: note = synthetic [barcode part1]
  source 1..16: mol_type = other DNA
tctgttacggtctctc

SEQ ID NO: 35442 - DNA, 16 bp, synthetic construct
  misc_feature 1..16: note = synthetic [barcode part1]
  source 1..16: mol_type = other DNA
agacggaatcctggac

SEQ ID NO: 35443 - DNA, 16 bp, synthetic construct
  misc_feature 1..16: note = synthetic [barcode part1]
  source 1..16: mol_type = other DNA
ataccgaaggaattgc

SEQ ID NO: 35444 - DNA, 16 bp, synthetic construct
  misc_feature 1..16: note = synthetic [barcode part1]
  source 1..16: mol_type = other DNA
cagtaacgtataggac

SEQ ID NO: 35445 - DNA, 16 bp, synthetic construct
  misc_feature 1..16: note = synthetic [barcode part1]
  source 1..16: mol_type = other DNA
tggacacacgtaacct

SEQ ID NO: 35446 - DNA, 16 bp, synthetic construct
  misc_feature 1..16: note = synthetic [barcode part1]
  source 1..16: mol_type = other DNA
acacttgcctatcgcg

SEQ ID NO: 35447 - DNA, 16 bp, synthetic construct
  misc_feature 1..16: note = synthetic [barcode part1]
  source 1..16: mol_type = other DNA
atccggaaggcctatt

SEQ ID NO: 35448 - DNA, 16 bp, synthetic construct
  misc_feature 1..16: note = synthetic [barcode part1]
  source 1..16: mol_type = other DNA
taggatcactgcagtc

SEQ ID NO: 35449 - DNA, 16 bp, synthetic construct
  misc_feature 1..16: note = synthetic [barcode part1]
  source 1..16: mol_type = other DNA
cagtacggtcactcct

SEQ ID NO: 35450 - DNA, 16 bp, synthetic construct
  misc_feature 1..16: note = synthetic [barcode part1]
  source 1..16: mol_type = other DNA
agtgtaagaatcgtcg

SEQ ID NO: 35451 - DNA, 16 bp, synthetic construct
  misc_feature 1..16: note = synthetic [barcode part1]
  source 1..16: mol_type = other DNA
gtgtacgttaaccggt

SEQ ID NO: 35452 - DNA, 16 bp, synthetic construct
  misc_feature 1..16: note = synthetic [barcode part1]
  source 1..16: mol_type = other DNA
aataaccgccgttggt

SEQ ID NO: 35453 - DNA, 16 bp, synthetic construct
  misc_feature 1..16: note = synthetic [barcode part1]
  source 1..16: mol_type = other DNA
actgccttacttgaac

SEQ ID NO: 35454 - DNA, 16 bp, synthetic construct
  misc_feature 1..16: note = synthetic [barcode part1]
  source 1..16: mol_type = other DNA
tgagaccaaggaaggt

SEQ ID NO: 35455 - DNA, 16 bp, synthetic construct
  misc_feature 1..16: note = synthetic [barcode part1]
  source 1..16: mol_type = other DNA
tactggttggtgtgtg

SEQ ID NO: 35456 - DNA, 16 bp, synthetic construct
  misc_feature 1..16: note = synthetic [barcode part1]
  source 1..16: mol_type = other DNA
gttgtgtatcgtcttg

SEQ ID NO: 35457 - DNA, 16 bp, synthetic construct
  misc_feature 1..16: note = synthetic [barcode part1]
  source 1..16: mol_type = other DNA
tcttacgtggtgactt

SEQ ID NO: 35458 - DNA, 16 bp, synthetic construct
  misc_feature 1..16: note = synthetic [barcode part1]
  source 1..16: mol_type = other DNA
caacactgatagacag

SEQ ID NO: 35459 - DNA, 16 bp, synthetic construct
  misc_feature 1..16: note = synthetic [barcode part1]
  source 1..16: mol_type = other DNA
ccttctcagttgacct

SEQ ID NO: 35460 - DNA, 16 bp, synthetic construct
  misc_feature 1..16: note = synthetic [barcode part1]
  source 1..16: mol_type = other DNA
ttgatcctattggcgt

SEQ ID NO: 35461 - DNA, 16 bp, synthetic construct
  misc_feature 1..16: note = synthetic [barcode part1]
  source 1..16: mol_type = other DNA
ccaacttcgtctcgtt

SEQ ID NO: 35462 - DNA, 16 bp, synthetic construct
  misc_feature 1..16: note = synthetic [barcode part1]
  source 1..16: mol_type = other DNA
gcctctgacaagaact

SEQ ID NO: 35463 - DNA, 16 bp, synthetic construct
  misc_feature 1..16: note = synthetic [barcode part1]
  source 1..16: mol_type = other DNA
tactcacgtctgtcct

SEQ ID NO: 35464 - DNA, 16 bp, synthetic construct
  misc_feature 1..16: note = synthetic [barcode part1]
  source 1..16: mol_type = other DNA
ttcgacaccgttagag

SEQ ID NO: 35465 - DNA, 16 bp, synthetic construct
  misc_feature 1..16: note = synthetic [barcode part1]
  source 1..16: mol_type = other DNA
cacctcgcgaacactt

SEQ ID NO: 35466 - DNA, 16 bp, synthetic construct
  misc_feature 1..16: note = synthetic [barcode part1]
  source 1..16: mol_type = other DNA
cagttagttgaccgac

SEQ ID NO: 35467 - DNA, 16 bp, synthetic construct
  misc_feature 1..16: note = synthetic [barcode part1]
  source 1..16: mol_type = other DNA
aagtcgtaacacgaac

SEQ ID NO: 35468 - DNA, 16 bp, synthetic construct
  misc_feature 1..16: note = synthetic [barcode part1]
  source 1..16: mol_type = other DNA
taattggcgcgtgtgt

SEQ ID NO: 35469 - DNA, 16 bp, synthetic construct
  misc_feature 1..16: note = synthetic [barcode part1]
  source 1..16: mol_type = other DNA
tcggtaacactaggtc

SEQ ID NO: 35470 - DNA, 16 bp, synthetic construct
  misc_feature 1..16: note = synthetic [barcode part1]
  source 1..16: mol_type = other DNA
taaggaaccgaaggac

SEQ ID NO: 35471 - DNA, 16 bp, synthetic construct
  misc_feature 1..16: note = synthetic [barcode part1]
  source 1..16: mol_type = other DNA
cctcaactacggatcc

SEQ ID NO: 35472 - DNA, 16 bp, synthetic construct
  misc_feature 1..16: note = synthetic [barcode part1]
  source 1..16: mol_type = other DNA
ttaagagtggcctctg

SEQ ID NO: 35473 - DNA, 16 bp, synthetic construct
  misc_feature 1..16: note = synthetic [barcode part1]
  source 1..16: mol_type = other DNA
gttcgtatcaggtgtg

SEQ ID NO: 35474 - DNA, 16 bp, synthetic construct
  misc_feature 1..16: note = synthetic [barcode part1]
  source 1..16: mol_type = other DNA
ccggaattcacttact

SEQ ID NO: 35475 - DNA, 16 bp, synthetic construct
  misc_feature 1..16: note = synthetic [barcode part1]
  source 1..16: mol_type = other DNA
tagacgtagaacaacc

SEQ ID NO: 35476 - DNA, 16 bp, synthetic construct
  misc_feature 1..16: note = synthetic [barcode part1]
  source 1..16: mol_type = other DNA
ataactgccggttctt

SEQ ID NO: 35477 - DNA, 16 bp, synthetic construct
  misc_feature 1..16: note = synthetic [barcode part1]
  source 1..16: mol_type = other DNA
actatctggatctgtc

SEQ ID NO: 35478 - DNA, 16 bp, synthetic construct
  misc_feature 1..16: note = synthetic [barcode part1]
  source 1..16: mol_type = other DNA
aaccgattggtatcgc

SEQ ID NO: 35479 - DNA, 16 bp, synthetic construct
  misc_feature 1..16: note = synthetic [barcode part1]
  source 1..16: mol_type = other DNA
tcgtcctaaggtaacg

SEQ ID NO: 35480 - DNA, 16 bp, synthetic construct
  misc_feature 1..16: note = synthetic [barcode part1]
  source 1..16: mol_type = other DNA
accgttaatcagaccg

SEQ ID NO: 35481 - DNA, 16 bp, synthetic construct
  misc_feature 1..16: note = synthetic [barcode part1]
  source 1..16: mol_type = other DNA
ccttcctaatctcggt

SEQ ID NO: 35482 - DNA, 16 bp, synthetic construct
  misc_feature 1..16: note = synthetic [barcode part1]
  source 1..16: mol_type = other DNA
tgaacaagtggtgccg

SEQ ID NO: 35483 - DNA, 16 bp, synthetic construct
  misc_feature 1..16: note = synthetic [barcode part1]
  source 1..16: mol_type = other DNA
gttgaggattacgtag

SEQ ID NO: 35484 - DNA, 16 bp, synthetic construct
  misc_feature 1..16: note = synthetic [barcode part1]
  source 1..16: mol_type = other DNA
gtgcaatcgactgtac

SEQ ID NO: 35485 - DNA, 16 bp, synthetic construct
  misc_feature 1..16: note = synthetic [barcode part1]
  source 1..16: mol_type = other DNA
gaggaatctacgtagt

SEQ ID NO: 35486 - DNA, 16 bp, synthetic construct
  misc_feature 1..16: note = synthetic [barcode part1]
  source 1..16: mol_type = other DNA
cgagatcagaaggagt

SEQ ID NO: 35487 - DNA, 16 bp, synthetic construct
  misc_feature 1..16: note = synthetic [barcode part1]
  source 1..16: mol_type = other DNA
agattcgttcgtaggc

SEQ ID NO: 35488 - DNA, 16 bp, synthetic construct
  misc_feature 1..16: note = synthetic [barcode part1]
  source 1..16: mol_type = other DNA
taagtgtagtccgcgt

SEQ ID NO: 35489 - DNA, 16 bp, synthetic construct
  misc_feature 1..16: note = synthetic [barcode part1]
  source 1..16: mol_type = other DNA
cactgaggagtcactt

SEQ ID NO: 35490 - DNA, 16 bp, synthetic construct
  misc_feature 1..16: note = synthetic [barcode part1]
  source 1..16: mol_type = other DNA
tgcgcagtccaacttc

SEQ ID NO: 35491 - DNA, 16 bp, synthetic construct
  misc_feature 1..16: note = synthetic [barcode part1]
  source 1..16: mol_type = other DNA
taacgtggagacggtc

SEQ ID NO: 35492 - DNA, 16 bp, synthetic construct
  misc_feature 1..16: note = synthetic [barcode part1]
  source 1..16: mol_type = other DNA
cggtgaatagagtgag

SEQ ID NO: 35493 - DNA, 16 bp, synthetic construct
  misc_feature 1..16: note = synthetic [barcode part1]
  source 1..16: mol_type = other DNA
cggtgtactctattgt

SEQ ID NO: 35494 - DNA, 16 bp, synthetic construct
  misc_feature 1..16: note = synthetic [barcode part1]
  source 1..16: mol_type = other DNA
gtgttcctaacctaac

SEQ ID NO: 35495 - DNA, 16 bp, synthetic construct
  misc_feature 1..16: note = synthetic [barcode part1]
  source 1..16: mol_type = other DNA
gactcgcctattccag

SEQ ID NO: 35496 - DNA, 16 bp, synthetic construct
  misc_feature 1..16: note = synthetic [barcode part1]
  source 1..16: mol_type = other DNA
gaccgtaccaattctt

SEQ ID NO: 35497 - DNA, 16 bp, synthetic construct
  misc_feature 1..16: note = synthetic [barcode part1]
  source 1..16: mol_type = other DNA
atctcgaattacggcg

SEQ ID NO: 35498 - DNA, 16 bp, synthetic construct
  misc_feature 1..16: note = synthetic [barcode part1]
  source 1..16: mol_type = other DNA
tactgccgcaactacc

SEQ ID NO: 35499 - DNA, 16 bp, synthetic construct
  misc_feature 1..16: note = synthetic [barcode part1]
  source 1..16: mol_type = other DNA
tgaccagtacacacgt

SEQ ID NO: 35500 - DNA, 16 bp, synthetic construct
  misc_feature 1..16: note = synthetic [barcode part1]
  source 1..16: mol_type = other DNA
ccacgtggaagtcaag

SEQ ID NO: 35501 - DNA, 16 bp, synthetic construct
  misc_feature 1..16: note = synthetic [barcode part1]
  source 1..16: mol_type = other DNA
acggaacacgaatccg

SEQ ID NO: 35502 - DNA, 16 bp, synthetic construct
  misc_feature 1..16: note = synthetic [barcode part1]
  source 1..16: mol_type = other DNA
tcttcgccaagagtag

SEQ ID NO: 35503 - DNA, 16 bp, synthetic construct
  misc_feature 1..16: note = synthetic [barcode part1]
  source 1..16: mol_type = other DNA
agtctgtgtctcaccg

SEQ ID NO: 35504 - DNA, 16 bp, synthetic construct
  misc_feature 1..16: note = synthetic [barcode part1]
  source 1..16: mol_type = other DNA
tcgtccttagttcctg

SEQ ID NO: 35505 - DNA, 16 bp, synthetic construct
  misc_feature 1..16: note = synthetic [barcode part1]
  source 1..16: mol_type = other DNA
tgatacgcagtaagac

SEQ ID NO: 35506 - DNA, 16 bp, synthetic construct
  misc_feature 1..16: note = synthetic [barcode part1]
  source 1..16: mol_type = other DNA
cgccagaattcttatc

SEQ ID NO: 35507 - DNA, 16 bp, synthetic construct
  misc_feature 1..16: note = synthetic [barcode part1]
  source 1..16: mol_type = other DNA
gccaattcgataccag

SEQ ID NO: 35508 - DNA, 16 bp, synthetic construct
  misc_feature 1..16: note = synthetic [barcode part1]
  source 1..16: mol_type = other DNA
actcttgcactggatt

SEQ ID NO: 35509 - DNA, 16 bp, synthetic construct
  misc_feature 1..16: note = synthetic [barcode part1]
  source 1..16: mol_type = other DNA
ttgattctaggcctac

SEQ ID NO: 35510 - DNA, 16 bp, synthetic construct
  misc_feature 1..16: note = synthetic [barcode part1]
  source 1..16: mol_type = other DNA
tattgcctggacttgt

SEQ ID NO: 35511 - DNA, 16 bp, synthetic construct
  misc_feature 1..16: note = synthetic [barcode part1]
  source 1..16: mol_type = other DNA
gattgaagatacaccg

SEQ ID NO: 35512 - DNA, 16 bp, synthetic construct
  misc_feature 1..16: note = synthetic [barcode part1]
  source 1..16: mol_type = other DNA
ttacttggcagtgttc

SEQ ID NO: 35513 - DNA, 16 bp, synthetic construct
  misc_feature 1..16: note = synthetic [barcode part1]
  source 1..16: mol_type = other DNA
atcttgtacgactacc

SEQ ID NO: 35514 - DNA, 16 bp, synthetic construct
  misc_feature 1..16: note = synthetic [barcode part1]
  source 1..16: mol_type = other DNA
cgttgcgttaggattg

SEQ ID NO: 35515 - DNA, 16 bp, synthetic construct
  misc_feature 1..16: note = synthetic [barcode part1]
  source 1..16: mol_type = other DNA
tgactgatacgtgtgc

SEQ ID NO: 35516 - DNA, 16 bp, synthetic construct
  misc_feature 1..16: note = synthetic [barcode part1]
  source 1..16: mol_type = other DNA
tacgtgaggattagac

SEQ ID NO: 35517 - DNA, 16 bp, synthetic construct
  misc_feature 1..16: note = synthetic [barcode part1]
  source 1..16: mol_type = other DNA
ccaggtgcgagataac

SEQ ID NO: 35518 - DNA, 16 bp, synthetic construct
  misc_feature 1..16: note = synthetic [barcode part1]
  source 1..16: mol_type = other DNA
gattcactctgtcgcg

SEQ ID NO: 35519 - DNA, 16 bp, synthetic construct
  misc_feature 1..16: note = synthetic [barcode part1]
  source 1..16: mol_type = other DNA
gcgttcgtattattcg

SEQ ID NO: 35520 - DNA, 16 bp, synthetic construct
  misc_feature 1..16: note = synthetic [barcode part1]
  source 1..16: mol_type = other DNA
tgaaggaacgccggtt

SEQ ID NO: 35521 - DNA, 16 bp, synthetic construct
  misc_feature 1..16: note = synthetic [barcode part1]
  source 1..16: mol_type = other DNA
tctattaggaggccgt

SEQ ID NO: 35522 - DNA, 16 bp, synthetic construct
  misc_feature 1..16: note = synthetic [barcode part1]
  source 1..16: mol_type = other DNA
tgactctcgaccgtgt

SEQ ID NO: 35523 - DNA, 16 bp, synthetic construct
  misc_feature 1..16: note = synthetic [barcode part1]
  source 1..16: mol_type = other DNA
gtgcgaatccggtaag

SEQ ID NO: 35524 - DNA, 16 bp, synthetic construct
  misc_feature 1..16: note = synthetic [barcode part1]
  source 1..16: mol_type = other DNA
tggtcctgagattgac

SEQ ID NO: 35525 - DNA, 16 bp, synthetic construct
  misc_feature 1..16: note = synthetic [barcode part1]
  source 1..16: mol_type = other DNA
caatcacttatcgtcg

SEQ ID NO: 35526 - DNA, 16 bp, synthetic construct
  misc_feature 1..16: note = synthetic [barcode part1]
  source 1..16: mol_type = other DNA
ttaccgtcctggacgt

SEQ ID NO: 35527 - DNA, 16 bp, synthetic construct
  misc_feature 1..16: note = synthetic [barcode part1]
  source 1..16: mol_type = other DNA
tcgacttgtgactact

SEQ ID NO: 35528 - DNA, 16 bp, synthetic construct
  misc_feature 1..16: note = synthetic [barcode part1]
  source 1..16: mol_type = other DNA
gccaagttgaaccgtt

SEQ ID NO: 35529 - DNA, 16 bp, synthetic construct
  misc_feature 1..16: note = synthetic [barcode part1]
  source 1..16: mol_type = other DNA
atacgcgtgactggtt

SEQ ID NO: 35530 - DNA, 16 bp, synthetic construct
  misc_feature 1..16: note = synthetic [barcode part1]
  source 1..16: mol_type = other DNA
tcgttgcgcagattcc

SEQ ID NO: 35531 - DNA, 16 bp, synthetic construct
  misc_feature 1..16: note = synthetic [barcode part1]
  source 1..16: mol_type = other DNA
tggacgttcttactgt

SEQ ID NO: 35532 - DNA, 16 bp, synthetic construct
  misc_feature 1..16: note = synthetic [barcode part1]
  source 1..16: mol_type = other DNA
tagaagtggactatcg

SEQ ID NO: 35533 - DNA, 16 bp, synthetic construct
  misc_feature 1..16: note = synthetic [barcode part1]
  source 1..16: mol_type = other DNA
cgtgtcgtaactgtag

SEQ ID NO: 35534 - DNA, 16 bp, synthetic construct
  misc_feature 1..16: note = synthetic [barcode part1]
  source 1..16: mol_type = other DNA
cgtgtaagtctcttac

SEQ ID NO: 35535 - DNA, 16 bp, synthetic construct
  misc_feature 1..16: note = synthetic [barcode part1]
  source 1..16: mol_type = other DNA
cgcgtccagactattc

SEQ ID NO: 35536 - DNA, 16 bp, synthetic construct
  misc_feature 1..16: note = synthetic [barcode part1]
  source 1..16: mol_type = other DNA
ccttgacgactatatc

SEQ ID NO: 35537 - DNA, 16 bp, synthetic construct
  misc_feature 1..16: note = synthetic [barcode part1]
  source 1..16: mol_type = other DNA
gcaggtcaaggactac

SEQ ID NO: 35538 - DNA, 16 bp, synthetic construct
  misc_feature 1..16: note = synthetic [barcode part1]
  source 1..16: mol_type = other DNA
tcttgtagtgcgagac

SEQ ID NO: 35539 - DNA, 16 bp, synthetic construct
  misc_feature 1..16: note = synthetic [barcode part1]
  source 1..16: mol_type = other DNA
tggtgactcaggttgt

SEQ ID NO: 35540 - DNA, 16 bp, synthetic construct
  misc_feature 1..16: note = synthetic [barcode part1]
  source 1..16: mol_type = other DNA
tgtacagattcctcac

SEQ ID NO: 35541 - DNA, 16 bp, synthetic construct
  misc_feature 1..16: note = synthetic [barcode part1]
  source 1..16: mol_type = other DNA
aggagacgagttagac

SEQ ID NO: 35542 - DNA, 16 bp, synthetic construct
  misc_feature 1..16: note = synthetic [barcode part1]
  source 1..16: mol_type = other DNA
gcaactactctaactc

SEQ ID NO: 35543 - DNA, 16 bp, synthetic construct
  misc_feature 1..16: note = synthetic [barcode part1]
  source 1..16: mol_type = other DNA
attcctggacaactct

SEQ ID NO: 35544 - DNA, 16 bp, synthetic construct
  misc_feature 1..16: note = synthetic [barcode part1]
  source 1..16: mol_type = other DNA
tgttcactctgaggtt

SEQ ID NO: 35545 - DNA, 16 bp, synthetic construct
  misc_feature 1..16: note = synthetic [barcode part1]
  source 1..16: mol_type = other DNA
aaggtcgatacagttg

SEQ ID NO: 35546 - DNA, 16 bp, synthetic construct
  misc_feature 1..16: note = synthetic [barcode part1]
  source 1..16: mol_type = other DNA
aactcacacggtggag

SEQ ID NO: 35547 - DNA, 16 bp, synthetic construct
  misc_feature 1..16: note = synthetic [barcode part1]
  source 1..16: mol_type = other DNA
acacctaaccttactg

SEQ ID NO: 35548 - DNA, 16 bp, synthetic construct
  misc_feature 1..16: note = synthetic [barcode part1]
  source 1..16: mol_type = other DNA
gtgtacaacgcgtatc

SEQ ID NO: 35549 - DNA, 16 bp, synthetic construct
  misc_feature 1..16: note = synthetic [barcode part1]
  source 1..16: mol_type = other DNA
atcgtccttacaagtc

SEQ ID NO: 35550 - DNA, 16 bp, synthetic construct
  misc_feature 1..16: note = synthetic [barcode part1]
  source 1..16: mol_type = other DNA
atctgccgaactctgc

SEQ ID NO: 35551 - DNA, 16 bp, synthetic construct
  misc_feature 1..16: note = synthetic [barcode part1]
  source 1..16: mol_type = other DNA
aactcttaccagaggc

SEQ ID NO: 35552 - DNA, 16 bp, synthetic construct
  misc_feature 1..16: note = synthetic [barcode part1]
  source 1..16: mol_type = other DNA
accgttctaagtatcc

SEQ ID NO: 35553 - DNA, 16 bp, synthetic construct
  misc_feature 1..16: note = synthetic [barcode part1]
  source 1..16: mol_type = other DNA
actggcgataaggcac

SEQ ID NO: 35554 - DNA, 16 bp, synthetic construct
  misc_feature 1..16: note = synthetic [barcode part1]
  source 1..16: mol_type = other DNA
acgcagtaagaggcct

SEQ ID NO: 35555 - DNA, 16 bp, synthetic construct
  misc_feature 1..16: note = synthetic [barcode part1]
  source 1..16: mol_type = other DNA
aaggacgacctaatac

SEQ ID NO: 35556 - DNA, 16 bp, synthetic construct
  misc_feature 1..16: note = synthetic [barcode part1]
  source 1..16: mol_type = other DNA
aacggttgaggcacac

SEQ ID NO: 35557 - DNA, 16 bp, synthetic construct
  misc_feature 1..16: note = synthetic [barcode part1]
  source 1..16: mol_type = other DNA
gtaactgttggcctcc

SEQ ID NO: 35558 - DNA, 16 bp, synthetic construct
  misc_feature 1..16: note = synthetic [barcode part1]
  source 1..16: mol_type = other DNA
cacgagtagacctact

SEQ ID NO: 35559 - DNA, 16 bp, synthetic construct
  misc_feature 1..16: note = synthetic [barcode part1]
  source 1..16: mol_type = other DNA
tacttggtgacaagag

SEQ ID NO: 35560 - DNA, 16 bp, synthetic construct
  misc_feature 1..16: note = synthetic [barcode part1]
  source 1..16: mol_type = other DNA
tagaccagtcaagtcc

SEQ ID NO: 35561 - DNA, 16 bp, synthetic construct
  misc_feature 1..16: note = synthetic [barcode part1]
  source 1..16: mol_type = other DNA
gcctatatcagacacg

SEQ ID NO: 35562 - DNA, 16 bp, synthetic construct
  misc_feature 1..16: note = synthetic [barcode part1]
  source 1..16: mol_type = other DNA
acagtatcgtgcacgt

SEQ ID NO: 35563 - DNA, 16 bp, synthetic construct
  misc_feature 1..16: note = synthetic [barcode part1]
  source 1..16: mol_type = other DNA
atcgtccagtgtctgc

SEQ ID NO: 35564 - DNA, 16 bp, synthetic construct
  misc_feature 1..16: note = synthetic [barcode part1]
  source 1..16: mol_type = other DNA
gtctccacggattgtc

SEQ ID NO: 35565 - DNA, 16 bp, synthetic construct
  misc_feature 1..16: note = synthetic [barcode part1]
  source 1..16: mol_type = other DNA
tcgtattgacgatctc

SEQ ID NO: 35566 - DNA, 16 bp, synthetic construct
  misc_feature 1..16: note = synthetic [barcode part1]
  source 1..16: mol_type = other DNA
caatcttcgtaatcgc

SEQ ID NO: 35567 - DNA, 16 bp, synthetic construct
  misc_feature 1..16: note = synthetic [barcode part1]
  source 1..16: mol_type = other DNA
cagtggatactacctg

SEQ ID NO: 35568 - DNA, 16 bp, synthetic construct
  misc_feature 1..16: note = synthetic [barcode part1]
  source 1..16: mol_type = other DNA
cctaactgtatcgact

SEQ ID NO: 35569 - DNA, 16 bp, synthetic construct
  misc_feature 1..16: note = synthetic [barcode part1]
  source 1..16: mol_type = other DNA
cctgaccggaattagt

SEQ ID NO: 35570 - DNA, 16 bp, synthetic construct
  misc_feature 1..16: note = synthetic [barcode part1]
  source 1..16: mol_type = other DNA
gccggataggttattc

SEQ ID NO: 35571 - DNA, 16 bp, synthetic construct
  misc_feature 1..16: note = synthetic [barcode part1]
  source 1..16: mol_type = other DNA
gtcgccttgcctaagt

SEQ ID NO: 35572 - DNA, 16 bp, synthetic construct
  misc_feature 1..16: note = synthetic [barcode part1]
  source 1..16: mol_type = other DNA
cgtgcaactgccactt

SEQ ID NO: 35573 - DNA, 16 bp, synthetic construct
  misc_feature 1..16: note = synthetic [barcode part1]
  source 1..16: mol_type = other DNA
tgaagtcactgactgc

SEQ ID NO: 35574 - DNA, 16 bp, synthetic construct
  misc_feature 1..16: note = synthetic [barcode part1]
  source 1..16: mol_type = other DNA
taggaccgaagttcct

SEQ ID NO: 35575 - DNA, 16 bp, synthetic construct
  misc_feature 1..16: note = synthetic [barcode part1]
  source 1..16: mol_type = other DNA
tcttacaccgaattgc

SEQ ID NO: 35576 - DNA, 16 bp, synthetic construct
  misc_feature 1..16: note = synthetic [barcode part1]
  source 1..16: mol_type = other DNA
attcctaggtgcagac

SEQ ID NO: 35577 - DNA, 16 bp, synthetic construct
  misc_feature 1..16: note = synthetic [barcode part1]
  source 1..16: mol_type = other DNA
aagtaccggacaacgc

SEQ ID NO: 35578 - DNA, 16 bp, synthetic construct
  misc_feature 1..16: note = synthetic [barcode part1]
  source 1..16: mol_type = other DNA
cgtcggaacaagaacc

SEQ ID NO: 35579 - DNA, 16 bp, synthetic construct
  misc_feature 1..16: note = synthetic [barcode part1]
  source 1..16: mol_type = other DNA
ttgcggacaggagact

SEQ ID NO: 35580 - DNA, 16 bp, synthetic construct
  misc_feature 1..16: note = synthetic [barcode part1]
  source 1..16: mol_type = other DNA
tatatccggacgtgac

SEQ ID NO: 35581 - DNA, 16 bp, synthetic construct
  misc_feature 1..16: note = synthetic [barcode part1]
  source 1..16: mol_type = other DNA
aggacacaacctgacg

SEQ ID NO: 35582 - DNA, 16 bp, synthetic construct
  misc_feature 1..16: note = synthetic [barcode part1]
  source 1..16: mol_type = other DNA
agactcagaattggac

SEQ ID NO: 35583 - DNA, 16 bp, synthetic construct
  misc_feature 1..16: note = synthetic [barcode part1]
  source 1..16: mol_type = other DNA
tccgattcgaccacgt

SEQ ID NO: 35584 - DNA, 16 bp, synthetic construct
  misc_feature 1..16: note = synthetic [barcode part1]
  source 1..16: mol_type = other DNA
gaactgtctgttggac

SEQ ID NO: 35585 - DNA, 16 bp, synthetic construct
  misc_feature 1..16: note = synthetic [barcode part1]
  source 1..16: mol_type = other DNA
gagtgacagtcgtgtg

SEQ ID NO: 35586 - DNA, 16 bp, synthetic construct
  misc_feature 1..16: note = synthetic [barcode part1]
  source 1..16: mol_type = other DNA
gttgagtgtgacctac

SEQ ID NO: 35587 - DNA, 16 bp, synthetic construct
  misc_feature 1..16: note = synthetic [barcode part1]
  source 1..16: mol_type = other DNA
ccgttctcgtaggttg

SEQ ID NO: 35588 - DNA, 16 bp, synthetic construct
  misc_feature 1..16: note = synthetic [barcode part1]
  source 1..16: mol_type = other DNA
cgaatacttccaccgc

SEQ ID NO: 35589 - DNA, 16 bp, synthetic construct
  misc_feature 1..16: note = synthetic [barcode part1]
  source 1..16: mol_type = other DNA
tacaagtctgtcctgt

SEQ ID NO: 35590 - DNA, 16 bp, synthetic construct
  misc_feature 1..16: note = synthetic [barcode part1]
  source 1..16: mol_type = other DNA
tctaggattcctcctc

SEQ ID NO: 35591 - DNA, 16 bp, synthetic construct
  misc_feature 1..16: note = synthetic [barcode part1]
  source 1..16: mol_type = other DNA
acggtccttgttagag

SEQ ID NO: 35592 - DNA, 16 bp, synthetic construct
  misc_feature 1..16: note = synthetic [barcode part1]
  source 1..16: mol_type = other DNA
aaggttctagataggc

SEQ ID NO: 35593 - DNA, 16 bp, synthetic construct
  misc_feature 1..16: note = synthetic [barcode part1]
  source 1..16: mol_type = other DNA
ttagtagtccggtggt

SEQ ID NO: 35594 - DNA, 16 bp, synthetic construct
  misc_feature 1..16: note = synthetic [barcode part1]
  source 1..16: mol_type = other DNA
aggtcagactggtacg

SEQ ID NO: 35595 - DNA, 16 bp, synthetic construct
  misc_feature 1..16: note = synthetic [barcode part1]
  source 1..16: mol_type = other DNA
tccttagacgccggtt

SEQ ID NO: 35596 - DNA, 16 bp, synthetic construct
  misc_feature 1..16: note = synthetic [barcode part1]
  source 1..16: mol_type = other DNA
gtgaccaagtcggagt

SEQ ID NO: 35597 - DNA, 16 bp, synthetic construct
  misc_feature 1..16: note = synthetic [barcode part1]
  source 1..16: mol_type = other DNA
aattctccggtaaggc

SEQ ID NO: 35598 - DNA, 16 bp, synthetic construct
  misc_feature 1..16: note = synthetic [barcode part1]
  source 1..16: mol_type = other DNA
tctacttctcgcctag

SEQ ID NO: 35599 - DNA, 16 bp, synthetic construct
  misc_feature 1..16: note = synthetic [barcode part1]
  source 1..16: mol_type = other DNA
cacaccttcgttggac

SEQ ID NO: 35600 - DNA, 16 bp, synthetic construct
  misc_feature 1..16: note = synthetic [barcode part1]
  source 1..16: mol_type = other DNA
tgaggtggttcgaacg

SEQ ID NO: 35601 - DNA, 16 bp, synthetic construct
  misc_feature 1..16: note = synthetic [barcode part1]
  source 1..16: mol_type = other DNA
aggcaactaatcctcg

SEQ ID NO: 35602 - DNA, 16 bp, synthetic construct
  misc_feature 1..16: note = synthetic [barcode part1]
  source 1..16: mol_type = other DNA
agaatagaagtctgcc

SEQ ID NO: 35603 - DNA, 16 bp, synthetic construct
  misc_feature 1..16: note = synthetic [barcode part1]
  source 1..16: mol_type = other DNA
aaggcactcaatagtg

SEQ ID NO: 35604 - DNA, 16 bp, synthetic construct
  misc_feature 1..16: note = synthetic [barcode part1]
  source 1..16: mol_type = other DNA
ttcctgccgaatcacg

SEQ ID NO: 35605 - DNA, 16 bp, synthetic construct
  misc_feature 1..16: note = synthetic [barcode part1]
  source 1..16: mol_type = other DNA
tgaaccttccagacag

SEQ ID NO: 35606 - DNA, 16 bp, synthetic construct
  misc_feature 1..16: note = synthetic [barcode part1]
  source 1..16: mol_type = other DNA
gcgattacacagttgc

SEQ ID NO: 35607 - DNA, 16 bp, synthetic construct
  misc_feature 1..16: note = synthetic [barcode part1]
  source 1..16: mol_type = other DNA
gaaggtgatagaggtc

SEQ ID NO: 35608 - DNA, 16 bp, synthetic construct
  misc_feature 1..16: note = synthetic [barcode part1]
  source 1..16: mol_type = other DNA
aaggtcgaacttgtag

SEQ ID NO: 35609 - DNA, 16 bp, synthetic construct
  misc_feature 1..16: note = synthetic [barcode part1]
  source 1..16: mol_type = other DNA
gtacgtacaaccagtc

SEQ ID NO: 35610 - DNA, 16 bp, synthetic construct
  misc_feature 1..16: note = synthetic [barcode part1]
  source 1..16: mol_type = other DNA
ccacgtcttgttaagt

SEQ ID NO: 35611 - DNA, 16 bp, synthetic construct
  misc_feature 1..16: note = synthetic [barcode part1]
  source 1..16: mol_type = other DNA
cagaggtgaactgtcg

SEQ ID NO: 35612 - DNA, 16 bp, synthetic construct
  misc_feature 1..16: note = synthetic [barcode part1]
  source 1..16: mol_type = other DNA
gtcgaccgttaactag

SEQ ID NO: 35613 - DNA, 16 bp, synthetic construct
  misc_feature 1..16: note = synthetic [barcode part1]
  source 1..16: mol_type = other DNA
cagtacggatctacgt

SEQ ID NO: 35614 - DNA, 16 bp, synthetic construct
  misc_feature 1..16: note = synthetic [barcode part1]
  source 1..16: mol_type = other DNA
atccttaatctggcac

SEQ ID NO: 35615 - DNA, 16 bp, synthetic construct
  misc_feature 1..16: note = synthetic [barcode part1]
  source 1..16: mol_type = other DNA
tagaacagacgacgag

SEQ ID NO: 35616 - DNA, 16 bp, synthetic construct
  misc_feature 1..16: note = synthetic [barcode part1]
  source 1..16: mol_type = other DNA
gtactaacgcactggt

SEQ ID NO: 35617 - DNA, 16 bp, synthetic construct
  misc_feature 1..16: note = synthetic [barcode part1]
  source 1..16: mol_type = other DNA
tcgaagtacaacgtcc

SEQ ID NO: 35618 - DNA, 16 bp, synthetic construct
  misc_feature 1..16: note = synthetic [barcode part1]
  source 1..16: mol_type = other DNA
ttcgtgtctgaactgt

SEQ ID NO: 35619 - DNA, 16 bp, synthetic construct
  misc_feature 1..16: note = synthetic [barcode part1]
  source 1..16: mol_type = other DNA
ttaaggagattgcgtg

SEQ ID NO: 35620 - DNA, 16 bp, synthetic construct
  misc_feature 1..16: note = synthetic [barcode part1]
  source 1..16: mol_type = other DNA
ataggccgtacaacct

SEQ ID NO: 35621 - DNA, 16 bp, synthetic construct
  misc_feature 1..16: note = synthetic [barcode part1]
  source 1..16: mol_type = other DNA
aattggaccacgcgag

SEQ ID NO: 35622 - DNA, 16 bp, synthetic construct
  misc_feature 1..16: note = synthetic [barcode part1]
  source 1..16: mol_type = other DNA
tagtgaaggtgaggtg

SEQ ID NO: 35623 - DNA, 16 bp, synthetic construct
  misc_feature 1..16: note = synthetic [barcode part1]
  source 1..16: mol_type = other DNA
ttagttctgaacctgc

SEQ ID NO: 35624 - DNA, 16 bp, synthetic construct
  misc_feature 1..16: note = synthetic [barcode part1]
  source 1..16: mol_type = other DNA
actctcagttcaacgt

SEQ ID NO: 35625 - DNA, 16 bp, synthetic construct
  misc_feature 1..16: note = synthetic [barcode part1]
  source 1..16: mol_type = other DNA
ttacttcttgaacgcg

SEQ ID NO: 35626 - DNA, 16 bp, synthetic construct
  misc_feature 1..16: note = synthetic [barcode part1]
  source 1..16: mol_type = other DNA
gcgaatctagttcctt

SEQ ID NO: 35627 - DNA, 16 bp, synthetic construct
  misc_feature 1..16: note = synthetic [barcode part1]
  source 1..16: mol_type = other DNA
agaatccaacaggcgc

SEQ ID NO: 35628 - DNA, 16 bp, synthetic construct
  misc_feature 1..16: note = synthetic [barcode part1]
  source 1..16: mol_type = other DNA
tggtgaccagtctagt

SEQ ID NO: 35629 - DNA, 16 bp, synthetic construct
  misc_feature 1..16: note = synthetic [barcode part1]
  source 1..16: mol_type = other DNA
tctgagaatacgcacc

SEQ ID NO: 35630 - DNA, 16 bp, synthetic construct
  misc_feature 1..16: note = synthetic [barcode part1]
  source 1..16: mol_type = other DNA
gcctaatctccacacg

SEQ ID NO: 35631 - DNA, 16 bp, synthetic construct
  misc_feature 1..16: note = synthetic [barcode part1]
  source 1..16: mol_type = other DNA
tgacctccaactgcac

SEQ ID NO: 35632 - DNA, 16 bp, synthetic construct
  misc_feature 1..16: note = synthetic [barcode part1]
  source 1..16: mol_type = other DNA
tagttcggacgattcg

SEQ ID NO: 35633 - DNA, 16 bp, synthetic construct
  misc_feature 1..16: note = synthetic [barcode part1]
  source 1..16: mol_type = other DNA
gccgtagagtggatac

SEQ ID NO: 35634 - DNA, 16 bp, synthetic construct
  misc_feature 1..16: note = synthetic [barcode part1]
  source 1..16: mol_type = other DNA
tatctggcggtcttcg

SEQ ID NO: 35635 - DNA, 16 bp, synthetic construct
  misc_feature 1..16: note = synthetic [barcode part1]
  source 1..16: mol_type = other DNA
gtggtgttcgagatct

SEQ ID NO: 35636 - DNA, 16 bp, synthetic construct
  misc_feature 1..16: note = synthetic [barcode part1]
  source 1..16: mol_type = other DNA
cacaatcgagacggtg

SEQ ID NO: 35637 - DNA, 16 bp, synthetic construct
  misc_feature 1..16: note = synthetic [barcode part1]
  source 1..16: mol_type = other DNA
gcgagtcgtcaagaac

SEQ ID NO: 35638 - DNA, 16 bp, synthetic construct
  misc_feature 1..16: note = synthetic [barcode part1]
  source 1..16: mol_type = other DNA
atcggattggagatac

SEQ ID NO: 35639 - DNA, 16 bp, synthetic construct
  misc_feature 1..16: note = synthetic [barcode part1]
  source 1..16: mol_type = other DNA
tggacttcaagacaag

SEQ ID NO: 35640 - DNA, 16 bp, synthetic construct
  misc_feature 1..16: note = synthetic [barcode part1]
  source 1..16: mol_type = other DNA
tcttctcgtcgtagtc

SEQ ID NO: 35641 - DNA, 16 bp, synthetic construct
  misc_feature 1..16: note = synthetic [barcode part1]
  source 1..16: mol_type = other DNA
gaatactctcgtcact

SEQ ID NO: 35642 - DNA, 16 bp, synthetic construct
  misc_feature 1..16: note = synthetic [barcode part1]
  source 1..16: mol_type = other DNA
aggcagacttagaatc

SEQ ID NO: 35643 - DNA, 16 bp, synthetic construct
  misc_feature 1..16: note = synthetic [barcode part1]
  source 1..16: mol_type = other DNA
tctaatcaccggcacc

SEQ ID NO: 35644 - DNA, 16 bp, synthetic construct
  misc_feature 1..16: note = synthetic [barcode part1]
  source 1..16: mol_type = other DNA
cactcgttattgcggc

SEQ ID NO: 35645 - DNA, 16 bp, synthetic construct
  misc_feature 1..16: note = synthetic [barcode part1]
  source 1..16: mol_type = other DNA
cgagacttcagttggt

SEQ ID NO: 35646 - DNA, 16 bp, synthetic construct
  misc_feature 1..16: note = synthetic [barcode part1]
  source 1..16: mol_type = other DNA
atattccggtcactac

SEQ ID NO: 35647 - DNA, 16 bp, synthetic construct
  misc_feature 1..16: note = synthetic [barcode part1]
  source 1..16: mol_type = other DNA
aacttaacgatccggc

SEQ ID NO: 35648 - DNA, 16 bp, synthetic construct
  misc_feature 1..16: note = synthetic [barcode part1]
  source 1..16: mol_type = other DNA
cgccacaagtcttaag

SEQ ID NO: 35649 - DNA, 16 bp, synthetic construct
  misc_feature 1..16: note = synthetic [barcode part1]
  source 1..16: mol_type = other DNA
aatagacggtatcgtg

SEQ ID NO: 35650 - DNA, 16 bp, synthetic construct
  misc_feature 1..16: note = synthetic [barcode part1]
  source 1..16: mol_type = other DNA
gccttggtcgattaag

SEQ ID NO: 35651 - DNA, 16 bp, synthetic construct
  misc_feature 1..16: note = synthetic [barcode part1]
  source 1..16: mol_type = other DNA
ttgtggacgtctcacc

SEQ ID NO: 35652 - DNA, 16 bp, synthetic construct
  misc_feature 1..16: note = synthetic [barcode part1]
  source 1..16: mol_type = other DNA
taagtgaccacaacag

SEQ ID NO: 35653 - DNA, 16 bp, synthetic construct
  misc_feature 1..16: note = synthetic [barcode part1]
  source 1..16: mol_type = other DNA
gcctctgttgccaagt

SEQ ID NO: 35654 - DNA, 16 bp, synthetic construct
  misc_feature 1..16: note = synthetic [barcode part1]
  source 1..16: mol_type = other DNA
cagactactctcacgc

SEQ ID NO: 35655 - DNA, 16 bp, synthetic construct
  misc_feature 1..16: note = synthetic [barcode part1]
  source 1..16: mol_type = other DNA
aacacgccgacgtatt

SEQ ID NO: 35656 - DNA, 16 bp, synthetic construct
  misc_feature 1..16: note = synthetic [barcode part1]
  source 1..16: mol_type = other DNA
ttgcctactgtggcgt

SEQ ID NO: 35657 - DNA, 16 bp, synthetic construct
  misc_feature 1..16: note = synthetic [barcode part1]
  source 1..16: mol_type = other DNA
acagtggacaaggtag

SEQ ID NO: 35658 - DNA, 16 bp, synthetic construct
  misc_feature 1..16: note = synthetic [barcode part1]
  source 1..16: mol_type = other DNA
cgcacctagatcacct

SEQ ID NO: 35659 - DNA, 16 bp, synthetic construct
  misc_feature 1..16: note = synthetic [barcode part1]
  source 1..16: mol_type = other DNA
gacagttcgactcaac

SEQ ID NO: 35660 - DNA, 16 bp, synthetic construct
  misc_feature 1..16: note = synthetic [barcode part1]
  source 1..16: mol_type = other DNA
ttcagtggacaatccg

SEQ ID NO: 35661 - DNA, 16 bp, synthetic construct
  misc_feature 1..16: note = synthetic [barcode part1]
  source 1..16: mol_type = other DNA
attgtcgccagtaacg

SEQ ID NO: 35662 - DNA, 16 bp, synthetic construct
  misc_feature 1..16: note = synthetic [barcode part1]
  source 1..16: mol_type = other DNA
tctccttccagaactc

SEQ ID NO: 35663 - DNA, 16 bp, synthetic construct
  misc_feature 1..16: note = synthetic [barcode part1]
  source 1..16: mol_type = other DNA
tcagtgttgtgcagtg

SEQ ID NO: 35664 - DNA, 16 bp, synthetic construct
  misc_feature 1..16: note = synthetic [barcode part1]
  source 1..16: mol_type = other DNA
tattccgattccgcct

SEQ ID NO: 35665 - DNA, 16 bp, synthetic construct
  misc_feature 1..16: note = synthetic [barcode part1]
  source 1..16: mol_type = other DNA
ataatcgtcgagaggt

SEQ ID NO: 35666 - DNA, 16 bp, synthetic construct
  misc_feature 1..16: note = synthetic [barcode part1]
  source 1..16: mol_type = other DNA
tcggttccgttaacgc

SEQ ID NO: 35667 - DNA, 16 bp, synthetic construct
  misc_feature 1..16: note = synthetic [barcode part1]
  source 1..16: mol_type = other DNA
gaatattggcagaacc

SEQ ID NO: 35668 - DNA, 16 bp, synthetic construct
  misc_feature 1..16: note = synthetic [barcode part1]
  source 1..16: mol_type = other DNA
cggtgatctctgcact

SEQ ID NO: 35669 - DNA, 16 bp, synthetic construct
  misc_feature 1..16: note = synthetic [barcode part1]
  source 1..16: mol_type = other DNA
caagacgagtagtgag

SEQ ID NO: 35670 - DNA, 16 bp, synthetic construct
  misc_feature 1..16: note = synthetic [barcode part1]
  source 1..16: mol_type = other DNA
cctgagagattctggt

SEQ ID NO: 35671 - DNA, 16 bp, synthetic construct
  misc_feature 1..16: note = synthetic [barcode part1]
  source 1..16: mol_type = other DNA
gagtaggtatccgttc

SEQ ID NO: 35672 - DNA, 16 bp, synthetic construct
  misc_feature 1..16: note = synthetic [barcode part1]
  source 1..16: mol_type = other DNA
aatccttgtattcggc

SEQ ID NO: 35673 - DNA, 16 bp, synthetic construct
  misc_feature 1..16: note = synthetic [barcode part1]
  source 1..16: mol_type = other DNA
attcgtggcgttcaag

SEQ ID NO: 35674 - DNA, 16 bp, synthetic construct
  misc_feature 1..16: note = synthetic [barcode part1]
  source 1..16: mol_type = other DNA
ccggtaattgccaagt

SEQ ID NO: 35675 - DNA, 16 bp, synthetic construct
  misc_feature 1..16: note = synthetic [barcode part1]
  source 1..16: mol_type = other DNA
aagactagagacggtg

SEQ ID NO: 35676 - DNA, 16 bp, synthetic construct
  misc_feature 1..16: note = synthetic [barcode part1]
  source 1..16: mol_type = other DNA
ttcttggcgtagttgt

SEQ ID NO: 35677 - DNA, 16 bp, synthetic construct
  misc_feature 1..16: note = synthetic [barcode part1]
  source 1..16: mol_type = other DNA
gacttgtcaccgtctg

SEQ ID NO: 35678 - DNA, 16 bp, synthetic construct
  misc_feature 1..16: note = synthetic [barcode part1]
  source 1..16: mol_type = other DNA
gtaacaagacggtgag

SEQ ID NO: 35679 - DNA, 16 bp, synthetic construct
  misc_feature 1..16: note = synthetic [barcode part1]
  source 1..16: mol_type = other DNA
aaccttccgcagacct

SEQ ID NO: 35680 - DNA, 16 bp, synthetic construct
  misc_feature 1..16: note = synthetic [barcode part1]
  source 1..16: mol_type = other DNA
agtcgattcagtcgac

SEQ ID NO: 35681 - DNA, 16 bp, synthetic construct
  misc_feature 1..16: note = synthetic [barcode part1]
  source 1..16: mol_type = other DNA
gcgattattggaagac

SEQ ID NO: 35682 - DNA, 16 bp, synthetic construct
  misc_feature 1..16: note = synthetic [barcode part1]
  source 1..16: mol_type = other DNA
caggaaggtattaacc

SEQ ID NO: 35683 - DNA, 16 bp, synthetic construct
  misc_feature 1..16: note = synthetic [barcode part1]
  source 1..16: mol_type = other DNA
aggcgagacctcaagt

SEQ ID NO: 35684 - DNA, 16 bp, synthetic construct
  misc_feature 1..16: note = synthetic [barcode part1]
  source 1..16: mol_type = other DNA
gcaaggtgtgaactcg

SEQ ID NO: 35685 - DNA, 16 bp, synthetic construct
  misc_feature 1..16: note = synthetic [barcode part1]
  source 1..16: mol_type = other DNA
gttagacgccttcgtc

SEQ ID NO: 35686 - DNA, 16 bp, synthetic construct
  misc_feature 1..16: note = synthetic [barcode part1]
  source 1..16: mol_type = other DNA
acctctacctggcagt

SEQ ID NO: 35687 - DNA, 16 bp, synthetic construct
  misc_feature 1..16: note = synthetic [barcode part1]
  source 1..16: mol_type = other DNA
aagtagaggaccttac

SEQ ID NO: 35688 - DNA, 16 bp, synthetic construct
  misc_feature 1..16: note = synthetic [barcode part1]
  source 1..16: mol_type = other DNA
tgaacaagacgtcgcg

SEQ ID NO: 35689 - DNA, 16 bp, synthetic construct
  misc_feature 1..16: note = synthetic [barcode part1]
  source 1..16: mol_type = other DNA
ttcaatccggtacgcc

SEQ ID NO: 35690 - DNA, 16 bp, synthetic construct
  misc_feature 1..16: note = synthetic [barcode part1]
  source 1..16: mol_type = other DNA
caggagagtcgatacc

SEQ ID NO: 35691 - DNA, 16 bp, synthetic construct
  misc_feature 1..16: note = synthetic [barcode part1]
  source 1..16: mol_type = other DNA
ccagtctgtaaggtac

SEQ ID NO: 35692 - DNA, 16 bp, synthetic construct
  misc_feature 1..16: note = synthetic [barcode part1]
  source 1..16: mol_type = other DNA
ccgatccgatatatct

SEQ ID NO: 35693 - DNA, 16 bp, synthetic construct
  misc_feature 1..16: note = synthetic [barcode part1]
  source 1..16: mol_type = other DNA
cctactgtcgagtacc

SEQ ID NO: 35694 - DNA, 16 bp, synthetic construct
  misc_feature 1..16: note = synthetic [barcode part1]
  source 1..16: mol_type = other DNA
agactgtctcacgtcc

SEQ ID NO: 35695 - DNA, 16 bp, synthetic construct
  misc_feature 1..16: note = synthetic [barcode part1]
  source 1..16: mol_type = other DNA
gcagagtaacgcctag

SEQ ID NO: 35696 - DNA, 16 bp, synthetic construct
  misc_feature 1..16: note = synthetic [barcode part1]
  source 1..16: mol_type = other DNA
tgttcgaagtcacacg

SEQ ID NO: 35697 - DNA, 16 bp, synthetic construct
  misc_feature 1..16: note = synthetic [barcode part1]
  source 1..16: mol_type = other DNA
gtagtcacctcgatcc

SEQ ID NO: 35698 - DNA, 16 bp, synthetic construct
  misc_feature 1..16: note = synthetic [barcode part1]
  source 1..16: mol_type = other DNA
tgcctaaccttactag

SEQ ID NO: 35699 - DNA, 16 bp, synthetic construct
  misc_feature 1..16: note = synthetic [barcode part1]
  source 1..16: mol_type = other DNA
actcgaaggatctgtc

SEQ ID NO: 35700 - DNA, 16 bp, synthetic construct
  misc_feature 1..16: note = synthetic [barcode part1]
  source 1..16: mol_type = other DNA
ttcgattgtgcactac

SEQ ID NO: 35701 - DNA, 16 bp, synthetic construct
  misc_feature 1..16: note = synthetic [barcode part1]
  source 1..16: mol_type = other DNA
atcggatccgtactcc

SEQ ID NO: 35702 - DNA, 16 bp, synthetic construct
  misc_feature 1..16: note = synthetic [barcode part1]
  source 1..16: mol_type = other DNA
ccgtatcgcctaacac

SEQ ID NO: 35703 - DNA, 16 bp, synthetic construct
  misc_feature 1..16: note = synthetic [barcode part1]
  source 1..16: mol_type = other DNA
agtctagtcagatcgc

SEQ ID NO: 35704 - DNA, 16 bp, synthetic construct
  misc_feature 1..16: note = synthetic [barcode part1]
  source 1..16: mol_type = other DNA
tcaagtggtgagtctc

SEQ ID NO: 35705 - DNA, 16 bp, synthetic construct
  misc_feature 1..16: note = synthetic [barcode part1]
  source 1..16: mol_type = other DNA
gtacttcgattaccgt

SEQ ID NO: 35706 - DNA, 16 bp, synthetic construct
  misc_feature 1..16: note = synthetic [barcode part1]
  source 1..16: mol_type = other DNA
aggccaagttgtatag

SEQ ID NO: 35707 - DNA, 16 bp, synthetic construct
  misc_feature 1..16: note = synthetic [barcode part1]
  source 1..16: mol_type = other DNA
ttataagttgccgtcc

SEQ ID NO: 35708 - DNA, 16 bp, synthetic construct
  misc_feature 1..16: note = synthetic [barcode part1]
  source 1..16: mol_type = other DNA
ttgcagaccgttgtcc

SEQ ID NO: 35709 - DNA, 16 bp, synthetic construct
  misc_feature 1..16: note = synthetic [barcode part1]
  source 1..16: mol_type = other DNA
acttggttgactcgag

SEQ ID NO: 35710 - DNA, 16 bp, synthetic construct
  misc_feature 1..16: note = synthetic [barcode part1]
  source 1..16: mol_type = other DNA
aagtacagtcgccgag

SEQ ID NO: 35711 - DNA, 16 bp, synthetic construct
  misc_feature 1..16: note = synthetic [barcode part1]
  source 1..16: mol_type = other DNA
gccttcgactcaacgt

SEQ ID NO: 35712 - DNA, 16 bp, synthetic construct
  misc_feature 1..16: note = synthetic [barcode part1]
  source 1..16: mol_type = other DNA
tatccgttatcgtggt

SEQ ID NO: 35713 - DNA, 16 bp, synthetic construct
  misc_feature 1..16: note = synthetic [barcode part1]
  source 1..16: mol_type = other DNA
gaacggactcagaacc

SEQ ID NO: 35714 - DNA, 16 bp, synthetic construct
  misc_feature 1..16: note = synthetic [barcode part1]
  source 1..16: mol_type = other DNA
gagtaagtaccgtagt

SEQ ID NO: 35715 - DNA, 16 bp, synthetic construct
  misc_feature 1..16: note = synthetic [barcode part1]
  source 1..16: mol_type = other DNA
cgtactctattgagtc

SEQ ID NO: 35716 - DNA, 16 bp, synthetic construct
  misc_feature 1..16: note = synthetic [barcode part1]
  source 1..16: mol_type = other DNA
ttagttcactcgagtc

SEQ ID NO: 35717 - DNA, 16 bp, synthetic construct
  misc_feature 1..16: note = synthetic [barcode part1]
  source 1..16: mol_type = other DNA
tagagaatcaggaggc

SEQ ID NO: 35718 - DNA, 16 bp, synthetic construct
  misc_feature 1..16: note = synthetic [barcode part1]
  source 1..16: mol_type = other DNA
cctaccgcgtgaatct

SEQ ID NO: 35719 - DNA, 16 bp, synthetic construct
  misc_feature 1..16: note = synthetic [barcode part1]
  source 1..16: mol_type = other DNA
cggagaagatcttctc

SEQ ID NO: 35720 - DNA, 16 bp, synthetic construct
  misc_feature 1..16: note = synthetic [barcode part1]
  source 1..16: mol_type = other DNA
tgacctcgtgtaccac

SEQ ID NO: 35721 - DNA, 16 bp, synthetic construct
  misc_feature 1..16: note = synthetic [barcode part1]
  source 1..16: mol_type = other DNA
tacaggccgaggtagt

SEQ ID NO: 35722 - DNA, 16 bp, synthetic construct
  misc_feature 1..16: note = synthetic [barcode part1]
  source 1..16: mol_type = other DNA
caccacttaaggaacc

SEQ ID NO: 35723 - DNA, 16 bp, synthetic construct
  misc_feature 1..16: note = synthetic [barcode part1]
  source 1..16: mol_type = other DNA
agacctagtctggatc

SEQ ID NO: 35724 - DNA, 16 bp, synthetic construct
  misc_feature 1..16: note = synthetic [barcode part1]
  source 1..16: mol_type = other DNA
gaggtgtcagtagtcg

SEQ ID NO: 35725 - DNA, 16 bp, synthetic construct
  misc_feature 1..16: note = synthetic [barcode part1]
  source 1..16: mol_type = other DNA
gacttcaacaggtaag

SEQ ID NO: 35726 - DNA, 16 bp, synthetic construct
  misc_feature 1..16: note = synthetic [barcode part1]
  source 1..16: mol_type = other DNA
tcagacactataggcc

SEQ ID NO: 35727 - DNA, 16 bp, synthetic construct
  misc_feature 1..16: note = synthetic [barcode part1]
  source 1..16: mol_type = other DNA
atcggagtgtgtgacg

SEQ ID NO: 35728 - DNA, 16 bp, synthetic construct
  misc_feature 1..16: note = synthetic [barcode part1]
  source 1..16: mol_type = other DNA
cgtctactcgtgacac

SEQ ID NO: 35729 - DNA, 16 bp, synthetic construct
  misc_feature 1..16: note = synthetic [barcode part1]
  source 1..16: mol_type = other DNA
attcgactgtaccttg

SEQ ID NO: 35730 - DNA, 16 bp, synthetic construct
  misc_feature 1..16: note = synthetic [barcode part1]
  source 1..16: mol_type = other DNA
cgaaggtgcaatccag

SEQ ID NO: 35731 - DNA, 16 bp, synthetic construct
  misc_feature 1..16: note = synthetic [barcode part1]
  source 1..16: mol_type = other DNA
cgtagtgacgaacggt

SEQ ID NO: 35732 - DNA, 16 bp, synthetic construct
  misc_feature 1..16: note = synthetic [barcode part1]
  source 1..16: mol_type = other DNA
cggcaacttcttacgc

SEQ ID NO: 35733 - DNA, 16 bp, synthetic construct
  misc_feature 1..16: note = synthetic [barcode part1]
  source 1..16: mol_type = other DNA
cgtgtccggtataagt

SEQ ID NO: 35734 - DNA, 16 bp, synthetic construct
  misc_feature 1..16: note = synthetic [barcode part1]
  source 1..16: mol_type = other DNA
gtgtaattggtcgcgt

SEQ ID NO: 35735 - DNA, 16 bp, synthetic construct
  misc_feature 1..16: note = synthetic [barcode part1]
  source 1..16: mol_type = other DNA
attgtccgagtgacgt

SEQ ID NO: 35736 - DNA, 16 bp, synthetic construct
  misc_feature 1..16: note = synthetic [barcode part1]
  source 1..16: mol_type = other DNA
gaagtatctggtagtg

SEQ ID NO: 35737 - DNA, 16 bp, synthetic construct
  misc_feature 1..16: note = synthetic [barcode part1]
  source 1..16: mol_type = other DNA
tcaagaccgtctattc

SEQ ID NO: 35738 - DNA, 16 bp, synthetic construct
  misc_feature 1..16: note = synthetic [barcode part1]
  source 1..16: mol_type = other DNA
gacgtgaagtggtctg

SEQ ID NO: 35739 - DNA, 16 bp, synthetic construct
  misc_feature 1..16: note = synthetic [barcode part1]
  source 1..16: mol_type = other DNA
ccaacgaagtgactct

SEQ ID NO: 35740 - DNA, 16 bp, synthetic construct
  misc_feature 1..16: note = synthetic [barcode part1]
  source 1..16: mol_type = other DNA
agtctgattctacgtc

SEQ ID NO: 35741 - DNA, 16 bp, synthetic construct
  misc_feature 1..16: note = synthetic [barcode part1]
  source 1..16: mol_type = other DNA
cactaagttcggtgac

SEQ ID NO: 35742 - DNA, 16 bp, synthetic construct
  misc_feature 1..16: note = synthetic [barcode part1]
  source 1..16: mol_type = other DNA
aattacagtgccggtc

SEQ ID NO: 35743 - DNA, 16 bp, synthetic construct
  misc_feature 1..16: note = synthetic [barcode part1]
  source 1..16: mol_type = other DNA
tgaactgttggcaacc

SEQ ID NO: 35744 - DNA, 16 bp, synthetic construct
  misc_feature 1..16: note = synthetic [barcode part1]
  source 1..16: mol_type = other DNA
ccgaatagtagacctc

SEQ ID NO: 35745 - DNA, 16 bp, synthetic construct
  misc_feature 1..16: note = synthetic [barcode part1]
  source 1..16: mol_type = other DNA
ccacaccacaggaatt

SEQ ID NO: 35746 - DNA, 16 bp, synthetic construct
  misc_feature 1..16: note = synthetic [barcode part1]
  source 1..16: mol_type = other DNA
ttcgtgacaccgttcg

SEQ ID NO: 35747 - DNA, 16 bp, synthetic construct
  misc_feature 1..16: note = synthetic [barcode part1]
  source 1..16: mol_type = other DNA
ccgtgtgaagatcgag

SEQ ID NO: 35748 - DNA, 16 bp, synthetic construct
  misc_feature 1..16: note = synthetic [barcode part1]
  source 1..16: mol_type = other DNA
agtaaccagtccaacc

SEQ ID NO: 35749 - DNA, 16 bp, synthetic construct
  misc_feature 1..16: note = synthetic [barcode part1]
  source 1..16: mol_type = other DNA
gataccggagatcctt

SEQ ID NO: 35750 - DNA, 16 bp, synthetic construct
  misc_feature 1..16: note = synthetic [barcode part1]
  source 1..16: mol_type = other DNA
aacgtaaggactgttg

SEQ ID NO: 35751 - DNA, 16 bp, synthetic construct
  misc_feature 1..16: note = synthetic [barcode part1]
  source 1..16: mol_type = other DNA
caacctacctaacgag

SEQ ID NO: 35752 - DNA, 16 bp, synthetic construct
  misc_feature 1..16: note = synthetic [barcode part1]
  source 1..16: mol_type = other DNA
cggcgacagttattgt

SEQ ID NO: 35753 - DNA, 16 bp, synthetic construct
  misc_feature 1..16: note = synthetic [barcode part1]
  source 1..16: mol_type = other DNA
acacctcgacttaatc

SEQ ID NO: 35754 - DNA, 16 bp, synthetic construct
  misc_feature 1..16: note = synthetic [barcode part1]
  source 1..16: mol_type = other DNA
gacctgaatcgaacct

SEQ ID NO: 35755 - DNA, 16 bp, synthetic construct
  misc_feature 1..16: note = synthetic [barcode part1]
  source 1..16: mol_type = other DNA
cacagtgcctgtctgt

SEQ ID NO: 35756 - DNA, 16 bp, synthetic construct
  misc_feature 1..16: note = synthetic [barcode part1]
  source 1..16: mol_type = other DNA
tggttcaacttctacg

SEQ ID NO: 35757 - DNA, 16 bp, synthetic construct
  misc_feature 1..16: note = synthetic [barcode part1]
  source 1..16: mol_type = other DNA
attccgactctctctg

SEQ ID NO: 35758 - DNA, 16 bp, synthetic construct
  misc_feature 1..16: note = synthetic [barcode part1]
  source 1..16: mol_type = other DNA
ttctcgaaccaacact

SEQ ID NO: 35759 - DNA, 16 bp, synthetic construct
  misc_feature 1..16: note = synthetic [barcode part1]
  source 1..16: mol_type = other DNA
acttggatatccggac

SEQ ID NO: 35760 - DNA, 16 bp, synthetic construct
  misc_feature 1..16: note = synthetic [barcode part1]
  source 1..16: mol_type = other DNA
cgagtgcaatcgtatc

SEQ ID NO: 35761 - DNA, 16 bp, synthetic construct
  misc_feature 1..16: note = synthetic [barcode part1]
  source 1..16: mol_type = other DNA
gtcgttcagatccgtc

SEQ ID NO: 35762 - DNA, 16 bp, synthetic construct
  misc_feature 1..16: note = synthetic [barcode part1]
  source 1..16: mol_type = other DNA
gtatcgtgtctattcg

SEQ ID NO: 35763 - DNA, 16 bp, synthetic construct
  misc_feature 1..16: note = synthetic [barcode part1]
  source 1..16: mol_type = other DNA
tgttcacgcagtatct

SEQ ID NO: 35764 - DNA, 16 bp, synthetic construct
  misc_feature 1..16: note = synthetic [barcode part1]
  source 1..16: mol_type = other DNA
actacacctagtgcag

SEQ ID NO: 35765 - DNA, 16 bp, synthetic construct
  misc_feature 1..16: note = synthetic [barcode part1]
  source 1..16: mol_type = other DNA
tcttggtaaccacgtt

SEQ ID NO: 35766 - DNA, 16 bp, synthetic construct
  misc_feature 1..16: note = synthetic [barcode part1]
  source 1..16: mol_type = other DNA
ccaccaccttagacgt

SEQ ID NO: 35767 - DNA, 16 bp, synthetic construct
  misc_feature 1..16: note = synthetic [barcode part1]
  source 1..16: mol_type = other DNA
cgtatagtccacgaac

SEQ ID NO: 35768 - DNA, 16 bp, synthetic construct
  misc_feature 1..16: note = synthetic [barcode part1]
  source 1..16: mol_type = other DNA
acgttgataacaggac

SEQ ID NO: 35769 - DNA, 16 bp, synthetic construct
  misc_feature 1..16: note = synthetic [barcode part1]
  source 1..16: mol_type = other DNA
cgacctctcagttctt

SEQ ID NO: 35770 - DNA, 16 bp, synthetic construct
  misc_feature 1..16: note = synthetic [barcode part1]
  source 1..16: mol_type = other DNA
gacgtatcttcaactc

SEQ ID NO: 35771 - DNA, 16 bp, synthetic construct
  misc_feature 1..16: note = synthetic [barcode part1]
  source 1..16: mol_type = other DNA
attacaactgtccacc

SEQ ID NO: 35772 - DNA, 16 bp, synthetic construct
  misc_feature 1..16: note = synthetic [barcode part1]
  source 1..16: mol_type = other DNA
gttcgagttgcagact

SEQ ID NO: 35773 - DNA, 16 bp, synthetic construct
  misc_feature 1..16: note = synthetic [barcode part1]
  source 1..16: mol_type = other DNA
acgttctcagtgatct

SEQ ID NO: 35774 - DNA, 16 bp, synthetic construct
  misc_feature 1..16: note = synthetic [barcode part1]
  source 1..16: mol_type = other DNA
cgtgtaatagagaacc

SEQ ID NO: 35775 - DNA, 16 bp, synthetic construct
  misc_feature 1..16: note = synthetic [barcode part1]
  source 1..16: mol_type = other DNA
aatctaatcctcgcac

SEQ ID NO: 35776 - DNA, 16 bp, synthetic construct
  misc_feature 1..16: note = synthetic [barcode part1]
  source 1..16: mol_type = other DNA
cgttccacgttatctc

SEQ ID NO: 35777 - DNA, 16 bp, synthetic construct
  misc_feature 1..16: note = synthetic [barcode part1]
  source 1..16: mol_type = other DNA
agtgtaatcacgtccg

SEQ ID NO: 35778 - DNA, 16 bp, synthetic construct
  misc_feature 1..16: note = synthetic [barcode part1]
  source 1..16: mol_type = other DNA
acgatctgccttcgtg

SEQ ID NO: 35779 - DNA, 16 bp, synthetic construct
  misc_feature 1..16: note = synthetic [barcode part1]
  source 1..16: mol_type = other DNA
acaagaattggcgatc

SEQ ID NO: 35780 - DNA, 16 bp, synthetic construct
  misc_feature 1..16: note = synthetic [barcode part1]
  source 1..16: mol_type = other DNA
agagtaactcaccacc

SEQ ID NO: 35781 - DNA, 16 bp, synthetic construct
  misc_feature 1..16: note = synthetic [barcode part1]
  source 1..16: mol_type = other DNA
caaggttgccgattac

SEQ ID NO: 35782 - DNA, 16 bp, synthetic construct
  misc_feature 1..16: note = synthetic [barcode part1]
  source 1..16: mol_type = other DNA
tatcaggcctagtgac

SEQ ID NO: 35783 - DNA, 16 bp, synthetic construct
  misc_feature 1..16: note = synthetic [barcode part1]
  source 1..16: mol_type = other DNA
ttgttcggtaacgtct

SEQ ID NO: 35784 - DNA, 16 bp, synthetic construct
  misc_feature 1..16: note = synthetic [barcode part1]
  source 1..16: mol_type = other DNA
ttcgcgttctctgtac

SEQ ID NO: 35785 - DNA, 16 bp, synthetic construct
  misc_feature 1..16: note = synthetic [barcode part1]
  source 1..16: mol_type = other DNA
acgaaggaatccgacc

SEQ ID NO: 35786 - DNA, 16 bp, synthetic construct
  misc_feature 1..16: note = synthetic [barcode part1]
  source 1..16: mol_type = other DNA
ccgttgcgatactcgt

SEQ ID NO: 35787 - DNA, 16 bp, synthetic construct
  misc_feature 1..16: note = synthetic [barcode part1]
  source 1..16: mol_type = other DNA
tcgtgatattgcggtg

SEQ ID NO: 35788 - DNA, 16 bp, synthetic construct
  misc_feature 1..16: note = synthetic [barcode part1]
  source 1..16: mol_type = other DNA
tcggacaacttgcagt

SEQ ID NO: 35789 - DNA, 16 bp, synthetic construct
  misc_feature 1..16: note = synthetic [barcode part1]
  source 1..16: mol_type = other DNA
aatacgttcgaggagt

SEQ ID NO: 35790 - DNA, 16 bp, synthetic construct
  misc_feature 1..16: note = synthetic [barcode part1]
  source 1..16: mol_type = other DNA
tacttcgacggattct

SEQ ID NO: 35791 - DNA, 16 bp, synthetic construct
  misc_feature 1..16: note = synthetic [barcode part1]
  source 1..16: mol_type = other DNA
tgatctgtcacgcctg

SEQ ID NO: 35792 - DNA, 16 bp, synthetic construct
  misc_feature 1..16: note = synthetic [barcode part1]
  source 1..16: mol_type = other DNA
tacctatattccaggc

SEQ ID NO: 35793 - DNA, 16 bp, synthetic construct
  misc_feature 1..16: note = synthetic [barcode part1]
  source 1..16: mol_type = other DNA
tagttccggtctcctt

SEQ ID NO: 35794 - DNA, 16 bp, synthetic construct
  misc_feature 1..16: note = synthetic [barcode part1]
  source 1..16: mol_type = other DNA
agtagaggcactcggt

SEQ ID NO: 35795 - DNA, 16 bp, synthetic construct
  misc_feature 1..16: note = synthetic [barcode part1]
  source 1..16: mol_type = other DNA
tcttagtgattcgtgc

SEQ ID NO: 35796 - DNA, 16 bp, synthetic construct
  misc_feature 1..16: note = synthetic [barcode part1]
  source 1..16: mol_type = other DNA
tcaggaggactgtgtg

SEQ ID NO: 35797 - DNA, 16 bp, synthetic construct
  misc_feature 1..16: note = synthetic [barcode part1]
  source 1..16: mol_type = other DNA
tcggcactctcaactg

SEQ ID NO: 35798 - DNA, 16 bp, synthetic construct
  misc_feature 1..16: note = synthetic [barcode part1]
  source 1..16: mol_type = other DNA
gcacaacttctggcct

SEQ ID NO: 35799 - DNA, 16 bp, synthetic construct
  misc_feature 1..16: note = synthetic [barcode part1]
  source 1..16: mol_type = other DNA
gcggttgttggagaac

SEQ ID NO: 35800 - DNA, 16 bp, synthetic construct
  misc_feature 1..16: note = synthetic [barcode part1]
  source 1..16: mol_type = other DNA
gtagtgtggttctgac

SEQ ID NO: 35801 - DNA, 16 bp, synthetic construct
  misc_feature 1..16: note = synthetic [barcode part1]
  source 1..16: mol_type = other DNA
aatcaaccgcgtgtgt

SEQ ID NO: 35802 - DNA, 16 bp, synthetic construct
  misc_feature 1..16: note = synthetic [barcode part1]
  source 1..16: mol_type = other DNA
cgtgtggaagtacttc

SEQ ID NO: 35803 - DNA, 16 bp, synthetic construct
  misc_feature 1..16: note = synthetic [barcode part1]
  source 1..16: mol_type = other DNA
ttcaccaggccgtact

SEQ ID NO: 35804 - DNA, 16 bp, synthetic construct
  misc_feature 1..16: note = synthetic [barcode part1]
  source 1..16: mol_type = other DNA
aattgttctcgcactg

SEQ ID NO: 35805 - DNA, 16 bp, synthetic construct
  misc_feature 1..16: note = synthetic [barcode part1]
  source 1..16: mol_type = other DNA
tagacaaggcagacag

SEQ ID NO: 35806 - DNA, 16 bp, synthetic construct
  misc_feature 1..16: note = synthetic [barcode part1]
  source 1..16: mol_type = other DNA
agaagttctggtctcg

SEQ ID NO: 35807 - DNA, 16 bp, synthetic construct
  misc_feature 1..16: note = synthetic [barcode part1]
  source 1..16: mol_type = other DNA
ttcgttgcacaggcct

SEQ ID NO: 35808 - DNA, 16 bp, synthetic construct
  misc_feature 1..16: note = synthetic [barcode part1]
  source 1..16: mol_type = other DNA
aaccgttctgtgcctg

SEQ ID NO: 35809 - DNA, 16 bp, synthetic construct
  misc_feature 1..16: note = synthetic [barcode part1]
  source 1..16: mol_type = other DNA
gtccttatccggcagt

SEQ ID NO: 35810 - DNA, 16 bp, synthetic construct
  misc_feature 1..16: note = synthetic [barcode part1]
  source 1..16: mol_type = other DNA
gataacaccgcaggtg

SEQ ID NO: 35811 - DNA, 16 bp, synthetic construct
  misc_feature 1..16: note = synthetic [barcode part1]
  source 1..16: mol_type = other DNA
cgactagacgttacgt

SEQ ID NO: 35812 - DNA, 16 bp, synthetic construct
  misc_feature 1..16: note = synthetic [barcode part1]
  source 1..16: mol_type = other DNA
caggattagttccgac

SEQ ID NO: 35813 - DNA, 16 bp, synthetic construct
  misc_feature 1..16: note = synthetic [barcode part1]
  source 1..16: mol_type = other DNA
agtcacacctcaattc

SEQ ID NO: 35814 - DNA, 16 bp, synthetic construct
  misc_feature 1..16: note = synthetic [barcode part1]
  source 1..16: mol_type = other DNA
tagacaaggacttcag

SEQ ID NO: 35815 - DNA, 16 bp, synthetic construct
  misc_feature 1..16: note = synthetic [barcode part1]
  source 1..16: mol_type = other DNA
gcagtatccttccttc

SEQ ID NO: 35816 - DNA, 16 bp, synthetic construct
  misc_feature 1..16: note = synthetic [barcode part1]
  source 1..16: mol_type = other DNA
cagacgtgaggtgact

SEQ ID NO: 35817 - DNA, 16 bp, synthetic construct
  misc_feature 1..16: note = synthetic [barcode part1]
  source 1..16: mol_type = other DNA
gtcctgcggatatcct

SEQ ID NO: 35818 - DNA, 16 bp, synthetic construct
  misc_feature 1..16: note = synthetic [barcode part1]
  source 1..16: mol_type = other DNA
gttgcctgtagactcc

SEQ ID NO: 35819 - DNA, 16 bp, synthetic construct
  misc_feature 1..16: note = synthetic [barcode part1]
  source 1..16: mol_type = other DNA
gcgatagatccgagtg

SEQ ID NO: 35820 - DNA, 16 bp, synthetic construct
  misc_feature 1..16: note = synthetic [barcode part1]
  source 1..16: mol_type = other DNA
gacaactaggacgtgc

SEQ ID NO: 35821 - DNA, 16 bp, synthetic construct
  misc_feature 1..16: note = synthetic [barcode part1]
  source 1..16: mol_type = other DNA
aaggttctccagaacc

SEQ ID NO: 35822 - DNA, 16 bp, synthetic construct
  misc_feature 1..16: note = synthetic [barcode part1]
  source 1..16: mol_type = other DNA
tctaacgtgagttgcg

SEQ ID NO: 35823 - DNA, 16 bp, synthetic construct
  misc_feature 1..16: note = synthetic [barcode part1]
  source 1..16: mol_type = other DNA
gcagagagttagattc

SEQ ID NO: 35824 - DNA, 16 bp, synthetic construct
  misc_feature 1..16: note = synthetic [barcode part1]
  source 1..16: mol_type = other DNA
gtcctatccgttgtct

SEQ ID NO: 35825 - DNA, 16 bp, synthetic construct
  misc_feature 1..16: note = synthetic [barcode part1]
  source 1..16: mol_type = other DNA
gaacggatcacttgtc

SEQ ID NO: 35826 - DNA, 16 bp, synthetic construct
  misc_feature 1..16: note = synthetic [barcode part1]
  source 1..16: mol_type = other DNA
tacacgtacacacacg

SEQ ID NO: 35827 - DNA, 16 bp, synthetic construct
  misc_feature 1..16: note = synthetic [barcode part1]
  source 1..16: mol_type = other DNA
tcgaaggcacgttgag

SEQ ID NO: 35828 - DNA, 16 bp, synthetic construct
  misc_feature 1..16: note = synthetic [barcode part1]
  source 1..16: mol_type = other DNA
tactggagagttgtcc

SEQ ID NO: 35829 - DNA, 16 bp, synthetic construct
  misc_feature 1..16: note = synthetic [barcode part1]
  source 1..16: mol_type = other DNA
gagtcgtgttcagtgt

SEQ ID NO: 35830 - DNA, 16 bp, synthetic construct
  misc_feature 1..16: note = synthetic [barcode part1]
  source 1..16: mol_type = other DNA
ttggtacactgcacag

SEQ ID NO: 35831 - DNA, 16 bp, synthetic construct
  misc_feature 1..16: note = synthetic [barcode part1]
  source 1..16: mol_type = other DNA
agatcctgcgttacag

SEQ ID NO: 35832 - DNA, 16 bp, synthetic construct
  misc_feature 1..16: note = synthetic [barcode part1]
  source 1..16: mol_type = other DNA
cacagtgtgaggtctt

SEQ ID NO: 35833 - DNA, 16 bp, synthetic construct
  misc_feature 1..16: note = synthetic [barcode part1]
  source 1..16: mol_type = other DNA
tgatataggcctgcac

SEQ ID NO: 35834 - DNA, 16 bp, synthetic construct
  misc_feature 1..16: note = synthetic [barcode part1]
  source 1..16: mol_type = other DNA
gtctctgtaagttacc

SEQ ID NO: 35835 - DNA, 16 bp, synthetic construct
  misc_feature 1..16: note = synthetic [barcode part1]
  source 1..16: mol_type = other DNA
tacggcctatatcgag

SEQ ID NO: 35836 - DNA, 16 bp, synthetic construct
  misc_feature 1..16: note = synthetic [barcode part1]
  source 1..16: mol_type = other DNA
tattacacgactggcg

SEQ ID NO: 35837 - DNA, 16 bp, synthetic construct
  misc_feature 1..16: note = synthetic [barcode part1]
  source 1..16: mol_type = other DNA
caggaaccgaatcacg

SEQ ID NO: 35838 - DNA, 16 bp, synthetic construct
  misc_feature 1..16: note = synthetic [barcode part1]
  source 1..16: mol_type = other DNA
atcaacgcaccgatac

SEQ ID NO: 35839 - DNA, 16 bp, synthetic construct
  misc_feature 1..16: note = synthetic [barcode part1]
  source 1..16: mol_type = other DNA
tgtgatacactgcggt

SEQ ID NO: 35840 - DNA, 16 bp, synthetic construct
  misc_feature 1..16: note = synthetic [barcode part1]
  source 1..16: mol_type = other DNA
tcctgcaggttatcgc

SEQ ID NO: 35841 - DNA, 16 bp, synthetic construct
  misc_feature 1..16: note = synthetic [barcode part1]
  source 1..16: mol_type = other DNA
gtcgtcctacttaagt

SEQ ID NO: 35842 - DNA, 16 bp, synthetic construct
  misc_feature 1..16: note = synthetic [barcode part1]
  source 1..16: mol_type = other DNA
gcgttattccaaggtg

SEQ ID NO: 35843 - DNA, 16 bp, synthetic construct
  misc_feature 1..16: note = synthetic [barcode part1]
  source 1..16: mol_type = other DNA
cactaactcaaccttg

SEQ ID NO: 35844 - DNA, 16 bp, synthetic construct
  misc_feature 1..16: note = synthetic [barcode part1]
  source 1..16: mol_type = other DNA
gcaccgtaacggatag

SEQ ID NO: 35845 - DNA, 16 bp, synthetic construct
  misc_feature 1..16: note = synthetic [barcode part1]
  source 1..16: mol_type = other DNA
tccgtcgtgcgaactt

SEQ ID NO: 35846 - DNA, 16 bp, synthetic construct
  misc_feature 1..16: note = synthetic [barcode part1]
  source 1..16: mol_type = other DNA
tactgtcactctccgt

SEQ ID NO: 35847 - DNA, 16 bp, synthetic construct
  misc_feature 1..16: note = synthetic [barcode part1]
  source 1..16: mol_type = other DNA
tcgcgactgattagtg

SEQ ID NO: 35848 - DNA, 16 bp, synthetic construct
  misc_feature 1..16: note = synthetic [barcode part1]
  source 1..16: mol_type = other DNA
tagaccagactgtcac

SEQ ID NO: 35849 - DNA, 16 bp, synthetic construct
  misc_feature 1..16: note = synthetic [barcode part1]
  source 1..16: mol_type = other DNA
tatagaggcacgagag

SEQ ID NO: 35850 - DNA, 16 bp, synthetic construct
  misc_feature 1..16: note = synthetic [barcode part1]
  source 1..16: mol_type = other DNA
gtgtcggttagtacac

SEQ ID NO: 35851 - DNA, 16 bp, synthetic construct
  misc_feature 1..16: note = synthetic [barcode part1]
  source 1..16: mol_type = other DNA
attcagacgtcactct

SEQ ID NO: 35852 - DNA, 16 bp, synthetic construct
  misc_feature 1..16: note = synthetic [barcode part1]
  source 1..16: mol_type = other DNA
ccaggtggaataatac

SEQ ID NO: 35853 - DNA, 16 bp, synthetic construct
  misc_feature 1..16: note = synthetic [barcode part1]
  source 1..16: mol_type = other DNA
tgtaagattggtggtg

SEQ ID NO: 35854 - DNA, 16 bp, synthetic construct
  misc_feature 1..16: note = synthetic [barcode part1]
  source 1..16: mol_type = other DNA
caagatcaaccggttc

SEQ ID NO: 35855 - DNA, 16 bp, synthetic construct
  misc_feature 1..16: note = synthetic [barcode part1]
  source 1..16: mol_type = other DNA
tccaattcgtagtcac

SEQ ID NO: 35856 - DNA, 16 bp, synthetic construct
  misc_feature 1..16: note = synthetic [barcode part1]
  source 1..16: mol_type = other DNA
accggtacacctcgtt

SEQ ID NO: 35857 - DNA, 16 bp, synthetic construct
  misc_feature 1..16: note = synthetic [barcode part1]
  source 1..16: mol_type = other DNA
tgagatacacttcgcg

SEQ ID NO: 35858 - DNA, 16 bp, synthetic construct
  misc_feature 1..16: note = synthetic [barcode part1]
  source 1..16: mol_type = other DNA
ttctgccaggtctacg

SEQ ID NO: 35859 - DNA, 16 bp, synthetic construct
  misc_feature 1..16: note = synthetic [barcode part1]
  source 1..16: mol_type = other DNA
gcgtacaaggagaagt

SEQ ID NO: 35860 - DNA, 16 bp, synthetic construct
  misc_feature 1..16: note = synthetic [barcode part1]
  source 1..16: mol_type = other DNA
gttccgtgaacactcc

SEQ ID NO: 35861 - DNA, 16 bp, synthetic construct
  misc_feature 1..16: note = synthetic [barcode part1]
  source 1..16: mol_type = other DNA
gattgcgttagaaggt

SEQ ID NO: 35862 - DNA, 16 bp, synthetic construct
  misc_feature 1..16: note = synthetic [barcode part1]
  source 1..16: mol_type = other DNA
tcgacggtattggatc

SEQ ID NO: 35863 - DNA, 16 bp, synthetic construct
  misc_feature 1..16: note = synthetic [barcode part1]
  source 1..16: mol_type = other DNA
agaggtggatacagac

SEQ ID NO: 35864 - DNA, 16 bp, synthetic construct
  misc_feature 1..16: note = synthetic [barcode part1]
  source 1..16: mol_type = other DNA
tctcaatcgactcctc

SEQ ID NO: 35865 - DNA, 16 bp, synthetic construct
  misc_feature 1..16: note = synthetic [barcode part1]
  source 1..16: mol_type = other DNA
atcttggttggccaag

SEQ ID NO: 35866 - DNA, 16 bp, synthetic construct
  misc_feature 1..16: note = synthetic [barcode part1]
  source 1..16: mol_type = other DNA
accttgtgaacacctt

SEQ ID NO: 35867 - DNA, 16 bp, synthetic construct
  misc_feature 1..16: note = synthetic [barcode part1]
  source 1..16: mol_type = other DNA
attcaccggattctgt

SEQ ID NO: 35868 - DNA, 16 bp, synthetic construct
  misc_feature 1..16: note = synthetic [barcode part1]
  source 1..16: mol_type = other DNA
gagagtacgttaggtt

SEQ ID NO: 35869 - DNA, 16 bp, synthetic construct
  misc_feature 1..16: note = synthetic [barcode part1]
  source 1..16: mol_type = other DNA
acaggacactcgtgag

SEQ ID NO: 35870 - DNA, 16 bp, synthetic construct
  misc_feature 1..16: note = synthetic [barcode part1]
  source 1..16: mol_type = other DNA
accactagaagtacag

SEQ ID NO: 35871 - DNA, 16 bp, synthetic construct
  misc_feature 1..16: note = synthetic [barcode part1]
  source 1..16: mol_type = other DNA
cctcctatagacttag

SEQ ID NO: 35872 - DNA, 16 bp, synthetic construct
  misc_feature 1..16: note = synthetic [barcode part1]
  source 1..16: mol_type = other DNA
gcggcgtaactaatct

SEQ ID NO: 35873 - DNA, 16 bp, synthetic construct
  misc_feature 1..16: note = synthetic [barcode part1]
  source 1..16: mol_type = other DNA
ccgttcacgtcgtaac

SEQ ID NO: 35874 - DNA, 16 bp, synthetic construct
  misc_feature 1..16: note = synthetic [barcode part1]
  source 1..16: mol_type = other DNA
attgattggtcggtcg

SEQ ID NO: 35875 - DNA, 16 bp, synthetic construct
  misc_feature 1..16: note = synthetic [barcode part1]
  source 1..16: mol_type = other DNA
tgaggacagatacgag

SEQ ID NO: 35876 - DNA, 16 bp, synthetic construct
  misc_feature 1..16: note = synthetic [barcode part1]
  source 1..16: mol_type = other DNA
atctagaactccacct

SEQ ID NO: 35877 - DNA, 16 bp, synthetic construct
  misc_feature 1..16: note = synthetic [barcode part1]
  source 1..16: mol_type = other DNA
cgacgtggaagtgatc

SEQ ID NO: 35878 - DNA, 16 bp, synthetic construct
  misc_feature 1..16: note = synthetic [barcode part1]
  source 1..16: mol_type = other DNA
acacacgataccacgt

SEQ ID NO: 35879 - DNA, 16 bp, synthetic construct
  misc_feature 1..16: note = synthetic [barcode part1]
  source 1..16: mol_type = other DNA
aggtgaacgttacagt

SEQ ID NO: 35880 - DNA, 16 bp, synthetic construct
  misc_feature 1..16: note = synthetic [barcode part1]
  source 1..16: mol_type = other DNA
caccagaataaggact

SEQ ID NO: 35881 - DNA, 16 bp, synthetic construct
  misc_feature 1..16: note = synthetic [barcode part1]
  source 1..16: mol_type = other DNA
actgagttcgcacctc

SEQ ID NO: 35882 - DNA, 16 bp, synthetic construct
  misc_feature 1..16: note = synthetic [barcode part1]
  source 1..16: mol_type = other DNA
cctcgttcactacttg

SEQ ID NO: 35883 - DNA, 16 bp, synthetic construct
  misc_feature 1..16: note = synthetic [barcode part1]
  source 1..16: mol_type = other DNA
aacaccaacgttgcac

SEQ ID NO: 35884 - DNA, 16 bp, synthetic construct
  misc_feature 1..16: note = synthetic [barcode part1]
  source 1..16: mol_type = other DNA
tatactctgaaccacc

SEQ ID NO: 35885 - DNA, 16 bp, synthetic construct
  misc_feature 1..16: note = synthetic [barcode part1]
  source 1..16: mol_type = other DNA
gactcggtgattcaac

SEQ ID NO: 35886 - DNA, 16 bp, synthetic construct
  misc_feature 1..16: note = synthetic [barcode part1]
  source 1..16: mol_type = other DNA
caacactacaacgtcg

SEQ ID NO: 35887 - DNA, 16 bp, synthetic construct
  misc_feature 1..16: note = synthetic [barcode part1]
  source 1..16: mol_type = other DNA
atccgaacgaacactc

SEQ ID NO: 35888 - DNA, 16 bp, synthetic construct
  misc_feature 1..16: note = synthetic [barcode part1]
  source 1..16: mol_type = other DNA
gcgtccaacaacgaag

SEQ ID NO: 35889 - DNA, 16 bp, synthetic construct
  misc_feature 1..16: note = synthetic [barcode part1]
  source 1..16: mol_type = other DNA
cacaatcaactacgcg

SEQ ID NO: 35890 - DNA, 16 bp, synthetic construct
  misc_feature 1..16: note = synthetic [barcode part1]
  source 1..16: mol_type = other DNA
ttggtagttacgtctc

SEQ ID NO: 35891 - DNA, 16 bp, synthetic construct
  misc_feature 1..16: note = synthetic [barcode part1]
  source 1..16: mol_type = other DNA
cgtaacgcacctacct

SEQ ID NO: 35892 - DNA, 16 bp, synthetic construct
  misc_feature 1..16: note = synthetic [barcode part1]
  source 1..16: mol_type = other DNA
ttggtcactaggactg

SEQ ID NO: 35893 - DNA, 16 bp, synthetic construct
  misc_feature 1..16: note = synthetic [barcode part1]
  source 1..16: mol_type = other DNA
ttccacacgatagtct

SEQ ID NO: 35894 - DNA, 16 bp, synthetic construct
  misc_feature 1..16: note = synthetic [barcode part1]
  source 1..16: mol_type = other DNA
cgaaccacgatctagt

SEQ ID NO: 35895 - DNA, 16 bp, synthetic construct
  misc_feature 1..16: note = synthetic [barcode part1]
  source 1..16: mol_type = other DNA
tgttcagacgtagtcg

SEQ ID NO: 35896 - DNA, 16 bp, synthetic construct
  misc_feature 1..16: note = synthetic [barcode part1]
  source 1..16: mol_type = other DNA
caacaacaaccgttgc

SEQ ID NO: 35897 - DNA, 16 bp, synthetic construct
  misc_feature 1..16: note = synthetic [barcode part1]
  source 1..16: mol_type = other DNA
cacgtctgtaaggatc

SEQ ID NO: 35898 - DNA, 16 bp, synthetic construct
  misc_feature 1..16: note = synthetic [barcode part1]
  source 1..16: mol_type = other DNA
gccagatataggagtt

SEQ ID NO: 35899 - DNA, 16 bp, synthetic construct
  misc_feature 1..16: note = synthetic [barcode part1]
  source 1..16: mol_type = other DNA
tctgtgcaccgttgac

SEQ ID NO: 35900 - DNA, 16 bp, synthetic construct
  misc_feature 1..16: note = synthetic [barcode part1]
  source 1..16: mol_type = other DNA
aggataaggcgtctgc

SEQ ID NO: 35901 - DNA, 16 bp, synthetic construct
  misc_feature 1..16: note = synthetic [barcode part1]
  source 1..16: mol_type = other DNA
tccggtcagagaatct

SEQ ID NO: 35902 - DNA, 16 bp, synthetic construct
  misc_feature 1..16: note = synthetic [barcode part1]
  source 1..16: mol_type = other DNA
tacaacacctatccgt

SEQ ID NO: 35903 - DNA, 16 bp, synthetic construct
  misc_feature 1..16: note = synthetic [barcode part1]
  source 1..16: mol_type = other DNA
tctcacaggttcaact

SEQ ID NO: 35904 - DNA, 16 bp, synthetic construct
  misc_feature 1..16: note = synthetic [barcode part1]
  source 1..16: mol_type = other DNA
tgttgcagtgtacacg

SEQ ID NO: 35905 - DNA, 16 bp, synthetic construct
  misc_feature 1..16: note = synthetic [barcode part1]
  source 1..16: mol_type = other DNA
tactaggtcgcacctc

SEQ ID NO: 35906 - DNA, 16 bp, synthetic construct
  misc_feature 1..16: note = synthetic [barcode part1]
  source 1..16: mol_type = other DNA
gcaatcacgcaattgc

SEQ ID NO: 35907 - DNA, 16 bp, synthetic construct
  misc_feature 1..16: note = synthetic [barcode part1]
  source 1..16: mol_type = other DNA
gcgcggtaacttcctt

SEQ ID NO: 35908 - DNA, 16 bp, synthetic construct
  misc_feature 1..16: note = synthetic [barcode part1]
  source 1..16: mol_type = other DNA
tacttgtattccggac

SEQ ID NO: 35909 - DNA, 16 bp, synthetic construct
  misc_feature 1..16: note = synthetic [barcode part1]
  source 1..16: mol_type = other DNA
gtgcaactcgacctct

SEQ ID NO: 35910 - DNA, 16 bp, synthetic construct
  misc_feature 1..16: note = synthetic [barcode part1]
  source 1..16: mol_type = other DNA
tcgaactacgcaggag

SEQ ID NO: 35911 - DNA, 16 bp, synthetic construct
  misc_feature 1..16: note = synthetic [barcode part1]
  source 1..16: mol_type = other DNA
cactcaatacagaccg

SEQ ID NO: 35912 - DNA, 16 bp, synthetic construct
  misc_feature 1..16: note = synthetic [barcode part1]
  source 1..16: mol_type = other DNA
gtggtacggttagtct

SEQ ID NO: 35913 - DNA, 16 bp, synthetic construct
  misc_feature 1..16: note = synthetic [barcode part1]
  source 1..16: mol_type = other DNA
cgaagacaggtcactg

SEQ ID NO: 35914 - DNA, 16 bp, synthetic construct
  misc_feature 1..16: note = synthetic [barcode part1]
  source 1..16: mol_type = other DNA
tgtcggacactgaact

SEQ ID NO: 35915 - DNA, 16 bp, synthetic construct
  misc_feature 1..16: note = synthetic [barcode part1]
  source 1..16: mol_type = other DNA
ccacagattgtgtggt

SEQ ID NO: 35916 - DNA, 16 bp, synthetic construct
  misc_feature 1..16: note = synthetic [barcode part1]
  source 1..16: mol_type = other DNA
cctagtcttctagtcc

SEQ ID NO: 35917 - DNA, 16 bp, synthetic construct
  misc_feature 1..16: note = synthetic [barcode part1]
  source 1..16: mol_type = other DNA
tggcagttcttacgtt

SEQ ID NO: 35918 - DNA, 16 bp, synthetic construct
  misc_feature 1..16: note = synthetic [barcode part1]
  source 1..16: mol_type = other DNA
tggtcaatctctcctc

SEQ ID NO: 35919 - DNA, 16 bp, synthetic construct
  misc_feature 1..16: note = synthetic [barcode part1]
  source 1..16: mol_type = other DNA
aggacgttcttgtgtg

SEQ ID NO: 35920 - DNA, 16 bp, synthetic construct
  misc_feature 1..16: note = synthetic [barcode part1]
  source 1..16: mol_type = other DNA
gttgtaaccgcctatt

SEQ ID NO: 35921 - DNA, 16 bp, synthetic construct
  misc_feature 1..16: note = synthetic [barcode part1]
  source 1..16: mol_type = other DNA
tgtctccttaagtcag

SEQ ID NO: 35922 - DNA, 16 bp, synthetic construct
  misc_feature 1..16: note = synthetic [barcode part1]
  source 1..16: mol_type = other DNA
ccgattcttgtacggc

SEQ ID NO: 35923 - DNA, 16 bp, synthetic construct
  misc_feature 1..16: note = synthetic [barcode part1]
  source 1..16: mol_type = other DNA
cgtgttaccgattccg

SEQ ID NO: 35924 - DNA, 16 bp, synthetic construct
  misc_feature 1..16: note = synthetic [barcode part1]
  source 1..16: mol_type = other DNA
cagactaggtctgatc

SEQ ID NO: 35925 - DNA, 16 bp, synthetic construct
  misc_feature 1..16: note = synthetic [barcode part1]
  source 1..16: mol_type = other DNA
gttgaggaccaacgtg

SEQ ID NO: 35926 - DNA, 16 bp, synthetic construct
  misc_feature 1..16: note = synthetic [barcode part1]
  source 1..16: mol_type = other DNA
tacctaggaggaccag

SEQ ID NO: 35927 - DNA, 16 bp, synthetic construct
  misc_feature 1..16: note = synthetic [barcode part1]
  source 1..16: mol_type = other DNA
tagtccaggtgatctg

SEQ ID NO: 35928 - DNA, 16 bp, synthetic construct
  misc_feature 1..16: note = synthetic [barcode part1]
  source 1..16: mol_type = other DNA
ataatacgcgttgcgc

SEQ ID NO: 35929 - DNA, 16 bp, synthetic construct
  misc_feature 1..16: note = synthetic [barcode part1]
  source 1..16: mol_type = other DNA
ttgttcggcagacagt

SEQ ID NO: 35930 - DNA, 16 bp, synthetic construct
  misc_feature 1..16: note = synthetic [barcode part1]
  source 1..16: mol_type = other DNA
aaccaggttatcgtcg

SEQ ID NO: 35931 - DNA, 16 bp, synthetic construct
  misc_feature 1..16: note = synthetic [barcode part1]
  source 1..16: mol_type = other DNA
tcgcagacagaggact

SEQ ID NO: 35932 - DNA, 16 bp, synthetic construct
  misc_feature 1..16: note = synthetic [barcode part1]
  source 1..16: mol_type = other DNA
aatctctctaacgtgc

SEQ ID NO: 35933 - DNA, 16 bp, synthetic construct
  misc_feature 1..16: note = synthetic [barcode part1]
  source 1..16: mol_type = other DNA
aattcctctaacgcac

SEQ ID NO: 35934 - DNA, 16 bp, synthetic construct
  misc_feature 1..16: note = synthetic [barcode part1]
  source 1..16: mol_type = other DNA
atcaacctgtgacacg

SEQ ID NO: 35935 - DNA, 16 bp, synthetic construct
  misc_feature 1..16: note = synthetic [barcode part1]
  source 1..16: mol_type = other DNA
gaggatacgagagtgt

SEQ ID NO: 35936 - DNA, 16 bp, synthetic construct
  misc_feature 1..16: note = synthetic [barcode part1]
  source 1..16: mol_type = other DNA
tggcaatcacgaggac

SEQ ID NO: 35937 - DNA, 16 bp, synthetic construct
  misc_feature 1..16: note = synthetic [barcode part1]
  source 1..16: mol_type = other DNA
gttataaccactcacc

SEQ ID NO: 35938 - DNA, 16 bp, synthetic construct
  misc_feature 1..16: note = synthetic [barcode part1]
  source 1..16: mol_type = other DNA
gagacacttaacagtg

SEQ ID NO: 35939 - DNA, 16 bp, synthetic construct
  misc_feature 1..16: note = synthetic [barcode part1]
  source 1..16: mol_type = other DNA
tgcgttctctggcaac

SEQ ID NO: 35940 - DNA, 16 bp, synthetic construct
  misc_feature 1..16: note = synthetic [barcode part1]
  source 1..16: mol_type = other DNA
gattaaggtaatcgcg

SEQ ID NO: 35941 - DNA, 16 bp, synthetic construct
  misc_feature 1..16: note = synthetic [barcode part1]
  source 1..16: mol_type = other DNA
acttatcagtgttgcc

SEQ ID NO: 35942 - DNA, 16 bp, synthetic construct
  misc_feature 1..16: note = synthetic [barcode part1]
  source 1..16: mol_type = other DNA
agtgtcggaaggaagt

SEQ ID NO: 35943 - DNA, 16 bp, synthetic construct
  misc_feature 1..16: note = synthetic [barcode part1]
  source 1..16: mol_type = other DNA
tctattgtcaagtgcc

SEQ ID NO: 35944 - DNA, 16 bp, synthetic construct
  misc_feature 1..16: note = synthetic [barcode part1]
  source 1..16: mol_type = other DNA
tcactgtgcgaatctt

SEQ ID NO: 35945 - DNA, 16 bp, synthetic construct
  misc_feature 1..16: note = synthetic [barcode part1]
  source 1..16: mol_type = other DNA
gcaatcaccgatctcc

SEQ ID NO: 35946 - DNA, 16 bp, synthetic construct
  misc_feature 1..16: note = synthetic [barcode part1]
  source 1..16: mol_type = other DNA
cgtaacgtactcactt

SEQ ID NO: 35947 - DNA, 16 bp, synthetic construct
  misc_feature 1..16: note = synthetic [barcode part1]
  source 1..16: mol_type = other DNA
cacttaccaagacctt

SEQ ID NO: 35948 - DNA, 16 bp, synthetic construct
  misc_feature 1..16: note = synthetic [barcode part1]
  source 1..16: mol_type = other DNA
gcaatactcctaggac

SEQ ID NO: 35949 - DNA, 16 bp, synthetic construct
  misc_feature 1..16: note = synthetic [barcode part1]
  source 1..16: mol_type = other DNA
gcgaagaggttgtcac

SEQ ID NO: 35950 - DNA, 16 bp, synthetic construct
  misc_feature 1..16: note = synthetic [barcode part1]
  source 1..16: mol_type = other DNA
agtcgatactgatcgc

SEQ ID NO: 35951 - DNA, 16 bp, synthetic construct
  misc_feature 1..16: note = synthetic [barcode part1]
  source 1..16: mol_type = other DNA
ccagacctgatagttg

SEQ ID NO: 35952 - DNA, 16 bp, synthetic construct
  misc_feature 1..16: note = synthetic [barcode part1]
  source 1..16: mol_type = other DNA
ccgaagtgtggtatct

SEQ ID NO: 35953 - DNA, 16 bp, synthetic construct
  misc_feature 1..16: note = synthetic [barcode part1]
  source 1..16: mol_type = other DNA
ttagttctaagtccgc

SEQ ID NO: 35954 - DNA, 16 bp, synthetic construct
  misc_feature 1..16: note = synthetic [barcode part1]
  source 1..16: mol_type = other DNA
tacgatcacactcgag

SEQ ID NO: 35955 - DNA, 16 bp, synthetic construct
  misc_feature 1..16: note = synthetic [barcode part1]
  source 1..16: mol_type = other DNA
tcgtaacttaggaccg

SEQ ID NO: 35956 - DNA, 16 bp, synthetic construct
  misc_feature 1..16: note = synthetic [barcode part1]
  source 1..16: mol_type = other DNA
tgaaccacgcgtcttc

SEQ ID NO: 35957 - DNA, 16 bp, synthetic construct
  misc_feature 1..16: note = synthetic [barcode part1]
  source 1..16: mol_type = other DNA
cgacaacctagatcgt

SEQ ID NO: 35958 - DNA, 16 bp, synthetic construct
  misc_feature 1..16: note = synthetic [barcode part1]
  source 1..16: mol_type = other DNA
aaggtagagtgttcgt

SEQ ID NO: 35959 - DNA, 16 bp, synthetic construct
  misc_feature 1..16: note = synthetic [barcode part1]
  source 1..16: mol_type = other DNA
attcgtcgtaggtggt

SEQ ID NO: 35960 - DNA, 16 bp, synthetic construct
  misc_feature 1..16: note = synthetic [barcode part1]
  source 1..16: mol_type = other DNA
gaccgtaagaagatct

SEQ ID NO: 35961 - DNA, 16 bp, synthetic construct
  misc_feature 1..16: note = synthetic [barcode part1]
  source 1..16: mol_type = other DNA
actctatcgaatccac

SEQ ID NO: 35962 - DNA, 16 bp, synthetic construct
  misc_feature 1..16: note = synthetic [barcode part1]
  source 1..16: mol_type = other DNA
tgccgccagatattcc

SEQ ID NO: 35963 - DNA, 16 bp, synthetic construct
  misc_feature 1..16: note = synthetic [barcode part1]
  source 1..16: mol_type = other DNA
agtgatcctgaaccac

SEQ ID NO: 35964 - DNA, 16 bp, synthetic construct
  misc_feature 1..16: note = synthetic [barcode part1]
  source 1..16: mol_type = other DNA
tgagaattcgttggag

SEQ ID NO: 35965 - DNA, 16 bp, synthetic construct
  misc_feature 1..16: note = synthetic [barcode part1]
  source 1..16: mol_type = other DNA
gtaccagaggaattgt

SEQ ID NO: 35966 - DNA, 16 bp, synthetic construct
  misc_feature 1..16: note = synthetic [barcode part1]
  source 1..16: mol_type = other DNA
aattcaaggtcgccac

SEQ ID NO: 35967 - DNA, 16 bp, synthetic construct
  misc_feature 1..16: note = synthetic [barcode part1]
  source 1..16: mol_type = other DNA
atctgtgtcttcagtg

SEQ ID NO: 35968 - DNA, 16 bp, synthetic construct
  misc_feature 1..16: note = synthetic [barcode part1]
  source 1..16: mol_type = other DNA
ccaactactggaatcg

SEQ ID NO: 35969 - DNA, 16 bp, synthetic construct
  misc_feature 1..16: note = synthetic [barcode part1]
  source 1..16: mol_type = other DNA
gtgaattcctcactgt

SEQ ID NO: 35970 - DNA, 16 bp, synthetic construct
  misc_feature 1..16: note = synthetic [barcode part1]
  source 1..16: mol_type = other DNA
tctgcgccagtgatct

SEQ ID NO: 35971 - DNA, 16 bp, synthetic construct
  misc_feature 1..16: note = synthetic [barcode part1]
  source 1..16: mol_type = other DNA
gtcgagaatactaacg

SEQ ID NO: 35972 - DNA, 16 bp, synthetic construct
  misc_feature 1..16: note = synthetic [barcode part1]
  source 1..16: mol_type = other DNA
agaatcaggtccgcag

SEQ ID NO: 35973 - DNA, 16 bp, synthetic construct
  misc_feature 1..16: note = synthetic [barcode part1]
  source 1..16: mol_type = other DNA
attcactaacaccacc

SEQ ID NO: 35974 - DNA, 16 bp, synthetic construct
  misc_feature 1..16: note = synthetic [barcode part1]
  source 1..16: mol_type = other DNA
cctatatagtcgtcac

SEQ ID NO: 35975 - DNA, 16 bp, synthetic construct
  misc_feature 1..16: note = synthetic [barcode part1]
  source 1..16: mol_type = other DNA
cacagttactaccttg

SEQ ID NO: 35976 - DNA, 16 bp, synthetic construct
  misc_feature 1..16: note = synthetic [barcode part1]
  source 1..16: mol_type = other DNA
agttgaagtggtcgcg

SEQ ID NO: 35977 - DNA, 16 bp, synthetic construct
  misc_feature 1..16: note = synthetic [barcode part1]
  source 1..16: mol_type = other DNA
gtatacgactggttgc

SEQ ID NO: 35978 - DNA, 16 bp, synthetic construct
  misc_feature 1..16: note = synthetic [barcode part1]
  source 1..16: mol_type = other DNA
accagagaacttcctg

SEQ ID NO: 35979 - DNA, 16 bp, synthetic construct
  misc_feature 1..16: note = synthetic [barcode part1]
  source 1..16: mol_type = other DNA
ttgcctcgatctatag

SEQ ID NO: 35980 - DNA, 16 bp, synthetic construct
  misc_feature 1..16: note = synthetic [barcode part1]
  source 1..16: mol_type = other DNA
gcaccaggagacaatc

SEQ ID NO: 35981 - DNA, 16 bp, synthetic construct
  misc_feature 1..16: note = synthetic [barcode part1]
  source 1..16: mol_type = other DNA
cgtgtagtggaagatt

SEQ ID NO: 35982 - DNA, 16 bp, synthetic construct
  misc_feature 1..16: note = synthetic [barcode part1]
  source 1..16: mol_type = other DNA
tgtgagtaggtctgtc

SEQ ID NO: 35983 - DNA, 16 bp, synthetic construct
  misc_feature 1..16: note = synthetic [barcode part1]
  source 1..16: mol_type = other DNA
cggatatcctcaccac

SEQ ID NO: 35984 - DNA, 16 bp, synthetic construct
  misc_feature 1..16: note = synthetic [barcode part1]
  source 1..16: mol_type = other DNA
ttgcagatccgtagac

SEQ ID NO: 35985 - DNA, 16 bp, synthetic construct
  misc_feature 1..16: note = synthetic [barcode part1]
  source 1..16: mol_type = other DNA
cctcgtgtggcaatct

SEQ ID NO: 35986 - DNA, 16 bp, synthetic construct
  misc_feature 1..16: note = synthetic [barcode part1]
  source 1..16: mol_type = other DNA
gcagtcgtcaacttcc

SEQ ID NO: 35987 - DNA, 16 bp, synthetic construct
  misc_feature 1..16: note = synthetic [barcode part1]
  source 1..16: mol_type = other DNA
tcgaacggaacctact

SEQ ID NO: 35988 - DNA, 16 bp, synthetic construct
  misc_feature 1..16: note = synthetic [barcode part1]
  source 1..16: mol_type = other DNA
cgacctcaccaacgtt

SEQ ID NO: 35989 - DNA, 16 bp, synthetic construct
  misc_feature 1..16: note = synthetic [barcode part1]
  source 1..16: mol_type = other DNA
gtagttgatcggtacc

SEQ ID NO: 35990 - DNA, 16 bp, synthetic construct
  misc_feature 1..16: note = synthetic [barcode part1]
  source 1..16: mol_type = other DNA
agttaacaccggtcgt

SEQ ID NO: 35991 - DNA, 16 bp, synthetic construct
  misc_feature 1..16: note = synthetic [barcode part1]
  source 1..16: mol_type = other DNA
cacggatctgccttgt

SEQ ID NO: 35992 - DNA, 16 bp, synthetic construct
  misc_feature 1..16: note = synthetic [barcode part1]
  source 1..16: mol_type = other DNA
gcgatcgagaaggttc

SEQ ID NO: 35993 - DNA, 16 bp, synthetic construct
  misc_feature 1..16: note = synthetic [barcode part1]
  source 1..16: mol_type = other DNA
tgtcagtacacaccag

SEQ ID NO: 35994 - DNA, 16 bp, synthetic construct
  misc_feature 1..16: note = synthetic [barcode part1]
  source 1..16: mol_type = other DNA
gacgtagagtgacctg

SEQ ID NO: 35995 - DNA, 16 bp, synthetic construct
  misc_feature 1..16: note = synthetic [barcode part1]
  source 1..16: mol_type = other DNA
gttgactagtcggttg

SEQ ID NO: 35996 - DNA, 16 bp, synthetic construct
  misc_feature 1..16: note = synthetic [barcode part1]
  source 1..16: mol_type = other DNA
gcgtgtcctcaatctg

SEQ ID NO: 35997 - DNA, 16 bp, synthetic construct
  misc_feature 1..16: note = synthetic [barcode part1]
  source 1..16: mol_type = other DNA
gattaccacctggtag

SEQ ID NO: 35998 - DNA, 16 bp, synthetic construct
  misc_feature 1..16: note = synthetic [barcode part1]
  source 1..16: mol_type = other DNA
tgtctaggtcacctcg

SEQ ID NO: 35999 - DNA, 16 bp, synthetic construct
  misc_feature 1..16: note = synthetic [barcode part1]
  source 1..16: mol_type = other DNA
gacgaacagtgtcgtg

SEQ ID NO: 36000 - DNA, 16 bp, synthetic construct
  misc_feature 1..16: note = synthetic [barcode part1]
  source 1..16: mol_type = other DNA
acgtaggttgtactcg

SEQ ID NO: 36001 - DNA, 16 bp, synthetic construct
  misc_feature 1..16: note = synthetic [barcode part1]
  source 1..16: mol_type = other DNA
agaattgtctcgccag

SEQ ID NO: 36002 - DNA, 16 bp, synthetic construct
  misc_feature 1..16: note = synthetic [barcode part1]
  source 1..16: mol_type = other DNA
acgtgagttgttagag

SEQ ID NO: 36003 - DNA, 16 bp, synthetic construct
  misc_feature 1..16: note = synthetic [barcode part1]
  source 1..16: mol_type = other DNA
ttggtgaaggtacggc

SEQ ID NO: 36004 - DNA, 16 bp, synthetic construct
  misc_feature 1..16: note = synthetic [barcode part1]
  source 1..16: mol_type = other DNA
gtacctatcacttcag

SEQ ID NO: 36005 - DNA, 16 bp, synthetic construct
  misc_feature 1..16: note = synthetic [barcode part1]
  source 1..16: mol_type = other DNA
attatcctgtccgaac

SEQ ID NO: 36006 - DNA, 16 bp, synthetic construct
  misc_feature 1..16: note = synthetic [barcode part1]
  source 1..16: mol_type = other DNA
ttacgtggaccgagag

SEQ ID NO: 36007 - DNA, 16 bp, synthetic construct
  misc_feature 1..16: note = synthetic [barcode part1]
  source 1..16: mol_type = other DNA
tcctctcgtattgcgt

SEQ ID NO: 36008 - DNA, 16 bp, synthetic construct
  misc_feature 1..16: note = synthetic [barcode part1]
  source 1..16: mol_type = other DNA
aataggattgacgtgc

SEQ ID NO: 36009 - DNA, 16 bp, synthetic construct
  misc_feature 1..16: note = synthetic [barcode part1]
  source 1..16: mol_type = other DNA
tatattggtcggcgtg

SEQ ID NO: 36010 - DNA, 16 bp, synthetic construct
  misc_feature 1..16: note = synthetic [barcode part1]
  source 1..16: mol_type = other DNA
tgatagacaggtactg

SEQ ID NO: 36011 - DNA, 16 bp, synthetic construct
  misc_feature 1..16: note = synthetic [barcode part1]
  source 1..16: mol_type = other DNA
caactctgcacaccgt

SEQ ID NO: 36012 - DNA, 16 bp, synthetic construct
  misc_feature 1..16: note = synthetic [barcode part1]
  source 1..16: mol_type = other DNA
gtgttagtcggtacac

SEQ ID NO: 36013 - DNA, 16 bp, synthetic construct
  misc_feature 1..16: note = synthetic [barcode part1]
  source 1..16: mol_type = other DNA
gaggaactggaagatc

SEQ ID NO: 36014 - DNA, 16 bp, synthetic construct
  misc_feature 1..16: note = synthetic [barcode part1]
  source 1..16: mol_type = other DNA
ttctccgatctggacg

SEQ ID NO: 36015 - DNA, 16 bp, synthetic construct
  misc_feature 1..16: note = synthetic [barcode part1]
  source 1..16: mol_type = other DNA
gacttcaacttactcg

SEQ ID NO: 36016 - DNA, 16 bp, synthetic construct
  misc_feature 1..16: note = synthetic [barcode part1]
  source 1..16: mol_type = other DNA
cgagtatcgtgagttc

SEQ ID NO: 36017 - DNA, 16 bp, synthetic construct
  misc_feature 1..16: note = synthetic [barcode part1]
  source 1..16: mol_type = other DNA
gtgaactgaagatcac

SEQ ID NO: 36018 - DNA, 16 bp, synthetic construct
  misc_feature 1..16: note = synthetic [barcode part1]
  source 1..16: mol_type = other DNA
gttgtacagtcgtacg

SEQ ID NO: 36019 - DNA, 16 bp, synthetic construct
  misc_feature 1..16: note = synthetic [barcode part1]
  source 1..16: mol_type = other DNA
cagattggtataggac

SEQ ID NO: 36020 - DNA, 16 bp, synthetic construct
  misc_feature 1..16: note = synthetic [barcode part1]
  source 1..16: mol_type = other DNA
actcgcctagaatctt

SEQ ID NO: 36021 - DNA, 16 bp, synthetic construct
  misc_feature 1..16: note = synthetic [barcode part1]
  source 1..16: mol_type = other DNA
cagttctcaacgtgtt

SEQ ID NO: 36022 - DNA, 16 bp, synthetic construct
  misc_feature 1..16: note = synthetic [barcode part1]
  source 1..16: mol_type = other DNA
agttattgtctccgtg

SEQ ID NO: 36023 - DNA, 16 bp, synthetic construct
  misc_feature 1..16: note = synthetic [barcode part1]
  source 1..16: mol_type = other DNA
atctacgatcgtcttg

SEQ ID NO: 36024 - DNA, 16 bp, synthetic construct
  misc_feature 1..16: note = synthetic [barcode part1]
  source 1..16: mol_type = other DNA
tagacctcggatatcg

SEQ ID NO: 36025 - DNA, 16 bp, synthetic construct
  misc_feature 1..16: note = synthetic [barcode part1]
  source 1..16: mol_type = other DNA
acaactgcctcctgac

SEQ ID NO: 36026 - DNA, 16 bp, synthetic construct
  misc_feature 1..16: note = synthetic [barcode part1]
  source 1..16: mol_type = other DNA
tctcgtgaatctgatc

SEQ ID NO: 36027 - DNA, 16 bp, synthetic construct
  misc_feature 1..16: note = synthetic [barcode part1]
  source 1..16: mol_type = other DNA
cgagtcacctcgtgtt

SEQ ID NO: 36028 - DNA, 16 bp, synthetic construct
  misc_feature 1..16: note = synthetic [barcode part1]
  source 1..16: mol_type = other DNA
attgcgaagatcctgc

SEQ ID NO: 36029 - DNA, 16 bp, synthetic construct
  misc_feature 1..16: note = synthetic [barcode part1]
  source 1..16: mol_type = other DNA
tccactcgaatcttag

SEQ ID NO: 36030 - DNA, 16 bp, synthetic construct
  misc_feature 1..16: note = synthetic [barcode part1]
  source 1..16: mol_type = other DNA
attccgtctcgatcct

SEQ ID NO: 36031 - DNA, 16 bp, synthetic construct
  misc_feature 1..16: note = synthetic [barcode part1]
  source 1..16: mol_type = other DNA
atagttactggccttc

SEQ ID NO: 36032 - DNA, 16 bp, synthetic construct
  misc_feature 1..16: note = synthetic [barcode part1]
  source 1..16: mol_type = other DNA
caccgccaacaataac

SEQ ID NO: 36033 - DNA, 16 bp, synthetic construct
  misc_feature 1..16: note = synthetic [barcode part1]
  source 1..16: mol_type = other DNA
taggaggtacgtaatc

SEQ ID NO: 36034 - DNA, 16 bp, synthetic construct
  misc_feature 1..16: note = synthetic [barcode part1]
  source 1..16: mol_type = other DNA
tctcctgataattgcg

SEQ ID NO: 36035 - DNA, 16 bp, synthetic construct
  misc_feature 1..16: note = synthetic [barcode part1]
  source 1..16: mol_type = other DNA
gtactccgtcactgac

SEQ ID NO: 36036 - DNA, 16 bp, synthetic construct
  misc_feature 1..16: note = synthetic [barcode part1]
  source 1..16: mol_type = other DNA
gtcaggagtcgtgtag

SEQ ID NO: 36037 - DNA, 16 bp, synthetic construct
  misc_feature 1..16: note = synthetic [barcode part1]
  source 1..16: mol_type = other DNA
agtctggcgcagaagt

SEQ ID NO: 36038 - DNA, 16 bp, synthetic construct
  misc_feature 1..16: note = synthetic [barcode part1]
  source 1..16: mol_type = other DNA
gtcactaccgagttag

SEQ ID NO: 36039 - DNA, 16 bp, synthetic construct
  misc_feature 1..16: note = synthetic [barcode part1]
  source 1..16: mol_type = other DNA
tacgacactcggaatc

SEQ ID NO: 36040 - DNA, 16 bp, synthetic construct
  misc_feature 1..16: note = synthetic [barcode part1]
  source 1..16: mol_type = other DNA
ttctgagttacctacg

SEQ ID NO: 36041 - DNA, 16 bp, synthetic construct
  misc_feature 1..16: note = synthetic [barcode part1]
  source 1..16: mol_type = other DNA
gcggccagttaatact

SEQ ID NO: 36042 - DNA, 16 bp, synthetic construct
  misc_feature 1..16: note = synthetic [barcode part1]
  source 1..16: mol_type = other DNA
acaacggagatattcg

SEQ ID NO: 36043 - DNA, 16 bp, synthetic construct
  misc_feature 1..16: note = synthetic [barcode part1]
  source 1..16: mol_type = other DNA
accggtaaggtatcct

SEQ ID NO: 36044 - DNA, 16 bp, synthetic construct
  misc_feature 1..16: note = synthetic [barcode part1]
  source 1..16: mol_type = other DNA
aacgtgtatatcggcc

SEQ ID NO: 36045 - DNA, 16 bp, synthetic construct
  misc_feature 1..16: note = synthetic [barcode part1]
  source 1..16: mol_type = other DNA
agtgtgttacgcgatc

SEQ ID NO: 36046 - DNA, 16 bp, synthetic construct
  misc_feature 1..16: note = synthetic [barcode part1]
  source 1..16: mol_type = other DNA
agtcgagttgcacgag

SEQ ID NO: 36047 - DNA, 16 bp, synthetic construct
  misc_feature 1..16: note = synthetic [barcode part1]
  source 1..16: mol_type = other DNA
tcttaggccacagtag

SEQ ID NO: 36048 - DNA, 16 bp, synthetic construct
  misc_feature 1..16: note = synthetic [barcode part1]
  source 1..16: mol_type = other DNA
tgatcgtctcaatctg

SEQ ID NO: 36049 - DNA, 16 bp, synthetic construct
  misc_feature 1..16: note = synthetic [barcode part1]
  source 1..16: mol_type = other DNA
tgtcgtccgaattcgc

SEQ ID NO: 36050 - DNA, 16 bp, synthetic construct
  misc_feature 1..16: note = synthetic [barcode part1]
  source 1..16: mol_type = other DNA
accgaactgaggacgt

SEQ ID NO: 36051 - DNA, 16 bp, synthetic construct
  misc_feature 1..16: note = synthetic [barcode part1]
  source 1..16: mol_type = other DNA
gaattcactgccactt

SEQ ID NO: 36052 - DNA, 16 bp, synthetic construct
  misc_feature 1..16: note = synthetic [barcode part1]
  source 1..16: mol_type = other DNA
gtagtacttggttggc

SEQ ID NO: 36053 - DNA, 16 bp, synthetic construct
  misc_feature 1..16: note = synthetic [barcode part1]
  source 1..16: mol_type = other DNA
acaacgttgcagtgtc

SEQ ID NO: 36054 - DNA, 16 bp, synthetic construct
  misc_feature 1..16: note = synthetic [barcode part1]
  source 1..16: mol_type = other DNA
ttcacgcagttgtcgc

SEQ ID NO: 36055 - DNA, 16 bp, synthetic construct
  misc_feature 1..16: note = synthetic [barcode part1]
  source 1..16: mol_type = other DNA
tcaacagatctctacc

SEQ ID NO: 36056 - DNA, 16 bp, synthetic construct
  misc_feature 1..16: note = synthetic [barcode part1]
  source 1..16: mol_type = other DNA
aggcgatctagtatag

SEQ ID NO: 36057 - DNA, 16 bp, synthetic construct
  misc_feature 1..16: note = synthetic [barcode part1]
  source 1..16: mol_type = other DNA
aaccacgccgaagagt

SEQ ID NO: 36058 - DNA, 16 bp, synthetic construct
  misc_feature 1..16: note = synthetic [barcode part1]
  source 1..16: mol_type = other DNA
aagtagtgcgtctaag

SEQ ID NO: 36059 - DNA, 16 bp, synthetic construct
  misc_feature 1..16: note = synthetic [barcode part1]
  source 1..16: mol_type = other DNA
caccacgagttgattg

SEQ ID NO: 36060 - DNA, 16 bp, synthetic construct
  misc_feature 1..16: note = synthetic [barcode part1]
  source 1..16: mol_type = other DNA
gcaacgtctccttctt

SEQ ID NO: 36061 - DNA, 16 bp, synthetic construct
  misc_feature 1..16: note = synthetic [barcode part1]
  source 1..16: mol_type = other DNA
cgcctccactgaattg

SEQ ID NO: 36062 - DNA, 16 bp, synthetic construct
  misc_feature 1..16: note = synthetic [barcode part1]
  source 1..16: mol_type = other DNA
taatccttctcggtcc

SEQ ID NO: 36063 - DNA, 16 bp, synthetic construct
  misc_feature 1..16: note = synthetic [barcode part1]
  source 1..16: mol_type = other DNA
agtgtaagtctctgcg

SEQ ID NO: 36064 - DNA, 16 bp, synthetic construct
  misc_feature 1..16: note = synthetic [barcode part1]
  source 1..16: mol_type = other DNA
cgagagagtattaacc

SEQ ID NO: 36065 - DNA, 16 bp, synthetic construct
  misc_feature 1..16: note = synthetic [barcode part1]
  source 1..16: mol_type = other DNA
gaatcggtgatcgcag

SEQ ID NO: 36066 - DNA, 16 bp, synthetic construct
  misc_feature 1..16: note = synthetic [barcode part1]
  source 1..16: mol_type = other DNA
aggacttggatcctac

SEQ ID NO: 36067 - DNA, 16 bp, synthetic construct
  misc_feature 1..16: note = synthetic [barcode part1]
  source 1..16: mol_type = other DNA
acaaccacgcgattac

SEQ ID NO: 36068 - DNA, 16 bp, synthetic construct
  misc_feature 1..16: note = synthetic [barcode part1]
  source 1..16: mol_type = other DNA
gcaagagtaacctggc

SEQ ID NO: 36069 - DNA, 16 bp, synthetic construct
  misc_feature 1..16: note = synthetic [barcode part1]
  source 1..16: mol_type = other DNA
gtctgtacgactcctg

SEQ ID NO: 36070 - DNA, 16 bp, synthetic construct
  misc_feature 1..16: note = synthetic [barcode part1]
  source 1..16: mol_type = other DNA
tagagatctactggag

SEQ ID NO: 36071 - DNA, 16 bp, synthetic construct
  misc_feature 1..16: note = synthetic [barcode part1]
  source 1..16: mol_type = other DNA
gtataacctggtcctt

SEQ ID NO: 36072 - DNA, 16 bp, synthetic construct
  misc_feature 1..16: note = synthetic [barcode part1]
  source 1..16: mol_type = other DNA
atagagtcgaacactg

SEQ ID NO: 36073 - DNA, 16 bp, synthetic construct
  misc_feature 1..16: note = synthetic [barcode part1]
  source 1..16: mol_type = other DNA
tacgcgaacggagtgt

SEQ ID NO: 36074 - DNA, 16 bp, synthetic construct
  misc_feature 1..16: note = synthetic [barcode part1]
  source 1..16: mol_type = other DNA
atcctcctggtacacg

SEQ ID NO: 36075 - DNA, 16 bp, synthetic construct
  misc_feature 1..16: note = synthetic [barcode part1]
  source 1..16: mol_type = other DNA
aatccggaccagatct

SEQ ID NO: 36076 - DNA, 16 bp, synthetic construct
  misc_feature 1..16: note = synthetic [barcode part1]
  source 1..16: mol_type = other DNA
tacctgattcttgacg

SEQ ID NO: 36077 - DNA, 16 bp, synthetic construct
  misc_feature 1..16: note = synthetic [barcode part1]
  source 1..16: mol_type = other DNA
gttgccgtcttgtacg

SEQ ID NO: 36078 - DNA, 16 bp, synthetic construct
  misc_feature 1..16: note = synthetic [barcode part1]
  source 1..16: mol_type = other DNA
tggtcaggtgtacact

SEQ ID NO: 36079 - DNA, 16 bp, synthetic construct
  misc_feature 1..16: note = synthetic [barcode part1]
  source 1..16: mol_type = other DNA
actggtgtattccact

SEQ ID NO: 36080 - DNA, 16 bp, synthetic construct
  misc_feature 1..16: note = synthetic [barcode part1]
  source 1..16: mol_type = other DNA
cagatcgcacaggagt

SEQ ID NO: 36081 - DNA, 16 bp, synthetic construct
  misc_feature 1..16: note = synthetic [barcode part1]
  source 1..16: mol_type = other DNA
gtctccgtgagttatt

SEQ ID NO: 36082 - DNA, 16 bp, synthetic construct
  misc_feature 1..16: note = synthetic [barcode part1]
  source 1..16: mol_type = other DNA
actcgtacacagactg

SEQ ID NO: 36083 - DNA, 16 bp, synthetic construct
  misc_feature 1..16: note = synthetic [barcode part1]
  source 1..16: mol_type = other DNA
cgcaataacagacggc

SEQ ID NO: 36084 - DNA, 16 bp, synthetic construct
  misc_feature 1..16: note = synthetic [barcode part1]
  source 1..16: mol_type = other DNA
tgccttcagttgttag

SEQ ID NO: 36085 - DNA, 16 bp, synthetic construct
  misc_feature 1..16: note = synthetic [barcode part1]
  source 1..16: mol_type = other DNA
attgcggcctgaagtt

SEQ ID NO: 36086 - DNA, 16 bp, synthetic construct
  misc_feature 1..16: note = synthetic [barcode part1]
  source 1..16: mol_type = other DNA
gtacaactacggtcac

SEQ ID NO: 36087 - DNA, 16 bp, synthetic construct
  misc_feature 1..16: note = synthetic [barcode part1]
  source 1..16: mol_type = other DNA
gttcgaggaatccgtt

SEQ ID NO: 36088 - DNA, 16 bp, synthetic construct
  misc_feature 1..16: note = synthetic [barcode part1]
  source 1..16: mol_type = other DNA
tcctcttcgtaacacc

SEQ ID NO: 36089 - DNA, 16 bp, synthetic construct
  misc_feature 1..16: note = synthetic [barcode part1]
  source 1..16: mol_type = other DNA
acgactataacgcgtc

SEQ ID NO: 36090 - DNA, 16 bp, synthetic construct
  misc_feature 1..16: note = synthetic [barcode part1]
  source 1..16: mol_type = other DNA
tggtaggtaggcactg

SEQ ID NO: 36091 - DNA, 16 bp, synthetic construct
  misc_feature 1..16: note = synthetic [barcode part1]
  source 1..16: mol_type = other DNA
attgaagaccgatacg

SEQ ID NO: 36092 - DNA, 16 bp, synthetic construct
  misc_feature 1..16: note = synthetic [barcode part1]
  source 1..16: mol_type = other DNA
cgtatccacaattcac

SEQ ID NO: 36093 - DNA, 16 bp, synthetic construct
  misc_feature 1..16: note = synthetic [barcode part1]
  source 1..16: mol_type = other DNA
gaaggtggtaacttac

SEQ ID NO: 36094 - DNA, 16 bp, synthetic construct
  misc_feature 1..16: note = synthetic [barcode part1]
  source 1..16: mol_type = other DNA
tgatccaaggcacgag

SEQ ID NO: 36095 - DNA, 16 bp, synthetic construct
  misc_feature 1..16: note = synthetic [barcode part1]
  source 1..16: mol_type = other DNA
cctcagttacggactc

SEQ ID NO: 36096 - DNA, 16 bp, synthetic construct
  misc_feature 1..16: note = synthetic [barcode part1]
  source 1..16: mol_type = other DNA
tgcgccttgccagatt

SEQ ID NO: 36097 - DNA, 16 bp, synthetic construct
  misc_feature 1..16: note = synthetic [barcode part1]
  source 1..16: mol_type = other DNA
tgtcaacaccagtacg

SEQ ID NO: 36098 - DNA, 16 bp, synthetic construct
  misc_feature 1..16: note = synthetic [barcode part1]
  source 1..16: mol_type = other DNA
aggcggattataacgt

SEQ ID NO: 36099 - DNA, 16 bp, synthetic construct
  misc_feature 1..16: note = synthetic [barcode part1]
  source 1..16: mol_type = other DNA
ttcgtatcggtaatcc

SEQ ID NO: 36100 - DNA, 16 bp, synthetic construct
  misc_feature 1..16: note = synthetic [barcode part1]
  source 1..16: mol_type = other DNA
ccgagaagactgtacg

SEQ ID NO: 36101 - DNA, 16 bp, synthetic construct
  misc_feature 1..16: note = synthetic [barcode part1]
  source 1..16: mol_type = other DNA
taacgactccttgtac

SEQ ID NO: 36102 - DNA, 16 bp, synthetic construct
  misc_feature 1..16: note = synthetic [barcode part1]
  source 1..16: mol_type = other DNA
ccaagtaatccacgac

SEQ ID NO: 36103 - DNA, 16 bp, synthetic construct
  misc_feature 1..16: note = synthetic [barcode part1]
  source 1..16: mol_type = other DNA
ttgacgttcttgactg

SEQ ID NO: 36104 - DNA, 16 bp, synthetic construct
  misc_feature 1..16: note = synthetic [barcode part1]
  source 1..16: mol_type = other DNA
gtactactacctgttg

SEQ ID NO: 36105 - DNA, 16 bp, synthetic construct
  misc_feature 1..16: note = synthetic [barcode part1]
  source 1..16: mol_type = other DNA
gagtggtgttgagaag

SEQ ID NO: 36106 - DNA, 16 bp, synthetic construct
  misc_feature 1..16: note = synthetic [barcode part1]
  source 1..16: mol_type = other DNA
gacctgcaggtgatag

SEQ ID NO: 36107 - DNA, 16 bp, synthetic construct
  misc_feature 1..16: note = synthetic [barcode part1]
  source 1..16: mol_type = other DNA
tcgtcacgttcgcaac

SEQ ID NO: 36108 - DNA, 16 bp, synthetic construct
  misc_feature 1..16: note = synthetic [barcode part1]
  source 1..16: mol_type = other DNA
tagtcagatcgactgc

SEQ ID NO: 36109 - DNA, 16 bp, synthetic construct
  misc_feature 1..16: note = synthetic [barcode part1]
  source 1..16: mol_type = other DNA
actctgcagacactcc

SEQ ID NO: 36110 - DNA, 16 bp, synthetic construct
  misc_feature 1..16: note = synthetic [barcode part1]
  source 1..16: mol_type = other DNA
gtaactaccgatcctt

SEQ ID NO: 36111 - DNA, 16 bp, synthetic construct
  misc_feature 1..16: note = synthetic [barcode part1]
  source 1..16: mol_type = other DNA
gtatacgcaacgtcac

SEQ ID NO: 36112 - DNA, 16 bp, synthetic construct
  misc_feature 1..16: note = synthetic [barcode part1]
  source 1..16: mol_type = other DNA
atccactcgagtgagt

SEQ ID NO: 36113 - DNA, 16 bp, synthetic construct
  misc_feature 1..16: note = synthetic [barcode part1]
  source 1..16: mol_type = other DNA
agaagttaccggcgtg

SEQ ID NO: 36114 - DNA, 16 bp, synthetic construct
  misc_feature 1..16: note = synthetic [barcode part1]
  source 1..16: mol_type = other DNA
tgatctgttcgcaccg

SEQ ID NO: 36115 - DNA, 16 bp, synthetic construct
  misc_feature 1..16: note = synthetic [barcode part1]
  source 1..16: mol_type = other DNA
gtaccgaacgcaactt

SEQ ID NO: 36116 - DNA, 16 bp, synthetic construct
  misc_feature 1..16: note = synthetic [barcode part1]
  source 1..16: mol_type = other DNA
aggaattactgacgtg

SEQ ID NO: 36117 - DNA, 16 bp, synthetic construct
  misc_feature 1..16: note = synthetic [barcode part1]
  source 1..16: mol_type = other DNA
actccactaggcctac

SEQ ID NO: 36118 - DNA, 16 bp, synthetic construct
  misc_feature 1..16: note = synthetic [barcode part1]
  source 1..16: mol_type = other DNA
cacgagacggttcaag

SEQ ID NO: 36119 - DNA, 16 bp, synthetic construct
  misc_feature 1..16: note = synthetic [barcode part1]
  source 1..16: mol_type = other DNA
gcactagacgtgatct

SEQ ID NO: 36120 - DNA, 16 bp, synthetic construct
  misc_feature 1..16: note = synthetic [barcode part1]
  source 1..16: mol_type = other DNA
gaacttgacggaacgc

SEQ ID NO: 36121 - DNA, 16 bp, synthetic construct
  misc_feature 1..16: note = synthetic [barcode part1]
  source 1..16: mol_type = other DNA
cgtgtggacctcttac

SEQ ID NO: 36122 - DNA, 16 bp, synthetic construct
  misc_feature 1..16: note = synthetic [barcode part1]
  source 1..16: mol_type = other DNA
aacctagaattcggcc

SEQ ID NO: 36123 - DNA, 16 bp, synthetic construct
  misc_feature 1..16: note = synthetic [barcode part1]
  source 1..16: mol_type = other DNA
gcaagttaatccgtgc

SEQ ID NO: 36124 - DNA, 16 bp, synthetic construct
  misc_feature 1..16: note = synthetic [barcode part1]
  source 1..16: mol_type = other DNA
cctggtgagtacgaag

SEQ ID NO: 36125 - DNA, 16 bp, synthetic construct
  misc_feature 1..16: note = synthetic [barcode part1]
  source 1..16: mol_type = other DNA
ttaagacgcctactct

SEQ ID NO: 36126 - DNA, 16 bp, synthetic construct
  misc_feature 1..16: note = synthetic [barcode part1]
  source 1..16: mol_type = other DNA
tacgttccttgacagt

SEQ ID NO: 36127 - DNA, 16 bp, synthetic construct
  misc_feature 1..16: note = synthetic [barcode part1]
  source 1..16: mol_type = other DNA
tggtcgagttgtggtt

SEQ ID NO: 36128 - DNA, 16 bp, synthetic construct
  misc_feature 1..16: note = synthetic [barcode part1]
  source 1..16: mol_type = other DNA
acgatctaggtgtaag

SEQ ID NO: 36129 - DNA, 16 bp, synthetic construct
  misc_feature 1..16: note = synthetic [barcode part1]
  source 1..16: mol_type = other DNA
cctaattcaacacgtc

SEQ ID NO: 36130 - DNA, 16 bp, synthetic construct
  misc_feature 1..16: note = synthetic [barcode part1]
  source 1..16: mol_type = other DNA
caattggaaccggttc

SEQ ID NO: 36131 - DNA, 16 bp, synthetic construct
  misc_feature 1..16: note = synthetic [barcode part1]
  source 1..16: mol_type = other DNA
tgaggcaactcaggtg

SEQ ID NO: 36132 - DNA, 16 bp, synthetic construct
  misc_feature 1..16: note = synthetic [barcode part1]
  source 1..16: mol_type = other DNA
taagagtgaaccgttg

SEQ ID NO: 36133 - DNA, 16 bp, synthetic construct
  misc_feature 1..16: note = synthetic [barcode part1]
  source 1..16: mol_type = other DNA
agataggaggtcttgt

SEQ ID NO: 36134 - DNA, 16 bp, synthetic construct
  misc_feature 1..16: note = synthetic [barcode part1]
  source 1..16: mol_type = other DNA
cgtgaataagtaacgc

SEQ ID NO: 36135 - DNA, 16 bp, synthetic construct
  misc_feature 1..16: note = synthetic [barcode part1]
  source 1..16: mol_type = other DNA
gtactccgttgtcgac

SEQ ID NO: 36136 - DNA, 16 bp, synthetic construct
  misc_feature 1..16: note = synthetic [barcode part1]
  source 1..16: mol_type = other DNA
atcacgaacttcaggc

SEQ ID NO: 36137 - DNA, 16 bp, synthetic construct
  misc_feature 1..16: note = synthetic [barcode part1]
  source 1..16: mol_type = other DNA
cgaacgtacacttggt

SEQ ID NO: 36138 - DNA, 16 bp, synthetic construct
  misc_feature 1..16: note = synthetic [barcode part1]
  source 1..16: mol_type = other DNA
tctcggcgactgtact

SEQ ID NO: 36139 - DNA, 16 bp, synthetic construct
  misc_feature 1..16: note = synthetic [barcode part1]
  source 1..16: mol_type = other DNA
tgcaggagttaggtcg

SEQ ID NO: 36140 - DNA, 16 bp, synthetic construct
  misc_feature 1..16: note = synthetic [barcode part1]
  source 1..16: mol_type = other DNA
aacagtctacgagaac

SEQ ID NO: 36141 - DNA, 16 bp, synthetic construct
  misc_feature 1..16: note = synthetic [barcode part1]
  source 1..16: mol_type = other DNA
ttacacgcgactacag

SEQ ID NO: 36142 - DNA, 16 bp, synthetic construct
  misc_feature 1..16: note = synthetic [barcode part1]
  source 1..16: mol_type = other DNA
caggcaacaccgtaag

SEQ ID NO: 36143 - DNA, 16 bp, synthetic construct
  misc_feature 1..16: note = synthetic [barcode part1]
  source 1..16: mol_type = other DNA
tggcggtaatctgatc

SEQ ID NO: 36144 - DNA, 16 bp, synthetic construct
  misc_feature 1..16: note = synthetic [barcode part1]
  source 1..16: mol_type = other DNA
gcggttgacgttaatc

SEQ ID NO: 36145 - DNA, 16 bp, synthetic construct
  misc_feature 1..16: note = synthetic [barcode part1]
  source 1..16: mol_type = other DNA
tgttccggaacttatc

SEQ ID NO: 36146 - DNA, 16 bp, synthetic construct
  misc_feature 1..16: note = synthetic [barcode part1]
  source 1..16: mol_type = other DNA
cgtggtgacctacttc

SEQ ID NO: 36147 - DNA, 16 bp, synthetic construct
  misc_feature 1..16: note = synthetic [barcode part1]
  source 1..16: mol_type = other DNA
gagtacttactcggac

SEQ ID NO: 36148 - DNA, 16 bp, synthetic construct
  misc_feature 1..16: note = synthetic [barcode part1]
  source 1..16: mol_type = other DNA
tctgtgtgttgtcagt

SEQ ID NO: 36149 - DNA, 16 bp, synthetic construct
  misc_feature 1..16: note = synthetic [barcode part1]
  source 1..16: mol_type = other DNA
tcgtaacaggattccg

SEQ ID NO: 36150 - DNA, 16 bp, synthetic construct
  misc_feature 1..16: note = synthetic [barcode part1]
  source 1..16: mol_type = other DNA
tagacgcgtattcggt

SEQ ID NO: 36151 - DNA, 16 bp, synthetic construct
  misc_feature 1..16: note = synthetic [barcode part1]
  source 1..16: mol_type = other DNA
ccgcctatctggaact

SEQ ID NO: 36152 - DNA, 16 bp, synthetic construct
  misc_feature 1..16: note = synthetic [barcode part1]
  source 1..16: mol_type = other DNA
tacgactctccaccag

SEQ ID NO: 36153 - DNA, 16 bp, synthetic construct
  misc_feature 1..16: note = synthetic [barcode part1]
  source 1..16: mol_type = other DNA
cactcgttcacagtgc

SEQ ID NO: 36154 - DNA, 16 bp, synthetic construct
  misc_feature 1..16: note = synthetic [barcode part1]
  source 1..16: mol_type = other DNA
cactcaagacctacag

SEQ ID NO: 36155 - DNA, 16 bp, synthetic construct
  misc_feature 1..16: note = synthetic [barcode part1]
  source 1..16: mol_type = other DNA
agacaattgcgtcaag

SEQ ID NO: 36156 - DNA, 16 bp, synthetic construct
  misc_feature 1..16: note = synthetic [barcode part1]
  source 1..16: mol_type = other DNA
gacaactgtatcttcc

SEQ ID NO: 36157 - DNA, 16 bp, synthetic construct
  misc_feature 1..16: note = synthetic [barcode part1]
  source 1..16: mol_type = other DNA
gaggtcttgtctgcct

SEQ ID NO: 36158 - DNA, 16 bp, synthetic construct
  misc_feature 1..16: note = synthetic [barcode part1]
  source 1..16: mol_type = other DNA
tgtactgtgtggtcag

SEQ ID NO: 36159 - DNA, 16 bp, synthetic construct
  misc_feature 1..16: note = synthetic [barcode part1]
  source 1..16: mol_type = other DNA
tcttaaccgtgccgac

SEQ ID NO: 36160 - DNA, 16 bp, synthetic construct
  misc_feature 1..16: note = synthetic [barcode part1]
  source 1..16: mol_type = other DNA
ccggtctacctagact

SEQ ID NO: 36161 - DNA, 16 bp, synthetic construct
  misc_feature 1..16: note = synthetic [barcode part1]
  source 1..16: mol_type = other DNA
tcgtgtagtgcactag

SEQ ID NO: 36162 - DNA, 16 bp, synthetic construct
  misc_feature 1..16: note = synthetic [barcode part1]
  source 1..16: mol_type = other DNA
gtacgtaccaactgac

SEQ ID NO: 36163 - DNA, 16 bp, synthetic construct
  misc_feature 1..16: note = synthetic [barcode part1]
  source 1..16: mol_type = other DNA
tcgaatagtcctgtct

SEQ ID NO: 36164 - DNA, 16 bp, synthetic construct
  misc_feature 1..16: note = synthetic [barcode part1]
  source 1..16: mol_type = other DNA
gtgtacagtcggttac

SEQ ID NO: 36165 - DNA, 16 bp, synthetic construct
  misc_feature 1..16: note = synthetic [barcode part1]
  source 1..16: mol_type = other DNA
caacactgacgttgtg

SEQ ID NO: 36166 - DNA, 16 bp, synthetic construct
  misc_feature 1..16: note = synthetic [barcode part1]
  source 1..16: mol_type = other DNA
actcacagttgtcttg

SEQ ID NO: 36167 - DNA, 16 bp, synthetic construct
  misc_feature 1..16: note = synthetic [barcode part1]
  source 1..16: mol_type = other DNA
gtgttacgacactacg

SEQ ID NO: 36168 - DNA, 16 bp, synthetic construct
  misc_feature 1..16: note = synthetic [barcode part1]
  source 1..16: mol_type = other DNA
tcttgtaggtctaacc

SEQ ID NO: 36169 - DNA, 16 bp, synthetic construct
  misc_feature 1..16: note = synthetic [barcode part1]
  source 1..16: mol_type = other DNA
gatctggttaggtcgt

SEQ ID NO: 36170 - DNA, 16 bp, synthetic construct
  misc_feature 1..16: note = synthetic [barcode part1]
  source 1..16: mol_type = other DNA
gatagatcactgtgag

SEQ ID NO: 36171 - DNA, 16 bp, synthetic construct
  misc_feature 1..16: note = synthetic [barcode part1]
  source 1..16: mol_type = other DNA
tcgcacttaagaacgc

SEQ ID NO: 36172 - DNA, 16 bp, synthetic construct
  misc_feature 1..16: note = synthetic [barcode part1]
  source 1..16: mol_type = other DNA
gcaatcaattggcacc

SEQ ID NO: 36173 - DNA, 16 bp, synthetic construct
  misc_feature 1..16: note = synthetic [barcode part1]
  source 1..16: mol_type = other DNA
gcgaatcgagaaccgt

SEQ ID NO: 36174 - DNA, 16 bp, synthetic construct
  misc_feature 1..16: note = synthetic [barcode part1]
  source 1..16: mol_type = other DNA
actacaactcactcgt

SEQ ID NO: 36175 - DNA, 16 bp, synthetic construct
  misc_feature 1..16: note = synthetic [barcode part1]
  source 1..16: mol_type = other DNA
aactcttcctcgttgc

SEQ ID NO: 36176 - DNA, 16 bp, synthetic construct
  misc_feature 1..16: note = synthetic [barcode part1]
  source 1..16: mol_type = other DNA
gtcagacttgtatcct

SEQ ID NO: 36177 - DNA, 16 bp, synthetic construct
  misc_feature 1..16: note = synthetic [barcode part1]
  source 1..16: mol_type = other DNA
tacgaacagtgaagtc

SEQ ID NO: 36178 - DNA, 16 bp, synthetic construct
  misc_feature 1..16: note = synthetic [barcode part1]
  source 1..16: mol_type = other DNA
gtacacggtcgcaatt

SEQ ID NO: 36179 - DNA, 16 bp, synthetic construct
  misc_feature 1..16: note = synthetic [barcode part1]
  source 1..16: mol_type = other DNA
ttggagtagtgtcgtc

SEQ ID NO: 36180 - DNA, 16 bp, synthetic construct
  misc_feature 1..16: note = synthetic [barcode part1]
  source 1..16: mol_type = other DNA
aacctgaacacttctc

SEQ ID NO: 36181 - DNA, 16 bp, synthetic construct
  misc_feature 1..16: note = synthetic [barcode part1]
  source 1..16: mol_type = other DNA
atagtgaatctaggcg

SEQ ID NO: 36182 - DNA, 16 bp, synthetic construct
  misc_feature 1..16: note = synthetic [barcode part1]
  source 1..16: mol_type = other DNA
aggccggatatcaacg

SEQ ID NO: 36183 - DNA, 16 bp, synthetic construct
  misc_feature 1..16: note = synthetic [barcode part1]
  source 1..16: mol_type = other DNA
cggaagttcaccagag

SEQ ID NO: 36184 - DNA, 16 bp, synthetic construct
  misc_feature 1..16: note = synthetic [barcode part1]
  source 1..16: mol_type = other DNA
cctgattcgcacgact

SEQ ID NO: 36185 - DNA, 16 bp, synthetic construct
  misc_feature 1..16: note = synthetic [barcode part1]
  source 1..16: mol_type = other DNA
aattgcgtgtaaccgc

SEQ ID NO: 36186 - DNA, 16 bp, synthetic construct
  misc_feature 1..16: note = synthetic [barcode part1]
  source 1..16: mol_type = other DNA
agtggttgacttggtc

SEQ ID NO: 36187 - DNA, 16 bp, synthetic construct
  misc_feature 1..16: note = synthetic [barcode part1]
  source 1..16: mol_type = other DNA
aacggactctggaacg

SEQ ID NO: 36188 - DNA, 16 bp, synthetic construct
  misc_feature 1..16: note = synthetic [barcode part1]
  source 1..16: mol_type = other DNA
gaataccaggcggtac

SEQ ID NO: 36189 - DNA, 16 bp, synthetic construct
  misc_feature 1..16: note = synthetic [barcode part1]
  source 1..16: mol_type = other DNA
cgtaggtctgcgaatt

SEQ ID NO: 36190 - DNA, 16 bp, synthetic construct
  misc_feature 1..16: note = synthetic [barcode part1]
  source 1..16: mol_type = other DNA
gagtatcttcactacc

SEQ ID NO: 36191 - DNA, 16 bp, synthetic construct
  misc_feature 1..16: note = synthetic [barcode part1]
  source 1..16: mol_type = other DNA
acgagtctataggcct

SEQ ID NO: 36192 - DNA, 16 bp, synthetic construct
  misc_feature 1..16: note = synthetic [barcode part1]
  source 1..16: mol_type = other DNA
aagtctcttcctcctg

SEQ ID NO: 36193 - DNA, 16 bp, synthetic construct
  misc_feature 1..16: note = synthetic [barcode part1]
  source 1..16: mol_type = other DNA
gcaggatagacagtag

SEQ ID NO: 36194 - DNA, 16 bp, synthetic construct
  misc_feature 1..16: note = synthetic [barcode part1]
  source 1..16: mol_type = other DNA
tccggttcgtagttgc

SEQ ID NO: 36195 - DNA, 16 bp, synthetic construct
  misc_feature 1..16: note = synthetic [barcode part1]
  source 1..16: mol_type = other DNA
cggtcagttctaagac

SEQ ID NO: 36196 - DNA, 16 bp, synthetic construct
  misc_feature 1..16: note = synthetic [barcode part1]
  source 1..16: mol_type = other DNA
gtccgacttagtaacg

SEQ ID NO: 36197 - DNA, 16 bp, synthetic construct
  misc_feature 1..16: note = synthetic [barcode part1]
  source 1..16: mol_type = other DNA
acaggttgtgtccaac

SEQ ID NO: 36198 - DNA, 16 bp, synthetic construct
  misc_feature 1..16: note = synthetic [barcode part1]
  source 1..16: mol_type = other DNA
aggtcgcggattattc

SEQ ID NO: 36199 - DNA, 16 bp, synthetic construct
  misc_feature 1..16: note = synthetic [barcode part1]
  source 1..16: mol_type = other DNA
atatcctcgtgtcctc

SEQ ID NO: 36200 - DNA, 16 bp, synthetic construct
  misc_feature 1..16: note = synthetic [barcode part1]
  source 1..16: mol_type = other DNA
cctaagtatccgaacg

SEQ ID NO: 36201 - DNA, 16 bp, synthetic construct
  misc_feature 1..16: note = synthetic [barcode part1]
  source 1..16: mol_type = other DNA
tcaattcgcctagatc

SEQ ID NO: 36202 - DNA, 16 bp, synthetic construct
  misc_feature 1..16: note = synthetic [barcode part1]
  source 1..16: mol_type = other DNA
cagagtcactgactgt

SEQ ID NO: 36203 - DNA, 16 bp, synthetic construct
  misc_feature 1..16: note = synthetic [barcode part1]
  source 1..16: mol_type = other DNA
acctcctaggatcaag

SEQ ID NO: 36204 - DNA, 16 bp, synthetic construct
  misc_feature 1..16: note = synthetic [barcode part1]
  source 1..16: mol_type = other DNA
agtgtctagatcgaag

SEQ ID NO: 36205 - DNA, 16 bp, synthetic construct
  misc_feature 1..16: note = synthetic [barcode part1]
  source 1..16: mol_type = other DNA
atcacctcaggtatct

SEQ ID NO: 36206 - DNA, 16 bp, synthetic construct
  misc_feature 1..16: note = synthetic [barcode part1]
  source 1..16: mol_type = other DNA
gtctagaaggcctatc

SEQ ID NO: 36207 - DNA, 16 bp, synthetic construct
  misc_feature 1..16: note = synthetic [barcode part1]
  source 1..16: mol_type = other DNA
accttgacttctcctg

SEQ ID NO: 36208 - DNA, 16 bp, synthetic construct
  misc_feature 1..16: note = synthetic [barcode part1]
  source 1..16: mol_type = other DNA
gtcgaccaactagttg

SEQ ID NO: 36209 - DNA, 16 bp, synthetic construct
  misc_feature 1..16: note = synthetic [barcode part1]
  source 1..16: mol_type = other DNA
aattctccacgagttc

SEQ ID NO: 36210 - DNA, 16 bp, synthetic construct
  misc_feature 1..16: note = synthetic [barcode part1]
  source 1..16: mol_type = other DNA
gtatcacaggcaggtg

SEQ ID NO: 36211 - DNA, 16 bp, synthetic construct
  misc_feature 1..16: note = synthetic [barcode part1]
  source 1..16: mol_type = other DNA
gtgtggttgcacaact

SEQ ID NO: 36212 - DNA, 16 bp, synthetic construct
  misc_feature 1..16: note = synthetic [barcode part1]
  source 1..16: mol_type = other DNA
gattcactgaacgtcg

SEQ ID NO: 36213 - DNA, 16 bp, synthetic construct
  misc_feature 1..16: note = synthetic [barcode part1]
  source 1..16: mol_type = other DNA
acagagaaggacacgt

SEQ ID NO: 36214 - DNA, 16 bp, synthetic construct
  misc_feature 1..16: note = synthetic [barcode part1]
  source 1..16: mol_type = other DNA
aagtgccaggtgacgt

SEQ ID NO: 36215 - DNA, 16 bp, synthetic construct
  misc_feature 1..16: note = synthetic [barcode part1]
  source 1..16: mol_type = other DNA
agttcttccggacacc

SEQ ID NO: 36216 - DNA, 16 bp, synthetic construct
  misc_feature 1..16: note = synthetic [barcode part1]
  source 1..16: mol_type = other DNA
gacaactcgcaccttc

SEQ ID NO: 36217 - DNA, 16 bp, synthetic construct
  misc_feature 1..16: note = synthetic [barcode part1]
  source 1..16: mol_type = other DNA
gttcaccaggtcctac

SEQ ID NO: 36218 - DNA, 16 bp, synthetic construct
  misc_feature 1..16: note = synthetic [barcode part1]
  source 1..16: mol_type = other DNA
gtccacctggaactct

SEQ ID NO: 36219 - DNA, 16 bp, synthetic construct
  misc_feature 1..16: note = synthetic [barcode part1]
  source 1..16: mol_type = other DNA
agtagttgcacaaggt

SEQ ID NO: 36220 - DNA, 16 bp, synthetic construct
  misc_feature 1..16: note = synthetic [barcode part1]
  source 1..16: mol_type = other DNA
taaggtcagttccgac

SEQ ID NO: 36221 - DNA, 16 bp, synthetic construct
  misc_feature 1..16: note = synthetic [barcode part1]
  source 1..16: mol_type = other DNA
agaggacgtctgagtc

SEQ ID NO: 36222 - DNA, 16 bp, synthetic construct
  misc_feature 1..16: note = synthetic [barcode part1]
  source 1..16: mol_type = other DNA
tgcgattcgacaggag

SEQ ID NO: 36223 - DNA, 16 bp, synthetic construct
  misc_feature 1..16: note = synthetic [barcode part1]
  source 1..16: mol_type = other DNA
ttctggagaactccag

SEQ ID NO: 36224 - DNA, 16 bp, synthetic construct
  misc_feature 1..16: note = synthetic [barcode part1]
  source 1..16: mol_type = other DNA
gaactacctgtacttc

SEQ ID NO: 36225 - DNA, 16 bp, synthetic construct
  misc_feature 1..16: note = synthetic [barcode part1]
  source 1..16: mol_type = other DNA
tggtgtattgaacgcc

SEQ ID NO: 36226 - DNA, 16 bp, synthetic construct
  misc_feature 1..16: note = synthetic [barcode part1]
  source 1..16: mol_type = other DNA
cgtcgttaacacgtcc

SEQ ID NO: 36227 - DNA, 16 bp, synthetic construct
  misc_feature 1..16: note = synthetic [barcode part1]
  source 1..16: mol_type = other DNA
gtgatcttgagtcacg

SEQ ID NO: 36228 - DNA, 16 bp, synthetic construct
  misc_feature 1..16: note = synthetic [barcode part1]
  source 1..16: mol_type = other DNA
cctggacgttctctag

SEQ ID NO: 36229 - DNA, 16 bp, synthetic construct
  misc_feature 1..16: note = synthetic [barcode part1]
  source 1..16: mol_type = other DNA
ttctatcctgcaagtg

SEQ ID NO: 36230 - DNA, 16 bp, synthetic construct
  misc_feature 1..16: note = synthetic [barcode part1]
  source 1..16: mol_type = other DNA
gtagtgccttcgaagt

SEQ ID NO: 36231 - DNA, 16 bp, synthetic construct
  misc_feature 1..16: note = synthetic [barcode part1]
  source 1..16: mol_type = other DNA
atcgcggtactacaac

SEQ ID NO: 36232 - DNA, 16 bp, synthetic construct
  misc_feature 1..16: note = synthetic [barcode part1]
  source 1..16: mol_type = other DNA
accagttcacgtacag

SEQ ID NO: 36233 - DNA, 16 bp, synthetic construct
  misc_feature 1..16: note = synthetic [barcode part1]
  source 1..16: mol_type = other DNA
caactgtatccgaacg

SEQ ID NO: 36234 - DNA, 16 bp, synthetic construct
  misc_feature 1..16: note = synthetic [barcode part1]
  source 1..16: mol_type = other DNA
ttacttcggaacgacg

SEQ ID NO: 36235 - DNA, 16 bp, synthetic construct
  misc_feature 1..16: note = synthetic [barcode part1]
  source 1..16: mol_type = other DNA
attccaggtcgtaacg

SEQ ID NO: 36236 - DNA, 16 bp, synthetic construct
  misc_feature 1..16: note = synthetic [barcode part1]
  source 1..16: mol_type = other DNA
tactggtgtgtaccag

SEQ ID NO: 36237 - DNA, 16 bp, synthetic construct
  misc_feature 1..16: note = synthetic [barcode part1]
  source 1..16: mol_type = other DNA
ttcacgacaccgtctg

SEQ ID NO: 36238 - DNA, 16 bp, synthetic construct
  misc_feature 1..16: note = synthetic [barcode part1]
  source 1..16: mol_type = other DNA
gcctgtgtatatcgag

SEQ ID NO: 36239 - DNA, 16 bp, synthetic construct
  misc_feature 1..16: note = synthetic [barcode part1]
  source 1..16: mol_type = other DNA
ccttggcaatcgcgtt

SEQ ID NO: 36240 - DNA, 16 bp, synthetic construct
  misc_feature 1..16: note = synthetic [barcode part1]
  source 1..16: mol_type = other DNA
agtgtactcaggaggc

SEQ ID NO: 36241 - DNA, 16 bp, synthetic construct
  misc_feature 1..16: note = synthetic [barcode part1]
  source 1..16: mol_type = other DNA
gccactctagatactt

SEQ ID NO: 36242 - DNA, 16 bp, synthetic construct
  misc_feature 1..16: note = synthetic [barcode part1]
  source 1..16: mol_type = other DNA
ttccgtgaatcaccgc

SEQ ID NO: 36243 - DNA, 16 bp, synthetic construct
  misc_feature 1..16: note = synthetic [barcode part1]
  source 1..16: mol_type = other DNA
ttaagaccgtctgtct

SEQ ID NO: 36244 - DNA, 16 bp, synthetic construct
  misc_feature 1..16: note = synthetic [barcode part1]
  source 1..16: mol_type = other DNA
gatcgacaccgtaact

SEQ ID NO: 36245 - DNA, 16 bp, synthetic construct
  misc_feature 1..16: note = synthetic [barcode part1]
  source 1..16: mol_type = other DNA
aacgtcagttgcagtc

SEQ ID NO: 36246 - DNA, 16 bp, synthetic construct
  misc_feature 1..16: note = synthetic [barcode part1]
  source 1..16: mol_type = other DNA
agttcaggatcgttgc

SEQ ID NO: 36247 - DNA, 16 bp, synthetic construct
  misc_feature 1..16: note = synthetic [barcode part1]
  source 1..16: mol_type = other DNA
cgactagatcgcaact

SEQ ID NO: 36248 - DNA, 16 bp, synthetic construct
  misc_feature 1..16: note = synthetic [barcode part1]
  source 1..16: mol_type = other DNA
agtaatctctccacgt

SEQ ID NO: 36249 - DNA, 16 bp, synthetic construct
  misc_feature 1..16: note = synthetic [barcode part1]
  source 1..16: mol_type = other DNA
tcctaactcctcgact

SEQ ID NO: 36250 - DNA, 16 bp, synthetic construct
  misc_feature 1..16: note = synthetic [barcode part1]
  source 1..16: mol_type = other DNA
tctcttcctggtcaac

SEQ ID NO: 36251 - DNA, 16 bp, synthetic construct
  misc_feature 1..16: note = synthetic [barcode part1]
  source 1..16: mol_type = other DNA
tagtaaggtctcgtcg

SEQ ID NO: 36252 - DNA, 16 bp, synthetic construct
  misc_feature 1..16: note = synthetic [barcode part1]
  source 1..16: mol_type = other DNA
cgagtatcacgaactc

SEQ ID NO: 36253 - DNA, 16 bp, synthetic construct
  misc_feature 1..16: note = synthetic [barcode part1]
  source 1..16: mol_type = other DNA
tctagacgtagtcacg

SEQ ID NO: 36254 - DNA, 16 bp, synthetic construct
  misc_feature 1..16: note = synthetic [barcode part1]
  source 1..16: mol_type = other DNA
cgtagtaacctcgaac

SEQ ID NO: 36255 - DNA, 16 bp, synthetic construct
  misc_feature 1..16: note = synthetic [barcode part1]
  source 1..16: mol_type = other DNA
tcctcactctgataag

SEQ ID NO: 36256 - DNA, 16 bp, synthetic construct
  misc_feature 1..16: note = synthetic [barcode part1]
  source 1..16: mol_type = other DNA
atcaacggtgagacgc

SEQ ID NO: 36257 - DNA, 16 bp, synthetic construct
  misc_feature 1..16: note = synthetic [barcode part1]
  source 1..16: mol_type = other DNA
cagaattggcctcagt

SEQ ID NO: 36258 - DNA, 16 bp, synthetic construct
  misc_feature 1..16: note = synthetic [barcode part1]
  source 1..16: mol_type = other DNA
ttgacacgatcctccg

SEQ ID NO: 36259 - DNA, 16 bp, synthetic construct
  misc_feature 1..16: note = synthetic [barcode part1]
  source 1..16: mol_type = other DNA
taacagtggagacact

SEQ ID NO: 36260 - DNA, 16 bp, synthetic construct
  misc_feature 1..16: note = synthetic [barcode part1]
  source 1..16: mol_type = other DNA
tgccgaggtaaggatc

SEQ ID NO: 36261 - DNA, 16 bp, synthetic construct
  misc_feature 1..16: note = synthetic [barcode part1]
  source 1..16: mol_type = other DNA
agtgatcctccacgtc

SEQ ID NO: 36262 - DNA, 16 bp, synthetic construct
  misc_feature 1..16: note = synthetic [barcode part1]
  source 1..16: mol_type = other DNA
agacagactgcggtgt

SEQ ID NO: 36263 - DNA, 16 bp, synthetic construct
  misc_feature 1..16: note = synthetic [barcode part1]
  source 1..16: mol_type = other DNA
aagagttcgactgtag

SEQ ID NO: 36264 - DNA, 16 bp, synthetic construct
  misc_feature 1..16: note = synthetic [barcode part1]
  source 1..16: mol_type = other DNA
tgtcagtacgtcagtg

SEQ ID NO: 36265 - DNA, 16 bp, synthetic construct
  misc_feature 1..16: note = synthetic [barcode part1]
  source 1..16: mol_type = other DNA
gtagtaagtaaccgtg

SEQ ID NO: 36266 - DNA, 16 bp, synthetic construct
  misc_feature 1..16: note = synthetic [barcode part1]
  source 1..16: mol_type = other DNA
gatctctaaggcgact

SEQ ID NO: 36267 - DNA, 16 bp, synthetic construct
  misc_feature 1..16: note = synthetic [barcode part1]
  source 1..16: mol_type = other DNA
cgtgatactgtctatc

SEQ ID NO: 36268 - DNA, 16 bp, synthetic construct
  misc_feature 1..16: note = synthetic [barcode part1]
  source 1..16: mol_type = other DNA
taatccggccttcacg

SEQ ID NO: 36269 - DNA, 16 bp, synthetic construct
  misc_feature 1..16: note = synthetic [barcode part1]
  source 1..16: mol_type = other DNA
gtccgcactctactag

SEQ ID NO: 36270 - DNA, 16 bp, synthetic construct
  misc_feature 1..16: note = synthetic [barcode part1]
  source 1..16: mol_type = other DNA
gcgttctgtacagaac

SEQ ID NO: 36271 - DNA, 16 bp, synthetic construct
  misc_feature 1..16: note = synthetic [barcode part1]
  source 1..16: mol_type = other DNA
acggagaccagatcac

SEQ ID NO: 36272 - DNA, 16 bp, synthetic construct
  misc_feature 1..16: note = synthetic [barcode part1]
  source 1..16: mol_type = other DNA
tcctggtgtgtccaac

SEQ ID NO: 36273 - DNA, 16 bp, synthetic construct
  misc_feature 1..16: note = synthetic [barcode part1]
  source 1..16: mol_type = other DNA
gcaagtcaagaactgt

SEQ ID NO: 36274 - DNA, 16 bp, synthetic construct
  misc_feature 1..16: note = synthetic [barcode part1]
  source 1..16: mol_type = other DNA
actcgtcaggtagatc

SEQ ID NO: 36275 - DNA, 16 bp, synthetic construct
  misc_feature 1..16: note = synthetic [barcode part1]
  source 1..16: mol_type = other DNA
cctaatcaggagacct

SEQ ID NO: 36276 - DNA, 16 bp, synthetic construct
  misc_feature 1..16: note = synthetic [barcode part1]
  source 1..16: mol_type = other DNA
tggtctcgtatatcac

SEQ ID NO: 36277 - DNA, 16 bp, synthetic construct
  misc_feature 1..16: note = synthetic [barcode part1]
  source 1..16: mol_type = other DNA
cgttattgcagaacgc

SEQ ID NO: 36278 - DNA, 16 bp, synthetic construct
  misc_feature 1..16: note = synthetic [barcode part1]
  source 1..16: mol_type = other DNA
tccgatcgtgtgttgc

SEQ ID NO: 36279 - DNA, 16 bp, synthetic construct
  misc_feature 1..16: note = synthetic [barcode part1]
  source 1..16: mol_type = other DNA
agtgcgtaggaggtct

SEQ ID NO: 36280 - DNA, 16 bp, synthetic construct
  misc_feature 1..16: note = synthetic [barcode part1]
  source 1..16: mol_type = other DNA
cgtatcttgccggact

SEQ ID NO: 36281 - DNA, 16 bp, synthetic construct
  misc_feature 1..16: note = synthetic [barcode part1]
  source 1..16: mol_type = other DNA
atctcactgaatccgt

SEQ ID NO: 36282 - DNA, 16 bp, synthetic construct
  misc_feature 1..16: note = synthetic [barcode part1]
  source 1..16: mol_type = other DNA
aacgttgcaacaccac

SEQ ID NO: 36283 - DNA, 16 bp, synthetic construct
  misc_feature 1..16: note = synthetic [barcode part1]
  source 1..16: mol_type = other DNA
ccttccactgttgttg

SEQ ID NO: 36284 - DNA, 16 bp, synthetic construct
  misc_feature 1..16: note = synthetic [barcode part1]
  source 1..16: mol_type = other DNA
tacagacttgttctgc

SEQ ID NO: 36285 - DNA, 16 bp, synthetic construct
  misc_feature 1..16: note = synthetic [barcode part1]
  source 1..16: mol_type = other DNA
gtcacttacagactct

SEQ ID NO: 36286 - DNA, 16 bp, synthetic construct
  misc_feature 1..16: note = synthetic [barcode part1]
  source 1..16: mol_type = other DNA
tcaaccacagtaccag

SEQ ID NO: 36287 - DNA, 16 bp, synthetic construct
  misc_feature 1..16: note = synthetic [barcode part1]
  source 1..16: mol_type = other DNA
aatccggtgtggaggt

SEQ ID NO: 36288 - DNA, 16 bp, synthetic construct
  misc_feature 1..16: note = synthetic [barcode part1]
  source 1..16: mol_type = other DNA
tatcgcaggtctcaag

SEQ ID NO: 36289 - DNA, 16 bp, synthetic construct
  misc_feature 1..16: note = synthetic [barcode part1]
  source 1..16: mol_type = other DNA
tcaatctacttggacc

SEQ ID NO: 36290 - DNA, 16 bp, synthetic construct
  misc_feature 1..16: note = synthetic [barcode part1]
  source 1..16: mol_type = other DNA
cctcgttaacagagtg

SEQ ID NO: 36291 - DNA, 16 bp, synthetic construct
  misc_feature 1..16: note = synthetic [barcode part1]
  source 1..16: mol_type = other DNA
tgacagtgatcaccac

SEQ ID NO: 36292 - DNA, 16 bp, synthetic construct
  misc_feature 1..16: note = synthetic [barcode part1]
  source 1..16: mol_type = other DNA
aggactgactgaagag

SEQ ID NO: 36293 - DNA, 16 bp, synthetic construct
  misc_feature 1..16: note = synthetic [barcode part1]
  source 1..16: mol_type = other DNA
gaatcctactacggtg

SEQ ID NO: 36294 - DNA, 16 bp, synthetic construct
  misc_feature 1..16: note = synthetic [barcode part1]
  source 1..16: mol_type = other DNA
cgtcgtccttaactct

SEQ ID NO: 36295 - DNA, 16 bp, synthetic construct
  misc_feature 1..16: note = synthetic [barcode part1]
  source 1..16: mol_type = other DNA
gtaccttaatcgtcgt

SEQ ID NO: 36296 - DNA, 16 bp, synthetic construct
  misc_feature 1..16: note = synthetic [barcode part1]
  source 1..16: mol_type = other DNA
gtattctcgatctgac

SEQ ID NO: 36297 - DNA, 16 bp, synthetic construct
  misc_feature 1..16: note = synthetic [barcode part1]
  source 1..16: mol_type = other DNA
cggcaaccgtaagaac

SEQ ID NO: 36298 - DNA, 16 bp, synthetic construct
  misc_feature 1..16: note = synthetic [barcode part1]
  source 1..16: mol_type = other DNA
gaggagttggagaatc

SEQ ID NO: 36299 - DNA, 16 bp, synthetic construct
  misc_feature 1..16: note = synthetic [barcode part1]
  source 1..16: mol_type = other DNA
agagaactgttgacgt

SEQ ID NO: 36300 - DNA, 16 bp, synthetic construct
  misc_feature 1..16: note = synthetic [barcode part1]
  source 1..16: mol_type = other DNA
ccgattaacgtgtgtg

SEQ ID NO: 36301 - DNA, 16 bp, synthetic construct
  misc_feature 1..16: note = synthetic [barcode part1]
  source 1..16: mol_type = other DNA
tccgagacttccttct

SEQ ID NO: 36302 - DNA, 16 bp, synthetic construct
  misc_feature 1..16: note = synthetic [barcode part1]
  source 1..16: mol_type = other DNA
gtgcggttctcagttc

SEQ ID NO: 36303 - DNA, 16 bp, synthetic construct
  misc_feature 1..16: note = synthetic [barcode part1]
  source 1..16: mol_type = other DNA
ccgcaagacttaagtc

SEQ ID NO: 36304 - DNA, 16 bp, synthetic construct
  misc_feature 1..16: note = synthetic [barcode part1]
  source 1..16: mol_type = other DNA
tagacgtcgtaggttc

SEQ ID NO: 36305 - DNA, 16 bp, synthetic construct
  misc_feature 1..16: note = synthetic [barcode part1]
  source 1..16: mol_type = other DNA
gagtatcctgcgaatc

SEQ ID NO: 36306 - DNA, 16 bp, synthetic construct
  misc_feature 1..16: note = synthetic [barcode part1]
  source 1..16: mol_type = other DNA
tggtctcctaaggaac

SEQ ID NO: 36307 - DNA, 16 bp, synthetic construct
  misc_feature 1..16: note = synthetic [barcode part1]
  source 1..16: mol_type = other DNA
gttgactactgaccag

SEQ ID NO: 36308 - DNA, 16 bp, synthetic construct
  misc_feature 1..16: note = synthetic [barcode part1]
  source 1..16: mol_type = other DNA
caggtcaagtcactgt

SEQ ID NO: 36309 - DNA, 16 bp, synthetic construct
  misc_feature 1..16: note = synthetic [barcode part1]
  source 1..16: mol_type = other DNA
attctgtacggttacc

SEQ ID NO: 36310 - DNA, 16 bp, synthetic construct
  misc_feature 1..16: note = synthetic [barcode part1]
  source 1..16: mol_type = other DNA
tcactccacacgactg

SEQ ID NO: 36311 - DNA, 16 bp, synthetic construct
  misc_feature 1..16: note = synthetic [barcode part1]
  source 1..16: mol_type = other DNA
acagtgcagagttcct

SEQ ID NO: 36312 - DNA, 16 bp, synthetic construct
  misc_feature 1..16: note = synthetic [barcode part1]
  source 1..16: mol_type = other DNA
gttcacctcgcaacac

SEQ ID NO: 36313 - DNA, 16 bp, synthetic construct
  misc_feature 1..16: note = synthetic [barcode part1]
  source 1..16: mol_type = other DNA
aaggtgaacttgcagt

SEQ ID NO: 36314 - DNA, 16 bp, synthetic construct
  misc_feature 1..16: note = synthetic [barcode part1]
  source 1..16: mol_type = other DNA
ttcactacgactcctc

SEQ ID NO: 36315 - DNA, 16 bp, synthetic construct
  misc_feature 1..16: note = synthetic [barcode part1]
  source 1..16: mol_type = other DNA
gacgagatagtctctc

SEQ ID NO: 36316 - DNA, 16 bp, synthetic construct
  misc_feature 1..16: note = synthetic [barcode part1]
  source 1..16: mol_type = other DNA
cggaattgaggtcttc

SEQ ID NO: 36317 - DNA, 16 bp, synthetic construct
  misc_feature 1..16: note = synthetic [barcode part1]
  source 1..16: mol_type = other DNA
cgatactgacactacg

SEQ ID NO: 36318 - DNA, 16 bp, synthetic construct
  misc_feature 1..16: note = synthetic [barcode part1]
  source 1..16: mol_type = other DNA
tggagactgagaacag

SEQ ID NO: 36319 - DNA, 16 bp, synthetic construct
  misc_feature 1..16: note = synthetic [barcode part1]
  source 1..16: mol_type = other DNA
taaccacggatactcg

SEQ ID NO: 36320 - DNA, 16 bp, synthetic construct
  misc_feature 1..16: note = synthetic [barcode part1]
  source 1..16: mol_type = other DNA
gagttacacagttcgc

SEQ ID NO: 36321 - DNA, 16 bp, synthetic construct
  misc_feature 1..16: note = synthetic [barcode part1]
  source 1..16: mol_type = other DNA
atcgtggacggtactt

SEQ ID NO: 36322 - DNA, 16 bp, synthetic construct
  misc_feature 1..16: note = synthetic [barcode part1]
  source 1..16: mol_type = other DNA
ttccagaacgacactg

SEQ ID NO: 36323 - DNA, 16 bp, synthetic construct
  misc_feature 1..16: note = synthetic [barcode part1]
  source 1..16: mol_type = other DNA
attgaccggtcaatcg

SEQ ID NO: 36324 - DNA, 16 bp, synthetic construct
  misc_feature 1..16: note = synthetic [barcode part1]
  source 1..16: mol_type = other DNA
gtcctcgcaccgaatt

SEQ ID NO: 36325 - DNA, 16 bp, synthetic construct
  misc_feature 1..16: note = synthetic [barcode part1]
  source 1..16: mol_type = other DNA
tagacgtgatctgcac

SEQ ID NO: 36326 - DNA, 16 bp, synthetic construct
  misc_feature 1..16: note = synthetic [barcode part1]
  source 1..16: mol_type = other DNA
gtgactatcggtcctc

SEQ ID NO: 36327 - DNA, 16 bp, synthetic construct
  misc_feature 1..16: note = synthetic [barcode part1]
  source 1..16: mol_type = other DNA
cgttcacttgcggtac

SEQ ID NO: 36328 - DNA, 16 bp, synthetic construct
  misc_feature 1..16: note = synthetic [barcode part1]
  source 1..16: mol_type = other DNA
actgaggatcgtgcag

SEQ ID NO: 36329 - DNA, 16 bp, synthetic construct
  misc_feature 1..16: note = synthetic [barcode part1]
  source 1..16: mol_type = other DNA
cctcgtattggaccac

SEQ ID NO: 36330 - DNA, 16 bp, synthetic construct
  misc_feature 1..16: note = synthetic [barcode part1]
  source 1..16: mol_type = other DNA
aggcgattgtggatcg

SEQ ID NO: 36331 - DNA, 16 bp, synthetic construct
  misc_feature 1..16: note = synthetic [barcode part1]
  source 1..16: mol_type = other DNA
gtggactcctctaatt

SEQ ID NO: 36332 - DNA, 16 bp, synthetic construct
  misc_feature 1..16: note = synthetic [barcode part1]
  source 1..16: mol_type = other DNA
gttgttgatatctccg

SEQ ID NO: 36333 - DNA, 16 bp, synthetic construct
  misc_feature 1..16: note = synthetic [barcode part1]
  source 1..16: mol_type = other DNA
ttataccggtgcagac

SEQ ID NO: 36334 - DNA, 16 bp, synthetic construct
  misc_feature 1..16: note = synthetic [barcode part1]
  source 1..16: mol_type = other DNA
cctggtgttcgtactg

SEQ ID NO: 36335 - DNA, 16 bp, synthetic construct
  misc_feature 1..16: note = synthetic [barcode part1]
  source 1..16: mol_type = other DNA
ttatcggttcctgtag

SEQ ID NO: 36336 - DNA, 16 bp, synthetic construct
  misc_feature 1..16: note = synthetic [barcode part1]
  source 1..16: mol_type = other DNA
tcgaacggcggtaagt

SEQ ID NO: 36337 - DNA, 16 bp, synthetic construct
  misc_feature 1..16: note = synthetic [barcode part1]
  source 1..16: mol_type = other DNA
tgtcgagtctgtactt

SEQ ID NO: 36338 - DNA, 16 bp, synthetic construct
  misc_feature 1..16: note = synthetic [barcode part1]
  source 1..16: mol_type = other DNA
tgtgaatctcaggcgt

SEQ ID NO: 36339 - DNA, 16 bp, synthetic construct
  misc_feature 1..16: note = synthetic [barcode part1]
  source 1..16: mol_type = other DNA
attggacggcaattcc

SEQ ID NO: 36340 - DNA, 16 bp, synthetic construct
  misc_feature 1..16: note = synthetic [barcode part1]
  source 1..16: mol_type = other DNA
ttataacaccgcggtg

SEQ ID NO: 36341 - DNA, 16 bp, synthetic construct
  misc_feature 1..16: note = synthetic [barcode part1]
  source 1..16: mol_type = other DNA
atattcctctccacgc

SEQ ID NO: 36342 - DNA, 16 bp, synthetic construct
  misc_feature 1..16: note = synthetic [barcode part1]
  source 1..16: mol_type = other DNA
acttgttcacctgtcc

SEQ ID NO: 36343 - DNA, 16 bp, synthetic construct
  misc_feature 1..16: note = synthetic [barcode part1]
  source 1..16: mol_type = other DNA
aggattatcgacgtag

SEQ ID NO: 36344 - DNA, 16 bp, synthetic construct
  misc_feature 1..16: note = synthetic [barcode part1]
  source 1..16: mol_type = other DNA
cagaaggatcacgtgc

SEQ ID NO: 36345 - DNA, 16 bp, synthetic construct
  misc_feature 1..16: note = synthetic [barcode part1]
  source 1..16: mol_type = other DNA
gcagtccgaacacaag

SEQ ID NO: 36346 - DNA, 16 bp, synthetic construct
  misc_feature 1..16: note = synthetic [barcode part1]
  source 1..16: mol_type = other DNA
ccgtcttctaggtacg

SEQ ID NO: 36347 - DNA, 16 bp, synthetic construct
  misc_feature 1..16: note = synthetic [barcode part1]
  source 1..16: mol_type = other DNA
tctgtgcgattcaatc

SEQ ID NO: 36348 - DNA, 16 bp, synthetic construct
  misc_feature 1..16: note = synthetic [barcode part1]
  source 1..16: mol_type = other DNA
aaggacgtcgtacttc

SEQ ID NO: 36349 - DNA, 16 bp, synthetic construct
  misc_feature 1..16: note = synthetic [barcode part1]
  source 1..16: mol_type = other DNA
ccttcgaacgtcagtc

SEQ ID NO: 36350 - DNA, 16 bp, synthetic construct
  misc_feature 1..16: note = synthetic [barcode part1]
  source 1..16: mol_type = other DNA
ataccagaggatagtc

SEQ ID NO: 36351 - DNA, 16 bp, synthetic construct
  misc_feature 1..16: note = synthetic [barcode part1]
  source 1..16: mol_type = other DNA
caaccaggaagaaggt

SEQ ID NO: 36352 - DNA, 16 bp, synthetic construct
  misc_feature 1..16: note = synthetic [barcode part1]
  source 1..16: mol_type = other DNA
tacgtactgtggtacg

SEQ ID NO: 36353 - DNA, 16 bp, synthetic construct
  misc_feature 1..16: note = synthetic [barcode part1]
  source 1..16: mol_type = other DNA
gagatcgtcgagtgtg

SEQ ID NO: 36354 - DNA, 16 bp, synthetic construct
  misc_feature 1..16: note = synthetic [barcode part1]
  source 1..16: mol_type = other DNA
tccacgtaattatcgc

SEQ ID NO: 36355 - DNA, 16 bp, synthetic construct
  misc_feature 1..16: note = synthetic [barcode part1]
  source 1..16: mol_type = other DNA
tccgtcggttatcctt

SEQ ID NO: 36356 - DNA, 16 bp, synthetic construct
  misc_feature 1..16: note = synthetic [barcode part1]
  source 1..16: mol_type = other DNA
caccgaggtaattcac

SEQ ID NO: 36357 - DNA, 16 bp, synthetic construct
  misc_feature 1..16: note = synthetic [barcode part1]
  source 1..16: mol_type = other DNA
aagtacctctgtcgcc

SEQ ID NO: 36358 - DNA, 16 bp, synthetic construct
  misc_feature 1..16: note = synthetic [barcode part1]
  source 1..16: mol_type = other DNA
gtgtctctgtatcctc

SEQ ID NO: 36359 - DNA, 16 bp, synthetic construct
  misc_feature 1..16: note = synthetic [barcode part1]
  source 1..16: mol_type = other DNA
acgttgaaggaattgc

SEQ ID NO: 36360 - DNA, 16 bp, synthetic construct
  misc_feature 1..16: note = synthetic [barcode part1]
  source 1..16: mol_type = other DNA
atcacttcgtctagac

SEQ ID NO: 36361 - DNA, 16 bp, synthetic construct
  misc_feature 1..16: note = synthetic [barcode part1]
  source 1..16: mol_type = other DNA
ttgtggttgactgacg

SEQ ID NO: 36362 - DNA, 16 bp, synthetic construct
  misc_feature 1..16: note = synthetic [barcode part1]
  source 1..16: mol_type = other DNA
tagtaaccgtgtctct

SEQ ID NO: 36363 - DNA, 16 bp, synthetic construct
  misc_feature 1..16: note = synthetic [barcode part1]
  source 1..16: mol_type = other DNA
atctactctgcaacac

SEQ ID NO: 36364 - DNA, 16 bp, synthetic construct
  misc_feature 1..16: note = synthetic [barcode part1]
  source 1..16: mol_type = other DNA
gttggcctaattggtg

SEQ ID NO: 36365 - DNA, 16 bp, synthetic construct
  misc_feature 1..16: note = synthetic [barcode part1]
  source 1..16: mol_type = other DNA
aacgttctagagagtg

SEQ ID NO: 36366 - DNA, 16 bp, synthetic construct
  misc_feature 1..16: note = synthetic [barcode part1]
  source 1..16: mol_type = other DNA
ttctctcgtcgtaacc

SEQ ID NO: 36367 - DNA, 16 bp, synthetic construct
  misc_feature 1..16: note = synthetic [barcode part1]
  source 1..16: mol_type = other DNA
gactgagaatataccg

SEQ ID NO: 36368 - DNA, 16 bp, synthetic construct
  misc_feature 1..16: note = synthetic [barcode part1]
  source 1..16: mol_type = other DNA
gcaggccggagtaatt

SEQ ID NO: 36369 - DNA, 16 bp, synthetic construct
  misc_feature 1..16: note = synthetic [barcode part1]
  source 1..16: mol_type = other DNA
cacacctgttcaacgc

SEQ ID NO: 36370 - DNA, 16 bp, synthetic construct
  misc_feature 1..16: note = synthetic [barcode part1]
  source 1..16: mol_type = other DNA
gttggttccaagatcg

SEQ ID NO: 36371 - DNA, 16 bp, synthetic construct
  misc_feature 1..16: note = synthetic [barcode part1]
  source 1..16: mol_type = other DNA
caggcgtctcttagtc

SEQ ID NO: 36372 - DNA, 16 bp, synthetic construct
  misc_feature 1..16: note = synthetic [barcode part1]
  source 1..16: mol_type = other DNA
ccaagtacctaagtgc

SEQ ID NO: 36373 - DNA, 16 bp, synthetic construct
  misc_feature 1..16: note = synthetic [barcode part1]
  source 1..16: mol_type = other DNA
gcgtcggttgagtatt

SEQ ID NO: 36374 - DNA, 16 bp, synthetic construct
  misc_feature 1..16: note = synthetic [barcode part1]
  source 1..16: mol_type = other DNA
aatagagtggcggaac

SEQ ID NO: 36375 - DNA, 16 bp, synthetic construct
  misc_feature 1..16: note = synthetic [barcode part1]
  source 1..16: mol_type = other DNA
tacttatctgtggcgt

SEQ ID NO: 36376 - DNA, 16 bp, synthetic construct
  misc_feature 1..16: note = synthetic [barcode part1]
  source 1..16: mol_type = other DNA
taagttgcacactcct

SEQ ID NO: 36377 - DNA, 16 bp, synthetic construct
  misc_feature 1..16: note = synthetic [barcode part1]
  source 1..16: mol_type = other DNA
aagtgaatcgtgacac

SEQ ID NO: 36378 - DNA, 16 bp, synthetic construct
  misc_feature 1..16: note = synthetic [barcode part1]
  source 1..16: mol_type = other DNA
agattccggaactctg

SEQ ID NO: 36379 - DNA, 16 bp, synthetic construct
  misc_feature 1..16: note = synthetic [barcode part1]
  source 1..16: mol_type = other DNA
gttgcaaggcgagtac

SEQ ID NO: 36380 - DNA, 16 bp, synthetic construct
  misc_feature 1..16: note = synthetic [barcode part1]
  source 1..16: mol_type = other DNA
ccgtaggataaggtgc

SEQ ID NO: 36381 - DNA, 16 bp, synthetic construct
  misc_feature 1..16: note = synthetic [barcode part1]
  source 1..16: mol_type = other DNA
ttaccgatacagagag

SEQ ID NO: 36382 - DNA, 16 bp, synthetic construct
  misc_feature 1..16: note = synthetic [barcode part1]
  source 1..16: mol_type = other DNA
tcagaacttacggtgc

SEQ ID NO: 36383 - DNA, 16 bp, synthetic construct
  misc_feature 1..16: note = synthetic [barcode part1]
  source 1..16: mol_type = other DNA
tggagtccgatcagtt

SEQ ID NO: 36384 - DNA, 16 bp, synthetic construct
  misc_feature 1..16: note = synthetic [barcode part1]
  source 1..16: mol_type = other DNA
gtgtggcaatccttcc

SEQ ID NO: 36385 - DNA, 16 bp, synthetic construct
  misc_feature 1..16: note = synthetic [barcode part1]
  source 1..16: mol_type = other DNA
tacaggcgataaggtt

SEQ ID NO: 36386 - DNA, 16 bp, synthetic construct
  misc_feature 1..16: note = synthetic [barcode part1]
  source 1..16: mol_type = other DNA
acgtcggatcacttcc

SEQ ID NO: 36387 - DNA, 16 bp, synthetic construct
  misc_feature 1..16: note = synthetic [barcode part1]
  source 1..16: mol_type = other DNA
ataacagtccgtgaag

SEQ ID NO: 36388 - DNA, 16 bp, synthetic construct
  misc_feature 1..16: note = synthetic [barcode part1]
  source 1..16: mol_type = other DNA
caccttaattcacggt

SEQ ID NO: 36389 - DNA, 16 bp, synthetic construct
  misc_feature 1..16: note = synthetic [barcode part1]
  source 1..16: mol_type = other DNA
gttctagatcgaccag

SEQ ID NO: 36390 - DNA, 16 bp, synthetic construct
  misc_feature 1..16: note = synthetic [barcode part1]
  source 1..16: mol_type = other DNA
taaccaccttaacctg

SEQ ID NO: 36391 - DNA, 16 bp, synthetic construct
  misc_feature 1..16: note = synthetic [barcode part1]
  source 1..16: mol_type = other DNA
tcacaagtgttccgcc

SEQ ID NO: 36392 - DNA, 16 bp, synthetic construct
  misc_feature 1..16: note = synthetic [barcode part1]
  source 1..16: mol_type = other DNA
tagaccggtattctct

SEQ ID NO: 36393 - DNA, 16 bp, synthetic construct
  misc_feature 1..16: note = synthetic [barcode part1]
  source 1..16: mol_type = other DNA
cacctatacttcgagt

SEQ ID NO: 36394 - DNA, 16 bp, synthetic construct
  misc_feature 1..16: note = synthetic [barcode part1]
  source 1..16: mol_type = other DNA
tgcacttgtcctcgtt

SEQ ID NO: 36395 - DNA, 16 bp, synthetic construct
  misc_feature 1..16: note = synthetic [barcode part1]
  source 1..16: mol_type = other DNA
gtgatcactggccttc

SEQ ID NO: 36396 - DNA, 16 bp, synthetic construct
  misc_feature 1..16: note = synthetic [barcode part1]
  source 1..16: mol_type = other DNA
gcggtcagactagaac

SEQ ID NO: 36397 - DNA, 16 bp, synthetic construct
  misc_feature 1..16: note = synthetic [barcode part1]
  source 1..16: mol_type = other DNA
caacgttggacgagtg

SEQ ID NO: 36398 - DNA, 16 bp, synthetic construct
  misc_feature 1..16: note = synthetic [barcode part1]
  source 1..16: mol_type = other DNA
attacctgcagtaggc

SEQ ID NO: 36399 - DNA, 16 bp, synthetic construct
  misc_feature 1..16: note = synthetic [barcode part1]
  source 1..16: mol_type = other DNA
tgtaccttaccaggtt

SEQ ID NO: 36400 - DNA, 16 bp, synthetic construct
  misc_feature 1..16: note = synthetic [barcode part1]
  source 1..16: mol_type = other DNA
tcttgcgtcggatcac

SEQ ID NO: 36401 - DNA, 16 bp, synthetic construct
  misc_feature 1..16: note = synthetic [barcode part1]
  source 1..16: mol_type = other DNA
cgtctcagaataacgc

SEQ ID NO: 36402 - DNA, 16 bp, synthetic construct
  misc_feature 1..16: note = synthetic [barcode part1]
  source 1..16: mol_type = other DNA
tggtactcctgcctag

SEQ ID NO: 36403 - DNA, 16 bp, synthetic construct
  misc_feature 1..16: note = synthetic [barcode part1]
  source 1..16: mol_type = other DNA
actaagaacgtcaacg

SEQ ID NO: 36404 - DNA, 16 bp, synthetic construct
  misc_feature 1..16: note = synthetic [barcode part1]
  source 1..16: mol_type = other DNA
gtcactcgataagacc

SEQ ID NO: 36405 - DNA, 16 bp, synthetic construct
  misc_feature 1..16: note = synthetic [barcode part1]
  source 1..16: mol_type = other DNA
ccgattctgccagtac

SEQ ID NO: 36406 - DNA, 16 bp, synthetic construct
  misc_feature 1..16: note = synthetic [barcode part1]
  source 1..16: mol_type = other DNA
ttgaccaactgcagtg

SEQ ID NO: 36407 - DNA, 16 bp, synthetic construct
  misc_feature 1..16: note = synthetic [barcode part1]
  source 1..16: mol_type = other DNA
cgttagtcacggttag

SEQ ID NO: 36408 - DNA, 16 bp, synthetic construct
  misc_feature 1..16: note = synthetic [barcode part1]
  source 1..16: mol_type = other DNA
gttggtagtagtcgtc

SEQ ID NO: 36409 - DNA, 16 bp, synthetic construct
  misc_feature 1..16: note = synthetic [barcode part1]
  source 1..16: mol_type = other DNA
tcctggttacgtcgac

SEQ ID NO: 36410 - DNA, 16 bp, synthetic construct
  misc_feature 1..16: note = synthetic [barcode part1]
  source 1..16: mol_type = other DNA
tccactactctgtcgt

SEQ ID NO: 36411 - DNA, 16 bp, synthetic construct
  misc_feature 1..16: note = synthetic [barcode part1]
  source 1..16: mol_type = other DNA
tcaccaatacgcctcg

SEQ ID NO: 36412 - DNA, 16 bp, synthetic construct
  misc_feature 1..16: note = synthetic [barcode part1]
  source 1..16: mol_type = other DNA
tcgagtatccaccgtc

SEQ ID NO: 36413 - DNA, 16 bp, synthetic construct
  misc_feature 1..16: note = synthetic [barcode part1]
  source 1..16: mol_type = other DNA
cgtgaataccttatcc

SEQ ID NO: 36414 - DNA, 16 bp, synthetic construct
  misc_feature 1..16: note = synthetic [barcode part1]
  source 1..16: mol_type = other DNA
acctaccgataccacc

SEQ ID NO: 36415 - DNA, 16 bp, synthetic construct
  misc_feature 1..16: note = synthetic [barcode part1]
  source 1..16: mol_type = other DNA
cgacgtgagaggttac

SEQ ID NO: 36416 - DNA, 16 bp, synthetic construct
  misc_feature 1..16: note = synthetic [barcode part1]
  source 1..16: mol_type = other DNA
gtcaggtgtagaagtt

SEQ ID NO: 36417 - DNA, 16 bp, synthetic construct
  misc_feature 1..16: note = synthetic [barcode part1]
  source 1..16: mol_type = other DNA
actcgaactattccac

SEQ ID NO: 36418 - DNA, 16 bp, synthetic construct
  misc_feature 1..16: note = synthetic [barcode part1]
  source 1..16: mol_type = other DNA
ttgttggtggtaaccg

SEQ ID NO: 36419 - DNA, 16 bp, synthetic construct
  misc_feature 1..16: note = synthetic [barcode part1]
  source 1..16: mol_type = other DNA
gtggacctccttagtc

SEQ ID NO: 36420 - DNA, 16 bp, synthetic construct
  misc_feature 1..16: note = synthetic [barcode part1]
  source 1..16: mol_type = other DNA
tatccgcgaatctcgc

SEQ ID NO: 36421 - DNA, 16 bp, synthetic construct
  misc_feature 1..16: note = synthetic [barcode part1]
  source 1..16: mol_type = other DNA
tgcacagaggtatcct

SEQ ID NO: 36422 - DNA, 16 bp, synthetic construct
  misc_feature 1..16: note = synthetic [barcode part1]
  source 1..16: mol_type = other DNA
tcacaagataaggtgc

SEQ ID NO: 36423 - DNA, 16 bp, synthetic construct
  misc_feature 1..16: note = synthetic [barcode part1]
  source 1..16: mol_type = other DNA
tacaacgtatcgtggc

SEQ ID NO: 36424 - DNA, 16 bp, synthetic construct
  misc_feature 1..16: note = synthetic [barcode part1]
  source 1..16: mol_type = other DNA
tcggtatactagtgcg

SEQ ID NO: 36425 - DNA, 16 bp, synthetic construct
  misc_feature 1..16: note = synthetic [barcode part1]
  source 1..16: mol_type = other DNA
ttacgtcgagttgtct

SEQ ID NO: 36426 - DNA, 16 bp, synthetic construct
  misc_feature 1..16: note = synthetic [barcode part1]
  source 1..16: mol_type = other DNA
ccagagttccgagatt

SEQ ID NO: 36427 - DNA, 16 bp, synthetic construct
  misc_feature 1..16: note = synthetic [barcode part1]
  source 1..16: mol_type = other DNA
atcgcggaataggtgc

SEQ ID NO: 36428 - DNA, 16 bp, synthetic construct
  misc_feature 1..16: note = synthetic [barcode part1]
  source 1..16: mol_type = other DNA
acgaggagacctagtc

SEQ ID NO: 36429 - DNA, 16 bp, synthetic construct
  misc_feature 1..16: note = synthetic [barcode part1]
  source 1..16: mol_type = other DNA
accacaactcacctgc

SEQ ID NO: 36430 - DNA, 16 bp, synthetic construct
  misc_feature 1..16: note = synthetic [barcode part1]
  source 1..16: mol_type = other DNA
actggtacagaaggcc

SEQ ID NO: 36431 - DNA, 16 bp, synthetic construct
  misc_feature 1..16: note = synthetic [barcode part1]
  source 1..16: mol_type = other DNA
tggaaggcgactgtac

SEQ ID NO: 36432 - DNA, 16 bp, synthetic construct
  misc_feature 1..16: note = synthetic [barcode part1]
  source 1..16: mol_type = other DNA
taggactggttagtcc

SEQ ID NO: 36433 - DNA, 16 bp, synthetic construct
  misc_feature 1..16: note = synthetic [barcode part1]
  source 1..16: mol_type = other DNA
agtgatctcaggttgc

SEQ ID NO: 36434 - DNA, 16 bp, synthetic construct
  misc_feature 1..16: note = synthetic [barcode part1]
  source 1..16: mol_type = other DNA
aagtactccgttctgt

SEQ ID NO: 36435 - DNA, 16 bp, synthetic construct
  misc_feature 1..16: note = synthetic [barcode part1]
  source 1..16: mol_type = other DNA
cgcgcgattattactt

SEQ ID NO: 36436 - DNA, 16 bp, synthetic construct
  misc_feature 1..16: note = synthetic [barcode part1]
  source 1..16: mol_type = other DNA
cgagtgaggtactgtg

SEQ ID NO: 36437 - DNA, 16 bp, synthetic construct
  misc_feature 1..16: note = synthetic [barcode part1]
  source 1..16: mol_type = other DNA
gcgagaagtcagactc

SEQ ID NO: 36438 - DNA, 16 bp, synthetic construct
  misc_feature 1..16: note = synthetic [barcode part1]
  source 1..16: mol_type = other DNA
aatcgaaccgttgtcg

SEQ ID NO: 36439 - DNA, 16 bp, synthetic construct
  misc_feature 1..16: note = synthetic [barcode part1]
  source 1..16: mol_type = other DNA
tgtgtgtagtcaaccg

SEQ ID NO: 36440 - DNA, 16 bp, synthetic construct
  misc_feature 1..16: note = synthetic [barcode part1]
  source 1..16: mol_type = other DNA
gaattgcaacacgaac

SEQ ID NO: 36441 - DNA, 16 bp, synthetic construct
  misc_feature 1..16: note = synthetic [barcode part1]
  source 1..16: mol_type = other DNA
gaatctggatacgtcc

SEQ ID NO: 36442 - DNA, 16 bp, synthetic construct
  misc_feature 1..16: note = synthetic [barcode part1]
  source 1..16: mol_type = other DNA
acgtaggtatcctcag

SEQ ID NO: 36443 - DNA, 16 bp, synthetic construct
  misc_feature 1..16: note = synthetic [barcode part1]
  source 1..16: mol_type = other DNA
atcgtcaacgtaagag

SEQ ID NO: 36444 - DNA, 16 bp, synthetic construct
  misc_feature 1..16: note = synthetic [barcode part1]
  source 1..16: mol_type = other DNA
aacgttcctcagtccg

SEQ ID NO: 36445 - DNA, 16 bp, synthetic construct
  misc_feature 1..16: note = synthetic [barcode part1]
  source 1..16: mol_type = other DNA
tactgaacttgcacct

SEQ ID NO: 36446 - DNA, 16 bp, synthetic construct
  misc_feature 1..16: note = synthetic [barcode part1]
  source 1..16: mol_type = other DNA
tagtggtcctccacac

SEQ ID NO: 36447 - DNA, 16 bp, synthetic construct
  misc_feature 1..16: note = synthetic [barcode part1]
  source 1..16: mol_type = other DNA
acggacaagtgagtag

SEQ ID NO: 36448 - DNA, 16 bp, synthetic construct
  misc_feature 1..16: note = synthetic [barcode part1]
  source 1..16: mol_type = other DNA
ttccaagacttactcg

SEQ ID NO: 36449 - DNA, 16 bp, synthetic construct
  misc_feature 1..16: note = synthetic [barcode part1]
  source 1..16: mol_type = other DNA
gaactgttctgacgac

SEQ ID NO: 36450 - DNA, 16 bp, synthetic construct
  misc_feature 1..16: note = synthetic [barcode part1]
  source 1..16: mol_type = other DNA
tggcaccttactcacg

SEQ ID NO: 36451 - DNA, 16 bp, synthetic construct
  misc_feature 1..16: note = synthetic [barcode part1]
  source 1..16: mol_type = other DNA
gacgtgtaaccgaggt

SEQ ID NO: 36452 - DNA, 16 bp, synthetic construct
  misc_feature 1..16: note = synthetic [barcode part1]
  source 1..16: mol_type = other DNA
gtccgcaagagtagtg

SEQ ID NO: 36453 - DNA, 16 bp, synthetic construct
  misc_feature 1..16: note = synthetic [barcode part1]
  source 1..16: mol_type = other DNA
agttcttccaagtacc

SEQ ID NO: 36454 - DNA, 16 bp, synthetic construct
  misc_feature 1..16: note = synthetic [barcode part1]
  source 1..16: mol_type = other DNA
acgaccggattcttcc

SEQ ID NO: 36455 - DNA, 16 bp, synthetic construct
  misc_feature 1..16: note = synthetic [barcode part1]
  source 1..16: mol_type = other DNA
gtaggccactgaagac

SEQ ID NO: 36456 - DNA, 16 bp, synthetic construct
  misc_feature 1..16: note = synthetic [barcode part1]
  source 1..16: mol_type = other DNA
tcagactctgacagtg

SEQ ID NO: 36457 - DNA, 16 bp, synthetic construct
  misc_feature 1..16: note = synthetic [barcode part1]
  source 1..16: mol_type = other DNA
tgagtacagtcacacc

SEQ ID NO: 36458 - DNA, 16 bp, synthetic construct
  misc_feature 1..16: note = synthetic [barcode part1]
  source 1..16: mol_type = other DNA
ttacaggcgttggtac

SEQ ID NO: 36459 - DNA, 16 bp, synthetic construct
  misc_feature 1..16: note = synthetic [barcode part1]
  source 1..16: mol_type = other DNA
ttgccaactccacacg

SEQ ID NO: 36460 - DNA, 16 bp, synthetic construct
  misc_feature 1..16: note = synthetic [barcode part1]
  source 1..16: mol_type = other DNA
cctcgtaggttcgatc

SEQ ID NO: 36461 - DNA, 16 bp, synthetic construct
  misc_feature 1..16: note = synthetic [barcode part1]
  source 1..16: mol_type = other DNA
gagaatactcgacggc

SEQ ID NO: 36462 - DNA, 16 bp, synthetic construct
  misc_feature 1..16: note = synthetic [barcode part1]
  source 1..16: mol_type = other DNA
ttgcagattcaacctc

SEQ ID NO: 36463 - DNA, 16 bp, synthetic construct
  misc_feature 1..16: note = synthetic [barcode part1]
  source 1..16: mol_type = other DNA
attcacgtgatctctg

SEQ ID NO: 36464 - DNA, 16 bp, synthetic construct
  misc_feature 1..16: note = synthetic [barcode part1]
  source 1..16: mol_type = other DNA
ttgcactcgttagact

SEQ ID NO: 36465 - DNA, 16 bp, synthetic construct
  misc_feature 1..16: note = synthetic [barcode part1]
  source 1..16: mol_type = other DNA
gagttacgaacacggc

SEQ ID NO: 36466 - DNA, 16 bp, synthetic construct
  misc_feature 1..16: note = synthetic [barcode part1]
  source 1..16: mol_type = other DNA
gtgtaggacttctgtg

SEQ ID NO: 36467 - DNA, 16 bp, synthetic construct
  misc_feature 1..16: note = synthetic [barcode part1]
  source 1..16: mol_type = other DNA
ttcacgactcgagtag

SEQ ID NO: 36468 - DNA, 16 bp, synthetic construct
  misc_feature 1..16: note = synthetic [barcode part1]
  source 1..16: mol_type = other DNA
tcgaagtcgttgtgac

SEQ ID NO: 36469 - DNA, 16 bp, synthetic construct
  misc_feature 1..16: note = synthetic [barcode part1]
  source 1..16: mol_type = other DNA
gatagatcaggacttg

SEQ ID NO: 36470 - DNA, 16 bp, synthetic construct
  misc_feature 1..16: note = synthetic [barcode part1]
  source 1..16: mol_type = other DNA
tacgacaagaccttgc

SEQ ID NO: 36471 - DNA, 16 bp, synthetic construct
  misc_feature 1..16: note = synthetic [barcode part1]
  source 1..16: mol_type = other DNA
acttctatcgccggac

SEQ ID NO: 36472 - DNA, 16 bp, synthetic construct
  misc_feature 1..16: note = synthetic [barcode part1]
  source 1..16: mol_type = other DNA
tagttccgtatcggtt

SEQ ID NO: 36473 - DNA, 16 bp, synthetic construct
  misc_feature 1..16: note = synthetic [barcode part1]
  source 1..16: mol_type = other DNA
tatcctatcacgagtc

SEQ ID NO: 36474 - DNA, 16 bp, synthetic construct
  misc_feature 1..16: note = synthetic [barcode part1]
  source 1..16: mol_type = other DNA
taccaactggtacacg

SEQ ID NO: 36475 - DNA, 16 bp, synthetic construct
  misc_feature 1..16: note = synthetic [barcode part1]
  source 1..16: mol_type = other DNA
cgaatcagttaccgac

SEQ ID NO: 36476 - DNA, 16 bp, synthetic construct
  misc_feature 1..16: note = synthetic [barcode part1]
  source 1..16: mol_type = other DNA
acctactacgaacggt

SEQ ID NO: 36477 - DNA, 16 bp, synthetic construct
  misc_feature 1..16: note = synthetic [barcode part1]
  source 1..16: mol_type = other DNA
gaatcgttgtctccgc

SEQ ID NO: 36478 - DNA, 16 bp, synthetic construct
  misc_feature 1..16: note = synthetic [barcode part1]
  source 1..16: mol_type = other DNA
agtactcgacgtatcg

SEQ ID NO: 36479 - DNA, 16 bp, synthetic construct
  misc_feature 1..16: note = synthetic [barcode part1]
  source 1..16: mol_type = other DNA
gtatacggacttcgac

SEQ ID NO: 36480 - DNA, 16 bp, synthetic construct
  misc_feature 1..16: note = synthetic [barcode part1]
  source 1..16: mol_type = other DNA
tcctacgaaccaccac

SEQ ID NO: 36481 - DNA, 16 bp, synthetic construct
  misc_feature 1..16: note = synthetic [barcode part1]
  source 1..16: mol_type = other DNA
tcttcctggtcctaac

SEQ ID NO: 36482 - DNA, 16 bp, synthetic construct
  misc_feature 1..16: note = synthetic [barcode part1]
  source 1..16: mol_type = other DNA
tgtggatagtgcctac

SEQ ID NO: 36483 - DNA, 16 bp, synthetic construct
  misc_feature 1..16: note = synthetic [barcode part1]
  source 1..16: mol_type = other DNA
ttcaatccgtgaccgc

SEQ ID NO: 36484 - DNA, 16 bp, synthetic construct
  misc_feature 1..16: note = synthetic [barcode part1]
  source 1..16: mol_type = other DNA
cagttctcctcctagt

SEQ ID NO: 36485 - DNA, 16 bp, synthetic construct
  misc_feature 1..16: note = synthetic [barcode part1]
  source 1..16: mol_type = other DNA
aggttcaggtagtggc

SEQ ID NO: 36486 - DNA, 16 bp, synthetic construct
  misc_feature 1..16: note = synthetic [barcode part1]
  source 1..16: mol_type = other DNA
tgtcgatagtcttctg

SEQ ID NO: 36487 - DNA, 16 bp, synthetic construct
  misc_feature 1..16: note = synthetic [barcode part1]
  source 1..16: mol_type = other DNA
tctggattggaaggcg

SEQ ID NO: 36488 - DNA, 16 bp, synthetic construct
  misc_feature 1..16: note = synthetic [barcode part1]
  source 1..16: mol_type = other DNA
gatccgataacgacct

SEQ ID NO: 36489 - DNA, 16 bp, synthetic construct
  misc_feature 1..16: note = synthetic [barcode part1]
  source 1..16: mol_type = other DNA
tgaggacgttcttgtg

SEQ ID NO: 36490 - DNA, 16 bp, synthetic construct
  misc_feature 1..16: note = synthetic [barcode part1]
  source 1..16: mol_type = other DNA
caacctaacggttcag

SEQ ID NO: 36491 - DNA, 16 bp, synthetic construct
  misc_feature 1..16: note = synthetic [barcode part1]
  source 1..16: mol_type = other DNA
atagtagattcaggcg

SEQ ID NO: 36492 - DNA, 16 bp, synthetic construct
  misc_feature 1..16: note = synthetic [barcode part1]
  source 1..16: mol_type = other DNA
gatacgcagttcttct

SEQ ID NO: 36493 - DNA, 16 bp, synthetic construct
  misc_feature 1..16: note = synthetic [barcode part1]
  source 1..16: mol_type = other DNA
cgaccgattgattgac

SEQ ID NO: 36494 - DNA, 16 bp, synthetic construct
  misc_feature 1..16: note = synthetic [barcode part1]
  source 1..16: mol_type = other DNA
ttaacctcgttctgcc

SEQ ID NO: 36495 - DNA, 16 bp, synthetic construct
  misc_feature 1..16: note = synthetic [barcode part1]
  source 1..16: mol_type = other DNA
cgtatctctgccaggt

SEQ ID NO: 36496 - DNA, 16 bp, synthetic construct
  misc_feature 1..16: note = synthetic [barcode part1]
  source 1..16: mol_type = other DNA
gtaccaagtgtagtcc

SEQ ID NO: 36497 - DNA, 16 bp, synthetic construct
  misc_feature 1..16: note = synthetic [barcode part1]
  source 1..16: mol_type = other DNA
gtggaagtagtaactc

SEQ ID NO: 36498 - DNA, 16 bp, synthetic construct
  misc_feature 1..16: note = synthetic [barcode part1]
  source 1..16: mol_type = other DNA
tctggccacaccaact

SEQ ID NO: 36499 - DNA, 16 bp, synthetic construct
  misc_feature 1..16: note = synthetic [barcode part1]
  source 1..16: mol_type = other DNA
tggcctcgtgttaatt

SEQ ID NO: 36500 - DNA, 16 bp, synthetic construct
  misc_feature 1..16: note = synthetic [barcode part1]
  source 1..16: mol_type = other DNA
agtacactatacggcc

SEQ ID NO: 36501 - DNA, 16 bp, synthetic construct
  misc_feature 1..16: note = synthetic [barcode part1]
  source 1..16: mol_type = other DNA
ataccgacttcaccgc

SEQ ID NO: 36502 - DNA, 16 bp, synthetic construct
  misc_feature 1..16: note = synthetic [barcode part1]
  source 1..16: mol_type = other DNA
ttgcaggtgaatccgt

SEQ ID NO: 36503 - DNA, 16 bp, synthetic construct
  misc_feature 1..16: note = synthetic [barcode part1]
  source 1..16: mol_type = other DNA
ttcgaacctgccactg

SEQ ID NO: 36504 - DNA, 16 bp, synthetic construct
  misc_feature 1..16: note = synthetic [barcode part1]
  source 1..16: mol_type = other DNA
cagacagtgcctattg

SEQ ID NO: 36505 - DNA, 16 bp, synthetic construct
  misc_feature 1..16: note = synthetic [barcode part1]
  source 1..16: mol_type = other DNA
cgtggataggtgacgt

SEQ ID NO: 36506 - DNA, 16 bp, synthetic construct
  misc_feature 1..16: note = synthetic [barcode part1]
  source 1..16: mol_type = other DNA
attgttagaccgccag

SEQ ID NO: 36507 - DNA, 16 bp, synthetic construct
  misc_feature 1..16: note = synthetic [barcode part1]
  source 1..16: mol_type = other DNA
gtatccacaggataag

SEQ ID NO: 36508 - DNA, 16 bp, synthetic construct
  misc_feature 1..16: note = synthetic [barcode part1]
  source 1..16: mol_type = other DNA
acactcttagtccagt

SEQ ID NO: 36509 - DNA, 16 bp, synthetic construct
  misc_feature 1..16: note = synthetic [barcode part1]
  source 1..16: mol_type = other DNA
ttgatcttggactcac

SEQ ID NO: 36510 - DNA, 16 bp, synthetic construct
  misc_feature 1..16: note = synthetic [barcode part1]
  source 1..16: mol_type = other DNA
aaggtcttccagagtc

SEQ ID NO: 36511 - DNA, 16 bp, synthetic construct
  misc_feature 1..16: note = synthetic [barcode part1]
  source 1..16: mol_type = other DNA
acaagaacgcgttctc

SEQ ID NO: 36512 - DNA, 16 bp, synthetic construct
  misc_feature 1..16: note = synthetic [barcode part1]
  source 1..16: mol_type = other DNA
actcgagtccaagtgt

SEQ ID NO: 36513 - DNA, 16 bp, synthetic construct
  misc_feature 1..16: note = synthetic [barcode part1]
  source 1..16: mol_type = other DNA
tggttgagtatacgcc

SEQ ID NO: 36514 - DNA, 16 bp, synthetic construct
  misc_feature 1..16: note = synthetic [barcode part1]
  source 1..16: mol_type = other DNA
acgtcctccaggttac

SEQ ID NO: 36515 - DNA, 16 bp, synthetic construct
  misc_feature 1..16: note = synthetic [barcode part1]
  source 1..16: mol_type = other DNA
tatcgaaccacgtctt

SEQ ID NO: 36516 - DNA, 16 bp, synthetic construct
  misc_feature 1..16: note = synthetic [barcode part1]
  source 1..16: mol_type = other DNA
tcacctggtcctgaac

SEQ ID NO: 36517 - DNA, 16 bp, synthetic construct
  misc_feature 1..16: note = synthetic [barcode part1]
  source 1..16: mol_type = other DNA
cgtctgtgtctacttc

SEQ ID NO: 36518 - DNA, 16 bp, synthetic construct
  misc_feature 1..16: note = synthetic [barcode part1]
  source 1..16: mol_type = other DNA
acgattcagacgtaag

SEQ ID NO: 36519 - DNA, 16 bp, synthetic construct
  misc_feature 1..16: note = synthetic [barcode part1]
  source 1..16: mol_type = other DNA
tgtctcgagtgttcgc

SEQ ID NO: 36520 - DNA, 16 bp, synthetic construct
  misc_feature 1..16: note = synthetic [barcode part1]
  source 1..16: mol_type = other DNA
aattcgatacggaggt

SEQ ID NO: 36521 - DNA, 16 bp, synthetic construct
  misc_feature 1..16: note = synthetic [barcode part1]
  source 1..16: mol_type = other DNA
attggcggcggttatt

SEQ ID NO: 36522 - DNA, 16 bp, synthetic construct
  misc_feature 1..16: note = synthetic [barcode part1]
  source 1..16: mol_type = other DNA
ccggcagtattgagtt

SEQ ID NO: 36523 - DNA, 16 bp, synthetic construct
  misc_feature 1..16: note = synthetic [barcode part1]
  source 1..16: mol_type = other DNA
cgaccgttatcctgtg

SEQ ID NO: 36524 - DNA, 16 bp, synthetic construct
  misc_feature 1..16: note = synthetic [barcode part1]
  source 1..16: mol_type = other DNA
atcggtattcacaggc

SEQ ID NO: 36525 - DNA, 16 bp, synthetic construct
  misc_feature 1..16: note = synthetic [barcode part1]
  source 1..16: mol_type = other DNA
cagtgactgacgactt

SEQ ID NO: 36526 - DNA, 16 bp, synthetic construct
  misc_feature 1..16: note = synthetic [barcode part1]
  source 1..16: mol_type = other DNA
ttccgtcggattcgtg

SEQ ID NO: 36527 - DNA, 16 bp, synthetic construct
  misc_feature 1..16: note = synthetic [barcode part1]
  source 1..16: mol_type = other DNA
tgttactggcgcactc

SEQ ID NO: 36528 - DNA, 16 bp, synthetic construct
  misc_feature 1..16: note = synthetic [barcode part1]
  source 1..16: mol_type = other DNA
gtcaactcaatcgacg

SEQ ID NO: 36529 - DNA, 16 bp, synthetic construct
  misc_feature 1..16: note = synthetic [barcode part1]
  source 1..16: mol_type = other DNA
taacggtgttactggc

SEQ ID NO: 36530 - DNA, 16 bp, synthetic construct
  misc_feature 1..16: note = synthetic [barcode part1]
  source 1..16: mol_type = other DNA
cgttgaacttgtgttc

SEQ ID NO: 36531 - DNA, 16 bp, synthetic construct
  misc_feature 1..16: note = synthetic [barcode part1]
  source 1..16: mol_type = other DNA
cctcgatcacagactc

SEQ ID NO: 36532 - DNA, 16 bp, synthetic construct
  misc_feature 1..16: note = synthetic [barcode part1]
  source 1..16: mol_type = other DNA
ttcaacttggccgcac

SEQ ID NO: 36533 - DNA, 16 bp, synthetic construct
  misc_feature 1..16: note = synthetic [barcode part1]
  source 1..16: mol_type = other DNA
tacggcaggcaagtgt

SEQ ID NO: 36534 - DNA, 16 bp, synthetic construct
  misc_feature 1..16: note = synthetic [barcode part1]
  source 1..16: mol_type = other DNA
tgatcctgttacacgt

SEQ ID NO: 36535 - DNA, 16 bp, synthetic construct
  misc_feature 1..16: note = synthetic [barcode part1]
  source 1..16: mol_type = other DNA
aatctcttgtaccgac

SEQ ID NO: 36536 - DNA, 16 bp, synthetic construct
  misc_feature 1..16: note = synthetic [barcode part1]
  source 1..16: mol_type = other DNA
ttgcgttgtctagtgt

SEQ ID NO: 36537 - DNA, 16 bp, synthetic construct
  misc_feature 1..16: note = synthetic [barcode part1]
  source 1..16: mol_type = other DNA
atacaacgcgccaact

SEQ ID NO: 36538 - DNA, 16 bp, synthetic construct
  misc_feature 1..16: note = synthetic [barcode part1]
  source 1..16: mol_type = other DNA
ttaggcagtctgcaac

SEQ ID NO: 36539 - DNA, 16 bp, synthetic construct
  misc_feature 1..16: note = synthetic [barcode part1]
  source 1..16: mol_type = other DNA
taggcactctccgact

SEQ ID NO: 36540 - DNA, 16 bp, synthetic construct
  misc_feature 1..16: note = synthetic [barcode part1]
  source 1..16: mol_type = other DNA
tctgcgttgattcaac

SEQ ID NO: 36541 - DNA, 16 bp, synthetic construct
  misc_feature 1..16: note = synthetic [barcode part1]
  source 1..16: mol_type = other DNA
attagtgacaggacgt

SEQ ID NO: 36542 - DNA, 16 bp, synthetic construct
  misc_feature 1..16: note = synthetic [barcode part1]
  source 1..16: mol_type = other DNA
gttaggtcctgcactc

SEQ ID NO: 36543 - DNA, 16 bp, synthetic construct
  misc_feature 1..16: note = synthetic [barcode part1]
  source 1..16: mol_type = other DNA
gacagaatcgagtgtt

SEQ ID NO: 36544 - DNA, 16 bp, synthetic construct
  misc_feature 1..16: note = synthetic [barcode part1]
  source 1..16: mol_type = other DNA
acgcaagataacctag

SEQ ID NO: 36545 - DNA, 16 bp, synthetic construct
  misc_feature 1..16: note = synthetic [barcode part1]
  source 1..16: mol_type = other DNA
taaccaagttggccgt

SEQ ID NO: 36546 - DNA, 16 bp, synthetic construct
  misc_feature 1..16: note = synthetic [barcode part1]
  source 1..16: mol_type = other DNA
tgaacggccgcaatag

SEQ ID NO: 36547 - DNA, 16 bp, synthetic construct
  misc_feature 1..16: note = synthetic [barcode part1]
  source 1..16: mol_type = other DNA
cgaggaacgtgattgc

SEQ ID NO: 36548 - DNA, 16 bp, synthetic construct
  misc_feature 1..16: note = synthetic [barcode part1]
  source 1..16: mol_type = other DNA
atacggtcacgattgc

SEQ ID NO: 36549 - DNA, 16 bp, synthetic construct
  misc_feature 1..16: note = synthetic [barcode part1]
  source 1..16: mol_type = other DNA
tcacggatccaatctt

SEQ ID NO: 36550 - DNA, 16 bp, synthetic construct
  misc_feature 1..16: note = synthetic [barcode part1]
  source 1..16: mol_type = other DNA
gacttccgattcacgc

SEQ ID NO: 36551 - DNA, 16 bp, synthetic construct
  misc_feature 1..16: note = synthetic [barcode part1]
  source 1..16: mol_type = other DNA
tgcagaccgtcgtctt

SEQ ID NO: 36552 - DNA, 16 bp, synthetic construct
  misc_feature 1..16: note = synthetic [barcode part1]
  source 1..16: mol_type = other DNA
caatagatctgccgtg

SEQ ID NO: 36553 - DNA, 16 bp, synthetic construct
  misc_feature 1..16: note = synthetic [barcode part1]
  source 1..16: mol_type = other DNA
ccggttcgtaaccact

SEQ ID NO: 36554 - DNA, 16 bp, synthetic construct
  misc_feature 1..16: note = synthetic [barcode part1]
  source 1..16: mol_type = other DNA
tctctataacgcggag

SEQ ID NO: 36555 - DNA, 16 bp, synthetic construct
  misc_feature 1..16: note = synthetic [barcode part1]
  source 1..16: mol_type = other DNA
aggcgattgcaagtcg

SEQ ID NO: 36556 - DNA, 16 bp, synthetic construct
  misc_feature 1..16: note = synthetic [barcode part1]
  source 1..16: mol_type = other DNA
cctctgagtcagtgtc

SEQ ID NO: 36557 - DNA, 16 bp, synthetic construct
  misc_feature 1..16: note = synthetic [barcode part1]
  source 1..16: mol_type = other DNA
aacgccaggaattcct

SEQ ID NO: 36558 - DNA, 16 bp, synthetic construct
  misc_feature 1..16: note = synthetic [barcode part1]
  source 1..16: mol_type = other DNA
acgtacaggaatcctc

SEQ ID NO: 36559 - DNA, 16 bp, synthetic construct
  misc_feature 1..16: note = synthetic [barcode part1]
  source 1..16: mol_type = other DNA
tgtcgtctcgcacaac

SEQ ID NO: 36560 - DNA, 16 bp, synthetic construct
  misc_feature 1..16: note = synthetic [barcode part1]
  source 1..16: mol_type = other DNA
ccgatagtcaccaagt

SEQ ID NO: 36561 - DNA, 16 bp, synthetic construct
  misc_feature 1..16: note = synthetic [barcode part1]
  source 1..16: mol_type = other DNA
cgactctattgtacac

SEQ ID NO: 36562 - DNA, 16 bp, synthetic construct
  misc_feature 1..16: note = synthetic [barcode part1]
  source 1..16: mol_type = other DNA
tcgagttccttcgcag

SEQ ID NO: 36563 - DNA, 16 bp, synthetic construct
  misc_feature 1..16: note = synthetic [barcode part1]
  source 1..16: mol_type = other DNA
tgaggtcaccgcaatt

SEQ ID NO: 36564 - DNA, 16 bp, synthetic construct
  misc_feature 1..16: note = synthetic [barcode part1]
  source 1..16: mol_type = other DNA
tggtatacaacgaggt

SEQ ID NO: 36565 - DNA, 16 bp, synthetic construct
  misc_feature 1..16: note = synthetic [barcode part1]
  source 1..16: mol_type = other DNA
tgccggacttgtgttc

SEQ ID NO: 36566 - DNA, 16 bp, synthetic construct
  misc_feature 1..16: note = synthetic [barcode part1]
  source 1..16: mol_type = other DNA
aggacagaacgagatc

SEQ ID NO: 36567 - DNA, 16 bp, synthetic construct
  misc_feature 1..16: note = synthetic [barcode part1]
  source 1..16: mol_type = other DNA
aaccactgcgaagacg

SEQ ID NO: 36568 - DNA, 16 bp, synthetic construct
  misc_feature 1..16: note = synthetic [barcode part1]
  source 1..16: mol_type = other DNA
gtgttcctcggtaacc

SEQ ID NO: 36569 - DNA, 16 bp, synthetic construct
  misc_feature 1..16: note = synthetic [barcode part1]
  source 1..16: mol_type = other DNA
aactagacgccaatag

SEQ ID NO: 36570 - DNA, 16 bp, synthetic construct
  misc_feature 1..16: note = synthetic [barcode part1]
  source 1..16: mol_type = other DNA
tgacgtaatcgcctcc

SEQ ID NO: 36571 - DNA, 16 bp, synthetic construct
  misc_feature 1..16: note = synthetic [barcode part1]
  source 1..16: mol_type = other DNA
tggtgtattccgtcgc

SEQ ID NO: 36572 - DNA, 16 bp, synthetic construct
  misc_feature 1..16: note = synthetic [barcode part1]
  source 1..16: mol_type = other DNA
taggtcacctcgtgtc

SEQ ID NO: 36573 - DNA, 16 bp, synthetic construct
  misc_feature 1..16: note = synthetic [barcode part1]
  source 1..16: mol_type = other DNA
ccgataatacttctgc

SEQ ID NO: 36574 - DNA, 16 bp, synthetic construct
  misc_feature 1..16: note = synthetic [barcode part1]
  source 1..16: mol_type = other DNA
tctgtcgttccactac

SEQ ID NO: 36575 - DNA, 16 bp, synthetic construct
  misc_feature 1..16: note = synthetic [barcode part1]
  source 1..16: mol_type = other DNA
agtgtcagtcagtcac

SEQ ID NO: 36576 - DNA, 16 bp, synthetic construct
  misc_feature 1..16: note = synthetic [barcode part1]
  source 1..16: mol_type = other DNA
gttgtgtacacgactg

SEQ ID NO: 36577 - DNA, 16 bp, synthetic construct
  misc_feature 1..16: note = synthetic [barcode part1]
  source 1..16: mol_type = other DNA
taatctcgcgtcaatc

SEQ ID NO: 36578 - DNA, 16 bp, synthetic construct
  misc_feature 1..16: note = synthetic [barcode part1]
  source 1..16: mol_type = other DNA
tgcaagtggacggtac

SEQ ID NO: 36579 - DNA, 16 bp, synthetic construct
  misc_feature 1..16: note = synthetic [barcode part1]
  source 1..16: mol_type = other DNA
cgcggacttcgttgtt

SEQ ID NO: 36580 - DNA, 16 bp, synthetic construct
  misc_feature 1..16: note = synthetic [barcode part1]
  source 1..16: mol_type = other DNA
taccaccgcaactgtc

SEQ ID NO: 36581 - DNA, 16 bp, synthetic construct
  misc_feature 1..16: note = synthetic [barcode part1]
  source 1..16: mol_type = other DNA
tgcgcacaatctcaag

SEQ ID NO: 36582 - DNA, 16 bp, synthetic construct
  misc_feature 1..16: note = synthetic [barcode part1]
  source 1..16: mol_type = other DNA
gatctctccttgtcgt

SEQ ID NO: 36583 - DNA, 16 bp, synthetic construct
  misc_feature 1..16: note = synthetic [barcode part1]
  source 1..16: mol_type = other DNA
ttaacgcaactgagag

SEQ ID NO: 36584 - DNA, 16 bp, synthetic construct
  misc_feature 1..16: note = synthetic [barcode part1]
  source 1..16: mol_type = other DNA
gagattactaggtacg

SEQ ID NO: 36585 - DNA, 16 bp, synthetic construct
  misc_feature 1..16: note = synthetic [barcode part1]
  source 1..16: mol_type = other DNA
ttccgtcggatctacg

SEQ ID NO: 36586 - DNA, 16 bp, synthetic construct
  misc_feature 1..16: note = synthetic [barcode part1]
  source 1..16: mol_type = other DNA
tacgttgcaacacacg

SEQ ID NO: 36587 - DNA, 16 bp, synthetic construct
  misc_feature 1..16: note = synthetic [barcode part1]
  source 1..16: mol_type = other DNA
tacttcttcagtgacg

SEQ ID NO: 36588 - DNA, 16 bp, synthetic construct
  misc_feature 1..16: note = synthetic [barcode part1]
  source 1..16: mol_type = other DNA
ttcctggattgtgtac

SEQ ID NO: 36589 - DNA, 16 bp, synthetic construct
  misc_feature 1..16: note = synthetic [barcode part1]
  source 1..16: mol_type = other DNA
ttcgcgtgattgccac

SEQ ID NO: 36590 - DNA, 16 bp, synthetic construct
  misc_feature 1..16: note = synthetic [barcode part1]
  source 1..16: mol_type = other DNA
aagtccaacggttgtc

SEQ ID NO: 36591 - DNA, 16 bp, synthetic construct
  misc_feature 1..16: note = synthetic [barcode part1]
  source 1..16: mol_type = other DNA
aattccggcaataccg

SEQ ID NO: 36592 - DNA, 16 bp, synthetic construct
  misc_feature 1..16: note = synthetic [barcode part1]
  source 1..16: mol_type = other DNA
tgagtgcactatcctt

SEQ ID NO: 36593 - DNA, 16 bp, synthetic construct
  misc_feature 1..16: note = synthetic [barcode part1]
  source 1..16: mol_type = other DNA
actggactcactgagt

SEQ ID NO: 36594 - DNA, 16 bp, synthetic construct
  misc_feature 1..16: note = synthetic [barcode part1]
  source 1..16: mol_type = other DNA
tcgcaataccgactag

SEQ ID NO: 36595 - DNA, 16 bp, synthetic construct
  misc_feature 1..16: note = synthetic [barcode part1]
  source 1..16: mol_type = other DNA
cgtgtgatatcggtgt

SEQ ID NO: 36596 - DNA, 16 bp, synthetic construct
  misc_feature 1..16: note = synthetic [barcode part1]
  source 1..16: mol_type = other DNA
tgagtcagtacttctc

SEQ ID NO: 36597 - DNA, 16 bp, synthetic construct
  misc_feature 1..16: note = synthetic [barcode part1]
  source 1..16: mol_type = other DNA
tacttgcgtggcgtct

SEQ ID NO: 36598 - DNA, 16 bp, synthetic construct
  misc_feature 1..16: note = synthetic [barcode part1]
  source 1..16: mol_type = other DNA
gagtaggacttactcc

SEQ ID NO: 36599 - DNA, 16 bp, synthetic construct
  misc_feature 1..16: note = synthetic [barcode part1]
  source 1..16: mol_type = other DNA
tacggatattccactc

SEQ ID NO: 36600 - DNA, 16 bp, synthetic construct
  misc_feature 1..16: note = synthetic [barcode part1]
  source 1..16: mol_type = other DNA
aggacgtgactattag

SEQ ID NO: 36601 - DNA, 16 bp, synthetic construct
  misc_feature 1..16: note = synthetic [barcode part1]
  source 1..16: mol_type = other DNA
attctaccttggcctc

SEQ ID NO: 36602 - DNA, 16 bp, synthetic construct
  misc_feature 1..16: note = synthetic [barcode part1]
  source 1..16: mol_type = other DNA
tacacttccacactcc

SEQ ID NO: 36603 - DNA, 16 bp, synthetic construct
  misc_feature 1..16: note = synthetic [barcode part1]
  source 1..16: mol_type = other DNA
gacacagtgttcctag

SEQ ID NO: 36604 - DNA, 16 bp, synthetic construct
  misc_feature 1..16: note = synthetic [barcode part1]
  source 1..16: mol_type = other DNA
gagtaggacgaacaac

SEQ ID NO: 36605 - DNA, 16 bp, synthetic construct
  misc_feature 1..16: note = synthetic [barcode part1]
  source 1..16: mol_type = other DNA
tcgattgtctctcctg

SEQ ID NO: 36606 - DNA, 16 bp, synthetic construct
  misc_feature 1..16: note = synthetic [barcode part1]
  source 1..16: mol_type = other DNA
taagtcgtccttacac

SEQ ID NO: 36607 - DNA, 16 bp, synthetic construct
  misc_feature 1..16: note = synthetic [barcode part1]
  source 1..16: mol_type = other DNA
agtactgacgttgcac

SEQ ID NO: 36608 - DNA, 16 bp, synthetic construct
  misc_feature 1..16: note = synthetic [barcode part1]
  source 1..16: mol_type = other DNA
tattcacctacggcgc

SEQ ID NO: 36609 - DNA, 16 bp, synthetic construct
  misc_feature 1..16: note = synthetic [barcode part1]
  source 1..16: mol_type = other DNA
gattgaatctgcgaag

SEQ ID NO: 36610 - DNA, 16 bp, synthetic construct
  misc_feature 1..16: note = synthetic [barcode part1]
  source 1..16: mol_type = other DNA
aatcacacgcgtggtt

SEQ ID NO: 36611 - DNA, 16 bp, synthetic construct
  misc_feature 1..16: note = synthetic [barcode part1]
  source 1..16: mol_type = other DNA
aagaacggtagtctgt

SEQ ID NO: 36612 - DNA, 16 bp, synthetic construct
  misc_feature 1..16: note = synthetic [barcode part1]
  source 1..16: mol_type = other DNA
attaggagtgccgacg

SEQ ID NO: 36613 - DNA, 16 bp, synthetic construct
  misc_feature 1..16: note = synthetic [barcode part1]
  source 1..16: mol_type = other DNA
taggatctcaggactc

SEQ ID NO: 36614 - DNA, 16 bp, synthetic construct
  misc_feature 1..16: note = synthetic [barcode part1]
  source 1..16: mol_type = other DNA
gtccttaagtgcaggt

SEQ ID NO: 36615 - DNA, 16 bp, synthetic construct
  misc_feature 1..16: note = synthetic [barcode part1]
  source 1..16: mol_type = other DNA
ttctcgacaacgtgtt

SEQ ID NO: 36616 - DNA, 16 bp, synthetic construct
  misc_feature 1..16: note = synthetic [barcode part1]
  source 1..16: mol_type = other DNA
ttcgcggatcttgtcg

SEQ ID NO: 36617 - DNA, 16 bp, synthetic construct
  misc_feature 1..16: note = synthetic [barcode part1]
  source 1..16: mol_type = other DNA
tctattggcgtagttc

SEQ ID NO: 36618 - DNA, 16 bp, synthetic construct
  misc_feature 1..16: note = synthetic [barcode part1]
  source 1..16: mol_type = other DNA
accactctcacagacc

SEQ ID NO: 36619 - DNA, 16 bp, synthetic construct
  misc_feature 1..16: note = synthetic [barcode part1]
  source 1..16: mol_type = other DNA
tagtgtctcgtgacag

SEQ ID NO: 36620 - DNA, 16 bp, synthetic construct
  misc_feature 1..16: note = synthetic [barcode part1]
  source 1..16: mol_type = other DNA
atcgtggttatccgtt

SEQ ID NO: 36621 - DNA, 16 bp, synthetic construct
  misc_feature 1..16: note = synthetic [barcode part1]
  source 1..16: mol_type = other DNA
caagaggacgtatcgc

SEQ ID NO: 36622 - DNA, 16 bp, synthetic construct
  misc_feature 1..16: note = synthetic [barcode part1]
  source 1..16: mol_type = other DNA
cgactatctgcacaag

SEQ ID NO: 36623 - DNA, 16 bp, synthetic construct
  misc_feature 1..16: note = synthetic [barcode part1]
  source 1..16: mol_type = other DNA
cgcaccaagtcttctg

SEQ ID NO: 36624 - DNA, 16 bp, synthetic construct
  misc_feature 1..16: note = synthetic [barcode part1]
  source 1..16: mol_type = other DNA
atcggattactctcac

SEQ ID NO: 36625 - DNA, 16 bp, synthetic construct
  misc_feature 1..16: note = synthetic [barcode part1]
  source 1..16: mol_type = other DNA
ttgaccaacaccacag

SEQ ID NO: 36626 - DNA, 16 bp, synthetic construct
  misc_feature 1..16: note = synthetic [barcode part1]
  source 1..16: mol_type = other DNA
acggttattgatcctc

SEQ ID NO: 36627 - DNA, 16 bp, synthetic construct
  misc_feature 1..16: note = synthetic [barcode part1]
  source 1..16: mol_type = other DNA
acgtctacctgtcacg

SEQ ID NO: 36628 - DNA, 16 bp, synthetic construct
  misc_feature 1..16: note = synthetic [barcode part1]
  source 1..16: mol_type = other DNA
aggcagtggttacacg

SEQ ID NO: 36629 - DNA, 16 bp, synthetic construct
  misc_feature 1..16: note = synthetic [barcode part1]
  source 1..16: mol_type = other DNA
agtcctatcgtctgcg

SEQ ID NO: 36630 - DNA, 16 bp, synthetic construct
  misc_feature 1..16: note = synthetic [barcode part1]
  source 1..16: mol_type = other DNA
ttggaggaattacacg

SEQ ID NO: 36631 - DNA, 16 bp, synthetic construct
  misc_feature 1..16: note = synthetic [barcode part1]
  source 1..16: mol_type = other DNA
ttctaacgtcgtctcc

SEQ ID NO: 36632 - DNA, 16 bp, synthetic construct
  misc_feature 1..16: note = synthetic [barcode part1]
  source 1..16: mol_type = other DNA
tgtgacagacaggcac

SEQ ID NO: 36633 - DNA, 16 bp, synthetic construct
  misc_feature 1..16: note = synthetic [barcode part1]
  source 1..16: mol_type = other DNA
ttagtggtaagtcgcc

SEQ ID NO: 36634 - DNA, 16 bp, synthetic construct
  misc_feature 1..16: note = synthetic [barcode part1]
  source 1..16: mol_type = other DNA
cgtaggtagacggtgt

SEQ ID NO: 36635 - DNA, 16 bp, synthetic construct
  misc_feature 1..16: note = synthetic [barcode part1]
  source 1..16: mol_type = other DNA
agactctaaggttccg

SEQ ID NO: 36636 - DNA, 16 bp, synthetic construct
  misc_feature 1..16: note = synthetic [barcode part1]
  source 1..16: mol_type = other DNA
gcgactataacgcact

SEQ ID NO: 36637 - DNA, 16 bp, synthetic construct
  misc_feature 1..16: note = synthetic [barcode part1]
  source 1..16: mol_type = other DNA
tcttcggagagttgac

SEQ ID NO: 36638 - DNA, 16 bp, synthetic construct
  misc_feature 1..16: note = synthetic [barcode part1]
  source 1..16: mol_type = other DNA
tatattcgcggtctgt

SEQ ID NO: 36639 - DNA, 16 bp, synthetic construct
  misc_feature 1..16: note = synthetic [barcode part1]
  source 1..16: mol_type = other DNA
ttgcagtagtcaaccg

SEQ ID NO: 36640 - DNA, 16 bp, synthetic construct
  misc_feature 1..16: note = synthetic [barcode part1]
  source 1..16: mol_type = other DNA
tccgagacgcagtatt

SEQ ID NO: 36641 - DNA, 16 bp, synthetic construct
  misc_feature 1..16: note = synthetic [barcode part1]
  source 1..16: mol_type = other DNA
tataggcaagtgacac

SEQ ID NO: 36642 - DNA, 16 bp, synthetic construct
  misc_feature 1..16: note = synthetic [barcode part1]
  source 1..16: mol_type = other DNA
actaccaggttgtcag

SEQ ID NO: 36643 - DNA, 16 bp, synthetic construct
  misc_feature 1..16: note = synthetic [barcode part1]
  source 1..16: mol_type = other DNA
cagaatatccgtgaag

SEQ ID NO: 36644 - DNA, 16 bp, synthetic construct
  misc_feature 1..16: note = synthetic [barcode part1]
  source 1..16: mol_type = other DNA
gcaattcagtgcggag

SEQ ID NO: 36645 - DNA, 16 bp, synthetic construct
  misc_feature 1..16: note = synthetic [barcode part1]
  source 1..16: mol_type = other DNA
cgttccacttgttgtc

SEQ ID NO: 36646 - DNA, 16 bp, synthetic construct
  misc_feature 1..16: note = synthetic [barcode part1]
  source 1..16: mol_type = other DNA
acactacctacttacg

SEQ ID NO: 36647 - DNA, 16 bp, synthetic construct
  misc_feature 1..16: note = synthetic [barcode part1]
  source 1..16: mol_type = other DNA
gtccacgtacactaag

SEQ ID NO: 36648 - DNA, 16 bp, synthetic construct
  misc_feature 1..16: note = synthetic [barcode part1]
  source 1..16: mol_type = other DNA
tggcagaggatagtag

SEQ ID NO: 36649 - DNA, 16 bp, synthetic construct
  misc_feature 1..16: note = synthetic [barcode part1]
  source 1..16: mol_type = other DNA
gacctggttgaattgc

SEQ ID NO: 36650 - DNA, 16 bp, synthetic construct
  misc_feature 1..16: note = synthetic [barcode part1]
  source 1..16: mol_type = other DNA
ccacaccggatatagt

SEQ ID NO: 36651 - DNA, 16 bp, synthetic construct
  misc_feature 1..16: note = synthetic [barcode part1]
  source 1..16: mol_type = other DNA
tctatcgtgcagactt

SEQ ID NO: 36652 - DNA, 16 bp, synthetic construct
  misc_feature 1..16: note = synthetic [barcode part1]
  source 1..16: mol_type = other DNA
gtggttagagaagttc

SEQ ID NO: 36653 - DNA, 16 bp, synthetic construct
  misc_feature 1..16: note = synthetic [barcode part1]
  source 1..16: mol_type = other DNA
gtacgttgaatcgaag

SEQ ID NO: 36654 - DNA, 16 bp, synthetic construct
  misc_feature 1..16: note = synthetic [barcode part1]
  source 1..16: mol_type = other DNA
taggacgtagagaacg

SEQ ID NO: 36655 - DNA, 16 bp, synthetic construct
  misc_feature 1..16: note = synthetic [barcode part1]
  source 1..16: mol_type = other DNA
ccgagtgatctgtaac

SEQ ID NO: 36656 - DNA, 16 bp, synthetic construct
  misc_feature 1..16: note = synthetic [barcode part1]
  source 1..16: mol_type = other DNA
tctctcgtatcctacg

SEQ ID NO: 36657 - DNA, 16 bp, synthetic construct
  misc_feature 1..16: note = synthetic [barcode part1]
  source 1..16: mol_type = other DNA
aaccgttccgcacttg

SEQ ID NO: 36658 - DNA, 16 bp, synthetic construct
  misc_feature 1..16: note = synthetic [barcode part1]
  source 1..16: mol_type = other DNA
agtgccagagacttct

SEQ ID NO: 36659 - DNA, 16 bp, synthetic construct
  misc_feature 1..16: note = synthetic [barcode part1]
  source 1..16: mol_type = other DNA
acgcgatccaactcct

SEQ ID NO: 36660 - DNA, 16 bp, synthetic construct
  misc_feature 1..16: note = synthetic [barcode part1]
  source 1..16: mol_type = other DNA
agatctgactcagacc

SEQ ID NO: 36661 - DNA, 16 bp, synthetic construct
  misc_feature 1..16: note = synthetic [barcode part1]
  source 1..16: mol_type = other DNA
aatccggttctacgtt

SEQ ID NO: 36662 - DNA, 16 bp, synthetic construct
  misc_feature 1..16: note = synthetic [barcode part1]
  source 1..16: mol_type = other DNA
aagtctccggttagtg

SEQ ID NO: 36663 - DNA, 16 bp, synthetic construct
  misc_feature 1..16: note = synthetic [barcode part1]
  source 1..16: mol_type = other DNA
agatccacgttctatc

SEQ ID NO: 36664 - DNA, 16 bp, synthetic construct
  misc_feature 1..16: note = synthetic [barcode part1]
  source 1..16: mol_type = other DNA
gattggttacgtgtgc

SEQ ID NO: 36665 - DNA, 16 bp, synthetic construct
  misc_feature 1..16: note = synthetic [barcode part1]
  source 1..16: mol_type = other DNA
tgacactctcaagacg

SEQ ID NO: 36666 - DNA, 16 bp, synthetic construct
  misc_feature 1..16: note = synthetic [barcode part1]
  source 1..16: mol_type = other DNA
ttccgtgtacagagac

SEQ ID NO: 36667 - DNA, 16 bp, synthetic construct
  misc_feature 1..16: note = synthetic [barcode part1]
  source 1..16: mol_type = other DNA
cactctctgtactctg

SEQ ID NO: 36668 - DNA, 16 bp, synthetic construct
  misc_feature 1..16: note = synthetic [barcode part1]
  source 1..16: mol_type = other DNA
gttggtggataacagt

SEQ ID NO: 36669 - DNA, 16 bp, synthetic construct
  misc_feature 1..16: note = synthetic [barcode part1]
  source 1..16: mol_type = other DNA
actccgcgtaaccgtt

SEQ ID NO: 36670 - DNA, 16 bp, synthetic construct
  misc_feature 1..16: note = synthetic [barcode part1]
  source 1..16: mol_type = other DNA
attggtcctctgagag

SEQ ID NO: 36671 - DNA, 16 bp, synthetic construct
  misc_feature 1..16: note = synthetic [barcode part1]
  source 1..16: mol_type = other DNA
attgccacgtgtcctg

SEQ ID NO: 36672 - DNA, 16 bp, synthetic construct
  misc_feature 1..16: note = synthetic [barcode part1]
  source 1..16: mol_type = other DNA
aacaggagattcacgt

SEQ ID NO: 36673 - DNA, 16 bp, synthetic construct
  misc_feature 1..16: note = synthetic [barcode part1]
  source 1..16: mol_type = other DNA
agaagttgtgccgacg

SEQ ID NO: 36674 - DNA, 16 bp, synthetic construct
  misc_feature 1..16: note = synthetic [barcode part1]
  source 1..16: mol_type = other DNA
tgagaaggtgccgact

SEQ ID NO: 36675 - DNA, 16 bp, synthetic construct
  misc_feature 1..16: note = synthetic [barcode part1]
  source 1..16: mol_type = other DNA
agagtctgaattccgc

SEQ ID NO: 36676 - DNA, 16 bp, synthetic construct
  misc_feature 1..16: note = synthetic [barcode part1]
  source 1..16: mol_type = other DNA
aagatacaactcgacg

SEQ ID NO: 36677 - DNA, 16 bp, synthetic construct
  misc_feature 1..16: note = synthetic [barcode part1]
  source 1..16: mol_type = other DNA
tctcctgtactgatag

SEQ ID NO: 36678 - DNA, 16 bp, synthetic construct
  misc_feature 1..16: note = synthetic [barcode part1]
  source 1..16: mol_type = other DNA
tcgcactgtaagaacc

SEQ ID NO: 36679 - DNA, 16 bp, synthetic construct
  misc_feature 1..16: note = synthetic [barcode part1]
  source 1..16: mol_type = other DNA
tacgtgacgaaggacc

SEQ ID NO: 36680 - DNA, 16 bp, synthetic construct
  misc_feature 1..16: note = synthetic [barcode part1]
  source 1..16: mol_type = other DNA
actgtgagaactccac

SEQ ID NO: 36681 - DNA, 16 bp, synthetic construct
  misc_feature 1..16: note = synthetic [barcode part1]
  source 1..16: mol_type = other DNA
ccgagtactgtgaact

SEQ ID NO: 36682 - DNA, 16 bp, synthetic construct
  misc_feature 1..16: note = synthetic [barcode part1]
  source 1..16: mol_type = other DNA
gtctcgcggattaagt

SEQ ID NO: 36683 - DNA, 16 bp, synthetic construct
  misc_feature 1..16: note = synthetic [barcode part1]
  source 1..16: mol_type = other DNA
cggatagagtaggtag

SEQ ID NO: 36684 - DNA, 16 bp, synthetic construct
  misc_feature 1..16: note = synthetic [barcode part1]
  source 1..16: mol_type = other DNA
aactaccgttcttgtg

SEQ ID NO: 36685 - DNA, 16 bp, synthetic construct
  misc_feature 1..16: note = synthetic [barcode part1]
  source 1..16: mol_type = other DNA
agagtgcagttcgacg

SEQ ID NO: 36686 - DNA, 16 bp, synthetic construct
  misc_feature 1..16: note = synthetic [barcode part1]
  source 1..16: mol_type = other DNA
gttaggcagatcgtct

SEQ ID NO: 36687 - DNA, 16 bp, synthetic construct
  misc_feature 1..16: note = synthetic [barcode part1]
  source 1..16: mol_type = other DNA
gacgaacacgagtaag

SEQ ID NO: 36688 - DNA, 16 bp, synthetic construct
  misc_feature 1..16: note = synthetic [barcode part1]
  source 1..16: mol_type = other DNA
accttagtctctcctg

SEQ ID NO: 36689 - DNA, 16 bp, synthetic construct
  misc_feature 1..16: note = synthetic [barcode part1]
  source 1..16: mol_type = other DNA
aacacggaagttgttg

SEQ ID NO: 36690 - DNA, 16 bp, synthetic construct
  misc_feature 1..16: note = synthetic [barcode part1]
  source 1..16: mol_type = other DNA
tccttaggcacgtcgt

SEQ ID NO: 36691 - DNA, 16 bp, synthetic construct
  misc_feature 1..16: note = synthetic [barcode part1]
  source 1..16: mol_type = other DNA
atcaccttcacggatt

SEQ ID NO: 36692 - DNA, 16 bp, synthetic construct
  misc_feature 1..16: note = synthetic [barcode part1]
  source 1..16: mol_type = other DNA
gcctccgagactattc

SEQ ID NO: 36693 - DNA, 16 bp, synthetic construct
  misc_feature 1..16: note = synthetic [barcode part1]
  source 1..16: mol_type = other DNA
tgcgcgtactaatcag

SEQ ID NO: 36694 - DNA, 16 bp, synthetic construct
  misc_feature 1..16: note = synthetic [barcode part1]
  source 1..16: mol_type = other DNA
tgagaggtcttagtcc

SEQ ID NO: 36695 - DNA, 16 bp, synthetic construct
  misc_feature 1..16: note = synthetic [barcode part1]
  source 1..16: mol_type = other DNA
ttgtatcaacgacctc

SEQ ID NO: 36696 - DNA, 16 bp, synthetic construct
  misc_feature 1..16: note = synthetic [barcode part1]
  source 1..16: mol_type = other DNA
gtgcacgtagtgttac

SEQ ID NO: 36697 - DNA, 16 bp, synthetic construct
  misc_feature 1..16: note = synthetic [barcode part1]
  source 1..16: mol_type = other DNA
aactccacttggaacg

SEQ ID NO: 36698 - DNA, 16 bp, synthetic construct
  misc_feature 1..16: note = synthetic [barcode part1]
  source 1..16: mol_type = other DNA
actgacaacgaggtgc

SEQ ID NO: 36699 - DNA, 16 bp, synthetic construct
  misc_feature 1..16: note = synthetic [barcode part1]
  source 1..16: mol_type = other DNA
tgagacgtagattcag

SEQ ID NO: 36700 - DNA, 16 bp, synthetic construct
  misc_feature 1..16: note = synthetic [barcode part1]
  source 1..16: mol_type = other DNA
tcctataggccgttgc

SEQ ID NO: 36701 - DNA, 16 bp, synthetic construct
  misc_feature 1..16: note = synthetic [barcode part1]
  source 1..16: mol_type = other DNA
gtggttgacactggtt

SEQ ID NO: 36702 - DNA, 16 bp, synthetic construct
  misc_feature 1..16: note = synthetic [barcode part1]
  source 1..16: mol_type = other DNA
cacacaataaggagtc

SEQ ID NO: 36703 - DNA, 16 bp, synthetic construct
  misc_feature 1..16: note = synthetic [barcode part1]
  source 1..16: mol_type = other DNA
ccacggatagatctac

SEQ ID NO: 36704 - DNA, 16 bp, synthetic construct
  misc_feature 1..16: note = synthetic [barcode part1]
  source 1..16: mol_type = other DNA
taacctcgcgccaact

SEQ ID NO: 36705 - DNA, 16 bp, synthetic construct
  misc_feature 1..16: note = synthetic [barcode part1]
  source 1..16: mol_type = other DNA
ttgaagtcactcacct

SEQ ID NO: 36706 - DNA, 16 bp, synthetic construct
  misc_feature 1..16: note = synthetic [barcode part1]
  source 1..16: mol_type = other DNA
acaacggatagttacg

SEQ ID NO: 36707 - DNA, 16 bp, synthetic construct
  misc_feature 1..16: note = synthetic [barcode part1]
  source 1..16: mol_type = other DNA
aatagaggtcgtcctc

SEQ ID NO: 36708 - DNA, 16 bp, synthetic construct
  misc_feature 1..16: note = synthetic [barcode part1]
  source 1..16: mol_type = other DNA
gagagattctggtcct

SEQ ID NO: 36709 - DNA, 16 bp, synthetic construct
  misc_feature 1..16: note = synthetic [barcode part1]
  source 1..16: mol_type = other DNA
tgttgaggagttgtcc

SEQ ID NO: 36710 - DNA, 16 bp, synthetic construct
  misc_feature 1..16: note = synthetic [barcode part1]
  source 1..16: mol_type = other DNA
ttcacttcgaacggag

SEQ ID NO: 36711 - DNA, 16 bp, synthetic construct
  misc_feature 1..16: note = synthetic [barcode part1]
  source 1..16: mol_type = other DNA
ttgagtgttcactacc

SEQ ID NO: 36712 - DNA, 16 bp, synthetic construct
  misc_feature 1..16: note = synthetic [barcode part1]
  source 1..16: mol_type = other DNA
tcgttacgtgacgagt

SEQ ID NO: 36713 - DNA, 16 bp, synthetic construct
  misc_feature 1..16: note = synthetic [barcode part1]
  source 1..16: mol_type = other DNA
tcagtgtgtactgacg

SEQ ID NO: 36714 - DNA, 16 bp, synthetic construct
  misc_feature 1..16: note = synthetic [barcode part1]
  source 1..16: mol_type = other DNA
tattgtcacggttacc

SEQ ID NO: 36715 - DNA, 16 bp, synthetic construct
  misc_feature 1..16: note = synthetic [barcode part1]
  source 1..16: mol_type = other DNA
atagtgtgccgactgt

SEQ ID NO: 36716 - DNA, 16 bp, synthetic construct
  misc_feature 1..16: note = synthetic [barcode part1]
  source 1..16: mol_type = other DNA
gttagtaggaccaagt

SEQ ID NO: 36717 - DNA, 16 bp, synthetic construct
  misc_feature 1..16: note = synthetic [barcode part1]
  source 1..16: mol_type = other DNA
acgatctgcaactcag

SEQ ID NO: 36718 - DNA, 16 bp, synthetic construct
  misc_feature 1..16: note = synthetic [barcode part1]
  source 1..16: mol_type = other DNA
cctccgattgacttct

SEQ ID NO: 36719 - DNA, 16 bp, synthetic construct
  misc_feature 1..16: note = synthetic [barcode part1]
  source 1..16: mol_type = other DNA
acgttgtacagtaccg

SEQ ID NO: 36720 - DNA, 16 bp, synthetic construct
  misc_feature 1..16: note = synthetic [barcode part1]
  source 1..16: mol_type = other DNA
agtaacttctctgcgt

SEQ ID NO: 36721 - DNA, 16 bp, synthetic construct
  misc_feature 1..16: note = synthetic [barcode part1]
  source 1..16: mol_type = other DNA
tcggtcctgagtctgt

SEQ ID NO: 36722 - DNA, 16 bp, synthetic construct
  misc_feature 1..16: note = synthetic [barcode part1]
  source 1..16: mol_type = other DNA
gagaggtcaagttcgc

SEQ ID NO: 36723 - DNA, 16 bp, synthetic construct
  misc_feature 1..16: note = synthetic [barcode part1]
  source 1..16: mol_type = other DNA
cggttgacaataccgt

SEQ ID NO: 36724 - DNA, 16 bp, synthetic construct
  misc_feature 1..16: note = synthetic [barcode part1]
  source 1..16: mol_type = other DNA
gtccttgatccgacac

SEQ ID NO: 36725 - DNA, 16 bp, synthetic construct
  misc_feature 1..16: note = synthetic [barcode part1]
  source 1..16: mol_type = other DNA
gtctctggttcaacgc

SEQ ID NO: 36726 - DNA, 16 bp, synthetic construct
  misc_feature 1..16: note = synthetic [barcode part1]
  source 1..16: mol_type = other DNA
actgtgacctgtctgc

SEQ ID NO: 36727 - DNA, 16 bp, synthetic construct
  misc_feature 1..16: note = synthetic [barcode part1]
  source 1..16: mol_type = other DNA
tctgtgcggaatacac

SEQ ID NO: 36728 - DNA, 16 bp, synthetic construct
  misc_feature 1..16: note = synthetic [barcode part1]
  source 1..16: mol_type = other DNA
cagtcctaccggtatc

SEQ ID NO: 36729 - DNA, 16 bp, synthetic construct
  misc_feature 1..16: note = synthetic [barcode part1]
  source 1..16: mol_type = other DNA
tcagtggaagtgtagt

SEQ ID NO: 36730 - DNA, 16 bp, synthetic construct
  misc_feature 1..16: note = synthetic [barcode part1]
  source 1..16: mol_type = other DNA
acttgcctgttacaac

SEQ ID NO: 36731 - DNA, 16 bp, synthetic construct
  misc_feature 1..16: note = synthetic [barcode part1]
  source 1..16: mol_type = other DNA
gcaacagttaccactg

SEQ ID NO: 36732 - DNA, 16 bp, synthetic construct
  misc_feature 1..16: note = synthetic [barcode part1]
  source 1..16: mol_type = other DNA
actagacgtcctcacc

SEQ ID NO: 36733 - DNA, 16 bp, synthetic construct
  misc_feature 1..16: note = synthetic [barcode part1]
  source 1..16: mol_type = other DNA
agtcacgcgtgcaatt

SEQ ID NO: 36734 - DNA, 16 bp, synthetic construct
  misc_feature 1..16: note = synthetic [barcode part1]
  source 1..16: mol_type = other DNA
gtccaccttcacttgt

SEQ ID NO: 36735 - DNA, 16 bp, synthetic construct
  misc_feature 1..16: note = synthetic [barcode part1]
  source 1..16: mol_type = other DNA
cgtgatattgcgacac

SEQ ID NO: 36736 - DNA, 16 bp, synthetic construct
  misc_feature 1..16: note = synthetic [barcode part1]
  source 1..16: mol_type = other DNA
aacgtgtgccgatatc

SEQ ID NO: 36737 - DNA, 16 bp, synthetic construct
  misc_feature 1..16: note = synthetic [barcode part1]
  source 1..16: mol_type = other DNA
gatacctacaaccacg

SEQ ID NO: 36738 - DNA, 16 bp, synthetic construct
  misc_feature 1..16: note = synthetic [barcode part1]
  source 1..16: mol_type = other DNA
taggactacacacacc

SEQ ID NO: 36739 - DNA, 16 bp, synthetic construct
  misc_feature 1..16: note = synthetic [barcode part1]
  source 1..16: mol_type = other DNA
cctgacgtgtcttcag

SEQ ID NO: 36740 - DNA, 16 bp, synthetic construct
  misc_feature 1..16: note = synthetic [barcode part1]
  source 1..16: mol_type = other DNA
gcgtcctctggtagtt

SEQ ID NO: 36741 - DNA, 16 bp, synthetic construct
  misc_feature 1..16: note = synthetic [barcode part1]
  source 1..16: mol_type = other DNA
atacttctcctgcgtc

SEQ ID NO: 36742 - DNA, 16 bp, synthetic construct
  misc_feature 1..16: note = synthetic [barcode part1]
  source 1..16: mol_type = other DNA
ttcgaacggatactcg

SEQ ID NO: 36743 - DNA, 16 bp, synthetic construct
  misc_feature 1..16: note = synthetic [barcode part1]
  source 1..16: mol_type = other DNA
agtcctaggcaggtag

SEQ ID NO: 36744 - DNA, 16 bp, synthetic construct
  misc_feature 1..16: note = synthetic [barcode part1]
  source 1..16: mol_type = other DNA
actcgtcgaacttcgc

SEQ ID NO: 36745 - DNA, 16 bp, synthetic construct
  misc_feature 1..16: note = synthetic [barcode part1]
  source 1..16: mol_type = other DNA
tattgtccggaggatc

SEQ ID NO: 36746 - DNA, 16 bp, synthetic construct
  misc_feature 1..16: note = synthetic [barcode part1]
  source 1..16: mol_type = other DNA
tcactgaattaggccg

SEQ ID NO: 36747 - DNA, 16 bp, synthetic construct
  misc_feature 1..16: note = synthetic [barcode part1]
  source 1..16: mol_type = other DNA
caacgatcgattcgac

SEQ ID NO: 36748 - DNA, 16 bp, synthetic construct
  misc_feature 1..16: note = synthetic [barcode part1]
  source 1..16: mol_type = other DNA
cacgaagtccttacag

SEQ ID NO: 36749 - DNA, 16 bp, synthetic construct
  misc_feature 1..16: note = synthetic [barcode part1]
  source 1..16: mol_type = other DNA
gtgagtgacgacactg

SEQ ID NO: 36750 - DNA, 16 bp, synthetic construct
  misc_feature 1..16: note = synthetic [barcode part1]
  source 1..16: mol_type = other DNA
tgtgccgtatacagtg

SEQ ID NO: 36751 - DNA, 16 bp, synthetic construct
  misc_feature 1..16: note = synthetic [barcode part1]
  source 1..16: mol_type = other DNA
tgatacgtcgagtgtc

SEQ ID NO: 36752 - DNA, 16 bp, synthetic construct
  misc_feature 1..16: note = synthetic [barcode part1]
  source 1..16: mol_type = other DNA
gtggttgttaactcct

SEQ ID NO: 36753 - DNA, 16 bp, synthetic construct
  misc_feature 1..16: note = synthetic [barcode part1]
  source 1..16: mol_type = other DNA
tacactcacggtccgt

SEQ ID NO: 36754 - DNA, 16 bp, synthetic construct
  misc_feature 1..16: note = synthetic [barcode part1]
  source 1..16: mol_type = other DNA
gtatagttggcgcgtt

SEQ ID NO: 36755 - DNA, 16 bp, synthetic construct
  misc_feature 1..16: note = synthetic [barcode part1]
  source 1..16: mol_type = other DNA
tgtaacggcaacactc

SEQ ID NO: 36756 - DNA, 16 bp, synthetic construct
  misc_feature 1..16: note = synthetic [barcode part1]
  source 1..16: mol_type = other DNA
cgatataggccgtact

SEQ ID NO: 36757 - DNA, 16 bp, synthetic construct
  misc_feature 1..16: note = synthetic [barcode part1]
  source 1..16: mol_type = other DNA
gtcgaagtaaccgcag

SEQ ID NO: 36758 - DNA, 16 bp, synthetic construct
  misc_feature 1..16: note = synthetic [barcode part1]
  source 1..16: mol_type = other DNA
aattggacgaacctag

SEQ ID NO: 36759 - DNA, 16 bp, synthetic construct
  misc_feature 1..16: note = synthetic [barcode part1]
  source 1..16: mol_type = other DNA
tcgcctgatctgtctt

SEQ ID NO: 36760 - DNA, 16 bp, synthetic construct
  misc_feature 1..16: note = synthetic [barcode part1]
  source 1..16: mol_type = other DNA
tgcgcgaagatcgaac

SEQ ID NO: 36761 - DNA, 16 bp, synthetic construct
  misc_feature 1..16: note = synthetic [barcode part1]
  source 1..16: mol_type = other DNA
gcgtgattctcttagt

SEQ ID NO: 36762 - DNA, 16 bp, synthetic construct
  misc_feature 1..16: note = synthetic [barcode part1]
  source 1..16: mol_type = other DNA
gtaacctagatcaccg

SEQ ID NO: 36763 - DNA, 16 bp, synthetic construct
  misc_feature 1..16: note = synthetic [barcode part1]
  source 1..16: mol_type = other DNA
aggtcagtcttgactg

SEQ ID NO: 36764 - DNA, 16 bp, synthetic construct
  misc_feature 1..16: note = synthetic [barcode part1]
  source 1..16: mol_type = other DNA
tcaggtgataggcctt

SEQ ID NO: 36765 - DNA, 16 bp, synthetic construct
  misc_feature 1..16: note = synthetic [barcode part1]
  source 1..16: mol_type = other DNA
aatctgcgtgagtctg

SEQ ID NO: 36766 - DNA, 16 bp, synthetic construct
  misc_feature 1..16: note = synthetic [barcode part1]
  source 1..16: mol_type = other DNA
ccaggcaagataatac

SEQ ID NO: 36767 - DNA, 16 bp, synthetic construct
  misc_feature 1..16: note = synthetic [barcode part1]
  source 1..16: mol_type = other DNA
ttcacttcaaggtctg

SEQ ID NO: 36768 - DNA, 16 bp, synthetic construct
  misc_feature 1..16: note = synthetic [barcode part1]
  source 1..16: mol_type = other DNA
aatcgaaggcgtattg

SEQ ID NO: 36769 - DNA, 16 bp, synthetic construct
  misc_feature 1..16: note = synthetic [barcode part1]
  source 1..16: mol_type = other DNA
ttaccgtctgccttgt

SEQ ID NO: 36770 - DNA, 16 bp, synthetic construct
  misc_feature 1..16: note = synthetic [barcode part1]
  source 1..16: mol_type = other DNA
gcaatcagttagtgcc

SEQ ID NO: 36771 - DNA, 16 bp, synthetic construct
  misc_feature 1..16: note = synthetic [barcode part1]
  source 1..16: mol_type = other DNA
acaactgtggtcacac

SEQ ID NO: 36772 - DNA, 16 bp, synthetic construct
  misc_feature 1..16: note = synthetic [barcode part1]
  source 1..16: mol_type = other DNA
tgatagacaggcgtcg

SEQ ID NO: 36773 - DNA, 16 bp, synthetic construct
  misc_feature 1..16: note = synthetic [barcode part1]
  source 1..16: mol_type = other DNA
agaccacagtggtctt

SEQ ID NO: 36774 - DNA, 16 bp, synthetic construct
  misc_feature 1..16: note = synthetic [barcode part1]
  source 1..16: mol_type = other DNA
taggagacacgtaact

SEQ ID NO: 36775 - DNA, 16 bp, synthetic construct
  misc_feature 1..16: note = synthetic [barcode part1]
  source 1..16: mol_type = other DNA
cgtatagagattggac

SEQ ID NO: 36776 - DNA, 16 bp, synthetic construct
  misc_feature 1..16: note = synthetic [barcode part1]
  source 1..16: mol_type = other DNA
cagtgccttgtgatag

SEQ ID NO: 36777 - DNA, 16 bp, synthetic construct
  misc_feature 1..16: note = synthetic [barcode part1]
  source 1..16: mol_type = other DNA
tcaaggtaacgagtac

SEQ ID NO: 36778 - DNA, 16 bp, synthetic construct
  misc_feature 1..16: note = synthetic [barcode part1]
  source 1..16: mol_type = other DNA
agtgaggaaccacacc

SEQ ID NO: 36779 - DNA, 16 bp, synthetic construct
  misc_feature 1..16: note = synthetic [barcode part1]
  source 1..16: mol_type = other DNA
attcgcctccaggatc

SEQ ID NO: 36780 - DNA, 16 bp, synthetic construct
  misc_feature 1..16: note = synthetic [barcode part1]
  source 1..16: mol_type = other DNA
taggccgtacgttctc

SEQ ID NO: 36781 - DNA, 16 bp, synthetic construct
  misc_feature 1..16: note = synthetic [barcode part1]
  source 1..16: mol_type = other DNA
ttgcggaacggttgtt

SEQ ID NO: 36782 - DNA, 16 bp, synthetic construct
  misc_feature 1..16: note = synthetic [barcode part1]
  source 1..16: mol_type = other DNA
ccacctaagataggtc

SEQ ID NO: 36783 - DNA, 16 bp, synthetic construct
  misc_feature 1..16: note = synthetic [barcode part1]
  source 1..16: mol_type = other DNA
acgtcggccttcaatc

SEQ ID NO: 36784 - DNA, 16 bp, synthetic construct
  misc_feature 1..16: note = synthetic [barcode part1]
  source 1..16: mol_type = other DNA
gcgtgtcctgttactg

SEQ ID NO: 36785 - DNA, 16 bp, synthetic construct
  misc_feature 1..16: note = synthetic [barcode part1]
  source 1..16: mol_type = other DNA
gacaacgttgtcctag

SEQ ID NO: 36786 - DNA, 16 bp, synthetic construct
  misc_feature 1..16: note = synthetic [barcode part1]
  source 1..16: mol_type = other DNA
aacacgttcgaagaac

SEQ ID NO: 36787 - DNA, 16 bp, synthetic construct
  misc_feature 1..16: note = synthetic [barcode part1]
  source 1..16: mol_type = other DNA
cctccgaatactagtt

SEQ ID NO: 36788 - DNA, 16 bp, synthetic construct
  misc_feature 1..16: note = synthetic [barcode part1]
  source 1..16: mol_type = other DNA
gttgtaacctatccgt

SEQ ID NO: 36789 - DNA, 16 bp, synthetic construct
  misc_feature 1..16: note = synthetic [barcode part1]
  source 1..16: mol_type = other DNA
ataacagtgccggcag

SEQ ID NO: 36790 - DNA, 16 bp, synthetic construct
  misc_feature 1..16: note = synthetic [barcode part1]
  source 1..16: mol_type = other DNA
tctcacgaactcggtc

SEQ ID NO: 36791 - DNA, 16 bp, synthetic construct
  misc_feature 1..16: note = synthetic [barcode part1]
  source 1..16: mol_type = other DNA
tagaggaccgattcct

SEQ ID NO: 36792 - DNA, 16 bp, synthetic construct
  misc_feature 1..16: note = synthetic [barcode part1]
  source 1..16: mol_type = other DNA
tgacgttacctgcctg

SEQ ID NO: 36793 - DNA, 16 bp, synthetic construct
  misc_feature 1..16: note = synthetic [barcode part1]
  source 1..16: mol_type = other DNA
tgaagtacgaggagtg

SEQ ID NO: 36794 - DNA, 16 bp, synthetic construct
  misc_feature 1..16: note = synthetic [barcode part1]
  source 1..16: mol_type = other DNA
tcgtatcttcaacggt

SEQ ID NO: 36795 - DNA, 16 bp, synthetic construct
  misc_feature 1..16: note = synthetic [barcode part1]
  source 1..16: mol_type = other DNA
cctgattcttcgacct

SEQ ID NO: 36796 - DNA, 16 bp, synthetic construct
  misc_feature 1..16: note = synthetic [barcode part1]
  source 1..16: mol_type = other DNA
acaaccttaccttcag

SEQ ID NO: 36797 - DNA, 16 bp, synthetic construct
  misc_feature 1..16: note = synthetic [barcode part1]
  source 1..16: mol_type = other DNA
tgagtctcactcagag

SEQ ID NO: 36798 - DNA, 16 bp, synthetic construct
  misc_feature 1..16: note = synthetic [barcode part1]
  source 1..16: mol_type = other DNA
gagtgcaccaacaacg

SEQ ID NO: 36799 - DNA, 16 bp, synthetic construct
  misc_feature 1..16: note = synthetic [barcode part1]
  source 1..16: mol_type = other DNA
ccactaaggtcactag

SEQ ID NO: 36800 - DNA, 16 bp, synthetic construct
  misc_feature 1..16: note = synthetic [barcode part1]
  source 1..16: mol_type = other DNA
tctggaggtgttgtgt

SEQ ID NO: 36801 - DNA, 16 bp, synthetic construct
  misc_feature 1..16: note = synthetic [barcode part1]
  source 1..16: mol_type = other DNA
agtgtgtgactaagac

SEQ ID NO: 36802 - DNA, 16 bp, synthetic construct
  misc_feature 1..16: note = synthetic [barcode part1]
  source 1..16: mol_type = other DNA
gttgagtgtaggaatc

SEQ ID NO: 36803 - DNA, 16 bp, synthetic construct
  misc_feature 1..16: note = synthetic [barcode part1]
  source 1..16: mol_type = other DNA
acggttatacacgacc

SEQ ID NO: 36804 - DNA, 16 bp, synthetic construct
  misc_feature 1..16: note = synthetic [barcode part1]
  source 1..16: mol_type = other DNA
gttcgagaagtggcgt

SEQ ID NO: 36805 - DNA, 16 bp, synthetic construct
  misc_feature 1..16: note = synthetic [barcode part1]
  source 1..16: mol_type = other DNA
gtgcaccacaggatag

SEQ ID NO: 36806 - DNA, 16 bp, synthetic construct
  misc_feature 1..16: note = synthetic [barcode part1]
  source 1..16: mol_type = other DNA
gagacggtcacgagtt

SEQ ID NO: 36807 - DNA, 16 bp, synthetic construct
  misc_feature 1..16: note = synthetic [barcode part1]
  source 1..16: mol_type = other DNA
gatagtcagtccaacc

SEQ ID NO: 36808 - DNA, 16 bp, synthetic construct
  misc_feature 1..16: note = synthetic [barcode part1]
  source 1..16: mol_type = other DNA
gtcctcggacaacctt

SEQ ID NO: 36809 - DNA, 16 bp, synthetic construct
  misc_feature 1..16: note = synthetic [barcode part1]
  source 1..16: mol_type = other DNA
cctatacctaagtcgt

SEQ ID NO: 36810 - DNA, 16 bp, synthetic construct
  misc_feature 1..16: note = synthetic [barcode part1]
  source 1..16: mol_type = other DNA
agattcctcaaggtcg

SEQ ID NO: 36811 - DNA, 16 bp, synthetic construct
  misc_feature 1..16: note = synthetic [barcode part1]
  source 1..16: mol_type = other DNA
cgccttaagtgtctgc

SEQ ID NO: 36812 - DNA, 16 bp, synthetic construct
  misc_feature 1..16: note = synthetic [barcode part1]
  source 1..16: mol_type = other DNA
acagtcacagttgcac

SEQ ID NO: 36813 - DNA, 16 bp, synthetic construct
  misc_feature 1..16: note = synthetic [barcode part1]
  source 1..16: mol_type = other DNA
tccgtcgagagtagtt

SEQ ID NO: 36814 - DNA, 16 bp, synthetic construct
  misc_feature 1..16: note = synthetic [barcode part1]
  source 1..16: mol_type = other DNA
cacaatatccgtctgt

SEQ ID NO: 36815 - DNA, 16 bp, synthetic construct
  misc_feature 1..16: note = synthetic [barcode part1]
  source 1..16: mol_type = other DNA
cctgtgcgttagacct

SEQ ID NO: 36816 - DNA, 16 bp, synthetic construct
  misc_feature 1..16: note = synthetic [barcode part1]
  source 1..16: mol_type = other DNA
tcgatctccacacggt

SEQ ID NO: 36817 - DNA, 16 bp, synthetic construct
  misc_feature 1..16: note = synthetic [barcode part1]
  source 1..16: mol_type = other DNA
aagaagttaccaacgc

SEQ ID NO: 36818 - DNA, 16 bp, synthetic construct
  misc_feature 1..16: note = synthetic [barcode part1]
  source 1..16: mol_type = other DNA
tcgatacaatctctcg

SEQ ID NO: 36819 - DNA, 16 bp, synthetic construct
  misc_feature 1..16: note = synthetic [barcode part1]
  source 1..16: mol_type = other DNA
ccaattctaggttcgt

SEQ ID NO: 36820 - DNA, 16 bp, synthetic construct
  misc_feature 1..16: note = synthetic [barcode part1]
  source 1..16: mol_type = other DNA
gcaaggaagttgttac

SEQ ID NO: 36821 - DNA, 16 bp, synthetic construct
  misc_feature 1..16: note = synthetic [barcode part1]
  source 1..16: mol_type = other DNA
atcagaacgatacgtg

SEQ ID NO: 36822 - DNA, 16 bp, synthetic construct
  misc_feature 1..16: note = synthetic [barcode part1]
  source 1..16: mol_type = other DNA
gcaggagtcgacgatt

SEQ ID NO: 36823 - DNA, 16 bp, synthetic construct
  misc_feature 1..16: note = synthetic [barcode part1]
  source 1..16: mol_type = other DNA
gtccggaaggcaatac

SEQ ID NO: 36824 - DNA, 16 bp, synthetic construct
  misc_feature 1..16: note = synthetic [barcode part1]
  source 1..16: mol_type = other DNA
gttgtgtctgacgtag

SEQ ID NO: 36825 - DNA, 16 bp, synthetic construct
  misc_feature 1..16: note = synthetic [barcode part1]
  source 1..16: mol_type = other DNA
ttcgagagaagtctcc

SEQ ID NO: 36826 - DNA, 16 bp, synthetic construct
  misc_feature 1..16: note = synthetic [barcode part1]
  source 1..16: mol_type = other DNA
agtggccactgttaac

SEQ ID NO: 36827 - DNA, 16 bp, synthetic construct
  misc_feature 1..16: note = synthetic [barcode part1]
  source 1..16: mol_type = other DNA
gaactctagaggagag

SEQ ID NO: 36828 - DNA, 16 bp, synthetic construct
  misc_feature 1..16: note = synthetic [barcode part1]
  source 1..16: mol_type = other DNA
tattcctaatcgccag

SEQ ID NO: 36829 - DNA, 16 bp, synthetic construct
  misc_feature 1..16: note = synthetic [barcode part1]
  source 1..16: mol_type = other DNA
tgcggatcaaggtggt

SEQ ID NO: 36830 - DNA, 16 bp, synthetic construct
  misc_feature 1..16: note = synthetic [barcode part1]
  source 1..16: mol_type = other DNA
acagttgcaacgtgtc

SEQ ID NO: 36831 - DNA, 16 bp, synthetic construct
  misc_feature 1..16: note = synthetic [barcode part1]
  source 1..16: mol_type = other DNA
tggtcctaatctctcc

SEQ ID NO: 36832 - DNA, 16 bp, synthetic construct
  misc_feature 1..16: note = synthetic [barcode part1]
  source 1..16: mol_type = other DNA
actgcgaggtgagtgt

SEQ ID NO: 36833 - DNA, 16 bp, synthetic construct
  misc_feature 1..16: note = synthetic [barcode part1]
  source 1..16: mol_type = other DNA
agtaagtgtggacgag

SEQ ID NO: 36834 - DNA, 16 bp, synthetic construct
  misc_feature 1..16: note = synthetic [barcode part1]
  source 1..16: mol_type = other DNA
gaggtgttaatctgag

SEQ ID NO: 36835 - DNA, 16 bp, synthetic construct
  misc_feature 1..16: note = synthetic [barcode part1]
  source 1..16: mol_type = other DNA
cagagtgacagagtag

SEQ ID NO: 36836 - DNA, 16 bp, synthetic construct
  misc_feature 1..16: note = synthetic [barcode part1]
  source 1..16: mol_type = other DNA
tcttcagtggtgtgtt

SEQ ID NO: 36837 - DNA, 16 bp, synthetic construct
  misc_feature 1..16: note = synthetic [barcode part1]
  source 1..16: mol_type = other DNA
ccagttctaagaggtc

SEQ ID NO: 36838 - DNA, 16 bp, synthetic construct
  misc_feature 1..16: note = synthetic [barcode part1]
  source 1..16: mol_type = other DNA
gaacagaataacgcct

SEQ ID NO: 36839 - DNA, 16 bp, synthetic construct
  misc_feature 1..16: note = synthetic [barcode part1]
  source 1..16: mol_type = other DNA
acaccaacgtaccaac

SEQ ID NO: 36840 - DNA, 16 bp, synthetic construct
  misc_feature 1..16: note = synthetic [barcode part1]
  source 1..16: mol_type = other DNA
tctggtctctcaatcc

SEQ ID NO: 36841 - DNA, 16 bp, synthetic construct
  misc_feature 1..16: note = synthetic [barcode part1]
  source 1..16: mol_type = other DNA
gacggtaattccactg

SEQ ID NO: 36842 - DNA, 16 bp, synthetic construct
  misc_feature 1..16: note = synthetic [barcode part1]
  source 1..16: mol_type = other DNA
gcctaggtgttactcc

SEQ ID NO: 36843 - DNA, 16 bp, synthetic construct
  misc_feature 1..16: note = synthetic [barcode part1]
  source 1..16: mol_type = other DNA
agtaccggtcgtaact

SEQ ID NO: 36844 - DNA, 16 bp, synthetic construct
  misc_feature 1..16: note = synthetic [barcode part1]
  source 1..16: mol_type = other DNA
acaagtctggtaagac

SEQ ID NO: 36845 - DNA, 16 bp, synthetic construct
  misc_feature 1..16: note = synthetic [barcode part1]
  source 1..16: mol_type = other DNA
aatcgtgccttccgac

SEQ ID NO: 36846 - DNA, 16 bp, synthetic construct
  misc_feature 1..16: note = synthetic [barcode part1]
  source 1..16: mol_type = other DNA
cagtgtgactgcctct

SEQ ID NO: 36847 - DNA, 16 bp, synthetic construct
  misc_feature 1..16: note = synthetic [barcode part1]
  source 1..16: mol_type = other DNA
gacgagttggaacctg

SEQ ID NO: 36848 - DNA, 16 bp, synthetic construct
  misc_feature 1..16: note = synthetic [barcode part1]
  source 1..16: mol_type = other DNA
taacagactcggatag

SEQ ID NO: 36849 - DNA, 16 bp, synthetic construct
  misc_feature 1..16: note = synthetic [barcode part1]
  source 1..16: mol_type = other DNA
cactactgagtcgagt

SEQ ID NO: 36850 - DNA, 16 bp, synthetic construct
  misc_feature 1..16: note = synthetic [barcode part1]
  source 1..16: mol_type = other DNA
tctaaggtgcgatacc

SEQ ID NO: 36851 - DNA, 16 bp, synthetic construct
  misc_feature 1..16: note = synthetic [barcode part1]
  source 1..16: mol_type = other DNA
gcctatctggaactcc

SEQ ID NO: 36852 - DNA, 16 bp, synthetic construct
  misc_feature 1..16: note = synthetic [barcode part1]
  source 1..16: mol_type = other DNA
tcctaacagttcacgt

SEQ ID NO: 36853 - DNA, 16 bp, synthetic construct
  misc_feature 1..16: note = synthetic [barcode part1]
  source 1..16: mol_type = other DNA
tgttcgaactgcctcg

SEQ ID NO: 36854 - DNA, 16 bp, synthetic construct
  misc_feature 1..16: note = synthetic [barcode part1]
  source 1..16: mol_type = other DNA
caggatcgactctagt

SEQ ID NO: 36855 - DNA, 16 bp, synthetic construct
  misc_feature 1..16: note = synthetic [barcode part1]
  source 1..16: mol_type = other DNA
atacgtaggccagtct

SEQ ID NO: 36856 - DNA, 16 bp, synthetic construct
  misc_feature 1..16: note = synthetic [barcode part1]
  source 1..16: mol_type = other DNA
gccttgtcgtcaacac

SEQ ID NO: 36857 - DNA, 16 bp, synthetic construct
  misc_feature 1..16: note = synthetic [barcode part1]
  source 1..16: mol_type = other DNA
gtgtggacctggtaag

SEQ ID NO: 36858 - DNA, 16 bp, synthetic construct
  misc_feature 1..16: note = synthetic [barcode part1]
  source 1..16: mol_type = other DNA
caacactcgagacttg

SEQ ID NO: 36859 - DNA, 16 bp, synthetic construct
  misc_feature 1..16: note = synthetic [barcode part1]
  source 1..16: mol_type = other DNA
tgatcaccttgcgaag

SEQ ID NO: 36860 - DNA, 16 bp, synthetic construct
  misc_feature 1..16: note = synthetic [barcode part1]
  source 1..16: mol_type = other DNA
atccagtacgttcttg

SEQ ID NO: 36861 - DNA, 16 bp, synthetic construct
  misc_feature 1..16: note = synthetic [barcode part1]
  source 1..16: mol_type = other DNA
gaattcgacggttgtc

SEQ ID NO: 36862 - DNA, 16 bp, synthetic construct
  misc_feature 1..16: note = synthetic [barcode part1]
  source 1..16: mol_type = other DNA
ttgacgattacactcc

SEQ ID NO: 36863 - DNA, 16 bp, synthetic construct
  misc_feature 1..16: note = synthetic [barcode part1]
  source 1..16: mol_type = other DNA
gtggatcgtgtctagt

SEQ ID NO: 36864 - DNA, 16 bp, synthetic construct
  misc_feature 1..16: note = synthetic [barcode part1]
  source 1..16: mol_type = other DNA
gtagacctgcgaatct

SEQ ID NO: 36865 - DNA, 16 bp, synthetic construct
  misc_feature 1..16: note = synthetic [barcode part1]
  source 1..16: mol_type = other DNA
gtaatcgtgacacacc

SEQ ID NO: 36866 - DNA, 16 bp, synthetic construct
  misc_feature 1..16: note = synthetic [barcode part1]
  source 1..16: mol_type = other DNA
gtgcacagtacgtact

SEQ ID NO: 36867 - DNA, 16 bp, synthetic construct
  misc_feature 1..16: note = synthetic [barcode part1]
  source 1..16: mol_type = other DNA
actatcgtggtagtcg

SEQ ID NO: 36868 - DNA, 16 bp, synthetic construct
  misc_feature 1..16: note = synthetic [barcode part1]
  source 1..16: mol_type = other DNA
gtacctctggtagtcc

SEQ ID NO: 36869 - DNA, 16 bp, synthetic construct
  misc_feature 1..16: note = synthetic [barcode part1]
  source 1..16: mol_type = other DNA
cgatcctacgcactac

SEQ ID NO: 36870 - DNA, 16 bp, synthetic construct
  misc_feature 1..16: note = synthetic [barcode part1]
  source 1..16: mol_type = other DNA
gtatcagacactcgac

SEQ ID NO: 36871 - DNA, 16 bp, synthetic construct
  misc_feature 1..16: note = synthetic [barcode part1]
  source 1..16: mol_type = other DNA
aggatcgttcttgacg

SEQ ID NO: 36872 - DNA, 16 bp, synthetic construct
  misc_feature 1..16: note = synthetic [barcode part1]
  source 1..16: mol_type = other DNA
gttggattgcctctgc

SEQ ID NO: 36873 - DNA, 16 bp, synthetic construct
  misc_feature 1..16: note = synthetic [barcode part1]
  source 1..16: mol_type = other DNA
tgatcttcgcggttgc

SEQ ID NO: 36874 - DNA, 16 bp, synthetic construct
  misc_feature 1..16: note = synthetic [barcode part1]
  source 1..16: mol_type = other DNA
acttgtgtaatcctcg

SEQ ID NO: 36875 - DNA, 16 bp, synthetic construct
  misc_feature 1..16: note = synthetic [barcode part1]
  source 1..16: mol_type = other DNA
tacttcaccacggacc

SEQ ID NO: 36876 - DNA, 16 bp, synthetic construct
  misc_feature 1..16: note = synthetic [barcode part1]
  source 1..16: mol_type = other DNA
attcgtccagaactct

SEQ ID NO: 36877 - DNA, 16 bp, synthetic construct
  misc_feature 1..16: note = synthetic [barcode part1]
  source 1..16: mol_type = other DNA
cgacctccaactgtgt

SEQ ID NO: 36878 - DNA, 16 bp, synthetic construct
  misc_feature 1..16: note = synthetic [barcode part1]
  source 1..16: mol_type = other DNA
tcgtagagatacgtcc

SEQ ID NO: 36879 - DNA, 16 bp, synthetic construct
  misc_feature 1..16: note = synthetic [barcode part1]
  source 1..16: mol_type = other DNA
tagagagtcggtcctt

SEQ ID NO: 36880 - DNA, 16 bp, synthetic construct
  misc_feature 1..16: note = synthetic [barcode part1]
  source 1..16: mol_type = other DNA
gcaacttcctgcactg

SEQ ID NO: 36881 - DNA, 16 bp, synthetic construct
  misc_feature 1..16: note = synthetic [barcode part1]
  source 1..16: mol_type = other DNA
ttgacggtaccagact

SEQ ID NO: 36882 - DNA, 16 bp, synthetic construct
  misc_feature 1..16: note = synthetic [barcode part1]
  source 1..16: mol_type = other DNA
cacttgattgagtgcg

SEQ ID NO: 36883 - DNA, 16 bp, synthetic construct
  misc_feature 1..16: note = synthetic [barcode part1]
  source 1..16: mol_type = other DNA
acgaaccaaccacgtt

SEQ ID NO: 36884 - DNA, 16 bp, synthetic construct
  misc_feature 1..16: note = synthetic [barcode part1]
  source 1..16: mol_type = other DNA
tggattcgaacagtag

SEQ ID NO: 36885 - DNA, 16 bp, synthetic construct
  misc_feature 1..16: note = synthetic [barcode part1]
  source 1..16: mol_type = other DNA
tacggactcacgagtt

SEQ ID NO: 36886 - DNA, 16 bp, synthetic construct
  misc_feature 1..16: note = synthetic [barcode part1]
  source 1..16: mol_type = other DNA
gttcgttcgccacagt

SEQ ID NO: 36887 - DNA, 16 bp, synthetic construct
  misc_feature 1..16: note = synthetic [barcode part1]
  source 1..16: mol_type = other DNA
ccgaataacgaacctc

SEQ ID NO: 36888 - DNA, 16 bp, synthetic construct
  misc_feature 1..16: note = synthetic [barcode part1]
  source 1..16: mol_type = other DNA
gagtgacgacttgcag

SEQ ID NO: 36889 - DNA, 16 bp, synthetic construct
  misc_feature 1..16: note = synthetic [barcode part1]
  source 1..16: mol_type = other DNA
gtctcctagagagttg

SEQ ID NO: 36890 - DNA, 16 bp, synthetic construct
  misc_feature 1..16: note = synthetic [barcode part1]
  source 1..16: mol_type = other DNA
tgacggcagaatatac

SEQ ID NO: 36891 - DNA, 16 bp, synthetic construct
  misc_feature 1..16: note = synthetic [barcode part1]
  source 1..16: mol_type = other DNA
cgaaccgtgataactc

SEQ ID NO: 36892 - DNA, 16 bp, synthetic construct
  misc_feature 1..16: note = synthetic [barcode part1]
  source 1..16: mol_type = other DNA
caataacgtgcaaggt

SEQ ID NO: 36893 - DNA, 16 bp, synthetic construct
  misc_feature 1..16: note = synthetic [barcode part1]
  source 1..16: mol_type = other DNA
aggaagaacgtgtgtg

SEQ ID NO: 36894 - DNA, 16 bp, synthetic construct
  misc_feature 1..16: note = synthetic [barcode part1]
  source 1..16: mol_type = other DNA
accacggaacagacac

SEQ ID NO: 36895 - DNA, 16 bp, synthetic construct
  misc_feature 1..16: note = synthetic [barcode part1]
  source 1..16: mol_type = other DNA
ccttagactacgacag

SEQ ID NO: 36896 - DNA, 16 bp, synthetic construct
  misc_feature 1..16: note = synthetic [barcode part1]
  source 1..16: mol_type = other DNA
gtcctactagaaggtc

SEQ ID NO: 36897 - DNA, 16 bp, synthetic construct
  misc_feature 1..16: note = synthetic [barcode part1]
  source 1..16: mol_type = other DNA
taaggccacgtacact

SEQ ID NO: 36898 - DNA, 16 bp, synthetic construct
  misc_feature 1..16: note = synthetic [barcode part1]
  source 1..16: mol_type = other DNA
ccaggatacaggcagt

SEQ ID NO: 36899 - DNA, 16 bp, synthetic construct
  misc_feature 1..16: note = synthetic [barcode part1]
  source 1..16: mol_type = other DNA
gtagaaggtgccttct

SEQ ID NO: 36900 - DNA, 16 bp, synthetic construct
  misc_feature 1..16: note = synthetic [barcode part1]
  source 1..16: mol_type = other DNA
gacctcctgcagactt

SEQ ID NO: 36901 - DNA, 16 bp, synthetic construct
  misc_feature 1..16: note = synthetic [barcode part1]
  source 1..16: mol_type = other DNA
cgaattgaggagtgcc

SEQ ID NO: 36902 - DNA, 16 bp, synthetic construct
  misc_feature 1..16: note = synthetic [barcode part1]
  source 1..16: mol_type = other DNA
cacacgaggatcgagt

SEQ ID NO: 36903 - DNA, 16 bp, synthetic construct
  misc_feature 1..16: note = synthetic [barcode part1]
  source 1..16: mol_type = other DNA
gagttgtgcaatccac

SEQ ID NO: 36904 - DNA, 16 bp, synthetic construct
  misc_feature 1..16: note = synthetic [barcode part1]
  source 1..16: mol_type = other DNA
gtctggcaaggatacg

SEQ ID NO: 36905 - DNA, 16 bp, synthetic construct
  misc_feature 1..16: note = synthetic [barcode part1]
  source 1..16: mol_type = other DNA
aaccacgaatccttct

SEQ ID NO: 36906 - DNA, 16 bp, synthetic construct
  misc_feature 1..16: note = synthetic [barcode part1]
  source 1..16: mol_type = other DNA
taaccgaaggaggaac

SEQ ID NO: 36907 - DNA, 16 bp, synthetic construct
  misc_feature 1..16: note = synthetic [barcode part1]
  source 1..16: mol_type = other DNA
gttcggatagagtagt

SEQ ID NO: 36908 - DNA, 16 bp, synthetic construct
  misc_feature 1..16: note = synthetic [barcode part1]
  source 1..16: mol_type = other DNA
tccagtatcacgtccg

SEQ ID NO: 36909 - DNA, 16 bp, synthetic construct
  misc_feature 1..16: note = synthetic [barcode part1]
  source 1..16: mol_type = other DNA
tgcacttcacctctgt

SEQ ID NO: 36910 - DNA, 16 bp, synthetic construct
  misc_feature 1..16: note = synthetic [barcode part1]
  source 1..16: mol_type = other DNA
tacagaacggcagtcg

SEQ ID NO: 36911 - DNA, 16 bp, synthetic construct
  misc_feature 1..16: note = synthetic [barcode part1]
  source 1..16: mol_type = other DNA
ccgcgaattcaacctc

SEQ ID NO: 36912 - DNA, 16 bp, synthetic construct
  misc_feature 1..16: note = synthetic [barcode part1]
  source 1..16: mol_type = other DNA
cgtgtaggcctaagtt

SEQ ID NO: 36913 - DNA, 16 bp, synthetic construct
  misc_feature 1..16: note = synthetic [barcode part1]
  source 1..16: mol_type = other DNA
cgacgatctgaactgt

SEQ ID NO: 36914 - DNA, 16 bp, synthetic construct
  misc_feature 1..16: note = synthetic [barcode part1]
  source 1..16: mol_type = other DNA
cggtagagttcacgag

SEQ ID NO: 36915 - DNA, 16 bp, synthetic construct
  misc_feature 1..16: note = synthetic [barcode part1]
  source 1..16: mol_type = other DNA
tgagaattaccgaacg

SEQ ID NO: 36916 - DNA, 16 bp, synthetic construct
  misc_feature 1..16: note = synthetic [barcode part1]
  source 1..16: mol_type = other DNA
cgagtgaggataagtg

SEQ ID NO: 36917 - DNA, 16 bp, synthetic construct
  misc_feature 1..16: note = synthetic [barcode part1]
  source 1..16: mol_type = other DNA
caaggtcaggagaagt

SEQ ID NO: 36918 - DNA, 16 bp, synthetic construct
  misc_feature 1..16: note = synthetic [barcode part1]
  source 1..16: mol_type = other DNA
tcttatccagacgttg

SEQ ID NO: 36919 - DNA, 16 bp, synthetic construct
  misc_feature 1..16: note = synthetic [barcode part1]
  source 1..16: mol_type = other DNA
gcgtaataattcctcc

SEQ ID NO: 36920 - DNA, 16 bp, synthetic construct
  misc_feature 1..16: note = synthetic [barcode part1]
  source 1..16: mol_type = other DNA
ttggtggtagaccact

SEQ ID NO: 36921 - DNA, 16 bp, synthetic construct
  misc_feature 1..16: note = synthetic [barcode part1]
  source 1..16: mol_type = other DNA
gtgagagatactcctc

SEQ ID NO: 36922 - DNA, 16 bp, synthetic construct
  misc_feature 1..16: note = synthetic [barcode part1]
  source 1..16: mol_type = other DNA
actacttccgtcttgc

SEQ ID NO: 36923 - DNA, 16 bp, synthetic construct
  misc_feature 1..16: note = synthetic [barcode part1]
  source 1..16: mol_type = other DNA
taggtcttccagacag

SEQ ID NO: 36924 - DNA, 16 bp, synthetic construct
  misc_feature 1..16: note = synthetic [barcode part1]
  source 1..16: mol_type = other DNA
tgacacaggagatcgc

SEQ ID NO: 36925 - DNA, 16 bp, synthetic construct
  misc_feature 1..16: note = synthetic [barcode part1]
  source 1..16: mol_type = other DNA
aaccaactgcagtacc

SEQ ID NO: 36926 - DNA, 16 bp, synthetic construct
  misc_feature 1..16: note = synthetic [barcode part1]
  source 1..16: mol_type = other DNA
actacgtctaggtacg

SEQ ID NO: 36927 - DNA, 16 bp, synthetic construct
  misc_feature 1..16: note = synthetic [barcode part1]
  source 1..16: mol_type = other DNA
aacggagagtccacac

SEQ ID NO: 36928 - DNA, 16 bp, synthetic construct
  misc_feature 1..16: note = synthetic [barcode part1]
  source 1..16: mol_type = other DNA
gcgttctgccgaattc

SEQ ID NO: 36929 - DNA, 16 bp, synthetic construct
  misc_feature 1..16: note = synthetic [barcode part1]
  source 1..16: mol_type = other DNA
acgattgatcacacgc

SEQ ID NO: 36930 - DNA, 16 bp, synthetic construct
  misc_feature 1..16: note = synthetic [barcode part1]
  source 1..16: mol_type = other DNA
tgtcctattcgccgtt

SEQ ID NO: 36931 - DNA, 16 bp, synthetic construct
  misc_feature 1..16: note = synthetic [barcode part1]
  source 1..16: mol_type = other DNA
gagtacttgcctgaac

SEQ ID NO: 36932 - DNA, 16 bp, synthetic construct
  misc_feature 1..16: note = synthetic [barcode part1]
  source 1..16: mol_type = other DNA
tgattggactggttgc

SEQ ID NO: 36933 - DNA, 16 bp, synthetic construct
  misc_feature 1..16: note = synthetic [barcode part1]
  source 1..16: mol_type = other DNA
tcttctcctggaactc

SEQ ID NO: 36934 - DNA, 16 bp, synthetic construct
  misc_feature 1..16: note = synthetic [barcode part1]
  source 1..16: mol_type = other DNA
cgaacgagacaagtag

SEQ ID NO: 36935 - DNA, 16 bp, synthetic construct
  misc_feature 1..16: note = synthetic [barcode part1]
  source 1..16: mol_type = other DNA
gtgtgcgatcaactac

SEQ ID NO: 36936 - DNA, 16 bp, synthetic construct
  misc_feature 1..16: note = synthetic [barcode part1]
  source 1..16: mol_type = other DNA
agaactaccgacgcag

SEQ ID NO: 36937 - DNA, 16 bp, synthetic construct
  misc_feature 1..16: note = synthetic [barcode part1]
  source 1..16: mol_type = other DNA
gtaacgcggtcttagt

SEQ ID NO: 36938 - DNA, 16 bp, synthetic construct
  misc_feature 1..16: note = synthetic [barcode part1]
  source 1..16: mol_type = other DNA
tgtgtcaggttagaag

SEQ ID NO: 36939 - DNA, 16 bp, synthetic construct
  misc_feature 1..16: note = synthetic [barcode part1]
  source 1..16: mol_type = other DNA
ccttgacgacttacgc

SEQ ID NO: 36940 - DNA, 16 bp, synthetic construct
  misc_feature 1..16: note = synthetic [barcode part1]
  source 1..16: mol_type = other DNA
gtgtggatactggacg

SEQ ID NO: 36941 - DNA, 16 bp, synthetic construct
  misc_feature 1..16: note = synthetic [barcode part1]
  source 1..16: mol_type = other DNA
ttcttcctagtcggtc

SEQ ID NO: 36942 - DNA, 16 bp, synthetic construct
  misc_feature 1..16: note = synthetic [barcode part1]
  source 1..16: mol_type = other DNA
agtgtgcggtcaaggt

SEQ ID NO: 36943 - DNA, 16 bp, synthetic construct
  misc_feature 1..16: note = synthetic [barcode part1]
  source 1..16: mol_type = other DNA
accttacgagtgttct

SEQ ID NO: 36944 - DNA, 16 bp, synthetic construct
  misc_feature 1..16: note = synthetic [barcode part1]
  source 1..16: mol_type = other DNA
agaaggacaatcgacg

SEQ ID NO: 36945 - DNA, 16 bp, synthetic construct
  misc_feature 1..16: note = synthetic [barcode part1]
  source 1..16: mol_type = other DNA
cgagaccactataacc

SEQ ID NO: 36946 - DNA, 16 bp, synthetic construct
  misc_feature 1..16: note = synthetic [barcode part1]
  source 1..16: mol_type = other DNA
taacaagacgaactcg

SEQ ID NO: 36947 - DNA, 16 bp, synthetic construct
  misc_feature 1..16: note = synthetic [barcode part1]
  source 1..16: mol_type = other DNA
cgcgcgattcgattct

SEQ ID NO: 36948 - DNA, 16 bp, synthetic construct
  misc_feature 1..16: note = synthetic [barcode part1]
  source 1..16: mol_type = other DNA
taacttcactacgtgc

SEQ ID NO: 36949 - DNA, 16 bp, synthetic construct
  misc_feature 1..16: note = synthetic [barcode part1]
  source 1..16: mol_type = other DNA
cgagtacgatcacact

SEQ ID NO: 36950 - DNA, 16 bp, synthetic construct
  misc_feature 1..16: note = synthetic [barcode part1]
  source 1..16: mol_type = other DNA
ttgcacacaacgtgtg

SEQ ID NO: 36951 - DNA, 16 bp, synthetic construct
  misc_feature 1..16: note = synthetic [barcode part1]
  source 1..16: mol_type = other DNA
cggtagtcgtggaagt

SEQ ID NO: 36952 - DNA, 16 bp, synthetic construct
  misc_feature 1..16: note = synthetic [barcode part1]
  source 1..16: mol_type = other DNA
gactcttgaggactgt

SEQ ID NO: 36953 - DNA, 16 bp, synthetic construct
  misc_feature 1..16: note = synthetic [barcode part1]
  source 1..16: mol_type = other DNA
tcacgtactgactccg

SEQ ID NO: 36954 - DNA, 16 bp, synthetic construct
  misc_feature 1..16: note = synthetic [barcode part1]
  source 1..16: mol_type = other DNA
aacctccgactacgtc

SEQ ID NO: 36955 - DNA, 16 bp, synthetic construct
  misc_feature 1..16: note = synthetic [barcode part1]
  source 1..16: mol_type = other DNA
actatcgtgcaagaag

SEQ ID NO: 36956 - DNA, 16 bp, synthetic construct
  misc_feature 1..16: note = synthetic [barcode part1]
  source 1..16: mol_type = other DNA
cctacctaagttctag

SEQ ID NO: 36957 - DNA, 16 bp, synthetic construct
  misc_feature 1..16: note = synthetic [barcode part1]
  source 1..16: mol_type = other DNA
gacgtactggtgtact

SEQ ID NO: 36958 - DNA, 16 bp, synthetic construct
  misc_feature 1..16: note = synthetic [barcode part1]
  source 1..16: mol_type = other DNA
tcctgaccgtactgac

SEQ ID NO: 36959 - DNA, 16 bp, synthetic construct
  misc_feature 1..16: note = synthetic [barcode part1]
  source 1..16: mol_type = other DNA
cgcctatctgcgatac

SEQ ID NO: 36960 - DNA, 16 bp, synthetic construct
  misc_feature 1..16: note = synthetic [barcode part1]
  source 1..16: mol_type = other DNA
acgcagttgcacgatt

SEQ ID NO: 36961 - DNA, 16 bp, synthetic construct
  misc_feature 1..16: note = synthetic [barcode part1]
  source 1..16: mol_type = other DNA
ttaacggacggagacc

SEQ ID NO: 36962 - DNA, 16 bp, synthetic construct
  misc_feature 1..16: note = synthetic [barcode part1]
  source 1..16: mol_type = other DNA
caactagaattccggc

SEQ ID NO: 36963 - DNA, 16 bp, synthetic construct
  misc_feature 1..16: note = synthetic [barcode part1]
  source 1..16: mol_type = other DNA
cgtgtagttactgtct

SEQ ID NO: 36964 - DNA, 16 bp, synthetic construct
  misc_feature 1..16: note = synthetic [barcode part1]
  source 1..16: mol_type = other DNA
tcacgccttgccaagt

SEQ ID NO: 36965 - DNA, 16 bp, synthetic construct
  misc_feature 1..16: note = synthetic [barcode part1]
  source 1..16: mol_type = other DNA
actcaggcactattct

SEQ ID NO: 36966 - DNA, 16 bp, synthetic construct
  misc_feature 1..16: note = synthetic [barcode part1]
  source 1..16: mol_type = other DNA
tgtggagtgacgactg

SEQ ID NO: 36967 - DNA, 16 bp, synthetic construct
  misc_feature 1..16: note = synthetic [barcode part1]
  source 1..16: mol_type = other DNA
gttatctgagtctgtc

SEQ ID NO: 36968 - DNA, 16 bp, synthetic construct
  misc_feature 1..16: note = synthetic [barcode part1]
  source 1..16: mol_type = other DNA
gattaccgcaggagtg

SEQ ID NO: 36969 - DNA, 16 bp, synthetic construct
  misc_feature 1..16: note = synthetic [barcode part1]
  source 1..16: mol_type = other DNA
cgtccttaatctagtg

SEQ ID NO: 36970 - DNA, 16 bp, synthetic construct
  misc_feature 1..16: note = synthetic [barcode part1]
  source 1..16: mol_type = other DNA
taggttctgaacaccg

SEQ ID NO: 36971 - DNA, 16 bp, synthetic construct
  misc_feature 1..16: note = synthetic [barcode part1]
  source 1..16: mol_type = other DNA
gaatccgaggtcaggt

SEQ ID NO: 36972 - DNA, 16 bp, synthetic construct
  misc_feature 1..16: note = synthetic [barcode part1]
  source 1..16: mol_type = other DNA
acctaccttatccgtc

SEQ ID NO: 36973 - DNA, 16 bp, synthetic construct
  misc_feature 1..16: note = synthetic [barcode part1]
  source 1..16: mol_type = other DNA
ccgaacagacgagact

SEQ ID NO: 36974 - DNA, 16 bp, synthetic construct
  misc_feature 1..16: note = synthetic [barcode part1]
  source 1..16: mol_type = other DNA
tccttcttcgagatcc

SEQ ID NO: 36975 - DNA, 16 bp, synthetic construct
  misc_feature 1..16: note = synthetic [barcode part1]
  source 1..16: mol_type = other DNA
atcacggagatagact

SEQ ID NO: 36976 - DNA, 16 bp, synthetic construct
  misc_feature 1..16: note = synthetic [barcode part1]
  source 1..16: mol_type = other DNA
taactgccttacggag

SEQ ID NO: 36977 - DNA, 16 bp, synthetic construct
  misc_feature 1..16: note = synthetic [barcode part1]
  source 1..16: mol_type = other DNA
ttctgactcagacact

SEQ ID NO: 36978 - DNA, 16 bp, synthetic construct
  misc_feature 1..16: note = synthetic [barcode part1]
  source 1..16: mol_type = other DNA
actggtatatctcacc

SEQ ID NO: 36979 - DNA, 16 bp, synthetic construct
  misc_feature 1..16: note = synthetic [barcode part1]
  source 1..16: mol_type = other DNA
gtgaacttctccaatc

SEQ ID NO: 36980 - DNA, 16 bp, synthetic construct
  misc_feature 1..16: note = synthetic [barcode part1]
  source 1..16: mol_type = other DNA
taagtgataggatccg

SEQ ID NO: 36981 - DNA, 16 bp, synthetic construct
  misc_feature 1..16: note = synthetic [barcode part1]
  source 1..16: mol_type = other DNA
aagagtaaggcgcaac

SEQ ID NO: 36982 - DNA, 16 bp, synthetic construct
  misc_feature 1..16: note = synthetic [barcode part1]
  source 1..16: mol_type = other DNA
tgaccagagaggaagt

SEQ ID NO: 36983 - DNA, 16 bp, synthetic construct
  misc_feature 1..16: note = synthetic [barcode part1]
  source 1..16: mol_type = other DNA
ttccagtctagtgtgt

SEQ ID NO: 36984 - DNA, 16 bp, synthetic construct
  misc_feature 1..16: note = synthetic [barcode part1]
  source 1..16: mol_type = other DNA
gtagattgcacgacct

SEQ ID NO: 36985 - DNA, 16 bp, synthetic construct
  misc_feature 1..16: note = synthetic [barcode part1]
  source 1..16: mol_type = other DNA
cacgacaacttgtctt

SEQ ID NO: 36986 - DNA, 16 bp, synthetic construct
  misc_feature 1..16: note = synthetic [barcode part1]
  source 1..16: mol_type = other DNA
gccacctatagattct

SEQ ID NO: 36987 - DNA, 16 bp, synthetic construct
  misc_feature 1..16: note = synthetic [barcode part1]
  source 1..16: mol_type = other DNA
agacctgatcttctgt

SEQ ID NO: 36988 - DNA, 16 bp, synthetic construct
  misc_feature 1..16: note = synthetic [barcode part1]
  source 1..16: mol_type = other DNA
tggactacggttcaac

SEQ ID NO: 36989 - DNA, 16 bp, synthetic construct
  misc_feature 1..16: note = synthetic [barcode part1]
  source 1..16: mol_type = other DNA
tcacagtgaggtcttg

SEQ ID NO: 36990 - DNA, 16 bp, synthetic construct
  misc_feature 1..16: note = synthetic [barcode part1]
  source 1..16: mol_type = other DNA
aaggttccaggacttc

SEQ ID NO: 36991 - DNA, 16 bp, synthetic construct
  misc_feature 1..16: note = synthetic [barcode part1]
  source 1..16: mol_type = other DNA
acacgcgtaatcaacc

SEQ ID NO: 36992 - DNA, 16 bp, synthetic construct
  misc_feature 1..16: note = synthetic [barcode part1]
  source 1..16: mol_type = other DNA
cgacagatactgttcg

SEQ ID NO: 36993 - DNA, 16 bp, synthetic construct
  misc_feature 1..16: note = synthetic [barcode part1]
  source 1..16: mol_type = other DNA
tggtcaaggtcaactc

SEQ ID NO: 36994 - DNA, 16 bp, synthetic construct
  misc_feature 1..16: note = synthetic [barcode part1]
  source 1..16: mol_type = other DNA
gtcttgtctcgactct

SEQ ID NO: 36995 - DNA, 16 bp, synthetic construct
  misc_feature 1..16: note = synthetic [barcode part1]
  source 1..16: mol_type = other DNA
acaccgaagttcacgt

SEQ ID NO: 36996 - DNA, 16 bp, synthetic construct
  misc_feature 1..16: note = synthetic [barcode part1]
  source 1..16: mol_type = other DNA
taccaactatacggcg

SEQ ID NO: 36997 - DNA, 16 bp, synthetic construct
  misc_feature 1..16: note = synthetic [barcode part1]
  source 1..16: mol_type = other DNA
tgttcgaacacagtcg

SEQ ID NO: 36998 - DNA, 16 bp, synthetic construct
  misc_feature 1..16: note = synthetic [barcode part1]
  source 1..16: mol_type = other DNA
cagtcgaacactacgt

SEQ ID NO: 36999 - DNA, 16 bp, synthetic construct
  misc_feature 1..16: note = synthetic [barcode part1]
  source 1..16: mol_type = other DNA
agtcgtggttacacgt

SEQ ID NO: 37000 - DNA, 16 bp, synthetic construct
  misc_feature 1..16: note = synthetic [barcode part1]
  source 1..16: mol_type = other DNA
cacggatcgaacactt

SEQ ID NO: 37001 - DNA, 16 bp, synthetic construct
  misc_feature 1..16: note = synthetic [barcode part1]
  source 1..16: mol_type = other DNA
acggcgttgtatacac

SEQ ID NO: 37002 - DNA, 16 bp, synthetic construct
  misc_feature 1..16: note = synthetic [barcode part1]
  source 1..16: mol_type = other DNA
cgataacggaatacac

SEQ ID NO: 37003 - DNA, 16 bp, synthetic construct
  misc_feature 1..16: note = synthetic [barcode part1]
  source 1..16: mol_type = other DNA
ccaggcgtatcgtctt

SEQ ID NO: 37004 - DNA, 16 bp, synthetic construct
  misc_feature 1..16: note = synthetic [barcode part1]
  source 1..16: mol_type = other DNA
gaatagtccagatacg

SEQ ID NO: 37005 - DNA, 16 bp, synthetic construct
  misc_feature 1..16: note = synthetic [barcode part1]
  source 1..16: mol_type = other DNA
gaccaactggtcagtt

SEQ ID NO: 37006 - DNA, 16 bp, synthetic construct
  misc_feature 1..16: note = synthetic [barcode part1]
  source 1..16: mol_type = other DNA
gacttgttgccacctg

SEQ ID NO: 37007 - DNA, 16 bp, synthetic construct
  misc_feature 1..16: note = synthetic [barcode part1]
  source 1..16: mol_type = other DNA
atcttgttgccggcac

SEQ ID NO: 37008 - DNA, 16 bp, synthetic construct
  misc_feature 1..16: note = synthetic [barcode part1]
  source 1..16: mol_type = other DNA
tgtcggacttgtactt

SEQ ID NO: 37009 - DNA, 16 bp, synthetic construct
  misc_feature 1..16: note = synthetic [barcode part1]
  source 1..16: mol_type = other DNA
ccgtatagtacaccag

SEQ ID NO: 37010 - DNA, 16 bp, synthetic construct
  misc_feature 1..16: note = synthetic [barcode part1]
  source 1..16: mol_type = other DNA
atacggtgagattgac

SEQ ID NO: 37011 - DNA, 16 bp, synthetic construct
  misc_feature 1..16: note = synthetic [barcode part1]
  source 1..16: mol_type = other DNA
tcctagataagtggag

SEQ ID NO: 37012 - DNA, 16 bp, synthetic construct
  misc_feature 1..16: note = synthetic [barcode part1]
  source 1..16: mol_type = other DNA
ccaatacctctgaccg

SEQ ID NO: 37013 - DNA, 16 bp, synthetic construct
  misc_feature 1..16: note = synthetic [barcode part1]
  source 1..16: mol_type = other DNA
cctacgtagtccgatc

SEQ ID NO: 37014 - DNA, 16 bp, synthetic construct
  misc_feature 1..16: note = synthetic [barcode part1]
  source 1..16: mol_type = other DNA
aagttgcgatataggc

SEQ ID NO: 37015 - DNA, 16 bp, synthetic construct
  misc_feature 1..16: note = synthetic [barcode part1]
  source 1..16: mol_type = other DNA
cgccaacttctagtcg

SEQ ID NO: 37016 - DNA, 16 bp, synthetic construct
  misc_feature 1..16: note = synthetic [barcode part1]
  source 1..16: mol_type = other DNA
gcaccgaggaatagtc

SEQ ID NO: 37017 - DNA, 16 bp, synthetic construct
  misc_feature 1..16: note = synthetic [barcode part1]
  source 1..16: mol_type = other DNA
atagactcgcgaacct

SEQ ID NO: 37018 - DNA, 16 bp, synthetic construct
  misc_feature 1..16: note = synthetic [barcode part1]
  source 1..16: mol_type = other DNA
aatattggcgttgcgc

SEQ ID NO: 37019 - DNA, 16 bp, synthetic construct
  misc_feature 1..16: note = synthetic [barcode part1]
  source 1..16: mol_type = other DNA
aattatcaacgcggag

SEQ ID NO: 37020 - DNA, 16 bp, synthetic construct
  misc_feature 1..16: note = synthetic [barcode part1]
  source 1..16: mol_type = other DNA
gataccttattctgcg

SEQ ID NO: 37021 - DNA, 16 bp, synthetic construct
  misc_feature 1..16: note = synthetic [barcode part1]
  source 1..16: mol_type = other DNA
agaactcctcacctgc

SEQ ID NO: 37022 - DNA, 16 bp, synthetic construct
  misc_feature 1..16: note = synthetic [barcode part1]
  source 1..16: mol_type = other DNA
gtagtacgatcttggc

SEQ ID NO: 37023 - DNA, 16 bp, synthetic construct
  misc_feature 1..16: note = synthetic [barcode part1]
  source 1..16: mol_type = other DNA
tacaacggcctactcc

SEQ ID NO: 37024 - DNA, 16 bp, synthetic construct
  misc_feature 1..16: note = synthetic [barcode part1]
  source 1..16: mol_type = other DNA
gacgaggtcagtgtgt

SEQ ID NO: 37025 - DNA, 16 bp, synthetic construct
  misc_feature 1..16: note = synthetic [barcode part1]
  source 1..16: mol_type = other DNA
tggaactgttacggtc

SEQ ID NO: 37026 - DNA, 16 bp, synthetic construct
  misc_feature 1..16: note = synthetic [barcode part1]
  source 1..16: mol_type = other DNA
tcctcgagttgtacgc

SEQ ID NO: 37027 - DNA, 16 bp, synthetic construct
  misc_feature 1..16: note = synthetic [barcode part1]
  source 1..16: mol_type = other DNA
gttggtaggatacctc

SEQ ID NO: 37028 - DNA, 16 bp, synthetic construct
  misc_feature 1..16: note = synthetic [barcode part1]
  source 1..16: mol_type = other DNA
tgccttagaactcgtt

SEQ ID NO: 37029 - DNA, 16 bp, synthetic construct
  misc_feature 1..16: note = synthetic [barcode part1]
  source 1..16: mol_type = other DNA
tctgttggtgttcagt

SEQ ID NO: 37030 - DNA, 16 bp, synthetic construct
  misc_feature 1..16: note = synthetic [barcode part1]
  source 1..16: mol_type = other DNA
cgatcgcgtagaacag

SEQ ID NO: 37031 - DNA, 16 bp, synthetic construct
  misc_feature 1..16: note = synthetic [barcode part1]
  source 1..16: mol_type = other DNA
taggccaggaacgtgt

SEQ ID NO: 37032 - DNA, 16 bp, synthetic construct
  misc_feature 1..16: note = synthetic [barcode part1]
  source 1..16: mol_type = other DNA
aacggtgacggacttg

SEQ ID NO: 37033 - DNA, 16 bp, synthetic construct
  misc_feature 1..16: note = synthetic [barcode part1]
  source 1..16: mol_type = other DNA
cgtgagacgactcaag

SEQ ID NO: 37034 - DNA, 16 bp, synthetic construct
  misc_feature 1..16: note = synthetic [barcode part1]
  source 1..16: mol_type = other DNA
ttcttgtcagatcacg

SEQ ID NO: 37035 - DNA, 16 bp, synthetic construct
  misc_feature 1..16: note = synthetic [barcode part1]
  source 1..16: mol_type = other DNA
tcacacaaccacacag

SEQ ID NO: 37036 - DNA, 16 bp, synthetic construct
  misc_feature 1..16: note = synthetic [barcode part1]
  source 1..16: mol_type = other DNA
caaggagagtcaagac

SEQ ID NO: 37037 - DNA, 16 bp, synthetic construct
  misc_feature 1..16: note = synthetic [barcode part1]
  source 1..16: mol_type = other DNA
tcactgtggcaaggtt

SEQ ID NO: 37038 - DNA, 16 bp, synthetic construct
  misc_feature 1..16: note = synthetic [barcode part1]
  source 1..16: mol_type = other DNA
cggataggcagtatcg

SEQ ID NO: 37039 - DNA, 16 bp, synthetic construct
  misc_feature 1..16: note = synthetic [barcode part1]
  source 1..16: mol_type = other DNA
tagtctgcaggttgtg

SEQ ID NO: 37040 - DNA, 16 bp, synthetic construct
  misc_feature 1..16: note = synthetic [barcode part1]
  source 1..16: mol_type = other DNA
tacggaccttgagtgt

SEQ ID NO: 37041 - DNA, 16 bp, synthetic construct
  misc_feature 1..16: note = synthetic [barcode part1]
  source 1..16: mol_type = other DNA
gagtgttagacttgcc

SEQ ID NO: 37042 - DNA, 16 bp, synthetic construct
  misc_feature 1..16: note = synthetic [barcode part1]
  source 1..16: mol_type = other DNA
ccgtctggataccact

SEQ ID NO: 37043 - DNA, 16 bp, synthetic construct
  misc_feature 1..16: note = synthetic [barcode part1]
  source 1..16: mol_type = other DNA
aagtgaattcgtccgc

SEQ ID NO: 37044 - DNA, 16 bp, synthetic construct
  misc_feature 1..16: note = synthetic [barcode part1]
  source 1..16: mol_type = other DNA
gtcagaggttaacgcg

SEQ ID NO: 37045 - DNA, 16 bp, synthetic construct
  misc_feature 1..16: note = synthetic [barcode part1]
  source 1..16: mol_type = other DNA
tcaattctcgcgtaac

SEQ ID NO: 37046 - DNA, 16 bp, synthetic construct
  misc_feature 1..16: note = synthetic [barcode part1]
  source 1..16: mol_type = other DNA
caactaccgttccacg

SEQ ID NO: 37047 - DNA, 16 bp, synthetic construct
  misc_feature 1..16: note = synthetic [barcode part1]
  source 1..16: mol_type = other DNA
cagtagttctcgcgtc

SEQ ID NO: 37048 - DNA, 16 bp, synthetic construct
  misc_feature 1..16: note = synthetic [barcode part1]
  source 1..16: mol_type = other DNA
tatctcacaggtatcc

SEQ ID NO: 37049 - DNA, 16 bp, synthetic construct
  misc_feature 1..16: note = synthetic [barcode part1]
  source 1..16: mol_type = other DNA
aatctcgttgtctgtg

SEQ ID NO: 37050 - DNA, 16 bp, synthetic construct
  misc_feature 1..16: note = synthetic [barcode part1]
  source 1..16: mol_type = other DNA
aggacgttcagtgacg

SEQ ID NO: 37051 - DNA, 16 bp, synthetic construct
  misc_feature 1..16: note = synthetic [barcode part1]
  source 1..16: mol_type = other DNA
ttgcctgcaaggtctc

SEQ ID NO: 37052 - DNA, 16 bp, synthetic construct
  misc_feature 1..16: note = synthetic [barcode part1]
  source 1..16: mol_type = other DNA
gtacgttgtggaatag

SEQ ID NO: 37053 - DNA, 16 bp, synthetic construct
  misc_feature 1..16: note = synthetic [barcode part1]
  source 1..16: mol_type = other DNA
ccaactacaatcgacg

SEQ ID NO: 37054 - DNA, 16 bp, synthetic construct
  misc_feature 1..16: note = synthetic [barcode part1]
  source 1..16: mol_type = other DNA
tgacttctaaccgtgt

SEQ ID NO: 37055 - DNA, 16 bp, synthetic construct
  misc_feature 1..16: note = synthetic [barcode part1]
  source 1..16: mol_type = other DNA
tgcaacacctacctgc

SEQ ID NO: 37056 - DNA, 16 bp, synthetic construct
  misc_feature 1..16: note = synthetic [barcode part1]
  source 1..16: mol_type = other DNA
acgaacttctctaacc

SEQ ID NO: 37057 - DNA, 16 bp, synthetic construct
  misc_feature 1..16: note = synthetic [barcode part1]
  source 1..16: mol_type = other DNA
ccgtatcgcaactcac

SEQ ID NO: 37058 - DNA, 16 bp, synthetic construct
  misc_feature 1..16: note = synthetic [barcode part1]
  source 1..16: mol_type = other DNA
ttctacttggacgccg

SEQ ID NO: 37059 - DNA, 16 bp, synthetic construct
  misc_feature 1..16: note = synthetic [barcode part1]
  source 1..16: mol_type = other DNA
gacgtcaacgtacact

SEQ ID NO: 37060 - DNA, 16 bp, synthetic construct
  misc_feature 1..16: note = synthetic [barcode part1]
  source 1..16: mol_type = other DNA
cctacactcgagttgc

SEQ ID NO: 37061 - DNA, 16 bp, synthetic construct
  misc_feature 1..16: note = synthetic [barcode part1]
  source 1..16: mol_type = other DNA
acttaggtggacgttc

SEQ ID NO: 37062 - DNA, 16 bp, synthetic construct
  misc_feature 1..16: note = synthetic [barcode part1]
  source 1..16: mol_type = other DNA
gcaggtcgtattcaac

SEQ ID NO: 37063 - DNA, 16 bp, synthetic construct
  misc_feature 1..16: note = synthetic [barcode part1]
  source 1..16: mol_type = other DNA
atcagacacttggtgc

SEQ ID NO: 37064 - DNA, 16 bp, synthetic construct
  misc_feature 1..16: note = synthetic [barcode part1]
  source 1..16: mol_type = other DNA
ccgtaggtactctacc

SEQ ID NO: 37065 - DNA, 16 bp, synthetic construct
  misc_feature 1..16: note = synthetic [barcode part1]
  source 1..16: mol_type = other DNA
ttctgcgaacttaacc

SEQ ID NO: 37066 - DNA, 16 bp, synthetic construct
  misc_feature 1..16: note = synthetic [barcode part1]
  source 1..16: mol_type = other DNA
cgtctaagacctacag

SEQ ID NO: 37067 - DNA, 16 bp, synthetic construct
  misc_feature 1..16: note = synthetic [barcode part1]
  source 1..16: mol_type = other DNA
gttgacttgcagtgtg

SEQ ID NO: 37068 - DNA, 16 bp, synthetic construct
  misc_feature 1..16: note = synthetic [barcode part1]
  source 1..16: mol_type = other DNA
atatcgcgtgacactg

SEQ ID NO: 37069 - DNA, 16 bp, synthetic construct
  misc_feature 1..16: note = synthetic [barcode part1]
  source 1..16: mol_type = other DNA
acctctcagagtcaag

SEQ ID NO: 37070 - DNA, 16 bp, synthetic construct
  misc_feature 1..16: note = synthetic [barcode part1]
  source 1..16: mol_type = other DNA
cggacaccgatagaac

SEQ ID NO: 37071 - DNA, 16 bp, synthetic construct
  misc_feature 1..16: note = synthetic [barcode part1]
  source 1..16: mol_type = other DNA
tgtgacaacgagtggc

SEQ ID NO: 37072 - DNA, 16 bp, synthetic construct
  misc_feature 1..16: note = synthetic [barcode part1]
  source 1..16: mol_type = other DNA
tacggcgcacctattc

SEQ ID NO: 37073 - DNA, 16 bp, synthetic construct
  misc_feature 1..16: note = synthetic [barcode part1]
  source 1..16: mol_type = other DNA
tccgcgtctggtagtt

SEQ ID NO: 37074 - DNA, 16 bp, synthetic construct
  misc_feature 1..16: note = synthetic [barcode part1]
  source 1..16: mol_type = other DNA
cgttgtaagttccgag

SEQ ID NO: 37075 - DNA, 16 bp, synthetic construct
  misc_feature 1..16: note = synthetic [barcode part1]
  source 1..16: mol_type = other DNA
aattgagaacgcactg

SEQ ID NO: 37076 - DNA, 16 bp, synthetic construct
  misc_feature 1..16: note = synthetic [barcode part1]
  source 1..16: mol_type = other DNA
cactgtccttgtggac

SEQ ID NO: 37077 - DNA, 16 bp, synthetic construct
  misc_feature 1..16: note = synthetic [barcode part1]
  source 1..16: mol_type = other DNA
cgtaccgtacaactag

SEQ ID NO: 37078 - DNA, 16 bp, synthetic construct
  misc_feature 1..16: note = synthetic [barcode part1]
  source 1..16: mol_type = other DNA
cgtcctgaggtctact

SEQ ID NO: 37079 - DNA, 16 bp, synthetic construct
  misc_feature 1..16: note = synthetic [barcode part1]
  source 1..16: mol_type = other DNA
gtgtgtgacgtgtact

SEQ ID NO: 37080 - DNA, 16 bp, synthetic construct
  misc_feature 1..16: note = synthetic [barcode part1]
  source 1..16: mol_type = other DNA
tcggcaaggatatagt

SEQ ID NO: 37081 - DNA, 16 bp, synthetic construct
  misc_feature 1..16: note = synthetic [barcode part1]
  source 1..16: mol_type = other DNA
gacgtgcaatccttcc

SEQ ID NO: 37082 - DNA, 16 bp, synthetic construct
  misc_feature 1..16: note = synthetic [barcode part1]
  source 1..16: mol_type = other DNA
caagttcgttccgtcg

SEQ ID NO: 37083 - DNA, 16 bp, synthetic construct
  misc_feature 1..16: note = synthetic [barcode part1]
  source 1..16: mol_type = other DNA
cactgttggcgatagt

SEQ ID NO: 37084 - DNA, 16 bp, synthetic construct
  misc_feature 1..16: note = synthetic [barcode part1]
  source 1..16: mol_type = other DNA
gaatccaatccaggtc

SEQ ID NO: 37085 - DNA, 16 bp, synthetic construct
  misc_feature 1..16: note = synthetic [barcode part1]
  source 1..16: mol_type = other DNA
tacctagtacgtcgag

SEQ ID NO: 37086 - DNA, 16 bp, synthetic construct
  misc_feature 1..16: note = synthetic [barcode part1]
  source 1..16: mol_type = other DNA
aagtgtcctacgagtc

SEQ ID NO: 37087 - DNA, 16 bp, synthetic construct
  misc_feature 1..16: note = synthetic [barcode part1]
  source 1..16: mol_type = other DNA
gtatccaatccacgag

SEQ ID NO: 37088 - DNA, 16 bp, synthetic construct
  misc_feature 1..16: note = synthetic [barcode part1]
  source 1..16: mol_type = other DNA
gtctcactagacctgc

SEQ ID NO: 37089 - DNA, 16 bp, synthetic construct
  misc_feature 1..16: note = synthetic [barcode part1]
  source 1..16: mol_type = other DNA
aatataccggtgtgcc

SEQ ID NO: 37090 - DNA, 16 bp, synthetic construct
  misc_feature 1..16: note = synthetic [barcode part1]
  source 1..16: mol_type = other DNA
cagttggactggttgt

SEQ ID NO: 37091 - DNA, 16 bp, synthetic construct
  misc_feature 1..16: note = synthetic [barcode part1]
  source 1..16: mol_type = other DNA
tactgccttgtacggc

SEQ ID NO: 37092 - DNA, 16 bp, synthetic construct
  misc_feature 1..16: note = synthetic [barcode part1]
  source 1..16: mol_type = other DNA
gtgaggtgtagactcg

SEQ ID NO: 37093 - DNA, 16 bp, synthetic construct
  misc_feature 1..16: note = synthetic [barcode part1]
  source 1..16: mol_type = other DNA
gtggaacaataaggcg

SEQ ID NO: 37094 - DNA, 16 bp, synthetic construct
  misc_feature 1..16: note = synthetic [barcode part1]
  source 1..16: mol_type = other DNA
cagtgcagatcgtgtt

SEQ ID NO: 37095 - DNA, 16 bp, synthetic construct
  misc_feature 1..16: note = synthetic [barcode part1]
  source 1..16: mol_type = other DNA
acttgttccgtaacac

SEQ ID NO: 37096 - DNA, 16 bp, synthetic construct
  misc_feature 1..16: note = synthetic [barcode part1]
  source 1..16: mol_type = other DNA
tgtgacttcagacgtg

SEQ ID NO: 37097 - DNA, 16 bp, synthetic construct
  misc_feature 1..16: note = synthetic [barcode part1]
  source 1..16: mol_type = other DNA
ttgtcgttgaacacct

SEQ ID NO: 37098 - DNA, 16 bp, synthetic construct
  misc_feature 1..16: note = synthetic [barcode part1]
  source 1..16: mol_type = other DNA
caagtgcgaagtgatt

SEQ ID NO: 37099 - DNA, 16 bp, synthetic construct
  misc_feature 1..16: note = synthetic [barcode part1]
  source 1..16: mol_type = other DNA
cgtgcaacgaattcgt

SEQ ID NO: 37100 - DNA, 16 bp, synthetic construct
  misc_feature 1..16: note = synthetic [barcode part1]
  source 1..16: mol_type = other DNA
cctcgtaagtcactgc

SEQ ID NO: 37101 - DNA, 16 bp, synthetic construct
  misc_feature 1..16: note = synthetic [barcode part1]
  source 1..16: mol_type = other DNA
ccggaggtcagtatag

SEQ ID NO: 37102 - DNA, 16 bp, synthetic construct
  misc_feature 1..16: note = synthetic [barcode part1]
  source 1..16: mol_type = other DNA
aggacctcactcgtct

SEQ ID NO: 37103 - DNA, 16 bp, synthetic construct
  misc_feature 1..16: note = synthetic [barcode part1]
  source 1..16: mol_type = other DNA
tggtctcgtcgatacc

SEQ ID NO: 37104 - DNA, 16 bp, synthetic construct
  misc_feature 1..16: note = synthetic [barcode part1]
  source 1..16: mol_type = other DNA
acgtgattgcgactac

SEQ ID NO: 37105 - DNA, 16 bp, synthetic construct
  misc_feature 1..16: note = synthetic [barcode part1]
  source 1..16: mol_type = other DNA
aagagtacggaccacc

SEQ ID NO: 37106 - DNA, 16 bp, synthetic construct
  misc_feature 1..16: note = synthetic [barcode part1]
  source 1..16: mol_type = other DNA
aacactgtacgtacgc

SEQ ID NO: 37107 - DNA, 16 bp, synthetic construct
  misc_feature 1..16: note = synthetic [barcode part1]
  source 1..16: mol_type = other DNA
taacgaccgcagagac

SEQ ID NO: 37108 - DNA, 16 bp, synthetic construct
  misc_feature 1..16: note = synthetic [barcode part1]
  source 1..16: mol_type = other DNA
taagttagaccgtcgc

SEQ ID NO: 37109 - DNA, 16 bp, synthetic construct
  misc_feature 1..16: note = synthetic [barcode part1]
  source 1..16: mol_type = other DNA
aggactccaggtaggt

SEQ ID NO: 37110 - DNA, 16 bp, synthetic construct
  misc_feature 1..16: note = synthetic [barcode part1]
  source 1..16: mol_type = other DNA
cctcctatcactatcg

SEQ ID NO: 37111 - DNA, 16 bp, synthetic construct
  misc_feature 1..16: note = synthetic [barcode part1]
  source 1..16: mol_type = other DNA
agacctacactctgcc

SEQ ID NO: 37112 - DNA, 16 bp, synthetic construct
  misc_feature 1..16: note = synthetic [barcode part1]
  source 1..16: mol_type = other DNA
cagtccttggcgtatc

SEQ ID NO: 37113 - DNA, 16 bp, synthetic construct
  misc_feature 1..16: note = synthetic [barcode part1]
  source 1..16: mol_type = other DNA
gatccggtcgataatc

SEQ ID NO: 37114 - DNA, 16 bp, synthetic construct
  misc_feature 1..16: note = synthetic [barcode part1]
  source 1..16: mol_type = other DNA
accaacgaggtcgagt

SEQ ID NO: 37115 - DNA, 16 bp, synthetic construct
  misc_feature 1..16: note = synthetic [barcode part1]
  source 1..16: mol_type = other DNA
ttgaagagtgtccaag

SEQ ID NO: 37116 - DNA, 16 bp, synthetic construct
  misc_feature 1..16: note = synthetic [barcode part1]
  source 1..16: mol_type = other DNA
gaaggaataactggcg

SEQ ID NO: 37117 - DNA, 16 bp, synthetic construct
  misc_feature 1..16: note = synthetic [barcode part1]
  source 1..16: mol_type = other DNA
ttgaatatccgtcgtc

SEQ ID NO: 37118 - DNA, 16 bp, synthetic construct
  misc_feature 1..16: note = synthetic [barcode part1]
  source 1..16: mol_type = other DNA
tactgacgttgcacag

SEQ ID NO: 37119 - DNA, 16 bp, synthetic construct
  misc_feature 1..16: note = synthetic [barcode part1]
  source 1..16: mol_type = other DNA
gtagaccgccaagagt

SEQ ID NO: 37120 - DNA, 16 bp, synthetic construct
  misc_feature 1..16: note = synthetic [barcode part1]
  source 1..16: mol_type = other DNA
atcagtacgccaacgt

SEQ ID NO: 37121 - DNA, 16 bp, synthetic construct
  misc_feature 1..16: note = synthetic [barcode part1]
  source 1..16: mol_type = other DNA
gttggtacaagtctgc

SEQ ID NO: 37122 - DNA, 16 bp, synthetic construct
  misc_feature 1..16: note = synthetic [barcode part1]
  source 1..16: mol_type = other DNA
acagaatcgagtgttg

SEQ ID NO: 37123 - DNA, 16 bp, synthetic construct
  misc_feature 1..16: note = synthetic [barcode part1]
  source 1..16: mol_type = other DNA
taacgtactccgccgt

SEQ ID NO: 37124 - DNA, 16 bp, synthetic construct
  misc_feature 1..16: note = synthetic [barcode part1]
  source 1..16: mol_type = other DNA
actgtacgactcgtag

SEQ ID NO: 37125 - DNA, 16 bp, synthetic construct
  misc_feature 1..16: note = synthetic [barcode part1]
  source 1..16: mol_type = other DNA
tagactacacgtcctt

SEQ ID NO: 37126 - DNA, 16 bp, synthetic construct
  misc_feature 1..16: note = synthetic [barcode part1]
  source 1..16: mol_type = other DNA
acactccgttggactc

SEQ ID NO: 37127 - DNA, 16 bp, synthetic construct
  misc_feature 1..16: note = synthetic [barcode part1]
  source 1..16: mol_type = other DNA
aacggttgatcgttgc

SEQ ID NO: 37128 - DNA, 16 bp, synthetic construct
  misc_feature 1..16: note = synthetic [barcode part1]
  source 1..16: mol_type = other DNA
atatcgaggagtgact

SEQ ID NO: 37129 - DNA, 16 bp, synthetic construct
  misc_feature 1..16: note = synthetic [barcode part1]
  source 1..16: mol_type = other DNA
gacgagaatacaatcc

SEQ ID NO: 37130 - DNA, 16 bp, synthetic construct
  misc_feature 1..16: note = synthetic [barcode part1]
  source 1..16: mol_type = other DNA
caacggcctcctatac

SEQ ID NO: 37131 - DNA, 16 bp, synthetic construct
  misc_feature 1..16: note = synthetic [barcode part1]
  source 1..16: mol_type = other DNA
aacgactagtccgatc

SEQ ID NO: 37132 - DNA, 16 bp, synthetic construct
  misc_feature 1..16: note = synthetic [barcode part1]
  source 1..16: mol_type = other DNA
cctgactacactaatc

SEQ ID NO: 37133 - DNA, 16 bp, synthetic construct
  misc_feature 1..16: note = synthetic [barcode part1]
  source 1..16: mol_type = other DNA
cggactatcctgcgtt

SEQ ID NO: 37134 - DNA, 16 bp, synthetic construct
  misc_feature 1..16: note = synthetic [barcode part1]
  source 1..16: mol_type = other DNA
cctagtcaagaggttc

SEQ ID NO: 37135 - DNA, 16 bp, synthetic construct
  misc_feature 1..16: note = synthetic [barcode part1]
  source 1..16: mol_type = other DNA
attcctgcctgcactt

SEQ ID NO: 37136 - DNA, 16 bp, synthetic construct
  misc_feature 1..16: note = synthetic [barcode part1]
  source 1..16: mol_type = other DNA
ttgaggtcagagtctc

SEQ ID NO: 37137 - DNA, 16 bp, synthetic construct
  misc_feature 1..16: note = synthetic [barcode part1]
  source 1..16: mol_type = other DNA
ttatcgtactccgtcc

SEQ ID NO: 37138 - DNA, 16 bp, synthetic construct
  misc_feature 1..16: note = synthetic [barcode part1]
  source 1..16: mol_type = other DNA
gagactcctgtagtgt

SEQ ID NO: 37139 - DNA, 16 bp, synthetic construct
  misc_feature 1..16: note = synthetic [barcode part1]
  source 1..16: mol_type = other DNA
tcttctctgatcgacc

SEQ ID NO: 37140 - DNA, 16 bp, synthetic construct
  misc_feature 1..16: note = synthetic [barcode part1]
  source 1..16: mol_type = other DNA
tacggattatcgtctc

SEQ ID NO: 37141 - DNA, 16 bp, synthetic construct
  misc_feature 1..16: note = synthetic [barcode part1]
  source 1..16: mol_type = other DNA
tagtcttcgtagttgc

SEQ ID NO: 37142 - DNA, 16 bp, synthetic construct
  misc_feature 1..16: note = synthetic [barcode part1]
  source 1..16: mol_type = other DNA
ttgaagtccgcaacgt

SEQ ID NO: 37143 - DNA, 16 bp, synthetic construct
  misc_feature 1..16: note = synthetic [barcode part1]
  source 1..16: mol_type = other DNA
gcagtcgatactgatc

SEQ ID NO: 37144 - DNA, 16 bp, synthetic construct
  misc_feature 1..16: note = synthetic [barcode part1]
  source 1..16: mol_type = other DNA
ttggttcctactgcct

SEQ ID NO: 37145 - DNA, 16 bp, synthetic construct
  misc_feature 1..16: note = synthetic [barcode part1]
  source 1..16: mol_type = other DNA
ccaacggcctatactc

SEQ ID NO: 37146 - DNA, 16 bp, synthetic construct
  misc_feature 1..16: note = synthetic [barcode part1]
  source 1..16: mol_type = other DNA
aggatctggtactgtc

SEQ ID NO: 37147 - DNA, 16 bp, synthetic construct
  misc_feature 1..16: note = synthetic [barcode part1]
  source 1..16: mol_type = other DNA
tgattgcagtacgtcg

SEQ ID NO: 37148 - DNA, 16 bp, synthetic construct
  misc_feature 1..16: note = synthetic [barcode part1]
  source 1..16: mol_type = other DNA
tagtcgtgtaagacag

SEQ ID NO: 37149 - DNA, 16 bp, synthetic construct
  misc_feature 1..16: note = synthetic [barcode part1]
  source 1..16: mol_type = other DNA
gtctgaagatagagtc

SEQ ID NO: 37150 - DNA, 16 bp, synthetic construct
  misc_feature 1..16: note = synthetic [barcode part1]
  source 1..16: mol_type = other DNA
tgttgttgtccttcgc

SEQ ID NO: 37151 - DNA, 16 bp, synthetic construct
  misc_feature 1..16: note = synthetic [barcode part1]
  source 1..16: mol_type = other DNA
tctacgactataggcg

SEQ ID NO: 37152 - DNA, 16 bp, synthetic construct
  misc_feature 1..16: note = synthetic [barcode part1]
  source 1..16: mol_type = other DNA
atagagtcgtcactcg

SEQ ID NO: 37153 - DNA, 16 bp, synthetic construct
  misc_feature 1..16: note = synthetic [barcode part1]
  source 1..16: mol_type = other DNA
tacgtgatatcggtgc

SEQ ID NO: 37154 - DNA, 16 bp, synthetic construct
  misc_feature 1..16: note = synthetic [barcode part1]
  source 1..16: mol_type = other DNA
gtcgtctgtctgcaac

SEQ ID NO: 37155 - DNA, 16 bp, synthetic construct
  misc_feature 1..16: note = synthetic [barcode part1]
  source 1..16: mol_type = other DNA
gaggatattcgcgtct

SEQ ID NO: 37156 - DNA, 16 bp, synthetic construct
  misc_feature 1..16: note = synthetic [barcode part1]
  source 1..16: mol_type = other DNA
aactctgacaagtgag

SEQ ID NO: 37157 - DNA, 16 bp, synthetic construct
  misc_feature 1..16: note = synthetic [barcode part1]
  source 1..16: mol_type = other DNA
aatcacctcgcgtctg

SEQ ID NO: 37158 - DNA, 16 bp, synthetic construct
  misc_feature 1..16: note = synthetic [barcode part1]
  source 1..16: mol_type = other DNA
tcctaatctccgttgc

SEQ ID NO: 37159 - DNA, 16 bp, synthetic construct
  misc_feature 1..16: note = synthetic [barcode part1]
  source 1..16: mol_type = other DNA
ttgtgcacaaccacag

SEQ ID NO: 37160 - DNA, 16 bp, synthetic construct
  misc_feature 1..16: note = synthetic [barcode part1]
  source 1..16: mol_type = other DNA
aatctaacggtctggc

SEQ ID NO: 37161 - DNA, 16 bp, synthetic construct
  misc_feature 1..16: note = synthetic [barcode part1]
  source 1..16: mol_type = other DNA
actgcctgcctacaac

SEQ ID NO: 37162 - DNA, 16 bp, synthetic construct
  misc_feature 1..16: note = synthetic [barcode part1]
  source 1..16: mol_type = other DNA
gtcagatacctccgtc

SEQ ID NO: 37163 - DNA, 16 bp, synthetic construct
  misc_feature 1..16: note = synthetic [barcode part1]
  source 1..16: mol_type = other DNA
tgcgttcgataacttc

SEQ ID NO: 37164 - DNA, 16 bp, synthetic construct
  misc_feature 1..16: note = synthetic [barcode part1]
  source 1..16: mol_type = other DNA
actagtactacgcggt

SEQ ID NO: 37165 - DNA, 16 bp, synthetic construct
  misc_feature 1..16: note = synthetic [barcode part1]
  source 1..16: mol_type = other DNA
gtacgcctcactgttg

SEQ ID NO: 37166 - DNA, 16 bp, synthetic construct
  misc_feature 1..16: note = synthetic [barcode part1]
  source 1..16: mol_type = other DNA
tcaggataggtgaatc

SEQ ID NO: 37167 - DNA, 16 bp, synthetic construct
  misc_feature 1..16: note = synthetic [barcode part1]
  source 1..16: mol_type = other DNA
tcctcctatacgcgtt

SEQ ID NO: 37168 - DNA, 16 bp, synthetic construct
  misc_feature 1..16: note = synthetic [barcode part1]
  source 1..16: mol_type = other DNA
gttggcactactatct

SEQ ID NO: 37169 - DNA, 16 bp, synthetic construct
  misc_feature 1..16: note = synthetic [barcode part1]
  source 1..16: mol_type = other DNA
cgccacttagatccgt

SEQ ID NO: 37170 - DNA, 16 bp, synthetic construct
  misc_feature 1..16: note = synthetic [barcode part1]
  source 1..16: mol_type = other DNA
atctggtgccgttaag

SEQ ID NO: 37171 - DNA, 16 bp, synthetic construct
  misc_feature 1..16: note = synthetic [barcode part1]
  source 1..16: mol_type = other DNA
accaatcgcactacag

SEQ ID NO: 37172 - DNA, 16 bp, synthetic construct
  misc_feature 1..16: note = synthetic [barcode part1]
  source 1..16: mol_type = other DNA
cgtagttactaaggag

SEQ ID NO: 37173 - DNA, 16 bp, synthetic construct
  misc_feature 1..16: note = synthetic [barcode part1]
  source 1..16: mol_type = other DNA
caacttcgagaccagt

SEQ ID NO: 37174 - DNA, 16 bp, synthetic construct
  misc_feature 1..16: note = synthetic [barcode part1]
  source 1..16: mol_type = other DNA
aaccacgaaggaactt

SEQ ID NO: 37175 - DNA, 16 bp, synthetic construct
  misc_feature 1..16: note = synthetic [barcode part1]
  source 1..16: mol_type = other DNA
tagactgtcagatcgc

SEQ ID NO: 37176 - DNA, 16 bp, synthetic construct
  misc_feature 1..16: note = synthetic [barcode part1]
  source 1..16: mol_type = other DNA
agttaagacaaccacg

SEQ ID NO: 37177 - DNA, 16 bp, synthetic construct
  misc_feature 1..16: note = synthetic [barcode part1]
  source 1..16: mol_type = other DNA
tgtaagaactgagtcg

SEQ ID NO: 37178 - DNA, 16 bp, synthetic construct
  misc_feature 1..16: note = synthetic [barcode part1]
  source 1..16: mol_type = other DNA
acgagttgattgcacc

SEQ ID NO: 37179 - DNA, 16 bp, synthetic construct
  misc_feature 1..16: note = synthetic [barcode part1]
  source 1..16: mol_type = other DNA
gagatcgcgcgttaag

SEQ ID NO: 37180 - DNA, 16 bp, synthetic construct
  misc_feature 1..16: note = synthetic [barcode part1]
  source 1..16: mol_type = other DNA
tcacagttgcacacag

SEQ ID NO: 37181 - DNA, 16 bp, synthetic construct
  misc_feature 1..16: note = synthetic [barcode part1]
  source 1..16: mol_type = other DNA
atcggacactcaacgt

SEQ ID NO: 37182 - DNA, 16 bp, synthetic construct
  misc_feature 1..16: note = synthetic [barcode part1]
  source 1..16: mol_type = other DNA
cgacgcgaagacagtt

SEQ ID NO: 37183 - DNA, 16 bp, synthetic construct
  misc_feature 1..16: note = synthetic [barcode part1]
  source 1..16: mol_type = other DNA
ttgtgtgcagtgtacg

SEQ ID NO: 37184 - DNA, 16 bp, synthetic construct
  misc_feature 1..16: note = synthetic [barcode part1]
  source 1..16: mol_type = other DNA
ccgccggaattattag

SEQ ID NO: 37185 - DNA, 16 bp, synthetic construct
  misc_feature 1..16: note = synthetic [barcode part1]
  source 1..16: mol_type = other DNA
gtccgtgtacaagttg

SEQ ID NO: 37186 - DNA, 16 bp, synthetic construct
  misc_feature 1..16: note = synthetic [barcode part1]
  source 1..16: mol_type = other DNA
aaccaactcgagatcc

SEQ ID NO: 37187 - DNA, 16 bp, synthetic construct
  misc_feature 1..16: note = synthetic [barcode part1]
  source 1..16: mol_type = other DNA
agttgtcgatacgaag

SEQ ID NO: 37188 - DNA, 16 bp, synthetic construct
  misc_feature 1..16: note = synthetic [barcode part1]
  source 1..16: mol_type = other DNA
tcttggtgcgcagtct

SEQ ID NO: 37189 - DNA, 16 bp, synthetic construct
  misc_feature 1..16: note = synthetic [barcode part1]
  source 1..16: mol_type = other DNA
aagaataggcgcaggt

SEQ ID NO: 37190 - DNA, 16 bp, synthetic construct
  misc_feature 1..16: note = synthetic [barcode part1]
  source 1..16: mol_type = other DNA
tagagattagaccacg

SEQ ID NO: 37191 - DNA, 16 bp, synthetic construct
  misc_feature 1..16: note = synthetic [barcode part1]
  source 1..16: mol_type = other DNA
tgtgaacgaacggtgc

SEQ ID NO: 37192 - DNA, 16 bp, synthetic construct
  misc_feature 1..16: note = synthetic [barcode part1]
  source 1..16: mol_type = other DNA
tgaatacgaagaccgt

SEQ ID NO: 37193 - DNA, 16 bp, synthetic construct
  misc_feature 1..16: note = synthetic [barcode part1]
  source 1..16: mol_type = other DNA
caggattaactggtcc

SEQ ID NO: 37194 - DNA, 16 bp, synthetic construct
  misc_feature 1..16: note = synthetic [barcode part1]
  source 1..16: mol_type = other DNA
agtacgttgtgcaacc

SEQ ID NO: 37195 - DNA, 16 bp, synthetic construct
  misc_feature 1..16: note = synthetic [barcode part1]
  source 1..16: mol_type = other DNA
gtggcgttcaagattc

SEQ ID NO: 37196 - DNA, 16 bp, synthetic construct
  misc_feature 1..16: note = synthetic [barcode part1]
  source 1..16: mol_type = other DNA
cgtgaacttcactact

SEQ ID NO: 37197 - DNA, 16 bp, synthetic construct
  misc_feature 1..16: note = synthetic [barcode part1]
  source 1..16: mol_type = other DNA
aattactcgtcctcag

SEQ ID NO: 37198 - DNA, 16 bp, synthetic construct
  misc_feature 1..16: note = synthetic [barcode part1]
  source 1..16: mol_type = other DNA
gttaatactgccactc

SEQ ID NO: 37199 - DNA, 16 bp, synthetic construct
  misc_feature 1..16: note = synthetic [barcode part1]
  source 1..16: mol_type = other DNA
cagttccaaggaactc

SEQ ID NO: 37200 - DNA, 16 bp, synthetic construct
  misc_feature 1..16: note = synthetic [barcode part1]
  source 1..16: mol_type = other DNA
tactctgtcgtaggtt

SEQ ID NO: 37201 - DNA, 16 bp, synthetic construct
  misc_feature 1..16: note = synthetic [barcode part1]
  source 1..16: mol_type = other DNA
atcttcgaggcacagt

SEQ ID NO: 37202 - DNA, 16 bp, synthetic construct
  misc_feature 1..16: note = synthetic [barcode part1]
  source 1..16: mol_type = other DNA
cagtccgagactattg

SEQ ID NO: 37203 - DNA, 16 bp, synthetic construct
  misc_feature 1..16: note = synthetic [barcode part1]
  source 1..16: mol_type = other DNA
tccacgcgttaggtct

SEQ ID NO: 37204 - DNA, 16 bp, synthetic construct
  misc_feature 1..16: note = synthetic [barcode part1]
  source 1..16: mol_type = other DNA
cgtgattcggttcctg

SEQ ID NO: 37205 - DNA, 16 bp, synthetic construct
  misc_feature 1..16: note = synthetic [barcode part1]
  source 1..16: mol_type = other DNA
aagaccggagatagtg

SEQ ID NO: 37206 - DNA, 16 bp, synthetic construct
  misc_feature 1..16: note = synthetic [barcode part1]
  source 1..16: mol_type = other DNA
cgacgtgtagtcttcc

SEQ ID NO: 37207 - DNA, 16 bp, synthetic construct
  misc_feature 1..16: note = synthetic [barcode part1]
  source 1..16: mol_type = other DNA
agttctgactcacttg

SEQ ID NO: 37208 - DNA, 16 bp, synthetic construct
  misc_feature 1..16: note = synthetic [barcode part1]
  source 1..16: mol_type = other DNA
aatcggtccgagattc

SEQ ID NO: 37209 - DNA, 16 bp, synthetic construct
  misc_feature 1..16: note = synthetic [barcode part1]
  source 1..16: mol_type = other DNA
gtcacgatacttacct

SEQ ID NO: 37210 - DNA, 16 bp, synthetic construct
  misc_feature 1..16: note = synthetic [barcode part1]
  source 1..16: mol_type = other DNA
cgcacacttaaccaag

SEQ ID NO: 37211 - DNA, 16 bp, synthetic construct
  misc_feature 1..16: note = synthetic [barcode part1]
  source 1..16: mol_type = other DNA
cagattcgcaatagag

SEQ ID NO: 37212 - DNA, 16 bp, synthetic construct
  misc_feature 1..16: note = synthetic [barcode part1]
  source 1..16: mol_type = other DNA
cacagtgaggtcttgt

SEQ ID NO: 37213 - DNA, 16 bp, synthetic construct
  misc_feature 1..16: note = synthetic [barcode part1]
  source 1..16: mol_type = other DNA
tgacctccgatatatc

SEQ ID NO: 37214 - DNA, 16 bp, synthetic construct
  misc_feature 1..16: note = synthetic [barcode part1]
  source 1..16: mol_type = other DNA
attggtacagaggact

SEQ ID NO: 37215 - DNA, 16 bp, synthetic construct
  misc_feature 1..16: note = synthetic [barcode part1]
  source 1..16: mol_type = other DNA
agtgtaacgccttcag

SEQ ID NO: 37216 - DNA, 16 bp, synthetic construct
  misc_feature 1..16: note = synthetic [barcode part1]
  source 1..16: mol_type = other DNA
atatctcgacctgatc

SEQ ID NO: 37217 - DNA, 16 bp, synthetic construct
  misc_feature 1..16: note = synthetic [barcode part1]
  source 1..16: mol_type = other DNA
accgatatcgtgtgac

SEQ ID NO: 37218 - DNA, 16 bp, synthetic construct
  misc_feature 1..16: note = synthetic [barcode part1]
  source 1..16: mol_type = other DNA
gtagttgtgaccgtac

SEQ ID NO: 37219 - DNA, 16 bp, synthetic construct
  misc_feature 1..16: note = synthetic [barcode part1]
  source 1..16: mol_type = other DNA
acgtgacctgaggagt

SEQ ID NO: 37220 - DNA, 16 bp, synthetic construct
  misc_feature 1..16: note = synthetic [barcode part1]
  source 1..16: mol_type = other DNA
tatcacgaactccgag

SEQ ID NO: 37221 - DNA, 16 bp, synthetic construct
  misc_feature 1..16: note = synthetic [barcode part1]
  source 1..16: mol_type = other DNA
cagtggatctaggcag

SEQ ID NO: 37222 - DNA, 16 bp, synthetic construct
  misc_feature 1..16: note = synthetic [barcode part1]
  source 1..16: mol_type = other DNA
ttgacgaagaccactc

SEQ ID NO: 37223 - DNA, 16 bp, synthetic construct
  misc_feature 1..16: note = synthetic [barcode part1]
  source 1..16: mol_type = other DNA
actgtgaggtagatac

SEQ ID NO: 37224 - DNA, 16 bp, synthetic construct
  misc_feature 1..16: note = synthetic [barcode part1]
  source 1..16: mol_type = other DNA
agaagacggcgatagt

SEQ ID NO: 37225 - DNA, 16 bp, synthetic construct
  misc_feature 1..16: note = synthetic [barcode part1]
  source 1..16: mol_type = other DNA
tgtcgcgatatcacag

SEQ ID NO: 37226 - DNA, 16 bp, synthetic construct
  misc_feature 1..16: note = synthetic [barcode part1]
  source 1..16: mol_type = other DNA
tgacggatcactctag

SEQ ID NO: 37227 - DNA, 16 bp, synthetic construct
  misc_feature 1..16: note = synthetic [barcode part1]
  source 1..16: mol_type = other DNA
gccaagactagaagag

SEQ ID NO: 37228 - DNA, 16 bp, synthetic construct
  misc_feature 1..16: note = synthetic [barcode part1]
  source 1..16: mol_type = other DNA
aggtaagatccgcctt

SEQ ID NO: 37229 - DNA, 16 bp, synthetic construct
  misc_feature 1..16: note = synthetic [barcode part1]
  source 1..16: mol_type = other DNA
acacctcctgagtcac

SEQ ID NO: 37230 - DNA, 16 bp, synthetic construct
  misc_feature 1..16: note = synthetic [barcode part1]
  source 1..16: mol_type = other DNA
cgtaggtcctgtcgtt

SEQ ID NO: 37231 - DNA, 16 bp, synthetic construct
  misc_feature 1..16: note = synthetic [barcode part1]
  source 1..16: mol_type = other DNA
agtcgagttcgcagag

SEQ ID NO: 37232 - DNA, 16 bp, synthetic construct
  misc_feature 1..16: note = synthetic [barcode part1]
  source 1..16: mol_type = other DNA
agtctgtgcgaatctg

SEQ ID NO: 37233 - DNA, 16 bp, synthetic construct
  misc_feature 1..16: note = synthetic [barcode part1]
  source 1..16: mol_type = other DNA
gaactctaccgtaacg

SEQ ID NO: 37234 - DNA, 16 bp, synthetic construct
  misc_feature 1..16: note = synthetic [barcode part1]
  source 1..16: mol_type = other DNA
cagactggtcaagtct

SEQ ID NO: 37235 - DNA, 16 bp, synthetic construct
  misc_feature 1..16: note = synthetic [barcode part1]
  source 1..16: mol_type = other DNA
tcgtgaggcctgaatt

SEQ ID NO: 37236 - DNA, 16 bp, synthetic construct
  misc_feature 1..16: note = synthetic [barcode part1]
  source 1..16: mol_type = other DNA
atcgtggttcggaact

SEQ ID NO: 37237 - DNA, 16 bp, synthetic construct
  misc_feature 1..16: note = synthetic [barcode part1]
  source 1..16: mol_type = other DNA
gagttaattctggccg

SEQ ID NO: 37238 - DNA, 16 bp, synthetic construct
  misc_feature 1..16: note = synthetic [barcode part1]
  source 1..16: mol_type = other DNA
ttaaggtcaccgcagt

SEQ ID NO: 37239 - DNA, 16 bp, synthetic construct
  misc_feature 1..16: note = synthetic [barcode part1]
  source 1..16: mol_type = other DNA
agttcctaggacgact

SEQ ID NO: 37240 - DNA, 16 bp, synthetic construct
  misc_feature 1..16: note = synthetic [barcode part1]
  source 1..16: mol_type = other DNA
atacgtgactacgacc

SEQ ID NO: 37241 - DNA, 16 bp, synthetic construct
  misc_feature 1..16: note = synthetic [barcode part1]
  source 1..16: mol_type = other DNA
gagagacagactgaac

SEQ ID NO: 37242 - DNA, 16 bp, synthetic construct
  misc_feature 1..16: note = synthetic [barcode part1]
  source 1..16: mol_type = other DNA
ccttatagatccagtc

SEQ ID NO: 37243 - DNA, 16 bp, synthetic construct
  misc_feature 1..16: note = synthetic [barcode part1]
  source 1..16: mol_type = other DNA
acaagtctacggactc

SEQ ID NO: 37244 - DNA, 16 bp, synthetic construct
  misc_feature 1..16: note = synthetic [barcode part1]
  source 1..16: mol_type = other DNA
aacacctaacagtgag

SEQ ID NO: 37245 - DNA, 16 bp, synthetic construct
  misc_feature 1..16: note = synthetic [barcode part1]
  source 1..16: mol_type = other DNA
aaggataggcaacttc

SEQ ID NO: 37246 - DNA, 16 bp, synthetic construct
  misc_feature 1..16: note = synthetic [barcode part1]
  source 1..16: mol_type = other DNA
gagtaatccggcgtag

SEQ ID NO: 37247 - DNA, 16 bp, synthetic construct
  misc_feature 1..16: note = synthetic [barcode part1]
  source 1..16: mol_type = other DNA
tccgttggtgtgatcc

SEQ ID NO: 37248 - DNA, 16 bp, synthetic construct
  misc_feature 1..16: note = synthetic [barcode part1]
  source 1..16: mol_type = other DNA
agtgacgttgcagacg

SEQ ID NO: 37249 - DNA, 16 bp, synthetic construct
  misc_feature 1..16: note = synthetic [barcode part1]
  source 1..16: mol_type = other DNA
cgtgttcgtaaggatc

SEQ ID NO: 37250 - DNA, 16 bp, synthetic construct
  misc_feature 1..16: note = synthetic [barcode part1]
  source 1..16: mol_type = other DNA
tgtactggacttcttg

SEQ ID NO: 37251 - DNA, 16 bp, synthetic construct
  misc_feature 1..16: note = synthetic [barcode part1]
  source 1..16: mol_type = other DNA
tgagacttcgaccaac

SEQ ID NO: 37252 - DNA, 16 bp, synthetic construct
  misc_feature 1..16: note = synthetic [barcode part1]
  source 1..16: mol_type = other DNA
tacggaggttgagtcg

SEQ ID NO: 37253 - DNA, 16 bp, synthetic construct
  misc_feature 1..16: note = synthetic [barcode part1]
  source 1..16: mol_type = other DNA
aattactcttacgccg

SEQ ID NO: 37254 - DNA, 16 bp, synthetic construct
  misc_feature 1..16: note = synthetic [barcode part1]
  source 1..16: mol_type = other DNA
aaccgacaactgacct

SEQ ID NO: 37255 - DNA, 16 bp, synthetic construct
  misc_feature 1..16: note = synthetic [barcode part1]
  source 1..16: mol_type = other DNA
tatacggacggagtgc

SEQ ID NO: 37256 - DNA, 16 bp, synthetic construct
  misc_feature 1..16: note = synthetic [barcode part1]
  source 1..16: mol_type = other DNA
acgcgaatatcctcag

SEQ ID NO: 37257 - DNA, 16 bp, synthetic construct
  misc_feature 1..16: note = synthetic [barcode part1]
  source 1..16: mol_type = other DNA
cgacaagaatatccag

SEQ ID NO: 37258 - DNA, 16 bp, synthetic construct
  misc_feature 1..16: note = synthetic [barcode part1]
  source 1..16: mol_type = other DNA
gagttaacacacaacg

SEQ ID NO: 37259 - DNA, 16 bp, synthetic construct
  misc_feature 1..16: note = synthetic [barcode part1]
  source 1..16: mol_type = other DNA
accggcgtctaactct

SEQ ID NO: 37260 - DNA, 16 bp, synthetic construct
  misc_feature 1..16: note = synthetic [barcode part1]
  source 1..16: mol_type = other DNA
tgttggaatctggcac

SEQ ID NO: 37261 - DNA, 16 bp, synthetic construct
  misc_feature 1..16: note = synthetic [barcode part1]
  source 1..16: mol_type = other DNA
gattagactcagtccg

SEQ ID NO: 37262 - DNA, 16 bp, synthetic construct
  misc_feature 1..16: note = synthetic [barcode part1]
  source 1..16: mol_type = other DNA
gcaacaggacacactg

SEQ ID NO: 37263 - DNA, 16 bp, synthetic construct
  misc_feature 1..16: note = synthetic [barcode part1]
  source 1..16: mol_type = other DNA
ttgtcgacaacgatcg

SEQ ID NO: 37264 - DNA, 16 bp, synthetic construct
  misc_feature 1..16: note = synthetic [barcode part1]
  source 1..16: mol_type = other DNA
taaccgacgactaacc

SEQ ID NO: 37265 - DNA, 16 bp, synthetic construct
  misc_feature 1..16: note = synthetic [barcode part1]
  source 1..16: mol_type = other DNA
taggttggatctggtc

SEQ ID NO: 37266 - DNA, 16 bp, synthetic construct
  misc_feature 1..16: note = synthetic [barcode part1]
  source 1..16: mol_type = other DNA
tatcctactcaccacc

SEQ ID NO: 37267 - DNA, 16 bp, synthetic construct
  misc_feature 1..16: note = synthetic [barcode part1]
  source 1..16: mol_type = other DNA
acactagtggtagaac

SEQ ID NO: 37268 - DNA, 16 bp, synthetic construct
  misc_feature 1..16: note = synthetic [barcode part1]
  source 1..16: mol_type = other DNA
acgagagtagtgattc

SEQ ID NO: 37269 - DNA, 16 bp, synthetic construct
  misc_feature 1..16: note = synthetic [barcode part1]
  source 1..16: mol_type = other DNA
tcaccaatcttacgtg

SEQ ID NO: 37270 - DNA, 16 bp, synthetic construct
  misc_feature 1..16: note = synthetic [barcode part1]
  source 1..16: mol_type = other DNA
acggatcactgttctt

SEQ ID NO: 37271 - DNA, 16 bp, synthetic construct
  misc_feature 1..16: note = synthetic [barcode part1]
  source 1..16: mol_type = other DNA
tacctatctgcctgtc

SEQ ID NO: 37272 - DNA, 16 bp, synthetic construct
  misc_feature 1..16: note = synthetic [barcode part1]
  source 1..16: mol_type = other DNA
cgaagtgagtggtaag

SEQ ID NO: 37273 - DNA, 16 bp, synthetic construct
  misc_feature 1..16: note = synthetic [barcode part1]
  source 1..16: mol_type = other DNA
acctgaatctgttgtc

SEQ ID NO: 37274 - DNA, 16 bp, synthetic construct
  misc_feature 1..16: note = synthetic [barcode part1]
  source 1..16: mol_type = other DNA
cactcacagtaggtac

SEQ ID NO: 37275 - DNA, 16 bp, synthetic construct
  misc_feature 1..16: note = synthetic [barcode part1]
  source 1..16: mol_type = other DNA
gatcctcctagtatac

SEQ ID NO: 37276 - DNA, 16 bp, synthetic construct
  misc_feature 1..16: note = synthetic [barcode part1]
  source 1..16: mol_type = other DNA
aaggcgtaccggattg

SEQ ID NO: 37277 - DNA, 16 bp, synthetic construct
  misc_feature 1..16: note = synthetic [barcode part1]
  source 1..16: mol_type = other DNA
gcctaatcgcgttctg

SEQ ID NO: 37278 - DNA, 16 bp, synthetic construct
  misc_feature 1..16: note = synthetic [barcode part1]
  source 1..16: mol_type = other DNA
gtctattcactgtgac

SEQ ID NO: 37279 - DNA, 16 bp, synthetic construct
  misc_feature 1..16: note = synthetic [barcode part1]
  source 1..16: mol_type = other DNA
acggatctgtgttggt

SEQ ID NO: 37280 - DNA, 16 bp, synthetic construct
  misc_feature 1..16: note = synthetic [barcode part1]
  source 1..16: mol_type = other DNA
cggaagaaccacacac

SEQ ID NO: 37281 - DNA, 16 bp, synthetic construct
  misc_feature 1..16: note = synthetic [barcode part1]
  source 1..16: mol_type = other DNA
ttctactcacctagag

SEQ ID NO: 37282 - DNA, 16 bp, synthetic construct
  misc_feature 1..16: note = synthetic [barcode part1]
  source 1..16: mol_type = other DNA
taattactgcctcacg

SEQ ID NO: 37283 - DNA, 16 bp, synthetic construct
  misc_feature 1..16: note = synthetic [barcode part1]
  source 1..16: mol_type = other DNA
gcctggatactacctc

SEQ ID NO: 37284 - DNA, 16 bp, synthetic construct
  misc_feature 1..16: note = synthetic [barcode part1]
  source 1..16: mol_type = other DNA
ataagtggtcctagag

SEQ ID NO: 37285 - DNA, 16 bp, synthetic construct
  misc_feature 1..16: note = synthetic [barcode part1]
  source 1..16: mol_type = other DNA
cgaatcggtgtggagt

SEQ ID NO: 37286 - DNA, 16 bp, synthetic construct
  misc_feature 1..16: note = synthetic [barcode part1]
  source 1..16: mol_type = other DNA
gaacgtggaagtacag

SEQ ID NO: 37287 - DNA, 16 bp, synthetic construct
  misc_feature 1..16: note = synthetic [barcode part1]
  source 1..16: mol_type = other DNA
cagttgaatacacgcc

SEQ ID NO: 37288 - DNA, 16 bp, synthetic construct
  misc_feature 1..16: note = synthetic [barcode part1]
  source 1..16: mol_type = other DNA
ttggacagtgagttcc

SEQ ID NO: 37289 - DNA, 16 bp, synthetic construct
  misc_feature 1..16: note = synthetic [barcode part1]
  source 1..16: mol_type = other DNA
tggtgtgcgatcctct

SEQ ID NO: 37290 - DNA, 16 bp, synthetic construct
  misc_feature 1..16: note = synthetic [barcode part1]
  source 1..16: mol_type = other DNA
tacttggaagagtcag

SEQ ID NO: 37291 - DNA, 16 bp, synthetic construct
  misc_feature 1..16: note = synthetic [barcode part1]
  source 1..16: mol_type = other DNA
accgtctgataggatc

SEQ ID NO: 37292 - DNA, 16 bp, synthetic construct
  misc_feature 1..16: note = synthetic [barcode part1]
  source 1..16: mol_type = other DNA
tcttgtaaccgagttc

SEQ ID NO: 37293 - DNA, 16 bp, synthetic construct
  misc_feature 1..16: note = synthetic [barcode part1]
  source 1..16: mol_type = other DNA
ttcctctagagaggac

SEQ ID NO: 37294 - DNA, 16 bp, synthetic construct
  misc_feature 1..16: note = synthetic [barcode part1]
  source 1..16: mol_type = other DNA
atctccacgttaggtt

SEQ ID NO: 37295 - DNA, 16 bp, synthetic construct
  misc_feature 1..16: note = synthetic [barcode part1]
  source 1..16: mol_type = other DNA
caaggaacgcaaccgt

SEQ ID NO: 37296 - DNA, 16 bp, synthetic construct
  misc_feature 1..16: note = synthetic [barcode part1]
  source 1..16: mol_type = other DNA
tcgtcggatactcctg

SEQ ID NO: 37297 - DNA, 16 bp, synthetic construct
  misc_feature 1..16: note = synthetic [barcode part1]
  source 1..16: mol_type = other DNA
caactactgtcctgcg

SEQ ID NO: 37298 - DNA, 16 bp, synthetic construct
  misc_feature 1..16: note = synthetic [barcode part1]
  source 1..16: mol_type = other DNA
aaccgtattctccggc

SEQ ID NO: 37299 - DNA, 16 bp, synthetic construct
  misc_feature 1..16: note = synthetic [barcode part1]
  source 1..16: mol_type = other DNA
tgcgcagttatcgtcc

SEQ ID NO: 37300 - DNA, 16 bp, synthetic construct
  misc_feature 1..16: note = synthetic [barcode part1]
  source 1..16: mol_type = other DNA
aagattgccagacgcg

SEQ ID NO: 37301 - DNA, 16 bp, synthetic construct
  misc_feature 1..16: note = synthetic [barcode part1]
  source 1..16: mol_type = other DNA
ccgaggtcttatccac

SEQ ID NO: 37302 - DNA, 16 bp, synthetic construct
  misc_feature 1..16: note = synthetic [barcode part1]
  source 1..16: mol_type = other DNA
tgtgtcctatccttgc

SEQ ID NO: 37303 - DNA, 16 bp, synthetic construct
  misc_feature 1..16: note = synthetic [barcode part1]
  source 1..16: mol_type = other DNA
tggaccaacacggagt

SEQ ID NO: 37304 - DNA, 16 bp, synthetic construct
  misc_feature 1..16: note = synthetic [barcode part1]
  source 1..16: mol_type = other DNA
cacaaggaccgtcaag

SEQ ID NO: 37305 - DNA, 16 bp, synthetic construct
  misc_feature 1..16: note = synthetic [barcode part1]
  source 1..16: mol_type = other DNA
agttgactgcagtacc

SEQ ID NO: 37306 - DNA, 16 bp, synthetic construct
  misc_feature 1..16: note = synthetic [barcode part1]
  source 1..16: mol_type = other DNA
gtagttaggtcttcct

SEQ ID NO: 37307 - DNA, 16 bp, synthetic construct
  misc_feature 1..16: note = synthetic [barcode part1]
  source 1..16: mol_type = other DNA
ttctacgcctctgtgt

SEQ ID NO: 37308 - DNA, 16 bp, synthetic construct
  misc_feature 1..16: note = synthetic [barcode part1]
  source 1..16: mol_type = other DNA
tctccttcggtattgc

SEQ ID NO: 37309 - DNA, 16 bp, synthetic construct
  misc_feature 1..16: note = synthetic [barcode part1]
  source 1..16: mol_type = other DNA
aaggtcgtgcgaatcg

SEQ ID NO: 37310 - DNA, 16 bp, synthetic construct
  misc_feature 1..16: note = synthetic [barcode part1]
  source 1..16: mol_type = other DNA
gagacgtctagattag

SEQ ID NO: 37311 - DNA, 16 bp, synthetic construct
  misc_feature 1..16: note = synthetic [barcode part1]
  source 1..16: mol_type = other DNA
aagaaggtcggagttg

SEQ ID NO: 37312 - DNA, 16 bp, synthetic construct
  misc_feature 1..16: note = synthetic [barcode part1]
  source 1..16: mol_type = other DNA
tgtctgtcgttgcggt

SEQ ID NO: 37313 - DNA, 16 bp, synthetic construct
  misc_feature 1..16: note = synthetic [barcode part1]
  source 1..16: mol_type = other DNA
gtgaggaaccgttgac

SEQ ID NO: 37314 - DNA, 16 bp, synthetic construct
  misc_feature 1..16: note = synthetic [barcode part1]
  source 1..16: mol_type = other DNA
tgtgttgttggtcttg

SEQ ID NO: 37315 - DNA, 16 bp, synthetic construct
  misc_feature 1..16: note = synthetic [barcode part1]
  source 1..16: mol_type = other DNA
acgcgtgaatcaatcc

SEQ ID NO: 37316 - DNA, 16 bp, synthetic construct
  misc_feature 1..16: note = synthetic [barcode part1]
  source 1..16: mol_type = other DNA
gtgcacactgattggt

SEQ ID NO: 37317 - DNA, 16 bp, synthetic construct
  misc_feature 1..16: note = synthetic [barcode part1]
  source 1..16: mol_type = other DNA
gttcaaggacaagatc

SEQ ID NO: 37318 - DNA, 16 bp, synthetic construct
  misc_feature 1..16: note = synthetic [barcode part1]
  source 1..16: mol_type = other DNA
cacagttcgacctctg

SEQ ID NO: 37319 - DNA, 16 bp, synthetic construct
  misc_feature 1..16: note = synthetic [barcode part1]
  source 1..16: mol_type = other DNA
acaaggcctgtcttag

SEQ ID NO: 37320 - DNA, 16 bp, synthetic construct
  misc_feature 1..16: note = synthetic [barcode part1]
  source 1..16: mol_type = other DNA
gcacgattcgactcct

SEQ ID NO: 37321 - DNA, 16 bp, synthetic construct
  misc_feature 1..16: note = synthetic [barcode part1]
  source 1..16: mol_type = other DNA
atacggtcgtggttac

SEQ ID NO: 37322 - DNA, 16 bp, synthetic construct
  misc_feature 1..16: note = synthetic [barcode part1]
  source 1..16: mol_type = other DNA
gatatcgtcagagtcc

SEQ ID NO: 37323 - DNA, 16 bp, synthetic construct
  misc_feature 1..16: note = synthetic [barcode part1]
  source 1..16: mol_type = other DNA
accggataacgacctt

SEQ ID NO: 37324 - DNA, 16 bp, synthetic construct
  misc_feature 1..16: note = synthetic [barcode part1]
  source 1..16: mol_type = other DNA
gagactctcgtccact

SEQ ID NO: 37325 - DNA, 16 bp, synthetic construct
  misc_feature 1..16: note = synthetic [barcode part1]
  source 1..16: mol_type = other DNA
aagtcacacctagtgc

SEQ ID NO: 37326 - DNA, 16 bp, synthetic construct
  misc_feature 1..16: note = synthetic [barcode part1]
  source 1..16: mol_type = other DNA
cctgaatcctagtccg

SEQ ID NO: 37327 - DNA, 16 bp, synthetic construct
  misc_feature 1..16: note = synthetic [barcode part1]
  source 1..16: mol_type = other DNA
ttatcacttgcgagtc

SEQ ID NO: 37328 - DNA, 16 bp, synthetic construct
  misc_feature 1..16: note = synthetic [barcode part1]
  source 1..16: mol_type = other DNA
ttgtctatcgcctacc

SEQ ID NO: 37329 - DNA, 16 bp, synthetic construct
  misc_feature 1..16: note = synthetic [barcode part1]
  source 1..16: mol_type = other DNA
attagactccggcagt

SEQ ID NO: 37330 - DNA, 16 bp, synthetic construct
  misc_feature 1..16: note = synthetic [barcode part1]
  source 1..16: mol_type = other DNA
ttggcagacctagtgt

SEQ ID NO: 37331 - DNA, 16 bp, synthetic construct
  misc_feature 1..16: note = synthetic [barcode part1]
  source 1..16: mol_type = other DNA
taggatacgagttcag

SEQ ID NO: 37332 - DNA, 16 bp, synthetic construct
  misc_feature 1..16: note = synthetic [barcode part1]
  source 1..16: mol_type = other DNA
gtcgagaattgtacag

SEQ ID NO: 37333 - DNA, 16 bp, synthetic construct
  misc_feature 1..16: note = synthetic [barcode part1]
  source 1..16: mol_type = other DNA
tcgacaatcgtcgaac

SEQ ID NO: 37334 - DNA, 16 bp, synthetic construct
  misc_feature 1..16: note = synthetic [barcode part1]
  source 1..16: mol_type = other DNA
cgcaatagtccgtctc

SEQ ID NO: 37335 - DNA, 16 bp, synthetic construct
  misc_feature 1..16: note = synthetic [barcode part1]
  source 1..16: mol_type = other DNA
cgtccttactagattg

SEQ ID NO: 37336 - DNA, 16 bp, synthetic construct
  misc_feature 1..16: note = synthetic [barcode part1]
  source 1..16: mol_type = other DNA
gttagactatcggacc

SEQ ID NO: 37337 - DNA, 16 bp, synthetic construct
  misc_feature 1..16: note = synthetic [barcode part1]
  source 1..16: mol_type = other DNA
tagtggtcctcacgtc

SEQ ID NO: 37338 - DNA, 16 bp, synthetic construct
  misc_feature 1..16: note = synthetic [barcode part1]
  source 1..16: mol_type = other DNA
atctggatccgagtac

SEQ ID NO: 37339 - DNA, 16 bp, synthetic construct
  misc_feature 1..16: note = synthetic [barcode part1]
  source 1..16: mol_type = other DNA
gtctgtaagttacgcg

SEQ ID NO: 37340 - DNA, 16 bp, synthetic construct
  misc_feature 1..16: note = synthetic [barcode part1]
  source 1..16: mol_type = other DNA
gatcacgttgatctct

SEQ ID NO: 37341 - DNA, 16 bp, synthetic construct
  misc_feature 1..16: note = synthetic [barcode part1]
  source 1..16: mol_type = other DNA
tgacacgaacttgcgt

SEQ ID NO: 37342 - DNA, 16 bp, synthetic construct
  misc_feature 1..16: note = synthetic [barcode part1]
  source 1..16: mol_type = other DNA
tgataccaacactgcg

SEQ ID NO: 37343 - DNA, 16 bp, synthetic construct
  misc_feature 1..16: note = synthetic [barcode part1]
  source 1..16: mol_type = other DNA
aagaatccgtggccag

SEQ ID NO: 37344 - DNA, 16 bp, synthetic construct
  misc_feature 1..16: note = synthetic [barcode part1]
  source 1..16: mol_type = other DNA
caccagaagtgactct

SEQ ID NO: 37345 - DNA, 16 bp, synthetic construct
  misc_feature 1..16: note = synthetic [barcode part1]
  source 1..16: mol_type = other DNA
gaattgaccgatctcg

SEQ ID NO: 37346 - DNA, 16 bp, synthetic construct
  misc_feature 1..16: note = synthetic [barcode part1]
  source 1..16: mol_type = other DNA
agacgtgtcctatacg

SEQ ID NO: 37347 - DNA, 16 bp, synthetic construct
  misc_feature 1..16: note = synthetic [barcode part1]
  source 1..16: mol_type = other DNA
aatattcgcggtcacg

SEQ ID NO: 37348 - DNA, 16 bp, synthetic construct
  misc_feature 1..16: note = synthetic [barcode part1]
  source 1..16: mol_type = other DNA
cgacttagtccaacag

SEQ ID NO: 37349 - DNA, 16 bp, synthetic construct
  misc_feature 1..16: note = synthetic [barcode part1]
  source 1..16: mol_type = other DNA
gtgataatcgccactg

SEQ ID NO: 37350 - DNA, 16 bp, synthetic construct
  misc_feature 1..16: note = synthetic [barcode part1]
  source 1..16: mol_type = other DNA
accttgacgacactag

SEQ ID NO: 37351 - DNA, 16 bp, synthetic construct
  misc_feature 1..16: note = synthetic [barcode part1]
  source 1..16: mol_type = other DNA
cctggcagaatataag

SEQ ID NO: 37352 - DNA, 16 bp, synthetic construct
  misc_feature 1..16: note = synthetic [barcode part1]
  source 1..16: mol_type = other DNA
tcggaatcctacttac

SEQ ID NO: 37353 - DNA, 16 bp, synthetic construct
  misc_feature 1..16: note = synthetic [barcode part1]
  source 1..16: mol_type = other DNA
cgcaatagtgagtaac

SEQ ID NO: 37354 - DNA, 16 bp, synthetic construct
  misc_feature 1..16: note = synthetic [barcode part1]
  source 1..16: mol_type = other DNA
actaccacgtacctcg

SEQ ID NO: 37355 - DNA, 16 bp, synthetic construct
  misc_feature 1..16: note = synthetic [barcode part1]
  source 1..16: mol_type = other DNA
ccaggtagtagatcct

SEQ ID NO: 37356 - DNA, 16 bp, synthetic construct
  misc_feature 1..16: note = synthetic [barcode part1]
  source 1..16: mol_type = other DNA
tggattctctactgtg

SEQ ID NO: 37357 - DNA, 16 bp, synthetic construct
  misc_feature 1..16: note = synthetic [barcode part1]
  source 1..16: mol_type = other DNA
agtgactctagtggtc

SEQ ID NO: 37358 - DNA, 16 bp, synthetic construct
  misc_feature 1..16: note = synthetic [barcode part1]
  source 1..16: mol_type = other DNA
actgcgccaacttctg

SEQ ID NO: 37359 - DNA, 16 bp, synthetic construct
  misc_feature 1..16: note = synthetic [barcode part1]
  source 1..16: mol_type = other DNA
tgtatcttcgcgtctc

SEQ ID NO: 37360 - DNA, 16 bp, synthetic construct
  misc_feature 1..16: note = synthetic [barcode part1]
  source 1..16: mol_type = other DNA
actggagttctctgag

SEQ ID NO: 37361 - DNA, 16 bp, synthetic construct
  misc_feature 1..16: note = synthetic [barcode part1]
  source 1..16: mol_type = other DNA
tcaggagtataggttg

SEQ ID NO: 37362 - DNA, 16 bp, synthetic construct
  misc_feature 1..16: note = synthetic [barcode part1]
  source 1..16: mol_type = other DNA
tgccgaattacgtctt

SEQ ID NO: 37363 - DNA, 16 bp, synthetic construct
  misc_feature 1..16: note = synthetic [barcode part1]
  source 1..16: mol_type = other DNA
gtcacaacaggtaggc

SEQ ID NO: 37364 - DNA, 16 bp, synthetic construct
  misc_feature 1..16: note = synthetic [barcode part1]
  source 1..16: mol_type = other DNA
aaccagttgactggtc

SEQ ID NO: 37365 - DNA, 16 bp, synthetic construct
  misc_feature 1..16: note = synthetic [barcode part1]
  source 1..16: mol_type = other DNA
tgaacaacgttcgtcg

SEQ ID NO: 37366 - DNA, 16 bp, synthetic construct
  misc_feature 1..16: note = synthetic [barcode part1]
  source 1..16: mol_type = other DNA
ttgtaatcggccaacg

SEQ ID NO: 37367 - DNA, 16 bp, synthetic construct
  misc_feature 1..16: note = synthetic [barcode part1]
  source 1..16: mol_type = other DNA
atacaccacgatcacg

SEQ ID NO: 37368 - DNA, 16 bp, synthetic construct
  misc_feature 1..16: note = synthetic [barcode part1]
  source 1..16: mol_type = other DNA
tgtaggcagtagaact

SEQ ID NO: 37369 - DNA, 16 bp, synthetic construct
  misc_feature 1..16: note = synthetic [barcode part1]
  source 1..16: mol_type = other DNA
gtgtggaggtaatccg

SEQ ID NO: 37370 - DNA, 16 bp, synthetic construct
  misc_feature 1..16: note = synthetic [barcode part1]
  source 1..16: mol_type = other DNA
ttgttggcaacggttg

SEQ ID NO: 37371 - DNA, 16 bp, synthetic construct
  misc_feature 1..16: note = synthetic [barcode part1]
  source 1..16: mol_type = other DNA
gtctgttctcggaatt

SEQ ID NO: 37372 - DNA, 16 bp, synthetic construct
  misc_feature 1..16: note = synthetic [barcode part1]
  source 1..16: mol_type = other DNA
gtccaccttacctact

SEQ ID NO: 37373 - DNA, 16 bp, synthetic construct
  misc_feature 1..16: note = synthetic [barcode part1]
  source 1..16: mol_type = other DNA
gaagttacacggaccg

SEQ ID NO: 37374 - DNA, 16 bp, synthetic construct
  misc_feature 1..16: note = synthetic [barcode part1]
  source 1..16: mol_type = other DNA
gttcctggagtacaac

SEQ ID NO: 37375 - DNA, 16 bp, synthetic construct
  misc_feature 1..16: note = synthetic [barcode part1]
  source 1..16: mol_type = other DNA
tcgacctcgttctatc

SEQ ID NO: 37376 - DNA, 16 bp, synthetic construct
  misc_feature 1..16: note = synthetic [barcode part1]
  source 1..16: mol_type = other DNA
tgtgaggtgacaaccg

SEQ ID NO: 37377 - DNA, 16 bp, synthetic construct
  misc_feature 1..16: note = synthetic [barcode part1]
  source 1..16: mol_type = other DNA
acgttagtgcgtcaac

SEQ ID NO: 37378 - DNA, 16 bp, synthetic construct
  misc_feature 1..16: note = synthetic [barcode part1]
  source 1..16: mol_type = other DNA
gtcgttagaaggtgcg

SEQ ID NO: 37379 - DNA, 16 bp, synthetic construct
  misc_feature 1..16: note = synthetic [barcode part1]
  source 1..16: mol_type = other DNA
accaggtacaggaatt

SEQ ID NO: 37380 - DNA, 16 bp, synthetic construct
  misc_feature 1..16: note = synthetic [barcode part1]
  source 1..16: mol_type = other DNA
gcacgacttgacttcc

SEQ ID NO: 37381 - DNA, 16 bp, synthetic construct
  misc_feature 1..16: note = synthetic [barcode part1]
  source 1..16: mol_type = other DNA
attacgcactactctg

SEQ ID NO: 37382 - DNA, 16 bp, synthetic construct
  misc_feature 1..16: note = synthetic [barcode part1]
  source 1..16: mol_type = other DNA
atagtgcggtcagttc

SEQ ID NO: 37383 - DNA, 16 bp, synthetic construct
  misc_feature 1..16: note = synthetic [barcode part1]
  source 1..16: mol_type = other DNA
cggagtaacaaccacg

SEQ ID NO: 37384 - DNA, 16 bp, synthetic construct
  misc_feature 1..16: note = synthetic [barcode part1]
  source 1..16: mol_type = other DNA
atactaaccagacgcc

SEQ ID NO: 37385 - DNA, 16 bp, synthetic construct
  misc_feature 1..16: note = synthetic [barcode part1]
  source 1..16: mol_type = other DNA
gcagattctaacgtgc

SEQ ID NO: 37386 - DNA, 16 bp, synthetic construct
  misc_feature 1..16: note = synthetic [barcode part1]
  source 1..16: mol_type = other DNA
ttgccaactgacagtg

SEQ ID NO: 37387 - DNA, 16 bp, synthetic construct
  misc_feature 1..16: note = synthetic [barcode part1]
  source 1..16: mol_type = other DNA
atctcttcacagtcag

SEQ ID NO: 37388 - DNA, 16 bp, synthetic construct
  misc_feature 1..16: note = synthetic [barcode part1]
  source 1..16: mol_type = other DNA
cgaacgttgtggactt

SEQ ID NO: 37389 - DNA, 16 bp, synthetic construct
  misc_feature 1..16: note = synthetic [barcode part1]
  source 1..16: mol_type = other DNA
ttagtcgcggttagtg

SEQ ID NO: 37390 - DNA, 16 bp, synthetic construct
  misc_feature 1..16: note = synthetic [barcode part1]
  source 1..16: mol_type = other DNA
gtatccactgtcttag

SEQ ID NO: 37391 - DNA, 16 bp, synthetic construct
  misc_feature 1..16: note = synthetic [barcode part1]
  source 1..16: mol_type = other DNA
agactcacactccacc

SEQ ID NO: 37392 - DNA, 16 bp, synthetic construct
  misc_feature 1..16: note = synthetic [barcode part1]
  source 1..16: mol_type = other DNA
acgcacgattgtagtc

SEQ ID NO: 37393 - DNA, 16 bp, synthetic construct
  misc_feature 1..16: note = synthetic [barcode part1]
  source 1..16: mol_type = other DNA
actgttggtacctccg

SEQ ID NO: 37394 - DNA, 16 bp, synthetic construct
  misc_feature 1..16: note = synthetic [barcode part1]
  source 1..16: mol_type = other DNA
agtcgagtctgcgaag

SEQ ID NO: 37395 - DNA, 16 bp, synthetic construct
  misc_feature 1..16: note = synthetic [barcode part1]
  source 1..16: mol_type = other DNA
gtgtgtagaaggagac

SEQ ID NO: 37396 - DNA, 16 bp, synthetic construct
  misc_feature 1..16: note = synthetic [barcode part1]
  source 1..16: mol_type = other DNA
acacgacgattctctt

SEQ ID NO: 37397 - DNA, 16 bp, synthetic construct
  misc_feature 1..16: note = synthetic [barcode part1]
  source 1..16: mol_type = other DNA
acgtcggaacttacac

SEQ ID NO: 37398 - DNA, 16 bp, synthetic construct
  misc_feature 1..16: note = synthetic [barcode part1]
  source 1..16: mol_type = other DNA
ttaggtcagagtgtag

SEQ ID NO: 37399 - DNA, 16 bp, synthetic construct
  misc_feature 1..16: note = synthetic [barcode part1]
  source 1..16: mol_type = other DNA
gcagttagattgagac

SEQ ID NO: 37400 - DNA, 16 bp, synthetic construct
  misc_feature 1..16: note = synthetic [barcode part1]
  source 1..16: mol_type = other DNA
ttcagtgcctgtaccg

SEQ ID NO: 37401 - DNA, 16 bp, synthetic construct
  misc_feature 1..16: note = synthetic [barcode part1]
  source 1..16: mol_type = other DNA
acctaggaggttcgtt

SEQ ID NO: 37402 - DNA, 16 bp, synthetic construct
  misc_feature 1..16: note = synthetic [barcode part1]
  source 1..16: mol_type = other DNA
cctcggatattcgtcg

SEQ ID NO: 37403 - DNA, 16 bp, synthetic construct
  misc_feature 1..16: note = synthetic [barcode part1]
  source 1..16: mol_type = other DNA
acaggacgtctgtgag

SEQ ID NO: 37404 - DNA, 16 bp, synthetic construct
  misc_feature 1..16: note = synthetic [barcode part1]
  source 1..16: mol_type = other DNA
aagactcgcagtatcc

SEQ ID NO: 37405 - DNA, 16 bp, synthetic construct
  misc_feature 1..16: note = synthetic [barcode part1]
  source 1..16: mol_type = other DNA
tcttgtgccaacgatt

SEQ ID NO: 37406 - DNA, 16 bp, synthetic construct
  misc_feature 1..16: note = synthetic [barcode part1]
  source 1..16: mol_type = other DNA
gttgacacgtcctacc

SEQ ID NO: 37407 - DNA, 16 bp, synthetic construct
  misc_feature 1..16: note = synthetic [barcode part1]
  source 1..16: mol_type = other DNA
gccacgtagaacagtg

SEQ ID NO: 37408 - DNA, 16 bp, synthetic construct
  misc_feature 1..16: note = synthetic [barcode part1]
  source 1..16: mol_type = other DNA
acgccaagtcagaggt

SEQ ID NO: 37409 - DNA, 16 bp, synthetic construct
  misc_feature 1..16: note = synthetic [barcode part1]
  source 1..16: mol_type = other DNA
cactgtataactggcg

SEQ ID NO: 37410 - DNA, 16 bp, synthetic construct
  misc_feature 1..16: note = synthetic [barcode part1]
  source 1..16: mol_type = other DNA
acgatcgccaactcct

SEQ ID NO: 37411 - DNA, 16 bp, synthetic construct
  misc_feature 1..16: note = synthetic [barcode part1]
  source 1..16: mol_type = other DNA
cgtaacagataggcgc

SEQ ID NO: 37412 - DNA, 16 bp, synthetic construct
  misc_feature 1..16: note = synthetic [barcode part1]
  source 1..16: mol_type = other DNA
acttcgcacaggatac

SEQ ID NO: 37413 - DNA, 16 bp, synthetic construct
  misc_feature 1..16: note = synthetic [barcode part1]
  source 1..16: mol_type = other DNA
cggtgcgtgatagagt

SEQ ID NO: 37414 - DNA, 16 bp, synthetic construct
  misc_feature 1..16: note = synthetic [barcode part1]
  source 1..16: mol_type = other DNA
gccacttacttgcgac

SEQ ID NO: 37415 - DNA, 16 bp, synthetic construct
  misc_feature 1..16: note = synthetic [barcode part1]
  source 1..16: mol_type = other DNA
atctactgcctgttcc

SEQ ID NO: 37416 - DNA, 16 bp, synthetic construct
  misc_feature 1..16: note = synthetic [barcode part1]
  source 1..16: mol_type = other DNA
actcgccacaacacct

SEQ ID NO: 37417 - DNA, 16 bp, synthetic construct
  misc_feature 1..16: note = synthetic [barcode part1]
  source 1..16: mol_type = other DNA
gacacaccaacacact

SEQ ID NO: 37418 - DNA, 16 bp, synthetic construct
  misc_feature 1..16: note = synthetic [barcode part1]
  source 1..16: mol_type = other DNA
gtatcgatcgacacac

SEQ ID NO: 37419 - DNA, 16 bp, synthetic construct
  misc_feature 1..16: note = synthetic [barcode part1]
  source 1..16: mol_type = other DNA
gactgtgcacagttgt

SEQ ID NO: 37420 - DNA, 16 bp, synthetic construct
  misc_feature 1..16: note = synthetic [barcode part1]
  source 1..16: mol_type = other DNA
cgcaaccgatctatag

SEQ ID NO: 37421 - DNA, 16 bp, synthetic construct
  misc_feature 1..16: note = synthetic [barcode part1]
  source 1..16: mol_type = other DNA
cgtgtattctccttcg

SEQ ID NO: 37422 - DNA, 16 bp, synthetic construct
  misc_feature 1..16: note = synthetic [barcode part1]
  source 1..16: mol_type = other DNA
gaactgtgacgtaggc

SEQ ID NO: 37423 - DNA, 16 bp, synthetic construct
  misc_feature 1..16: note = synthetic [barcode part1]
  source 1..16: mol_type = other DNA
tgtattccttaacggc

SEQ ID NO: 37424 - DNA, 16 bp, synthetic construct
  misc_feature 1..16: note = synthetic [barcode part1]
  source 1..16: mol_type = other DNA
gccaacctaattggtg

SEQ ID NO: 37425 - DNA, 16 bp, synthetic construct
  misc_feature 1..16: note = synthetic [barcode part1]
  source 1..16: mol_type = other DNA
accaggaagttgagag

SEQ ID NO: 37426 - DNA, 16 bp, synthetic construct
  misc_feature 1..16: note = synthetic [barcode part1]
  source 1..16: mol_type = other DNA
gtgattcctgcgttcg

SEQ ID NO: 37427 - DNA, 16 bp, synthetic construct
  misc_feature 1..16: note = synthetic [barcode part1]
  source 1..16: mol_type = other DNA
aggaattatcggcgcg

SEQ ID NO: 37428 - DNA, 16 bp, synthetic construct
  misc_feature 1..16: note = synthetic [barcode part1]
  source 1..16: mol_type = other DNA
cgaactgtggtgactt

SEQ ID NO: 37429 - DNA, 16 bp, synthetic construct
  misc_feature 1..16: note = synthetic [barcode part1]
  source 1..16: mol_type = other DNA
tataaggtgcggagag

SEQ ID NO: 37430 - DNA, 16 bp, synthetic construct
  misc_feature 1..16: note = synthetic [barcode part1]
  source 1..16: mol_type = other DNA
gtggatcacacctagt

SEQ ID NO: 37431 - DNA, 16 bp, synthetic construct
  misc_feature 1..16: note = synthetic [barcode part1]
  source 1..16: mol_type = other DNA
acaacgcgaccttagt

SEQ ID NO: 37432 - DNA, 16 bp, synthetic construct
  misc_feature 1..16: note = synthetic [barcode part1]
  source 1..16: mol_type = other DNA
cctctgatcagttctc

SEQ ID NO: 37433 - DNA, 16 bp, synthetic construct
  misc_feature 1..16: note = synthetic [barcode part1]
  source 1..16: mol_type = other DNA
tacagtctcttcaacg

SEQ ID NO: 37434 - DNA, 16 bp, synthetic construct
  misc_feature 1..16: note = synthetic [barcode part1]
  source 1..16: mol_type = other DNA
gatagttcacgtcctt

SEQ ID NO: 37435 - DNA, 16 bp, synthetic construct
  misc_feature 1..16: note = synthetic [barcode part1]
  source 1..16: mol_type = other DNA
acagtacagtctcgac

SEQ ID NO: 37436 - DNA, 16 bp, synthetic construct
  misc_feature 1..16: note = synthetic [barcode part1]
  source 1..16: mol_type = other DNA
agaccttggtctcaag

SEQ ID NO: 37437 - DNA, 16 bp, synthetic construct
  misc_feature 1..16: note = synthetic [barcode part1]
  source 1..16: mol_type = other DNA
ttggaattacctgcct

SEQ ID NO: 37438 - DNA, 16 bp, synthetic construct
  misc_feature 1..16: note = synthetic [barcode part1]
  source 1..16: mol_type = other DNA
tcttgtaccaggtcgc

SEQ ID NO: 37439 - DNA, 16 bp, synthetic construct
  misc_feature 1..16: note = synthetic [barcode part1]
  source 1..16: mol_type = other DNA
tgagactgtcaactgc

SEQ ID NO: 37440 - DNA, 16 bp, synthetic construct
  misc_feature 1..16: note = synthetic [barcode part1]
  source 1..16: mol_type = other DNA
ccttccagatatactg

SEQ ID NO: 37441 - DNA, 16 bp, synthetic construct
  misc_feature 1..16: note = synthetic [barcode part1]
  source 1..16: mol_type = other DNA
caccgaaggatcactt

SEQ ID NO: 37442 - DNA, 16 bp, synthetic construct
  misc_feature 1..16: note = synthetic [barcode part1]
  source 1..16: mol_type = other DNA
gacacacacacgttgt

SEQ ID NO: 37443 - DNA, 16 bp, synthetic construct
  misc_feature 1..16: note = synthetic [barcode part1]
  source 1..16: mol_type = other DNA
ccgacttaacggtaac

SEQ ID NO: 37444 - DNA, 16 bp, synthetic construct
  misc_feature 1..16: note = synthetic [barcode part1]
  source 1..16: mol_type = other DNA
tagagtacggaagacg

SEQ ID NO: 37445 - DNA, 16 bp, synthetic construct
  misc_feature 1..16: note = synthetic [barcode part1]
  source 1..16: mol_type = other DNA
cgtggacagtacttac

SEQ ID NO: 37446 - DNA, 16 bp, synthetic construct
  misc_feature 1..16: note = synthetic [barcode part1]
  source 1..16: mol_type = other DNA
accagagagaggattg

SEQ ID NO: 37447 - DNA, 16 bp, synthetic construct
  misc_feature 1..16: note = synthetic [barcode part1]
  source 1..16: mol_type = other DNA
acggagactggtgatc

SEQ ID NO: 37448 - DNA, 16 bp, synthetic construct
  misc_feature 1..16: note = synthetic [barcode part1]
  source 1..16: mol_type = other DNA
cgaacgcaactgtatc

SEQ ID NO: 37449 - DNA, 16 bp, synthetic construct
  misc_feature 1..16: note = synthetic [barcode part1]
  source 1..16: mol_type = other DNA
cgtggtaatctgttct

SEQ ID NO: 37450 - DNA, 16 bp, synthetic construct
  misc_feature 1..16: note = synthetic [barcode part1]
  source 1..16: mol_type = other DNA
caggtgactataacag

SEQ ID NO: 37451 - DNA, 16 bp, synthetic construct
  misc_feature 1..16: note = synthetic [barcode part1]
  source 1..16: mol_type = other DNA
tatcggtatcaacgcg

SEQ ID NO: 37452 - DNA, 16 bp, synthetic construct
  misc_feature 1..16: note = synthetic [barcode part1]
  source 1..16: mol_type = other DNA
gtggaactgttgtctg

SEQ ID NO: 37453 - DNA, 16 bp, synthetic construct
  misc_feature 1..16: note = synthetic [barcode part1]
  source 1..16: mol_type = other DNA
tcggtatcggttacag

SEQ ID NO: 37454 - DNA, 16 bp, synthetic construct
  misc_feature 1..16: note = synthetic [barcode part1]
  source 1..16: mol_type = other DNA
tgtgttctaccgaact

SEQ ID NO: 37455 - DNA, 16 bp, synthetic construct
  misc_feature 1..16: note = synthetic [barcode part1]
  source 1..16: mol_type = other DNA
cctccaagtgtatcgc

SEQ ID NO: 37456 - DNA, 16 bp, synthetic construct
  misc_feature 1..16: note = synthetic [barcode part1]
  source 1..16: mol_type = other DNA
ttctactggtactcag

SEQ ID NO: 37457 - DNA, 16 bp, synthetic construct
  misc_feature 1..16: note = synthetic [barcode part1]
  source 1..16: mol_type = other DNA
cgttcgttaagatctc

SEQ ID NO: 37458 - DNA, 16 bp, synthetic construct
  misc_feature 1..16: note = synthetic [barcode part1]
  source 1..16: mol_type = other DNA
gattgatcgaccgact

SEQ ID NO: 37459 - DNA, 16 bp, synthetic construct
  misc_feature 1..16: note = synthetic [barcode part1]
  source 1..16: mol_type = other DNA
gatccaaggttatcgc

SEQ ID NO: 37460 - DNA, 16 bp, synthetic construct
  misc_feature 1..16: note = synthetic [barcode part1]
  source 1..16: mol_type = other DNA
tccagtcacactgacc

SEQ ID NO: 37461 - DNA, 16 bp, synthetic construct
  misc_feature 1..16: note = synthetic [barcode part1]
  source 1..16: mol_type = other DNA
tccaaggcgactagtt

SEQ ID NO: 37462 - DNA, 16 bp, synthetic construct
  misc_feature 1..16: note = synthetic [barcode part1]
  source 1..16: mol_type = other DNA
tcttcctctctcttcc

SEQ ID NO: 37463 - DNA, 16 bp, synthetic construct
  misc_feature 1..16: note = synthetic [barcode part1]
  source 1..16: mol_type = other DNA
gttgcggtgttcactc

SEQ ID NO: 37464 - DNA, 16 bp, synthetic construct
  misc_feature 1..16: note = synthetic [barcode part1]
  source 1..16: mol_type = other DNA
cagttgagaaggagac

SEQ ID NO: 37465 - DNA, 16 bp, synthetic construct
  misc_feature 1..16: note = synthetic [barcode part1]
  source 1..16: mol_type = other DNA
tctagagagagtctcc

SEQ ID NO: 37466 - DNA, 16 bp, synthetic construct
  misc_feature 1..16: note = synthetic [barcode part1]
  source 1..16: mol_type = other DNA
gaattcggtctcctgc

SEQ ID NO: 37467 - DNA, 16 bp, synthetic construct
  misc_feature 1..16: note = synthetic [barcode part1]
  source 1..16: mol_type = other DNA
actctcgcaagttatc

SEQ ID NO: 37468 - DNA, 16 bp, synthetic construct
  misc_feature 1..16: note = synthetic [barcode part1]
  source 1..16: mol_type = other DNA
gtctaccgatactgcc

SEQ ID NO: 37469 - DNA, 16 bp, synthetic construct
  misc_feature 1..16: note = synthetic [barcode part1]
  source 1..16: mol_type = other DNA
ataacactgacgccgt

SEQ ID NO: 37470 - DNA, 16 bp, synthetic construct
  misc_feature 1..16: note = synthetic [barcode part1]
  source 1..16: mol_type = other DNA
gtgatcgtggttacgt

SEQ ID NO: 37471 - DNA, 16 bp, synthetic construct
  misc_feature 1..16: note = synthetic [barcode part1]
  source 1..16: mol_type = other DNA
caagacgtgaagagtg

SEQ ID NO: 37472 - DNA, 16 bp, synthetic construct
  misc_feature 1..16: note = synthetic [barcode part1]
  source 1..16: mol_type = other DNA
gagtgttctgcaagtc

SEQ ID NO: 37473 - DNA, 16 bp, synthetic construct
  misc_feature 1..16: note = synthetic [barcode part1]
  source 1..16: mol_type = other DNA
cagttaacctcggagt

SEQ ID NO: 37474 - DNA, 16 bp, synthetic construct
  misc_feature 1..16: note = synthetic [barcode part1]
  source 1..16: mol_type = other DNA
gcagtgcgtatatacc

SEQ ID NO: 37475 - DNA, 16 bp, synthetic construct
  misc_feature 1..16: note = synthetic [barcode part1]
  source 1..16: mol_type = other DNA
gtagaaggtcgaactt

SEQ ID NO: 37476 - DNA, 16 bp, synthetic construct
  misc_feature 1..16: note = synthetic [barcode part1]
  source 1..16: mol_type = other DNA
atcgcggtatctgtcc

SEQ ID NO: 37477 - DNA, 16 bp, synthetic construct
  misc_feature 1..16: note = synthetic [barcode part1]
  source 1..16: mol_type = other DNA
tgtcagacagagacgc

SEQ ID NO: 37478 - DNA, 16 bp, synthetic construct
  misc_feature 1..16: note = synthetic [barcode part1]
  source 1..16: mol_type = other DNA
cgcagtacttgcctgt

SEQ ID NO: 37479 - DNA, 16 bp, synthetic construct
  misc_feature 1..16: note = synthetic [barcode part1]
  source 1..16: mol_type = other DNA
agagtctcaggacttc

SEQ ID NO: 37480 - DNA, 16 bp, synthetic construct
  misc_feature 1..16: note = synthetic [barcode part1]
  source 1..16: mol_type = other DNA
caacttgtgaactgcg

SEQ ID NO: 37481 - DNA, 16 bp, synthetic construct
  misc_feature 1..16: note = synthetic [barcode part1]
  source 1..16: mol_type = other DNA
gcggattccttcggtt

SEQ ID NO: 37482 - DNA, 16 bp, synthetic construct
  misc_feature 1..16: note = synthetic [barcode part1]
  source 1..16: mol_type = other DNA
ttcagtcgccgacact

SEQ ID NO: 37483 - DNA, 16 bp, synthetic construct
  misc_feature 1..16: note = synthetic [barcode part1]
  source 1..16: mol_type = other DNA
acaacacaagacctcc

SEQ ID NO: 37484 - DNA, 16 bp, synthetic construct
  misc_feature 1..16: note = synthetic [barcode part1]
  source 1..16: mol_type = other DNA
atcgtaggtccactcc

SEQ ID NO: 37485 - DNA, 16 bp, synthetic construct
  misc_feature 1..16: note = synthetic [barcode part1]
  source 1..16: mol_type = other DNA
tgcctaatctccgacg

SEQ ID NO: 37486 - DNA, 16 bp, synthetic construct
  misc_feature 1..16: note = synthetic [barcode part1]
  source 1..16: mol_type = other DNA
cgtccgacttctagtg

SEQ ID NO: 37487 - DNA, 16 bp, synthetic construct
  misc_feature 1..16: note = synthetic [barcode part1]
  source 1..16: mol_type = other DNA
gagtgagatctcaggc

SEQ ID NO: 37488 - DNA, 16 bp, synthetic construct
  misc_feature 1..16: note = synthetic [barcode part1]
  source 1..16: mol_type = other DNA
gatacgtggccaagac

SEQ ID NO: 37489 - DNA, 16 bp, synthetic construct
  misc_feature 1..16: note = synthetic [barcode part1]
  source 1..16: mol_type = other DNA
aaggaactatcggtgt

SEQ ID NO: 37490 - DNA, 16 bp, synthetic construct
  misc_feature 1..16: note = synthetic [barcode part1]
  source 1..16: mol_type = other DNA
caaggtcactacgact

SEQ ID NO: 37491 - DNA, 16 bp, synthetic construct
  misc_feature 1..16: note = synthetic [barcode part1]
  source 1..16: mol_type = other DNA
cacggacgtaacagac

SEQ ID NO: 37492 - DNA, 16 bp, synthetic construct
  misc_feature 1..16: note = synthetic [barcode part1]
  source 1..16: mol_type = other DNA
gttaccagttgccaag

SEQ ID NO: 37493 - DNA, 16 bp, synthetic construct
  misc_feature 1..16: note = synthetic [barcode part1]
  source 1..16: mol_type = other DNA
caatacagagacgact

SEQ ID NO: 37494 - DNA, 16 bp, synthetic construct
  misc_feature 1..16: note = synthetic [barcode part1]
  source 1..16: mol_type = other DNA
gaggactcaacacgtg

SEQ ID NO: 37495 - DNA, 16 bp, synthetic construct
  misc_feature 1..16: note = synthetic [barcode part1]
  source 1..16: mol_type = other DNA
aacttgcagtagaacg

SEQ ID NO: 37496 - DNA, 16 bp, synthetic construct
  misc_feature 1..16: note = synthetic [barcode part1]
  source 1..16: mol_type = other DNA
tctcaagacgagtaag

SEQ ID NO: 37497 - DNA, 16 bp, synthetic construct
  misc_feature 1..16: note = synthetic [barcode part1]
  source 1..16: mol_type = other DNA
actggaggtgtgtcag

SEQ ID NO: 37498 - DNA, 16 bp, synthetic construct
  misc_feature 1..16: note = synthetic [barcode part1]
  source 1..16: mol_type = other DNA
ttcgactcggcgtgtt

SEQ ID NO: 37499 - DNA, 16 bp, synthetic construct
  misc_feature 1..16: note = synthetic [barcode part1]
  source 1..16: mol_type = other DNA
agtctccgatcgtacc

SEQ ID NO: 37500 - DNA, 16 bp, synthetic construct
  misc_feature 1..16: note = synthetic [barcode part1]
  source 1..16: mol_type = other DNA
aggtacgttaacaacg

SEQ ID NO: 37501 - DNA, 16 bp, synthetic construct
  misc_feature 1..16: note = synthetic [barcode part1]
  source 1..16: mol_type = other DNA
ccacctggaactctgt

SEQ ID NO: 37502 - DNA, 16 bp, synthetic construct
  misc_feature 1..16: note = synthetic [barcode part1]
  source 1..16: mol_type = other DNA
tgagttgtggtgactc

SEQ ID NO: 37503 - DNA, 16 bp, synthetic construct
  misc_feature 1..16: note = synthetic [barcode part1]
  source 1..16: mol_type = other DNA
tgtctgagactcacag

SEQ ID NO: 37504 - DNA, 16 bp, synthetic construct
  misc_feature 1..16: note = synthetic [barcode part1]
  source 1..16: mol_type = other DNA
taggttatccttgcgt

SEQ ID NO: 37505 - DNA, 16 bp, synthetic construct
  misc_feature 1..16: note = synthetic [barcode part1]
  source 1..16: mol_type = other DNA
cactacaccgatcaag

SEQ ID NO: 37506 - DNA, 16 bp, synthetic construct
  misc_feature 1..16: note = synthetic [barcode part1]
  source 1..16: mol_type = other DNA
tcctcgaacgttaatc

SEQ ID NO: 37507 - DNA, 16 bp, synthetic construct
  misc_feature 1..16: note = synthetic [barcode part1]
  source 1..16: mol_type = other DNA
acttcgtgcagttgtt

SEQ ID NO: 37508 - DNA, 16 bp, synthetic construct
  misc_feature 1..16: note = synthetic [barcode part1]
  source 1..16: mol_type = other DNA
acggcaatactggcag

SEQ ID NO: 37509 - DNA, 16 bp, synthetic construct
  misc_feature 1..16: note = synthetic [barcode part1]
  source 1..16: mol_type = other DNA
tcacgagtagactcgt

SEQ ID NO: 37510 - DNA, 16 bp, synthetic construct
  misc_feature 1..16: note = synthetic [barcode part1]
  source 1..16: mol_type = other DNA
tcctgaagtggacgag

SEQ ID NO: 37511 - DNA, 16 bp, synthetic construct
  misc_feature 1..16: note = synthetic [barcode part1]
  source 1..16: mol_type = other DNA
tgcctcagtggattcc

SEQ ID NO: 37512 - DNA, 16 bp, synthetic construct
  misc_feature 1..16: note = synthetic [barcode part1]
  source 1..16: mol_type = other DNA
gtgtcttgacttggtt

SEQ ID NO: 37513 - DNA, 16 bp, synthetic construct
  misc_feature 1..16: note = synthetic [barcode part1]
  source 1..16: mol_type = other DNA
acctagatagagtgac

SEQ ID NO: 37514 - DNA, 16 bp, synthetic construct
  misc_feature 1..16: note = synthetic [barcode part1]
  source 1..16: mol_type = other DNA
gagtgcacacaagaag

SEQ ID NO: 37515 - DNA, 16 bp, synthetic construct
  misc_feature 1..16: note = synthetic [barcode part1]
  source 1..16: mol_type = other DNA
cgtatcaacgcgttag

SEQ ID NO: 37516 - DNA, 16 bp, synthetic construct
  misc_feature 1..16: note = synthetic [barcode part1]
  source 1..16: mol_type = other DNA
atctgaactgttccgt

SEQ ID NO: 37517 - DNA, 16 bp, synthetic construct
  misc_feature 1..16: note = synthetic [barcode part1]
  source 1..16: mol_type = other DNA
tacgtacgtgtacacg

SEQ ID NO: 37518 - DNA, 16 bp, synthetic construct
  misc_feature 1..16: note = synthetic [barcode part1]
  source 1..16: mol_type = other DNA
tgaccaagttgcagtc

SEQ ID NO: 37519 - DNA, 16 bp, synthetic construct
  misc_feature 1..16: note = synthetic [barcode part1]
  source 1..16: mol_type = other DNA
acggattgttatcctc

SEQ ID NO: 37520 - DNA, 16 bp, synthetic construct
  misc_feature 1..16: note = synthetic [barcode part1]
  source 1..16: mol_type = other DNA
aggcgaaggataagtc

SEQ ID NO: 37521 - DNA, 16 bp, synthetic construct
  misc_feature 1..16: note = synthetic [barcode part1]
  source 1..16: mol_type = other DNA
tcgtgaacactccacc

SEQ ID NO: 37522 - DNA, 16 bp, synthetic construct
  misc_feature 1..16: note = synthetic [barcode part1]
  source 1..16: mol_type = other DNA
tctgtgagagttcgtg

SEQ ID NO: 37523 - DNA, 16 bp, synthetic construct
  misc_feature 1..16: note = synthetic [barcode part1]
  source 1..16: mol_type = other DNA
tggcagtatcgagtct

SEQ ID NO: 37524 - DNA, 16 bp, synthetic construct
  misc_feature 1..16: note = synthetic [barcode part1]
  source 1..16: mol_type = other DNA
gttgaatcggaccact

SEQ ID NO: 37525 - DNA, 16 bp, synthetic construct
  misc_feature 1..16: note = synthetic [barcode part1]
  source 1..16: mol_type = other DNA
agacctgcctggtctt

SEQ ID NO: 37526 - DNA, 16 bp, synthetic construct
  misc_feature 1..16: note = synthetic [barcode part1]
  source 1..16: mol_type = other DNA
gacggtcttgaatcac

SEQ ID NO: 37527 - DNA, 16 bp, synthetic construct
  misc_feature 1..16: note = synthetic [barcode part1]
  source 1..16: mol_type = other DNA
cgaagacgacaacctg

SEQ ID NO: 37528 - DNA, 16 bp, synthetic construct
  misc_feature 1..16: note = synthetic [barcode part1]
  source 1..16: mol_type = other DNA
tgacagtgaggacgtc

SEQ ID NO: 37529 - DNA, 16 bp, synthetic construct
  misc_feature 1..16: note = synthetic [barcode part1]
  source 1..16: mol_type = other DNA
tggcaattcaacgacc

SEQ ID NO: 37530 - DNA, 16 bp, synthetic construct
  misc_feature 1..16: note = synthetic [barcode part1]
  source 1..16: mol_type = other DNA
taacgtgacgcaactc

SEQ ID NO: 37531 - DNA, 16 bp, synthetic construct
  misc_feature 1..16: note = synthetic [barcode part1]
  source 1..16: mol_type = other DNA
agactcttctcttccg

SEQ ID NO: 37532 - DNA, 16 bp, synthetic construct
  misc_feature 1..16: note = synthetic [barcode part1]
  source 1..16: mol_type = other DNA
acgagtctgtggactt

SEQ ID NO: 37533 - DNA, 16 bp, synthetic construct
  misc_feature 1..16: note = synthetic [barcode part1]
  source 1..16: mol_type = other DNA
gtgaaggtgtacttcc

SEQ ID NO: 37534 - DNA, 16 bp, synthetic construct
  misc_feature 1..16: note = synthetic [barcode part1]
  source 1..16: mol_type = other DNA
agttaacgtcgaccgt

SEQ ID NO: 37535 - DNA, 16 bp, synthetic construct
  misc_feature 1..16: note = synthetic [barcode part1]
  source 1..16: mol_type = other DNA
tgcaacactcaggatc

SEQ ID NO: 37536 - DNA, 16 bp, synthetic construct
  misc_feature 1..16: note = synthetic [barcode part1]
  source 1..16: mol_type = other DNA
ttgtgtgacgtcagtg

SEQ ID NO: 37537 - DNA, 16 bp, synthetic construct
  misc_feature 1..16: note = synthetic [barcode part1]
  source 1..16: mol_type = other DNA
gattacgtgtgaccac

SEQ ID NO: 37538 - DNA, 16 bp, synthetic construct
  misc_feature 1..16: note = synthetic [barcode part1]
  source 1..16: mol_type = other DNA
aataaccgtacctcct

SEQ ID NO: 37539 - DNA, 16 bp, synthetic construct
  misc_feature 1..16: note = synthetic [barcode part1]
  source 1..16: mol_type = other DNA
acaccttggtccggtt

SEQ ID NO: 37540 - DNA, 16 bp, synthetic construct
  misc_feature 1..16: note = synthetic [barcode part1]
  source 1..16: mol_type = other DNA
gtccttgcggattgtc

SEQ ID NO: 37541 - DNA, 16 bp, synthetic construct
  misc_feature 1..16: note = synthetic [barcode part1]
  source 1..16: mol_type = other DNA
tgcagacggatctact

SEQ ID NO: 37542 - DNA, 16 bp, synthetic construct
  misc_feature 1..16: note = synthetic [barcode part1]
  source 1..16: mol_type = other DNA
gcgtggtattacacac

SEQ ID NO: 37543 - DNA, 16 bp, synthetic construct
  misc_feature 1..16: note = synthetic [barcode part1]
  source 1..16: mol_type = other DNA
acgcctcgttggactt

SEQ ID NO: 37544 - DNA, 16 bp, synthetic construct
  misc_feature 1..16: note = synthetic [barcode part1]
  source 1..16: mol_type = other DNA
acttgaagacgaggtt

SEQ ID NO: 37545 - DNA, 16 bp, synthetic construct
  misc_feature 1..16: note = synthetic [barcode part1]
  source 1..16: mol_type = other DNA
acacgcctcactactg

SEQ ID NO: 37546 - DNA, 16 bp, synthetic construct
  misc_feature 1..16: note = synthetic [barcode part1]
  source 1..16: mol_type = other DNA
taattgacacgtgcgc

SEQ ID NO: 37547 - DNA, 16 bp, synthetic construct
  misc_feature 1..16: note = synthetic [barcode part1]
  source 1..16: mol_type = other DNA
tctctgataatcgcgt

SEQ ID NO: 37548 - DNA, 16 bp, synthetic construct
  misc_feature 1..16: note = synthetic [barcode part1]
  source 1..16: mol_type = other DNA
gccttatcgagagact

SEQ ID NO: 37549 - DNA, 16 bp, synthetic construct
  misc_feature 1..16: note = synthetic [barcode part1]
  source 1..16: mol_type = other DNA
cgtcttatcgcaagtt

SEQ ID NO: 37550 - DNA, 16 bp, synthetic construct
  misc_feature 1..16: note = synthetic [barcode part1]
  source 1..16: mol_type = other DNA
gtaagtccgtatcgac

SEQ ID NO: 37551 - DNA, 16 bp, synthetic construct
  misc_feature 1..16: note = synthetic [barcode part1]
  source 1..16: mol_type = other DNA
actagtaggtggcggt

SEQ ID NO: 37552 - DNA, 16 bp, synthetic construct
  misc_feature 1..16: note = synthetic [barcode part1]
  source 1..16: mol_type = other DNA
gaccgtgagagtcaac

SEQ ID NO: 37553 - DNA, 16 bp, synthetic construct
  misc_feature 1..16: note = synthetic [barcode part1]
  source 1..16: mol_type = other DNA
ttgaccaccaatcgag

SEQ ID NO: 37554 - DNA, 16 bp, synthetic construct
  misc_feature 1..16: note = synthetic [barcode part1]
  source 1..16: mol_type = other DNA
gtaactgcgatacacc

SEQ ID NO: 37555 - DNA, 16 bp, synthetic construct
  misc_feature 1..16: note = synthetic [barcode part1]
  source 1..16: mol_type = other DNA
gcaataactcgactcg

SEQ ID NO: 37556 - DNA, 16 bp, synthetic construct
  misc_feature 1..16: note = synthetic [barcode part1]
  source 1..16: mol_type = other DNA
aacaccggtcgtagtt

SEQ ID NO: 37557 - DNA, 16 bp, synthetic construct
  misc_feature 1..16: note = synthetic [barcode part1]
  source 1..16: mol_type = other DNA
tgatacgtgcaggttc

SEQ ID NO: 37558 - DNA, 16 bp, synthetic construct
  misc_feature 1..16: note = synthetic [barcode part1]
  source 1..16: mol_type = other DNA
tcagactggaggtgtg

SEQ ID NO: 37559 - DNA, 16 bp, synthetic construct
  misc_feature 1..16: note = synthetic [barcode part1]
  source 1..16: mol_type = other DNA
aataccgttccggaac

SEQ ID NO: 37560 - DNA, 16 bp, synthetic construct
  misc_feature 1..16: note = synthetic [barcode part1]
  source 1..16: mol_type = other DNA
cgcgaatctgtgaact

SEQ ID NO: 37561 - DNA, 16 bp, synthetic construct
  misc_feature 1..16: note = synthetic [barcode part1]
  source 1..16: mol_type = other DNA
tggaacctgacactgt

SEQ ID NO: 37562 - DNA, 16 bp, synthetic construct
  misc_feature 1..16: note = synthetic [barcode part1]
  source 1..16: mol_type = other DNA
agttgaccgatatcgc

SEQ ID NO: 37563 - DNA, 16 bp, synthetic construct
  misc_feature 1..16: note = synthetic [barcode part1]
  source 1..16: mol_type = other DNA
cacgccactctgattg

SEQ ID NO: 37564 - DNA, 16 bp, synthetic construct
  misc_feature 1..16: note = synthetic [barcode part1]
  source 1..16: mol_type = other DNA
aggtacctcacagact

SEQ ID NO: 37565 - DNA, 16 bp, synthetic construct
  misc_feature 1..16: note = synthetic [barcode part1]
  source 1..16: mol_type = other DNA
tccgtattggcaactt

SEQ ID NO: 37566 - DNA, 16 bp, synthetic construct
  misc_feature 1..16: note = synthetic [barcode part1]
  source 1..16: mol_type = other DNA
caggaactatcaagtg

SEQ ID NO: 37567 - DNA, 16 bp, synthetic construct
  misc_feature 1..16: note = synthetic [barcode part1]
  source 1..16: mol_type = other DNA
tctccgtcttagtaag

SEQ ID NO: 37568 - DNA, 16 bp, synthetic construct
  misc_feature 1..16: note = synthetic [barcode part1]
  source 1..16: mol_type = other DNA
tagtggtgtacgaggc

SEQ ID NO: 37569 - DNA, 16 bp, synthetic construct
  misc_feature 1..16: note = synthetic [barcode part1]
  source 1..16: mol_type = other DNA
atatagtcgaccacgc

SEQ ID NO: 37570 - DNA, 16 bp, synthetic construct
  misc_feature 1..16: note = synthetic [barcode part1]
  source 1..16: mol_type = other DNA
aacggtcactatcggt

SEQ ID NO: 37571 - DNA, 16 bp, synthetic construct
  misc_feature 1..16: note = synthetic [barcode part1]
  source 1..16: mol_type = other DNA
acgtggatatcaggcg

SEQ ID NO: 37572 - DNA, 16 bp, synthetic construct
  misc_feature 1..16: note = synthetic [barcode part1]
  source 1..16: mol_type = other DNA
gcgaagtgtggattcg

SEQ ID NO: 37573 - DNA, 16 bp, synthetic construct
  misc_feature 1..16: note = synthetic [barcode part1]
  source 1..16: mol_type = other DNA
ccggactagaagtacg

SEQ ID NO: 37574 - DNA, 16 bp, synthetic construct
  misc_feature 1..16: note = synthetic [barcode part1]
  source 1..16: mol_type = other DNA
atacgcactggtcaac

SEQ ID NO: 37575 - DNA, 16 bp, synthetic construct
  misc_feature 1..16: note = synthetic [barcode part1]
  source 1..16: mol_type = other DNA
atcgcaacaagtagac

SEQ ID NO: 37576 - DNA, 16 bp, synthetic construct
  misc_feature 1..16: note = synthetic [barcode part1]
  source 1..16: mol_type = other DNA
gcgttccactatcggt

SEQ ID NO: 37577 - DNA, 16 bp, synthetic construct
  misc_feature 1..16: note = synthetic [barcode part1]
  source 1..16: mol_type = other DNA
atactggacgcagttc

SEQ ID NO: 37578 - DNA, 16 bp, synthetic construct
  misc_feature 1..16: note = synthetic [barcode part1]
  source 1..16: mol_type = other DNA
tgatcgacgatactgc

SEQ ID NO: 37579 - DNA, 16 bp, synthetic construct
  misc_feature 1..16: note = synthetic [barcode part1]
  source 1..16: mol_type = other DNA
ccgtaattgtgtgcag

SEQ ID NO: 37580 - DNA, 16 bp, synthetic construct
  misc_feature 1..16: note = synthetic [barcode part1]
  source 1..16: mol_type = other DNA
caaggaggtaccagtc

SEQ ID NO: 37581 - DNA, 16 bp, synthetic construct
  misc_feature 1..16: note = synthetic [barcode part1]
  source 1..16: mol_type = other DNA
ttctagtgagacggtc

SEQ ID NO: 37582 - DNA, 16 bp, synthetic construct
  misc_feature 1..16: note = synthetic [barcode part1]
  source 1..16: mol_type = other DNA
aacggaacgacgaagt

SEQ ID NO: 37583 - DNA, 16 bp, synthetic construct
  misc_feature 1..16: note = synthetic [barcode part1]
  source 1..16: mol_type = other DNA
gatacaacctacaccg

SEQ ID NO: 37584 - DNA, 16 bp, synthetic construct
  misc_feature 1..16: note = synthetic [barcode part1]
  source 1..16: mol_type = other DNA
aagtgcctctatcact

SEQ ID NO: 37585 - DNA, 16 bp, synthetic construct
  misc_feature 1..16: note = synthetic [barcode part1]
  source 1..16: mol_type = other DNA
aacagttcgacggtct

SEQ ID NO: 37586 - DNA, 16 bp, synthetic construct
  misc_feature 1..16: note = synthetic [barcode part1]
  source 1..16: mol_type = other DNA
cgacctcaccagtact

SEQ ID NO: 37587 - DNA, 16 bp, synthetic construct
  misc_feature 1..16: note = synthetic [barcode part1]
  source 1..16: mol_type = other DNA
cacctgtgttcacttc

SEQ ID NO: 37588 - DNA, 16 bp, synthetic construct
  misc_feature 1..16: note = synthetic [barcode part1]
  source 1..16: mol_type = other DNA
tcgatctccaccactt

SEQ ID NO: 37589 - DNA, 16 bp, synthetic construct
  misc_feature 1..16: note = synthetic [barcode part1]
  source 1..16: mol_type = other DNA
aggtcgataatcgtag

SEQ ID NO: 37590 - DNA, 16 bp, synthetic construct
  misc_feature 1..16: note = synthetic [barcode part1]
  source 1..16: mol_type = other DNA
acggtatctctaggac

SEQ ID NO: 37591 - DNA, 16 bp, synthetic construct
  misc_feature 1..16: note = synthetic [barcode part1]
  source 1..16: mol_type = other DNA
agttcctccttcggtt

SEQ ID NO: 37592 - DNA, 16 bp, synthetic construct
  misc_feature 1..16: note = synthetic [barcode part1]
  source 1..16: mol_type = other DNA
ttaactcacaaccacc

SEQ ID NO: 37593 - DNA, 16 bp, synthetic construct
  misc_feature 1..16: note = synthetic [barcode part1]
  source 1..16: mol_type = other DNA
gagatccgataccgtt

SEQ ID NO: 37594 - DNA, 16 bp, synthetic construct
  misc_feature 1..16: note = synthetic [barcode part1]
  source 1..16: mol_type = other DNA
gtctcgccttacgagt

SEQ ID NO: 37595 - DNA, 16 bp, synthetic construct
  misc_feature 1..16: note = synthetic [barcode part1]
  source 1..16: mol_type = other DNA
cgagaccgttatagtc

SEQ ID NO: 37596 - DNA, 16 bp, synthetic construct
  misc_feature 1..16: note = synthetic [barcode part1]
  source 1..16: mol_type = other DNA
aactcaacgcaagagt

SEQ ID NO: 37597 - DNA, 16 bp, synthetic construct
  misc_feature 1..16: note = synthetic [barcode part1]
  source 1..16: mol_type = other DNA
tcgtagagtcttctac

SEQ ID NO: 37598 - DNA, 16 bp, synthetic construct
  misc_feature 1..16: note = synthetic [barcode part1]
  source 1..16: mol_type = other DNA
ttatctgcgccgtgac

SEQ ID NO: 37599 - DNA, 16 bp, synthetic construct
  misc_feature 1..16: note = synthetic [barcode part1]
  source 1..16: mol_type = other DNA
ccttcgtgaattatcg

SEQ ID NO: 37600 - DNA, 16 bp, synthetic construct
  misc_feature 1..16: note = synthetic [barcode part1]
  source 1..16: mol_type = other DNA
tacttaccaccacggc

SEQ ID NO: 37601 - DNA, 16 bp, synthetic construct
  misc_feature 1..16: note = synthetic [barcode part1]
  source 1..16: mol_type = other DNA
atccgtagtgtgactg

SEQ ID NO: 37602 - DNA, 16 bp, synthetic construct
  misc_feature 1..16: note = synthetic [barcode part1]
  source 1..16: mol_type = other DNA
tcaattctccgcaggc

SEQ ID NO: 37603 - DNA, 16 bp, synthetic construct
  misc_feature 1..16: note = synthetic [barcode part1]
  source 1..16: mol_type = other DNA
atacagaacgactcag

SEQ ID NO: 37604 - DNA, 16 bp, synthetic construct
  misc_feature 1..16: note = synthetic [barcode part1]
  source 1..16: mol_type = other DNA
tacaccagactaagag

SEQ ID NO: 37605 - DNA, 16 bp, synthetic construct
  misc_feature 1..16: note = synthetic [barcode part1]
  source 1..16: mol_type = other DNA
gtagtggcaggttcag

SEQ ID NO: 37606 - DNA, 16 bp, synthetic construct
  misc_feature 1..16: note = synthetic [barcode part1]
  source 1..16: mol_type = other DNA
aacacacgaggaattc

SEQ ID NO: 37607 - DNA, 16 bp, synthetic construct
  misc_feature 1..16: note = synthetic [barcode part1]
  source 1..16: mol_type = other DNA
cgcaataggtattgcc

SEQ ID NO: 37608 - DNA, 16 bp, synthetic construct
  misc_feature 1..16: note = synthetic [barcode part1]
  source 1..16: mol_type = other DNA
gattcaggtacaagac

SEQ ID NO: 37609 - DNA, 16 bp, synthetic construct
  misc_feature 1..16: note = synthetic [barcode part1]
  source 1..16: mol_type = other DNA
ccgtagaacctctcgt

SEQ ID NO: 37610 - DNA, 16 bp, synthetic construct
  misc_feature 1..16: note = synthetic [barcode part1]
  source 1..16: mol_type = other DNA
ttagtagaggtgcagt

SEQ ID NO: 37611 - DNA, 16 bp, synthetic construct
  misc_feature 1..16: note = synthetic [barcode part1]
  source 1..16: mol_type = other DNA
ccgttgttgagtattc

SEQ ID NO: 37612 - DNA, 16 bp, synthetic construct
  misc_feature 1..16: note = synthetic [barcode part1]
  source 1..16: mol_type = other DNA
gtgtgtgcgtatacgt

SEQ ID NO: 37613 - DNA, 16 bp, synthetic construct
  misc_feature 1..16: note = synthetic [barcode part1]
  source 1..16: mol_type = other DNA
actctatacgaccgcc

SEQ ID NO: 37614 - DNA, 16 bp, synthetic construct
  misc_feature 1..16: note = synthetic [barcode part1]
  source 1..16: mol_type = other DNA
agtgatcctaggtcac

SEQ ID NO: 37615 - DNA, 16 bp, synthetic construct
  misc_feature 1..16: note = synthetic [barcode part1]
  source 1..16: mol_type = other DNA
tctgtcgttagtgcgc

SEQ ID NO: 37616 - DNA, 16 bp, synthetic construct
  misc_feature 1..16: note = synthetic [barcode part1]
  source 1..16: mol_type = other DNA
agactacggcaatctc

SEQ ID NO: 37617 - DNA, 16 bp, synthetic construct
  misc_feature 1..16: note = synthetic [barcode part1]
  source 1..16: mol_type = other DNA
atccaaggcaatagac

SEQ ID NO: 37618 - DNA, 16 bp, synthetic construct
  misc_feature 1..16: note = synthetic [barcode part1]
  source 1..16: mol_type = other DNA
gagacaggaacttgcc

SEQ ID NO: 37619 - DNA, 16 bp, synthetic construct
  misc_feature 1..16: note = synthetic [barcode part1]
  source 1..16: mol_type = other DNA
gtattctctaggccgc

SEQ ID NO: 37620 - DNA, 16 bp, synthetic construct
  misc_feature 1..16: note = synthetic [barcode part1]
  source 1..16: mol_type = other DNA
tgtgacaaggttccac

SEQ ID NO: 37621 - DNA, 16 bp, synthetic construct
  misc_feature 1..16: note = synthetic [barcode part1]
  source 1..16: mol_type = other DNA
taccgaatcgcgttcc

SEQ ID NO: 37622 - DNA, 16 bp, synthetic construct
  misc_feature 1..16: note = synthetic [barcode part1]
  source 1..16: mol_type = other DNA
actggcaactcggatt

SEQ ID NO: 37623 - DNA, 16 bp, synthetic construct
  misc_feature 1..16: note = synthetic [barcode part1]
  source 1..16: mol_type = other DNA
aaggcagttcgttgtc

SEQ ID NO: 37624 - DNA, 16 bp, synthetic construct
  misc_feature 1..16: note = synthetic [barcode part1]
  source 1..16: mol_type = other DNA
caacacactccactgc

SEQ ID NO: 37625 - DNA, 16 bp, synthetic construct
  misc_feature 1..16: note = synthetic [barcode part1]
  source 1..16: mol_type = other DNA
ttctgttcgaacgttg

SEQ ID NO: 37626 - DNA, 16 bp, synthetic construct
  misc_feature 1..16: note = synthetic [barcode part1]
  source 1..16: mol_type = other DNA
aacagagaatcgcact

SEQ ID NO: 37627 - DNA, 16 bp, synthetic construct
  misc_feature 1..16: note = synthetic [barcode part1]
  source 1..16: mol_type = other DNA
taccgcgacgttatag

SEQ ID NO: 37628 - DNA, 16 bp, synthetic construct
  misc_feature 1..16: note = synthetic [barcode part1]
  source 1..16: mol_type = other DNA
gcctgacttctacgtg

SEQ ID NO: 37629 - DNA, 16 bp, synthetic construct
  misc_feature 1..16: note = synthetic [barcode part1]
  source 1..16: mol_type = other DNA
actagtctcgatcgag

SEQ ID NO: 37630 - DNA, 16 bp, synthetic construct
  misc_feature 1..16: note = synthetic [barcode part1]
  source 1..16: mol_type = other DNA
gaacctaacctaggtc

SEQ ID NO: 37631 - DNA, 16 bp, synthetic construct
  misc_feature 1..16: note = synthetic [barcode part1]
  source 1..16: mol_type = other DNA
atccttagtagaggcc

SEQ ID NO: 37632 - DNA, 16 bp, synthetic construct
  misc_feature 1..16: note = synthetic [barcode part1]
  source 1..16: mol_type = other DNA
tcggattagaggcgtg

SEQ ID NO: 37633 - DNA, 16 bp, synthetic construct
  misc_feature 1..16: note = synthetic [barcode part1]
  source 1..16: mol_type = other DNA
agtcagtaaccgatcc

SEQ ID NO: 37634 - DNA, 16 bp, synthetic construct
  misc_feature 1..16: note = synthetic [barcode part1]
  source 1..16: mol_type = other DNA
tcgcgaatctaatcct

SEQ ID NO: 37635 - DNA, 16 bp, synthetic construct
  misc_feature 1..16: note = synthetic [barcode part1]
  source 1..16: mol_type = other DNA
cggtaacgacctagtt

SEQ ID NO: 37636 - DNA, 16 bp, synthetic construct
  misc_feature 1..16: note = synthetic [barcode part1]
  source 1..16: mol_type = other DNA
acaaggcagatccgtg

SEQ ID NO: 37637 - DNA, 16 bp, synthetic construct
  misc_feature 1..16: note = synthetic [barcode part1]
  source 1..16: mol_type = other DNA
tgttcttatcgtcgag

SEQ ID NO: 37638 - DNA, 16 bp, synthetic construct
  misc_feature 1..16: note = synthetic [barcode part1]
  source 1..16: mol_type = other DNA
agtagtaagatccacg

SEQ ID NO: 37639 - DNA, 16 bp, synthetic construct
  misc_feature 1..16: note = synthetic [barcode part1]
  source 1..16: mol_type = other DNA
gtatccagacgagacg

SEQ ID NO: 37640 - DNA, 16 bp, synthetic construct
  misc_feature 1..16: note = synthetic [barcode part1]
  source 1..16: mol_type = other DNA
actcacaggagtggtg

SEQ ID NO: 37641 - DNA, 16 bp, synthetic construct
  misc_feature 1..16: note = synthetic [barcode part1]
  source 1..16: mol_type = other DNA
cgtgagacggtctaag

SEQ ID NO: 37642 - DNA, 16 bp, synthetic construct
  misc_feature 1..16: note = synthetic [barcode part1]
  source 1..16: mol_type = other DNA
tatacctatccaacgc

SEQ ID NO: 37643 - DNA, 16 bp, synthetic construct
  misc_feature 1..16: note = synthetic [barcode part1]
  source 1..16: mol_type = other DNA
actgatatcaccgtct

SEQ ID NO: 37644 - DNA, 16 bp, synthetic construct
  misc_feature 1..16: note = synthetic [barcode part1]
  source 1..16: mol_type = other DNA
ttccagaggataggcg

SEQ ID NO: 37645 - DNA, 16 bp, synthetic construct
  misc_feature 1..16: note = synthetic [barcode part1]
  source 1..16: mol_type = other DNA
tactgaggcctaacac

SEQ ID NO: 37646 - DNA, 16 bp, synthetic construct
  misc_feature 1..16: note = synthetic [barcode part1]
  source 1..16: mol_type = other DNA
gttaggtaatacggac

SEQ ID NO: 37647 - DNA, 16 bp, synthetic construct
  misc_feature 1..16: note = synthetic [barcode part1]
  source 1..16: mol_type = other DNA
attgcactgcggattg

SEQ ID NO: 37648 - DNA, 16 bp, synthetic construct
  misc_feature 1..16: note = synthetic [barcode part1]
  source 1..16: mol_type = other DNA
tacgtaactgttgcct

SEQ ID NO: 37649 - DNA, 16 bp, synthetic construct
  misc_feature 1..16: note = synthetic [barcode part1]
  source 1..16: mol_type = other DNA
gttaggtgcctctgtc

SEQ ID NO: 37650 - DNA, 16 bp, synthetic construct
  misc_feature 1..16: note = synthetic [barcode part1]
  source 1..16: mol_type = other DNA
tgtcgccacggttact

SEQ ID NO: 37651 - DNA, 16 bp, synthetic construct
  misc_feature 1..16: note = synthetic [barcode part1]
  source 1..16: mol_type = other DNA
tctgaacttactaccg

SEQ ID NO: 37652 - DNA, 16 bp, synthetic construct
  misc_feature 1..16: note = synthetic [barcode part1]
  source 1..16: mol_type = other DNA
aggatcgacacttaag

SEQ ID NO: 37653 - DNA, 16 bp, synthetic construct
  misc_feature 1..16: note = synthetic [barcode part1]
  source 1..16: mol_type = other DNA
ttggaactatccgttc

SEQ ID NO: 37654 - DNA, 16 bp, synthetic construct
  misc_feature 1..16: note = synthetic [barcode part1]
  source 1..16: mol_type = other DNA
gcacgtaatcgcagtt

SEQ ID NO: 37655 - DNA, 16 bp, synthetic construct
  misc_feature 1..16: note = synthetic [barcode part1]
  source 1..16: mol_type = other DNA
tcgcaaggcctagatt

SEQ ID NO: 37656 - DNA, 16 bp, synthetic construct
  misc_feature 1..16: note = synthetic [barcode part1]
  source 1..16: mol_type = other DNA
gtactcagtctgcaag

SEQ ID NO: 37657 - DNA, 16 bp, synthetic construct
  misc_feature 1..16: note = synthetic [barcode part1]
  source 1..16: mol_type = other DNA
cctgacttgactacgc

SEQ ID NO: 37658 - DNA, 16 bp, synthetic construct
  misc_feature 1..16: note = synthetic [barcode part1]
  source 1..16: mol_type = other DNA
gcactcgtctatcgtg

SEQ ID NO: 37659 - DNA, 16 bp, synthetic construct
  misc_feature 1..16: note = synthetic [barcode part1]
  source 1..16: mol_type = other DNA
tagaacagtggccacg

SEQ ID NO: 37660 - DNA, 16 bp, synthetic construct
  misc_feature 1..16: note = synthetic [barcode part1]
  source 1..16: mol_type = other DNA
cctacaagtggatctg

SEQ ID NO: 37661 - DNA, 16 bp, synthetic construct
  misc_feature 1..16: note = synthetic [barcode part1]
  source 1..16: mol_type = other DNA
gccgtaataaggcctt

SEQ ID NO: 37662 - DNA, 16 bp, synthetic construct
  misc_feature 1..16: note = synthetic [barcode part1]
  source 1..16: mol_type = other DNA
gttcaacagaagtacg

SEQ ID NO: 37663 - DNA, 16 bp, synthetic construct
  misc_feature 1..16: note = synthetic [barcode part1]
  source 1..16: mol_type = other DNA
taccgcgttctagaag

SEQ ID NO: 37664 - DNA, 16 bp, synthetic construct
  misc_feature 1..16: note = synthetic [barcode part1]
  source 1..16: mol_type = other DNA
ttatctgtcgttcgcc

SEQ ID NO: 37665 - DNA, 16 bp, synthetic construct
  misc_feature 1..16: note = synthetic [barcode part1]
  source 1..16: mol_type = other DNA
gtgtctcggtcgttac

SEQ ID NO: 37666 - DNA, 16 bp, synthetic construct
  misc_feature 1..16: note = synthetic [barcode part1]
  source 1..16: mol_type = other DNA
agttcttcctcactgc

SEQ ID NO: 37667 - DNA, 16 bp, synthetic construct
  misc_feature 1..16: note = synthetic [barcode part1]
  source 1..16: mol_type = other DNA
aggaagttcgtacagt

SEQ ID NO: 37668 - DNA, 16 bp, synthetic construct
  misc_feature 1..16: note = synthetic [barcode part1]
  source 1..16: mol_type = other DNA
atcacttgtgagttcc

SEQ ID NO: 37669 - DNA, 16 bp, synthetic construct
  misc_feature 1..16: note = synthetic [barcode part1]
  source 1..16: mol_type = other DNA
aatcaattgcgcacgc

SEQ ID NO: 37670 - DNA, 16 bp, synthetic construct
  misc_feature 1..16: note = synthetic [barcode part1]
  source 1..16: mol_type = other DNA
gagaaccaattctccg

SEQ ID NO: 37671 - DNA, 16 bp, synthetic construct
  misc_feature 1..16: note = synthetic [barcode part1]
  source 1..16: mol_type = other DNA
acggcggttgtacaag

SEQ ID NO: 37672 - DNA, 16 bp, synthetic construct
  misc_feature 1..16: note = synthetic [barcode part1]
  source 1..16: mol_type = other DNA
atctacgtgtggatcg

SEQ ID NO: 37673 - DNA, 16 bp, synthetic construct
  misc_feature 1..16: note = synthetic [barcode part1]
  source 1..16: mol_type = other DNA
aatagttcgtggagac

SEQ ID NO: 37674 - DNA, 16 bp, synthetic construct
  misc_feature 1..16: note = synthetic [barcode part1]
  source 1..16: mol_type = other DNA
agttctccgcagacct

SEQ ID NO: 37675 - DNA, 16 bp, synthetic construct
  misc_feature 1..16: note = synthetic [barcode part1]
  source 1..16: mol_type = other DNA
gacacgcgattgagac

SEQ ID NO: 37676 - DNA, 16 bp, synthetic construct
  misc_feature 1..16: note = synthetic [barcode part1]
  source 1..16: mol_type = other DNA
aatcaagtcgcacaag

SEQ ID NO: 37677 - DNA, 16 bp, synthetic construct
  misc_feature 1..16: note = synthetic [barcode part1]
  source 1..16: mol_type = other DNA
gtgcaacctccgactt

SEQ ID NO: 37678 - DNA, 16 bp, synthetic construct
  misc_feature 1..16: note = synthetic [barcode part1]
  source 1..16: mol_type = other DNA
acttactggtatcgtc

SEQ ID NO: 37679 - DNA, 16 bp, synthetic construct
  misc_feature 1..16: note = synthetic [barcode part1]
  source 1..16: mol_type = other DNA
tcagtccacagttatc

SEQ ID NO: 37680 - DNA, 16 bp, synthetic construct
  misc_feature 1..16: note = synthetic [barcode part1]
  source 1..16: mol_type = other DNA
attcaggtcacgaacc

SEQ ID NO: 37681 - DNA, 16 bp, synthetic construct
  misc_feature 1..16: note = synthetic [barcode part1]
  source 1..16: mol_type = other DNA
gactcaatcctgtgcc

SEQ ID NO: 37682 - DNA, 16 bp, synthetic construct
  misc_feature 1..16: note = synthetic [barcode part1]
  source 1..16: mol_type = other DNA
gccgaactatcctcac

SEQ ID NO: 37683 - DNA, 16 bp, synthetic construct
  misc_feature 1..16: note = synthetic [barcode part1]
  source 1..16: mol_type = other DNA
acaacaatcacacgag

SEQ ID NO: 37684 - DNA, 16 bp, synthetic construct
  misc_feature 1..16: note = synthetic [barcode part1]
  source 1..16: mol_type = other DNA
ttgttggtggttcgag

SEQ ID NO: 37685 - DNA, 16 bp, synthetic construct
  misc_feature 1..16: note = synthetic [barcode part1]
  source 1..16: mol_type = other DNA
aaccgcgatataccac

SEQ ID NO: 37686 - DNA, 16 bp, synthetic construct
  misc_feature 1..16: note = synthetic [barcode part1]
  source 1..16: mol_type = other DNA
actattcagacgacgc

SEQ ID NO: 37687 - DNA, 16 bp, synthetic construct
  misc_feature 1..16: note = synthetic [barcode part1]
  source 1..16: mol_type = other DNA
attcggtagaggtgcg

SEQ ID NO: 37688 - DNA, 16 bp, synthetic construct
  misc_feature 1..16: note = synthetic [barcode part1]
  source 1..16: mol_type = other DNA
gattctcgcgtaatct

SEQ ID NO: 37689 - DNA, 16 bp, synthetic construct
  misc_feature 1..16: note = synthetic [barcode part1]
  source 1..16: mol_type = other DNA
ccaacaacacttccgc

SEQ ID NO: 37690 - DNA, 16 bp, synthetic construct
  misc_feature 1..16: note = synthetic [barcode part1]
  source 1..16: mol_type = other DNA
gcaccgattcctgatc

SEQ ID NO: 37691 - DNA, 16 bp, synthetic construct
  misc_feature 1..16: note = synthetic [barcode part1]
  source 1..16: mol_type = other DNA
accaccgaatcgttag

SEQ ID NO: 37692 - DNA, 16 bp, synthetic construct
  misc_feature 1..16: note = synthetic [barcode part1]
  source 1..16: mol_type = other DNA
tatcgttcgaggaacc

SEQ ID NO: 37693 - DNA, 16 bp, synthetic construct
  misc_feature 1..16: note = synthetic [barcode part1]
  source 1..16: mol_type = other DNA
tagattggcactcctt

SEQ ID NO: 37694 - DNA, 16 bp, synthetic construct
  misc_feature 1..16: note = synthetic [barcode part1]
  source 1..16: mol_type = other DNA
gtaggtggataccacg

SEQ ID NO: 37695 - DNA, 16 bp, synthetic construct
  misc_feature 1..16: note = synthetic [barcode part1]
  source 1..16: mol_type = other DNA
tggtgtaaggagttac

SEQ ID NO: 37696 - DNA, 16 bp, synthetic construct
  misc_feature 1..16: note = synthetic [barcode part1]
  source 1..16: mol_type = other DNA
gcctacctattcacct

SEQ ID NO: 37697 - DNA, 16 bp, synthetic construct
  misc_feature 1..16: note = synthetic [barcode part1]
  source 1..16: mol_type = other DNA
ataccttctaagtcgc

SEQ ID NO: 37698 - DNA, 16 bp, synthetic construct
  misc_feature 1..16: note = synthetic [barcode part1]
  source 1..16: mol_type = other DNA
aactgtgacacgttgc

SEQ ID NO: 37699 - DNA, 16 bp, synthetic construct
  misc_feature 1..16: note = synthetic [barcode part1]
  source 1..16: mol_type = other DNA
tccgtctcgagatctg

SEQ ID NO: 37700 - DNA, 16 bp, synthetic construct
  misc_feature 1..16: note = synthetic [barcode part1]
  source 1..16: mol_type = other DNA
gtaacaattcgcagag

SEQ ID NO: 37701 - DNA, 16 bp, synthetic construct
  misc_feature 1..16: note = synthetic [barcode part1]
  source 1..16: mol_type = other DNA
tcgcaaggagttaagt

SEQ ID NO: 37702 - DNA, 16 bp, synthetic construct
  misc_feature 1..16: note = synthetic [barcode part1]
  source 1..16: mol_type = other DNA
gtctgataactgccag

SEQ ID NO: 37703 - DNA, 16 bp, synthetic construct
  misc_feature 1..16: note = synthetic [barcode part1]
  source 1..16: mol_type = other DNA
gcggagaccttatact

SEQ ID NO: 37704 - DNA, 16 bp, synthetic construct
  misc_feature 1..16: note = synthetic [barcode part1]
  source 1..16: mol_type = other DNA
cgttcacggtgttgtc

SEQ ID NO: 37705 - DNA, 16 bp, synthetic construct
  misc_feature 1..16: note = synthetic [barcode part1]
  source 1..16: mol_type = other DNA
taggaatcttggtgag

SEQ ID NO: 37706 - DNA, 16 bp, synthetic construct
  misc_feature 1..16: note = synthetic [barcode part1]
  source 1..16: mol_type = other DNA
gaccgcagagactaac

SEQ ID NO: 37707 - DNA, 16 bp, synthetic construct
  misc_feature 1..16: note = synthetic [barcode part1]
  source 1..16: mol_type = other DNA
attctggaggatctcg

SEQ ID NO: 37708 - DNA, 16 bp, synthetic construct
  misc_feature 1..16: note = synthetic [barcode part1]
  source 1..16: mol_type = other DNA
aaggacgtagagacac

SEQ ID NO: 37709 - DNA, 16 bp, synthetic construct
  misc_feature 1..16: note = synthetic [barcode part1]
  source 1..16: mol_type = other DNA
tactcgagaggcaacg

SEQ ID NO: 37710 - DNA, 16 bp, synthetic construct
  misc_feature 1..16: note = synthetic [barcode part1]
  source 1..16: mol_type = other DNA
cgtcgagtaagaacgc

SEQ ID NO: 37711 - DNA, 16 bp, synthetic construct
  misc_feature 1..16: note = synthetic [barcode part1]
  source 1..16: mol_type = other DNA
taggttgaccaccaac

SEQ ID NO: 37712 - DNA, 16 bp, synthetic construct
  misc_feature 1..16: note = synthetic [barcode part1]
  source 1..16: mol_type = other DNA
tccacgcctaacaatt

SEQ ID NO: 37713 - DNA, 16 bp, synthetic construct
  misc_feature 1..16: note = synthetic [barcode part1]
  source 1..16: mol_type = other DNA
tgttgcacacaacgtg

SEQ ID NO: 37714 - DNA, 16 bp, synthetic construct
  misc_feature 1..16: note = synthetic [barcode part1]
  source 1..16: mol_type = other DNA
tgtcgaatcgcgtctc

SEQ ID NO: 37715 - DNA, 16 bp, synthetic construct
  misc_feature 1..16: note = synthetic [barcode part1]
  source 1..16: mol_type = other DNA
tccgttctccagagtg

SEQ ID NO: 37716 - DNA, 16 bp, synthetic construct
  misc_feature 1..16: note = synthetic [barcode part1]
  source 1..16: mol_type = other DNA
atactccggcctggtt

SEQ ID NO: 37717 - DNA, 16 bp, synthetic construct
  misc_feature 1..16: note = synthetic [barcode part1]
  source 1..16: mol_type = other DNA
gatcgttgcagagacg

SEQ ID NO: 37718 - DNA, 16 bp, synthetic construct
  misc_feature 1..16: note = synthetic [barcode part1]
  source 1..16: mol_type = other DNA
tgcgtgatccggtctt

SEQ ID NO: 37719 - DNA, 16 bp, synthetic construct
  misc_feature 1..16: note = synthetic [barcode part1]
  source 1..16: mol_type = other DNA
tatccgttgccgcagt

SEQ ID NO: 37720 - DNA, 16 bp, synthetic construct
  misc_feature 1..16: note = synthetic [barcode part1]
  source 1..16: mol_type = other DNA
gtaaggactggaccgt

SEQ ID NO: 37721 - DNA, 16 bp, synthetic construct
  misc_feature 1..16: note = synthetic [barcode part1]
  source 1..16: mol_type = other DNA
cgagattggaatctcc

SEQ ID NO: 37722 - DNA, 16 bp, synthetic construct
  misc_feature 1..16: note = synthetic [barcode part1]
  source 1..16: mol_type = other DNA
aagtgcgattgccgag

SEQ ID NO: 37723 - DNA, 16 bp, synthetic construct
  misc_feature 1..16: note = synthetic [barcode part1]
  source 1..16: mol_type = other DNA
accacagtaggactct

SEQ ID NO: 37724 - DNA, 16 bp, synthetic construct
  misc_feature 1..16: note = synthetic [barcode part1]
  source 1..16: mol_type = other DNA
gtcgtggtgaataggc

SEQ ID NO: 37725 - DNA, 16 bp, synthetic construct
  misc_feature 1..16: note = synthetic [barcode part1]
  source 1..16: mol_type = other DNA
ttacgtcgccttcact

SEQ ID NO: 37726 - DNA, 16 bp, synthetic construct
  misc_feature 1..16: note = synthetic [barcode part1]
  source 1..16: mol_type = other DNA
tggcgcgagaacaact

SEQ ID NO: 37727 - DNA, 16 bp, synthetic construct
  misc_feature 1..16: note = synthetic [barcode part1]
  source 1..16: mol_type = other DNA
gatcctataccgcaag

SEQ ID NO: 37728 - DNA, 16 bp, synthetic construct
  misc_feature 1..16: note = synthetic [barcode part1]
  source 1..16: mol_type = other DNA
cagtagttacaggaac

SEQ ID NO: 37729 - DNA, 16 bp, synthetic construct
  misc_feature 1..16: note = synthetic [barcode part1]
  source 1..16: mol_type = other DNA
gtcacttagactcact

SEQ ID NO: 37730 - DNA, 16 bp, synthetic construct
  misc_feature 1..16: note = synthetic [barcode part1]
  source 1..16: mol_type = other DNA
gatcgtattggtcttc

SEQ ID NO: 37731 - DNA, 16 bp, synthetic construct
  misc_feature 1..16: note = synthetic [barcode part1]
  source 1..16: mol_type = other DNA
ccaggtaggtaggact

SEQ ID NO: 37732 - DNA, 16 bp, synthetic construct
  misc_feature 1..16: note = synthetic [barcode part1]
  source 1..16: mol_type = other DNA
tcgccttgtataatcg

SEQ ID NO: 37733 - DNA, 16 bp, synthetic construct
  misc_feature 1..16: note = synthetic [barcode part1]
  source 1..16: mol_type = other DNA
acgtacaccagttgac

SEQ ID NO: 37734 - DNA, 16 bp, synthetic construct
  misc_feature 1..16: note = synthetic [barcode part1]
  source 1..16: mol_type = other DNA
tccgaattgtctcgcg

SEQ ID NO: 37735 - DNA, 16 bp, synthetic construct
  misc_feature 1..16: note = synthetic [barcode part1]
  source 1..16: mol_type = other DNA
cacctcagatacttac

SEQ ID NO: 37736 - DNA, 16 bp, synthetic construct
  misc_feature 1..16: note = synthetic [barcode part1]
  source 1..16: mol_type = other DNA
acgcgacgaagagttc

SEQ ID NO: 37737 - DNA, 16 bp, synthetic construct
  misc_feature 1..16: note = synthetic [barcode part1]
  source 1..16: mol_type = other DNA
gaaggaacttctcctg

SEQ ID NO: 37738 - DNA, 16 bp, synthetic construct
  misc_feature 1..16: note = synthetic [barcode part1]
  source 1..16: mol_type = other DNA
attcgaaccgttctgt

SEQ ID NO: 37739 - DNA, 16 bp, synthetic construct
  misc_feature 1..16: note = synthetic [barcode part1]
  source 1..16: mol_type = other DNA
cctggaaggtcaactt

SEQ ID NO: 37740 - DNA, 16 bp, synthetic construct
  misc_feature 1..16: note = synthetic [barcode part1]
  source 1..16: mol_type = other DNA
tgttcgttgtctgcct

SEQ ID NO: 37741 - DNA, 16 bp, synthetic construct
  misc_feature 1..16: note = synthetic [barcode part1]
  source 1..16: mol_type = other DNA
atatccgaggtctacg

SEQ ID NO: 37742 - DNA, 16 bp, synthetic construct
  misc_feature 1..16: note = synthetic [barcode part1]
  source 1..16: mol_type = other DNA
attggacaggcgtgac

SEQ ID NO: 37743 - DNA, 16 bp, synthetic construct
  misc_feature 1..16: note = synthetic [barcode part1]
  source 1..16: mol_type = other DNA
tcactagtggtagtcg

SEQ ID NO: 37744 - DNA, 16 bp, synthetic construct
  misc_feature 1..16: note = synthetic [barcode part1]
  source 1..16: mol_type = other DNA
agacggaacctatctc

SEQ ID NO: 37745 - DNA, 16 bp, synthetic construct
  misc_feature 1..16: note = synthetic [barcode part1]
  source 1..16: mol_type = other DNA
gccgtctatagatctt

SEQ ID NO: 37746 - DNA, 16 bp, synthetic construct
  misc_feature 1..16: note = synthetic [barcode part1]
  source 1..16: mol_type = other DNA
cctaagtcacttcgcg

SEQ ID NO: 37747 - DNA, 16 bp, synthetic construct
  misc_feature 1..16: note = synthetic [barcode part1]
  source 1..16: mol_type = other DNA
ccttataccaacagtc

SEQ ID NO: 37748 - DNA, 16 bp, synthetic construct
  misc_feature 1..16: note = synthetic [barcode part1]
  source 1..16: mol_type = other DNA
ccaactatcctggaag

SEQ ID NO: 37749 - DNA, 16 bp, synthetic construct
  misc_feature 1..16: note = synthetic [barcode part1]
  source 1..16: mol_type = other DNA
gatcactggactatcg

SEQ ID NO: 37750 - DNA, 16 bp, synthetic construct
  misc_feature 1..16: note = synthetic [barcode part1]
  source 1..16: mol_type = other DNA
ttcggcctggtacgtt

SEQ ID NO: 37751 - DNA, 16 bp, synthetic construct
  misc_feature 1..16: note = synthetic [barcode part1]
  source 1..16: mol_type = other DNA
gagatcttgagactcc

SEQ ID NO: 37752 - DNA, 16 bp, synthetic construct
  misc_feature 1..16: note = synthetic [barcode part1]
  source 1..16: mol_type = other DNA
gtactgaccaatacgc

SEQ ID NO: 37753 - DNA, 16 bp, synthetic construct
  misc_feature 1..16: note = synthetic [barcode part1]
  source 1..16: mol_type = other DNA
gatacggcgttcttag

SEQ ID NO: 37754 - DNA, 16 bp, synthetic construct
  misc_feature 1..16: note = synthetic [barcode part1]
  source 1..16: mol_type = other DNA
cctgtcacaactcttc

SEQ ID NO: 37755 - DNA, 16 bp, synthetic construct
  misc_feature 1..16: note = synthetic [barcode part1]
  source 1..16: mol_type = other DNA
tggattcttgtcctag

SEQ ID NO: 37756 - DNA, 16 bp, synthetic construct
  misc_feature 1..16: note = synthetic [barcode part1]
  source 1..16: mol_type = other DNA
gcgaaggaatccggtt

SEQ ID NO: 37757 - DNA, 16 bp, synthetic construct
  misc_feature 1..16: note = synthetic [barcode part1]
  source 1..16: mol_type = other DNA
caacgtggccagaagt

SEQ ID NO: 37758 - DNA, 16 bp, synthetic construct
  misc_feature 1..16: note = synthetic [barcode part1]
  source 1..16: mol_type = other DNA
tcagtaccacaaccag

SEQ ID NO: 37759 - DNA, 16 bp, synthetic construct
  misc_feature 1..16: note = synthetic [barcode part1]
  source 1..16: mol_type = other DNA
gatctgtctgtcttag

SEQ ID NO: 37760 - DNA, 16 bp, synthetic construct
  misc_feature 1..16: note = synthetic [barcode part1]
  source 1..16: mol_type = other DNA
caaggagatatcgatc

SEQ ID NO: 37761 - DNA, 16 bp, synthetic construct
  misc_feature 1..16: note = synthetic [barcode part1]
  source 1..16: mol_type = other DNA
tcaagtcacacaagag

SEQ ID NO: 37762 - DNA, 16 bp, synthetic construct
  misc_feature 1..16: note = synthetic [barcode part1]
  source 1..16: mol_type = other DNA
agaccagatcaacgcg

SEQ ID NO: 37763 - DNA, 16 bp, synthetic construct
  misc_feature 1..16: note = synthetic [barcode part1]
  source 1..16: mol_type = other DNA
cagatcttaggcgttg

SEQ ID NO: 37764 - DNA, 16 bp, synthetic construct
  misc_feature 1..16: note = synthetic [barcode part1]
  source 1..16: mol_type = other DNA
agacgtcgagtctgtt

SEQ ID NO: 37765 - DNA, 16 bp, synthetic construct
  misc_feature 1..16: note = synthetic [barcode part1]
  source 1..16: mol_type = other DNA
ttctcgccgaactacg

SEQ ID NO: 37766 - DNA, 16 bp, synthetic construct
  misc_feature 1..16: note = synthetic [barcode part1]
  source 1..16: mol_type = other DNA
gacgtaggcaactcag

SEQ ID NO: 37767 - DNA, 16 bp, synthetic construct
  misc_feature 1..16: note = synthetic [barcode part1]
  source 1..16: mol_type = other DNA
ttccacactgacaact

SEQ ID NO: 37768 - DNA, 16 bp, synthetic construct
  misc_feature 1..16: note = synthetic [barcode part1]
  source 1..16: mol_type = other DNA
gtcgagttccgtgtct

SEQ ID NO: 37769 - DNA, 16 bp, synthetic construct
  misc_feature 1..16: note = synthetic [barcode part1]
  source 1..16: mol_type = other DNA
taggtacgatcacacc

SEQ ID NO: 37770 - DNA, 16 bp, synthetic construct
  misc_feature 1..16: note = synthetic [barcode part1]
  source 1..16: mol_type = other DNA
agttcggtcggcaatt

SEQ ID NO: 37771 - DNA, 16 bp, synthetic construct
  misc_feature 1..16: note = synthetic [barcode part1]
  source 1..16: mol_type = other DNA
agatcacaacacgaac

SEQ ID NO: 37772 - DNA, 16 bp, synthetic construct
  misc_feature 1..16: note = synthetic [barcode part1]
  source 1..16: mol_type = other DNA
gtgtagtgacctcctc

SEQ ID NO: 37773 - DNA, 16 bp, synthetic construct
  misc_feature 1..16: note = synthetic [barcode part1]
  source 1..16: mol_type = other DNA
cacgcctcttaacggt

SEQ ID NO: 37774 - DNA, 16 bp, synthetic construct
  misc_feature 1..16: note = synthetic [barcode part1]
  source 1..16: mol_type = other DNA
agtgacttcgagttgc

SEQ ID NO: 37775 - DNA, 16 bp, synthetic construct
  misc_feature 1..16: note = synthetic [barcode part1]
  source 1..16: mol_type = other DNA
gccgagtggtatagac

SEQ ID NO: 37776 - DNA, 16 bp, synthetic construct
  misc_feature 1..16: note = synthetic [barcode part1]
  source 1..16: mol_type = other DNA
ttaactctattggcgc

SEQ ID NO: 37777 - DNA, 16 bp, synthetic construct
  misc_feature 1..16: note = synthetic [barcode part1]
  source 1..16: mol_type = other DNA
ccggatcgttgttaag

SEQ ID NO: 37778 - DNA, 16 bp, synthetic construct
  misc_feature 1..16: note = synthetic [barcode part1]
  source 1..16: mol_type = other DNA
tactcttactgccaag

SEQ ID NO: 37779 - DNA, 16 bp, synthetic construct
  misc_feature 1..16: note = synthetic [barcode part1]
  source 1..16: mol_type = other DNA
ccacctactacggtac

SEQ ID NO: 37780 - DNA, 16 bp, synthetic construct
  misc_feature 1..16: note = synthetic [barcode part1]
  source 1..16: mol_type = other DNA
aacggacagatcttag

SEQ ID NO: 37781 - DNA, 16 bp, synthetic construct
  misc_feature 1..16: note = synthetic [barcode part1]
  source 1..16: mol_type = other DNA
atagagagtcgtcggc

SEQ ID NO: 37782 - DNA, 16 bp, synthetic construct
  misc_feature 1..16: note = synthetic [barcode part1]
  source 1..16: mol_type = other DNA
tcctgtcctgtgagtg

SEQ ID NO: 37783 - DNA, 16 bp, synthetic construct
  misc_feature 1..16: note = synthetic [barcode part1]
  source 1..16: mol_type = other DNA
atagtacctccggagt

SEQ ID NO: 37784 - DNA, 16 bp, synthetic construct
  misc_feature 1..16: note = synthetic [barcode part1]
  source 1..16: mol_type = other DNA
atagtacgccgtggtt

SEQ ID NO: 37785 - DNA, 16 bp, synthetic construct
  misc_feature 1..16: note = synthetic [barcode part1]
  source 1..16: mol_type = other DNA
gcgaattacgtggttc

SEQ ID NO: 37786 - DNA, 16 bp, synthetic construct
  misc_feature 1..16: note = synthetic [barcode part1]
  source 1..16: mol_type = other DNA
gcgatcaccgaagagt

SEQ ID NO: 37787 - DNA, 16 bp, synthetic construct
  misc_feature 1..16: note = synthetic [barcode part1]
  source 1..16: mol_type = other DNA
cgtaggactggtaacg

SEQ ID NO: 37788 - DNA, 16 bp, synthetic construct
  misc_feature 1..16: note = synthetic [barcode part1]
  source 1..16: mol_type = other DNA
aagtggaacgacgcct

SEQ ID NO: 37789 - DNA, 16 bp, synthetic construct
  misc_feature 1..16: note = synthetic [barcode part1]
  source 1..16: mol_type = other DNA
gtgataatccgtgaag

SEQ ID NO: 37790 - DNA, 16 bp, synthetic construct
  misc_feature 1..16: note = synthetic [barcode part1]
  source 1..16: mol_type = other DNA
acggactcacaagtct

SEQ ID NO: 37791 - DNA, 16 bp, synthetic construct
  misc_feature 1..16: note = synthetic [barcode part1]
  source 1..16: mol_type = other DNA
acagactcctctaatc

SEQ ID NO: 37792 - DNA, 16 bp, synthetic construct
  misc_feature 1..16: note = synthetic [barcode part1]
  source 1..16: mol_type = other DNA
gcctcgaatattgcag

SEQ ID NO: 37793 - DNA, 16 bp, synthetic construct
  misc_feature 1..16: note = synthetic [barcode part1]
  source 1..16: mol_type = other DNA
attgcctacttgtggt

SEQ ID NO: 37794 - DNA, 16 bp, synthetic construct
  misc_feature 1..16: note = synthetic [barcode part1]
  source 1..16: mol_type = other DNA
gattacgccaatcttc

SEQ ID NO: 37795 - DNA, 16 bp, synthetic construct
  misc_feature 1..16: note = synthetic [barcode part1]
  source 1..16: mol_type = other DNA
atccacttagagtcct

SEQ ID NO: 37796 - DNA, 16 bp, synthetic construct
  misc_feature 1..16: note = synthetic [barcode part1]
  source 1..16: mol_type = other DNA
tgccacgtagttagtg

SEQ ID NO: 37797 - DNA, 16 bp, synthetic construct
  misc_feature 1..16: note = synthetic [barcode part1]
  source 1..16: mol_type = other DNA
gcctacgtgactcttg

SEQ ID NO: 37798 - DNA, 16 bp, synthetic construct
  misc_feature 1..16: note = synthetic [barcode part1]
  source 1..16: mol_type = other DNA
gagacgatactacctc

SEQ ID NO: 37799 - DNA, 16 bp, synthetic construct
  misc_feature 1..16: note = synthetic [barcode part1]
  source 1..16: mol_type = other DNA
gacctccttctactgt

SEQ ID NO: 37800 - DNA, 16 bp, synthetic construct
  misc_feature 1..16: note = synthetic [barcode part1]
  source 1..16: mol_type = other DNA
acggcaattcagtctg

SEQ ID NO: 37801 - DNA, 16 bp, synthetic construct
  misc_feature 1..16: note = synthetic [barcode part1]
  source 1..16: mol_type = other DNA
gatcctaggacagacg

SEQ ID NO: 37802 - DNA, 16 bp, synthetic construct
  misc_feature 1..16: note = synthetic [barcode part1]
  source 1..16: mol_type = other DNA
tccgtgtagtcgtcac

SEQ ID NO: 37803 - DNA, 16 bp, synthetic construct
  misc_feature 1..16: note = synthetic [barcode part1]
  source 1..16: mol_type = other DNA
gcagtagttgttgtcg

SEQ ID NO: 37804 - DNA, 16 bp, synthetic construct
  misc_feature 1..16: note = synthetic [barcode part1]
  source 1..16: mol_type = other DNA
atcagtacactccact

SEQ ID NO: 37805 - DNA, 16 bp, synthetic construct
  misc_feature 1..16: note = synthetic [barcode part1]
  source 1..16: mol_type = other DNA
aagtactcgtccgagt

SEQ ID NO: 37806 - DNA, 16 bp, synthetic construct
  misc_feature 1..16: note = synthetic [barcode part1]
  source 1..16: mol_type = other DNA
tcctaaccgcactggt

SEQ ID NO: 37807 - DNA, 16 bp, synthetic construct
  misc_feature 1..16: note = synthetic [barcode part1]
  source 1..16: mol_type = other DNA
cctccgcaagttactg

SEQ ID NO: 37808 - DNA, 16 bp, synthetic construct
  misc_feature 1..16: note = synthetic [barcode part1]
  source 1..16: mol_type = other DNA
tctgcggtctatcacg

SEQ ID NO: 37809 - DNA, 16 bp, synthetic construct
  misc_feature 1..16: note = synthetic [barcode part1]
  source 1..16: mol_type = other DNA
gtgcacactaggactt

SEQ ID NO: 37810 - DNA, 16 bp, synthetic construct
  misc_feature 1..16: note = synthetic [barcode part1]
  source 1..16: mol_type = other DNA
aacacgttgactgtgc

SEQ ID NO: 37811 - DNA, 16 bp, synthetic construct
  misc_feature 1..16: note = synthetic [barcode part1]
  source 1..16: mol_type = other DNA
gaatcgtaagtgtgac

SEQ ID NO: 37812 - DNA, 16 bp, synthetic construct
  misc_feature 1..16: note = synthetic [barcode part1]
  source 1..16: mol_type = other DNA
cagactgagaagtact

SEQ ID NO: 37813 - DNA, 16 bp, synthetic construct
  misc_feature 1..16: note = synthetic [barcode part1]
  source 1..16: mol_type = other DNA
tgccgtcgcaatcgtt

SEQ ID NO: 37814 - DNA, 16 bp, synthetic construct
  misc_feature 1..16: note = synthetic [barcode part1]
  source 1..16: mol_type = other DNA
gttgtctgcagatctt

SEQ ID NO: 37815 - DNA, 16 bp, synthetic construct
  misc_feature 1..16: note = synthetic [barcode part1]
  source 1..16: mol_type = other DNA
gttctcgacgacttgc

SEQ ID NO: 37816 - DNA, 16 bp, synthetic construct
  misc_feature 1..16: note = synthetic [barcode part1]
  source 1..16: mol_type = other DNA
accaagtaggcacgac

SEQ ID NO: 37817 - DNA, 16 bp, synthetic construct
  misc_feature 1..16: note = synthetic [barcode part1]
  source 1..16: mol_type = other DNA
gaccgtccaagaacag

SEQ ID NO: 37818 - DNA, 16 bp, synthetic construct
  misc_feature 1..16: note = synthetic [barcode part1]
  source 1..16: mol_type = other DNA
ccttaacagttgcact

SEQ ID NO: 37819 - DNA, 16 bp, synthetic construct
  misc_feature 1..16: note = synthetic [barcode part1]
  source 1..16: mol_type = other DNA
tactagatacctccgt

SEQ ID NO: 37820 - DNA, 16 bp, synthetic construct
  misc_feature 1..16: note = synthetic [barcode part1]
  source 1..16: mol_type = other DNA
tacgatattcgcctgt

SEQ ID NO: 37821 - DNA, 16 bp, synthetic construct
  misc_feature 1..16: note = synthetic [barcode part1]
  source 1..16: mol_type = other DNA
tctactgtgacggagt

SEQ ID NO: 37822 - DNA, 16 bp, synthetic construct
  misc_feature 1..16: note = synthetic [barcode part1]
  source 1..16: mol_type = other DNA
tgtatctgtagtctgc

SEQ ID NO: 37823 - DNA, 16 bp, synthetic construct
  misc_feature 1..16: note = synthetic [barcode part1]
  source 1..16: mol_type = other DNA
tgataacctctgcact

SEQ ID NO: 37824 - DNA, 16 bp, synthetic construct
  misc_feature 1..16: note = synthetic [barcode part1]
  source 1..16: mol_type = other DNA
agacggacttgtctac

SEQ ID NO: 37825 - DNA, 16 bp, synthetic construct
  misc_feature 1..16: note = synthetic [barcode part1]
  source 1..16: mol_type = other DNA
tgtaagaattaggccg

SEQ ID NO: 37826 - DNA, 16 bp, synthetic construct
  misc_feature 1..16: note = synthetic [barcode part1]
  source 1..16: mol_type = other DNA
ccacaaggtccttcgt

SEQ ID NO: 37827 - DNA, 16 bp, synthetic construct
  misc_feature 1..16: note = synthetic [barcode part1]
  source 1..16: mol_type = other DNA
ccgtaggtacttcgtc

SEQ ID NO: 37828 - DNA, 16 bp, synthetic construct
  misc_feature 1..16: note = synthetic [barcode part1]
  source 1..16: mol_type = other DNA
actgtagtgccacaac

SEQ ID NO: 37829 - DNA, 16 bp, synthetic construct
  misc_feature 1..16: note = synthetic [barcode part1]
  source 1..16: mol_type = other DNA
tggagtctacgacact

SEQ ID NO: 37830 - DNA, 16 bp, synthetic construct
  misc_feature 1..16: note = synthetic [barcode part1]
  source 1..16: mol_type = other DNA
ccgtcagtatacctcg

SEQ ID NO: 37831 - DNA, 16 bp, synthetic construct
  misc_feature 1..16: note = synthetic [barcode part1]
  source 1..16: mol_type = other DNA
ccttcaggtacgttgc

SEQ ID NO: 37832 - DNA, 16 bp, synthetic construct
  misc_feature 1..16: note = synthetic [barcode part1]
  source 1..16: mol_type = other DNA
caatctcgaccttcct

SEQ ID NO: 37833 - DNA, 16 bp, synthetic construct
  misc_feature 1..16: note = synthetic [barcode part1]
  source 1..16: mol_type = other DNA
gcgtcctgaaggtatt

SEQ ID NO: 37834 - DNA, 16 bp, synthetic construct
  misc_feature 1..16: note = synthetic [barcode part1]
  source 1..16: mol_type = other DNA
acacgtggaagaaggt

SEQ ID NO: 37835 - DNA, 16 bp, synthetic construct
  misc_feature 1..16: note = synthetic [barcode part1]
  source 1..16: mol_type = other DNA
cgttaggcaagtcgtt

SEQ ID NO: 37836 - DNA, 16 bp, synthetic construct
  misc_feature 1..16: note = synthetic [barcode part1]
  source 1..16: mol_type = other DNA
tactccgtaggtgtcc

SEQ ID NO: 37837 - DNA, 16 bp, synthetic construct
  misc_feature 1..16: note = synthetic [barcode part1]
  source 1..16: mol_type = other DNA
attaccgcgcaccttg

SEQ ID NO: 37838 - DNA, 16 bp, synthetic construct
  misc_feature 1..16: note = synthetic [barcode part1]
  source 1..16: mol_type = other DNA
ttcagacgcaattgcg

SEQ ID NO: 37839 - DNA, 16 bp, synthetic construct
  misc_feature 1..16: note = synthetic [barcode part1]
  source 1..16: mol_type = other DNA
ttctgcgataccttcc

SEQ ID NO: 37840 - DNA, 16 bp, synthetic construct
  misc_feature 1..16: note = synthetic [barcode part1]
  source 1..16: mol_type = other DNA
gaagatactaccgaac

SEQ ID NO: 37841 - DNA, 16 bp, synthetic construct
  misc_feature 1..16: note = synthetic [barcode part1]
  source 1..16: mol_type = other DNA
gtacgtaacacgtgtc

SEQ ID NO: 37842 - DNA, 16 bp, synthetic construct
  misc_feature 1..16: note = synthetic [barcode part1]
  source 1..16: mol_type = other DNA
cgacaacgactactgt

SEQ ID NO: 37843 - DNA, 16 bp, synthetic construct
  misc_feature 1..16: note = synthetic [barcode part1]
  source 1..16: mol_type = other DNA
ccaggtctgtactctg

SEQ ID NO: 37844 - DNA, 16 bp, synthetic construct
  misc_feature 1..16: note = synthetic [barcode part1]
  source 1..16: mol_type = other DNA
tctgtaccgcgttctt

SEQ ID NO: 37845 - DNA, 16 bp, synthetic construct
  misc_feature 1..16: note = synthetic [barcode part1]
  source 1..16: mol_type = other DNA
gatctactgtcgcctg

SEQ ID NO: 37846 - DNA, 16 bp, synthetic construct
  misc_feature 1..16: note = synthetic [barcode part1]
  source 1..16: mol_type = other DNA
ccgatcttatcctgtc

SEQ ID NO: 37847 - DNA, 16 bp, synthetic construct
  misc_feature 1..16: note = synthetic [barcode part1]
  source 1..16: mol_type = other DNA
gcaccaacgtaagtct

SEQ ID NO: 37848 - DNA, 16 bp, synthetic construct
  misc_feature 1..16: note = synthetic [barcode part1]
  source 1..16: mol_type = other DNA
agtactacgacgtcgt

SEQ ID NO: 37849 - DNA, 16 bp, synthetic construct
  misc_feature 1..16: note = synthetic [barcode part1]
  source 1..16: mol_type = other DNA
tactcgttgtcgtagt

SEQ ID NO: 37850 - DNA, 16 bp, synthetic construct
  misc_feature 1..16: note = synthetic [barcode part1]
  source 1..16: mol_type = other DNA
cggactaagttaccgt

SEQ ID NO: 37851 - DNA, 16 bp, synthetic construct
  misc_feature 1..16: note = synthetic [barcode part1]
  source 1..16: mol_type = other DNA
cctgaatatcctctag

SEQ ID NO: 37852 - DNA, 16 bp, synthetic construct
  misc_feature 1..16: note = synthetic [barcode part1]
  source 1..16: mol_type = other DNA
tctggaactaactggc

SEQ ID NO: 37853 - DNA, 16 bp, synthetic construct
  misc_feature 1..16: note = synthetic [barcode part1]
  source 1..16: mol_type = other DNA
atactggaactcgtgc

SEQ ID NO: 37854 - DNA, 16 bp, synthetic construct
  misc_feature 1..16: note = synthetic [barcode part1]
  source 1..16: mol_type = other DNA
agtcctccgcgttaac

SEQ ID NO: 37855 - DNA, 16 bp, synthetic construct
  misc_feature 1..16: note = synthetic [barcode part1]
  source 1..16: mol_type = other DNA
ccagtcgttagagttg

SEQ ID NO: 37856 - DNA, 16 bp, synthetic construct
  misc_feature 1..16: note = synthetic [barcode part1]
  source 1..16: mol_type = other DNA
gatagaagactacacc

SEQ ID NO: 37857 - DNA, 16 bp, synthetic construct
  misc_feature 1..16: note = synthetic [barcode part1]
  source 1..16: mol_type = other DNA
cgcgacacaagtagac

SEQ ID NO: 37858 - DNA, 16 bp, synthetic construct
  misc_feature 1..16: note = synthetic [barcode part1]
  source 1..16: mol_type = other DNA
attcaaggcaacaggt

SEQ ID NO: 37859 - DNA, 16 bp, synthetic construct
  misc_feature 1..16: note = synthetic [barcode part1]
  source 1..16: mol_type = other DNA
ccagtatcgcagttag

SEQ ID NO: 37860 - DNA, 16 bp, synthetic construct
  misc_feature 1..16: note = synthetic [barcode part1]
  source 1..16: mol_type = other DNA
atcgtccacgagtctc

SEQ ID NO: 37861 - DNA, 16 bp, synthetic construct
  misc_feature 1..16: note = synthetic [barcode part1]
  source 1..16: mol_type = other DNA
acttctacgtccttgc

SEQ ID NO: 37862 - DNA, 16 bp, synthetic construct
  misc_feature 1..16: note = synthetic [barcode part1]
  source 1..16: mol_type = other DNA
gtatcctggtccgact

SEQ ID NO: 37863 - DNA, 16 bp, synthetic construct
  misc_feature 1..16: note = synthetic [barcode part1]
  source 1..16: mol_type = other DNA
agtcctaagatagacg

SEQ ID NO: 37864 - DNA, 16 bp, synthetic construct
  misc_feature 1..16: note = synthetic [barcode part1]
  source 1..16: mol_type = other DNA
atagttacggtcgtgc

SEQ ID NO: 37865 - DNA, 16 bp, synthetic construct
  misc_feature 1..16: note = synthetic [barcode part1]
  source 1..16: mol_type = other DNA
tctcttagaacgtctg

SEQ ID NO: 37866 - DNA, 16 bp, synthetic construct
  misc_feature 1..16: note = synthetic [barcode part1]
  source 1..16: mol_type = other DNA
aatccaaggttgccgt

SEQ ID NO: 37867 - DNA, 16 bp, synthetic construct
  misc_feature 1..16: note = synthetic [barcode part1]
  source 1..16: mol_type = other DNA
agtaccggaccttagt

SEQ ID NO: 37868 - DNA, 16 bp, synthetic construct
  misc_feature 1..16: note = synthetic [barcode part1]
  source 1..16: mol_type = other DNA
ttagttcgtaaccacc

SEQ ID NO: 37869 - DNA, 16 bp, synthetic construct
  misc_feature 1..16: note = synthetic [barcode part1]
  source 1..16: mol_type = other DNA
tctaactgccagtatc

SEQ ID NO: 37870 - DNA, 16 bp, synthetic construct
  misc_feature 1..16: note = synthetic [barcode part1]
  source 1..16: mol_type = other DNA
gcactccactgagtct

SEQ ID NO: 37871 - DNA, 16 bp, synthetic construct
  misc_feature 1..16: note = synthetic [barcode part1]
  source 1..16: mol_type = other DNA
atagtcgccgatctcc

SEQ ID NO: 37872 - DNA, 16 bp, synthetic construct
  misc_feature 1..16: note = synthetic [barcode part1]
  source 1..16: mol_type = other DNA
cggtcaacgcagtatt

SEQ ID NO: 37873 - DNA, 16 bp, synthetic construct
  misc_feature 1..16: note = synthetic [barcode part1]
  source 1..16: mol_type = other DNA
tgtccgcgacgttgtt

SEQ ID NO: 37874 - DNA, 16 bp, synthetic construct
  misc_feature 1..16: note = synthetic [barcode part1]
  source 1..16: mol_type = other DNA
cgaggaatcctagttc

SEQ ID NO: 37875 - DNA, 16 bp, synthetic construct
  misc_feature 1..16: note = synthetic [barcode part1]
  source 1..16: mol_type = other DNA
ccgtaatcagtgtcag

SEQ ID NO: 37876 - DNA, 16 bp, synthetic construct
  misc_feature 1..16: note = synthetic [barcode part1]
  source 1..16: mol_type = other DNA
gcagtgttgtgacgtt

SEQ ID NO: 37877 - DNA, 16 bp, synthetic construct
  misc_feature 1..16: note = synthetic [barcode part1]
  source 1..16: mol_type = other DNA
acagtcacacacaacc

SEQ ID NO: 37878 - DNA, 16 bp, synthetic construct
  misc_feature 1..16: note = synthetic [barcode part1]
  source 1..16: mol_type = other DNA
ccgagaacgtatcgag

SEQ ID NO: 37879 - DNA, 16 bp, synthetic construct
  misc_feature 1..16: note = synthetic [barcode part1]
  source 1..16: mol_type = other DNA
ttcctagacactggtt

SEQ ID NO: 37880 - DNA, 16 bp, synthetic construct
  misc_feature 1..16: note = synthetic [barcode part1]
  source 1..16: mol_type = other DNA
tgactgtactcaggtg

SEQ ID NO: 37881 - DNA, 16 bp, synthetic construct
  misc_feature 1..16: note = synthetic [barcode part1]
  source 1..16: mol_type = other DNA
aagttgcgttctcgcc

SEQ ID NO: 37882 - DNA, 16 bp, synthetic construct
  misc_feature 1..16: note = synthetic [barcode part1]
  source 1..16: mol_type = other DNA
aagtggccgtggattg

SEQ ID NO: 37883 - DNA, 16 bp, synthetic construct
  misc_feature 1..16: note = synthetic [barcode part1]
  source 1..16: mol_type = other DNA
atctcactaccagtgt

SEQ ID NO: 37884 - DNA, 16 bp, synthetic construct
  misc_feature 1..16: note = synthetic [barcode part1]
  source 1..16: mol_type = other DNA
tatcctaggacttgtc

SEQ ID NO: 37885 - DNA, 16 bp, synthetic construct
  misc_feature 1..16: note = synthetic [barcode part1]
  source 1..16: mol_type = other DNA
tgaacacgatcacacc

SEQ ID NO: 37886 - DNA, 16 bp, synthetic construct
  misc_feature 1..16: note = synthetic [barcode part1]
  source 1..16: mol_type = other DNA
ataccgaaggataacc

SEQ ID NO: 37887 - DNA, 16 bp, synthetic construct
  misc_feature 1..16: note = synthetic [barcode part1]
  source 1..16: mol_type = other DNA
cgtgtgaagtggtggt

SEQ ID NO: 37888 - DNA, 16 bp, synthetic construct
  misc_feature 1..16: note = synthetic [barcode part1]
  source 1..16: mol_type = other DNA
ccacctgtgagacctt

SEQ ID NO: 37889 - DNA, 16 bp, synthetic construct
  misc_feature 1..16: note = synthetic [barcode part1]
  source 1..16: mol_type = other DNA
gcgtattactccttag

SEQ ID NO: 37890 - DNA, 16 bp, synthetic construct
  misc_feature 1..16: note = synthetic [barcode part1]
  source 1..16: mol_type = other DNA
tctgaaggagacttcc

SEQ ID NO: 37891 - DNA, 16 bp, synthetic construct
  misc_feature 1..16: note = synthetic [barcode part1]
  source 1..16: mol_type = other DNA
tgtgtactcttcctcg

SEQ ID NO: 37892 - DNA, 16 bp, synthetic construct
  misc_feature 1..16: note = synthetic [barcode part1]
  source 1..16: mol_type = other DNA
gcactcttgtactctc

SEQ ID NO: 37893 - DNA, 16 bp, synthetic construct
  misc_feature 1..16: note = synthetic [barcode part1]
  source 1..16: mol_type = other DNA
agagtatccgacggtg

SEQ ID NO: 37894 - DNA, 16 bp, synthetic construct
  misc_feature 1..16: note = synthetic [barcode part1]
  source 1..16: mol_type = other DNA
aggattcagacaggcc

SEQ ID NO: 37895 - DNA, 16 bp, synthetic construct
  misc_feature 1..16: note = synthetic [barcode part1]
  source 1..16: mol_type = other DNA
cgtaactgtcgtcctg

SEQ ID NO: 37896 - DNA, 16 bp, synthetic construct
  misc_feature 1..16: note = synthetic [barcode part1]
  source 1..16: mol_type = other DNA
atcggattgaggacgc

SEQ ID NO: 37897 - DNA, 16 bp, synthetic construct
  misc_feature 1..16: note = synthetic [barcode part1]
  source 1..16: mol_type = other DNA
gatatatcgatcgcgc

SEQ ID NO: 37898 - DNA, 16 bp, synthetic construct
  misc_feature 1..16: note = synthetic [barcode part1]
  source 1..16: mol_type = other DNA
gtccagagaacctact

SEQ ID NO: 37899 - DNA, 16 bp, synthetic construct
  misc_feature 1..16: note = synthetic [barcode part1]
  source 1..16: mol_type = other DNA
gtccgtcgtagtacct

SEQ ID NO: 37900 - DNA, 16 bp, synthetic construct
  misc_feature 1..16: note = synthetic [barcode part1]
  source 1..16: mol_type = other DNA
accgaatcttggtgac

SEQ ID NO: 37901 - DNA, 16 bp, synthetic construct
  misc_feature 1..16: note = synthetic [barcode part1]
  source 1..16: mol_type = other DNA
ttagtcgccttcttcg

SEQ ID NO: 37902 - DNA, 16 bp, synthetic construct
  misc_feature 1..16: note = synthetic [barcode part1]
  source 1..16: mol_type = other DNA
cactcctgaagatacg

SEQ ID NO: 37903 - DNA, 16 bp, synthetic construct
  misc_feature 1..16: note = synthetic [barcode part1]
  source 1..16: mol_type = other DNA
tccaattcacaatcgc

SEQ ID NO: 37904 - DNA, 16 bp, synthetic construct
  misc_feature 1..16: note = synthetic [barcode part1]
  source 1..16: mol_type = other DNA
tgcgaagactatcaag

SEQ ID NO: 37905 - DNA, 16 bp, synthetic construct
  misc_feature 1..16: note = synthetic [barcode part1]
  source 1..16: mol_type = other DNA
ccaaccttattgacac

SEQ ID NO: 37906 - DNA, 16 bp, synthetic construct
  misc_feature 1..16: note = synthetic [barcode part1]
  source 1..16: mol_type = other DNA
cgccgtcaatatattc

SEQ ID NO: 37907 - DNA, 16 bp, synthetic construct
  misc_feature 1..16: note = synthetic [barcode part1]
  source 1..16: mol_type = other DNA
gcacttatccgtcgtg

SEQ ID NO: 37908 - DNA, 16 bp, synthetic construct
  misc_feature 1..16: note = synthetic [barcode part1]
  source 1..16: mol_type = other DNA
tggtctacctgtgtcg

SEQ ID NO: 37909 - DNA, 16 bp, synthetic construct
  misc_feature 1..16: note = synthetic [barcode part1]
  source 1..16: mol_type = other DNA
tgaagatcggaccacg

SEQ ID NO: 37910 - DNA, 16 bp, synthetic construct
  misc_feature 1..16: note = synthetic [barcode part1]
  source 1..16: mol_type = other DNA
tccaaggagagtctct

SEQ ID NO: 37911 - DNA, 16 bp, synthetic construct
  misc_feature 1..16: note = synthetic [barcode part1]
  source 1..16: mol_type = other DNA
tggtatcctattcgtg

SEQ ID NO: 37912 - DNA, 16 bp, synthetic construct
  misc_feature 1..16: note = synthetic [barcode part1]
  source 1..16: mol_type = other DNA
cctaatcgccacacgt

SEQ ID NO: 37913 - DNA, 16 bp, synthetic construct
  misc_feature 1..16: note = synthetic [barcode part1]
  source 1..16: mol_type = other DNA
acgttgactaagtgcc

SEQ ID NO: 37914 - DNA, 16 bp, synthetic construct
  misc_feature 1..16: note = synthetic [barcode part1]
  source 1..16: mol_type = other DNA
cgtacgagtccgaatt

SEQ ID NO: 37915 - DNA, 16 bp, synthetic construct
  misc_feature 1..16: note = synthetic [barcode part1]
  source 1..16: mol_type = other DNA
ccaacgaagaccactt

SEQ ID NO: 37916 - DNA, 16 bp, synthetic construct
  misc_feature 1..16: note = synthetic [barcode part1]
  source 1..16: mol_type = other DNA
aacgactacgttcttc

SEQ ID NO: 37917 - DNA, 16 bp, synthetic construct
  misc_feature 1..16: note = synthetic [barcode part1]
  source 1..16: mol_type = other DNA
gcgaagattggattac

SEQ ID NO: 37918 - DNA, 16 bp, synthetic construct
  misc_feature 1..16: note = synthetic [barcode part1]
  source 1..16: mol_type = other DNA
tcacctctacgccaag

SEQ ID NO: 37919 - DNA, 16 bp, synthetic construct
  misc_feature 1..16: note = synthetic [barcode part1]
  source 1..16: mol_type = other DNA
gtctagtctggactag

SEQ ID NO: 37920 - DNA, 16 bp, synthetic construct
  misc_feature 1..16: note = synthetic [barcode part1]
  source 1..16: mol_type = other DNA
cgtgcgatattctgcc

SEQ ID NO: 37921 - DNA, 16 bp, synthetic construct
  misc_feature 1..16: note = synthetic [barcode part1]
  source 1..16: mol_type = other DNA
tcactactccaagtgt

SEQ ID NO: 37922 - DNA, 16 bp, synthetic construct
  misc_feature 1..16: note = synthetic [barcode part1]
  source 1..16: mol_type = other DNA
gcgcgacctaactctt

SEQ ID NO: 37923 - DNA, 16 bp, synthetic construct
  misc_feature 1..16: note = synthetic [barcode part1]
  source 1..16: mol_type = other DNA
ttcagttgaccggaac

SEQ ID NO: 37924 - DNA, 16 bp, synthetic construct
  misc_feature 1..16: note = synthetic [barcode part1]
  source 1..16: mol_type = other DNA
cgaccgaatcacaatc

SEQ ID NO: 37925 - DNA, 16 bp, synthetic construct
  misc_feature 1..16: note = synthetic [barcode part1]
  source 1..16: mol_type = other DNA
gactgtataacacgcc

SEQ ID NO: 37926 - DNA, 16 bp, synthetic construct
  misc_feature 1..16: note = synthetic [barcode part1]
  source 1..16: mol_type = other DNA
gaatagaatcctaggc

SEQ ID NO: 37927 - DNA, 16 bp, synthetic construct
  misc_feature 1..16: note = synthetic [barcode part1]
  source 1..16: mol_type = other DNA
ttggttgccggaattg

SEQ ID NO: 37928 - DNA, 16 bp, synthetic construct
  misc_feature 1..16: note = synthetic [barcode part1]
  source 1..16: mol_type = other DNA
tcggtattacacggtg

SEQ ID NO: 37929 - DNA, 16 bp, synthetic construct
  misc_feature 1..16: note = synthetic [barcode part1]
  source 1..16: mol_type = other DNA
aaccggtccagaactt

SEQ ID NO: 37930 - DNA, 16 bp, synthetic construct
  misc_feature 1..16: note = synthetic [barcode part1]
  source 1..16: mol_type = other DNA
aagtgtaagaggcgtg

SEQ ID NO: 37931 - DNA, 16 bp, synthetic construct
  misc_feature 1..16: note = synthetic [barcode part1]
  source 1..16: mol_type = other DNA
ccttgtctaccacttg

SEQ ID NO: 37932 - DNA, 16 bp, synthetic construct
  misc_feature 1..16: note = synthetic [barcode part1]
  source 1..16: mol_type = other DNA
cgaagaagatcctcct

SEQ ID NO: 37933 - DNA, 16 bp, synthetic construct
  misc_feature 1..16: note = synthetic [barcode part1]
  source 1..16: mol_type = other DNA
tatacctgtggaggtc

SEQ ID NO: 37934 - DNA, 16 bp, synthetic construct
  misc_feature 1..16: note = synthetic [barcode part1]
  source 1..16: mol_type = other DNA
ccaacttgcggtcgtt

SEQ ID NO: 37935 - DNA, 16 bp, synthetic construct
  misc_feature 1..16: note = synthetic [barcode part1]
  source 1..16: mol_type = other DNA
gattcgaagaacgcgc

SEQ ID NO: 37936 - DNA, 16 bp, synthetic construct
  misc_feature 1..16: note = synthetic [barcode part1]
  source 1..16: mol_type = other DNA
gtaccgatagtgaagt

SEQ ID NO: 37937 - DNA, 16 bp, synthetic construct
  misc_feature 1..16: note = synthetic [barcode part1]
  source 1..16: mol_type = other DNA
gccaacgtatcttatc

SEQ ID NO: 37938 - DNA, 16 bp, synthetic construct
  misc_feature 1..16: note = synthetic [barcode part1]
  source 1..16: mol_type = other DNA
tgtaagtccgcggatt

SEQ ID NO: 37939 - DNA, 16 bp, synthetic construct
  misc_feature 1..16: note = synthetic [barcode part1]
  source 1..16: mol_type = other DNA
agactaatagtgcacg

SEQ ID NO: 37940 - DNA, 16 bp, synthetic construct
  misc_feature 1..16: note = synthetic [barcode part1]
  source 1..16: mol_type = other DNA
acacgtaccaattggc

SEQ ID NO: 37941 - DNA, 16 bp, synthetic construct
  misc_feature 1..16: note = synthetic [barcode part1]
  source 1..16: mol_type = other DNA
gtgccggagaataatt

SEQ ID NO: 37942 - DNA, 16 bp, synthetic construct
  misc_feature 1..16: note = synthetic [barcode part1]
  source 1..16: mol_type = other DNA
tagaacacactgacag

SEQ ID NO: 37943 - DNA, 16 bp, synthetic construct
  misc_feature 1..16: note = synthetic [barcode part1]
  source 1..16: mol_type = other DNA
tctactaaccgaggac

SEQ ID NO: 37944 - DNA, 16 bp, synthetic construct
  misc_feature 1..16: note = synthetic [barcode part1]
  source 1..16: mol_type = other DNA
cactacaattggccag

SEQ ID NO: 37945 - DNA, 16 bp, synthetic construct
  misc_feature 1..16: note = synthetic [barcode part1]
  source 1..16: mol_type = other DNA
gcgttaagtcacctcc

SEQ ID NO: 37946 - DNA, 16 bp, synthetic construct
  misc_feature 1..16: note = synthetic [barcode part1]
  source 1..16: mol_type = other DNA
caatcgttagagagtg

SEQ ID NO: 37947 - DNA, 16 bp, synthetic construct
  misc_feature 1..16: note = synthetic [barcode part1]
  source 1..16: mol_type = other DNA
cacgcacgttaactag

SEQ ID NO: 37948 - DNA, 16 bp, synthetic construct
  misc_feature 1..16: note = synthetic [barcode part1]
  source 1..16: mol_type = other DNA
tggtccttcaactctc

SEQ ID NO: 37949 - DNA, 16 bp, synthetic construct
  misc_feature 1..16: note = synthetic [barcode part1]
  source 1..16: mol_type = other DNA
tctgaaggaccaactc

SEQ ID NO: 37950 - DNA, 16 bp, synthetic construct
  misc_feature 1..16: note = synthetic [barcode part1]
  source 1..16: mol_type = other DNA
ttatccgtgccacggt

SEQ ID NO: 37951 - DNA, 16 bp, synthetic construct
  misc_feature 1..16: note = synthetic [barcode part1]
  source 1..16: mol_type = other DNA
gccttacaggtacctc

SEQ ID NO: 37952 - DNA, 16 bp, synthetic construct
  misc_feature 1..16: note = synthetic [barcode part1]
  source 1..16: mol_type = other DNA
tcgatactagtgtgcg

SEQ ID NO: 37953 - DNA, 16 bp, synthetic construct
  misc_feature 1..16: note = synthetic [barcode part1]
  source 1..16: mol_type = other DNA
taacgtccttaggacg

SEQ ID NO: 37954 - DNA, 16 bp, synthetic construct
  misc_feature 1..16: note = synthetic [barcode part1]
  source 1..16: mol_type = other DNA
gatatacgaccgaagt

SEQ ID NO: 37955 - DNA, 16 bp, synthetic construct
  misc_feature 1..16: note = synthetic [barcode part1]
  source 1..16: mol_type = other DNA
gcctatactccaccag

SEQ ID NO: 37956 - DNA, 16 bp, synthetic construct
  misc_feature 1..16: note = synthetic [barcode part1]
  source 1..16: mol_type = other DNA
gtagacgaacagacag

SEQ ID NO: 37957 - DNA, 16 bp, synthetic construct
  misc_feature 1..16: note = synthetic [barcode part1]
  source 1..16: mol_type = other DNA
cgtgagagttagaccg

SEQ ID NO: 37958 - DNA, 16 bp, synthetic construct
  misc_feature 1..16: note = synthetic [barcode part1]
  source 1..16: mol_type = other DNA
tccgttattaggcgtt

SEQ ID NO: 37959 - DNA, 16 bp, synthetic construct
  misc_feature 1..16: note = synthetic [barcode part1]
  source 1..16: mol_type = other DNA
acttgtgtcttcaacg

SEQ ID NO: 37960 - DNA, 16 bp, synthetic construct
  misc_feature 1..16: note = synthetic [barcode part1]
  source 1..16: mol_type = other DNA
gtatccttcctgcact

SEQ ID NO: 37961 - DNA, 16 bp, synthetic construct
  misc_feature 1..16: note = synthetic [barcode part1]
  source 1..16: mol_type = other DNA
atatctctcggcgacc

SEQ ID NO: 37962 - DNA, 16 bp, synthetic construct
  misc_feature 1..16: note = synthetic [barcode part1]
  source 1..16: mol_type = other DNA
actataacgtcacggc

SEQ ID NO: 37963 - DNA, 16 bp, synthetic construct
  misc_feature 1..16: note = synthetic [barcode part1]
  source 1..16: mol_type = other DNA
gttcagtgaggtgcag

SEQ ID NO: 37964 - DNA, 16 bp, synthetic construct
  misc_feature 1..16: note = synthetic [barcode part1]
  source 1..16: mol_type = other DNA
gccgaacacagagatc

SEQ ID NO: 37965 - DNA, 16 bp, synthetic construct
  misc_feature 1..16: note = synthetic [barcode part1]
  source 1..16: mol_type = other DNA
tctcgacaacttgcgc

SEQ ID NO: 37966 - DNA, 16 bp, synthetic construct
  misc_feature 1..16: note = synthetic [barcode part1]
  source 1..16: mol_type = other DNA
acaaggactctcgtgt

SEQ ID NO: 37967 - DNA, 16 bp, synthetic construct
  misc_feature 1..16: note = synthetic [barcode part1]
  source 1..16: mol_type = other DNA
cactagacaggttacc

SEQ ID NO: 37968 - DNA, 16 bp, synthetic construct
  misc_feature 1..16: note = synthetic [barcode part1]
  source 1..16: mol_type = other DNA
aactgtcttgcgcctg

SEQ ID NO: 37969 - DNA, 16 bp, synthetic construct
  misc_feature 1..16: note = synthetic [barcode part1]
  source 1..16: mol_type = other DNA
actggccaattagtcg

SEQ ID NO: 37970 - DNA, 16 bp, synthetic construct
  misc_feature 1..16: note = synthetic [barcode part1]
  source 1..16: mol_type = other DNA
tacgacgtccactcgt

SEQ ID NO: 37971 - DNA, 16 bp, synthetic construct
  misc_feature 1..16: note = synthetic [barcode part1]
  source 1..16: mol_type = other DNA
gcgtagactaccagag

SEQ ID NO: 37972 - DNA, 16 bp, synthetic construct
  misc_feature 1..16: note = synthetic [barcode part1]
  source 1..16: mol_type = other DNA
gtagtgtcgatcagtc

SEQ ID NO: 37973 - DNA, 16 bp, synthetic construct
  misc_feature 1..16: note = synthetic [barcode part1]
  source 1..16: mol_type = other DNA
agttcttgtcacctcc

SEQ ID NO: 37974 - DNA, 16 bp, synthetic construct
  misc_feature 1..16: note = synthetic [barcode part1]
  source 1..16: mol_type = other DNA
accggcaatagaatac

SEQ ID NO: 37975 - DNA, 16 bp, synthetic construct
  misc_feature 1..16: note = synthetic [barcode part1]
  source 1..16: mol_type = other DNA
tggtaacgagacgcac

SEQ ID NO: 37976 - DNA, 16 bp, synthetic construct
  misc_feature 1..16: note = synthetic [barcode part1]
  source 1..16: mol_type = other DNA
acaggcacgttgcaag

SEQ ID NO: 37977 - DNA, 16 bp, synthetic construct
  misc_feature 1..16: note = synthetic [barcode part1]
  source 1..16: mol_type = other DNA
gactacaacgccaatc

SEQ ID NO: 37978 - DNA, 16 bp, synthetic construct
  misc_feature 1..16: note = synthetic [barcode part1]
  source 1..16: mol_type = other DNA
ttattgcaagtccacc

SEQ ID NO: 37979 - DNA, 16 bp, synthetic construct
  misc_feature 1..16: note = synthetic [barcode part1]
  source 1..16: mol_type = other DNA
tgtgatacgccacagt

SEQ ID NO: 37980 - DNA, 16 bp, synthetic construct
  misc_feature 1..16: note = synthetic [barcode part1]
  source 1..16: mol_type = other DNA
gaggcaagagttcgtc

SEQ ID NO: 37981 - DNA, 16 bp, synthetic construct
  misc_feature 1..16: note = synthetic [barcode part1]
  source 1..16: mol_type = other DNA
gacagaactcctgact

SEQ ID NO: 37982 - DNA, 16 bp, synthetic construct
  misc_feature 1..16: note = synthetic [barcode part1]
  source 1..16: mol_type = other DNA
tagtcttgttggcgcc

SEQ ID NO: 37983 - DNA, 16 bp, synthetic construct
  misc_feature 1..16: note = synthetic [barcode part1]
  source 1..16: mol_type = other DNA
tcacaggttcgatctt

SEQ ID NO: 37984 - DNA, 16 bp, synthetic construct
  misc_feature 1..16: note = synthetic [barcode part1]
  source 1..16: mol_type = other DNA
tcaacacgtaccagtg

SEQ ID NO: 37985 - DNA, 16 bp, synthetic construct
  misc_feature 1..16: note = synthetic [barcode part1]
  source 1..16: mol_type = other DNA
cgtcggataagaatac

SEQ ID NO: 37986 - DNA, 16 bp, synthetic construct
  misc_feature 1..16: note = synthetic [barcode part1]
  source 1..16: mol_type = other DNA
tctctgagaggaacct

SEQ ID NO: 37987 - DNA, 16 bp, synthetic construct
  misc_feature 1..16: note = synthetic [barcode part1]
  source 1..16: mol_type = other DNA
gcagaacttgtctcag

SEQ ID NO: 37988 - DNA, 16 bp, synthetic construct
  misc_feature 1..16: note = synthetic [barcode part1]
  source 1..16: mol_type = other DNA
gtactcaagatccacg

SEQ ID NO: 37989 - DNA, 16 bp, synthetic construct
  misc_feature 1..16: note = synthetic [barcode part1]
  source 1..16: mol_type = other DNA
gccttgtatcttccac

SEQ ID NO: 37990 - DNA, 16 bp, synthetic construct
  misc_feature 1..16: note = synthetic [barcode part1]
  source 1..16: mol_type = other DNA
aacgttggtgtacgtc

SEQ ID NO: 37991 - DNA, 16 bp, synthetic construct
  misc_feature 1..16: note = synthetic [barcode part1]
  source 1..16: mol_type = other DNA
tagagtctgcaacacc

SEQ ID NO: 37992 - DNA, 16 bp, synthetic construct
  misc_feature 1..16: note = synthetic [barcode part1]
  source 1..16: mol_type = other DNA
gtgttacaacgagtag

SEQ ID NO: 37993 - DNA, 16 bp, synthetic construct
  misc_feature 1..16: note = synthetic [barcode part1]
  source 1..16: mol_type = other DNA
ttatcggccaggttag

SEQ ID NO: 37994 - DNA, 16 bp, synthetic construct
  misc_feature 1..16: note = synthetic [barcode part1]
  source 1..16: mol_type = other DNA
aacgcagttgcacttg

SEQ ID NO: 37995 - DNA, 16 bp, synthetic construct
  misc_feature 1..16: note = synthetic [barcode part1]
  source 1..16: mol_type = other DNA
tatatagaggccgaac

SEQ ID NO: 37996 - DNA, 16 bp, synthetic construct
  misc_feature 1..16: note = synthetic [barcode part1]
  source 1..16: mol_type = other DNA
gtctagttctcgtgcg

SEQ ID NO: 37997 - DNA, 16 bp, synthetic construct
  misc_feature 1..16: note = synthetic [barcode part1]
  source 1..16: mol_type = other DNA
gttcagattacaggcc

SEQ ID NO: 37998 - DNA, 16 bp, synthetic construct
  misc_feature 1..16: note = synthetic [barcode part1]
  source 1..16: mol_type = other DNA
cgtcgaaccgttaagt

SEQ ID NO: 37999 - DNA, 16 bp, synthetic construct
  misc_feature 1..16: note = synthetic [barcode part1]
  source 1..16: mol_type = other DNA
attctcgacttggtgt

SEQ ID NO: 38000 - DNA, 16 bp, synthetic construct
  misc_feature 1..16: note = synthetic [barcode part1]
  source 1..16: mol_type = other DNA
tgactggaggatctct

SEQ ID NO: 38001 - DNA, 16 bp, synthetic construct
  misc_feature 1..16: note = synthetic [barcode part1]
  source 1..16: mol_type = other DNA
ccttgtcgttcgcaag

SEQ ID NO: 38002 - DNA, 16 bp, synthetic construct
  misc_feature 1..16: note = synthetic [barcode part1]
  source 1..16: mol_type = other DNA
cagtgttgcctacctg

SEQ ID NO: 38003 - DNA, 16 bp, synthetic construct
  misc_feature 1..16: note = synthetic [barcode part1]
  source 1..16: mol_type = other DNA
gtgattctactcctag

SEQ ID NO: 38004 - DNA, 16 bp, synthetic construct
  misc_feature 1..16: note = synthetic [barcode part1]
  source 1..16: mol_type = other DNA
aggacgttggtaaccg

SEQ ID NO: 38005 - DNA, 16 bp, synthetic construct
  misc_feature 1..16: note = synthetic [barcode part1]
  source 1..16: mol_type = other DNA
cgaccacaatataccg

SEQ ID NO: 38006 - DNA, 16 bp, synthetic construct
  misc_feature 1..16: note = synthetic [barcode part1]
  source 1..16: mol_type = other DNA
acgcaagacgactcag

SEQ ID NO: 38007 - DNA, 16 bp, synthetic construct
  misc_feature 1..16: note = synthetic [barcode part1]
  source 1..16: mol_type = other DNA
tgttagactgtgcctt

SEQ ID NO: 38008 - DNA, 16 bp, synthetic construct
  misc_feature 1..16: note = synthetic [barcode part1]
  source 1..16: mol_type = other DNA
gttgagtaggttgtcc

SEQ ID NO: 38009 - DNA, 16 bp, synthetic construct
  misc_feature 1..16: note = synthetic [barcode part1]
  source 1..16: mol_type = other DNA
tcctgtaaccgaactt

SEQ ID NO: 38010 - DNA, 16 bp, synthetic construct
  misc_feature 1..16: note = synthetic [barcode part1]
  source 1..16: mol_type = other DNA
gttgcctagacctacc

SEQ ID NO: 38011 - DNA, 16 bp, synthetic construct
  misc_feature 1..16: note = synthetic [barcode part1]
  source 1..16: mol_type = other DNA
tagtaccgtggtatcg

SEQ ID NO: 38012 - DNA, 16 bp, synthetic construct
  misc_feature 1..16: note = synthetic [barcode part1]
  source 1..16: mol_type = other DNA
agagagaccgattgag

SEQ ID NO: 38013 - DNA, 16 bp, synthetic construct
  misc_feature 1..16: note = synthetic [barcode part1]
  source 1..16: mol_type = other DNA
cacgtaacggaaggtc

SEQ ID NO: 38014 - DNA, 16 bp, synthetic construct
  misc_feature 1..16: note = synthetic [barcode part1]
  source 1..16: mol_type = other DNA
agttgcgtctcggtct

SEQ ID NO: 38015 - DNA, 16 bp, synthetic construct
  misc_feature 1..16: note = synthetic [barcode part1]
  source 1..16: mol_type = other DNA
ttattgatctcgtgcg

SEQ ID NO: 38016 - DNA, 16 bp, synthetic construct
  misc_feature 1..16: note = synthetic [barcode part1]
  source 1..16: mol_type = other DNA
tcgcgtgttccttgag

SEQ ID NO: 38017 - DNA, 16 bp, synthetic construct
  misc_feature 1..16: note = synthetic [barcode part1]
  source 1..16: mol_type = other DNA
cgattcttgtggttgt

SEQ ID NO: 38018 - DNA, 16 bp, synthetic construct
  misc_feature 1..16: note = synthetic [barcode part1]
  source 1..16: mol_type = other DNA
tccgtactcagatcgc

SEQ ID NO: 38019 - DNA, 16 bp, synthetic construct
  misc_feature 1..16: note = synthetic [barcode part1]
  source 1..16: mol_type = other DNA
taggactaccaactgc

SEQ ID NO: 38020 - DNA, 16 bp, synthetic construct
  misc_feature 1..16: note = synthetic [barcode part1]
  source 1..16: mol_type = other DNA
tagagtcggttgactc

SEQ ID NO: 38021 - DNA, 16 bp, synthetic construct
  misc_feature 1..16: note = synthetic [barcode part1]
  source 1..16: mol_type = other DNA
aacgtggcggattacg

SEQ ID NO: 38022 - DNA, 16 bp, synthetic construct
  misc_feature 1..16: note = synthetic [barcode part1]
  source 1..16: mol_type = other DNA
tgtgacttcaggtacg

SEQ ID NO: 38023 - DNA, 16 bp, synthetic construct
  misc_feature 1..16: note = synthetic [barcode part1]
  source 1..16: mol_type = other DNA
acgtgttgagtcggag

SEQ ID NO: 38024 - DNA, 16 bp, synthetic construct
  misc_feature 1..16: note = synthetic [barcode part1]
  source 1..16: mol_type = other DNA
caattctcgcgaccac

SEQ ID NO: 38025 - DNA, 16 bp, synthetic construct
  misc_feature 1..16: note = synthetic [barcode part1]
  source 1..16: mol_type = other DNA
ttacggatagaagacc

SEQ ID NO: 38026 - DNA, 16 bp, synthetic construct
  misc_feature 1..16: note = synthetic [barcode part1]
  source 1..16: mol_type = other DNA
attaggcacctaacgc

SEQ ID NO: 38027 - DNA, 16 bp, synthetic construct
  misc_feature 1..16: note = synthetic [barcode part1]
  source 1..16: mol_type = other DNA
gtatcggaggagtcgt

SEQ ID NO: 38028 - DNA, 16 bp, synthetic construct
  misc_feature 1..16: note = synthetic [barcode part1]
  source 1..16: mol_type = other DNA
acaaccaatcgcgtac

SEQ ID NO: 38029 - DNA, 16 bp, synthetic construct
  misc_feature 1..16: note = synthetic [barcode part1]
  source 1..16: mol_type = other DNA
gcctgagaatacttgc

SEQ ID NO: 38030 - DNA, 16 bp, synthetic construct
  misc_feature 1..16: note = synthetic [barcode part1]
  source 1..16: mol_type = other DNA
gtggacttcaggtgtt

SEQ ID NO: 38031 - DNA, 16 bp, synthetic construct
  misc_feature 1..16: note = synthetic [barcode part1]
  source 1..16: mol_type = other DNA
tacaccaggagttaag

SEQ ID NO: 38032 - DNA, 16 bp, synthetic construct
  misc_feature 1..16: note = synthetic [barcode part1]
  source 1..16: mol_type = other DNA
aaggattacgcgccag

SEQ ID NO: 38033 - DNA, 16 bp, synthetic construct
  misc_feature 1..16: note = synthetic [barcode part1]
  source 1..16: mol_type = other DNA
acggtgaccgttattg

SEQ ID NO: 38034 - DNA, 16 bp, synthetic construct
  misc_feature 1..16: note = synthetic [barcode part1]
  source 1..16: mol_type = other DNA
aagtacctctgaacgc

SEQ ID NO: 38035 - DNA, 16 bp, synthetic construct
  misc_feature 1..16: note = synthetic [barcode part1]
  source 1..16: mol_type = other DNA
tgaccgaaccgtaact

SEQ ID NO: 38036 - DNA, 16 bp, synthetic construct
  misc_feature 1..16: note = synthetic [barcode part1]
  source 1..16: mol_type = other DNA
atcttcactcgcactc

SEQ ID NO: 38037 - DNA, 16 bp, synthetic construct
  misc_feature 1..16: note = synthetic [barcode part1]
  source 1..16: mol_type = other DNA
atcactggtcaggttg

SEQ ID NO: 38038 - DNA, 16 bp, synthetic construct
  misc_feature 1..16: note = synthetic [barcode part1]
  source 1..16: mol_type = other DNA
cgtataaccaccgcct

SEQ ID NO: 38039 - DNA, 16 bp, synthetic construct
  misc_feature 1..16: note = synthetic [barcode part1]
  source 1..16: mol_type = other DNA
tgattgcaccttctag

SEQ ID NO: 38040 - DNA, 16 bp, synthetic construct
  misc_feature 1..16: note = synthetic [barcode part1]
  source 1..16: mol_type = other DNA
attaacgtccggttct

SEQ ID NO: 38041 - DNA, 16 bp, synthetic construct
  misc_feature 1..16: note = synthetic [barcode part1]
  source 1..16: mol_type = other DNA
atactcgcacctgaag

SEQ ID NO: 38042 - DNA, 16 bp, synthetic construct
  misc_feature 1..16: note = synthetic [barcode part1]
  source 1..16: mol_type = other DNA
agaacaacaggacgac

SEQ ID NO: 38043 - DNA, 16 bp, synthetic construct
  misc_feature 1..16: note = synthetic [barcode part1]
  source 1..16: mol_type = other DNA
aacgacgcgagtgttg

SEQ ID NO: 38044 - DNA, 16 bp, synthetic construct
  misc_feature 1..16: note = synthetic [barcode part1]
  source 1..16: mol_type = other DNA
acctaagtctgaacgc

SEQ ID NO: 38045 - DNA, 16 bp, synthetic construct
  misc_feature 1..16: note = synthetic [barcode part1]
  source 1..16: mol_type = other DNA
cgcctagtggtaagag

SEQ ID NO: 38046 - DNA, 16 bp, synthetic construct
  misc_feature 1..16: note = synthetic [barcode part1]
  source 1..16: mol_type = other DNA
gcgcgtgcaatattgt

SEQ ID NO: 38047 - DNA, 16 bp, synthetic construct
  misc_feature 1..16: note = synthetic [barcode part1]
  source 1..16: mol_type = other DNA
ccttgtcgtaacgaag

SEQ ID NO: 38048 - DNA, 16 bp, synthetic construct
  misc_feature 1..16: note = synthetic [barcode part1]
  source 1..16: mol_type = other DNA
acctagaggacaatac

SEQ ID NO: 38049 - DNA, 16 bp, synthetic construct
  misc_feature 1..16: note = synthetic [barcode part1]
  source 1..16: mol_type = other DNA
tgcacaactaccgtcc

SEQ ID NO: 38050 - DNA, 16 bp, synthetic construct
  misc_feature 1..16: note = synthetic [barcode part1]
  source 1..16: mol_type = other DNA
ccacactatccagtgc

SEQ ID NO: 38051 - DNA, 16 bp, synthetic construct
  misc_feature 1..16: note = synthetic [barcode part1]
  source 1..16: mol_type = other DNA
tcgagttatacaggag

SEQ ID NO: 38052 - DNA, 16 bp, synthetic construct
  misc_feature 1..16: note = synthetic [barcode part1]
  source 1..16: mol_type = other DNA
tacttggtacgccaag

SEQ ID NO: 38053 - DNA, 16 bp, synthetic construct
  misc_feature 1..16: note = synthetic [barcode part1]
  source 1..16: mol_type = other DNA
ttcaataacgaaggcg

SEQ ID NO: 38054 - DNA, 16 bp, synthetic construct
  misc_feature 1..16: note = synthetic [barcode part1]
  source 1..16: mol_type = other DNA
gtcgagacggttacag

SEQ ID NO: 38055 - DNA, 16 bp, synthetic construct
  misc_feature 1..16: note = synthetic [barcode part1]
  source 1..16: mol_type = other DNA
tgcggaagtatccttg

SEQ ID NO: 38056 - DNA, 16 bp, synthetic construct
  misc_feature 1..16: note = synthetic [barcode part1]
  source 1..16: mol_type = other DNA
ttgacttgcaactgtc

SEQ ID NO: 38057 - DNA, 16 bp, synthetic construct
  misc_feature 1..16: note = synthetic [barcode part1]
  source 1..16: mol_type = other DNA
taatccttagtcacgc

SEQ ID NO: 38058 - DNA, 16 bp, synthetic construct
  misc_feature 1..16: note = synthetic [barcode part1]
  source 1..16: mol_type = other DNA
cctcggttgattctct

SEQ ID NO: 38059 - DNA, 16 bp, synthetic construct
  misc_feature 1..16: note = synthetic [barcode part1]
  source 1..16: mol_type = other DNA
acaagtatcacctgcg

SEQ ID NO: 38060 - DNA, 16 bp, synthetic construct
  misc_feature 1..16: note = synthetic [barcode part1]
  source 1..16: mol_type = other DNA
aagattggccacttcg

SEQ ID NO: 38061 - DNA, 16 bp, synthetic construct
  misc_feature 1..16: note = synthetic [barcode part1]
  source 1..16: mol_type = other DNA
aactaaggttcgaacg

SEQ ID NO: 38062 - DNA, 16 bp, synthetic construct
  misc_feature 1..16: note = synthetic [barcode part1]
  source 1..16: mol_type = other DNA
atcggagagtcaagag

SEQ ID NO: 38063 - DNA, 16 bp, synthetic construct
  misc_feature 1..16: note = synthetic [barcode part1]
  source 1..16: mol_type = other DNA
caaggagtgactgtgc

SEQ ID NO: 38064 - DNA, 16 bp, synthetic construct
  misc_feature 1..16: note = synthetic [barcode part1]
  source 1..16: mol_type = other DNA
gttagaactccgatcg

SEQ ID NO: 38065 - DNA, 16 bp, synthetic construct
  misc_feature 1..16: note = synthetic [barcode part1]
  source 1..16: mol_type = other DNA
gatcgcctcgtacttg

SEQ ID NO: 38066 - DNA, 16 bp, synthetic construct
  misc_feature 1..16: note = synthetic [barcode part1]
  source 1..16: mol_type = other DNA
ttcggtaagtgactcg

SEQ ID NO: 38067 - DNA, 16 bp, synthetic construct
  misc_feature 1..16: note = synthetic [barcode part1]
  source 1..16: mol_type = other DNA
cgatacttacttaccg

SEQ ID NO: 38068 - DNA, 16 bp, synthetic construct
  misc_feature 1..16: note = synthetic [barcode part1]
  source 1..16: mol_type = other DNA
gcggttgtatagtcac

SEQ ID NO: 38069 - DNA, 16 bp, synthetic construct
  misc_feature 1..16: note = synthetic [barcode part1]
  source 1..16: mol_type = other DNA
gtggccgacactaatt

SEQ ID NO: 38070 - DNA, 16 bp, synthetic construct
  misc_feature 1..16: note = synthetic [barcode part1]
  source 1..16: mol_type = other DNA
tcggtcgtaactaacg

SEQ ID NO: 38071 - DNA, 16 bp, synthetic construct
  misc_feature 1..16: note = synthetic [barcode part1]
  source 1..16: mol_type = other DNA
tcagtggcaggaacgt

SEQ ID NO: 38072 - DNA, 16 bp, synthetic construct
  misc_feature 1..16: note = synthetic [barcode part1]
  source 1..16: mol_type = other DNA
attgacacctgactct

SEQ ID NO: 38073 - DNA, 16 bp, synthetic construct
  misc_feature 1..16: note = synthetic [barcode part1]
  source 1..16: mol_type = other DNA
tagttggtcaggactc

SEQ ID NO: 38074 - DNA, 16 bp, synthetic construct
  misc_feature 1..16: note = synthetic [barcode part1]
  source 1..16: mol_type = other DNA
cacctcgatctacggt

SEQ ID NO: 38075 - DNA, 16 bp, synthetic construct
  misc_feature 1..16: note = synthetic [barcode part1]
  source 1..16: mol_type = other DNA
cctaactgtcgcgtgt

SEQ ID NO: 38076 - DNA, 16 bp, synthetic construct
  misc_feature 1..16: note = synthetic [barcode part1]
  source 1..16: mol_type = other DNA
gcactattctaggacg

SEQ ID NO: 38077 - DNA, 16 bp, synthetic construct
  misc_feature 1..16: note = synthetic [barcode part1]
  source 1..16: mol_type = other DNA
accagtgcaccttatt

SEQ ID NO: 38078 - DNA, 16 bp, synthetic construct
  misc_feature 1..16: note = synthetic [barcode part1]
  source 1..16: mol_type = other DNA
tgcagacacagtaagt

SEQ ID NO: 38079 - DNA, 16 bp, synthetic construct
  misc_feature 1..16: note = synthetic [barcode part1]
  source 1..16: mol_type = other DNA
cgacacagttggaggt

SEQ ID NO: 38080 - DNA, 16 bp, synthetic construct
  misc_feature 1..16: note = synthetic [barcode part1]
  source 1..16: mol_type = other DNA
tagatactctccggtt

SEQ ID NO: 38081 - DNA, 16 bp, synthetic construct
  misc_feature 1..16: note = synthetic [barcode part1]
  source 1..16: mol_type = other DNA
cagtacggtgtaacct

SEQ ID NO: 38082 - DNA, 16 bp, synthetic construct
  misc_feature 1..16: note = synthetic [barcode part1]
  source 1..16: mol_type = other DNA
cctgaattgaagagtg

SEQ ID NO: 38083 - DNA, 16 bp, synthetic construct
  misc_feature 1..16: note = synthetic [barcode part1]
  source 1..16: mol_type = other DNA
cgcctgtagtattgtt

SEQ ID NO: 38084 - DNA, 16 bp, synthetic construct
  misc_feature 1..16: note = synthetic [barcode part1]
  source 1..16: mol_type = other DNA
aaccagtcaacactgc

SEQ ID NO: 38085 - DNA, 16 bp, synthetic construct
  misc_feature 1..16: note = synthetic [barcode part1]
  source 1..16: mol_type = other DNA
aaggaagtgcgatacg

SEQ ID NO: 38086 - DNA, 16 bp, synthetic construct
  misc_feature 1..16: note = synthetic [barcode part1]
  source 1..16: mol_type = other DNA
atactcctggttcagt

SEQ ID NO: 38087 - DNA, 16 bp, synthetic construct
  misc_feature 1..16: note = synthetic [barcode part1]
  source 1..16: mol_type = other DNA
cgtggtaacgatacct

SEQ ID NO: 38088 - DNA, 16 bp, synthetic construct
  misc_feature 1..16: note = synthetic [barcode part1]
  source 1..16: mol_type = other DNA
tgtctgtgcgatactt

SEQ ID NO: 38089 - DNA, 16 bp, synthetic construct
  misc_feature 1..16: note = synthetic [barcode part1]
  source 1..16: mol_type = other DNA
gactcaagattcggtc

SEQ ID NO: 38090 - DNA, 16 bp, synthetic construct
  misc_feature 1..16: note = synthetic [barcode part1]
  source 1..16: mol_type = other DNA
cctaagagttggtcac

SEQ ID NO: 38091 - DNA, 16 bp, synthetic construct
  misc_feature 1..16: note = synthetic [barcode part1]
  source 1..16: mol_type = other DNA
tagtagtaggacacgt

SEQ ID NO: 38092 - DNA, 16 bp, synthetic construct
  misc_feature 1..16: note = synthetic [barcode part1]
  source 1..16: mol_type = other DNA
acacgtgatacgcgtt

SEQ ID NO: 38093 - DNA, 16 bp, synthetic construct
  misc_feature 1..16: note = synthetic [barcode part1]
  source 1..16: mol_type = other DNA
acgccgtattctgaag

SEQ ID NO: 38094 - DNA, 16 bp, synthetic construct
  misc_feature 1..16: note = synthetic [barcode part1]
  source 1..16: mol_type = other DNA
ccagtgcgattccttg

SEQ ID NO: 38095 - DNA, 16 bp, synthetic construct
  misc_feature 1..16: note = synthetic [barcode part1]
  source 1..16: mol_type = other DNA
atctggacaccgttcc

SEQ ID NO: 38096 - DNA, 16 bp, synthetic construct
  misc_feature 1..16: note = synthetic [barcode part1]
  source 1..16: mol_type = other DNA
tcttcggaccgtacac

SEQ ID NO: 38097 - DNA, 16 bp, synthetic construct
  misc_feature 1..16: note = synthetic [barcode part1]
  source 1..16: mol_type = other DNA
gttaggtgcaacttgc

SEQ ID NO: 38098 - DNA, 16 bp, synthetic construct
  misc_feature 1..16: note = synthetic [barcode part1]
  source 1..16: mol_type = other DNA
tggcaatcttcgcgtc

SEQ ID NO: 38099 - DNA, 16 bp, synthetic construct
  misc_feature 1..16: note = synthetic [barcode part1]
  source 1..16: mol_type = other DNA
gcactggtagtaggac

SEQ ID NO: 38100 - DNA, 16 bp, synthetic construct
  misc_feature 1..16: note = synthetic [barcode part1]
  source 1..16: mol_type = other DNA
tctatcacggtaggac

SEQ ID NO: 38101 - DNA, 16 bp, synthetic construct
  misc_feature 1..16: note = synthetic [barcode part1]
  source 1..16: mol_type = other DNA
taattagacgccacgc

SEQ ID NO: 38102 - DNA, 16 bp, synthetic construct
  misc_feature 1..16: note = synthetic [barcode part1]
  source 1..16: mol_type = other DNA
caagtacttggtacgc

SEQ ID NO: 38103 - DNA, 16 bp, synthetic construct
  misc_feature 1..16: note = synthetic [barcode part1]
  source 1..16: mol_type = other DNA
tgcaccgtgtagttag

SEQ ID NO: 38104 - DNA, 16 bp, synthetic construct
  misc_feature 1..16: note = synthetic [barcode part1]
  source 1..16: mol_type = other DNA
tgtgcagtccaatctt

SEQ ID NO: 38105 - DNA, 16 bp, synthetic construct
  misc_feature 1..16: note = synthetic [barcode part1]
  source 1..16: mol_type = other DNA
atcgtcaatatcctcg

SEQ ID NO: 38106 - DNA, 16 bp, synthetic construct
  misc_feature 1..16: note = synthetic [barcode part1]
  source 1..16: mol_type = other DNA
acgtggtcagttacgt

SEQ ID NO: 38107 - DNA, 16 bp, synthetic construct
  misc_feature 1..16: note = synthetic [barcode part1]
  source 1..16: mol_type = other DNA
gttgttggactcagtg

SEQ ID NO: 38108 - DNA, 16 bp, synthetic construct
  misc_feature 1..16: note = synthetic [barcode part1]
  source 1..16: mol_type = other DNA
tcttctaggtacgccg

SEQ ID NO: 38109 - DNA, 16 bp, synthetic construct
  misc_feature 1..16: note = synthetic [barcode part1]
  source 1..16: mol_type = other DNA
gcacctgacttgtaag

SEQ ID NO: 38110 - DNA, 16 bp, synthetic construct
  misc_feature 1..16: note = synthetic [barcode part1]
  source 1..16: mol_type = other DNA
tgtcactggtgacagt

SEQ ID NO: 38111 - DNA, 16 bp, synthetic construct
  misc_feature 1..16: note = synthetic [barcode part1]
  source 1..16: mol_type = other DNA
acgttccaactgttac

SEQ ID NO: 38112 - DNA, 16 bp, synthetic construct
  misc_feature 1..16: note = synthetic [barcode part1]
  source 1..16: mol_type = other DNA
acaacctacggtctag

SEQ ID NO: 38113 - DNA, 16 bp, synthetic construct
  misc_feature 1..16: note = synthetic [barcode part1]
  source 1..16: mol_type = other DNA
gattggtcgatcaacc

SEQ ID NO: 38114 - DNA, 16 bp, synthetic construct
  misc_feature 1..16: note = synthetic [barcode part1]
  source 1..16: mol_type = other DNA
atctatctatcgtggc

SEQ ID NO: 38115 - DNA, 16 bp, synthetic construct
  misc_feature 1..16: note = synthetic [barcode part1]
  source 1..16: mol_type = other DNA
ccaattgccttggaag

SEQ ID NO: 38116 - DNA, 16 bp, synthetic construct
  misc_feature 1..16: note = synthetic [barcode part1]
  source 1..16: mol_type = other DNA
aggttctatcgcagtg

SEQ ID NO: 38117 - DNA, 16 bp, synthetic construct
  misc_feature 1..16: note = synthetic [barcode part1]
  source 1..16: mol_type = other DNA
gatcgccagtaatctg

SEQ ID NO: 38118 - DNA, 16 bp, synthetic construct
  misc_feature 1..16: note = synthetic [barcode part1]
  source 1..16: mol_type = other DNA
aagtaaccgtgaatcg

SEQ ID NO: 38119 - DNA, 16 bp, synthetic construct
  misc_feature 1..16: note = synthetic [barcode part1]
  source 1..16: mol_type = other DNA
cctactcacggataag

SEQ ID NO: 38120 - DNA, 16 bp, synthetic construct
  misc_feature 1..16: note = synthetic [barcode part1]
  source 1..16: mol_type = other DNA
tgtgacgttcgcctgt

SEQ ID NO: 38121 - DNA, 16 bp, synthetic construct
  misc_feature 1..16: note = synthetic [barcode part1]
  source 1..16: mol_type = other DNA
cacacctagtaattcc

SEQ ID NO: 38122 - DNA, 16 bp, synthetic construct
  misc_feature 1..16: note = synthetic [barcode part1]
  source 1..16: mol_type = other DNA
agaacgcgaagtacag

SEQ ID NO: 38123 - DNA, 16 bp, synthetic construct
  misc_feature 1..16: note = synthetic [barcode part1]
  source 1..16: mol_type = other DNA
tggtcctcggtgtatc

SEQ ID NO: 38124 - DNA, 16 bp, synthetic construct
  misc_feature 1..16: note = synthetic [barcode part1]
  source 1..16: mol_type = other DNA
gagaagaatcgtgacg

SEQ ID NO: 38125 - DNA, 16 bp, synthetic construct
  misc_feature 1..16: note = synthetic [barcode part1]
  source 1..16: mol_type = other DNA
accagattccaacgac

SEQ ID NO: 38126 - DNA, 16 bp, synthetic construct
  misc_feature 1..16: note = synthetic [barcode part1]
  source 1..16: mol_type = other DNA
cggagaattctgatcc

SEQ ID NO: 38127 - DNA, 16 bp, synthetic construct
  misc_feature 1..16: note = synthetic [barcode part1]
  source 1..16: mol_type = other DNA
aggttcggttcaggtt

SEQ ID NO: 38128 - DNA, 16 bp, synthetic construct
  misc_feature 1..16: note = synthetic [barcode part1]
  source 1..16: mol_type = other DNA
attcgaaccgtggact

SEQ ID NO: 38129 - DNA, 16 bp, synthetic construct
  misc_feature 1..16: note = synthetic [barcode part1]
  source 1..16: mol_type = other DNA
cgtactaggtctcctg

SEQ ID NO: 38130 - DNA, 16 bp, synthetic construct
  misc_feature 1..16: note = synthetic [barcode part1]
  source 1..16: mol_type = other DNA
acgccactactacaag

SEQ ID NO: 38131 - DNA, 16 bp, synthetic construct
  misc_feature 1..16: note = synthetic [barcode part1]
  source 1..16: mol_type = other DNA
gactcagagtctgact

SEQ ID NO: 38132 - DNA, 16 bp, synthetic construct
  misc_feature 1..16: note = synthetic [barcode part1]
  source 1..16: mol_type = other DNA
actaacctacgcgtag

SEQ ID NO: 38133 - DNA, 16 bp, synthetic construct
  misc_feature 1..16: note = synthetic [barcode part1]
  source 1..16: mol_type = other DNA
aaggcaacttagacgt

SEQ ID NO: 38134 - DNA, 16 bp, synthetic construct
  misc_feature 1..16: note = synthetic [barcode part1]
  source 1..16: mol_type = other DNA
tcaagtgacgagttcc

SEQ ID NO: 38135 - DNA, 16 bp, synthetic construct
  misc_feature 1..16: note = synthetic [barcode part1]
  source 1..16: mol_type = other DNA
gagacagttgtgaatc

SEQ ID NO: 38136 - DNA, 16 bp, synthetic construct
  misc_feature 1..16: note = synthetic [barcode part1]
  source 1..16: mol_type = other DNA
cactcctccgataacg

SEQ ID NO: 38137 - DNA, 16 bp, synthetic construct
  misc_feature 1..16: note = synthetic [barcode part1]
  source 1..16: mol_type = other DNA
gtggtgatatcctacg

SEQ ID NO: 38138 - DNA, 16 bp, synthetic construct
  misc_feature 1..16: note = synthetic [barcode part1]
  source 1..16: mol_type = other DNA
gagattcagtgaacac

SEQ ID NO: 38139 - DNA, 16 bp, synthetic construct
  misc_feature 1..16: note = synthetic [barcode part1]
  source 1..16: mol_type = other DNA
aagttgccgagttgtc

SEQ ID NO: 38140 - DNA, 16 bp, synthetic construct
  misc_feature 1..16: note = synthetic [barcode part1]
  source 1..16: mol_type = other DNA
agacttatccgactct

SEQ ID NO: 38141 - DNA, 16 bp, synthetic construct
  misc_feature 1..16: note = synthetic [barcode part1]
  source 1..16: mol_type = other DNA
cggacctaagtggtag

SEQ ID NO: 38142 - DNA, 16 bp, synthetic construct
  misc_feature 1..16: note = synthetic [barcode part1]
  source 1..16: mol_type = other DNA
tgttctatccgtcacc

SEQ ID NO: 38143 - DNA, 16 bp, synthetic construct
  misc_feature 1..16: note = synthetic [barcode part1]
  source 1..16: mol_type = other DNA
atctacgaattgcgcg

SEQ ID NO: 38144 - DNA, 16 bp, synthetic construct
  misc_feature 1..16: note = synthetic [barcode part1]
  source 1..16: mol_type = other DNA
tcctcttatcggtcac

SEQ ID NO: 38145 - DNA, 16 bp, synthetic construct
  misc_feature 1..16: note = synthetic [barcode part1]
  source 1..16: mol_type = other DNA
aggccggtgactatag

SEQ ID NO: 38146 - DNA, 16 bp, synthetic construct
  misc_feature 1..16: note = synthetic [barcode part1]
  source 1..16: mol_type = other DNA
gcgttaggtatctggt

SEQ ID NO: 38147 - DNA, 16 bp, synthetic construct
  misc_feature 1..16: note = synthetic [barcode part1]
  source 1..16: mol_type = other DNA
tcgagtatcgtaggtc

SEQ ID NO: 38148 - DNA, 16 bp, synthetic construct
  misc_feature 1..16: note = synthetic [barcode part1]
  source 1..16: mol_type = other DNA
acctaccaccttaggc

SEQ ID NO: 38149 - DNA, 16 bp, synthetic construct
  misc_feature 1..16: note = synthetic [barcode part1]
  source 1..16: mol_type = other DNA
gtaacctgttcttgtg

SEQ ID NO: 38150 - DNA, 16 bp, synthetic construct
  misc_feature 1..16: note = synthetic [barcode part1]
  source 1..16: mol_type = other DNA
aagtagttgtaccgag

SEQ ID NO: 38151 - DNA, 16 bp, synthetic construct
  misc_feature 1..16: note = synthetic [barcode part1]
  source 1..16: mol_type = other DNA
gcagtccgagtgtaag

SEQ ID NO: 38152 - DNA, 16 bp, synthetic construct
  misc_feature 1..16: note = synthetic [barcode part1]
  source 1..16: mol_type = other DNA
tctgtccgtgagtaag

SEQ ID NO: 38153 - DNA, 16 bp, synthetic construct
  misc_feature 1..16: note = synthetic [barcode part1]
  source 1..16: mol_type = other DNA
tcagttgcacaacgtg

SEQ ID NO: 38154 - DNA, 16 bp, synthetic construct
  misc_feature 1..16: note = synthetic [barcode part1]
  source 1..16: mol_type = other DNA
cctgactaacctcttc

SEQ ID NO: 38155 - DNA, 16 bp, synthetic construct
  misc_feature 1..16: note = synthetic [barcode part1]
  source 1..16: mol_type = other DNA
gtgataccgtgatacc

SEQ ID NO: 38156 - DNA, 16 bp, synthetic construct
  misc_feature 1..16: note = synthetic [barcode part1]
  source 1..16: mol_type = other DNA
gacagtctcttgtgtt

SEQ ID NO: 38157 - DNA, 16 bp, synthetic construct
  misc_feature 1..16: note = synthetic [barcode part1]
  source 1..16: mol_type = other DNA
gttcttacaagtcacc

SEQ ID NO: 38158 - DNA, 16 bp, synthetic construct
  misc_feature 1..16: note = synthetic [barcode part1]
  source 1..16: mol_type = other DNA
cagtgcgtaacgagac

SEQ ID NO: 38159 - DNA, 16 bp, synthetic construct
  misc_feature 1..16: note = synthetic [barcode part1]
  source 1..16: mol_type = other DNA
gattcggtgcgttcct

SEQ ID NO: 38160 - DNA, 16 bp, synthetic construct
  misc_feature 1..16: note = synthetic [barcode part1]
  source 1..16: mol_type = other DNA
gacgactctaggttgt

SEQ ID NO: 38161 - DNA, 16 bp, synthetic construct
  misc_feature 1..16: note = synthetic [barcode part1]
  source 1..16: mol_type = other DNA
tcgattgaactggtcg

SEQ ID NO: 38162 - DNA, 16 bp, synthetic construct
  misc_feature 1..16: note = synthetic [barcode part1]
  source 1..16: mol_type = other DNA
gcaggtatctactcag

SEQ ID NO: 38163 - DNA, 16 bp, synthetic construct
  misc_feature 1..16: note = synthetic [barcode part1]
  source 1..16: mol_type = other DNA
gaaggaccttgtggac

SEQ ID NO: 38164 - DNA, 16 bp, synthetic construct
  misc_feature 1..16: note = synthetic [barcode part1]
  source 1..16: mol_type = other DNA
gaatccgtacttcgtt

SEQ ID NO: 38165 - DNA, 16 bp, synthetic construct
  misc_feature 1..16: note = synthetic [barcode part1]
  source 1..16: mol_type = other DNA
gccaattctagaaccg

SEQ ID NO: 38166 - DNA, 16 bp, synthetic construct
  misc_feature 1..16: note = synthetic [barcode part1]
  source 1..16: mol_type = other DNA
ccagacgagtagagtc

SEQ ID NO: 38167 - DNA, 16 bp, synthetic construct
  misc_feature 1..16: note = synthetic [barcode part1]
  source 1..16: mol_type = other DNA
tgcgaatcggatactc

SEQ ID NO: 38168 - DNA, 16 bp, synthetic construct
  misc_feature 1..16: note = synthetic [barcode part1]
  source 1..16: mol_type = other DNA
gtagtggacaaccgtg

SEQ ID NO: 38169 - DNA, 16 bp, synthetic construct
  misc_feature 1..16: note = synthetic [barcode part1]
  source 1..16: mol_type = other DNA
gccaatattcacggac

SEQ ID NO: 38170 - DNA, 16 bp, synthetic construct
  misc_feature 1..16: note = synthetic [barcode part1]
  source 1..16: mol_type = other DNA
tcgatccaagtcagac

SEQ ID NO: 38171 - DNA, 16 bp, synthetic construct
  misc_feature 1..16: note = synthetic [barcode part1]
  source 1..16: mol_type = other DNA
gtacttcgacctgatt

SEQ ID NO: 38172 - DNA, 16 bp, synthetic construct
  misc_feature 1..16: note = synthetic [barcode part1]
  source 1..16: mol_type = other DNA
cgtcgttacaattgtc

SEQ ID NO: 38173 - DNA, 16 bp, synthetic construct
  misc_feature 1..16: note = synthetic [barcode part1]
  source 1..16: mol_type = other DNA
tacaggtagacggtgc

SEQ ID NO: 38174 - DNA, 16 bp, synthetic construct
  misc_feature 1..16: note = synthetic [barcode part1]
  source 1..16: mol_type = other DNA
cacacttgacagtctt

SEQ ID NO: 38175 - DNA, 16 bp, synthetic construct
  misc_feature 1..16: note = synthetic [barcode part1]
  source 1..16: mol_type = other DNA
gtactctgtcgccagt

SEQ ID NO: 38176 - DNA, 16 bp, synthetic construct
  misc_feature 1..16: note = synthetic [barcode part1]
  source 1..16: mol_type = other DNA
aacagtcggaggtacc

SEQ ID NO: 38177 - DNA, 16 bp, synthetic construct
  misc_feature 1..16: note = synthetic [barcode part1]
  source 1..16: mol_type = other DNA
tgcggaacggtaatcg

SEQ ID NO: 38178 - DNA, 16 bp, synthetic construct
  misc_feature 1..16: note = synthetic [barcode part1]
  source 1..16: mol_type = other DNA
aagatagtcgtggatc

SEQ ID NO: 38179 - DNA, 16 bp, synthetic construct
  misc_feature 1..16: note = synthetic [barcode part1]
  source 1..16: mol_type = other DNA
gatcaggactcttcag

SEQ ID NO: 38180 - DNA, 16 bp, synthetic construct
  misc_feature 1..16: note = synthetic [barcode part1]
  source 1..16: mol_type = other DNA
acgaggaccttatacc

SEQ ID NO: 38181 - DNA, 16 bp, synthetic construct
  misc_feature 1..16: note = synthetic [barcode part1]
  source 1..16: mol_type = other DNA
gttcctgtgaggatac

SEQ ID NO: 38182 - DNA, 16 bp, synthetic construct
  misc_feature 1..16: note = synthetic [barcode part1]
  source 1..16: mol_type = other DNA
acagtgttggtaccac

SEQ ID NO: 38183 - DNA, 16 bp, synthetic construct
  misc_feature 1..16: note = synthetic [barcode part1]
  source 1..16: mol_type = other DNA
ttgcaggacaaggcgt

SEQ ID NO: 38184 - DNA, 16 bp, synthetic construct
  misc_feature 1..16: note = synthetic [barcode part1]
  source 1..16: mol_type = other DNA
gccttcgagattactt

SEQ ID NO: 38185 - DNA, 16 bp, synthetic construct
  misc_feature 1..16: note = synthetic [barcode part1]
  source 1..16: mol_type = other DNA
cacagagtggcgattg

SEQ ID NO: 38186 - DNA, 16 bp, synthetic construct
  misc_feature 1..16: note = synthetic [barcode part1]
  source 1..16: mol_type = other DNA
taccttgtgtctgagt

SEQ ID NO: 38187 - DNA, 16 bp, synthetic construct
  misc_feature 1..16: note = synthetic [barcode part1]
  source 1..16: mol_type = other DNA
tattcgtgttctaggc

SEQ ID NO: 38188 - DNA, 16 bp, synthetic construct
  misc_feature 1..16: note = synthetic [barcode part1]
  source 1..16: mol_type = other DNA
tgtaccacaacacgtg

SEQ ID NO: 38189 - DNA, 16 bp, synthetic construct
  misc_feature 1..16: note = synthetic [barcode part1]
  source 1..16: mol_type = other DNA
attcgttagtaccacc

SEQ ID NO: 38190 - DNA, 16 bp, synthetic construct
  misc_feature 1..16: note = synthetic [barcode part1]
  source 1..16: mol_type = other DNA
cgtgtatcttctctcg

SEQ ID NO: 38191 - DNA, 16 bp, synthetic construct
  misc_feature 1..16: note = synthetic [barcode part1]
  source 1..16: mol_type = other DNA
cgtgattgttaaggag

SEQ ID NO: 38192 - DNA, 16 bp, synthetic construct
  misc_feature 1..16: note = synthetic [barcode part1]
  source 1..16: mol_type = other DNA
ttggtccagtgtgtcc

SEQ ID NO: 38193 - DNA, 16 bp, synthetic construct
  misc_feature 1..16: note = synthetic [barcode part1]
  source 1..16: mol_type = other DNA
ttggttggtacacacg

SEQ ID NO: 38194 - DNA, 16 bp, synthetic construct
  misc_feature 1..16: note = synthetic [barcode part1]
  source 1..16: mol_type = other DNA
gccgaggttaatcttg

SEQ ID NO: 38195 - DNA, 16 bp, synthetic construct
  misc_feature 1..16: note = synthetic [barcode part1]
  source 1..16: mol_type = other DNA
gttcacttcgtccgtt

SEQ ID NO: 38196 - DNA, 16 bp, synthetic construct
  misc_feature 1..16: note = synthetic [barcode part1]
  source 1..16: mol_type = other DNA
tgttcgacctctgacg

SEQ ID NO: 38197 - DNA, 16 bp, synthetic construct
  misc_feature 1..16: note = synthetic [barcode part1]
  source 1..16: mol_type = other DNA
agactcggtccaagtt

SEQ ID NO: 38198 - DNA, 16 bp, synthetic construct
  misc_feature 1..16: note = synthetic [barcode part1]
  source 1..16: mol_type = other DNA
agtctccttctcagtc

SEQ ID NO: 38199 - DNA, 16 bp, synthetic construct
  misc_feature 1..16: note = synthetic [barcode part1]
  source 1..16: mol_type = other DNA
gtgtgacaattgaggt

SEQ ID NO: 38200 - DNA, 16 bp, synthetic construct
  misc_feature 1..16: note = synthetic [barcode part1]
  source 1..16: mol_type = other DNA
ataagaggtcgtcggc

SEQ ID NO: 38201 - DNA, 16 bp, synthetic construct
  misc_feature 1..16: note = synthetic [barcode part1]
  source 1..16: mol_type = other DNA
ttctgcggaagtgtac

SEQ ID NO: 38202 - DNA, 16 bp, synthetic construct
  misc_feature 1..16: note = synthetic [barcode part1]
  source 1..16: mol_type = other DNA
aacgttaaccgcggtt

SEQ ID NO: 38203 - DNA, 16 bp, synthetic construct
  misc_feature 1..16: note = synthetic [barcode part1]
  source 1..16: mol_type = other DNA
gatcggtaaggtcctt

SEQ ID NO: 38204 - DNA, 16 bp, synthetic construct
  misc_feature 1..16: note = synthetic [barcode part1]
  source 1..16: mol_type = other DNA
tggtgccaatagatag

SEQ ID NO: 38205 - DNA, 16 bp, synthetic construct
  misc_feature 1..16: note = synthetic [barcode part1]
  source 1..16: mol_type = other DNA
cctcgacagagattgt

SEQ ID NO: 38206 - DNA, 16 bp, synthetic construct
  misc_feature 1..16: note = synthetic [barcode part1]
  source 1..16: mol_type = other DNA
gtctcgttccaacttc

SEQ ID NO: 38207 - DNA, 16 bp, synthetic construct
  misc_feature 1..16: note = synthetic [barcode part1]
  source 1..16: mol_type = other DNA
tccgtgttcagtaatc

SEQ ID NO: 38208 - DNA, 16 bp, synthetic construct
  misc_feature 1..16: note = synthetic [barcode part1]
  source 1..16: mol_type = other DNA
accgttagattgccag

SEQ ID NO: 38209 - DNA, 16 bp, synthetic construct
  misc_feature 1..16: note = synthetic [barcode part1]
  source 1..16: mol_type = other DNA
cgcaggccgttatctt

SEQ ID NO: 38210 - DNA, 16 bp, synthetic construct
  misc_feature 1..16: note = synthetic [barcode part1]
  source 1..16: mol_type = other DNA
tagtgacacacagaac

SEQ ID NO: 38211 - DNA, 16 bp, synthetic construct
  misc_feature 1..16: note = synthetic [barcode part1]
  source 1..16: mol_type = other DNA
ttggtgactatcggac

SEQ ID NO: 38212 - DNA, 16 bp, synthetic construct
  misc_feature 1..16: note = synthetic [barcode part1]
  source 1..16: mol_type = other DNA
caccgtgaactgattg

SEQ ID NO: 38213 - DNA, 16 bp, synthetic construct
  misc_feature 1..16: note = synthetic [barcode part1]
  source 1..16: mol_type = other DNA
tccgtaagttcacgag

SEQ ID NO: 38214 - DNA, 16 bp, synthetic construct
  misc_feature 1..16: note = synthetic [barcode part1]
  source 1..16: mol_type = other DNA
actacttattcgcgac

SEQ ID NO: 38215 - DNA, 16 bp, synthetic construct
  misc_feature 1..16: note = synthetic [barcode part1]
  source 1..16: mol_type = other DNA
aacagtaactccgtcg

SEQ ID NO: 38216 - DNA, 16 bp, synthetic construct
  misc_feature 1..16: note = synthetic [barcode part1]
  source 1..16: mol_type = other DNA
tggaaggatcagtatc

SEQ ID NO: 38217 - DNA, 16 bp, synthetic construct
  misc_feature 1..16: note = synthetic [barcode part1]
  source 1..16: mol_type = other DNA
aggtgacggttacacg

SEQ ID NO: 38218 - DNA, 16 bp, synthetic construct
  misc_feature 1..16: note = synthetic [barcode part1]
  source 1..16: mol_type = other DNA
cgacgacgaaggtatc

SEQ ID NO: 38219 - DNA, 16 bp, synthetic construct
  misc_feature 1..16: note = synthetic [barcode part1]
  source 1..16: mol_type = other DNA
ttcctgacacagttgt

SEQ ID NO: 38220 - DNA, 16 bp, synthetic construct
  misc_feature 1..16: note = synthetic [barcode part1]
  source 1..16: mol_type = other DNA
gagactctacctatct

SEQ ID NO: 38221 - DNA, 16 bp, synthetic construct
  misc_feature 1..16: note = synthetic [barcode part1]
  source 1..16: mol_type = other DNA
agagttaagaggccag

SEQ ID NO: 38222 - DNA, 16 bp, synthetic construct
  misc_feature 1..16: note = synthetic [barcode part1]
  source 1..16: mol_type = other DNA
gacgtcgtaacgttac

SEQ ID NO: 38223 - DNA, 16 bp, synthetic construct
  misc_feature 1..16: note = synthetic [barcode part1]
  source 1..16: mol_type = other DNA
agtcagttggtcaacc

SEQ ID NO: 38224 - DNA, 16 bp, synthetic construct
  misc_feature 1..16: note = synthetic [barcode part1]
  source 1..16: mol_type = other DNA
agagtggtctgttacc

SEQ ID NO: 38225 - DNA, 16 bp, synthetic construct
  misc_feature 1..16: note = synthetic [barcode part1]
  source 1..16: mol_type = other DNA
cgcctcgaatacctac

SEQ ID NO: 38226 - DNA, 16 bp, synthetic construct
  misc_feature 1..16: note = synthetic [barcode part1]
  source 1..16: mol_type = other DNA
gactggaccacacaag

SEQ ID NO: 38227 - DNA, 16 bp, synthetic construct
  misc_feature 1..16: note = synthetic [barcode part1]
  source 1..16: mol_type = other DNA
atcaacaggtgacagt

SEQ ID NO: 38228 - DNA, 16 bp, synthetic construct
  misc_feature 1..16: note = synthetic [barcode part1]
  source 1..16: mol_type = other DNA
caagttgcgcgttctc

SEQ ID NO: 38229 - DNA, 16 bp, synthetic construct
  misc_feature 1..16: note = synthetic [barcode part1]
  source 1..16: mol_type = other DNA
gcacacgaacttcaac

SEQ ID NO: 38230 - DNA, 16 bp, synthetic construct
  misc_feature 1..16: note = synthetic [barcode part1]
  source 1..16: mol_type = other DNA
tgacttcaggatcggt

SEQ ID NO: 38231 - DNA, 16 bp, synthetic construct
  misc_feature 1..16: note = synthetic [barcode part1]
  source 1..16: mol_type = other DNA
ttagatataccgcctc

SEQ ID NO: 38232 - DNA, 16 bp, synthetic construct
  misc_feature 1..16: note = synthetic [barcode part1]
  source 1..16: mol_type = other DNA
aacgccactaaccagt

SEQ ID NO: 38233 - DNA, 16 bp, synthetic construct
  misc_feature 1..16: note = synthetic [barcode part1]
  source 1..16: mol_type = other DNA
agacttatccgcaggt

SEQ ID NO: 38234 - DNA, 16 bp, synthetic construct
  misc_feature 1..16: note = synthetic [barcode part1]
  source 1..16: mol_type = other DNA
gcagaagtaacggtcc

SEQ ID NO: 38235 - DNA, 16 bp, synthetic construct
  misc_feature 1..16: note = synthetic [barcode part1]
  source 1..16: mol_type = other DNA
ttaagagtggcggaag

SEQ ID NO: 38236 - DNA, 16 bp, synthetic construct
  misc_feature 1..16: note = synthetic [barcode part1]
  source 1..16: mol_type = other DNA
accgattcttctcctg

SEQ ID NO: 38237 - DNA, 16 bp, synthetic construct
  misc_feature 1..16: note = synthetic [barcode part1]
  source 1..16: mol_type = other DNA
atacctcactgagtct

SEQ ID NO: 38238 - DNA, 16 bp, synthetic construct
  misc_feature 1..16: note = synthetic [barcode part1]
  source 1..16: mol_type = other DNA
gcagacaatcttagag

SEQ ID NO: 38239 - DNA, 16 bp, synthetic construct
  misc_feature 1..16: note = synthetic [barcode part1]
  source 1..16: mol_type = other DNA
tccggcaactcttacg

SEQ ID NO: 38240 - DNA, 16 bp, synthetic construct
  misc_feature 1..16: note = synthetic [barcode part1]
  source 1..16: mol_type = other DNA
agacggtaactgcgtg

SEQ ID NO: 38241 - DNA, 16 bp, synthetic construct
  misc_feature 1..16: note = synthetic [barcode part1]
  source 1..16: mol_type = other DNA
gagtatcgacactcac

SEQ ID NO: 38242 - DNA, 16 bp, synthetic construct
  misc_feature 1..16: note = synthetic [barcode part1]
  source 1..16: mol_type = other DNA
ttcgccggtacttggt

SEQ ID NO: 38243 - DNA, 16 bp, synthetic construct
  misc_feature 1..16: note = synthetic [barcode part1]
  source 1..16: mol_type = other DNA
tagattgtcggcgact

SEQ ID NO: 38244 - DNA, 16 bp, synthetic construct
  misc_feature 1..16: note = synthetic [barcode part1]
  source 1..16: mol_type = other DNA
aggtccaggaccaagt

SEQ ID NO: 38245 - DNA, 16 bp, synthetic construct
  misc_feature 1..16: note = synthetic [barcode part1]
  source 1..16: mol_type = other DNA
ttaggtgcaggataac

SEQ ID NO: 38246 - DNA, 16 bp, synthetic construct
  misc_feature 1..16: note = synthetic [barcode part1]
  source 1..16: mol_type = other DNA
gttaacggtagaacac

SEQ ID NO: 38247 - DNA, 16 bp, synthetic construct
  misc_feature 1..16: note = synthetic [barcode part1]
  source 1..16: mol_type = other DNA
ttcaataggcgatccg

SEQ ID NO: 38248 - DNA, 16 bp, synthetic construct
  misc_feature 1..16: note = synthetic [barcode part1]
  source 1..16: mol_type = other DNA
aactcaggtgtgaggc

SEQ ID NO: 38249 - DNA, 16 bp, synthetic construct
  misc_feature 1..16: note = synthetic [barcode part1]
  source 1..16: mol_type = other DNA
gagtactctataggcc

SEQ ID NO: 38250 - DNA, 16 bp, synthetic construct
  misc_feature 1..16: note = synthetic [barcode part1]
  source 1..16: mol_type = other DNA
tatctcagacggaacc

SEQ ID NO: 38251 - DNA, 16 bp, synthetic construct
  misc_feature 1..16: note = synthetic [barcode part1]
  source 1..16: mol_type = other DNA
ttggcaggaatcacct

SEQ ID NO: 38252 - DNA, 16 bp, synthetic construct
  misc_feature 1..16: note = synthetic [barcode part1]
  source 1..16: mol_type = other DNA
tcgtcggactattgag

SEQ ID NO: 38253 - DNA, 16 bp, synthetic construct
  misc_feature 1..16: note = synthetic [barcode part1]
  source 1..16: mol_type = other DNA
aacaagaaccagaggc

SEQ ID NO: 38254 - DNA, 16 bp, synthetic construct
  misc_feature 1..16: note = synthetic [barcode part1]
  source 1..16: mol_type = other DNA
atacctcgaggacgtt

SEQ ID NO: 38255 - DNA, 16 bp, synthetic construct
  misc_feature 1..16: note = synthetic [barcode part1]
  source 1..16: mol_type = other DNA
gcgagaggtataaggt

SEQ ID NO: 38256 - DNA, 16 bp, synthetic construct
  misc_feature 1..16: note = synthetic [barcode part1]
  source 1..16: mol_type = other DNA
acaggaggatcgtcac

SEQ ID NO: 38257 - DNA, 16 bp, synthetic construct
  misc_feature 1..16: note = synthetic [barcode part1]
  source 1..16: mol_type = other DNA
tcaatctctgccactc

SEQ ID NO: 38258 - DNA, 16 bp, synthetic construct
  misc_feature 1..16: note = synthetic [barcode part1]
  source 1..16: mol_type = other DNA
gtacgacggtccttct

SEQ ID NO: 38259 - DNA, 16 bp, synthetic construct
  misc_feature 1..16: note = synthetic [barcode part1]
  source 1..16: mol_type = other DNA
gatccggattatcgac

SEQ ID NO: 38260 - DNA, 16 bp, synthetic construct
  misc_feature 1..16: note = synthetic [barcode part1]
  source 1..16: mol_type = other DNA
ttgcaccgtgagaatc

SEQ ID NO: 38261 - DNA, 16 bp, synthetic construct
  misc_feature 1..16: note = synthetic [barcode part1]
  source 1..16: mol_type = other DNA
atccgttacaacacct

SEQ ID NO: 38262 - DNA, 16 bp, synthetic construct
  misc_feature 1..16: note = synthetic [barcode part1]
  source 1..16: mol_type = other DNA
cgtactaaccgatacg

SEQ ID NO: 38263 - DNA, 16 bp, synthetic construct
  misc_feature 1..16: note = synthetic [barcode part1]
  source 1..16: mol_type = other DNA
tgtctaggcgcaattg

SEQ ID NO: 38264 - DNA, 16 bp, synthetic construct
  misc_feature 1..16: note = synthetic [barcode part1]
  source 1..16: mol_type = other DNA
gagtatcgacaggacc

SEQ ID NO: 38265 - DNA, 16 bp, synthetic construct
  misc_feature 1..16: note = synthetic [barcode part1]
  source 1..16: mol_type = other DNA
cggattactagatcgc

SEQ ID NO: 38266 - DNA, 16 bp, synthetic construct
  misc_feature 1..16: note = synthetic [barcode part1]
  source 1..16: mol_type = other DNA
ttgacgtgtgtaccag

SEQ ID NO: 38267 - DNA, 16 bp, synthetic construct
  misc_feature 1..16: note = synthetic [barcode part1]
  source 1..16: mol_type = other DNA
gactcgacctcacact

SEQ ID NO: 38268 - DNA, 16 bp, synthetic construct
  misc_feature 1..16: note = synthetic [barcode part1]
  source 1..16: mol_type = other DNA
gttccaagactctgag

SEQ ID NO: 38269 - DNA, 16 bp, synthetic construct
  misc_feature 1..16: note = synthetic [barcode part1]
  source 1..16: mol_type = other DNA
ccttgacgtactcgac

SEQ ID NO: 38270 - DNA, 16 bp, synthetic construct
  misc_feature 1..16: note = synthetic [barcode part1]
  source 1..16: mol_type = other DNA
gattcgaacactcttc

SEQ ID NO: 38271 - DNA, 16 bp, synthetic construct
  misc_feature 1..16: note = synthetic [barcode part1]
  source 1..16: mol_type = other DNA
actacgtaaccacgtg

SEQ ID NO: 38272 - DNA, 16 bp, synthetic construct
  misc_feature 1..16: note = synthetic [barcode part1]
  source 1..16: mol_type = other DNA
gcctctaatctgacgc

SEQ ID NO: 38273 - DNA, 16 bp, synthetic construct
  misc_feature 1..16: note = synthetic [barcode part1]
  source 1..16: mol_type = other DNA
gcactgcgacaagtag

SEQ ID NO: 38274 - DNA, 16 bp, synthetic construct
  misc_feature 1..16: note = synthetic [barcode part1]
  source 1..16: mol_type = other DNA
tacttgcagtaccact

SEQ ID NO: 38275 - DNA, 16 bp, synthetic construct
  misc_feature 1..16: note = synthetic [barcode part1]
  source 1..16: mol_type = other DNA
ttacgcacacgtaacg

SEQ ID NO: 38276 - DNA, 16 bp, synthetic construct
  misc_feature 1..16: note = synthetic [barcode part1]
  source 1..16: mol_type = other DNA
gcgcaatattgcgtgt

SEQ ID NO: 38277 - DNA, 16 bp, synthetic construct
  misc_feature 1..16: note = synthetic [barcode part1]
  source 1..16: mol_type = other DNA
actgaggttctgatcg

SEQ ID NO: 38278 - DNA, 16 bp, synthetic construct
  misc_feature 1..16: note = synthetic [barcode part1]
  source 1..16: mol_type = other DNA
acagactaagacaacc

SEQ ID NO: 38279 - DNA, 16 bp, synthetic construct
  misc_feature 1..16: note = synthetic [barcode part1]
  source 1..16: mol_type = other DNA
tctacttggatcctag

SEQ ID NO: 38280 - DNA, 16 bp, synthetic construct
  misc_feature 1..16: note = synthetic [barcode part1]
  source 1..16: mol_type = other DNA
caacgtacgattcttc

SEQ ID NO: 38281 - DNA, 16 bp, synthetic construct
  misc_feature 1..16: note = synthetic [barcode part1]
  source 1..16: mol_type = other DNA
actatataaccgcgcg

SEQ ID NO: 38282 - DNA, 16 bp, synthetic construct
  misc_feature 1..16: note = synthetic [barcode part1]
  source 1..16: mol_type = other DNA
acttcttactgtgcag

SEQ ID NO: 38283 - DNA, 16 bp, synthetic construct
  misc_feature 1..16: note = synthetic [barcode part1]
  source 1..16: mol_type = other DNA
gtgttcaagactcacg

SEQ ID NO: 38284 - DNA, 16 bp, synthetic construct
  misc_feature 1..16: note = synthetic [barcode part1]
  source 1..16: mol_type = other DNA
ccgaagttaccgtagt

SEQ ID NO: 38285 - DNA, 16 bp, synthetic construct
  misc_feature 1..16: note = synthetic [barcode part1]
  source 1..16: mol_type = other DNA
ataaccgttagtcctc

SEQ ID NO: 38286 - DNA, 16 bp, synthetic construct
  misc_feature 1..16: note = synthetic [barcode part1]
  source 1..16: mol_type = other DNA
caccaccgagtactct

SEQ ID NO: 38287 - DNA, 16 bp, synthetic construct
  misc_feature 1..16: note = synthetic [barcode part1]
  source 1..16: mol_type = other DNA
actaggtcgtcagatc

SEQ ID NO: 38288 - DNA, 16 bp, synthetic construct
  misc_feature 1..16: note = synthetic [barcode part1]
  source 1..16: mol_type = other DNA
atcaagagtacgtcag

SEQ ID NO: 38289 - DNA, 16 bp, synthetic construct
  misc_feature 1..16: note = synthetic [barcode part1]
  source 1..16: mol_type = other DNA
ttccacaatcgccggt

SEQ ID NO: 38290 - DNA, 16 bp, synthetic construct
  misc_feature 1..16: note = synthetic [barcode part1]
  source 1..16: mol_type = other DNA
ttgtgtgtggtgtgtg

SEQ ID NO: 38291 - DNA, 16 bp, synthetic construct
  misc_feature 1..16: note = synthetic [barcode part1]
  source 1..16: mol_type = other DNA
tcaggaggtgtagtcg

SEQ ID NO: 38292 - DNA, 16 bp, synthetic construct
  misc_feature 1..16: note = synthetic [barcode part1]
  source 1..16: mol_type = other DNA
gagatccgacgttgtt

SEQ ID NO: 38293 - DNA, 16 bp, synthetic construct
  misc_feature 1..16: note = synthetic [barcode part1]
  source 1..16: mol_type = other DNA
attagagtgcgcggtg

SEQ ID NO: 38294 - DNA, 16 bp, synthetic construct
  misc_feature 1..16: note = synthetic [barcode part1]
  source 1..16: mol_type = other DNA
acgcgaacttataccg

SEQ ID NO: 38295 - DNA, 16 bp, synthetic construct
  misc_feature 1..16: note = synthetic [barcode part1]
  source 1..16: mol_type = other DNA
aattggcgattggtcc

SEQ ID NO: 38296 - DNA, 16 bp, synthetic construct
  misc_feature 1..16: note = synthetic [barcode part1]
  source 1..16: mol_type = other DNA
agtgtaccagtacacc

SEQ ID NO: 38297 - DNA, 16 bp, synthetic construct
  misc_feature 1..16: note = synthetic [barcode part1]
  source 1..16: mol_type = other DNA
accttgcgttccttac

SEQ ID NO: 38298 - DNA, 16 bp, synthetic construct
  misc_feature 1..16: note = synthetic [barcode part1]
  source 1..16: mol_type = other DNA
acacagttggtgtacc

SEQ ID NO: 38299 - DNA, 16 bp, synthetic construct
  misc_feature 1..16: note = synthetic [barcode part1]
  source 1..16: mol_type = other DNA
aacctccacgtgactc

SEQ ID NO: 38300 - DNA, 16 bp, synthetic construct
  misc_feature 1..16: note = synthetic [barcode part1]
  source 1..16: mol_type = other DNA
gtgtcaacttcgttac

SEQ ID NO: 38301 - DNA, 16 bp, synthetic construct
  misc_feature 1..16: note = synthetic [barcode part1]
  source 1..16: mol_type = other DNA
tcctcggttgatctct

SEQ ID NO: 38302 - DNA, 16 bp, synthetic construct
  misc_feature 1..16: note = synthetic [barcode part1]
  source 1..16: mol_type = other DNA
tggatcttactgtctg

SEQ ID NO: 38303 - DNA, 16 bp, synthetic construct
  misc_feature 1..16: note = synthetic [barcode part1]
  source 1..16: mol_type = other DNA
cactgagttacgtctt

SEQ ID NO: 38304 - DNA, 16 bp, synthetic construct
  misc_feature 1..16: note = synthetic [barcode part1]
  source 1..16: mol_type = other DNA
gtaagagtaacgacct

SEQ ID NO: 38305 - DNA, 16 bp, synthetic construct
  misc_feature 1..16: note = synthetic [barcode part1]
  source 1..16: mol_type = other DNA
acctatcaggtcttgt

SEQ ID NO: 38306 - DNA, 16 bp, synthetic construct
  misc_feature 1..16: note = synthetic [barcode part1]
  source 1..16: mol_type = other DNA
aaggttcgtaagtgac

SEQ ID NO: 38307 - DNA, 16 bp, synthetic construct
  misc_feature 1..16: note = synthetic [barcode part1]
  source 1..16: mol_type = other DNA
caggccactaataacc

SEQ ID NO: 38308 - DNA, 16 bp, synthetic construct
  misc_feature 1..16: note = synthetic [barcode part1]
  source 1..16: mol_type = other DNA
tcaagtgaacggaatc

SEQ ID NO: 38309 - DNA, 16 bp, synthetic construct
  misc_feature 1..16: note = synthetic [barcode part1]
  source 1..16: mol_type = other DNA
gatccaggattcggtt

SEQ ID NO: 38310 - DNA, 16 bp, synthetic construct
  misc_feature 1..16: note = synthetic [barcode part1]
  source 1..16: mol_type = other DNA
aactcgacacagaggc

SEQ ID NO: 38311 - DNA, 16 bp, synthetic construct
  misc_feature 1..16: note = synthetic [barcode part1]
  source 1..16: mol_type = other DNA
agtatcggtgtcgtac

SEQ ID NO: 38312 - DNA, 16 bp, synthetic construct
  misc_feature 1..16: note = synthetic [barcode part1]
  source 1..16: mol_type = other DNA
cgtcggttagtatacg

SEQ ID NO: 38313 - DNA, 16 bp, synthetic construct
  misc_feature 1..16: note = synthetic [barcode part1]
  source 1..16: mol_type = other DNA
acggttacaattgcgc

SEQ ID NO: 38314 - DNA, 16 bp, synthetic construct
  misc_feature 1..16: note = synthetic [barcode part1]
  source 1..16: mol_type = other DNA
cggaaggcaatcgtgt

SEQ ID NO: 38315 - DNA, 16 bp, synthetic construct
  misc_feature 1..16: note = synthetic [barcode part1]
  source 1..16: mol_type = other DNA
gatctacgtcttatcg

SEQ ID NO: 38316 - DNA, 16 bp, synthetic construct
  misc_feature 1..16: note = synthetic [barcode part1]
  source 1..16: mol_type = other DNA
ccggtaacgttctcgt

SEQ ID NO: 38317 - DNA, 16 bp, synthetic construct
  misc_feature 1..16: note = synthetic [barcode part1]
  source 1..16: mol_type = other DNA
tcagtcagatcggttg

SEQ ID NO: 38318 - DNA, 16 bp, synthetic construct
  misc_feature 1..16: note = synthetic [barcode part1]
  source 1..16: mol_type = other DNA
tcaacacctagttctg

SEQ ID NO: 38319 - DNA, 16 bp, synthetic construct
  misc_feature 1..16: note = synthetic [barcode part1]
  source 1..16: mol_type = other DNA
taatcgcagtgcactg

SEQ ID NO: 38320 - DNA, 16 bp, synthetic construct
  misc_feature 1..16: note = synthetic [barcode part1]
  source 1..16: mol_type = other DNA
aatcctggcctactcg

SEQ ID NO: 38321 - DNA, 16 bp, synthetic construct
  misc_feature 1..16: note = synthetic [barcode part1]
  source 1..16: mol_type = other DNA
aagtgagtccgaagtt

SEQ ID NO: 38322 - DNA, 16 bp, synthetic construct
  misc_feature 1..16: note = synthetic [barcode part1]
  source 1..16: mol_type = other DNA
gtatacgtgcaacacc

SEQ ID NO: 38323 - DNA, 16 bp, synthetic construct
  misc_feature 1..16: note = synthetic [barcode part1]
  source 1..16: mol_type = other DNA
tagacgtctagtacgc

SEQ ID NO: 38324 - DNA, 16 bp, synthetic construct
  misc_feature 1..16: note = synthetic [barcode part1]
  source 1..16: mol_type = other DNA
acaaggataacctggt

SEQ ID NO: 38325 - DNA, 16 bp, synthetic construct
  misc_feature 1..16: note = synthetic [barcode part1]
  source 1..16: mol_type = other DNA
gatacaacgagtcgcg

SEQ ID NO: 38326 - DNA, 16 bp, synthetic construct
  misc_feature 1..16: note = synthetic [barcode part1]
  source 1..16: mol_type = other DNA
tgtgcaaggatacctc

SEQ ID NO: 38327 - DNA, 16 bp, synthetic construct
  misc_feature 1..16: note = synthetic [barcode part1]
  source 1..16: mol_type = other DNA
tcgttgtattcgtggt

SEQ ID NO: 38328 - DNA, 16 bp, synthetic construct
  misc_feature 1..16: note = synthetic [barcode part1]
  source 1..16: mol_type = other DNA
aataatctctcgcacc

SEQ ID NO: 38329 - DNA, 16 bp, synthetic construct
  misc_feature 1..16: note = synthetic [barcode part1]
  source 1..16: mol_type = other DNA
acaacactgactgacc

SEQ ID NO: 38330 - DNA, 16 bp, synthetic construct
  misc_feature 1..16: note = synthetic [barcode part1]
  source 1..16: mol_type = other DNA
tatagatctcaccacc

SEQ ID NO: 38331 - DNA, 16 bp, synthetic construct
  misc_feature 1..16: note = synthetic [barcode part1]
  source 1..16: mol_type = other DNA
gtagaagtagtgacct

SEQ ID NO: 38332 - DNA, 16 bp, synthetic construct
  misc_feature 1..16: note = synthetic [barcode part1]
  source 1..16: mol_type = other DNA
aaccttgataggcaag

SEQ ID NO: 38333 - DNA, 16 bp, synthetic construct
  misc_feature 1..16: note = synthetic [barcode part1]
  source 1..16: mol_type = other DNA
agagaagtagttggcg

SEQ ID NO: 38334 - DNA, 16 bp, synthetic construct
  misc_feature 1..16: note = synthetic [barcode part1]
  source 1..16: mol_type = other DNA
accaggtccgtgtctt

SEQ ID NO: 38335 - DNA, 16 bp, synthetic construct
  misc_feature 1..16: note = synthetic [barcode part1]
  source 1..16: mol_type = other DNA
agagtattcggtggcg

SEQ ID NO: 38336 - DNA, 16 bp, synthetic construct
  misc_feature 1..16: note = synthetic [barcode part1]
  source 1..16: mol_type = other DNA
tcgtccacttgtctac

SEQ ID NO: 38337 - DNA, 16 bp, synthetic construct
  misc_feature 1..16: note = synthetic [barcode part1]
  source 1..16: mol_type = other DNA
atccgtcttcacctac

SEQ ID NO: 38338 - DNA, 16 bp, synthetic construct
  misc_feature 1..16: note = synthetic [barcode part1]
  source 1..16: mol_type = other DNA
tagagttgcactgcgt

SEQ ID NO: 38339 - DNA, 16 bp, synthetic construct
  misc_feature 1..16: note = synthetic [barcode part1]
  source 1..16: mol_type = other DNA
tgttaggtcgcgtctc

SEQ ID NO: 38340 - DNA, 16 bp, synthetic construct
  misc_feature 1..16: note = synthetic [barcode part1]
  source 1..16: mol_type = other DNA
taccgcgtaatcaacg

SEQ ID NO: 38341 - DNA, 16 bp, synthetic construct
  misc_feature 1..16: note = synthetic [barcode part1]
  source 1..16: mol_type = other DNA
gaacgtccttatcgtt

SEQ ID NO: 38342 - DNA, 16 bp, synthetic construct
  misc_feature 1..16: note = synthetic [barcode part1]
  source 1..16: mol_type = other DNA
agaggtctcaattccg

SEQ ID NO: 38343 - DNA, 16 bp, synthetic construct
  misc_feature 1..16: note = synthetic [barcode part1]
  source 1..16: mol_type = other DNA
tccagaggagattcct

SEQ ID NO: 38344 - DNA, 16 bp, synthetic construct
  misc_feature 1..16: note = synthetic [barcode part1]
  source 1..16: mol_type = other DNA
gcaactatctcaactc

SEQ ID NO: 38345 - DNA, 16 bp, synthetic construct
  misc_feature 1..16: note = synthetic [barcode part1]
  source 1..16: mol_type = other DNA
cgatatctatctaccg

SEQ ID NO: 38346 - DNA, 16 bp, synthetic construct
  misc_feature 1..16: note = synthetic [barcode part1]
  source 1..16: mol_type = other DNA
cggtggcgagagtatt

SEQ ID NO: 38347 - DNA, 16 bp, synthetic construct
  misc_feature 1..16: note = synthetic [barcode part1]
  source 1..16: mol_type = other DNA
gaccagtgatcctagt

SEQ ID NO: 38348 - DNA, 16 bp, synthetic construct
  misc_feature 1..16: note = synthetic [barcode part1]
  source 1..16: mol_type = other DNA
cacctcaggacttacc

SEQ ID NO: 38349 - DNA, 16 bp, synthetic construct
  misc_feature 1..16: note = synthetic [barcode part1]
  source 1..16: mol_type = other DNA
gtgtgttaggtgtctg

SEQ ID NO: 38350 - DNA, 16 bp, synthetic construct
  misc_feature 1..16: note = synthetic [barcode part1]
  source 1..16: mol_type = other DNA
gactcggttagtaacc

SEQ ID NO: 38351 - DNA, 16 bp, synthetic construct
  misc_feature 1..16: note = synthetic [barcode part1]
  source 1..16: mol_type = other DNA
cgccttgagatagtgt

SEQ ID NO: 38352 - DNA, 16 bp, synthetic construct
  misc_feature 1..16: note = synthetic [barcode part1]
  source 1..16: mol_type = other DNA
gacaactagttcggtc

SEQ ID NO: 38353 - DNA, 16 bp, synthetic construct
  misc_feature 1..16: note = synthetic [barcode part1]
  source 1..16: mol_type = other DNA
ttgatctgtcctccac

SEQ ID NO: 38354 - DNA, 16 bp, synthetic construct
  misc_feature 1..16: note = synthetic [barcode part1]
  source 1..16: mol_type = other DNA
tcgttgttaggacggt

SEQ ID NO: 38355 - DNA, 16 bp, synthetic construct
  misc_feature 1..16: note = synthetic [barcode part1]
  source 1..16: mol_type = other DNA
aatcacgaatcaggac

SEQ ID NO: 38356 - DNA, 16 bp, synthetic construct
  misc_feature 1..16: note = synthetic [barcode part1]
  source 1..16: mol_type = other DNA
tacgccgtaattgcag

SEQ ID NO: 38357 - DNA, 16 bp, synthetic construct
  misc_feature 1..16: note = synthetic [barcode part1]
  source 1..16: mol_type = other DNA
tgcgtgagaaccgagt

SEQ ID NO: 38358 - DNA, 16 bp, synthetic construct
  misc_feature 1..16: note = synthetic [barcode part1]
  source 1..16: mol_type = other DNA
aacacctctacgtgag

SEQ ID NO: 38359 - DNA, 16 bp, synthetic construct
  misc_feature 1..16: note = synthetic [barcode part1]
  source 1..16: mol_type = other DNA
ttatacaccagaggag

SEQ ID NO: 38360 - DNA, 16 bp, synthetic construct
  misc_feature 1..16: note = synthetic [barcode part1]
  source 1..16: mol_type = other DNA
ttgtgagacgaagtac

SEQ ID NO: 38361 - DNA, 16 bp, synthetic construct
  misc_feature 1..16: note = synthetic [barcode part1]
  source 1..16: mol_type = other DNA
ttcgaacacttggacg

SEQ ID NO: 38362 - DNA, 16 bp, synthetic construct
  misc_feature 1..16: note = synthetic [barcode part1]
  source 1..16: mol_type = other DNA
tgtacaggtaggacgc

SEQ ID NO: 38363 - DNA, 16 bp, synthetic construct
  misc_feature 1..16: note = synthetic [barcode part1]
  source 1..16: mol_type = other DNA
taggttcgtaagtccg

SEQ ID NO: 38364 - DNA, 16 bp, synthetic construct
  misc_feature 1..16: note = synthetic [barcode part1]
  source 1..16: mol_type = other DNA
gcagtgaacgaagtag

SEQ ID NO: 38365 - DNA, 16 bp, synthetic construct
  misc_feature 1..16: note = synthetic [barcode part1]
  source 1..16: mol_type = other DNA
tactcacggacgagtt

SEQ ID NO: 38366 - DNA, 16 bp, synthetic construct
  misc_feature 1..16: note = synthetic [barcode part1]
  source 1..16: mol_type = other DNA
caccaccttgttgtct

SEQ ID NO: 38367 - DNA, 16 bp, synthetic construct
  misc_feature 1..16: note = synthetic [barcode part1]
  source 1..16: mol_type = other DNA
gaacaggactccgaac

SEQ ID NO: 38368 - DNA, 16 bp, synthetic construct
  misc_feature 1..16: note = synthetic [barcode part1]
  source 1..16: mol_type = other DNA
agttgaaggacgtccg

SEQ ID NO: 38369 - DNA, 16 bp, synthetic construct
  misc_feature 1..16: note = synthetic [barcode part1]
  source 1..16: mol_type = other DNA
gacagttgtcgttgac

SEQ ID NO: 38370 - DNA, 16 bp, synthetic construct
  misc_feature 1..16: note = synthetic [barcode part1]
  source 1..16: mol_type = other DNA
ccagtctgtctcttac

SEQ ID NO: 38371 - DNA, 16 bp, synthetic construct
  misc_feature 1..16: note = synthetic [barcode part1]
  source 1..16: mol_type = other DNA
cggacgttcttcaacc

SEQ ID NO: 38372 - DNA, 16 bp, synthetic construct
  misc_feature 1..16: note = synthetic [barcode part1]
  source 1..16: mol_type = other DNA
ataacgtgtaccgcgt

SEQ ID NO: 38373 - DNA, 16 bp, synthetic construct
  misc_feature 1..16: note = synthetic [barcode part1]
  source 1..16: mol_type = other DNA
gttagtcaaccgactg

SEQ ID NO: 38374 - DNA, 16 bp, synthetic construct
  misc_feature 1..16: note = synthetic [barcode part1]
  source 1..16: mol_type = other DNA
tctctcggacaacaag

SEQ ID NO: 38375 - DNA, 16 bp, synthetic construct
  misc_feature 1..16: note = synthetic [barcode part1]
  source 1..16: mol_type = other DNA
tgttctatcgcggacc

SEQ ID NO: 38376 - DNA, 16 bp, synthetic construct
  misc_feature 1..16: note = synthetic [barcode part1]
  source 1..16: mol_type = other DNA
tagtaagaagttcgcg

SEQ ID NO: 38377 - DNA, 16 bp, synthetic construct
  misc_feature 1..16: note = synthetic [barcode part1]
  source 1..16: mol_type = other DNA
tgcagattaaggcaac

SEQ ID NO: 38378 - DNA, 16 bp, synthetic construct
  misc_feature 1..16: note = synthetic [barcode part1]
  source 1..16: mol_type = other DNA
ttccttacctgtgaag

SEQ ID NO: 38379 - DNA, 16 bp, synthetic construct
  misc_feature 1..16: note = synthetic [barcode part1]
  source 1..16: mol_type = other DNA
gttctcgtgttcttgc

SEQ ID NO: 38380 - DNA, 16 bp, synthetic construct
  misc_feature 1..16: note = synthetic [barcode part1]
  source 1..16: mol_type = other DNA
tgttgagtccgtattc

SEQ ID NO: 38381 - DNA, 16 bp, synthetic construct
  misc_feature 1..16: note = synthetic [barcode part1]
  source 1..16: mol_type = other DNA
gaacggtggaagttag

SEQ ID NO: 38382 - DNA, 16 bp, synthetic construct
  misc_feature 1..16: note = synthetic [barcode part1]
  source 1..16: mol_type = other DNA
tcctgaagtctgtccg

SEQ ID NO: 38383 - DNA, 16 bp, synthetic construct
  misc_feature 1..16: note = synthetic [barcode part1]
  source 1..16: mol_type = other DNA
tcactaccactcaagt

SEQ ID NO: 38384 - DNA, 16 bp, synthetic construct
  misc_feature 1..16: note = synthetic [barcode part1]
  source 1..16: mol_type = other DNA
caataatccggcaacc

SEQ ID NO: 38385 - DNA, 16 bp, synthetic construct
  misc_feature 1..16: note = synthetic [barcode part1]
  source 1..16: mol_type = other DNA
cgtaggactctatacg

SEQ ID NO: 38386 - DNA, 16 bp, synthetic construct
  misc_feature 1..16: note = synthetic [barcode part1]
  source 1..16: mol_type = other DNA
gacttgtcagagtaag

SEQ ID NO: 38387 - DNA, 16 bp, synthetic construct
  misc_feature 1..16: note = synthetic [barcode part1]
  source 1..16: mol_type = other DNA
cacctcgtgttatcct

SEQ ID NO: 38388 - DNA, 16 bp, synthetic construct
  misc_feature 1..16: note = synthetic [barcode part1]
  source 1..16: mol_type = other DNA
tgaatcagaccgtcgt

SEQ ID NO: 38389 - DNA, 16 bp, synthetic construct
  misc_feature 1..16: note = synthetic [barcode part1]
  source 1..16: mol_type = other DNA
acacaggtccaacgag

SEQ ID NO: 38390 - DNA, 16 bp, synthetic construct
  misc_feature 1..16: note = synthetic [barcode part1]
  source 1..16: mol_type = other DNA
tgatcggactagtcgt

SEQ ID NO: 38391 - DNA, 16 bp, synthetic construct
  misc_feature 1..16: note = synthetic [barcode part1]
  source 1..16: mol_type = other DNA
ttcgacctgatacgcc

SEQ ID NO: 38392 - DNA, 16 bp, synthetic construct
  misc_feature 1..16: note = synthetic [barcode part1]
  source 1..16: mol_type = other DNA
gcgcactggcaataag

SEQ ID NO: 38393 - DNA, 16 bp, synthetic construct
  misc_feature 1..16: note = synthetic [barcode part1]
  source 1..16: mol_type = other DNA
tatccgcgatactgcc

SEQ ID NO: 38394 - DNA, 16 bp, synthetic construct
  misc_feature 1..16: note = synthetic [barcode part1]
  source 1..16: mol_type = other DNA
tggcgtagtacttggt

SEQ ID NO: 38395 - DNA, 16 bp, synthetic construct
  misc_feature 1..16: note = synthetic [barcode part1]
  source 1..16: mol_type = other DNA
tcaggaccgagtaggt

SEQ ID NO: 38396 - DNA, 16 bp, synthetic construct
  misc_feature 1..16: note = synthetic [barcode part1]
  source 1..16: mol_type = other DNA
tgattgccgttccgtg

SEQ ID NO: 38397 - DNA, 16 bp, synthetic construct
  misc_feature 1..16: note = synthetic [barcode part1]
  source 1..16: mol_type = other DNA
acttcaccttgcaagt

SEQ ID NO: 38398 - DNA, 16 bp, synthetic construct
  misc_feature 1..16: note = synthetic [barcode part1]
  source 1..16: mol_type = other DNA
gccggtgaagttaggt

SEQ ID NO: 38399 - DNA, 16 bp, synthetic construct
  misc_feature 1..16: note = synthetic [barcode part1]
  source 1..16: mol_type = other DNA
taggtacctagtacgc

SEQ ID NO: 38400 - DNA, 16 bp, synthetic construct
  misc_feature 1..16: note = synthetic [barcode part1]
  source 1..16: mol_type = other DNA
actgcagtgaagtcct

SEQ ID NO: 38401 - DNA, 16 bp, synthetic construct
  misc_feature 1..16: note = synthetic [barcode part1]
  source 1..16: mol_type = other DNA
actgactaaccaaccg

SEQ ID NO: 38402 - DNA, 16 bp, synthetic construct
  misc_feature 1..16: note = synthetic [barcode part1]
  source 1..16: mol_type = other DNA
ataccaacaacgaggt

SEQ ID NO: 38403 - DNA, 16 bp, synthetic construct
  misc_feature 1..16: note = synthetic [barcode part1]
  source 1..16: mol_type = other DNA
tgatcactacctcgcg

SEQ ID NO: 38404 - DNA, 16 bp, synthetic construct
  misc_feature 1..16: note = synthetic [barcode part1]
  source 1..16: mol_type = other DNA
tgaacgtgatcgtacc

SEQ ID NO: 38405 - DNA, 16 bp, synthetic construct
  misc_feature 1..16: note = synthetic [barcode part1]
  source 1..16: mol_type = other DNA
gatctggactagacct

SEQ ID NO: 38406 - DNA, 16 bp, synthetic construct
  misc_feature 1..16: note = synthetic [barcode part1]
  source 1..16: mol_type = other DNA
caacacgactaagagt

SEQ ID NO: 38407 - DNA, 16 bp, synthetic construct
  misc_feature 1..16: note = synthetic [barcode part1]
  source 1..16: mol_type = other DNA
tcagacactgcagatc

SEQ ID NO: 38408 - DNA, 16 bp, synthetic construct
  misc_feature 1..16: note = synthetic [barcode part1]
  source 1..16: mol_type = other DNA
aggtattccgcctcgt

SEQ ID NO: 38409 - DNA, 16 bp, synthetic construct
  misc_feature 1..16: note = synthetic [barcode part1]
  source 1..16: mol_type = other DNA
aaccacacgtacgatc

SEQ ID NO: 38410 - DNA, 16 bp, synthetic construct
  misc_feature 1..16: note = synthetic [barcode part1]
  source 1..16: mol_type = other DNA
tgtcgtcgcctgaatc

SEQ ID NO: 38411 - DNA, 16 bp, synthetic construct
  misc_feature 1..16: note = synthetic [barcode part1]
  source 1..16: mol_type = other DNA
acacaacgtacgtcac

SEQ ID NO: 38412 - DNA, 16 bp, synthetic construct
  misc_feature 1..16: note = synthetic [barcode part1]
  source 1..16: mol_type = other DNA
ttggtaaggcacaagt

SEQ ID NO: 38413 - DNA, 16 bp, synthetic construct
  misc_feature 1..16: note = synthetic [barcode part1]
  source 1..16: mol_type = other DNA
tacctgttcgtccact

SEQ ID NO: 38414 - DNA, 16 bp, synthetic construct
  misc_feature 1..16: note = synthetic [barcode part1]
  source 1..16: mol_type = other DNA
atactcctgacctagt

SEQ ID NO: 38415 - DNA, 16 bp, synthetic construct
  misc_feature 1..16: note = synthetic [barcode part1]
  source 1..16: mol_type = other DNA
cctctaactggtcctt

SEQ ID NO: 38416 - DNA, 16 bp, synthetic construct
  misc_feature 1..16: note = synthetic [barcode part1]
  source 1..16: mol_type = other DNA
gtgtatcgtgactacg

SEQ ID NO: 38417 - DNA, 16 bp, synthetic construct
  misc_feature 1..16: note = synthetic [barcode part1]
  source 1..16: mol_type = other DNA
acactcacgagtatcg

SEQ ID NO: 38418 - DNA, 16 bp, synthetic construct
  misc_feature 1..16: note = synthetic [barcode part1]
  source 1..16: mol_type = other DNA
taggaccgattccagt

SEQ ID NO: 38419 - DNA, 16 bp, synthetic construct
  misc_feature 1..16: note = synthetic [barcode part1]
  source 1..16: mol_type = other DNA
ttcagagtgtacacgc

SEQ ID NO: 38420 - DNA, 16 bp, synthetic construct
  misc_feature 1..16: note = synthetic [barcode part1]
  source 1..16: mol_type = other DNA
agtgtacctccgatcc

SEQ ID NO: 38421 - DNA, 16 bp, synthetic construct
  misc_feature 1..16: note = synthetic [barcode part1]
  source 1..16: mol_type = other DNA
atacaacctgactcct

SEQ ID NO: 38422 - DNA, 16 bp, synthetic construct
  misc_feature 1..16: note = synthetic [barcode part1]
  source 1..16: mol_type = other DNA
tgcctctctctatacg

SEQ ID NO: 38423 - DNA, 16 bp, synthetic construct
  misc_feature 1..16: note = synthetic [barcode part1]
  source 1..16: mol_type = other DNA
acgaattcgcggactt

SEQ ID NO: 38424 - DNA, 16 bp, synthetic construct
  misc_feature 1..16: note = synthetic [barcode part1]
  source 1..16: mol_type = other DNA
cgagacctagtcaatc

SEQ ID NO: 38425 - DNA, 16 bp, synthetic construct
  misc_feature 1..16: note = synthetic [barcode part1]
  source 1..16: mol_type = other DNA
caacaactgacctgac

SEQ ID NO: 38426 - DNA, 16 bp, synthetic construct
  misc_feature 1..16: note = synthetic [barcode part1]
  source 1..16: mol_type = other DNA
gcggtacagaattctc

SEQ ID NO: 38427 - DNA, 16 bp, synthetic construct
  misc_feature 1..16: note = synthetic [barcode part1]
  source 1..16: mol_type = other DNA
gccacggttgcctatt

SEQ ID NO: 38428 - DNA, 16 bp, synthetic construct
  misc_feature 1..16: note = synthetic [barcode part1]
  source 1..16: mol_type = other DNA
cgcgtccttgttagac

SEQ ID NO: 38429 - DNA, 16 bp, synthetic construct
  misc_feature 1..16: note = synthetic [barcode part1]
  source 1..16: mol_type = other DNA
taccaacggttagaag

SEQ ID NO: 38430 - DNA, 16 bp, synthetic construct
  misc_feature 1..16: note = synthetic [barcode part1]
  source 1..16: mol_type = other DNA
caaccaacgtagtacc

SEQ ID NO: 38431 - DNA, 16 bp, synthetic construct
  misc_feature 1..16: note = synthetic [barcode part1]
  source 1..16: mol_type = other DNA
acagtacactgaccac

SEQ ID NO: 38432 - DNA, 16 bp, synthetic construct
  misc_feature 1..16: note = synthetic [barcode part1]
  source 1..16: mol_type = other DNA
agtaagtacaacaccg

SEQ ID NO: 38433 - DNA, 16 bp, synthetic construct
  misc_feature 1..16: note = synthetic [barcode part1]
  source 1..16: mol_type = other DNA
aggtgacactgaagag

SEQ ID NO: 38434 - DNA, 16 bp, synthetic construct
  misc_feature 1..16: note = synthetic [barcode part1]
  source 1..16: mol_type = other DNA
cggttcgtcgtattcg

SEQ ID NO: 38435 - DNA, 16 bp, synthetic construct
  misc_feature 1..16: note = synthetic [barcode part1]
  source 1..16: mol_type = other DNA
taataacgcgtgagac

SEQ ID NO: 38436 - DNA, 16 bp, synthetic construct
  misc_feature 1..16: note = synthetic [barcode part1]
  source 1..16: mol_type = other DNA
aattgcctccgcactg

SEQ ID NO: 38437 - DNA, 16 bp, synthetic construct
  misc_feature 1..16: note = synthetic [barcode part1]
  source 1..16: mol_type = other DNA
taagtgcgtcggagac

SEQ ID NO: 38438 - DNA, 16 bp, synthetic construct
  misc_feature 1..16: note = synthetic [barcode part1]
  source 1..16: mol_type = other DNA
caccttcgattcgacg

SEQ ID NO: 38439 - DNA, 16 bp, synthetic construct
  misc_feature 1..16: note = synthetic [barcode part1]
  source 1..16: mol_type = other DNA
gtgtcgacacagactt

SEQ ID NO: 38440 - DNA, 16 bp, synthetic construct
  misc_feature 1..16: note = synthetic [barcode part1]
  source 1..16: mol_type = other DNA
tcgtgataggacttcg

SEQ ID NO: 38441 - DNA, 16 bp, synthetic construct
  misc_feature 1..16: note = synthetic [barcode part1]
  source 1..16: mol_type = other DNA
tatcaataaggccgag

SEQ ID NO: 38442 - DNA, 16 bp, synthetic construct
  misc_feature 1..16: note = synthetic [barcode part1]
  source 1..16: mol_type = other DNA
aacacggaacagtccg

SEQ ID NO: 38443 - DNA, 16 bp, synthetic construct
  misc_feature 1..16: note = synthetic [barcode part1]
  source 1..16: mol_type = other DNA
cgatcctgtatactac

SEQ ID NO: 38444 - DNA, 16 bp, synthetic construct
  misc_feature 1..16: note = synthetic [barcode part1]
  source 1..16: mol_type = other DNA
tgcggtaacgagtggt

SEQ ID NO: 38445 - DNA, 16 bp, synthetic construct
  misc_feature 1..16: note = synthetic [barcode part1]
  source 1..16: mol_type = other DNA
atcggagtgcacaacg

SEQ ID NO: 38446 - DNA, 16 bp, synthetic construct
  misc_feature 1..16: note = synthetic [barcode part1]
  source 1..16: mol_type = other DNA
acgagacttcagatag

SEQ ID NO: 38447 - DNA, 16 bp, synthetic construct
  misc_feature 1..16: note = synthetic [barcode part1]
  source 1..16: mol_type = other DNA
cacttactggaacctt

SEQ ID NO: 38448 - DNA, 16 bp, synthetic construct
  misc_feature 1..16: note = synthetic [barcode part1]
  source 1..16: mol_type = other DNA
aatcacgtgcgcaatc

SEQ ID NO: 38449 - DNA, 16 bp, synthetic construct
  misc_feature 1..16: note = synthetic [barcode part1]
  source 1..16: mol_type = other DNA
accgagtatctctgtt

SEQ ID NO: 38450 - DNA, 16 bp, synthetic construct
  misc_feature 1..16: note = synthetic [barcode part1]
  source 1..16: mol_type = other DNA
agacggtaaggtaacg

SEQ ID NO: 38451 - DNA, 16 bp, synthetic construct
  misc_feature 1..16: note = synthetic [barcode part1]
  source 1..16: mol_type = other DNA
tcgaccttaccaacgc

SEQ ID NO: 38452 - DNA, 16 bp, synthetic construct
  misc_feature 1..16: note = synthetic [barcode part1]
  source 1..16: mol_type = other DNA
tgcgaatactcgtgac

SEQ ID NO: 38453 - DNA, 16 bp, synthetic construct
  misc_feature 1..16: note = synthetic [barcode part1]
  source 1..16: mol_type = other DNA
agattcgatccttcac

SEQ ID NO: 38454 - DNA, 16 bp, synthetic construct
  misc_feature 1..16: note = synthetic [barcode part1]
  source 1..16: mol_type = other DNA
acttcgttgaatccgt

SEQ ID NO: 38455 - DNA, 16 bp, synthetic construct
  misc_feature 1..16: note = synthetic [barcode part1]
  source 1..16: mol_type = other DNA
aggtcagtgacacgtg

SEQ ID NO: 38456 - DNA, 16 bp, synthetic construct
  misc_feature 1..16: note = synthetic [barcode part1]
  source 1..16: mol_type = other DNA
gatatatcgcgatcgc

SEQ ID NO: 38457 - DNA, 16 bp, synthetic construct
  misc_feature 1..16: note = synthetic [barcode part1]
  source 1..16: mol_type = other DNA
aagttgcgcgagaacc

SEQ ID NO: 38458 - DNA, 16 bp, synthetic construct
  misc_feature 1..16: note = synthetic [barcode part1]
  source 1..16: mol_type = other DNA
gtgtgcaggagttctt

SEQ ID NO: 38459 - DNA, 16 bp, synthetic construct
  misc_feature 1..16: note = synthetic [barcode part1]
  source 1..16: mol_type = other DNA
ttgaccacctcaagag

SEQ ID NO: 38460 - DNA, 16 bp, synthetic construct
  misc_feature 1..16: note = synthetic [barcode part1]
  source 1..16: mol_type = other DNA
ccgtaatacgtacacg

SEQ ID NO: 38461 - DNA, 16 bp, synthetic construct
  misc_feature 1..16: note = synthetic [barcode part1]
  source 1..16: mol_type = other DNA
actgacggtctgaact

SEQ ID NO: 38462 - DNA, 16 bp, synthetic construct
  misc_feature 1..16: note = synthetic [barcode part1]
  source 1..16: mol_type = other DNA
gagttgcgcgagagtt

SEQ ID NO: 38463 - DNA, 16 bp, synthetic construct
  misc_feature 1..16: note = synthetic [barcode part1]
  source 1..16: mol_type = other DNA
tgcacgacgaattcgt

SEQ ID NO: 38464 - DNA, 16 bp, synthetic construct
  misc_feature 1..16: note = synthetic [barcode part1]
  source 1..16: mol_type = other DNA
aacctcacactacgag

SEQ ID NO: 38465 - DNA, 16 bp, synthetic construct
  misc_feature 1..16: note = synthetic [barcode part1]
  source 1..16: mol_type = other DNA
tctggaggtcaactgt

SEQ ID NO: 38466 - DNA, 16 bp, synthetic construct
  misc_feature 1..16: note = synthetic [barcode part1]
  source 1..16: mol_type = other DNA
actctccgttgacgtg

SEQ ID NO: 38467 - DNA, 16 bp, synthetic construct
  misc_feature 1..16: note = synthetic [barcode part1]
  source 1..16: mol_type = other DNA
aggtctagagttgaac

SEQ ID NO: 38468 - DNA, 16 bp, synthetic construct
  misc_feature 1..16: note = synthetic [barcode part1]
  source 1..16: mol_type = other DNA
tacgcctgtccaacac

SEQ ID NO: 38469 - DNA, 16 bp, synthetic construct
  misc_feature 1..16: note = synthetic [barcode part1]
  source 1..16: mol_type = other DNA
tctccgagttaacgcc

SEQ ID NO: 38470 - DNA, 16 bp, synthetic construct
  misc_feature 1..16: note = synthetic [barcode part1]
  source 1..16: mol_type = other DNA
gcagagagattcaatc

SEQ ID NO: 38471 - DNA, 16 bp, synthetic construct
  misc_feature 1..16: note = synthetic [barcode part1]
  source 1..16: mol_type = other DNA
tgtgcctggatacaac

SEQ ID NO: 38472 - DNA, 16 bp, synthetic construct
  misc_feature 1..16: note = synthetic [barcode part1]
  source 1..16: mol_type = other DNA
gtcagagattggcgtg

SEQ ID NO: 38473 - DNA, 16 bp, synthetic construct
  misc_feature 1..16: note = synthetic [barcode part1]
  source 1..16: mol_type = other DNA
ttggtaacttgtgcct

SEQ ID NO: 38474 - DNA, 16 bp, synthetic construct
  misc_feature 1..16: note = synthetic [barcode part1]
  source 1..16: mol_type = other DNA
agagtattggcggtcg

SEQ ID NO: 38475 - DNA, 16 bp, synthetic construct
  misc_feature 1..16: note = synthetic [barcode part1]
  source 1..16: mol_type = other DNA
aatctggtccttacac

SEQ ID NO: 38476 - DNA, 16 bp, synthetic construct
  misc_feature 1..16: note = synthetic [barcode part1]
  source 1..16: mol_type = other DNA
acgtcttccggtaatt

SEQ ID NO: 38477 - DNA, 16 bp, synthetic construct
  misc_feature 1..16: note = synthetic [barcode part1]
  source 1..16: mol_type = other DNA
cgtgatacctaagacc

SEQ ID NO: 38478 - DNA, 16 bp, synthetic construct
  misc_feature 1..16: note = synthetic [barcode part1]
  source 1..16: mol_type = other DNA
caacgtgaggataact

SEQ ID NO: 38479 - DNA, 16 bp, synthetic construct
  misc_feature 1..16: note = synthetic [barcode part1]
  source 1..16: mol_type = other DNA
ccttcgaactgtgtgc

SEQ ID NO: 38480 - DNA, 16 bp, synthetic construct
  misc_feature 1..16: note = synthetic [barcode part1]
  source 1..16: mol_type = other DNA
ccaactcagtacgtcc

SEQ ID NO: 38481 - DNA, 16 bp, synthetic construct
  misc_feature 1..16: note = synthetic [barcode part1]
  source 1..16: mol_type = other DNA
cgcagtgttgtgatac

SEQ ID NO: 38482 - DNA, 16 bp, synthetic construct
  misc_feature 1..16: note = synthetic [barcode part1]
  source 1..16: mol_type = other DNA
actctccaagaccaag

SEQ ID NO: 38483 - DNA, 16 bp, synthetic construct
  misc_feature 1..16: note = synthetic [barcode part1]
  source 1..16: mol_type = other DNA
aacgaagatacctggt

SEQ ID NO: 38484 - DNA, 16 bp, synthetic construct
  misc_feature 1..16: note = synthetic [barcode part1]
  source 1..16: mol_type = other DNA
cctctgttattagacg

SEQ ID NO: 38485 - DNA, 16 bp, synthetic construct
  misc_feature 1..16: note = synthetic [barcode part1]
  source 1..16: mol_type = other DNA
gagttcagtgaagtac

SEQ ID NO: 38486 - DNA, 16 bp, synthetic construct
  misc_feature 1..16: note = synthetic [barcode part1]
  source 1..16: mol_type = other DNA
ttggttccactggcgt

SEQ ID NO: 38487 - DNA, 16 bp, synthetic construct
  misc_feature 1..16: note = synthetic [barcode part1]
  source 1..16: mol_type = other DNA
actcgatcagtccaag

SEQ ID NO: 38488 - DNA, 16 bp, synthetic construct
  misc_feature 1..16: note = synthetic [barcode part1]
  source 1..16: mol_type = other DNA
actattcggtaggacc

SEQ ID NO: 38489 - DNA, 16 bp, synthetic construct
  misc_feature 1..16: note = synthetic [barcode part1]
  source 1..16: mol_type = other DNA
acacggacctaacgag

SEQ ID NO: 38490 - DNA, 16 bp, synthetic construct
  misc_feature 1..16: note = synthetic [barcode part1]
  source 1..16: mol_type = other DNA
agttcgatcagatcgc

SEQ ID NO: 38491 - DNA, 16 bp, synthetic construct
  misc_feature 1..16: note = synthetic [barcode part1]
  source 1..16: mol_type = other DNA
gttctcgaataactcc

SEQ ID NO: 38492 - DNA, 16 bp, synthetic construct
  misc_feature 1..16: note = synthetic [barcode part1]
  source 1..16: mol_type = other DNA
ttgccggttctcgtag

SEQ ID NO: 38493 - DNA, 16 bp, synthetic construct
  misc_feature 1..16: note = synthetic [barcode part1]
  source 1..16: mol_type = other DNA
tcaacgagagtgtggc

SEQ ID NO: 38494 - DNA, 16 bp, synthetic construct
  misc_feature 1..16: note = synthetic [barcode part1]
  source 1..16: mol_type = other DNA
tcgagaccgaacaggt

SEQ ID NO: 38495 - DNA, 16 bp, synthetic construct
  misc_feature 1..16: note = synthetic [barcode part1]
  source 1..16: mol_type = other DNA
attacctggtggaacc

SEQ ID NO: 38496 - DNA, 16 bp, synthetic construct
  misc_feature 1..16: note = synthetic [barcode part1]
  source 1..16: mol_type = other DNA
ttctgataccggagac

SEQ ID NO: 38497 - DNA, 16 bp, synthetic construct
  misc_feature 1..16: note = synthetic [barcode part1]
  source 1..16: mol_type = other DNA
ttgcagaggatcggac

SEQ ID NO: 38498 - DNA, 16 bp, synthetic construct
  misc_feature 1..16: note = synthetic [barcode part1]
  source 1..16: mol_type = other DNA
agaggcgttaccgagt

SEQ ID NO: 38499 - DNA, 16 bp, synthetic construct
  misc_feature 1..16: note = synthetic [barcode part1]
  source 1..16: mol_type = other DNA
tacacgttgaccaacg

SEQ ID NO: 38500 - DNA, 16 bp, synthetic construct
  misc_feature 1..16: note = synthetic [barcode part1]
  source 1..16: mol_type = other DNA
agtgaaggcgtggtct

SEQ ID NO: 38501 - DNA, 16 bp, synthetic construct
  misc_feature 1..16: note = synthetic [barcode part1]
  source 1..16: mol_type = other DNA
ttagaaggcacagttg

SEQ ID NO: 38502 - DNA, 16 bp, synthetic construct
  misc_feature 1..16: note = synthetic [barcode part1]
  source 1..16: mol_type = other DNA
tcgtcctcgtgaactg

SEQ ID NO: 38503 - DNA, 16 bp, synthetic construct
  misc_feature 1..16: note = synthetic [barcode part1]
  source 1..16: mol_type = other DNA
gtcgaccgtattgtag

SEQ ID NO: 38504 - DNA, 16 bp, synthetic construct
  misc_feature 1..16: note = synthetic [barcode part1]
  source 1..16: mol_type = other DNA
ttaccttcgtggaccg

SEQ ID NO: 38505 - DNA, 16 bp, synthetic construct
  misc_feature 1..16: note = synthetic [barcode part1]
  source 1..16: mol_type = other DNA
tatctattcgcgacgt

SEQ ID NO: 38506 - DNA, 16 bp, synthetic construct
  misc_feature 1..16: note = synthetic [barcode part1]
  source 1..16: mol_type = other DNA
ccgaatacaagtgtcc

SEQ ID NO: 38507 - DNA, 16 bp, synthetic construct
  misc_feature 1..16: note = synthetic [barcode part1]
  source 1..16: mol_type = other DNA
acggttaccttctaac

SEQ ID NO: 38508 - DNA, 16 bp, synthetic construct
  misc_feature 1..16: note = synthetic [barcode part1]
  source 1..16: mol_type = other DNA
acggagaccgaattgc

SEQ ID NO: 38509 - DNA, 16 bp, synthetic construct
  misc_feature 1..16: note = synthetic [barcode part1]
  source 1..16: mol_type = other DNA
gttgtggaagtagact

SEQ ID NO: 38510 - DNA, 16 bp, synthetic construct
  misc_feature 1..16: note = synthetic [barcode part1]
  source 1..16: mol_type = other DNA
acgtacttacttcgtg

SEQ ID NO: 38511 - DNA, 16 bp, synthetic construct
  misc_feature 1..16: note = synthetic [barcode part1]
  source 1..16: mol_type = other DNA
gcaggaagattgccac

SEQ ID NO: 38512 - DNA, 16 bp, synthetic construct
  misc_feature 1..16: note = synthetic [barcode part1]
  source 1..16: mol_type = other DNA
gttgaacacgaagatc

SEQ ID NO: 38513 - DNA, 16 bp, synthetic construct
  misc_feature 1..16: note = synthetic [barcode part1]
  source 1..16: mol_type = other DNA
atcacggacctgcctt

SEQ ID NO: 38514 - DNA, 16 bp, synthetic construct
  misc_feature 1..16: note = synthetic [barcode part1]
  source 1..16: mol_type = other DNA
caactccactgacgtc

SEQ ID NO: 38515 - DNA, 16 bp, synthetic construct
  misc_feature 1..16: note = synthetic [barcode part1]
  source 1..16: mol_type = other DNA
gtcagactctagtggt

SEQ ID NO: 38516 - DNA, 16 bp, synthetic construct
  misc_feature 1..16: note = synthetic [barcode part1]
  source 1..16: mol_type = other DNA
gtaggtcaaggtaact

SEQ ID NO: 38517 - DNA, 16 bp, synthetic construct
  misc_feature 1..16: note = synthetic [barcode part1]
  source 1..16: mol_type = other DNA
agtacgcctggtctct

SEQ ID NO: 38518 - DNA, 16 bp, synthetic construct
  misc_feature 1..16: note = synthetic [barcode part1]
  source 1..16: mol_type = other DNA
tcttcgcagacacaag

SEQ ID NO: 38519 - DNA, 16 bp, synthetic construct
  misc_feature 1..16: note = synthetic [barcode part1]
  source 1..16: mol_type = other DNA
accgtctgtggacttc

SEQ ID NO: 38520 - DNA, 16 bp, synthetic construct
  misc_feature 1..16: note = synthetic [barcode part1]
  source 1..16: mol_type = other DNA
gtatcttctagtggtc

SEQ ID NO: 38521 - DNA, 16 bp, synthetic construct
  misc_feature 1..16: note = synthetic [barcode part1]
  source 1..16: mol_type = other DNA
atcgtccgtagtgaac

SEQ ID NO: 38522 - DNA, 16 bp, synthetic construct
  misc_feature 1..16: note = synthetic [barcode part1]
  source 1..16: mol_type = other DNA
agtccgactaacggtt

SEQ ID NO: 38523 - DNA, 16 bp, synthetic construct
  misc_feature 1..16: note = synthetic [barcode part1]
  source 1..16: mol_type = other DNA
aagatcaaccgccttg

SEQ ID NO: 38524 - DNA, 16 bp, synthetic construct
  misc_feature 1..16: note = synthetic [barcode part1]
  source 1..16: mol_type = other DNA
tataccgccttaactg

SEQ ID NO: 38525 - DNA, 16 bp, synthetic construct
  misc_feature 1..16: note = synthetic [barcode part1]
  source 1..16: mol_type = other DNA
agtgcacgtcggtatt

SEQ ID NO: 38526 - DNA, 16 bp, synthetic construct
  misc_feature 1..16: note = synthetic [barcode part1]
  source 1..16: mol_type = other DNA
tgaactcggacgacag

SEQ ID NO: 38527 - DNA, 16 bp, synthetic construct
  misc_feature 1..16: note = synthetic [barcode part1]
  source 1..16: mol_type = other DNA
tgccgagaacacagac

SEQ ID NO: 38528 - DNA, 16 bp, synthetic construct
  misc_feature 1..16: note = synthetic [barcode part1]
  source 1..16: mol_type = other DNA
tgccgccgatatatcc

SEQ ID NO: 38529 - DNA, 16 bp, synthetic construct
  misc_feature 1..16: note = synthetic [barcode part1]
  source 1..16: mol_type = other DNA
taccgattacgtggtg

SEQ ID NO: 38530 - DNA, 16 bp, synthetic construct
  misc_feature 1..16: note = synthetic [barcode part1]
  source 1..16: mol_type = other DNA
cgagtcgaactcaatc

SEQ ID NO: 38531 - DNA, 16 bp, synthetic construct
  misc_feature 1..16: note = synthetic [barcode part1]
  source 1..16: mol_type = other DNA
gtggcaagtccaagtg

SEQ ID NO: 38532 - DNA, 16 bp, synthetic construct
  misc_feature 1..16: note = synthetic [barcode part1]
  source 1..16: mol_type = other DNA
aggtatactgacggcg

SEQ ID NO: 38533 - DNA, 16 bp, synthetic construct
  misc_feature 1..16: note = synthetic [barcode part1]
  source 1..16: mol_type = other DNA
gtctcgtagtacgtcc

SEQ ID NO: 38534 - DNA, 16 bp, synthetic construct
  misc_feature 1..16: note = synthetic [barcode part1]
  source 1..16: mol_type = other DNA
caagtcgtcctgcact

SEQ ID NO: 38535 - DNA, 16 bp, synthetic construct
  misc_feature 1..16: note = synthetic [barcode part1]
  source 1..16: mol_type = other DNA
acggattacgcaatcc

SEQ ID NO: 38536 - DNA, 16 bp, synthetic construct
  misc_feature 1..16: note = synthetic [barcode part1]
  source 1..16: mol_type = other DNA
ttcttacctcgtgtcg

SEQ ID NO: 38537 - DNA, 16 bp, synthetic construct
  misc_feature 1..16: note = synthetic [barcode part1]
  source 1..16: mol_type = other DNA
ccaccgtacgaactct

SEQ ID NO: 38538 - DNA, 16 bp, synthetic construct
  misc_feature 1..16: note = synthetic [barcode part1]
  source 1..16: mol_type = other DNA
aactgtgtgcaaccac

SEQ ID NO: 38539 - DNA, 16 bp, synthetic construct
  misc_feature 1..16: note = synthetic [barcode part1]
  source 1..16: mol_type = other DNA
ttgaccaagaactccg

SEQ ID NO: 38540 - DNA, 16 bp, synthetic construct
  misc_feature 1..16: note = synthetic [barcode part1]
  source 1..16: mol_type = other DNA
ttgcaggcgttccgtt

SEQ ID NO: 38541 - DNA, 16 bp, synthetic construct
  misc_feature 1..16: note = synthetic [barcode part1]
  source 1..16: mol_type = other DNA
ccaggtgtagatactc

SEQ ID NO: 38542 - DNA, 16 bp, synthetic construct
  misc_feature 1..16: note = synthetic [barcode part1]
  source 1..16: mol_type = other DNA
gttaacgccactattc

SEQ ID NO: 38543 - DNA, 16 bp, synthetic construct
  misc_feature 1..16: note = synthetic [barcode part1]
  source 1..16: mol_type = other DNA
attgcgttaactcctg

SEQ ID NO: 38544 - DNA, 16 bp, synthetic construct
  misc_feature 1..16: note = synthetic [barcode part1]
  source 1..16: mol_type = other DNA
aggagtacaggttgtt

SEQ ID NO: 38545 - DNA, 16 bp, synthetic construct
  misc_feature 1..16: note = synthetic [barcode part1]
  source 1..16: mol_type = other DNA
atctcttgtcaacgtg

SEQ ID NO: 38546 - DNA, 16 bp, synthetic construct
  misc_feature 1..16: note = synthetic [barcode part1]
  source 1..16: mol_type = other DNA
tgtggttcgattcttg

SEQ ID NO: 38547 - DNA, 16 bp, synthetic construct
  misc_feature 1..16: note = synthetic [barcode part1]
  source 1..16: mol_type = other DNA
tacgatagacgccact

SEQ ID NO: 38548 - DNA, 16 bp, synthetic construct
  misc_feature 1..16: note = synthetic [barcode part1]
  source 1..16: mol_type = other DNA
gcactataggtaggcg

SEQ ID NO: 38549 - DNA, 16 bp, synthetic construct
  misc_feature 1..16: note = synthetic [barcode part1]
  source 1..16: mol_type = other DNA
atattagtcggtgcgc

SEQ ID NO: 38550 - DNA, 16 bp, synthetic construct
  misc_feature 1..16: note = synthetic [barcode part1]
  source 1..16: mol_type = other DNA
gcggtggtaagtctag

SEQ ID NO: 38551 - DNA, 16 bp, synthetic construct
  misc_feature 1..16: note = synthetic [barcode part1]
  source 1..16: mol_type = other DNA
gcctgtcgatactatt

SEQ ID NO: 38552 - DNA, 16 bp, synthetic construct
  misc_feature 1..16: note = synthetic [barcode part1]
  source 1..16: mol_type = other DNA
tcaccgcgaatccgtt

SEQ ID NO: 38553 - DNA, 16 bp, synthetic construct
  misc_feature 1..16: note = synthetic [barcode part1]
  source 1..16: mol_type = other DNA
cagaggtaggttgtcg

SEQ ID NO: 38554 - DNA, 16 bp, synthetic construct
  misc_feature 1..16: note = synthetic [barcode part1]
  source 1..16: mol_type = other DNA
ccgagatcactgtagt

SEQ ID NO: 38555 - DNA, 16 bp, synthetic construct
  misc_feature 1..16: note = synthetic [barcode part1]
  source 1..16: mol_type = other DNA
cgagattgaccgattc

SEQ ID NO: 38556 - DNA, 16 bp, synthetic construct
  misc_feature 1..16: note = synthetic [barcode part1]
  source 1..16: mol_type = other DNA
tagtgaactacgaacg

SEQ ID NO: 38557 - DNA, 16 bp, synthetic construct
  misc_feature 1..16: note = synthetic [barcode part1]
  source 1..16: mol_type = other DNA
ataaccggagatcaac

SEQ ID NO: 38558 - DNA, 16 bp, synthetic construct
  misc_feature 1..16: note = synthetic [barcode part1]
  source 1..16: mol_type = other DNA
gtgtagtctctgattc

SEQ ID NO: 38559 - DNA, 16 bp, synthetic construct
  misc_feature 1..16: note = synthetic [barcode part1]
  source 1..16: mol_type = other DNA
gcggtcaagaattaac

SEQ ID NO: 38560 - DNA, 16 bp, synthetic construct
  misc_feature 1..16: note = synthetic [barcode part1]
  source 1..16: mol_type = other DNA
gacgattcttccgcac

SEQ ID NO: 38561 - DNA, 16 bp, synthetic construct
  misc_feature 1..16: note = synthetic [barcode part1]
  source 1..16: mol_type = other DNA
tggacgtacacaacct

SEQ ID NO: 38562 - DNA, 16 bp, synthetic construct
  misc_feature 1..16: note = synthetic [barcode part1]
  source 1..16: mol_type = other DNA
caagttattcctgcgt

SEQ ID NO: 38563 - DNA, 16 bp, synthetic construct
  misc_feature 1..16: note = synthetic [barcode part1]
  source 1..16: mol_type = other DNA
acgtgcctgttctgtg

SEQ ID NO: 38564 - DNA, 16 bp, synthetic construct
  misc_feature 1..16: note = synthetic [barcode part1]
  source 1..16: mol_type = other DNA
tagaaggccgatcctt

SEQ ID NO: 38565 - DNA, 16 bp, synthetic construct
  misc_feature 1..16: note = synthetic [barcode part1]
  source 1..16: mol_type = other DNA
aacgtgtgtacaccac

SEQ ID NO: 38566 - DNA, 16 bp, synthetic construct
  misc_feature 1..16: note = synthetic [barcode part1]
  source 1..16: mol_type = other DNA
cctcgtgatacagagt

SEQ ID NO: 38567 - DNA, 16 bp, synthetic construct
  misc_feature 1..16: note = synthetic [barcode part1]
  source 1..16: mol_type = other DNA
acgtacgcagttggtt

SEQ ID NO: 38568 - DNA, 16 bp, synthetic construct
  misc_feature 1..16: note = synthetic [barcode part1]
  source 1..16: mol_type = other DNA
taactctgcacgtcgc

SEQ ID NO: 38569 - DNA, 16 bp, synthetic construct
  misc_feature 1..16: note = synthetic [barcode part1]
  source 1..16: mol_type = other DNA
cgattgtcaccgatag

SEQ ID NO: 38570 - DNA, 16 bp, synthetic construct
  misc_feature 1..16: note = synthetic [barcode part1]
  source 1..16: mol_type = other DNA
gatatcctcaccaccg

SEQ ID NO: 38571 - DNA, 16 bp, synthetic construct
  misc_feature 1..16: note = synthetic [barcode part1]
  source 1..16: mol_type = other DNA
cgtccgaagaggttag

SEQ ID NO: 38572 - DNA, 16 bp, synthetic construct
  misc_feature 1..16: note = synthetic [barcode part1]
  source 1..16: mol_type = other DNA
cgtcacgtcaatcaag

SEQ ID NO: 38573 - DNA, 16 bp, synthetic construct
  misc_feature 1..16: note = synthetic [barcode part1]
  source 1..16: mol_type = other DNA
attaccttcacgagtc

SEQ ID NO: 38574 - DNA, 16 bp, synthetic construct
  misc_feature 1..16: note = synthetic [barcode part1]
  source 1..16: mol_type = other DNA
tgtggtgtcgtccact

SEQ ID NO: 38575 - DNA, 16 bp, synthetic construct
  misc_feature 1..16: note = synthetic [barcode part1]
  source 1..16: mol_type = other DNA
atctgtctagagtcct

SEQ ID NO: 38576 - DNA, 16 bp, synthetic construct
  misc_feature 1..16: note = synthetic [barcode part1]
  source 1..16: mol_type = other DNA
tgacgatcaacctgac

SEQ ID NO: 38577 - DNA, 16 bp, synthetic construct
  misc_feature 1..16: note = synthetic [barcode part1]
  source 1..16: mol_type = other DNA
cgtatagatcctccgc

SEQ ID NO: 38578 - DNA, 16 bp, synthetic construct
  misc_feature 1..16: note = synthetic [barcode part1]
  source 1..16: mol_type = other DNA
tggacaccaacggagt

SEQ ID NO: 38579 - DNA, 16 bp, synthetic construct
  misc_feature 1..16: note = synthetic [barcode part1]
  source 1..16: mol_type = other DNA
attgcgaactctaggc

SEQ ID NO: 38580 - DNA, 16 bp, synthetic construct
  misc_feature 1..16: note = synthetic [barcode part1]
  source 1..16: mol_type = other DNA
gtcctgtatccttcac

SEQ ID NO: 38581 - DNA, 16 bp, synthetic construct
  misc_feature 1..16: note = synthetic [barcode part1]
  source 1..16: mol_type = other DNA
ttcgagaatacgcgtc

SEQ ID NO: 38582 - DNA, 16 bp, synthetic construct
  misc_feature 1..16: note = synthetic [barcode part1]
  source 1..16: mol_type = other DNA
agtacgtgttgcacac

SEQ ID NO: 38583 - DNA, 16 bp, synthetic construct
  misc_feature 1..16: note = synthetic [barcode part1]
  source 1..16: mol_type = other DNA
agaggcgcgaattatt

SEQ ID NO: 38584 - DNA, 16 bp, synthetic construct
  misc_feature 1..16: note = synthetic [barcode part1]
  source 1..16: mol_type = other DNA
actctcgacgagaatc

SEQ ID NO: 38585 - DNA, 16 bp, synthetic construct
  misc_feature 1..16: note = synthetic [barcode part1]
  source 1..16: mol_type = other DNA
tgattatcggagaacg

SEQ ID NO: 38586 - DNA, 16 bp, synthetic construct
  misc_feature 1..16: note = synthetic [barcode part1]
  source 1..16: mol_type = other DNA
tggcgtgtcaagtatc

SEQ ID NO: 38587 - DNA, 16 bp, synthetic construct
  misc_feature 1..16: note = synthetic [barcode part1]
  source 1..16: mol_type = other DNA
attacgcaggataacg

SEQ ID NO: 38588 - DNA, 16 bp, synthetic construct
  misc_feature 1..16: note = synthetic [barcode part1]
  source 1..16: mol_type = other DNA
tactggtgtaccagtg

SEQ ID NO: 38589 - DNA, 16 bp, synthetic construct
  misc_feature 1..16: note = synthetic [barcode part1]
  source 1..16: mol_type = other DNA
gttgtgtagtctgcag

SEQ ID NO: 38590 - DNA, 16 bp, synthetic construct
  misc_feature 1..16: note = synthetic [barcode part1]
  source 1..16: mol_type = other DNA
attcgaggtaataggc

SEQ ID NO: 38591 - DNA, 16 bp, synthetic construct
  misc_feature 1..16: note = synthetic [barcode part1]
  source 1..16: mol_type = other DNA
attgtctgtctacgac

SEQ ID NO: 38592 - DNA, 16 bp, synthetic construct
  misc_feature 1..16: note = synthetic [barcode part1]
  source 1..16: mol_type = other DNA
ttacctatccacctgc

SEQ ID NO: 38593 - DNA, 16 bp, synthetic construct
  misc_feature 1..16: note = synthetic [barcode part1]
  source 1..16: mol_type = other DNA
aacctgagtcagatcc

SEQ ID NO: 38594 - DNA, 16 bp, synthetic construct
  misc_feature 1..16: note = synthetic [barcode part1]
  source 1..16: mol_type = other DNA
taggacgtaccgacag

SEQ ID NO: 38595 - DNA, 16 bp, synthetic construct
  misc_feature 1..16: note = synthetic [barcode part1]
  source 1..16: mol_type = other DNA
acgcggttgtatagtc

SEQ ID NO: 38596 - DNA, 16 bp, synthetic construct
  misc_feature 1..16: note = synthetic [barcode part1]
  source 1..16: mol_type = other DNA
actcctgtaggttgcc

SEQ ID NO: 38597 - DNA, 16 bp, synthetic construct
  misc_feature 1..16: note = synthetic [barcode part1]
  source 1..16: mol_type = other DNA
gtatctgactcgcaag

SEQ ID NO: 38598 - DNA, 16 bp, synthetic construct
  misc_feature 1..16: note = synthetic [barcode part1]
  source 1..16: mol_type = other DNA
acgaacggacactacg

SEQ ID NO: 38599 - DNA, 16 bp, synthetic construct
  misc_feature 1..16: note = synthetic [barcode part1]
  source 1..16: mol_type = other DNA
acgagtggccttgaag

SEQ ID NO: 38600 - DNA, 16 bp, synthetic construct
  misc_feature 1..16: note = synthetic [barcode part1]
  source 1..16: mol_type = other DNA
gtcggaccactcttac

SEQ ID NO: 38601 - DNA, 16 bp, synthetic construct
  misc_feature 1..16: note = synthetic [barcode part1]
  source 1..16: mol_type = other DNA
gagtgttccacagatc

SEQ ID NO: 38602 - DNA, 16 bp, synthetic construct
  misc_feature 1..16: note = synthetic [barcode part1]
  source 1..16: mol_type = other DNA
tagacaatccaaggtg

SEQ ID NO: 38603 - DNA, 16 bp, synthetic construct
  misc_feature 1..16: note = synthetic [barcode part1]
  source 1..16: mol_type = other DNA
ccacgcacaattgtag

SEQ ID NO: 38604 - DNA, 16 bp, synthetic construct
  misc_feature 1..16: note = synthetic [barcode part1]
  source 1..16: mol_type = other DNA
aagttgaatcagtgcg

SEQ ID NO: 38605 - DNA, 16 bp, synthetic construct
  misc_feature 1..16: note = synthetic [barcode part1]
  source 1..16: mol_type = other DNA
tgcagtatattgcggc

SEQ ID NO: 38606 - DNA, 16 bp, synthetic construct
  misc_feature 1..16: note = synthetic [barcode part1]
  source 1..16: mol_type = other DNA
accagacttacgttct

SEQ ID NO: 38607 - DNA, 16 bp, synthetic construct
  misc_feature 1..16: note = synthetic [barcode part1]
  source 1..16: mol_type = other DNA
gtggttaggaactaac

SEQ ID NO: 38608 - DNA, 16 bp, synthetic construct
  misc_feature 1..16: note = synthetic [barcode part1]
  source 1..16: mol_type = other DNA
aacctcctcgacgtac

SEQ ID NO: 38609 - DNA, 16 bp, synthetic construct
  misc_feature 1..16: note = synthetic [barcode part1]
  source 1..16: mol_type = other DNA
gactacaccagtctcc

SEQ ID NO: 38610 - DNA, 16 bp, synthetic construct
  misc_feature 1..16: note = synthetic [barcode part1]
  source 1..16: mol_type = other DNA
acactctcgtggaagt

SEQ ID NO: 38611 - DNA, 16 bp, synthetic construct
  misc_feature 1..16: note = synthetic [barcode part1]
  source 1..16: mol_type = other DNA
caattcgactcgacag

SEQ ID NO: 38612 - DNA, 16 bp, synthetic construct
  misc_feature 1..16: note = synthetic [barcode part1]
  source 1..16: mol_type = other DNA
acaagtcgttgtcttc

SEQ ID NO: 38613 - DNA, 16 bp, synthetic construct
  misc_feature 1..16: note = synthetic [barcode part1]
  source 1..16: mol_type = other DNA
atcctcgtgagttatc

SEQ ID NO: 38614 - DNA, 16 bp, synthetic construct
  misc_feature 1..16: note = synthetic [barcode part1]
  source 1..16: mol_type = other DNA
ttcggagtggtactgt

SEQ ID NO: 38615 - DNA, 16 bp, synthetic construct
  misc_feature 1..16: note = synthetic [barcode part1]
  source 1..16: mol_type = other DNA
tctccgtcctgtattg

SEQ ID NO: 38616 - DNA, 16 bp, synthetic construct
  misc_feature 1..16: note = synthetic [barcode part1]
  source 1..16: mol_type = other DNA
gcagaggtggttcagt

SEQ ID NO: 38617 - DNA, 16 bp, synthetic construct
  misc_feature 1..16: note = synthetic [barcode part1]
  source 1..16: mol_type = other DNA
acggacactataacag

SEQ ID NO: 38618 - DNA, 16 bp, synthetic construct
  misc_feature 1..16: note = synthetic [barcode part1]
  source 1..16: mol_type = other DNA
atctccggtgattcgc

SEQ ID NO: 38619 - DNA, 16 bp, synthetic construct
  misc_feature 1..16: note = synthetic [barcode part1]
  source 1..16: mol_type = other DNA
aatcgactcaactggc

SEQ ID NO: 38620 - DNA, 16 bp, synthetic construct
  misc_feature 1..16: note = synthetic [barcode part1]
  source 1..16: mol_type = other DNA
caaggacaagtcaccg

SEQ ID NO: 38621 - DNA, 16 bp, synthetic construct
  misc_feature 1..16: note = synthetic [barcode part1]
  source 1..16: mol_type = other DNA
gtctcgtgtctcttac

SEQ ID NO: 38622 - DNA, 16 bp, synthetic construct
  misc_feature 1..16: note = synthetic [barcode part1]
  source 1..16: mol_type = other DNA
tggttacggcggtaag

SEQ ID NO: 38623 - DNA, 16 bp, synthetic construct
  misc_feature 1..16: note = synthetic [barcode part1]
  source 1..16: mol_type = other DNA
acaactgttctctgac

SEQ ID NO: 38624 - DNA, 16 bp, synthetic construct
  misc_feature 1..16: note = synthetic [barcode part1]
  source 1..16: mol_type = other DNA
aattgcggattggaac

SEQ ID NO: 38625 - DNA, 16 bp, synthetic construct
  misc_feature 1..16: note = synthetic [barcode part1]
  source 1..16: mol_type = other DNA
gactactgaactaccg

SEQ ID NO: 38626 - DNA, 16 bp, synthetic construct
  misc_feature 1..16: note = synthetic [barcode part1]
  source 1..16: mol_type = other DNA
tagacgtgtacgactc

SEQ ID NO: 38627 - DNA, 16 bp, synthetic construct
  misc_feature 1..16: note = synthetic [barcode part1]
  source 1..16: mol_type = other DNA
gtccacttcgtggtac

SEQ ID NO: 38628 - DNA, 16 bp, synthetic construct
  misc_feature 1..16: note = synthetic [barcode part1]
  source 1..16: mol_type = other DNA
aggcctgtatcagtac

SEQ ID NO: 38629 - DNA, 16 bp, synthetic construct
  misc_feature 1..16: note = synthetic [barcode part1]
  source 1..16: mol_type = other DNA
actacctcaggtactt

SEQ ID NO: 38630 - DNA, 16 bp, synthetic construct
  misc_feature 1..16: note = synthetic [barcode part1]
  source 1..16: mol_type = other DNA
actcggccacaagaag

SEQ ID NO: 38631 - DNA, 16 bp, synthetic construct
  misc_feature 1..16: note = synthetic [barcode part1]
  source 1..16: mol_type = other DNA
agacctactacgtgac

SEQ ID NO: 38632 - DNA, 16 bp, synthetic construct
  misc_feature 1..16: note = synthetic [barcode part1]
  source 1..16: mol_type = other DNA
tgacgtatcagtgtgc

SEQ ID NO: 38633 - DNA, 16 bp, synthetic construct
  misc_feature 1..16: note = synthetic [barcode part1]
  source 1..16: mol_type = other DNA
tccagtcttggaagac

SEQ ID NO: 38634 - DNA, 16 bp, synthetic construct
  misc_feature 1..16: note = synthetic [barcode part1]
  source 1..16: mol_type = other DNA
ttgtgttcgaatcgtc

SEQ ID NO: 38635 - DNA, 16 bp, synthetic construct
  misc_feature 1..16: note = synthetic [barcode part1]
  source 1..16: mol_type = other DNA
tcgtaagactccttac

SEQ ID NO: 38636 - DNA, 16 bp, synthetic construct
  misc_feature 1..16: note = synthetic [barcode part1]
  source 1..16: mol_type = other DNA
agactgtactcgacac

SEQ ID NO: 38637 - DNA, 16 bp, synthetic construct
  misc_feature 1..16: note = synthetic [barcode part1]
  source 1..16: mol_type = other DNA
gtgtgttcgtctcgtg

SEQ ID NO: 38638 - DNA, 16 bp, synthetic construct
  misc_feature 1..16: note = synthetic [barcode part1]
  source 1..16: mol_type = other DNA
aaggacctcaatcctg

SEQ ID NO: 38639 - DNA, 16 bp, synthetic construct
  misc_feature 1..16: note = synthetic [barcode part1]
  source 1..16: mol_type = other DNA
aggataggcagtaggt

SEQ ID NO: 38640 - DNA, 16 bp, synthetic construct
  misc_feature 1..16: note = synthetic [barcode part1]
  source 1..16: mol_type = other DNA
cgaccaagatcctagt

SEQ ID NO: 38641 - DNA, 16 bp, synthetic construct
  misc_feature 1..16: note = synthetic [barcode part1]
  source 1..16: mol_type = other DNA
gagtgagttcaagatc

SEQ ID NO: 38642 - DNA, 16 bp, synthetic construct
  misc_feature 1..16: note = synthetic [barcode part1]
  source 1..16: mol_type = other DNA
agactcttagtcgacg

SEQ ID NO: 38643 - DNA, 16 bp, synthetic construct
  misc_feature 1..16: note = synthetic [barcode part1]
  source 1..16: mol_type = other DNA
gcctcactccaatctt

SEQ ID NO: 38644 - DNA, 16 bp, synthetic construct
  misc_feature 1..16: note = synthetic [barcode part1]
  source 1..16: mol_type = other DNA
tgtagaacctccgtag

SEQ ID NO: 38645 - DNA, 16 bp, synthetic construct
  misc_feature 1..16: note = synthetic [barcode part1]
  source 1..16: mol_type = other DNA
cggcgtacaacttctc

SEQ ID NO: 38646 - DNA, 16 bp, synthetic construct
  misc_feature 1..16: note = synthetic [barcode part1]
  source 1..16: mol_type = other DNA
tgtagtgaacggatac

SEQ ID NO: 38647 - DNA, 16 bp, synthetic construct
  misc_feature 1..16: note = synthetic [barcode part1]
  source 1..16: mol_type = other DNA
acgataccacgatacc

SEQ ID NO: 38648 - DNA, 16 bp, synthetic construct
  misc_feature 1..16: note = synthetic [barcode part1]
  source 1..16: mol_type = other DNA
aagtaaccacggattg

SEQ ID NO: 38649 - DNA, 16 bp, synthetic construct
  misc_feature 1..16: note = synthetic [barcode part1]
  source 1..16: mol_type = other DNA
gcaacagtggacctag

SEQ ID NO: 38650 - DNA, 16 bp, synthetic construct
  misc_feature 1..16: note = synthetic [barcode part1]
  source 1..16: mol_type = other DNA
tactcagttctgtcag

SEQ ID NO: 38651 - DNA, 16 bp, synthetic construct
  misc_feature 1..16: note = synthetic [barcode part1]
  source 1..16: mol_type = other DNA
aggaagaactggtcag

SEQ ID NO: 38652 - DNA, 16 bp, synthetic construct
  misc_feature 1..16: note = synthetic [barcode part1]
  source 1..16: mol_type = other DNA
ccgtgaagttcgagtt

SEQ ID NO: 38653 - DNA, 16 bp, synthetic construct
  misc_feature 1..16: note = synthetic [barcode part1]
  source 1..16: mol_type = other DNA
tatagtggcggtgtct

SEQ ID NO: 38654 - DNA, 16 bp, synthetic construct
  misc_feature 1..16: note = synthetic [barcode part1]
  source 1..16: mol_type = other DNA
cagtactgtcctgaag

SEQ ID NO: 38655 - DNA, 16 bp, synthetic construct
  misc_feature 1..16: note = synthetic [barcode part1]
  source 1..16: mol_type = other DNA
tgtctattcgcctgtc

SEQ ID NO: 38656 - DNA, 16 bp, synthetic construct
  misc_feature 1..16: note = synthetic [barcode part1]
  source 1..16: mol_type = other DNA
caacgatcaacgatcc

SEQ ID NO: 38657 - DNA, 16 bp, synthetic construct
  misc_feature 1..16: note = synthetic [barcode part1]
  source 1..16: mol_type = other DNA
gacacttacagagtag

SEQ ID NO: 38658 - DNA, 16 bp, synthetic construct
  misc_feature 1..16: note = synthetic [barcode part1]
  source 1..16: mol_type = other DNA
cctactaatactcggt

SEQ ID NO: 38659 - DNA, 16 bp, synthetic construct
  misc_feature 1..16: note = synthetic [barcode part1]
  source 1..16: mol_type = other DNA
tcggaacgcctactct

SEQ ID NO: 38660 - DNA, 16 bp, synthetic construct
  misc_feature 1..16: note = synthetic [barcode part1]
  source 1..16: mol_type = other DNA
tgaaccacaacagtcc

SEQ ID NO: 38661 - DNA, 16 bp, synthetic construct
  misc_feature 1..16: note = synthetic [barcode part1]
  source 1..16: mol_type = other DNA
agttcggcacgtcctt

SEQ ID NO: 38662 - DNA, 16 bp, synthetic construct
  misc_feature 1..16: note = synthetic [barcode part1]
  source 1..16: mol_type = other DNA
aaggttctctggagtc

SEQ ID NO: 38663 - DNA, 16 bp, synthetic construct
  misc_feature 1..16: note = synthetic [barcode part1]
  source 1..16: mol_type = other DNA
caccaagatctctgtt

SEQ ID NO: 38664 - DNA, 16 bp, synthetic construct
  misc_feature 1..16: note = synthetic [barcode part1]
  source 1..16: mol_type = other DNA
gtatcgtctactcgcg

SEQ ID NO: 38665 - DNA, 16 bp, synthetic construct
  misc_feature 1..16: note = synthetic [barcode part1]
  source 1..16: mol_type = other DNA
gacctaaccttcgcac

SEQ ID NO: 38666 - DNA, 16 bp, synthetic construct
  misc_feature 1..16: note = synthetic [barcode part1]
  source 1..16: mol_type = other DNA
gacttggagtccgatt

SEQ ID NO: 38667 - DNA, 16 bp, synthetic construct
  misc_feature 1..16: note = synthetic [barcode part1]
  source 1..16: mol_type = other DNA
aaggaccgtatatcag

SEQ ID NO: 38668 - DNA, 16 bp, synthetic construct
  misc_feature 1..16: note = synthetic [barcode part1]
  source 1..16: mol_type = other DNA
atctcgactaggatcg

SEQ ID NO: 38669 - DNA, 16 bp, synthetic construct
  misc_feature 1..16: note = synthetic [barcode part1]
  source 1..16: mol_type = other DNA
gtcctgttagattcac

SEQ ID NO: 38670 - DNA, 16 bp, synthetic construct
  misc_feature 1..16: note = synthetic [barcode part1]
  source 1..16: mol_type = other DNA
ttaattcctcgcgagt

SEQ ID NO: 38671 - DNA, 16 bp, synthetic construct
  misc_feature 1..16: note = synthetic [barcode part1]
  source 1..16: mol_type = other DNA
tcctagtcttccggtt

SEQ ID NO: 38672 - DNA, 16 bp, synthetic construct
  misc_feature 1..16: note = synthetic [barcode part1]
  source 1..16: mol_type = other DNA
cgatcgccttaactcg

SEQ ID NO: 38673 - DNA, 16 bp, synthetic construct
  misc_feature 1..16: note = synthetic [barcode part1]
  source 1..16: mol_type = other DNA
gtattcgaccttgttg

SEQ ID NO: 38674 - DNA, 16 bp, synthetic construct
  misc_feature 1..16: note = synthetic [barcode part1]
  source 1..16: mol_type = other DNA
cgtgattagttgtgcg

SEQ ID NO: 38675 - DNA, 16 bp, synthetic construct
  misc_feature 1..16: note = synthetic [barcode part1]
  source 1..16: mol_type = other DNA
gtctcgtgtggaatac

SEQ ID NO: 38676 - DNA, 16 bp, synthetic construct
  misc_feature 1..16: note = synthetic [barcode part1]
  source 1..16: mol_type = other DNA
cacactcgataattcc

SEQ ID NO: 38677 - DNA, 16 bp, synthetic construct
  misc_feature 1..16: note = synthetic [barcode part1]
  source 1..16: mol_type = other DNA
acgccactaggtgaag

SEQ ID NO: 38678 - DNA, 16 bp, synthetic construct
  misc_feature 1..16: note = synthetic [barcode part1]
  source 1..16: mol_type = other DNA
actggtaggatcggac

SEQ ID NO: 38679 - DNA, 16 bp, synthetic construct
  misc_feature 1..16: note = synthetic [barcode part1]
  source 1..16: mol_type = other DNA
tgacgtaatcggaggc

SEQ ID NO: 38680 - DNA, 16 bp, synthetic construct
  misc_feature 1..16: note = synthetic [barcode part1]
  source 1..16: mol_type = other DNA
tacaacgtggatagac

SEQ ID NO: 38681 - DNA, 16 bp, synthetic construct
  misc_feature 1..16: note = synthetic [barcode part1]
  source 1..16: mol_type = other DNA
cggccagaatcttagt

SEQ ID NO: 38682 - DNA, 16 bp, synthetic construct
  misc_feature 1..16: note = synthetic [barcode part1]
  source 1..16: mol_type = other DNA
ttccgcaggtccaatc

SEQ ID NO: 38683 - DNA, 16 bp, synthetic construct
  misc_feature 1..16: note = synthetic [barcode part1]
  source 1..16: mol_type = other DNA
gtaacctactcttacg

SEQ ID NO: 38684 - DNA, 16 bp, synthetic construct
  misc_feature 1..16: note = synthetic [barcode part1]
  source 1..16: mol_type = other DNA
tcacgaacctgtagac

SEQ ID NO: 38685 - DNA, 16 bp, synthetic construct
  misc_feature 1..16: note = synthetic [barcode part1]
  source 1..16: mol_type = other DNA
tgcggataacgttcgt

SEQ ID NO: 38686 - DNA, 16 bp, synthetic construct
  misc_feature 1..16: note = synthetic [barcode part1]
  source 1..16: mol_type = other DNA
tagactcaagtccacg

SEQ ID NO: 38687 - DNA, 16 bp, synthetic construct
  misc_feature 1..16: note = synthetic [barcode part1]
  source 1..16: mol_type = other DNA
acctattgttcgcctc

SEQ ID NO: 38688 - DNA, 16 bp, synthetic construct
  misc_feature 1..16: note = synthetic [barcode part1]
  source 1..16: mol_type = other DNA
ttggtactgcacaacg

SEQ ID NO: 38689 - DNA, 16 bp, synthetic construct
  misc_feature 1..16: note = synthetic [barcode part1]
  source 1..16: mol_type = other DNA
tggattcagacgatag

SEQ ID NO: 38690 - DNA, 16 bp, synthetic construct
  misc_feature 1..16: note = synthetic [barcode part1]
  source 1..16: mol_type = other DNA
cgaatatcgcgttggt

SEQ ID NO: 38691 - DNA, 16 bp, synthetic construct
  misc_feature 1..16: note = synthetic [barcode part1]
  source 1..16: mol_type = other DNA
gattacctaaggacag

SEQ ID NO: 38692 - DNA, 16 bp, synthetic construct
  misc_feature 1..16: note = synthetic [barcode part1]
  source 1..16: mol_type = other DNA
gagacttagacagatc

SEQ ID NO: 38693 - DNA, 16 bp, synthetic construct
  misc_feature 1..16: note = synthetic [barcode part1]
  source 1..16: mol_type = other DNA
tgttactgcggttgcc

SEQ ID NO: 38694 - DNA, 16 bp, synthetic construct
  misc_feature 1..16: note = synthetic [barcode part1]
  source 1..16: mol_type = other DNA
agatctctgcgtgtag

SEQ ID NO: 38695 - DNA, 16 bp, synthetic construct
  misc_feature 1..16: note = synthetic [barcode part1]
  source 1..16: mol_type = other DNA
taggtcgttccgcact

SEQ ID NO: 38696 - DNA, 16 bp, synthetic construct
  misc_feature 1..16: note = synthetic [barcode part1]
  source 1..16: mol_type = other DNA
gaagtattggcagttg

SEQ ID NO: 38697 - DNA, 16 bp, synthetic construct
  misc_feature 1..16: note = synthetic [barcode part1]
  source 1..16: mol_type = other DNA
gaggtgatactgtctc

SEQ ID NO: 38698 - DNA, 16 bp, synthetic construct
  misc_feature 1..16: note = synthetic [barcode part1]
  source 1..16: mol_type = other DNA
tcctgtgcgatctgac

SEQ ID NO: 38699 - DNA, 16 bp, synthetic construct
  misc_feature 1..16: note = synthetic [barcode part1]
  source 1..16: mol_type = other DNA
gatagattccagaacg

SEQ ID NO: 38700 - DNA, 16 bp, synthetic construct
  misc_feature 1..16: note = synthetic [barcode part1]
  source 1..16: mol_type = other DNA
tgattcctgcgtaact

SEQ ID NO: 38701 - DNA, 16 bp, synthetic construct
  misc_feature 1..16: note = synthetic [barcode part1]
  source 1..16: mol_type = other DNA
attgtctcaggtgttc

SEQ ID NO: 38702 - DNA, 16 bp, synthetic construct
  misc_feature 1..16: note = synthetic [barcode part1]
  source 1..16: mol_type = other DNA
ccaggaagtgcaatcg

SEQ ID NO: 38703 - DNA, 16 bp, synthetic construct
  misc_feature 1..16: note = synthetic [barcode part1]
  source 1..16: mol_type = other DNA
cggattaagaagtacc

SEQ ID NO: 38704 - DNA, 16 bp, synthetic construct
  misc_feature 1..16: note = synthetic [barcode part1]
  source 1..16: mol_type = other DNA
atcacaaggcaggcgt

SEQ ID NO: 38705 - DNA, 16 bp, synthetic construct
  misc_feature 1..16: note = synthetic [barcode part1]
  source 1..16: mol_type = other DNA
caaggaacgtgtgatt

SEQ ID NO: 38706 - DNA, 16 bp, synthetic construct
  misc_feature 1..16: note = synthetic [barcode part1]
  source 1..16: mol_type = other DNA
aagatcctgtctactc

SEQ ID NO: 38707 - DNA, 16 bp, synthetic construct
  misc_feature 1..16: note = synthetic [barcode part1]
  source 1..16: mol_type = other DNA
agtccttcgactctct

SEQ ID NO: 38708 - DNA, 16 bp, synthetic construct
  misc_feature 1..16: note = synthetic [barcode part1]
  source 1..16: mol_type = other DNA
tcaagtggtgaactcc

SEQ ID NO: 38709 - DNA, 16 bp, synthetic construct
  misc_feature 1..16: note = synthetic [barcode part1]
  source 1..16: mol_type = other DNA
gtggccacttcgattc

SEQ ID NO: 38710 - DNA, 16 bp, synthetic construct
  misc_feature 1..16: note = synthetic [barcode part1]
  source 1..16: mol_type = other DNA
gcagagtcagagtaag

SEQ ID NO: 38711 - DNA, 16 bp, synthetic construct
  misc_feature 1..16: note = synthetic [barcode part1]
  source 1..16: mol_type = other DNA
aactgtcctacgtccg

SEQ ID NO: 38712 - DNA, 16 bp, synthetic construct
  misc_feature 1..16: note = synthetic [barcode part1]
  source 1..16: mol_type = other DNA
gaggatatccaacagt

SEQ ID NO: 38713 - DNA, 16 bp, synthetic construct
  misc_feature 1..16: note = synthetic [barcode part1]
  source 1..16: mol_type = other DNA
aggttcgacctaggtt

SEQ ID NO: 38714 - DNA, 16 bp, synthetic construct
  misc_feature 1..16: note = synthetic [barcode part1]
  source 1..16: mol_type = other DNA
tctgcaatccgtcacg

SEQ ID NO: 38715 - DNA, 16 bp, synthetic construct
  misc_feature 1..16: note = synthetic [barcode part1]
  source 1..16: mol_type = other DNA
gcacaattcctctaac

SEQ ID NO: 38716 - DNA, 16 bp, synthetic construct
  misc_feature 1..16: note = synthetic [barcode part1]
  source 1..16: mol_type = other DNA
tgcacctaacaattcc

SEQ ID NO: 38717 - DNA, 16 bp, synthetic construct
  misc_feature 1..16: note = synthetic [barcode part1]
  source 1..16: mol_type = other DNA
atcctccgttgacacg

SEQ ID NO: 38718 - DNA, 16 bp, synthetic construct
  misc_feature 1..16: note = synthetic [barcode part1]
  source 1..16: mol_type = other DNA
cggtagttgcgaaggt

SEQ ID NO: 38719 - DNA, 16 bp, synthetic construct
  misc_feature 1..16: note = synthetic [barcode part1]
  source 1..16: mol_type = other DNA
tcacctcctgagtacg

SEQ ID NO: 38720 - DNA, 16 bp, synthetic construct
  misc_feature 1..16: note = synthetic [barcode part1]
  source 1..16: mol_type = other DNA
agtgatcctgagttgc

SEQ ID NO: 38721 - DNA, 16 bp, synthetic construct
  misc_feature 1..16: note = synthetic [barcode part1]
  source 1..16: mol_type = other DNA
gcacttctagtgattc

SEQ ID NO: 38722 - DNA, 16 bp, synthetic construct
  misc_feature 1..16: note = synthetic [barcode part1]
  source 1..16: mol_type = other DNA
ccagagagattgtgcg

SEQ ID NO: 38723 - DNA, 16 bp, synthetic construct
  misc_feature 1..16: note = synthetic [barcode part1]
  source 1..16: mol_type = other DNA
gacgcgtgattaaggc

SEQ ID NO: 38724 - DNA, 16 bp, synthetic construct
  misc_feature 1..16: note = synthetic [barcode part1]
  source 1..16: mol_type = other DNA
cgttaccacctagacc

SEQ ID NO: 38725 - DNA, 16 bp, synthetic construct
  misc_feature 1..16: note = synthetic [barcode part1]
  source 1..16: mol_type = other DNA
gtgattaggttctcct

SEQ ID NO: 38726 - DNA, 16 bp, synthetic construct
  misc_feature 1..16: note = synthetic [barcode part1]
  source 1..16: mol_type = other DNA
cactgaagttcctgcc

SEQ ID NO: 38727 - DNA, 16 bp, synthetic construct
  misc_feature 1..16: note = synthetic [barcode part1]
  source 1..16: mol_type = other DNA
agtgaccttgagtcgt

SEQ ID NO: 38728 - DNA, 16 bp, synthetic construct
  misc_feature 1..16: note = synthetic [barcode part1]
  source 1..16: mol_type = other DNA
cactccaagtatccgc

SEQ ID NO: 38729 - DNA, 16 bp, synthetic construct
  misc_feature 1..16: note = synthetic [barcode part1]
  source 1..16: mol_type = other DNA
aaggtaatctggacac

SEQ ID NO: 38730 - DNA, 16 bp, synthetic construct
  misc_feature 1..16: note = synthetic [barcode part1]
  source 1..16: mol_type = other DNA
accacagaggtgaatt

SEQ ID NO: 38731 - DNA, 16 bp, synthetic construct
  misc_feature 1..16: note = synthetic [barcode part1]
  source 1..16: mol_type = other DNA
ttgagtcacgtctccg

SEQ ID NO: 38732 - DNA, 16 bp, synthetic construct
  misc_feature 1..16: note = synthetic [barcode part1]
  source 1..16: mol_type = other DNA
tactaatcagtgcgcg

SEQ ID NO: 38733 - DNA, 16 bp, synthetic construct
  misc_feature 1..16: note = synthetic [barcode part1]
  source 1..16: mol_type = other DNA
tacacttccactgaac

SEQ ID NO: 38734 - DNA, 16 bp, synthetic construct
  misc_feature 1..16: note = synthetic [barcode part1]
  source 1..16: mol_type = other DNA
agattccgtatcgcag

SEQ ID NO: 38735 - DNA, 16 bp, synthetic construct
  misc_feature 1..16: note = synthetic [barcode part1]
  source 1..16: mol_type = other DNA
aatcacgaactgagac

SEQ ID NO: 38736 - DNA, 16 bp, synthetic construct
  misc_feature 1..16: note = synthetic [barcode part1]
  source 1..16: mol_type = other DNA
gagatcgcgatagaag

SEQ ID NO: 38737 - DNA, 16 bp, synthetic construct
  misc_feature 1..16: note = synthetic [barcode part1]
  source 1..16: mol_type = other DNA
tcagatctgacggttg

SEQ ID NO: 38738 - DNA, 16 bp, synthetic construct
  misc_feature 1..16: note = synthetic [barcode part1]
  source 1..16: mol_type = other DNA
ttgcctgagactccac

SEQ ID NO: 38739 - DNA, 16 bp, synthetic construct
  misc_feature 1..16: note = synthetic [barcode part1]
  source 1..16: mol_type = other DNA
tggcgattgtgcctct

SEQ ID NO: 38740 - DNA, 16 bp, synthetic construct
  misc_feature 1..16: note = synthetic [barcode part1]
  source 1..16: mol_type = other DNA
acaatcgcctcgatcc

SEQ ID NO: 38741 - DNA, 16 bp, synthetic construct
  misc_feature 1..16: note = synthetic [barcode part1]
  source 1..16: mol_type = other DNA
actggactattcctgt

SEQ ID NO: 38742 - DNA, 16 bp, synthetic construct
  misc_feature 1..16: note = synthetic [barcode part1]
  source 1..16: mol_type = other DNA
atagtcgaggactggc

SEQ ID NO: 38743 - DNA, 16 bp, synthetic construct
  misc_feature 1..16: note = synthetic [barcode part1]
  source 1..16: mol_type = other DNA
agtctaccgaggcaag

SEQ ID NO: 38744 - DNA, 16 bp, synthetic construct
  misc_feature 1..16: note = synthetic [barcode part1]
  source 1..16: mol_type = other DNA
tctaacgccacgtctg

SEQ ID NO: 38745 - DNA, 16 bp, synthetic construct
  misc_feature 1..16: note = synthetic [barcode part1]
  source 1..16: mol_type = other DNA
attcaggtctgagtgc

SEQ ID NO: 38746 - DNA, 16 bp, synthetic construct
  misc_feature 1..16: note = synthetic [barcode part1]
  source 1..16: mol_type = other DNA
tggccgattagtcaac

SEQ ID NO: 38747 - DNA, 16 bp, synthetic construct
  misc_feature 1..16: note = synthetic [barcode part1]
  source 1..16: mol_type = other DNA
agaacggtcgtaggtc

SEQ ID NO: 38748 - DNA, 16 bp, synthetic construct
  misc_feature 1..16: note = synthetic [barcode part1]
  source 1..16: mol_type = other DNA
gcaataataggcctag

SEQ ID NO: 38749 - DNA, 16 bp, synthetic construct
  misc_feature 1..16: note = synthetic [barcode part1]
  source 1..16: mol_type = other DNA
ttaccgcgtctacgac

SEQ ID NO: 38750 - DNA, 16 bp, synthetic construct
  misc_feature 1..16: note = synthetic [barcode part1]
  source 1..16: mol_type = other DNA
ccgcgtagacttcttg

SEQ ID NO: 38751 - DNA, 16 bp, synthetic construct
  misc_feature 1..16: note = synthetic [barcode part1]
  source 1..16: mol_type = other DNA
tctattcacgacgttg

SEQ ID NO: 38752 - DNA, 16 bp, synthetic construct
  misc_feature 1..16: note = synthetic [barcode part1]
  source 1..16: mol_type = other DNA
tatcgagataggaacc

SEQ ID NO: 38753 - DNA, 16 bp, synthetic construct
  misc_feature 1..16: note = synthetic [barcode part1]
  source 1..16: mol_type = other DNA
acagattctctcgact

SEQ ID NO: 38754 - DNA, 16 bp, synthetic construct
  misc_feature 1..16: note = synthetic [barcode part1]
  source 1..16: mol_type = other DNA
ttcgcgttcaagttac

SEQ ID NO: 38755 - DNA, 16 bp, synthetic construct
  misc_feature 1..16: note = synthetic [barcode part1]
  source 1..16: mol_type = other DNA
attcgacctcttacag

SEQ ID NO: 38756 - DNA, 16 bp, synthetic construct
  misc_feature 1..16: note = synthetic [barcode part1]
  source 1..16: mol_type = other DNA
cagagttggaatctcc

SEQ ID NO: 38757 - DNA, 16 bp, synthetic construct
  misc_feature 1..16: note = synthetic [barcode part1]
  source 1..16: mol_type = other DNA
ttcaccgccaggtatc

SEQ ID NO: 38758 - DNA, 16 bp, synthetic construct
  misc_feature 1..16: note = synthetic [barcode part1]
  source 1..16: mol_type = other DNA
gcagtgccaatatcac

SEQ ID NO: 38759 - DNA, 16 bp, synthetic construct
  misc_feature 1..16: note = synthetic [barcode part1]
  source 1..16: mol_type = other DNA
acagaatcctagacag

SEQ ID NO: 38760 - DNA, 16 bp, synthetic construct
  misc_feature 1..16: note = synthetic [barcode part1]
  source 1..16: mol_type = other DNA
aggccgcagtacaagt

SEQ ID NO: 38761 - DNA, 16 bp, synthetic construct
  misc_feature 1..16: note = synthetic [barcode part1]
  source 1..16: mol_type = other DNA
ttccacctccggatag

SEQ ID NO: 38762 - DNA, 16 bp, synthetic construct
  misc_feature 1..16: note = synthetic [barcode part1]
  source 1..16: mol_type = other DNA
gagacctcgagattct

SEQ ID NO: 38763 - DNA, 16 bp, synthetic construct
  misc_feature 1..16: note = synthetic [barcode part1]
  source 1..16: mol_type = other DNA
ttgcaagtatcggtgc

SEQ ID NO: 38764 - DNA, 16 bp, synthetic construct
  misc_feature 1..16: note = synthetic [barcode part1]
  source 1..16: mol_type = other DNA
acaactgacacactgc

SEQ ID NO: 38765 - DNA, 16 bp, synthetic construct
  misc_feature 1..16: note = synthetic [barcode part1]
  source 1..16: mol_type = other DNA
attaactaccgtggcg

SEQ ID NO: 38766 - DNA, 16 bp, synthetic construct
  misc_feature 1..16: note = synthetic [barcode part1]
  source 1..16: mol_type = other DNA
aggtgagtgagactcc

SEQ ID NO: 38767 - DNA, 16 bp, synthetic construct
  misc_feature 1..16: note = synthetic [barcode part1]
  source 1..16: mol_type = other DNA
tgcctcgtaggtacct

SEQ ID NO: 38768 - DNA, 16 bp, synthetic construct
  misc_feature 1..16: note = synthetic [barcode part1]
  source 1..16: mol_type = other DNA
taataacctggaccgc

SEQ ID NO: 38769 - DNA, 16 bp, synthetic construct
  misc_feature 1..16: note = synthetic [barcode part1]
  source 1..16: mol_type = other DNA
tagttaatcgaccggc

SEQ ID NO: 38770 - DNA, 16 bp, synthetic construct
  misc_feature 1..16: note = synthetic [barcode part1]
  source 1..16: mol_type = other DNA
agtagtcttctcgcgc

SEQ ID NO: 38771 - DNA, 16 bp, synthetic construct
  misc_feature 1..16: note = synthetic [barcode part1]
  source 1..16: mol_type = other DNA
ttaacctgtggagtgc

SEQ ID NO: 38772 - DNA, 16 bp, synthetic construct
  misc_feature 1..16: note = synthetic [barcode part1]
  source 1..16: mol_type = other DNA
agtaaggcgacagagt

SEQ ID NO: 38773 - DNA, 16 bp, synthetic construct
  misc_feature 1..16: note = synthetic [barcode part1]
  source 1..16: mol_type = other DNA
tcgactccaggttcac

SEQ ID NO: 38774 - DNA, 16 bp, synthetic construct
  misc_feature 1..16: note = synthetic [barcode part1]
  source 1..16: mol_type = other DNA
gaagaccagttcttcg

SEQ ID NO: 38775 - DNA, 16 bp, synthetic construct
  misc_feature 1..16: note = synthetic [barcode part1]
  source 1..16: mol_type = other DNA
tctcaacctagtgtgt

SEQ ID NO: 38776 - DNA, 16 bp, synthetic construct
  misc_feature 1..16: note = synthetic [barcode part1]
  source 1..16: mol_type = other DNA
atcgtacctcctgacg

SEQ ID NO: 38777 - DNA, 16 bp, synthetic construct
  misc_feature 1..16: note = synthetic [barcode part1]
  source 1..16: mol_type = other DNA
gtcctctaccgatacg

SEQ ID NO: 38778 - DNA, 16 bp, synthetic construct
  misc_feature 1..16: note = synthetic [barcode part1]
  source 1..16: mol_type = other DNA
ttatatcgcctggtgt

SEQ ID NO: 38779 - DNA, 16 bp, synthetic construct
  misc_feature 1..16: note = synthetic [barcode part1]
  source 1..16: mol_type = other DNA
taggtgccgacttcct

SEQ ID NO: 38780 - DNA, 16 bp, synthetic construct
  misc_feature 1..16: note = synthetic [barcode part1]
  source 1..16: mol_type = other DNA
tctccgataaccgtgc

SEQ ID NO: 38781 - DNA, 16 bp, synthetic construct
  misc_feature 1..16: note = synthetic [barcode part1]
  source 1..16: mol_type = other DNA
tctgaactctaacctg

SEQ ID NO: 38782 - DNA, 16 bp, synthetic construct
  misc_feature 1..16: note = synthetic [barcode part1]
  source 1..16: mol_type = other DNA
tactggtgtcagtacg

SEQ ID NO: 38783 - DNA, 16 bp, synthetic construct
  misc_feature 1..16: note = synthetic [barcode part1]
  source 1..16: mol_type = other DNA
aagaggatcaaggtcg

SEQ ID NO: 38784 - DNA, 16 bp, synthetic construct
  misc_feature 1..16: note = synthetic [barcode part1]
  source 1..16: mol_type = other DNA
tcaacctgttcggatt

SEQ ID NO: 38785 - DNA, 16 bp, synthetic construct
  misc_feature 1..16: note = synthetic [barcode part1]
  source 1..16: mol_type = other DNA
cgttactgtgactgtt

SEQ ID NO: 38786 - DNA, 16 bp, synthetic construct
  misc_feature 1..16: note = synthetic [barcode part1]
  source 1..16: mol_type = other DNA
aacacaagacgattcg

SEQ ID NO: 38787 - DNA, 16 bp, synthetic construct
  misc_feature 1..16: note = synthetic [barcode part1]
  source 1..16: mol_type = other DNA
atcggatacaggaatc

SEQ ID NO: 38788 - DNA, 16 bp, synthetic construct
  misc_feature 1..16: note = synthetic [barcode part1]
  source 1..16: mol_type = other DNA
atcgtcagtacctccg

SEQ ID NO: 38789 - DNA, 16 bp, synthetic construct
  misc_feature 1..16: note = synthetic [barcode part1]
  source 1..16: mol_type = other DNA
tcgtcgccgtctaagt

SEQ ID NO: 38790 - DNA, 16 bp, synthetic construct
  misc_feature 1..16: note = synthetic [barcode part1]
  source 1..16: mol_type = other DNA
tcgttgtcgaacactt

SEQ ID NO: 38791 - DNA, 16 bp, synthetic construct
  misc_feature 1..16: note = synthetic [barcode part1]
  source 1..16: mol_type = other DNA
tccgtcgagttgcact

SEQ ID NO: 38792 - DNA, 16 bp, synthetic construct
  misc_feature 1..16: note = synthetic [barcode part1]
  source 1..16: mol_type = other DNA
ttgactgccaactgag

SEQ ID NO: 38793 - DNA, 16 bp, synthetic construct
  misc_feature 1..16: note = synthetic [barcode part1]
  source 1..16: mol_type = other DNA
tccacgcagttcggtt

SEQ ID NO: 38794 - DNA, 16 bp, synthetic construct
  misc_feature 1..16: note = synthetic [barcode part1]
  source 1..16: mol_type = other DNA
cacctgtacaagtgac

SEQ ID NO: 38795 - DNA, 16 bp, synthetic construct
  misc_feature 1..16: note = synthetic [barcode part1]
  source 1..16: mol_type = other DNA
ccgttaagtcaagtcg

SEQ ID NO: 38796 - DNA, 16 bp, synthetic construct
  misc_feature 1..16: note = synthetic [barcode part1]
  source 1..16: mol_type = other DNA
actgtcacaacaaccg

SEQ ID NO: 38797 - DNA, 16 bp, synthetic construct
  misc_feature 1..16: note = synthetic [barcode part1]
  source 1..16: mol_type = other DNA
ttacttggcgagtgac

SEQ ID NO: 38798 - DNA, 16 bp, synthetic construct
  misc_feature 1..16: note = synthetic [barcode part1]
  source 1..16: mol_type = other DNA
gtatacggttggtcac

SEQ ID NO: 38799 - DNA, 16 bp, synthetic construct
  misc_feature 1..16: note = synthetic [barcode part1]
  source 1..16: mol_type = other DNA
acctcaacggttaacg

SEQ ID NO: 38800 - DNA, 16 bp, synthetic construct
  misc_feature 1..16: note = synthetic [barcode part1]
  source 1..16: mol_type = other DNA
cctgatactacgcctg

SEQ ID NO: 38801 - DNA, 16 bp, synthetic construct
  misc_feature 1..16: note = synthetic [barcode part1]
  source 1..16: mol_type = other DNA
atcggacctactgagt

SEQ ID NO: 38802 - DNA, 16 bp, synthetic construct
  misc_feature 1..16: note = synthetic [barcode part1]
  source 1..16: mol_type = other DNA
ccgaattcgcgttctg

SEQ ID NO: 38803 - DNA, 16 bp, synthetic construct
  misc_feature 1..16: note = synthetic [barcode part1]
  source 1..16: mol_type = other DNA
cgccacttcgttactt

SEQ ID NO: 38804 - DNA, 16 bp, synthetic construct
  misc_feature 1..16: note = synthetic [barcode part1]
  source 1..16: mol_type = other DNA
gtaccgacttctgatt

SEQ ID NO: 38805 - DNA, 16 bp, synthetic construct
  misc_feature 1..16: note = synthetic [barcode part1]
  source 1..16: mol_type = other DNA
cgtgtgaccactgtct

SEQ ID NO: 38806 - DNA, 16 bp, synthetic construct
  misc_feature 1..16: note = synthetic [barcode part1]
  source 1..16: mol_type = other DNA
aggtataaccagatcg

SEQ ID NO: 38807 - DNA, 16 bp, synthetic construct
  misc_feature 1..16: note = synthetic [barcode part1]
  source 1..16: mol_type = other DNA
gactgcacagtacgtt

SEQ ID NO: 38808 - DNA, 16 bp, synthetic construct
  misc_feature 1..16: note = synthetic [barcode part1]
  source 1..16: mol_type = other DNA
cagataaccacaacag

SEQ ID NO: 38809 - DNA, 16 bp, synthetic construct
  misc_feature 1..16: note = synthetic [barcode part1]
  source 1..16: mol_type = other DNA
gtactcttcggtaact

SEQ ID NO: 38810 - DNA, 16 bp, synthetic construct
  misc_feature 1..16: note = synthetic [barcode part1]
  source 1..16: mol_type = other DNA
caatcttgcgccgatc

SEQ ID NO: 38811 - DNA, 16 bp, synthetic construct
  misc_feature 1..16: note = synthetic [barcode part1]
  source 1..16: mol_type = other DNA
caactccagtctcttc

SEQ ID NO: 38812 - DNA, 16 bp, synthetic construct
  misc_feature 1..16: note = synthetic [barcode part1]
  source 1..16: mol_type = other DNA
cgccgaacagagatac

SEQ ID NO: 38813 - DNA, 16 bp, synthetic construct
  misc_feature 1..16: note = synthetic [barcode part1]
  source 1..16: mol_type = other DNA
gcagtgatacttcgtg

SEQ ID NO: 38814 - DNA, 16 bp, synthetic construct
  misc_feature 1..16: note = synthetic [barcode part1]
  source 1..16: mol_type = other DNA
acacacacaactgacc

SEQ ID NO: 38815 - DNA, 16 bp, synthetic construct
  misc_feature 1..16: note = synthetic [barcode part1]
  source 1..16: mol_type = other DNA
tatccagactactctg

SEQ ID NO: 38816 - DNA, 16 bp, synthetic construct
  misc_feature 1..16: note = synthetic [barcode part1]
  source 1..16: mol_type = other DNA
ttatctgcctagaacc

SEQ ID NO: 38817 - DNA, 16 bp, synthetic construct
  misc_feature 1..16: note = synthetic [barcode part1]
  source 1..16: mol_type = other DNA
cgtacagtatctcgtt

SEQ ID NO: 38818 - DNA, 16 bp, synthetic construct
  misc_feature 1..16: note = synthetic [barcode part1]
  source 1..16: mol_type = other DNA
accaactgaccaactg

SEQ ID NO: 38819 - DNA, 16 bp, synthetic construct
  misc_feature 1..16: note = synthetic [barcode part1]
  source 1..16: mol_type = other DNA
tgtcaggtaccagact

SEQ ID NO: 38820 - DNA, 16 bp, synthetic construct
  misc_feature 1..16: note = synthetic [barcode part1]
  source 1..16: mol_type = other DNA
tggaacggtagttgcg

SEQ ID NO: 38821 - DNA, 16 bp, synthetic construct
  misc_feature 1..16: note = synthetic [barcode part1]
  source 1..16: mol_type = other DNA
atctcgtgtaaggcgt

SEQ ID NO: 38822 - DNA, 16 bp, synthetic construct
  misc_feature 1..16: note = synthetic [barcode part1]
  source 1..16: mol_type = other DNA
ccaacggcacttctac

SEQ ID NO: 38823 - DNA, 16 bp, synthetic construct
  misc_feature 1..16: note = synthetic [barcode part1]
  source 1..16: mol_type = other DNA
acgttggttcttgact

SEQ ID NO: 38824 - DNA, 16 bp, synthetic construct
  misc_feature 1..16: note = synthetic [barcode part1]
  source 1..16: mol_type = other DNA
ttctggtggttacact

SEQ ID NO: 38825 - DNA, 16 bp, synthetic construct
  misc_feature 1..16: note = synthetic [barcode part1]
  source 1..16: mol_type = other DNA
tcaacacacgttgacg

SEQ ID NO: 38826 - DNA, 16 bp, synthetic construct
  misc_feature 1..16: note = synthetic [barcode part1]
  source 1..16: mol_type = other DNA
tcgtaccttgccgaac

SEQ ID NO: 38827 - DNA, 16 bp, synthetic construct
  misc_feature 1..16: note = synthetic [barcode part1]
  source 1..16: mol_type = other DNA
gattctgtgtcgcaag

SEQ ID NO: 38828 - DNA, 16 bp, synthetic construct
  misc_feature 1..16: note = synthetic [barcode part1]
  source 1..16: mol_type = other DNA
acagatcttggcgtac

SEQ ID NO: 38829 - DNA, 16 bp, synthetic construct
  misc_feature 1..16: note = synthetic [barcode part1]
  source 1..16: mol_type = other DNA
tcaacagtatccttgc

SEQ ID NO: 38830 - DNA, 16 bp, synthetic construct
  misc_feature 1..16: note = synthetic [barcode part1]
  source 1..16: mol_type = other DNA
cactgccttactgtct

SEQ ID NO: 38831 - DNA, 16 bp, synthetic construct
  misc_feature 1..16: note = synthetic [barcode part1]
  source 1..16: mol_type = other DNA
gaatctgtctgcagac

SEQ ID NO: 38832 - DNA, 16 bp, synthetic construct
  misc_feature 1..16: note = synthetic [barcode part1]
  source 1..16: mol_type = other DNA
tcgagttgttaggtcg

SEQ ID NO: 38833 - DNA, 16 bp, synthetic construct
  misc_feature 1..16: note = synthetic [barcode part1]
  source 1..16: mol_type = other DNA
gttgtccttcagatac

SEQ ID NO: 38834 - DNA, 16 bp, synthetic construct
  misc_feature 1..16: note = synthetic [barcode part1]
  source 1..16: mol_type = other DNA
gcaccttaatccggtc

SEQ ID NO: 38835 - DNA, 16 bp, synthetic construct
  misc_feature 1..16: note = synthetic [barcode part1]
  source 1..16: mol_type = other DNA
tgagatcctgagatcc

SEQ ID NO: 38836 - DNA, 16 bp, synthetic construct
  misc_feature 1..16: note = synthetic [barcode part1]
  source 1..16: mol_type = other DNA
gtgttcaacgaacctg

SEQ ID NO: 38837 - DNA, 16 bp, synthetic construct
  misc_feature 1..16: note = synthetic [barcode part1]
  source 1..16: mol_type = other DNA
tgaaccgaggacgtgt

SEQ ID NO: 38838 - DNA, 16 bp, synthetic construct
  misc_feature 1..16: note = synthetic [barcode part1]
  source 1..16: mol_type = other DNA
aggacgtaagagtgtg

SEQ ID NO: 38839 - DNA, 16 bp, synthetic construct
  misc_feature 1..16: note = synthetic [barcode part1]
  source 1..16: mol_type = other DNA
actaccaacgttcttg

SEQ ID NO: 38840 - DNA, 16 bp, synthetic construct
  misc_feature 1..16: note = synthetic [barcode part1]
  source 1..16: mol_type = other DNA
ccttgcagtgttcttc

SEQ ID NO: 38841 - DNA, 16 bp, synthetic construct
  misc_feature 1..16: note = synthetic [barcode part1]
  source 1..16: mol_type = other DNA
agacgagtgtctatcc

SEQ ID NO: 38842 - DNA, 16 bp, synthetic construct
  misc_feature 1..16: note = synthetic [barcode part1]
  source 1..16: mol_type = other DNA
tggcacagtcaggagt

SEQ ID NO: 38843 - DNA, 16 bp, synthetic construct
  misc_feature 1..16: note = synthetic [barcode part1]
  source 1..16: mol_type = other DNA
tactaagacggcctgt

SEQ ID NO: 38844 - DNA, 16 bp, synthetic construct
  misc_feature 1..16: note = synthetic [barcode part1]
  source 1..16: mol_type = other DNA
cacagattcgtggatc

SEQ ID NO: 38845 - DNA, 16 bp, synthetic construct
  misc_feature 1..16: note = synthetic [barcode part1]
  source 1..16: mol_type = other DNA
taggttgacgtagaac

SEQ ID NO: 38846 - DNA, 16 bp, synthetic construct
  misc_feature 1..16: note = synthetic [barcode part1]
  source 1..16: mol_type = other DNA
gccacgtactgagaag

SEQ ID NO: 38847 - DNA, 16 bp, synthetic construct
  misc_feature 1..16: note = synthetic [barcode part1]
  source 1..16: mol_type = other DNA
ttcaactccttccgac

SEQ ID NO: 38848 - DNA, 16 bp, synthetic construct
  misc_feature 1..16: note = synthetic [barcode part1]
  source 1..16: mol_type = other DNA
accttgcgtaactgcc

SEQ ID NO: 38849 - DNA, 16 bp, synthetic construct
  misc_feature 1..16: note = synthetic [barcode part1]
  source 1..16: mol_type = other DNA
tgacactccgcaatag

SEQ ID NO: 38850 - DNA, 16 bp, synthetic construct
  misc_feature 1..16: note = synthetic [barcode part1]
  source 1..16: mol_type = other DNA
ttggcagacaagagtt

SEQ ID NO: 38851 - DNA, 16 bp, synthetic construct
  misc_feature 1..16: note = synthetic [barcode part1]
  source 1..16: mol_type = other DNA
aacctagagtccagtc

SEQ ID NO: 38852 - DNA, 16 bp, synthetic construct
  misc_feature 1..16: note = synthetic [barcode part1]
  source 1..16: mol_type = other DNA
acaacgttggtgtcac

SEQ ID NO: 38853 - DNA, 16 bp, synthetic construct
  misc_feature 1..16: note = synthetic [barcode part1]
  source 1..16: mol_type = other DNA
tgagatacttgcagag

SEQ ID NO: 38854 - DNA, 16 bp, synthetic construct
  misc_feature 1..16: note = synthetic [barcode part1]
  source 1..16: mol_type = other DNA
gtcgagtaacgacctt

SEQ ID NO: 38855 - DNA, 16 bp, synthetic construct
  misc_feature 1..16: note = synthetic [barcode part1]
  source 1..16: mol_type = other DNA
ttgttattccaggcgt

SEQ ID NO: 38856 - DNA, 16 bp, synthetic construct
  misc_feature 1..16: note = synthetic [barcode part1]
  source 1..16: mol_type = other DNA
aggttaaggcctcttg

SEQ ID NO: 38857 - DNA, 16 bp, synthetic construct
  misc_feature 1..16: note = synthetic [barcode part1]
  source 1..16: mol_type = other DNA
cctcgttgtctacgag

SEQ ID NO: 38858 - DNA, 16 bp, synthetic construct
  misc_feature 1..16: note = synthetic [barcode part1]
  source 1..16: mol_type = other DNA
acggagttggacgttg

SEQ ID NO: 38859 - DNA, 16 bp, synthetic construct
  misc_feature 1..16: note = synthetic [barcode part1]
  source 1..16: mol_type = other DNA
tccagtactgtacttg

SEQ ID NO: 38860 - DNA, 16 bp, synthetic construct
  misc_feature 1..16: note = synthetic [barcode part1]
  source 1..16: mol_type = other DNA
gtatctgacggattcg

SEQ ID NO: 38861 - DNA, 16 bp, synthetic construct
  misc_feature 1..16: note = synthetic [barcode part1]
  source 1..16: mol_type = other DNA
gcgacctcgagaatag

SEQ ID NO: 38862 - DNA, 16 bp, synthetic construct
  misc_feature 1..16: note = synthetic [barcode part1]
  source 1..16: mol_type = other DNA
ttgtaggcaccaacac

SEQ ID NO: 38863 - DNA, 16 bp, synthetic construct
  misc_feature 1..16: note = synthetic [barcode part1]
  source 1..16: mol_type = other DNA
cacaccttgaactgcc

SEQ ID NO: 38864 - DNA, 16 bp, synthetic construct
  misc_feature 1..16: note = synthetic [barcode part1]
  source 1..16: mol_type = other DNA
tgatagtcgacggtct

SEQ ID NO: 38865 - DNA, 16 bp, synthetic construct
  misc_feature 1..16: note = synthetic [barcode part1]
  source 1..16: mol_type = other DNA
tgtgtaaggtgtgcct

SEQ ID NO: 38866 - DNA, 16 bp, synthetic construct
  misc_feature 1..16: note = synthetic [barcode part1]
  source 1..16: mol_type = other DNA
agtggagtgacagaac

SEQ ID NO: 38867 - DNA, 16 bp, synthetic construct
  misc_feature 1..16: note = synthetic [barcode part1]
  source 1..16: mol_type = other DNA
cacgtcttcactggac

SEQ ID NO: 38868 - DNA, 16 bp, synthetic construct
  misc_feature 1..16: note = synthetic [barcode part1]
  source 1..16: mol_type = other DNA
tacgtcaatatcggcg

SEQ ID NO: 38869 - DNA, 16 bp, synthetic construct
  misc_feature 1..16: note = synthetic [barcode part1]
  source 1..16: mol_type = other DNA
taggactggttgactc

SEQ ID NO: 38870 - DNA, 16 bp, synthetic construct
  misc_feature 1..16: note = synthetic [barcode part1]
  source 1..16: mol_type = other DNA
ttattcctcaagtgcg

SEQ ID NO: 38871 - DNA, 16 bp, synthetic construct
  misc_feature 1..16: note = synthetic [barcode part1]
  source 1..16: mol_type = other DNA
cacggtgcctatctac

SEQ ID NO: 38872 - DNA, 16 bp, synthetic construct
  misc_feature 1..16: note = synthetic [barcode part1]
  source 1..16: mol_type = other DNA
gcagtgaattcggacg

SEQ ID NO: 38873 - DNA, 16 bp, synthetic construct
  misc_feature 1..16: note = synthetic [barcode part1]
  source 1..16: mol_type = other DNA
tggcgatcacagaggt

SEQ ID NO: 38874 - DNA, 16 bp, synthetic construct
  misc_feature 1..16: note = synthetic [barcode part1]
  source 1..16: mol_type = other DNA
aacttgcgcagacttg

SEQ ID NO: 38875 - DNA, 16 bp, synthetic construct
  misc_feature 1..16: note = synthetic [barcode part1]
  source 1..16: mol_type = other DNA
tccgatctgcaaccac

SEQ ID NO: 38876 - DNA, 16 bp, synthetic construct
  misc_feature 1..16: note = synthetic [barcode part1]
  source 1..16: mol_type = other DNA
aacaatcgcacttcct

SEQ ID NO: 38877 - DNA, 16 bp, synthetic construct
  misc_feature 1..16: note = synthetic [barcode part1]
  source 1..16: mol_type = other DNA
cctacaatccaggtag

SEQ ID NO: 38878 - DNA, 16 bp, synthetic construct
  misc_feature 1..16: note = synthetic [barcode part1]
  source 1..16: mol_type = other DNA
aaggcctcgaacgagt

SEQ ID NO: 38879 - DNA, 16 bp, synthetic construct
  misc_feature 1..16: note = synthetic [barcode part1]
  source 1..16: mol_type = other DNA
gagtggaggattccac

SEQ ID NO: 38880 - DNA, 16 bp, synthetic construct
  misc_feature 1..16: note = synthetic [barcode part1]
  source 1..16: mol_type = other DNA
cctaggcacaattacg

SEQ ID NO: 38881 - DNA, 16 bp, synthetic construct
  misc_feature 1..16: note = synthetic [barcode part1]
  source 1..16: mol_type = other DNA
gtctgtagttattccg

SEQ ID NO: 38882 - DNA, 16 bp, synthetic construct
  misc_feature 1..16: note = synthetic [barcode part1]
  source 1..16: mol_type = other DNA
gttgatccagtgtcag

SEQ ID NO: 38883 - DNA, 16 bp, synthetic construct
  misc_feature 1..16: note = synthetic [barcode part1]
  source 1..16: mol_type = other DNA
cgcctatagtgtcgtc

SEQ ID NO: 38884 - DNA, 16 bp, synthetic construct
  misc_feature 1..16: note = synthetic [barcode part1]
  source 1..16: mol_type = other DNA
cctcgtgttgaattgt

SEQ ID NO: 38885 - DNA, 16 bp, synthetic construct
  misc_feature 1..16: note = synthetic [barcode part1]
  source 1..16: mol_type = other DNA
ttgtgactggtcagtg

SEQ ID NO: 38886 - DNA, 16 bp, synthetic construct
  misc_feature 1..16: note = synthetic [barcode part1]
  source 1..16: mol_type = other DNA
gataagaacacggttc

SEQ ID NO: 38887 - DNA, 16 bp, synthetic construct
  misc_feature 1..16: note = synthetic [barcode part1]
  source 1..16: mol_type = other DNA
gaccttctgtaggtcc

SEQ ID NO: 38888 - DNA, 16 bp, synthetic construct
  misc_feature 1..16: note = synthetic [barcode part1]
  source 1..16: mol_type = other DNA
tggcacgtgtagattc

SEQ ID NO: 38889 - DNA, 16 bp, synthetic construct
  misc_feature 1..16: note = synthetic [barcode part1]
  source 1..16: mol_type = other DNA
ttccttcctctaaggc

SEQ ID NO: 38890 - DNA, 16 bp, synthetic construct
  misc_feature 1..16: note = synthetic [barcode part1]
  source 1..16: mol_type = other DNA
acagaggcaactcgac

SEQ ID NO: 38891 - DNA, 16 bp, synthetic construct
  misc_feature 1..16: note = synthetic [barcode part1]
  source 1..16: mol_type = other DNA
tggcacacagtggagt

SEQ ID NO: 38892 - DNA, 16 bp, synthetic construct
  misc_feature 1..16: note = synthetic [barcode part1]
  source 1..16: mol_type = other DNA
gcggttgtaattgtgc

SEQ ID NO: 38893 - DNA, 16 bp, synthetic construct
  misc_feature 1..16: note = synthetic [barcode part1]
  source 1..16: mol_type = other DNA
tcggtaattcggtgac

SEQ ID NO: 38894 - DNA, 16 bp, synthetic construct
  misc_feature 1..16: note = synthetic [barcode part1]
  source 1..16: mol_type = other DNA
tgtgagtggtattcgc

SEQ ID NO: 38895 - DNA, 16 bp, synthetic construct
  misc_feature 1..16: note = synthetic [barcode part1]
  source 1..16: mol_type = other DNA
gactccttccttgatc

SEQ ID NO: 38896 - DNA, 16 bp, synthetic construct
  misc_feature 1..16: note = synthetic [barcode part1]
  source 1..16: mol_type = other DNA
ttctcctatactgcgc

SEQ ID NO: 38897 - DNA, 16 bp, synthetic construct
  misc_feature 1..16: note = synthetic [barcode part1]
  source 1..16: mol_type = other DNA
gtgacgtacgttgtgt

SEQ ID NO: 38898 - DNA, 16 bp, synthetic construct
  misc_feature 1..16: note = synthetic [barcode part1]
  source 1..16: mol_type = other DNA
tcgtctgaacactgcc

SEQ ID NO: 38899 - DNA, 16 bp, synthetic construct
  misc_feature 1..16: note = synthetic [barcode part1]
  source 1..16: mol_type = other DNA
aagaggaagagttccg

SEQ ID NO: 38900 - DNA, 16 bp, synthetic construct
  misc_feature 1..16: note = synthetic [barcode part1]
  source 1..16: mol_type = other DNA
tgacgacactagacct

SEQ ID NO: 38901 - DNA, 16 bp, synthetic construct
  misc_feature 1..16: note = synthetic [barcode part1]
  source 1..16: mol_type = other DNA
atattgacggtgagac

SEQ ID NO: 38902 - DNA, 16 bp, synthetic construct
  misc_feature 1..16: note = synthetic [barcode part1]
  source 1..16: mol_type = other DNA
tggatcgagaagtact

SEQ ID NO: 38903 - DNA, 16 bp, synthetic construct
  misc_feature 1..16: note = synthetic [barcode part1]
  source 1..16: mol_type = other DNA
tgttctaggtactcac

SEQ ID NO: 38904 - DNA, 16 bp, synthetic construct
  misc_feature 1..16: note = synthetic [barcode part1]
  source 1..16: mol_type = other DNA
tctatcagtcgaaggc

SEQ ID NO: 38905 - DNA, 16 bp, synthetic construct
  misc_feature 1..16: note = synthetic [barcode part1]
  source 1..16: mol_type = other DNA
tgtgttcgcgagaact

SEQ ID NO: 38906 - DNA, 16 bp, synthetic construct
  misc_feature 1..16: note = synthetic [barcode part1]
  source 1..16: mol_type = other DNA
tcctaataacctgtgc

SEQ ID NO: 38907 - DNA, 16 bp, synthetic construct
  misc_feature 1..16: note = synthetic [barcode part1]
  source 1..16: mol_type = other DNA
gcgtcaatcctcgact

SEQ ID NO: 38908 - DNA, 16 bp, synthetic construct
  misc_feature 1..16: note = synthetic [barcode part1]
  source 1..16: mol_type = other DNA
ccagacctgtagagag

SEQ ID NO: 38909 - DNA, 16 bp, synthetic construct
  misc_feature 1..16: note = synthetic [barcode part1]
  source 1..16: mol_type = other DNA
aaggtaaggtgagacc

SEQ ID NO: 38910 - DNA, 16 bp, synthetic construct
  misc_feature 1..16: note = synthetic [barcode part1]
  source 1..16: mol_type = other DNA
tctaagaccggtcagt

SEQ ID NO: 38911 - DNA, 16 bp, synthetic construct
  misc_feature 1..16: note = synthetic [barcode part1]
  source 1..16: mol_type = other DNA
ttgtccgatctgtctc

SEQ ID NO: 38912 - DNA, 16 bp, synthetic construct
  misc_feature 1..16: note = synthetic [barcode part1]
  source 1..16: mol_type = other DNA
tgtacgtctccagaag

SEQ ID NO: 38913 - DNA, 16 bp, synthetic construct
  misc_feature 1..16: note = synthetic [barcode part1]
  source 1..16: mol_type = other DNA
agacagactcgaagtt

SEQ ID NO: 38914 - DNA, 16 bp, synthetic construct
  misc_feature 1..16: note = synthetic [barcode part1]
  source 1..16: mol_type = other DNA
gtattaacacaccggc

SEQ ID NO: 38915 - DNA, 16 bp, synthetic construct
  misc_feature 1..16: note = synthetic [barcode part1]
  source 1..16: mol_type = other DNA
ataagttccaggcgtc

SEQ ID NO: 38916 - DNA, 16 bp, synthetic construct
  misc_feature 1..16: note = synthetic [barcode part1]
  source 1..16: mol_type = other DNA
ccgattcagactgaac

SEQ ID NO: 38917 - DNA, 16 bp, synthetic construct
  misc_feature 1..16: note = synthetic [barcode part1]
  source 1..16: mol_type = other DNA
ccaagacttgttcact

SEQ ID NO: 38918 - DNA, 16 bp, synthetic construct
  misc_feature 1..16: note = synthetic [barcode part1]
  source 1..16: mol_type = other DNA
aaggcagtccaggtac

SEQ ID NO: 38919 - DNA, 16 bp, synthetic construct
  misc_feature 1..16: note = synthetic [barcode part1]
  source 1..16: mol_type = other DNA
atcacagacagacaac

SEQ ID NO: 38920 - DNA, 16 bp, synthetic construct
  misc_feature 1..16: note = synthetic [barcode part1]
  source 1..16: mol_type = other DNA
gtaagattcacgagtg

SEQ ID NO: 38921 - DNA, 16 bp, synthetic construct
  misc_feature 1..16: note = synthetic [barcode part1]
  source 1..16: mol_type = other DNA
cgccacttattggcgt

SEQ ID NO: 38922 - DNA, 16 bp, synthetic construct
  misc_feature 1..16: note = synthetic [barcode part1]
  source 1..16: mol_type = other DNA
attcgagactccgtcc

SEQ ID NO: 38923 - DNA, 16 bp, synthetic construct
  misc_feature 1..16: note = synthetic [barcode part1]
  source 1..16: mol_type = other DNA
taggtggaggccttag

SEQ ID NO: 38924 - DNA, 16 bp, synthetic construct
  misc_feature 1..16: note = synthetic [barcode part1]
  source 1..16: mol_type = other DNA
ttagtcgcgactaacg

SEQ ID NO: 38925 - DNA, 16 bp, synthetic construct
  misc_feature 1..16: note = synthetic [barcode part1]
  source 1..16: mol_type = other DNA
caatattacctgtccg

SEQ ID NO: 38926 - DNA, 16 bp, synthetic construct
  misc_feature 1..16: note = synthetic [barcode part1]
  source 1..16: mol_type = other DNA
cgtccgatcctatcag

SEQ ID NO: 38927 - DNA, 16 bp, synthetic construct
  misc_feature 1..16: note = synthetic [barcode part1]
  source 1..16: mol_type = other DNA
tggaggaacgccaatc

SEQ ID NO: 38928 - DNA, 16 bp, synthetic construct
  misc_feature 1..16: note = synthetic [barcode part1]
  source 1..16: mol_type = other DNA
taacgacgccaagttc

SEQ ID NO: 38929 - DNA, 16 bp, synthetic construct
  misc_feature 1..16: note = synthetic [barcode part1]
  source 1..16: mol_type = other DNA
tgcctacgaataggtc

SEQ ID NO: 38930 - DNA, 16 bp, synthetic construct
  misc_feature 1..16: note = synthetic [barcode part1]
  source 1..16: mol_type = other DNA
tactgttggatcggac

SEQ ID NO: 38931 - DNA, 16 bp, synthetic construct
  misc_feature 1..16: note = synthetic [barcode part1]
  source 1..16: mol_type = other DNA
cgaactacttcgtatc

SEQ ID NO: 38932 - DNA, 16 bp, synthetic construct
  misc_feature 1..16: note = synthetic [barcode part1]
  source 1..16: mol_type = other DNA
tccttctacgtgtgtc

SEQ ID NO: 38933 - DNA, 16 bp, synthetic construct
  misc_feature 1..16: note = synthetic [barcode part1]
  source 1..16: mol_type = other DNA
caacgatagaagtacc

SEQ ID NO: 38934 - DNA, 16 bp, synthetic construct
  misc_feature 1..16: note = synthetic [barcode part1]
  source 1..16: mol_type = other DNA
taggtcgtgcgtctct

SEQ ID NO: 38935 - DNA, 16 bp, synthetic construct
  misc_feature 1..16: note = synthetic [barcode part1]
  source 1..16: mol_type = other DNA
tccgttgacgtagtcc

SEQ ID NO: 38936 - DNA, 16 bp, synthetic construct
  misc_feature 1..16: note = synthetic [barcode part1]
  source 1..16: mol_type = other DNA
gccaatactgcacaac

SEQ ID NO: 38937 - DNA, 16 bp, synthetic construct
  misc_feature 1..16: note = synthetic [barcode part1]
  source 1..16: mol_type = other DNA
acgcgatcacagttgt

SEQ ID NO: 38938 - DNA, 16 bp, synthetic construct
  misc_feature 1..16: note = synthetic [barcode part1]
  source 1..16: mol_type = other DNA
cggtgatattgtcggt

SEQ ID NO: 38939 - DNA, 16 bp, synthetic construct
  misc_feature 1..16: note = synthetic [barcode part1]
  source 1..16: mol_type = other DNA
tgaagatcaggtcgcg

SEQ ID NO: 38940 - DNA, 16 bp, synthetic construct
  misc_feature 1..16: note = synthetic [barcode part1]
  source 1..16: mol_type = other DNA
gtgaccagtgtcaact

SEQ ID NO: 38941 - DNA, 16 bp, synthetic construct
  misc_feature 1..16: note = synthetic [barcode part1]
  source 1..16: mol_type = other DNA
gcagtgtcgtatacgt

SEQ ID NO: 38942 - DNA, 16 bp, synthetic construct
  misc_feature 1..16: note = synthetic [barcode part1]
  source 1..16: mol_type = other DNA
attgagatctcggtcg

SEQ ID NO: 38943 - DNA, 16 bp, synthetic construct
  misc_feature 1..16: note = synthetic [barcode part1]
  source 1..16: mol_type = other DNA
tgtctagagaacagtg

SEQ ID NO: 38944 - DNA, 16 bp, synthetic construct
  misc_feature 1..16: note = synthetic [barcode part1]
  source 1..16: mol_type = other DNA
agtggactgtcgtgag

SEQ ID NO: 38945 - DNA, 16 bp, synthetic construct
  misc_feature 1..16: note = synthetic [barcode part1]
  source 1..16: mol_type = other DNA
agagagtcgaatctgt

SEQ ID NO: 38946 - DNA, 16 bp, synthetic construct
  misc_feature 1..16: note = synthetic [barcode part1]
  source 1..16: mol_type = other DNA
gccacaacgttcgtct

SEQ ID NO: 38947 - DNA, 16 bp, synthetic construct
  misc_feature 1..16: note = synthetic [barcode part1]
  source 1..16: mol_type = other DNA
cctatcacttcgtcgt

SEQ ID NO: 38948 - DNA, 16 bp, synthetic construct
  misc_feature 1..16: note = synthetic [barcode part1]
  source 1..16: mol_type = other DNA
tgttggtccaactccg

SEQ ID NO: 38949 - DNA, 16 bp, synthetic construct
  misc_feature 1..16: note = synthetic [barcode part1]
  source 1..16: mol_type = other DNA
cacgtgacgtctcgtt

SEQ ID NO: 38950 - DNA, 16 bp, synthetic construct
  misc_feature 1..16: note = synthetic [barcode part1]
  source 1..16: mol_type = other DNA
acgttaagaggtggtt

SEQ ID NO: 38951 - DNA, 16 bp, synthetic construct
  misc_feature 1..16: note = synthetic [barcode part1]
  source 1..16: mol_type = other DNA
gtcgaacagactacct

SEQ ID NO: 38952 - DNA, 16 bp, synthetic construct
  misc_feature 1..16: note = synthetic [barcode part1]
  source 1..16: mol_type = other DNA
tgccggttcaactctg

SEQ ID NO: 38953 - DNA, 16 bp, synthetic construct
  misc_feature 1..16: note = synthetic [barcode part1]
  source 1..16: mol_type = other DNA
caagtgcgaccgtatt

SEQ ID NO: 38954 - DNA, 16 bp, synthetic construct
  misc_feature 1..16: note = synthetic [barcode part1]
  source 1..16: mol_type = other DNA
cgcacttcagatcacc

SEQ ID NO: 38955 - DNA, 16 bp, synthetic construct
  misc_feature 1..16: note = synthetic [barcode part1]
  source 1..16: mol_type = other DNA
ttactggtcctatacg

SEQ ID NO: 38956 - DNA, 16 bp, synthetic construct
  misc_feature 1..16: note = synthetic [barcode part1]
  source 1..16: mol_type = other DNA
ataagaccgaacactg

SEQ ID NO: 38957 - DNA, 16 bp, synthetic construct
  misc_feature 1..16: note = synthetic [barcode part1]
  source 1..16: mol_type = other DNA
gtcaccgtgtattccg

SEQ ID NO: 38958 - DNA, 16 bp, synthetic construct
  misc_feature 1..16: note = synthetic [barcode part1]
  source 1..16: mol_type = other DNA
cgttaacaactgagag

SEQ ID NO: 38959 - DNA, 16 bp, synthetic construct
  misc_feature 1..16: note = synthetic [barcode part1]
  source 1..16: mol_type = other DNA
gcgccaacaacagaac

SEQ ID NO: 38960 - DNA, 16 bp, synthetic construct
  misc_feature 1..16: note = synthetic [barcode part1]
  source 1..16: mol_type = other DNA
tgcggaagattgttag

SEQ ID NO: 38961 - DNA, 16 bp, synthetic construct
  misc_feature 1..16: note = synthetic [barcode part1]
  source 1..16: mol_type = other DNA
gtcttcgcgttcttac

SEQ ID NO: 38962 - DNA, 16 bp, synthetic construct
  misc_feature 1..16: note = synthetic [barcode part1]
  source 1..16: mol_type = other DNA
aggcgagtaaggcctt

SEQ ID NO: 38963 - DNA, 16 bp, synthetic construct
  misc_feature 1..16: note = synthetic [barcode part1]
  source 1..16: mol_type = other DNA
ccagttcgtctggatc

SEQ ID NO: 38964 - DNA, 16 bp, synthetic construct
  misc_feature 1..16: note = synthetic [barcode part1]
  source 1..16: mol_type = other DNA
aactgtgacgtcagtc

SEQ ID NO: 38965 - DNA, 16 bp, synthetic construct
  misc_feature 1..16: note = synthetic [barcode part1]
  source 1..16: mol_type = other DNA
accaactctaaccgag

SEQ ID NO: 38966 - DNA, 16 bp, synthetic construct
  misc_feature 1..16: note = synthetic [barcode part1]
  source 1..16: mol_type = other DNA
attgtcctcgcaagtt

SEQ ID NO: 38967 - DNA, 16 bp, synthetic construct
  misc_feature 1..16: note = synthetic [barcode part1]
  source 1..16: mol_type = other DNA
ccacaatctggaactg

SEQ ID NO: 38968 - DNA, 16 bp, synthetic construct
  misc_feature 1..16: note = synthetic [barcode part1]
  source 1..16: mol_type = other DNA
tacaggcctgttccgt

SEQ ID NO: 38969 - DNA, 16 bp, synthetic construct
  misc_feature 1..16: note = synthetic [barcode part1]
  source 1..16: mol_type = other DNA
acctaaggtcttactc

SEQ ID NO: 38970 - DNA, 16 bp, synthetic construct
  misc_feature 1..16: note = synthetic [barcode part1]
  source 1..16: mol_type = other DNA
actgacaataagacgc

SEQ ID NO: 38971 - DNA, 16 bp, synthetic construct
  misc_feature 1..16: note = synthetic [barcode part1]
  source 1..16: mol_type = other DNA
cactcaataacgagag

SEQ ID NO: 38972 - DNA, 16 bp, synthetic construct
  misc_feature 1..16: note = synthetic [barcode part1]
  source 1..16: mol_type = other DNA
tgttcacttgcggcgt

SEQ ID NO: 38973 - DNA, 16 bp, synthetic construct
  misc_feature 1..16: note = synthetic [barcode part1]
  source 1..16: mol_type = other DNA
tgtatagtcacgcggt

SEQ ID NO: 38974 - DNA, 16 bp, synthetic construct
  misc_feature 1..16: note = synthetic [barcode part1]
  source 1..16: mol_type = other DNA
tgatcggttgaggtct

SEQ ID NO: 38975 - DNA, 16 bp, synthetic construct
  misc_feature 1..16: note = synthetic [barcode part1]
  source 1..16: mol_type = other DNA
atcacggcacttatct

SEQ ID NO: 38976 - DNA, 16 bp, synthetic construct
  misc_feature 1..16: note = synthetic [barcode part1]
  source 1..16: mol_type = other DNA
aatctctctggcgcac

SEQ ID NO: 38977 - DNA, 16 bp, synthetic construct
  misc_feature 1..16: note = synthetic [barcode part1]
  source 1..16: mol_type = other DNA
aactgtaccaggaagt

SEQ ID NO: 38978 - DNA, 16 bp, synthetic construct
  misc_feature 1..16: note = synthetic [barcode part1]
  source 1..16: mol_type = other DNA
acctgaatcacgagtc

SEQ ID NO: 38979 - DNA, 16 bp, synthetic construct
  misc_feature 1..16: note = synthetic [barcode part1]
  source 1..16: mol_type = other DNA
agatactcaccacctt

SEQ ID NO: 38980 - DNA, 16 bp, synthetic construct
  misc_feature 1..16: note = synthetic [barcode part1]
  source 1..16: mol_type = other DNA
ttcgtgagagttcacg

SEQ ID NO: 38981 - DNA, 16 bp, synthetic construct
  misc_feature 1..16: note = synthetic [barcode part1]
  source 1..16: mol_type = other DNA
agtgtgcaatccttct

SEQ ID NO: 38982 - DNA, 16 bp, synthetic construct
  misc_feature 1..16: note = synthetic [barcode part1]
  source 1..16: mol_type = other DNA
cactattgtggttgtc

SEQ ID NO: 38983 - DNA, 16 bp, synthetic construct
  misc_feature 1..16: note = synthetic [barcode part1]
  source 1..16: mol_type = other DNA
tgtagaccaccgtctc

SEQ ID NO: 38984 - DNA, 16 bp, synthetic construct
  misc_feature 1..16: note = synthetic [barcode part1]
  source 1..16: mol_type = other DNA
gtactagacgttcgac

SEQ ID NO: 38985 - DNA, 16 bp, synthetic construct
  misc_feature 1..16: note = synthetic [barcode part1]
  source 1..16: mol_type = other DNA
tgcagtgtcgcctgtt

SEQ ID NO: 38986 - DNA, 16 bp, synthetic construct
  misc_feature 1..16: note = synthetic [barcode part1]
  source 1..16: mol_type = other DNA
cactagatctgtactc

SEQ ID NO: 38987 - DNA, 16 bp, synthetic construct
  misc_feature 1..16: note = synthetic [barcode part1]
  source 1..16: mol_type = other DNA
actcactacggcgtct

SEQ ID NO: 38988 - DNA, 16 bp, synthetic construct
  misc_feature 1..16: note = synthetic [barcode part1]
  source 1..16: mol_type = other DNA
tcgaggtcgtctgtct

SEQ ID NO: 38989 - DNA, 16 bp, synthetic construct
  misc_feature 1..16: note = synthetic [barcode part1]
  source 1..16: mol_type = other DNA
acaggtcgtattcggt

SEQ ID NO: 38990 - DNA, 16 bp, synthetic construct
  misc_feature 1..16: note = synthetic [barcode part1]
  source 1..16: mol_type = other DNA
tggccttactaacgcc

SEQ ID NO: 38991 - DNA, 16 bp, synthetic construct
  misc_feature 1..16: note = synthetic [barcode part1]
  source 1..16: mol_type = other DNA
aactacggaggagtcc

SEQ ID NO: 38992 - DNA, 16 bp, synthetic construct
  misc_feature 1..16: note = synthetic [barcode part1]
  source 1..16: mol_type = other DNA
atacggtgcactgatc

SEQ ID NO: 38993 - DNA, 16 bp, synthetic construct
  misc_feature 1..16: note = synthetic [barcode part1]
  source 1..16: mol_type = other DNA
cctcaatcacgccagt

SEQ ID NO: 38994 - DNA, 16 bp, synthetic construct
  misc_feature 1..16: note = synthetic [barcode part1]
  source 1..16: mol_type = other DNA
accagactctacgcct

SEQ ID NO: 38995 - DNA, 16 bp, synthetic construct
  misc_feature 1..16: note = synthetic [barcode part1]
  source 1..16: mol_type = other DNA
gtcacaagaataggtc

SEQ ID NO: 38996 - DNA, 16 bp, synthetic construct
  misc_feature 1..16: note = synthetic [barcode part1]
  source 1..16: mol_type = other DNA
cgatctcgattctctc

SEQ ID NO: 38997 - DNA, 16 bp, synthetic construct
  misc_feature 1..16: note = synthetic [barcode part1]
  source 1..16: mol_type = other DNA
cgcctattgttgtaac

SEQ ID NO: 38998 - DNA, 16 bp, synthetic construct
  misc_feature 1..16: note = synthetic [barcode part1]
  source 1..16: mol_type = other DNA
gtagaggttggcagtc

SEQ ID NO: 38999 - DNA, 16 bp, synthetic construct
  misc_feature 1..16: note = synthetic [barcode part1]
  source 1..16: mol_type = other DNA
acgtcaagtgcagttc

SEQ ID NO: 39000 - DNA, 16 bp, synthetic construct
  misc_feature 1..16: note = synthetic [barcode part1]
  source 1..16: mol_type = other DNA
attagatcactctcgc

SEQ ID NO: 39001 - DNA, 16 bp, synthetic construct
  misc_feature 1..16: note = synthetic [barcode part1]
  source 1..16: mol_type = other DNA
aagtcaccttgtactc

SEQ ID NO: 39002 - DNA, 16 bp, synthetic construct
  misc_feature 1..16: note = synthetic [barcode part1]
  source 1..16: mol_type = other DNA
attctatccgtcgcct

SEQ ID NO: 39003 - DNA, 16 bp, synthetic construct
  misc_feature 1..16: note = synthetic [barcode part1]
  source 1..16: mol_type = other DNA
cacgtggttatcgtcc

SEQ ID NO: 39004 - DNA, 16 bp, synthetic construct
  misc_feature 1..16: note = synthetic [barcode part1]
  source 1..16: mol_type = other DNA
gtgtatacgcgtgtgt

SEQ ID NO: 39005 - DNA, 16 bp, synthetic construct
  misc_feature 1..16: note = synthetic [barcode part1]
  source 1..16: mol_type = other DNA
ccacctggacactact

SEQ ID NO: 39006 - DNA, 16 bp, synthetic construct
  misc_feature 1..16: note = synthetic [barcode part1]
  source 1..16: mol_type = other DNA
atccttacgaatcacc

SEQ ID NO: 39007 - DNA, 16 bp, synthetic construct
  misc_feature 1..16: note = synthetic [barcode part1]
  source 1..16: mol_type = other DNA
gtgttgagaaggttac

SEQ ID NO: 39008 - DNA, 16 bp, synthetic construct
  misc_feature 1..16: note = synthetic [barcode part1]
  source 1..16: mol_type = other DNA
cgttgagttcagtggt

SEQ ID NO: 39009 - DNA, 16 bp, synthetic construct
  misc_feature 1..16: note = synthetic [barcode part1]
  source 1..16: mol_type = other DNA
gagttgttactggacc

SEQ ID NO: 39010 - DNA, 16 bp, synthetic construct
  misc_feature 1..16: note = synthetic [barcode part1]
  source 1..16: mol_type = other DNA
ttcgccgttcttgact

SEQ ID NO: 39011 - DNA, 16 bp, synthetic construct
  misc_feature 1..16: note = synthetic [barcode part1]
  source 1..16: mol_type = other DNA
aaggttcggacagacc

SEQ ID NO: 39012 - DNA, 16 bp, synthetic construct
  misc_feature 1..16: note = synthetic [barcode part1]
  source 1..16: mol_type = other DNA
cggttcttgcacgatc

SEQ ID NO: 39013 - DNA, 16 bp, synthetic construct
  misc_feature 1..16: note = synthetic [barcode part1]
  source 1..16: mol_type = other DNA
tgcggattggagtggt

SEQ ID NO: 39014 - DNA, 16 bp, synthetic construct
  misc_feature 1..16: note = synthetic [barcode part1]
  source 1..16: mol_type = other DNA
gtaggtccacgttagt

SEQ ID NO: 39015 - DNA, 16 bp, synthetic construct
  misc_feature 1..16: note = synthetic [barcode part1]
  source 1..16: mol_type = other DNA
tcaagtgcctgtcacc

SEQ ID NO: 39016 - DNA, 16 bp, synthetic construct
  misc_feature 1..16: note = synthetic [barcode part1]
  source 1..16: mol_type = other DNA
taaccgtgtgaggcag

SEQ ID NO: 39017 - DNA, 16 bp, synthetic construct
  misc_feature 1..16: note = synthetic [barcode part1]
  source 1..16: mol_type = other DNA
cgataggccacaagtg

SEQ ID NO: 39018 - DNA, 16 bp, synthetic construct
  misc_feature 1..16: note = synthetic [barcode part1]
  source 1..16: mol_type = other DNA
agtccaactagactgc

SEQ ID NO: 39019 - DNA, 16 bp, synthetic construct
  misc_feature 1..16: note = synthetic [barcode part1]
  source 1..16: mol_type = other DNA
cgacaattgcgtcctc

SEQ ID NO: 39020 - DNA, 16 bp, synthetic construct
  misc_feature 1..16: note = synthetic [barcode part1]
  source 1..16: mol_type = other DNA
atcacttcgaacgttc

SEQ ID NO: 39021 - DNA, 16 bp, synthetic construct
  misc_feature 1..16: note = synthetic [barcode part1]
  source 1..16: mol_type = other DNA
acggcacaacttcaac

SEQ ID NO: 39022 - DNA, 16 bp, synthetic construct
  misc_feature 1..16: note = synthetic [barcode part1]
  source 1..16: mol_type = other DNA
gatctgacgtattctc

SEQ ID NO: 39023 - DNA, 16 bp, synthetic construct
  misc_feature 1..16: note = synthetic [barcode part1]
  source 1..16: mol_type = other DNA
tgatcacgtctaggtg

SEQ ID NO: 39024 - DNA, 16 bp, synthetic construct
  misc_feature 1..16: note = synthetic [barcode part1]
  source 1..16: mol_type = other DNA
aacgaggtacgttaac

SEQ ID NO: 39025 - DNA, 16 bp, synthetic construct
  misc_feature 1..16: note = synthetic [barcode part1]
  source 1..16: mol_type = other DNA
gacgacaattctaccg

SEQ ID NO: 39026 - DNA, 16 bp, synthetic construct
  misc_feature 1..16: note = synthetic [barcode part1]
  source 1..16: mol_type = other DNA
gtcttcgtctggcaac

SEQ ID NO: 39027 - DNA, 16 bp, synthetic construct
  misc_feature 1..16: note = synthetic [barcode part1]
  source 1..16: mol_type = other DNA
cgatctcgttacacgc

SEQ ID NO: 39028 - DNA, 16 bp, synthetic construct
  misc_feature 1..16: note = synthetic [barcode part1]
  source 1..16: mol_type = other DNA
gttattcacaggttcc

SEQ ID NO: 39029 - DNA, 16 bp, synthetic construct
  misc_feature 1..16: note = synthetic [barcode part1]
  source 1..16: mol_type = other DNA
acttcgagtgtgtgtg

SEQ ID NO: 39030 - DNA, 16 bp, synthetic construct
  misc_feature 1..16: note = synthetic [barcode part1]
  source 1..16: mol_type = other DNA
gtggatcttaacgcgt

SEQ ID NO: 39031 - DNA, 16 bp, synthetic construct
  misc_feature 1..16: note = synthetic [barcode part1]
  source 1..16: mol_type = other DNA
acggcacctaatcaac

SEQ ID NO: 39032 - DNA, 16 bp, synthetic construct
  misc_feature 1..16: note = synthetic [barcode part1]
  source 1..16: mol_type = other DNA
aataggaccgacgcac

SEQ ID NO: 39033 - DNA, 16 bp, synthetic construct
  misc_feature 1..16: note = synthetic [barcode part1]
  source 1..16: mol_type = other DNA
gaggcaattcaggtgc

SEQ ID NO: 39034 - DNA, 16 bp, synthetic construct
  misc_feature 1..16: note = synthetic [barcode part1]
  source 1..16: mol_type = other DNA
gaggacgaacacaagt

SEQ ID NO: 39035 - DNA, 16 bp, synthetic construct
  misc_feature 1..16: note = synthetic [barcode part1]
  source 1..16: mol_type = other DNA
agtcggactgtgcaag

SEQ ID NO: 39036 - DNA, 16 bp, synthetic construct
  misc_feature 1..16: note = synthetic [barcode part1]
  source 1..16: mol_type = other DNA
tccttgaggtcctctt

SEQ ID NO: 39037 - DNA, 16 bp, synthetic construct
  misc_feature 1..16: note = synthetic [barcode part1]
  source 1..16: mol_type = other DNA
aagtctgaacacgtcc

SEQ ID NO: 39038 - DNA, 16 bp, synthetic construct
  misc_feature 1..16: note = synthetic [barcode part1]
  source 1..16: mol_type = other DNA
caggcaagaacctcag

SEQ ID NO: 39039 - DNA, 16 bp, synthetic construct
  misc_feature 1..16: note = synthetic [barcode part1]
  source 1..16: mol_type = other DNA
acaaggcgtaacgaag

SEQ ID NO: 39040 - DNA, 16 bp, synthetic construct
  misc_feature 1..16: note = synthetic [barcode part1]
  source 1..16: mol_type = other DNA
gcaactacgcacaatc

SEQ ID NO: 39041 - DNA, 16 bp, synthetic construct
  misc_feature 1..16: note = synthetic [barcode part1]
  source 1..16: mol_type = other DNA
acgtcttcggcgactt

SEQ ID NO: 39042 - DNA, 16 bp, synthetic construct
  misc_feature 1..16: note = synthetic [barcode part1]
  source 1..16: mol_type = other DNA
cgtcggttagttacag

SEQ ID NO: 39043 - DNA, 16 bp, synthetic construct
  misc_feature 1..16: note = synthetic [barcode part1]
  source 1..16: mol_type = other DNA
gactgcagttgacact

SEQ ID NO: 39044 - DNA, 16 bp, synthetic construct
  misc_feature 1..16: note = synthetic [barcode part1]
  source 1..16: mol_type = other DNA
aaggagtctcgtaagt

SEQ ID NO: 39045 - DNA, 16 bp, synthetic construct
  misc_feature 1..16: note = synthetic [barcode part1]
  source 1..16: mol_type = other DNA
aatcgtgtcaatcctc

SEQ ID NO: 39046 - DNA, 16 bp, synthetic construct
  misc_feature 1..16: note = synthetic [barcode part1]
  source 1..16: mol_type = other DNA
actgcgaactccaagt

SEQ ID NO: 39047 - DNA, 16 bp, synthetic construct
  misc_feature 1..16: note = synthetic [barcode part1]
  source 1..16: mol_type = other DNA
gtatcagtcttgtcac

SEQ ID NO: 39048 - DNA, 16 bp, synthetic construct
  misc_feature 1..16: note = synthetic [barcode part1]
  source 1..16: mol_type = other DNA
aacaccactaggatcc

SEQ ID NO: 39049 - DNA, 16 bp, synthetic construct
  misc_feature 1..16: note = synthetic [barcode part1]
  source 1..16: mol_type = other DNA
ttaattgaccgcggtg

SEQ ID NO: 39050 - DNA, 16 bp, synthetic construct
  misc_feature 1..16: note = synthetic [barcode part1]
  source 1..16: mol_type = other DNA
ttggcaggacgcaagt

SEQ ID NO: 39051 - DNA, 16 bp, synthetic construct
  misc_feature 1..16: note = synthetic [barcode part1]
  source 1..16: mol_type = other DNA
atctggagagtggcac

SEQ ID NO: 39052 - DNA, 16 bp, synthetic construct
  misc_feature 1..16: note = synthetic [barcode part1]
  source 1..16: mol_type = other DNA
actcaagtctagacgc

SEQ ID NO: 39053 - DNA, 16 bp, synthetic construct
  misc_feature 1..16: note = synthetic [barcode part1]
  source 1..16: mol_type = other DNA
agacaagttacgacgt

SEQ ID NO: 39054 - DNA, 16 bp, synthetic construct
  misc_feature 1..16: note = synthetic [barcode part1]
  source 1..16: mol_type = other DNA
tctacgtatcggatct

SEQ ID NO: 39055 - DNA, 16 bp, synthetic construct
  misc_feature 1..16: note = synthetic [barcode part1]
  source 1..16: mol_type = other DNA
tgtgacagtaggtggc

SEQ ID NO: 39056 - DNA, 16 bp, synthetic construct
  misc_feature 1..16: note = synthetic [barcode part1]
  source 1..16: mol_type = other DNA
ttgacggcgagttact

SEQ ID NO: 39057 - DNA, 16 bp, synthetic construct
  misc_feature 1..16: note = synthetic [barcode part1]
  source 1..16: mol_type = other DNA
acctccgtgttggact

SEQ ID NO: 39058 - DNA, 16 bp, synthetic construct
  misc_feature 1..16: note = synthetic [barcode part1]
  source 1..16: mol_type = other DNA
ttatcgttctgaacgc

SEQ ID NO: 39059 - DNA, 16 bp, synthetic construct
  misc_feature 1..16: note = synthetic [barcode part1]
  source 1..16: mol_type = other DNA
gaactaccgagttgtc

SEQ ID NO: 39060 - DNA, 16 bp, synthetic construct
  misc_feature 1..16: note = synthetic [barcode part1]
  source 1..16: mol_type = other DNA
tagttaggtcgcggtt

SEQ ID NO: 39061 - DNA, 16 bp, synthetic construct
  misc_feature 1..16: note = synthetic [barcode part1]
  source 1..16: mol_type = other DNA
cggtcctatactgatt

SEQ ID NO: 39062 - DNA, 16 bp, synthetic construct
  misc_feature 1..16: note = synthetic [barcode part1]
  source 1..16: mol_type = other DNA
gtgtgacacaccagtt

SEQ ID NO: 39063 - DNA, 16 bp, synthetic construct
  misc_feature 1..16: note = synthetic [barcode part1]
  source 1..16: mol_type = other DNA
tattgcgtagtcgacg

SEQ ID NO: 39064 - DNA, 16 bp, synthetic construct
  misc_feature 1..16: note = synthetic [barcode part1]
  source 1..16: mol_type = other DNA
gtcctactccaacttc

SEQ ID NO: 39065 - DNA, 16 bp, synthetic construct
  misc_feature 1..16: note = synthetic [barcode part1]
  source 1..16: mol_type = other DNA
tacagactgaggtggc

SEQ ID NO: 39066 - DNA, 16 bp, synthetic construct
  misc_feature 1..16: note = synthetic [barcode part1]
  source 1..16: mol_type = other DNA
tacgaacgtcctgtcc

SEQ ID NO: 39067 - DNA, 16 bp, synthetic construct
  misc_feature 1..16: note = synthetic [barcode part1]
  source 1..16: mol_type = other DNA
tgtgtacgatcaaccg

SEQ ID NO: 39068 - DNA, 16 bp, synthetic construct
  misc_feature 1..16: note = synthetic [barcode part1]
  source 1..16: mol_type = other DNA
aggcagacgaatagac

SEQ ID NO: 39069 - DNA, 16 bp, synthetic construct
  misc_feature 1..16: note = synthetic [barcode part1]
  source 1..16: mol_type = other DNA
aggtgacaaccacacg

SEQ ID NO: 39070 - DNA, 16 bp, synthetic construct
  misc_feature 1..16: note = synthetic [barcode part1]
  source 1..16: mol_type = other DNA
ttgatcgtcgaggttg

SEQ ID NO: 39071 - DNA, 16 bp, synthetic construct
  misc_feature 1..16: note = synthetic [barcode part1]
  source 1..16: mol_type = other DNA
aggtcgagtacaccag

SEQ ID NO: 39072 - DNA, 16 bp, synthetic construct
  misc_feature 1..16: note = synthetic [barcode part1]
  source 1..16: mol_type = other DNA
aggagtagtggagact

SEQ ID NO: 39073 - DNA, 16 bp, synthetic construct
  misc_feature 1..16: note = synthetic [barcode part1]
  source 1..16: mol_type = other DNA
tgattctaaccgaggc

SEQ ID NO: 39074 - DNA, 16 bp, synthetic construct
  misc_feature 1..16: note = synthetic [barcode part1]
  source 1..16: mol_type = other DNA
tgaatcggcgcagaac

SEQ ID NO: 39075 - DNA, 16 bp, synthetic construct
  misc_feature 1..16: note = synthetic [barcode part1]
  source 1..16: mol_type = other DNA
tgttgtgtgactgacg

SEQ ID NO: 39076 - DNA, 16 bp, synthetic construct
  misc_feature 1..16: note = synthetic [barcode part1]
  source 1..16: mol_type = other DNA
tccttgcacaacttag

SEQ ID NO: 39077 - DNA, 16 bp, synthetic construct
  misc_feature 1..16: note = synthetic [barcode part1]
  source 1..16: mol_type = other DNA
acaacgtcaacgtcac

SEQ ID NO: 39078 - DNA, 16 bp, synthetic construct
  misc_feature 1..16: note = synthetic [barcode part1]
  source 1..16: mol_type = other DNA
gaggccttgttgtaac

SEQ ID NO: 39079 - DNA, 16 bp, synthetic construct
  misc_feature 1..16: note = synthetic [barcode part1]
  source 1..16: mol_type = other DNA
cgaatcgtgcactcct

SEQ ID NO: 39080 - DNA, 16 bp, synthetic construct
  misc_feature 1..16: note = synthetic [barcode part1]
  source 1..16: mol_type = other DNA
ttcagagacgcgtatc

SEQ ID NO: 39081 - DNA, 16 bp, synthetic construct
  misc_feature 1..16: note = synthetic [barcode part1]
  source 1..16: mol_type = other DNA
aagtgttgtcctacct

SEQ ID NO: 39082 - DNA, 16 bp, synthetic construct
  misc_feature 1..16: note = synthetic [barcode part1]
  source 1..16: mol_type = other DNA
aacttctaaccgtacc

SEQ ID NO: 39083 - DNA, 16 bp, synthetic construct
  misc_feature 1..16: note = synthetic [barcode part1]
  source 1..16: mol_type = other DNA
gttgttgagaacacag

SEQ ID NO: 39084 - DNA, 16 bp, synthetic construct
  misc_feature 1..16: note = synthetic [barcode part1]
  source 1..16: mol_type = other DNA
gtgtaacctctccgac

SEQ ID NO: 39085 - DNA, 16 bp, synthetic construct
  misc_feature 1..16: note = synthetic [barcode part1]
  source 1..16: mol_type = other DNA
gttcgtacaactcttg

SEQ ID NO: 39086 - DNA, 16 bp, synthetic construct
  misc_feature 1..16: note = synthetic [barcode part1]
  source 1..16: mol_type = other DNA
gtcgtccgacacttgt

SEQ ID NO: 39087 - DNA, 16 bp, synthetic construct
  misc_feature 1..16: note = synthetic [barcode part1]
  source 1..16: mol_type = other DNA
gtagtcggaagtcggt

SEQ ID NO: 39088 - DNA, 16 bp, synthetic construct
  misc_feature 1..16: note = synthetic [barcode part1]
  source 1..16: mol_type = other DNA
ttggatcctccacacg

SEQ ID NO: 39089 - DNA, 16 bp, synthetic construct
  misc_feature 1..16: note = synthetic [barcode part1]
  source 1..16: mol_type = other DNA
ccagtcctgaggaatt

SEQ ID NO: 39090 - DNA, 16 bp, synthetic construct
  misc_feature 1..16: note = synthetic [barcode part1]
  source 1..16: mol_type = other DNA
acttgttccactcacc

SEQ ID NO: 39091 - DNA, 16 bp, synthetic construct
  misc_feature 1..16: note = synthetic [barcode part1]
  source 1..16: mol_type = other DNA
tcactcgcgtcacaac

SEQ ID NO: 39092 - DNA, 16 bp, synthetic construct
  misc_feature 1..16: note = synthetic [barcode part1]
  source 1..16: mol_type = other DNA
aagatcctaccacgac

SEQ ID NO: 39093 - DNA, 16 bp, synthetic construct
  misc_feature 1..16: note = synthetic [barcode part1]
  source 1..16: mol_type = other DNA
gcgttcgttgccttag

SEQ ID NO: 39094 - DNA, 16 bp, synthetic construct
  misc_feature 1..16: note = synthetic [barcode part1]
  source 1..16: mol_type = other DNA
ccttacaccgacgact

SEQ ID NO: 39095 - DNA, 16 bp, synthetic construct
  misc_feature 1..16: note = synthetic [barcode part1]
  source 1..16: mol_type = other DNA
tcttactgcaagtctg

SEQ ID NO: 39096 - DNA, 16 bp, synthetic construct
  misc_feature 1..16: note = synthetic [barcode part1]
  source 1..16: mol_type = other DNA
tacagatcgccgtcct

SEQ ID NO: 39097 - DNA, 16 bp, synthetic construct
  misc_feature 1..16: note = synthetic [barcode part1]
  source 1..16: mol_type = other DNA
gtacgagtcaccagag

SEQ ID NO: 39098 - DNA, 16 bp, synthetic construct
  misc_feature 1..16: note = synthetic [barcode part1]
  source 1..16: mol_type = other DNA
gatcttgactcgcctg

SEQ ID NO: 39099 - DNA, 16 bp, synthetic construct
  misc_feature 1..16: note = synthetic [barcode part1]
  source 1..16: mol_type = other DNA
accgatagacggcaac

SEQ ID NO: 39100 - DNA, 16 bp, synthetic construct
  misc_feature 1..16: note = synthetic [barcode part1]
  source 1..16: mol_type = other DNA
agaccacgcctctgtt

SEQ ID NO: 39101 - DNA, 16 bp, synthetic construct
  misc_feature 1..16: note = synthetic [barcode part1]
  source 1..16: mol_type = other DNA
aagacctcctactcgc

SEQ ID NO: 39102 - DNA, 16 bp, synthetic construct
  misc_feature 1..16: note = synthetic [barcode part1]
  source 1..16: mol_type = other DNA
atcctattgccgacgc

SEQ ID NO: 39103 - DNA, 16 bp, synthetic construct
  misc_feature 1..16: note = synthetic [barcode part1]
  source 1..16: mol_type = other DNA
atccacctctaagatc

SEQ ID NO: 39104 - DNA, 16 bp, synthetic construct
  misc_feature 1..16: note = synthetic [barcode part1]
  source 1..16: mol_type = other DNA
agtgtgtcgattacgc

SEQ ID NO: 39105 - DNA, 16 bp, synthetic construct
  misc_feature 1..16: note = synthetic [barcode part1]
  source 1..16: mol_type = other DNA
atccgttggcaccgtt

SEQ ID NO: 39106 - DNA, 16 bp, synthetic construct
  misc_feature 1..16: note = synthetic [barcode part1]
  source 1..16: mol_type = other DNA
caggatcgttgcagtt

SEQ ID NO: 39107 - DNA, 16 bp, synthetic construct
  misc_feature 1..16: note = synthetic [barcode part1]
  source 1..16: mol_type = other DNA
tccttggaccaacacc

SEQ ID NO: 39108 - DNA, 16 bp, synthetic construct
  misc_feature 1..16: note = synthetic [barcode part1]
  source 1..16: mol_type = other DNA
tccaacctacgaccac

SEQ ID NO: 39109 - DNA, 16 bp, synthetic construct
  misc_feature 1..16: note = synthetic [barcode part1]
  source 1..16: mol_type = other DNA
tcacctgccacaacac

SEQ ID NO: 39110 - DNA, 16 bp, synthetic construct
  misc_feature 1..16: note = synthetic [barcode part1]
  source 1..16: mol_type = other DNA
caatattggtggacag

SEQ ID NO: 39111 - DNA, 16 bp, synthetic construct
  misc_feature 1..16: note = synthetic [barcode part1]
  source 1..16: mol_type = other DNA
agagtcgccagatacg

SEQ ID NO: 39112 - DNA, 16 bp, synthetic construct
  misc_feature 1..16: note = synthetic [barcode part1]
  source 1..16: mol_type = other DNA
tacttacggtaccgcc

SEQ ID NO: 39113 - DNA, 16 bp, synthetic construct
  misc_feature 1..16: note = synthetic [barcode part1]
  source 1..16: mol_type = other DNA
ttcgatcggagtcagt

SEQ ID NO: 39114 - DNA, 16 bp, synthetic construct
  misc_feature 1..16: note = synthetic [barcode part1]
  source 1..16: mol_type = other DNA
cctatcaccttcggtt

SEQ ID NO: 39115 - DNA, 16 bp, synthetic construct
  misc_feature 1..16: note = synthetic [barcode part1]
  source 1..16: mol_type = other DNA
tcgttcggtctcagac

SEQ ID NO: 39116 - DNA, 16 bp, synthetic construct
  misc_feature 1..16: note = synthetic [barcode part1]
  source 1..16: mol_type = other DNA
tggatcaaggacgcac

SEQ ID NO: 39117 - DNA, 16 bp, synthetic construct
  misc_feature 1..16: note = synthetic [barcode part1]
  source 1..16: mol_type = other DNA
ataggtccgacaaggc

SEQ ID NO: 39118 - DNA, 16 bp, synthetic construct
  misc_feature 1..16: note = synthetic [barcode part1]
  source 1..16: mol_type = other DNA
actcgtatcgacgtag

SEQ ID NO: 39119 - DNA, 16 bp, synthetic construct
  misc_feature 1..16: note = synthetic [barcode part1]
  source 1..16: mol_type = other DNA
gaccacagttggtact

SEQ ID NO: 39120 - DNA, 16 bp, synthetic construct
  misc_feature 1..16: note = synthetic [barcode part1]
  source 1..16: mol_type = other DNA
cgaattctccggatag

SEQ ID NO: 39121 - DNA, 16 bp, synthetic construct
  misc_feature 1..16: note = synthetic [barcode part1]
  source 1..16: mol_type = other DNA
caatacctgaacagag

SEQ ID NO: 39122 - DNA, 16 bp, synthetic construct
  misc_feature 1..16: note = synthetic [barcode part1]
  source 1..16: mol_type = other DNA
atccactcgccgtagt

SEQ ID NO: 39123 - DNA, 16 bp, synthetic construct
  misc_feature 1..16: note = synthetic [barcode part1]
  source 1..16: mol_type = other DNA
agacttggttcttcac

SEQ ID NO: 39124 - DNA, 16 bp, synthetic construct
  misc_feature 1..16: note = synthetic [barcode part1]
  source 1..16: mol_type = other DNA
gccagtgatctaagtc

SEQ ID NO: 39125 - DNA, 16 bp, synthetic construct
  misc_feature 1..16: note = synthetic [barcode part1]
  source 1..16: mol_type = other DNA
gttgtctgatactcgt

SEQ ID NO: 39126 - DNA, 16 bp, synthetic construct
  misc_feature 1..16: note = synthetic [barcode part1]
  source 1..16: mol_type = other DNA
tcagataacggtaggt

SEQ ID NO: 39127 - DNA, 16 bp, synthetic construct
  misc_feature 1..16: note = synthetic [barcode part1]
  source 1..16: mol_type = other DNA
tcgcgcaatacactag

SEQ ID NO: 39128 - DNA, 16 bp, synthetic construct
  misc_feature 1..16: note = synthetic [barcode part1]
  source 1..16: mol_type = other DNA
cacagtaggacggatc

SEQ ID NO: 39129 - DNA, 16 bp, synthetic construct
  misc_feature 1..16: note = synthetic [barcode part1]
  source 1..16: mol_type = other DNA
ttatctcaccggagag

SEQ ID NO: 39130 - DNA, 16 bp, synthetic construct
  misc_feature 1..16: note = synthetic [barcode part1]
  source 1..16: mol_type = other DNA
gagaccacacagactg

SEQ ID NO: 39131 - DNA, 16 bp, synthetic construct
  misc_feature 1..16: note = synthetic [barcode part1]
  source 1..16: mol_type = other DNA
caccagattgtgttct

SEQ ID NO: 39132 - DNA, 16 bp, synthetic construct
  misc_feature 1..16: note = synthetic [barcode part1]
  source 1..16: mol_type = other DNA
tgccaccgcctgaatt

SEQ ID NO: 39133 - DNA, 16 bp, synthetic construct
  misc_feature 1..16: note = synthetic [barcode part1]
  source 1..16: mol_type = other DNA
gagttgtcctgcactc

SEQ ID NO: 39134 - DNA, 16 bp, synthetic construct
  misc_feature 1..16: note = synthetic [barcode part1]
  source 1..16: mol_type = other DNA
gattctgttcgttcag

SEQ ID NO: 39135 - DNA, 16 bp, synthetic construct
  misc_feature 1..16: note = synthetic [barcode part1]
  source 1..16: mol_type = other DNA
caacgagtattgcctg

SEQ ID NO: 39136 - DNA, 16 bp, synthetic construct
  misc_feature 1..16: note = synthetic [barcode part1]
  source 1..16: mol_type = other DNA
gtgacgtagtcaacct

SEQ ID NO: 39137 - DNA, 16 bp, synthetic construct
  misc_feature 1..16: note = synthetic [barcode part1]
  source 1..16: mol_type = other DNA
taggtctctacgaacg

SEQ ID NO: 39138 - DNA, 16 bp, synthetic construct
  misc_feature 1..16: note = synthetic [barcode part1]
  source 1..16: mol_type = other DNA
tatcttggacgttcac

SEQ ID NO: 39139 - DNA, 16 bp, synthetic construct
  misc_feature 1..16: note = synthetic [barcode part1]
  source 1..16: mol_type = other DNA
aactgtcctcaacgag

SEQ ID NO: 39140 - DNA, 16 bp, synthetic construct
  misc_feature 1..16: note = synthetic [barcode part1]
  source 1..16: mol_type = other DNA
tctggcgttgtgttcg

SEQ ID NO: 39141 - DNA, 16 bp, synthetic construct
  misc_feature 1..16: note = synthetic [barcode part1]
  source 1..16: mol_type = other DNA
aggttactgccaagtc

SEQ ID NO: 39142 - DNA, 16 bp, synthetic construct
  misc_feature 1..16: note = synthetic [barcode part1]
  source 1..16: mol_type = other DNA
gaactactgaaggcgc

SEQ ID NO: 39143 - DNA, 16 bp, synthetic construct
  misc_feature 1..16: note = synthetic [barcode part1]
  source 1..16: mol_type = other DNA
tggccagtacaatacc

SEQ ID NO: 39144 - DNA, 16 bp, synthetic construct
  misc_feature 1..16: note = synthetic [barcode part1]
  source 1..16: mol_type = other DNA
ccaatagaagtcgtcc

SEQ ID NO: 39145 - DNA, 16 bp, synthetic construct
  misc_feature 1..16: note = synthetic [barcode part1]
  source 1..16: mol_type = other DNA
acgacagtgttctgtg

SEQ ID NO: 39146 - DNA, 16 bp, synthetic construct
  misc_feature 1..16: note = synthetic [barcode part1]
  source 1..16: mol_type = other DNA
gatactgcctcttctc

SEQ ID NO: 39147 - DNA, 16 bp, synthetic construct
  misc_feature 1..16: note = synthetic [barcode part1]
  source 1..16: mol_type = other DNA
attcctgttcaacggt

SEQ ID NO: 39148 - DNA, 16 bp, synthetic construct
  misc_feature 1..16: note = synthetic [barcode part1]
  source 1..16: mol_type = other DNA
gtgataaggatacctg

SEQ ID NO: 39149 - DNA, 16 bp, synthetic construct
  misc_feature 1..16: note = synthetic [barcode part1]
  source 1..16: mol_type = other DNA
aacaaccggttcgatc

SEQ ID NO: 39150 - DNA, 16 bp, synthetic construct
  misc_feature 1..16: note = synthetic [barcode part1]
  source 1..16: mol_type = other DNA
ttactaagaaggtgcg

SEQ ID NO: 39151 - DNA, 16 bp, synthetic construct
  misc_feature 1..16: note = synthetic [barcode part1]
  source 1..16: mol_type = other DNA
ataaggacttcacgcc

SEQ ID NO: 39152 - DNA, 16 bp, synthetic construct
  misc_feature 1..16: note = synthetic [barcode part1]
  source 1..16: mol_type = other DNA
cgcaatactgcagtac

SEQ ID NO: 39153 - DNA, 16 bp, synthetic construct
  misc_feature 1..16: note = synthetic [barcode part1]
  source 1..16: mol_type = other DNA
caactggtaacgtcgt

SEQ ID NO: 39154 - DNA, 16 bp, synthetic construct
  misc_feature 1..16: note = synthetic [barcode part1]
  source 1..16: mol_type = other DNA
tccgactgatctcttc

SEQ ID NO: 39155 - DNA, 16 bp, synthetic construct
  misc_feature 1..16: note = synthetic [barcode part1]
  source 1..16: mol_type = other DNA
cgtgttatctcctaag

SEQ ID NO: 39156 - DNA, 16 bp, synthetic construct
  misc_feature 1..16: note = synthetic [barcode part1]
  source 1..16: mol_type = other DNA
gacgtcctaggaagtg

SEQ ID NO: 39157 - DNA, 16 bp, synthetic construct
  misc_feature 1..16: note = synthetic [barcode part1]
  source 1..16: mol_type = other DNA
aatcgtcttgtgttcg

SEQ ID NO: 39158 - DNA, 16 bp, synthetic construct
  misc_feature 1..16: note = synthetic [barcode part1]
  source 1..16: mol_type = other DNA
acttcacgtaaggcgt

SEQ ID NO: 39159 - DNA, 16 bp, synthetic construct
  misc_feature 1..16: note = synthetic [barcode part1]
  source 1..16: mol_type = other DNA
cgagtcgttgatagtc

SEQ ID NO: 39160 - DNA, 16 bp, synthetic construct
  misc_feature 1..16: note = synthetic [barcode part1]
  source 1..16: mol_type = other DNA
tcgtattcctacgtcc

SEQ ID NO: 39161 - DNA, 16 bp, synthetic construct
  misc_feature 1..16: note = synthetic [barcode part1]
  source 1..16: mol_type = other DNA
gtgaccgtagtgtatc

SEQ ID NO: 39162 - DNA, 16 bp, synthetic construct
  misc_feature 1..16: note = synthetic [barcode part1]
  source 1..16: mol_type = other DNA
tcctcacgttcttgtg

SEQ ID NO: 39163 - DNA, 16 bp, synthetic construct
  misc_feature 1..16: note = synthetic [barcode part1]
  source 1..16: mol_type = other DNA
aacggttaccagatcc

SEQ ID NO: 39164 - DNA, 16 bp, synthetic construct
  misc_feature 1..16: note = synthetic [barcode part1]
  source 1..16: mol_type = other DNA
atcaccacctctatag

SEQ ID NO: 39165 - DNA, 16 bp, synthetic construct
  misc_feature 1..16: note = synthetic [barcode part1]
  source 1..16: mol_type = other DNA
cgttctgaccttgttc

SEQ ID NO: 39166 - DNA, 16 bp, synthetic construct
  misc_feature 1..16: note = synthetic [barcode part1]
  source 1..16: mol_type = other DNA
taagtccagacggcag

SEQ ID NO: 39167 - DNA, 16 bp, synthetic construct
  misc_feature 1..16: note = synthetic [barcode part1]
  source 1..16: mol_type = other DNA
gtccggatctgttacc

SEQ ID NO: 39168 - DNA, 16 bp, synthetic construct
  misc_feature 1..16: note = synthetic [barcode part1]
  source 1..16: mol_type = other DNA
ttctagtctctaccgc

SEQ ID NO: 39169 - DNA, 16 bp, synthetic construct
  misc_feature 1..16: note = synthetic [barcode part1]
  source 1..16: mol_type = other DNA
actctgccagattcgc

SEQ ID NO: 39170 - DNA, 16 bp, synthetic construct
  misc_feature 1..16: note = synthetic [barcode part1]
  source 1..16: mol_type = other DNA
gttcggcgtacaagag

SEQ ID NO: 39171 - DNA, 16 bp, synthetic construct
  misc_feature 1..16: note = synthetic [barcode part1]
  source 1..16: mol_type = other DNA
gacctcttctctgatc

SEQ ID NO: 39172 - DNA, 16 bp, synthetic construct
  misc_feature 1..16: note = synthetic [barcode part1]
  source 1..16: mol_type = other DNA
taacagtcggcgactt

SEQ ID NO: 39173 - DNA, 16 bp, synthetic construct
  misc_feature 1..16: note = synthetic [barcode part1]
  source 1..16: mol_type = other DNA
tgagtatcggtgaagt

SEQ ID NO: 39174 - DNA, 16 bp, synthetic construct
  misc_feature 1..16: note = synthetic [barcode part1]
  source 1..16: mol_type = other DNA
gattgcgtctcttagt

SEQ ID NO: 39175 - DNA, 16 bp, synthetic construct
  misc_feature 1..16: note = synthetic [barcode part1]
  source 1..16: mol_type = other DNA
tctagttctggccttc

SEQ ID NO: 39176 - DNA, 16 bp, synthetic construct
  misc_feature 1..16: note = synthetic [barcode part1]
  source 1..16: mol_type = other DNA
ttattcgaacaccgtc

SEQ ID NO: 39177 - DNA, 16 bp, synthetic construct
  misc_feature 1..16: note = synthetic [barcode part1]
  source 1..16: mol_type = other DNA
tgaatacggtcgcact

SEQ ID NO: 39178 - DNA, 16 bp, synthetic construct
  misc_feature 1..16: note = synthetic [barcode part1]
  source 1..16: mol_type = other DNA
agtaatcgaaggcact

SEQ ID NO: 39179 - DNA, 16 bp, synthetic construct
  misc_feature 1..16: note = synthetic [barcode part1]
  source 1..16: mol_type = other DNA
gtgagacacgaacctg

SEQ ID NO: 39180 - DNA, 16 bp, synthetic construct
  misc_feature 1..16: note = synthetic [barcode part1]
  source 1..16: mol_type = other DNA
ttatctcaaggcggtg

SEQ ID NO: 39181 - DNA, 16 bp, synthetic construct
  misc_feature 1..16: note = synthetic [barcode part1]
  source 1..16: mol_type = other DNA
cgtgcgtgtattgtag

SEQ ID NO: 39182 - DNA, 16 bp, synthetic construct
  misc_feature 1..16: note = synthetic [barcode part1]
  source 1..16: mol_type = other DNA
gttcgttgcgagtagt

SEQ ID NO: 39183 - DNA, 16 bp, synthetic construct
  misc_feature 1..16: note = synthetic [barcode part1]
  source 1..16: mol_type = other DNA
aggcgttcactcaagt

SEQ ID NO: 39184 - DNA, 16 bp, synthetic construct
  misc_feature 1..16: note = synthetic [barcode part1]
  source 1..16: mol_type = other DNA
gttccacacttagatc

SEQ ID NO: 39185 - DNA, 16 bp, synthetic construct
  misc_feature 1..16: note = synthetic [barcode part1]
  source 1..16: mol_type = other DNA
gatccttgcacttagt

SEQ ID NO: 39186 - DNA, 16 bp, synthetic construct
  misc_feature 1..16: note = synthetic [barcode part1]
  source 1..16: mol_type = other DNA
cgttagagacgtggac

SEQ ID NO: 39187 - DNA, 16 bp, synthetic construct
  misc_feature 1..16: note = synthetic [barcode part1]
  source 1..16: mol_type = other DNA
ttgaacgtaggtgtcc

SEQ ID NO: 39188 - DNA, 16 bp, synthetic construct
  misc_feature 1..16: note = synthetic [barcode part1]
  source 1..16: mol_type = other DNA
ttcgtccgcaatattg

SEQ ID NO: 39189 - DNA, 16 bp, synthetic construct
  misc_feature 1..16: note = synthetic [barcode part1]
  source 1..16: mol_type = other DNA
acgatcaccttgattc

SEQ ID NO: 39190 - DNA, 16 bp, synthetic construct
  misc_feature 1..16: note = synthetic [barcode part1]
  source 1..16: mol_type = other DNA
tacgttcctactgagt

SEQ ID NO: 39191 - DNA, 16 bp, synthetic construct
  misc_feature 1..16: note = synthetic [barcode part1]
  source 1..16: mol_type = other DNA
aagtccgaataacggt

SEQ ID NO: 39192 - DNA, 16 bp, synthetic construct
  misc_feature 1..16: note = synthetic [barcode part1]
  source 1..16: mol_type = other DNA
tgtcctcacgtaagag

SEQ ID NO: 39193 - DNA, 16 bp, synthetic construct
  misc_feature 1..16: note = synthetic [barcode part1]
  source 1..16: mol_type = other DNA
atacgcggttgactgt

SEQ ID NO: 39194 - DNA, 16 bp, synthetic construct
  misc_feature 1..16: note = synthetic [barcode part1]
  source 1..16: mol_type = other DNA
gacgcgttacaattgc

SEQ ID NO: 39195 - DNA, 16 bp, synthetic construct
  misc_feature 1..16: note = synthetic [barcode part1]
  source 1..16: mol_type = other DNA
ttctcctaccgattgc

SEQ ID NO: 39196 - DNA, 16 bp, synthetic construct
  misc_feature 1..16: note = synthetic [barcode part1]
  source 1..16: mol_type = other DNA
accagtataccagtgc

SEQ ID NO: 39197 - DNA, 16 bp, synthetic construct
  misc_feature 1..16: note = synthetic [barcode part1]
  source 1..16: mol_type = other DNA
tatcgacaggaagttg

SEQ ID NO: 39198 - DNA, 16 bp, synthetic construct
  misc_feature 1..16: note = synthetic [barcode part1]
  source 1..16: mol_type = other DNA
ccactcggagtgaatt

SEQ ID NO: 39199 - DNA, 16 bp, synthetic construct
  misc_feature 1..16: note = synthetic [barcode part1]
  source 1..16: mol_type = other DNA
agatagattcgagacc

SEQ ID NO: 39200 - DNA, 16 bp, synthetic construct
  misc_feature 1..16: note = synthetic [barcode part1]
  source 1..16: mol_type = other DNA
tgatcgttctgatctg

SEQ ID NO: 39201 - DNA, 16 bp, synthetic construct
  misc_feature 1..16: note = synthetic [barcode part1]
  source 1..16: mol_type = other DNA
tcaccgtgtgaactcc

SEQ ID NO: 39202 - DNA, 16 bp, synthetic construct
  misc_feature 1..16: note = synthetic [barcode part1]
  source 1..16: mol_type = other DNA
agtactgtggtcaacc

SEQ ID NO: 39203 - DNA, 16 bp, synthetic construct
  misc_feature 1..16: note = synthetic [barcode part1]
  source 1..16: mol_type = other DNA
cgtagattcacctcgc

SEQ ID NO: 39204 - DNA, 16 bp, synthetic construct
  misc_feature 1..16: note = synthetic [barcode part1]
  source 1..16: mol_type = other DNA
atcagaatacggtcag

SEQ ID NO: 39205 - DNA, 16 bp, synthetic construct
  misc_feature 1..16: note = synthetic [barcode part1]
  source 1..16: mol_type = other DNA
atcacttaggttcacc

SEQ ID NO: 39206 - DNA, 16 bp, synthetic construct
  misc_feature 1..16: note = synthetic [barcode part1]
  source 1..16: mol_type = other DNA
gttacttggatctgtc

SEQ ID NO: 39207 - DNA, 16 bp, synthetic construct
  misc_feature 1..16: note = synthetic [barcode part1]
  source 1..16: mol_type = other DNA
gaatcaaggtcggaag

SEQ ID NO: 39208 - DNA, 16 bp, synthetic construct
  misc_feature 1..16: note = synthetic [barcode part1]
  source 1..16: mol_type = other DNA
acgaaggcggtctaac

SEQ ID NO: 39209 - DNA, 16 bp, synthetic construct
  misc_feature 1..16: note = synthetic [barcode part1]
  source 1..16: mol_type = other DNA
cgactaggtactacgt

SEQ ID NO: 39210 - DNA, 16 bp, synthetic construct
  misc_feature 1..16: note = synthetic [barcode part1]
  source 1..16: mol_type = other DNA
gtggatccagtctcct

SEQ ID NO: 39211 - DNA, 16 bp, synthetic construct
  misc_feature 1..16: note = synthetic [barcode part1]
  source 1..16: mol_type = other DNA
gtacagttcttctgac

SEQ ID NO: 39212 - DNA, 16 bp, synthetic construct
  misc_feature 1..16: note = synthetic [barcode part1]
  source 1..16: mol_type = other DNA
tcacaagagtgcactc

SEQ ID NO: 39213 - DNA, 16 bp, synthetic construct
  misc_feature 1..16: note = synthetic [barcode part1]
  source 1..16: mol_type = other DNA
tgccgttgatacgtcc

SEQ ID NO: 39214 - DNA, 16 bp, synthetic construct
  misc_feature 1..16: note = synthetic [barcode part1]
  source 1..16: mol_type = other DNA
gtcctacgaatcgaac

SEQ ID NO: 39215 - DNA, 16 bp, synthetic construct
  misc_feature 1..16: note = synthetic [barcode part1]
  source 1..16: mol_type = other DNA
atcaaccgtcagtcag

SEQ ID NO: 39216 - DNA, 16 bp, synthetic construct
  misc_feature 1..16: note = synthetic [barcode part1]
  source 1..16: mol_type = other DNA
aagtctgacctgagtc

SEQ ID NO: 39217 - DNA, 16 bp, synthetic construct
  misc_feature 1..16: note = synthetic [barcode part1]
  source 1..16: mol_type = other DNA
acgagaaccggtggtt

SEQ ID NO: 39218 - DNA, 16 bp, synthetic construct
  misc_feature 1..16: note = synthetic [barcode part1]
  source 1..16: mol_type = other DNA
gactgcctactctcag

SEQ ID NO: 39219 - DNA, 16 bp, synthetic construct
  misc_feature 1..16: note = synthetic [barcode part1]
  source 1..16: mol_type = other DNA
acgagaccttactacg

SEQ ID NO: 39220 - DNA, 16 bp, synthetic construct
  misc_feature 1..16: note = synthetic [barcode part1]
  source 1..16: mol_type = other DNA
caaggactgaatcgcg

SEQ ID NO: 39221 - DNA, 16 bp, synthetic construct
  misc_feature 1..16: note = synthetic [barcode part1]
  source 1..16: mol_type = other DNA
cgattccaatcggaac

SEQ ID NO: 39222 - DNA, 16 bp, synthetic construct
  misc_feature 1..16: note = synthetic [barcode part1]
  source 1..16: mol_type = other DNA
gatcgatacacacgtc

SEQ ID NO: 39223 - DNA, 16 bp, synthetic construct
  misc_feature 1..16: note = synthetic [barcode part1]
  source 1..16: mol_type = other DNA
cctacggtaccacttg

SEQ ID NO: 39224 - DNA, 16 bp, synthetic construct
  misc_feature 1..16: note = synthetic [barcode part1]
  source 1..16: mol_type = other DNA
acgaaggaactgccac

SEQ ID NO: 39225 - DNA, 16 bp, synthetic construct
  misc_feature 1..16: note = synthetic [barcode part1]
  source 1..16: mol_type = other DNA
cacgacagtccactct

SEQ ID NO: 39226 - DNA, 16 bp, synthetic construct
  misc_feature 1..16: note = synthetic [barcode part1]
  source 1..16: mol_type = other DNA
agactggttccaactg

SEQ ID NO: 39227 - DNA, 16 bp, synthetic construct
  misc_feature 1..16: note = synthetic [barcode part1]
  source 1..16: mol_type = other DNA
gaataactgcgaatcg

SEQ ID NO: 39228 - DNA, 16 bp, synthetic construct
  misc_feature 1..16: note = synthetic [barcode part1]
  source 1..16: mol_type = other DNA
acgactagtataccgc

SEQ ID NO: 39229 - DNA, 16 bp, synthetic construct
  misc_feature 1..16: note = synthetic [barcode part1]
  source 1..16: mol_type = other DNA
gcgcaactatagtcac

SEQ ID NO: 39230 - DNA, 16 bp, synthetic construct
  misc_feature 1..16: note = synthetic [barcode part1]
  source 1..16: mol_type = other DNA
tgcgattcaattctcg

SEQ ID NO: 39231 - DNA, 16 bp, synthetic construct
  misc_feature 1..16: note = synthetic [barcode part1]
  source 1..16: mol_type = other DNA
tgtagaatcgagtcag

SEQ ID NO: 39232 - DNA, 16 bp, synthetic construct
  misc_feature 1..16: note = synthetic [barcode part1]
  source 1..16: mol_type = other DNA
cctcgcaattggacct

SEQ ID NO: 39233 - DNA, 16 bp, synthetic construct
  misc_feature 1..16: note = synthetic [barcode part1]
  source 1..16: mol_type = other DNA
aatccggatatctcct

SEQ ID NO: 39234 - DNA, 16 bp, synthetic construct
  misc_feature 1..16: note = synthetic [barcode part1]
  source 1..16: mol_type = other DNA
gagagacaggtacctc

SEQ ID NO: 39235 - DNA, 16 bp, synthetic construct
  misc_feature 1..16: note = synthetic [barcode part1]
  source 1..16: mol_type = other DNA
tcactagactgccaag

SEQ ID NO: 39236 - DNA, 16 bp, synthetic construct
  misc_feature 1..16: note = synthetic [barcode part1]
  source 1..16: mol_type = other DNA
caacgacgttactggt

SEQ ID NO: 39237 - DNA, 16 bp, synthetic construct
  misc_feature 1..16: note = synthetic [barcode part1]
  source 1..16: mol_type = other DNA
gcacgacagttggaac

SEQ ID NO: 39238 - DNA, 16 bp, synthetic construct
  misc_feature 1..16: note = synthetic [barcode part1]
  source 1..16: mol_type = other DNA
agacggttgcggattg

SEQ ID NO: 39239 - DNA, 16 bp, synthetic construct
  misc_feature 1..16: note = synthetic [barcode part1]
  source 1..16: mol_type = other DNA
aacgcagtctggcaag

SEQ ID NO: 39240 - DNA, 16 bp, synthetic construct
  misc_feature 1..16: note = synthetic [barcode part1]
  source 1..16: mol_type = other DNA
aagtgcctactgttct

SEQ ID NO: 39241 - DNA, 16 bp, synthetic construct
  misc_feature 1..16: note = synthetic [barcode part1]
  source 1..16: mol_type = other DNA
acaacgttacgcgtac

SEQ ID NO: 39242 - DNA, 16 bp, synthetic construct
  misc_feature 1..16: note = synthetic [barcode part1]
  source 1..16: mol_type = other DNA
gtggcgtaatcgattc

SEQ ID NO: 39243 - DNA, 16 bp, synthetic construct
  misc_feature 1..16: note = synthetic [barcode part1]
  source 1..16: mol_type = other DNA
acctaacactaccgag

SEQ ID NO: 39244 - DNA, 16 bp, synthetic construct
  misc_feature 1..16: note = synthetic [barcode part1]
  source 1..16: mol_type = other DNA
tgcaactctcttagtg

SEQ ID NO: 39245 - DNA, 16 bp, synthetic construct
  misc_feature 1..16: note = synthetic [barcode part1]
  source 1..16: mol_type = other DNA
gcgcggtgaagttagt

SEQ ID NO: 39246 - DNA, 16 bp, synthetic construct
  misc_feature 1..16: note = synthetic [barcode part1]
  source 1..16: mol_type = other DNA
cctctacgtctggtag

SEQ ID NO: 39247 - DNA, 16 bp, synthetic construct
  misc_feature 1..16: note = synthetic [barcode part1]
  source 1..16: mol_type = other DNA
aagtctggttcagacc

SEQ ID NO: 39248 - DNA, 16 bp, synthetic construct
  misc_feature 1..16: note = synthetic [barcode part1]
  source 1..16: mol_type = other DNA
cagagtggtagttgcg

SEQ ID NO: 39249 - DNA, 16 bp, synthetic construct
  misc_feature 1..16: note = synthetic [barcode part1]
  source 1..16: mol_type = other DNA
tggtcagaccacagtt

SEQ ID NO: 39250 - DNA, 16 bp, synthetic construct
  misc_feature 1..16: note = synthetic [barcode part1]
  source 1..16: mol_type = other DNA
gaaggtgttcggcaac

SEQ ID NO: 39251 - DNA, 16 bp, synthetic construct
  misc_feature 1..16: note = synthetic [barcode part1]
  source 1..16: mol_type = other DNA
agtaacttcctcacgt

SEQ ID NO: 39252 - DNA, 16 bp, synthetic construct
  misc_feature 1..16: note = synthetic [barcode part1]
  source 1..16: mol_type = other DNA
tggagttattggccac

SEQ ID NO: 39253 - DNA, 16 bp, synthetic construct
  misc_feature 1..16: note = synthetic [barcode part1]
  source 1..16: mol_type = other DNA
gttctattgccggcac

SEQ ID NO: 39254 - DNA, 16 bp, synthetic construct
  misc_feature 1..16: note = synthetic [barcode part1]
  source 1..16: mol_type = other DNA
aactagaacaaccacg

SEQ ID NO: 39255 - DNA, 16 bp, synthetic construct
  misc_feature 1..16: note = synthetic [barcode part1]
  source 1..16: mol_type = other DNA
gttctgagaggttctg

SEQ ID NO: 39256 - DNA, 16 bp, synthetic construct
  misc_feature 1..16: note = synthetic [barcode part1]
  source 1..16: mol_type = other DNA
aggtgtcgcgacaagt

SEQ ID NO: 39257 - DNA, 16 bp, synthetic construct
  misc_feature 1..16: note = synthetic [barcode part1]
  source 1..16: mol_type = other DNA
actacgttgtgtcgag

SEQ ID NO: 39258 - DNA, 16 bp, synthetic construct
  misc_feature 1..16: note = synthetic [barcode part1]
  source 1..16: mol_type = other DNA
tactcactcgtccact

SEQ ID NO: 39259 - DNA, 16 bp, synthetic construct
  misc_feature 1..16: note = synthetic [barcode part1]
  source 1..16: mol_type = other DNA
acgaaccggttacgtt

SEQ ID NO: 39260 - DNA, 16 bp, synthetic construct
  misc_feature 1..16: note = synthetic [barcode part1]
  source 1..16: mol_type = other DNA
taatccgcaaggatag

SEQ ID NO: 39261 - DNA, 16 bp, synthetic construct
  misc_feature 1..16: note = synthetic [barcode part1]
  source 1..16: mol_type = other DNA
acgtcagtcttcagtt

SEQ ID NO: 39262 - DNA, 16 bp, synthetic construct
  misc_feature 1..16: note = synthetic [barcode part1]
  source 1..16: mol_type = other DNA
ataagtgcgaagtctg

SEQ ID NO: 39263 - DNA, 16 bp, synthetic construct
  misc_feature 1..16: note = synthetic [barcode part1]
  source 1..16: mol_type = other DNA
actgcgcaagaattag

SEQ ID NO: 39264 - DNA, 16 bp, synthetic construct
  misc_feature 1..16: note = synthetic [barcode part1]
  source 1..16: mol_type = other DNA
gcaattgagttcttcc

SEQ ID NO: 39265 - DNA, 16 bp, synthetic construct
  misc_feature 1..16: note = synthetic [barcode part1]
  source 1..16: mol_type = other DNA
atctccacggaccgtt

SEQ ID NO: 39266 - DNA, 16 bp, synthetic construct
  misc_feature 1..16: note = synthetic [barcode part1]
  source 1..16: mol_type = other DNA
ccgattcgaacacctc

SEQ ID NO: 39267 - DNA, 16 bp, synthetic construct
  misc_feature 1..16: note = synthetic [barcode part1]
  source 1..16: mol_type = other DNA
tcctgaaggacagacg

SEQ ID NO: 39268 - DNA, 16 bp, synthetic construct
  misc_feature 1..16: note = synthetic [barcode part1]
  source 1..16: mol_type = other DNA
gtgacactgcaacgtt

SEQ ID NO: 39269 - DNA, 16 bp, synthetic construct
  misc_feature 1..16: note = synthetic [barcode part1]
  source 1..16: mol_type = other DNA
attcgaggtcttactc

SEQ ID NO: 39270 - DNA, 16 bp, synthetic construct
  misc_feature 1..16: note = synthetic [barcode part1]
  source 1..16: mol_type = other DNA
tgttaagacggaggtt

SEQ ID NO: 39271 - DNA, 16 bp, synthetic construct
  misc_feature 1..16: note = synthetic [barcode part1]
  source 1..16: mol_type = other DNA
ccaagagtaacctctg

SEQ ID NO: 39272 - DNA, 16 bp, synthetic construct
  misc_feature 1..16: note = synthetic [barcode part1]
  source 1..16: mol_type = other DNA
tccacggtgaagtgag

SEQ ID NO: 39273 - DNA, 16 bp, synthetic construct
  misc_feature 1..16: note = synthetic [barcode part1]
  source 1..16: mol_type = other DNA
taggttccgttcgaag

SEQ ID NO: 39274 - DNA, 16 bp, synthetic construct
  misc_feature 1..16: note = synthetic [barcode part1]
  source 1..16: mol_type = other DNA
gcagtgcagttagttc

SEQ ID NO: 39275 - DNA, 16 bp, synthetic construct
  misc_feature 1..16: note = synthetic [barcode part1]
  source 1..16: mol_type = other DNA
gtatacctaccgacag

SEQ ID NO: 39276 - DNA, 16 bp, synthetic construct
  misc_feature 1..16: note = synthetic [barcode part1]
  source 1..16: mol_type = other DNA
atacctgagacagtag

SEQ ID NO: 39277 - DNA, 16 bp, synthetic construct
  misc_feature 1..16: note = synthetic [barcode part1]
  source 1..16: mol_type = other DNA
tacctgtactctgagt

SEQ ID NO: 39278 - DNA, 16 bp, synthetic construct
  misc_feature 1..16: note = synthetic [barcode part1]
  source 1..16: mol_type = other DNA
gtaccaagatctgtgc

SEQ ID NO: 39279 - DNA, 16 bp, synthetic construct
  misc_feature 1..16: note = synthetic [barcode part1]
  source 1..16: mol_type = other DNA
accgtgataggcaggt

SEQ ID NO: 39280 - DNA, 16 bp, synthetic construct
  misc_feature 1..16: note = synthetic [barcode part1]
  source 1..16: mol_type = other DNA
tgaagtcgactctgac

SEQ ID NO: 39281 - DNA, 16 bp, synthetic construct
  misc_feature 1..16: note = synthetic [barcode part1]
  source 1..16: mol_type = other DNA
taggcaccgtgaatct

SEQ ID NO: 39282 - DNA, 16 bp, synthetic construct
  misc_feature 1..16: note = synthetic [barcode part1]
  source 1..16: mol_type = other DNA
acagattcttccggtt

SEQ ID NO: 39283 - DNA, 16 bp, synthetic construct
  misc_feature 1..16: note = synthetic [barcode part1]
  source 1..16: mol_type = other DNA
gcgagaacgattcgac

SEQ ID NO: 39284 - DNA, 16 bp, synthetic construct
  misc_feature 1..16: note = synthetic [barcode part1]
  source 1..16: mol_type = other DNA
aacttccgcgtggtct

SEQ ID NO: 39285 - DNA, 16 bp, synthetic construct
  misc_feature 1..16: note = synthetic [barcode part1]
  source 1..16: mol_type = other DNA
acctgtcctacttacc

SEQ ID NO: 39286 - DNA, 16 bp, synthetic construct
  misc_feature 1..16: note = synthetic [barcode part1]
  source 1..16: mol_type = other DNA
actggtatatcctgtc

SEQ ID NO: 39287 - DNA, 16 bp, synthetic construct
  misc_feature 1..16: note = synthetic [barcode part1]
  source 1..16: mol_type = other DNA
gtacgttatccgaacg

SEQ ID NO: 39288 - DNA, 16 bp, synthetic construct
  misc_feature 1..16: note = synthetic [barcode part1]
  source 1..16: mol_type = other DNA
tcaggcaacaacaagt

SEQ ID NO: 39289 - DNA, 16 bp, synthetic construct
  misc_feature 1..16: note = synthetic [barcode part1]
  source 1..16: mol_type = other DNA
gattggtatcgaccac

SEQ ID NO: 39290 - DNA, 16 bp, synthetic construct
  misc_feature 1..16: note = synthetic [barcode part1]
  source 1..16: mol_type = other DNA
ccacctagatattgtc

SEQ ID NO: 39291 - DNA, 16 bp, synthetic construct
  misc_feature 1..16: note = synthetic [barcode part1]
  source 1..16: mol_type = other DNA
gagtacttccgagtac

SEQ ID NO: 39292 - DNA, 16 bp, synthetic construct
  misc_feature 1..16: note = synthetic [barcode part1]
  source 1..16: mol_type = other DNA
gcgcgattcgattctc

SEQ ID NO: 39293 - DNA, 16 bp, synthetic construct
  misc_feature 1..16: note = synthetic [barcode part1]
  source 1..16: mol_type = other DNA
gtcagagttccaatcg

SEQ ID NO: 39294 - DNA, 16 bp, synthetic construct
  misc_feature 1..16: note = synthetic [barcode part1]
  source 1..16: mol_type = other DNA
gacgaactgttcactg

SEQ ID NO: 39295 - DNA, 16 bp, synthetic construct
  misc_feature 1..16: note = synthetic [barcode part1]
  source 1..16: mol_type = other DNA
aagttgcggacgtgac

SEQ ID NO: 39296 - DNA, 16 bp, synthetic construct
  misc_feature 1..16: note = synthetic [barcode part1]
  source 1..16: mol_type = other DNA
atcacttcaccgtctc

SEQ ID NO: 39297 - DNA, 16 bp, synthetic construct
  misc_feature 1..16: note = synthetic [barcode part1]
  source 1..16: mol_type = other DNA
atatacgcctcctcct

SEQ ID NO: 39298 - DNA, 16 bp, synthetic construct
  misc_feature 1..16: note = synthetic [barcode part1]
  source 1..16: mol_type = other DNA
caccaggagtaatctc

SEQ ID NO: 39299 - DNA, 16 bp, synthetic construct
  misc_feature 1..16: note = synthetic [barcode part1]
  source 1..16: mol_type = other DNA
tatcgcaagaggagag

SEQ ID NO: 39300 - DNA, 16 bp, synthetic construct
  misc_feature 1..16: note = synthetic [barcode part1]
  source 1..16: mol_type = other DNA
ccgatcgcgatattag

SEQ ID NO: 39301 - DNA, 16 bp, synthetic construct
  misc_feature 1..16: note = synthetic [barcode part1]
  source 1..16: mol_type = other DNA
gttacagacaggcgac

SEQ ID NO: 39302 - DNA, 16 bp, synthetic construct
  misc_feature 1..16: note = synthetic [barcode part1]
  source 1..16: mol_type = other DNA
attcggttacacttcg

SEQ ID NO: 39303 - DNA, 16 bp, synthetic construct
  misc_feature 1..16: note = synthetic [barcode part1]
  source 1..16: mol_type = other DNA
gttcgtactaggtacg

SEQ ID NO: 39304 - DNA, 16 bp, synthetic construct
  misc_feature 1..16: note = synthetic [barcode part1]
  source 1..16: mol_type = other DNA
aacgcgagaattgccg

SEQ ID NO: 39305 - DNA, 16 bp, synthetic construct
  misc_feature 1..16: note = synthetic [barcode part1]
  source 1..16: mol_type = other DNA
ttgtcgcgcctacaac

SEQ ID NO: 39306 - DNA, 16 bp, synthetic construct
  misc_feature 1..16: note = synthetic [barcode part1]
  source 1..16: mol_type = other DNA
cctaccagtgtggttc

SEQ ID NO: 39307 - DNA, 16 bp, synthetic construct
  misc_feature 1..16: note = synthetic [barcode part1]
  source 1..16: mol_type = other DNA
cagattcgtgaactcg

SEQ ID NO: 39308 - DNA, 16 bp, synthetic construct
  misc_feature 1..16: note = synthetic [barcode part1]
  source 1..16: mol_type = other DNA
aagtccaacaagacac

SEQ ID NO: 39309 - DNA, 16 bp, synthetic construct
  misc_feature 1..16: note = synthetic [barcode part1]
  source 1..16: mol_type = other DNA
gtctcggtaacactag

SEQ ID NO: 39310 - DNA, 16 bp, synthetic construct
  misc_feature 1..16: note = synthetic [barcode part1]
  source 1..16: mol_type = other DNA
acctgcgatacgattg

SEQ ID NO: 39311 - DNA, 16 bp, synthetic construct
  misc_feature 1..16: note = synthetic [barcode part1]
  source 1..16: mol_type = other DNA
aagaggtccgtgtggt

SEQ ID NO: 39312 - DNA, 16 bp, synthetic construct
  misc_feature 1..16: note = synthetic [barcode part1]
  source 1..16: mol_type = other DNA
aacctacctacttcag

SEQ ID NO: 39313 - DNA, 16 bp, synthetic construct
  misc_feature 1..16: note = synthetic [barcode part1]
  source 1..16: mol_type = other DNA
cagaggactaacttcc

SEQ ID NO: 39314 - DNA, 16 bp, synthetic construct
  misc_feature 1..16: note = synthetic [barcode part1]
  source 1..16: mol_type = other DNA
aaccggcaccaattac

SEQ ID NO: 39315 - DNA, 16 bp, synthetic construct
  misc_feature 1..16: note = synthetic [barcode part1]
  source 1..16: mol_type = other DNA
ttctgagtactgcgag

SEQ ID NO: 39316 - DNA, 16 bp, synthetic construct
  misc_feature 1..16: note = synthetic [barcode part1]
  source 1..16: mol_type = other DNA
ccgcgataattccaag

SEQ ID NO: 39317 - DNA, 16 bp, synthetic construct
  misc_feature 1..16: note = synthetic [barcode part1]
  source 1..16: mol_type = other DNA
gcaacgacagacctag

SEQ ID NO: 39318 - DNA, 16 bp, synthetic construct
  misc_feature 1..16: note = synthetic [barcode part1]
  source 1..16: mol_type = other DNA
gatcgtgtcaactctt

SEQ ID NO: 39319 - DNA, 16 bp, synthetic construct
  misc_feature 1..16: note = synthetic [barcode part1]
  source 1..16: mol_type = other DNA
aaggttcaagtagacc

SEQ ID NO: 39320 - DNA, 16 bp, synthetic construct
  misc_feature 1..16: note = synthetic [barcode part1]
  source 1..16: mol_type = other DNA
agttcttgcgcctgac

SEQ ID NO: 39321 - DNA, 16 bp, synthetic construct
  misc_feature 1..16: note = synthetic [barcode part1]
  source 1..16: mol_type = other DNA
tcttcaacgtgtgatc

SEQ ID NO: 39322 - DNA, 16 bp, synthetic construct
  misc_feature 1..16: note = synthetic [barcode part1]
  source 1..16: mol_type = other DNA
gcgttagtgatctctt

SEQ ID NO: 39323 - DNA, 16 bp, synthetic construct
  misc_feature 1..16: note = synthetic [barcode part1]
  source 1..16: mol_type = other DNA
taagtcgtcctatacc

SEQ ID NO: 39324 - DNA, 16 bp, synthetic construct
  misc_feature 1..16: note = synthetic [barcode part1]
  source 1..16: mol_type = other DNA
tacgtaaccgccgtct

SEQ ID NO: 39325 - DNA, 16 bp, synthetic construct
  misc_feature 1..16: note = synthetic [barcode part1]
  source 1..16: mol_type = other DNA
gtacgtacagtaccac

SEQ ID NO: 39326 - DNA, 16 bp, synthetic construct
  misc_feature 1..16: note = synthetic [barcode part1]
  source 1..16: mol_type = other DNA
tggaaccagtctcagt

SEQ ID NO: 39327 - DNA, 16 bp, synthetic construct
  misc_feature 1..16: note = synthetic [barcode part1]
  source 1..16: mol_type = other DNA
gagagtatcactgagt

SEQ ID NO: 39328 - DNA, 16 bp, synthetic construct
  misc_feature 1..16: note = synthetic [barcode part1]
  source 1..16: mol_type = other DNA
agttaaccgtggcgtt

SEQ ID NO: 39329 - DNA, 16 bp, synthetic construct
  misc_feature 1..16: note = synthetic [barcode part1]
  source 1..16: mol_type = other DNA
tggtctattgtacctg

SEQ ID NO: 39330 - DNA, 16 bp, synthetic construct
  misc_feature 1..16: note = synthetic [barcode part1]
  source 1..16: mol_type = other DNA
gatccttacgcaatct

SEQ ID NO: 39331 - DNA, 16 bp, synthetic construct
  misc_feature 1..16: note = synthetic [barcode part1]
  source 1..16: mol_type = other DNA
gagttgtgagtgtaac

SEQ ID NO: 39332 - DNA, 16 bp, synthetic construct
  misc_feature 1..16: note = synthetic [barcode part1]
  source 1..16: mol_type = other DNA
agaccttgattgaccg

SEQ ID NO: 39333 - DNA, 16 bp, synthetic construct
  misc_feature 1..16: note = synthetic [barcode part1]
  source 1..16: mol_type = other DNA
tctctaacgcaactac

SEQ ID NO: 39334 - DNA, 16 bp, synthetic construct
  misc_feature 1..16: note = synthetic [barcode part1]
  source 1..16: mol_type = other DNA
tagttgcgacggcaag

SEQ ID NO: 39335 - DNA, 16 bp, synthetic construct
  misc_feature 1..16: note = synthetic [barcode part1]
  source 1..16: mol_type = other DNA
ttccttactcgtagag

SEQ ID NO: 39336 - DNA, 16 bp, synthetic construct
  misc_feature 1..16: note = synthetic [barcode part1]
  source 1..16: mol_type = other DNA
gataggcctacttacg

SEQ ID NO: 39337 - DNA, 16 bp, synthetic construct
  misc_feature 1..16: note = synthetic [barcode part1]
  source 1..16: mol_type = other DNA
gcgactgaagatcgac

SEQ ID NO: 39338 - DNA, 16 bp, synthetic construct
  misc_feature 1..16: note = synthetic [barcode part1]
  source 1..16: mol_type = other DNA
tggaggtaacgacctg

SEQ ID NO: 39339 - DNA, 16 bp, synthetic construct
  misc_feature 1..16: note = synthetic [barcode part1]
  source 1..16: mol_type = other DNA
ttgtggttgcacacag

SEQ ID NO: 39340 - DNA, 16 bp, synthetic construct
  misc_feature 1..16: note = synthetic [barcode part1]
  source 1..16: mol_type = other DNA
taggtcggattcgact

SEQ ID NO: 39341 - DNA, 16 bp, synthetic construct
  misc_feature 1..16: note = synthetic [barcode part1]
  source 1..16: mol_type = other DNA
aactcaacacgtcctt

SEQ ID NO: 39342 - DNA, 16 bp, synthetic construct
  misc_feature 1..16: note = synthetic [barcode part1]
  source 1..16: mol_type = other DNA
gcagactgtactcagt

SEQ ID NO: 39343 - DNA, 16 bp, synthetic construct
  misc_feature 1..16: note = synthetic [barcode part1]
  source 1..16: mol_type = other DNA
aggaggcctactactt

SEQ ID NO: 39344 - DNA, 16 bp, synthetic construct
  misc_feature 1..16: note = synthetic [barcode part1]
  source 1..16: mol_type = other DNA
cgtctgttgtcgtgac

SEQ ID NO: 39345 - DNA, 16 bp, synthetic construct
  misc_feature 1..16: note = synthetic [barcode part1]
  source 1..16: mol_type = other DNA
ttagtgactcggtggt

SEQ ID NO: 39346 - DNA, 16 bp, synthetic construct
  misc_feature 1..16: note = synthetic [barcode part1]
  source 1..16: mol_type = other DNA
tctctaacacgcggtc

SEQ ID NO: 39347 - DNA, 16 bp, synthetic construct
  misc_feature 1..16: note = synthetic [barcode part1]
  source 1..16: mol_type = other DNA
gacgtatctaacttcc

SEQ ID NO: 39348 - DNA, 16 bp, synthetic construct
  misc_feature 1..16: note = synthetic [barcode part1]
  source 1..16: mol_type = other DNA
cgcactgtgtgattag

SEQ ID NO: 39349 - DNA, 16 bp, synthetic construct
  misc_feature 1..16: note = synthetic [barcode part1]
  source 1..16: mol_type = other DNA
agtggagtgcaagtcc

SEQ ID NO: 39350 - DNA, 16 bp, synthetic construct
  misc_feature 1..16: note = synthetic [barcode part1]
  source 1..16: mol_type = other DNA
tcgtagttctctctcg

SEQ ID NO: 39351 - DNA, 16 bp, synthetic construct
  misc_feature 1..16: note = synthetic [barcode part1]
  source 1..16: mol_type = other DNA
cctcgttcaggtgttg

SEQ ID NO: 39352 - DNA, 16 bp, synthetic construct
  misc_feature 1..16: note = synthetic [barcode part1]
  source 1..16: mol_type = other DNA
accgagtgccttcgtt

SEQ ID NO: 39353 - DNA, 16 bp, synthetic construct
  misc_feature 1..16: note = synthetic [barcode part1]
  source 1..16: mol_type = other DNA
cactgaacctatactc

SEQ ID NO: 39354 - DNA, 16 bp, synthetic construct
  misc_feature 1..16: note = synthetic [barcode part1]
  source 1..16: mol_type = other DNA
tctggcgttcagtaag

SEQ ID NO: 39355 - DNA, 16 bp, synthetic construct
  misc_feature 1..16: note = synthetic [barcode part1]
  source 1..16: mol_type = other DNA
gttggtatcgcgtaac

SEQ ID NO: 39356 - DNA, 16 bp, synthetic construct
  misc_feature 1..16: note = synthetic [barcode part1]
  source 1..16: mol_type = other DNA
aatctaggccgttggt

SEQ ID NO: 39357 - DNA, 16 bp, synthetic construct
  misc_feature 1..16: note = synthetic [barcode part1]
  source 1..16: mol_type = other DNA
gcgcaatccagtctct

SEQ ID NO: 39358 - DNA, 16 bp, synthetic construct
  misc_feature 1..16: note = synthetic [barcode part1]
  source 1..16: mol_type = other DNA
accaaggaggactaag

SEQ ID NO: 39359 - DNA, 16 bp, synthetic construct
  misc_feature 1..16: note = synthetic [barcode part1]
  source 1..16: mol_type = other DNA
acaattactcctcgac

SEQ ID NO: 39360 - DNA, 16 bp, synthetic construct
  misc_feature 1..16: note = synthetic [barcode part1]
  source 1..16: mol_type = other DNA
ttgcgttggactactt

SEQ ID NO: 39361 - DNA, 16 bp, synthetic construct
  misc_feature 1..16: note = synthetic [barcode part1]
  source 1..16: mol_type = other DNA
tcacacctactcttgc

SEQ ID NO: 39362 - DNA, 16 bp, synthetic construct
  misc_feature 1..16: note = synthetic [barcode part1]
  source 1..16: mol_type = other DNA
cacagataagtaacgc

SEQ ID NO: 39363 - DNA, 16 bp, synthetic construct
  misc_feature 1..16: note = synthetic [barcode part1]
  source 1..16: mol_type = other DNA
cgagtcaagtctggtt

SEQ ID NO: 39364 - DNA, 16 bp, synthetic construct
  misc_feature 1..16: note = synthetic [barcode part1]
  source 1..16: mol_type = other DNA
tagtcgacacacgtac

SEQ ID NO: 39365 - DNA, 16 bp, synthetic construct
  misc_feature 1..16: note = synthetic [barcode part1]
  source 1..16: mol_type = other DNA
ttcgccaactatctcc

SEQ ID NO: 39366 - DNA, 16 bp, synthetic construct
  misc_feature 1..16: note = synthetic [barcode part1]
  source 1..16: mol_type = other DNA
tcggcacactaatacg

SEQ ID NO: 39367 - DNA, 16 bp, synthetic construct
  misc_feature 1..16: note = synthetic [barcode part1]
  source 1..16: mol_type = other DNA
gatacaagaattgccg

SEQ ID NO: 39368 - DNA, 16 bp, synthetic construct
  misc_feature 1..16: note = synthetic [barcode part1]
  source 1..16: mol_type = other DNA
gtgttagtcctcgacc

SEQ ID NO: 39369 - DNA, 16 bp, synthetic construct
  misc_feature 1..16: note = synthetic [barcode part1]
  source 1..16: mol_type = other DNA
tcacttgttcgtccgt

SEQ ID NO: 39370 - DNA, 16 bp, synthetic construct
  misc_feature 1..16: note = synthetic [barcode part1]
  source 1..16: mol_type = other DNA
gatatcggtcaactgc

SEQ ID NO: 39371 - DNA, 16 bp, synthetic construct
  misc_feature 1..16: note = synthetic [barcode part1]
  source 1..16: mol_type = other DNA
tacgtggtaagaggtt

SEQ ID NO: 39372 - DNA, 16 bp, synthetic construct
  misc_feature 1..16: note = synthetic [barcode part1]
  source 1..16: mol_type = other DNA
acacggagaattgccg

SEQ ID NO: 39373 - DNA, 16 bp, synthetic construct
  misc_feature 1..16: note = synthetic [barcode part1]
  source 1..16: mol_type = other DNA
gacacagattcggcag

SEQ ID NO: 39374 - DNA, 16 bp, synthetic construct
  misc_feature 1..16: note = synthetic [barcode part1]
  source 1..16: mol_type = other DNA
tgtcagtgttggtgtg

SEQ ID NO: 39375 - DNA, 16 bp, synthetic construct
  misc_feature 1..16: note = synthetic [barcode part1]
  source 1..16: mol_type = other DNA
tctcagattactcacg

SEQ ID NO: 39376 - DNA, 16 bp, synthetic construct
  misc_feature 1..16: note = synthetic [barcode part1]
  source 1..16: mol_type = other DNA
cgtgcagactcttcac

SEQ ID NO: 39377 - DNA, 16 bp, synthetic construct
  misc_feature 1..16: note = synthetic [barcode part1]
  source 1..16: mol_type = other DNA
gcaccacggtaagtag

SEQ ID NO: 39378 - DNA, 16 bp, synthetic construct
  misc_feature 1..16: note = synthetic [barcode part1]
  source 1..16: mol_type = other DNA
cgtgtccgtgaagatt

SEQ ID NO: 39379 - DNA, 16 bp, synthetic construct
  misc_feature 1..16: note = synthetic [barcode part1]
  source 1..16: mol_type = other DNA
actcactgcagtgcct

SEQ ID NO: 39380 - DNA, 16 bp, synthetic construct
  misc_feature 1..16: note = synthetic [barcode part1]
  source 1..16: mol_type = other DNA
aggaattacactggtg

SEQ ID NO: 39381 - DNA, 16 bp, synthetic construct
  misc_feature 1..16: note = synthetic [barcode part1]
  source 1..16: mol_type = other DNA
acgcgtagtcacaact

SEQ ID NO: 39382 - DNA, 16 bp, synthetic construct
  misc_feature 1..16: note = synthetic [barcode part1]
  source 1..16: mol_type = other DNA
tcgattctactggtgt

SEQ ID NO: 39383 - DNA, 16 bp, synthetic construct
  misc_feature 1..16: note = synthetic [barcode part1]
  source 1..16: mol_type = other DNA
ttgtcttgatcacacg

SEQ ID NO: 39384 - DNA, 16 bp, synthetic construct
  misc_feature 1..16: note = synthetic [barcode part1]
  source 1..16: mol_type = other DNA
cgttgccacttagatt

SEQ ID NO: 39385 - DNA, 16 bp, synthetic construct
  misc_feature 1..16: note = synthetic [barcode part1]
  source 1..16: mol_type = other DNA
cgtaacaatccgcctc

SEQ ID NO: 39386 - DNA, 16 bp, synthetic construct
  misc_feature 1..16: note = synthetic [barcode part1]
  source 1..16: mol_type = other DNA
acacggaactcgacag

SEQ ID NO: 39387 - DNA, 16 bp, synthetic construct
  misc_feature 1..16: note = synthetic [barcode part1]
  source 1..16: mol_type = other DNA
atagagttcgcaagtg

SEQ ID NO: 39388 - DNA, 16 bp, synthetic construct
  misc_feature 1..16: note = synthetic [barcode part1]
  source 1..16: mol_type = other DNA
tcaccgcgataagact

SEQ ID NO: 39389 - DNA, 16 bp, synthetic construct
  misc_feature 1..16: note = synthetic [barcode part1]
  source 1..16: mol_type = other DNA
tccaagtgaattggag

SEQ ID NO: 39390 - DNA, 16 bp, synthetic construct
  misc_feature 1..16: note = synthetic [barcode part1]
  source 1..16: mol_type = other DNA
actctccaattcctcg

SEQ ID NO: 39391 - DNA, 16 bp, synthetic construct
  misc_feature 1..16: note = synthetic [barcode part1]
  source 1..16: mol_type = other DNA
acactccagaagtgtc

SEQ ID NO: 39392 - DNA, 16 bp, synthetic construct
  misc_feature 1..16: note = synthetic [barcode part1]
  source 1..16: mol_type = other DNA
tagtcctaccgtgcgt

SEQ ID NO: 39393 - DNA, 16 bp, synthetic construct
  misc_feature 1..16: note = synthetic [barcode part1]
  source 1..16: mol_type = other DNA
gtcgttaccgaactag

SEQ ID NO: 39394 - DNA, 16 bp, synthetic construct
  misc_feature 1..16: note = synthetic [barcode part1]
  source 1..16: mol_type = other DNA
atacagacagactacg

SEQ ID NO: 39395 - DNA, 16 bp, synthetic construct
  misc_feature 1..16: note = synthetic [barcode part1]
  source 1..16: mol_type = other DNA
cctgtctgtaatactg

SEQ ID NO: 39396 - DNA, 16 bp, synthetic construct
  misc_feature 1..16: note = synthetic [barcode part1]
  source 1..16: mol_type = other DNA
tagaacaacggccgtg

SEQ ID NO: 39397 - DNA, 16 bp, synthetic construct
  misc_feature 1..16: note = synthetic [barcode part1]
  source 1..16: mol_type = other DNA
tgcagagatcagaccg

SEQ ID NO: 39398 - DNA, 16 bp, synthetic construct
  misc_feature 1..16: note = synthetic [barcode part1]
  source 1..16: mol_type = other DNA
gagaaccactgtatag

SEQ ID NO: 39399 - DNA, 16 bp, synthetic construct
  misc_feature 1..16: note = synthetic [barcode part1]
  source 1..16: mol_type = other DNA
tattgtccgccaatac

SEQ ID NO: 39400 - DNA, 16 bp, synthetic construct
  misc_feature 1..16: note = synthetic [barcode part1]
  source 1..16: mol_type = other DNA
gatctgtatccacgag

SEQ ID NO: 39401 - DNA, 16 bp, synthetic construct
  misc_feature 1..16: note = synthetic [barcode part1]
  source 1..16: mol_type = other DNA
tgcaacaggcaggtac

SEQ ID NO: 39402 - DNA, 16 bp, synthetic construct
  misc_feature 1..16: note = synthetic [barcode part1]
  source 1..16: mol_type = other DNA
ttggacgtgaacgtct

SEQ ID NO: 39403 - DNA, 16 bp, synthetic construct
  misc_feature 1..16: note = synthetic [barcode part1]
  source 1..16: mol_type = other DNA
tcgtaggccactgtct

SEQ ID NO: 39404 - DNA, 16 bp, synthetic construct
  misc_feature 1..16: note = synthetic [barcode part1]
  source 1..16: mol_type = other DNA
agacagacaccgcagt

SEQ ID NO: 39405 - DNA, 16 bp, synthetic construct
  misc_feature 1..16: note = synthetic [barcode part1]
  source 1..16: mol_type = other DNA
acgatctcgaatcacg

SEQ ID NO: 39406 - DNA, 16 bp, synthetic construct
  misc_feature 1..16: note = synthetic [barcode part1]
  source 1..16: mol_type = other DNA
agacgtctgttgttct

SEQ ID NO: 39407 - DNA, 16 bp, synthetic construct
  misc_feature 1..16: note = synthetic [barcode part1]
  source 1..16: mol_type = other DNA
aagataggacgcctgc

SEQ ID NO: 39408 - DNA, 16 bp, synthetic construct
  misc_feature 1..16: note = synthetic [barcode part1]
  source 1..16: mol_type = other DNA
tgcgtgagacaatagt

SEQ ID NO: 39409 - DNA, 16 bp, synthetic construct
  misc_feature 1..16: note = synthetic [barcode part1]
  source 1..16: mol_type = other DNA
gccacgttgacttctg

SEQ ID NO: 39410 - DNA, 16 bp, synthetic construct
  misc_feature 1..16: note = synthetic [barcode part1]
  source 1..16: mol_type = other DNA
tctcacgtagtctggc

SEQ ID NO: 39411 - DNA, 16 bp, synthetic construct
  misc_feature 1..16: note = synthetic [barcode part1]
  source 1..16: mol_type = other DNA
aacacgtactgacgtc

SEQ ID NO: 39412 - DNA, 16 bp, synthetic construct
  misc_feature 1..16: note = synthetic [barcode part1]
  source 1..16: mol_type = other DNA
gtgagaggtcggattc

SEQ ID NO: 39413 - DNA, 16 bp, synthetic construct
  misc_feature 1..16: note = synthetic [barcode part1]
  source 1..16: mol_type = other DNA
ttctactgaacttgcg

SEQ ID NO: 39414 - DNA, 16 bp, synthetic construct
  misc_feature 1..16: note = synthetic [barcode part1]
  source 1..16: mol_type = other DNA
gactactcctgtattg

SEQ ID NO: 39415 - DNA, 16 bp, synthetic construct
  misc_feature 1..16: note = synthetic [barcode part1]
  source 1..16: mol_type = other DNA
tcgaatcggaatacag

SEQ ID NO: 39416 - DNA, 16 bp, synthetic construct
  misc_feature 1..16: note = synthetic [barcode part1]
  source 1..16: mol_type = other DNA
tgatacgccaatacgc

SEQ ID NO: 39417 - DNA, 16 bp, synthetic construct
  misc_feature 1..16: note = synthetic [barcode part1]
  source 1..16: mol_type = other DNA
cgttgatattgacgcg

SEQ ID NO: 39418 - DNA, 16 bp, synthetic construct
  misc_feature 1..16: note = synthetic [barcode part1]
  source 1..16: mol_type = other DNA
tcttccgaggtgtctg

SEQ ID NO: 39419 - DNA, 16 bp, synthetic construct
  misc_feature 1..16: note = synthetic [barcode part1]
  source 1..16: mol_type = other DNA
agttgtcctgtcagag

SEQ ID NO: 39420 - DNA, 16 bp, synthetic construct
  misc_feature 1..16: note = synthetic [barcode part1]
  source 1..16: mol_type = other DNA
acacacgtaacgtcgt

SEQ ID NO: 39421 - DNA, 16 bp, synthetic construct
  misc_feature 1..16: note = synthetic [barcode part1]
  source 1..16: mol_type = other DNA
tctcagacagaactcg

SEQ ID NO: 39422 - DNA, 16 bp, synthetic construct
  misc_feature 1..16: note = synthetic [barcode part1]
  source 1..16: mol_type = other DNA
tctaggactaaccgac

SEQ ID NO: 39423 - DNA, 16 bp, synthetic construct
  misc_feature 1..16: note = synthetic [barcode part1]
  source 1..16: mol_type = other DNA
gttgacacgtcaacac

SEQ ID NO: 39424 - DNA, 16 bp, synthetic construct
  misc_feature 1..16: note = synthetic [barcode part1]
  source 1..16: mol_type = other DNA
ccgttcgtgtcgtagt

SEQ ID NO: 39425 - DNA, 16 bp, synthetic construct
  misc_feature 1..16: note = synthetic [barcode part1]
  source 1..16: mol_type = other DNA
cagtctcgtgcgttac

SEQ ID NO: 39426 - DNA, 16 bp, synthetic construct
  misc_feature 1..16: note = synthetic [barcode part1]
  source 1..16: mol_type = other DNA
agactgtgttcttgtc

SEQ ID NO: 39427 - DNA, 16 bp, synthetic construct
  misc_feature 1..16: note = synthetic [barcode part1]
  source 1..16: mol_type = other DNA
tagaggattccgacct

SEQ ID NO: 39428 - DNA, 16 bp, synthetic construct
  misc_feature 1..16: note = synthetic [barcode part1]
  source 1..16: mol_type = other DNA
ataactgcgcggttgt

SEQ ID NO: 39429 - DNA, 16 bp, synthetic construct
  misc_feature 1..16: note = synthetic [barcode part1]
  source 1..16: mol_type = other DNA
agtcctcctagtgcac

SEQ ID NO: 39430 - DNA, 16 bp, synthetic construct
  misc_feature 1..16: note = synthetic [barcode part1]
  source 1..16: mol_type = other DNA
gagacgaccacagatc

SEQ ID NO: 39431 - DNA, 16 bp, synthetic construct
  misc_feature 1..16: note = synthetic [barcode part1]
  source 1..16: mol_type = other DNA
tctgacagtcctcacg

SEQ ID NO: 39432 - DNA, 16 bp, synthetic construct
  misc_feature 1..16: note = synthetic [barcode part1]
  source 1..16: mol_type = other DNA
taacggcctagatcgt

SEQ ID NO: 39433 - DNA, 16 bp, synthetic construct
  misc_feature 1..16: note = synthetic [barcode part1]
  source 1..16: mol_type = other DNA
aggtatacaacgatcg

SEQ ID NO: 39434 - DNA, 16 bp, synthetic construct
  misc_feature 1..16: note = synthetic [barcode part1]
  source 1..16: mol_type = other DNA
tctgaggcgtagtgtt

SEQ ID NO: 39435 - DNA, 16 bp, synthetic construct
  misc_feature 1..16: note = synthetic [barcode part1]
  source 1..16: mol_type = other DNA
ttgcgtattctgactg

SEQ ID NO: 39436 - DNA, 16 bp, synthetic construct
  misc_feature 1..16: note = synthetic [barcode part1]
  source 1..16: mol_type = other DNA
tcgtccaacggataac

SEQ ID NO: 39437 - DNA, 16 bp, synthetic construct
  misc_feature 1..16: note = synthetic [barcode part1]
  source 1..16: mol_type = other DNA
tcagtagacgagaatc

SEQ ID NO: 39438 - DNA, 16 bp, synthetic construct
  misc_feature 1..16: note = synthetic [barcode part1]
  source 1..16: mol_type = other DNA
aaggcagactcgcaac

SEQ ID NO: 39439 - DNA, 16 bp, synthetic construct
  misc_feature 1..16: note = synthetic [barcode part1]
  source 1..16: mol_type = other DNA
gtgacagtactggcag

SEQ ID NO: 39440 - DNA, 16 bp, synthetic construct
  misc_feature 1..16: note = synthetic [barcode part1]
  source 1..16: mol_type = other DNA
cgtcagacttatacct

SEQ ID NO: 39441 - DNA, 16 bp, synthetic construct
  misc_feature 1..16: note = synthetic [barcode part1]
  source 1..16: mol_type = other DNA
tctcacctaggtattg

SEQ ID NO: 39442 - DNA, 16 bp, synthetic construct
  misc_feature 1..16: note = synthetic [barcode part1]
  source 1..16: mol_type = other DNA
cctctaggttgacacc

SEQ ID NO: 39443 - DNA, 16 bp, synthetic construct
  misc_feature 1..16: note = synthetic [barcode part1]
  source 1..16: mol_type = other DNA
gtgacgaaggtactcg

SEQ ID NO: 39444 - DNA, 16 bp, synthetic construct
  misc_feature 1..16: note = synthetic [barcode part1]
  source 1..16: mol_type = other DNA
caatcctggaactggt

SEQ ID NO: 39445 - DNA, 16 bp, synthetic construct
  misc_feature 1..16: note = synthetic [barcode part1]
  source 1..16: mol_type = other DNA
gtgtctacctggatag

SEQ ID NO: 39446 - DNA, 16 bp, synthetic construct
  misc_feature 1..16: note = synthetic [barcode part1]
  source 1..16: mol_type = other DNA
gaacttgcactaacgc

SEQ ID NO: 39447 - DNA, 16 bp, synthetic construct
  misc_feature 1..16: note = synthetic [barcode part1]
  source 1..16: mol_type = other DNA
ccactactgtccagac

SEQ ID NO: 39448 - DNA, 16 bp, synthetic construct
  misc_feature 1..16: note = synthetic [barcode part1]
  source 1..16: mol_type = other DNA
agaaggagagaaggag

SEQ ID NO: 39449 - DNA, 16 bp, synthetic construct
  misc_feature 1..16: note = synthetic [barcode part1]
  source 1..16: mol_type = other DNA
agatcacactcagtgc

SEQ ID NO: 39450 - DNA, 16 bp, synthetic construct
  misc_feature 1..16: note = synthetic [barcode part1]
  source 1..16: mol_type = other DNA
atctcaccactaacgt

SEQ ID NO: 39451 - DNA, 16 bp, synthetic construct
  misc_feature 1..16: note = synthetic [barcode part1]
  source 1..16: mol_type = other DNA
atcagtgtatcgacgc

SEQ ID NO: 39452 - DNA, 16 bp, synthetic construct
  misc_feature 1..16: note = synthetic [barcode part1]
  source 1..16: mol_type = other DNA
aaccttcaggacggtt

SEQ ID NO: 39453 - DNA, 16 bp, synthetic construct
  misc_feature 1..16: note = synthetic [barcode part1]
  source 1..16: mol_type = other DNA
gattcgatcttgtgtc

SEQ ID NO: 39454 - DNA, 16 bp, synthetic construct
  misc_feature 1..16: note = synthetic [barcode part1]
  source 1..16: mol_type = other DNA
taaccaacggccaact

SEQ ID NO: 39455 - DNA, 16 bp, synthetic construct
  misc_feature 1..16: note = synthetic [barcode part1]
  source 1..16: mol_type = other DNA
acgccagttgaatacc

SEQ ID NO: 39456 - DNA, 16 bp, synthetic construct
  misc_feature 1..16: note = synthetic [barcode part1]
  source 1..16: mol_type = other DNA
taggtcacgatctgac

SEQ ID NO: 39457 - DNA, 16 bp, synthetic construct
  misc_feature 1..16: note = synthetic [barcode part1]
  source 1..16: mol_type = other DNA
ttcgagtgtgatcacg

SEQ ID NO: 39458 - DNA, 16 bp, synthetic construct
  misc_feature 1..16: note = synthetic [barcode part1]
  source 1..16: mol_type = other DNA
cctggttcgattacgc

SEQ ID NO: 39459 - DNA, 16 bp, synthetic construct
  misc_feature 1..16: note = synthetic [barcode part1]
  source 1..16: mol_type = other DNA
tctgcggtctactgtg

SEQ ID NO: 39460 - DNA, 16 bp, synthetic construct
  misc_feature 1..16: note = synthetic [barcode part1]
  source 1..16: mol_type = other DNA
tcacaggtctggtcct

SEQ ID NO: 39461 - DNA, 16 bp, synthetic construct
  misc_feature 1..16: note = synthetic [barcode part1]
  source 1..16: mol_type = other DNA
caaggactctgtgttg

SEQ ID NO: 39462 - DNA, 16 bp, synthetic construct
  misc_feature 1..16: note = synthetic [barcode part1]
  source 1..16: mol_type = other DNA
cctgttggtgtggttc

SEQ ID NO: 39463 - DNA, 16 bp, synthetic construct
  misc_feature 1..16: note = synthetic [barcode part1]
  source 1..16: mol_type = other DNA
gaatcgcgccttcgtt

SEQ ID NO: 39464 - DNA, 16 bp, synthetic construct
  misc_feature 1..16: note = synthetic [barcode part1]
  source 1..16: mol_type = other DNA
aagacgaggattcgtt

SEQ ID NO: 39465 - DNA, 16 bp, synthetic construct
  misc_feature 1..16: note = synthetic [barcode part1]
  source 1..16: mol_type = other DNA
cgcctagtacgttaag

SEQ ID NO: 39466 - DNA, 16 bp, synthetic construct
  misc_feature 1..16: note = synthetic [barcode part1]
  source 1..16: mol_type = other DNA
ttctaaccacgaatcc

SEQ ID NO: 39467 - DNA, 16 bp, synthetic construct
  misc_feature 1..16: note = synthetic [barcode part1]
  source 1..16: mol_type = other DNA
caggattgagaaggac

SEQ ID NO: 39468 - DNA, 16 bp, synthetic construct
  misc_feature 1..16: note = synthetic [barcode part1]
  source 1..16: mol_type = other DNA
cactacaccagaactg

SEQ ID NO: 39469 - DNA, 16 bp, synthetic construct
  misc_feature 1..16: note = synthetic [barcode part1]
  source 1..16: mol_type = other DNA
tccagtaatagaggtg

SEQ ID NO: 39470 - DNA, 16 bp, synthetic construct
  misc_feature 1..16: note = synthetic [barcode part1]
  source 1..16: mol_type = other DNA
gtatacacacgcgtgt

SEQ ID NO: 39471 - DNA, 16 bp, synthetic construct
  misc_feature 1..16: note = synthetic [barcode part1]
  source 1..16: mol_type = other DNA
aataatcgcgttcctc

SEQ ID NO: 39472 - DNA, 16 bp, synthetic construct
  misc_feature 1..16: note = synthetic [barcode part1]
  source 1..16: mol_type = other DNA
acagaagactagacct

SEQ ID NO: 39473 - DNA, 16 bp, synthetic construct
  misc_feature 1..16: note = synthetic [barcode part1]
  source 1..16: mol_type = other DNA
cgactgagactgatct

SEQ ID NO: 39474 - DNA, 16 bp, synthetic construct
  misc_feature 1..16: note = synthetic [barcode part1]
  source 1..16: mol_type = other DNA
gatcggattgcgcaag

SEQ ID NO: 39475 - DNA, 16 bp, synthetic construct
  misc_feature 1..16: note = synthetic [barcode part1]
  source 1..16: mol_type = other DNA
gagaataatctgacgc

SEQ ID NO: 39476 - DNA, 16 bp, synthetic construct
  misc_feature 1..16: note = synthetic [barcode part1]
  source 1..16: mol_type = other DNA
agaaggactaaggtcg

SEQ ID NO: 39477 - DNA, 16 bp, synthetic construct
  misc_feature 1..16: note = synthetic [barcode part1]
  source 1..16: mol_type = other DNA
ttgagatcactcgtct

SEQ ID NO: 39478 - DNA, 16 bp, synthetic construct
  misc_feature 1..16: note = synthetic [barcode part1]
  source 1..16: mol_type = other DNA
tcacttacaccgcgac

SEQ ID NO: 39479 - DNA, 16 bp, synthetic construct
  misc_feature 1..16: note = synthetic [barcode part1]
  source 1..16: mol_type = other DNA
actctatacagttgcc

SEQ ID NO: 39480 - DNA, 16 bp, synthetic construct
  misc_feature 1..16: note = synthetic [barcode part1]
  source 1..16: mol_type = other DNA
cggttccgcactagtt

SEQ ID NO: 39481 - DNA, 16 bp, synthetic construct
  misc_feature 1..16: note = synthetic [barcode part1]
  source 1..16: mol_type = other DNA
cagagttgtcgatcac

SEQ ID NO: 39482 - DNA, 16 bp, synthetic construct
  misc_feature 1..16: note = synthetic [barcode part1]
  source 1..16: mol_type = other DNA
acggtgcagttaatcc

SEQ ID NO: 39483 - DNA, 16 bp, synthetic construct
  misc_feature 1..16: note = synthetic [barcode part1]
  source 1..16: mol_type = other DNA
atacaacggagtcagt

SEQ ID NO: 39484 - DNA, 16 bp, synthetic construct
  misc_feature 1..16: note = synthetic [barcode part1]
  source 1..16: mol_type = other DNA
gactgactcttgaggt

SEQ ID NO: 39485 - DNA, 16 bp, synthetic construct
  misc_feature 1..16: note = synthetic [barcode part1]
  source 1..16: mol_type = other DNA
gtctcaccttgtggac

SEQ ID NO: 39486 - DNA, 16 bp, synthetic construct
  misc_feature 1..16: note = synthetic [barcode part1]
  source 1..16: mol_type = other DNA
cgttgtacttcggaag

SEQ ID NO: 39487 - DNA, 16 bp, synthetic construct
  misc_feature 1..16: note = synthetic [barcode part1]
  source 1..16: mol_type = other DNA
gtgtggaacttagtag

SEQ ID NO: 39488 - DNA, 16 bp, synthetic construct
  misc_feature 1..16: note = synthetic [barcode part1]
  source 1..16: mol_type = other DNA
attggaagttagtgcg

SEQ ID NO: 39489 - DNA, 16 bp, synthetic construct
  misc_feature 1..16: note = synthetic [barcode part1]
  source 1..16: mol_type = other DNA
gttaacggcaagatac

SEQ ID NO: 39490 - DNA, 16 bp, synthetic construct
  misc_feature 1..16: note = synthetic [barcode part1]
  source 1..16: mol_type = other DNA
gcgagtcactgagaac

SEQ ID NO: 39491 - DNA, 16 bp, synthetic construct
  misc_feature 1..16: note = synthetic [barcode part1]
  source 1..16: mol_type = other DNA
acgactgcctcgatct

SEQ ID NO: 39492 - DNA, 16 bp, synthetic construct
  misc_feature 1..16: note = synthetic [barcode part1]
  source 1..16: mol_type = other DNA
ataacgccgcaatacc

SEQ ID NO: 39493 - DNA, 16 bp, synthetic construct
  misc_feature 1..16: note = synthetic [barcode part1]
  source 1..16: mol_type = other DNA
tacctacgcgatactt

SEQ ID NO: 39494 - DNA, 16 bp, synthetic construct
  misc_feature 1..16: note = synthetic [barcode part1]
  source 1..16: mol_type = other DNA
gttcaggaacaaggtt

SEQ ID NO: 39495 - DNA, 16 bp, synthetic construct
  misc_feature 1..16: note = synthetic [barcode part1]
  source 1..16: mol_type = other DNA
aagaacagtggaggtc

SEQ ID NO: 39496 - DNA, 16 bp, synthetic construct
  misc_feature 1..16: note = synthetic [barcode part1]
  source 1..16: mol_type = other DNA
gaacttggtaaggtac

SEQ ID NO: 39497 - DNA, 16 bp, synthetic construct
  misc_feature 1..16: note = synthetic [barcode part1]
  source 1..16: mol_type = other DNA
acagaaggttaccagt

SEQ ID NO: 39498 - DNA, 16 bp, synthetic construct
  misc_feature 1..16: note = synthetic [barcode part1]
  source 1..16: mol_type = other DNA
ataattgtccttcggc

SEQ ID NO: 39499 - DNA, 16 bp, synthetic construct
  misc_feature 1..16: note = synthetic [barcode part1]
  source 1..16: mol_type = other DNA
atcttctgtcacgtag

SEQ ID NO: 39500 - DNA, 16 bp, synthetic construct
  misc_feature 1..16: note = synthetic [barcode part1]
  source 1..16: mol_type = other DNA
cctgtataatccggtt

SEQ ID NO: 39501 - DNA, 16 bp, synthetic construct
  misc_feature 1..16: note = synthetic [barcode part1]
  source 1..16: mol_type = other DNA
caggtgtgaggtggtt

SEQ ID NO: 39502 - DNA, 16 bp, synthetic construct
  misc_feature 1..16: note = synthetic [barcode part1]
  source 1..16: mol_type = other DNA
cagaatccacgtgtac

SEQ ID NO: 39503 - DNA, 16 bp, synthetic construct
  misc_feature 1..16: note = synthetic [barcode part1]
  source 1..16: mol_type = other DNA
gagatccgataagtgt

SEQ ID NO: 39504 - DNA, 16 bp, synthetic construct
  misc_feature 1..16: note = synthetic [barcode part1]
  source 1..16: mol_type = other DNA
tcggaatctgtccacc

SEQ ID NO: 39505 - DNA, 16 bp, synthetic construct
  misc_feature 1..16: note = synthetic [barcode part1]
  source 1..16: mol_type = other DNA
tcagtactcttccaag

SEQ ID NO: 39506 - DNA, 16 bp, synthetic construct
  misc_feature 1..16: note = synthetic [barcode part1]
  source 1..16: mol_type = other DNA
cacaacaaccttggac

SEQ ID NO: 39507 - DNA, 16 bp, synthetic construct
  misc_feature 1..16: note = synthetic [barcode part1]
  source 1..16: mol_type = other DNA
cgtgttctagattacc

SEQ ID NO: 39508 - DNA, 16 bp, synthetic construct
  misc_feature 1..16: note = synthetic [barcode part1]
  source 1..16: mol_type = other DNA
gcaatcaacgcactac

SEQ ID NO: 39509 - DNA, 16 bp, synthetic construct
  misc_feature 1..16: note = synthetic [barcode part1]
  source 1..16: mol_type = other DNA
cacaggaggtctaacg

SEQ ID NO: 39510 - DNA, 16 bp, synthetic construct
  misc_feature 1..16: note = synthetic [barcode part1]
  source 1..16: mol_type = other DNA
gcgtaagacctggtag

SEQ ID NO: 39511 - DNA, 16 bp, synthetic construct
  misc_feature 1..16: note = synthetic [barcode part1]
  source 1..16: mol_type = other DNA
cacagatcctattacc

SEQ ID NO: 39512 - DNA, 16 bp, synthetic construct
  misc_feature 1..16: note = synthetic [barcode part1]
  source 1..16: mol_type = other DNA
gcgactggaggttaac

SEQ ID NO: 39513 - DNA, 16 bp, synthetic construct
  misc_feature 1..16: note = synthetic [barcode part1]
  source 1..16: mol_type = other DNA
taacctgaggtgcgag

SEQ ID NO: 39514 - DNA, 16 bp, synthetic construct
  misc_feature 1..16: note = synthetic [barcode part1]
  source 1..16: mol_type = other DNA
tcttaactcggtgtac

SEQ ID NO: 39515 - DNA, 16 bp, synthetic construct
  misc_feature 1..16: note = synthetic [barcode part1]
  source 1..16: mol_type = other DNA
gtctactacaggcagt

SEQ ID NO: 39516 - DNA, 16 bp, synthetic construct
  misc_feature 1..16: note = synthetic [barcode part1]
  source 1..16: mol_type = other DNA
ttattagacgcctctg

SEQ ID NO: 39517 - DNA, 16 bp, synthetic construct
  misc_feature 1..16: note = synthetic [barcode part1]
  source 1..16: mol_type = other DNA
tccagaaggttgatcc

SEQ ID NO: 39518 - DNA, 16 bp, synthetic construct
  misc_feature 1..16: note = synthetic [barcode part1]
  source 1..16: mol_type = other DNA
tgttacctaccggcgt

SEQ ID NO: 39519 - DNA, 16 bp, synthetic construct
  misc_feature 1..16: note = synthetic [barcode part1]
  source 1..16: mol_type = other DNA
tggagacgtagaagtg

SEQ ID NO: 39520 - DNA, 16 bp, synthetic construct
  misc_feature 1..16: note = synthetic [barcode part1]
  source 1..16: mol_type = other DNA
gcaagactgttactcg

SEQ ID NO: 39521 - DNA, 16 bp, synthetic construct
  misc_feature 1..16: note = synthetic [barcode part1]
  source 1..16: mol_type = other DNA
ccgagattgtcgtagt

SEQ ID NO: 39522 - DNA, 16 bp, synthetic construct
  misc_feature 1..16: note = synthetic [barcode part1]
  source 1..16: mol_type = other DNA
gtgtaggcctgtattg

SEQ ID NO: 39523 - DNA, 16 bp, synthetic construct
  misc_feature 1..16: note = synthetic [barcode part1]
  source 1..16: mol_type = other DNA
tgttgagtggagatac

SEQ ID NO: 39524 - DNA, 16 bp, synthetic construct
  misc_feature 1..16: note = synthetic [barcode part1]
  source 1..16: mol_type = other DNA
aacgtctctgttgccg

SEQ ID NO: 39525 - DNA, 16 bp, synthetic construct
  misc_feature 1..16: note = synthetic [barcode part1]
  source 1..16: mol_type = other DNA
agatagacgttgtgac

SEQ ID NO: 39526 - DNA, 16 bp, synthetic construct
  misc_feature 1..16: note = synthetic [barcode part1]
  source 1..16: mol_type = other DNA
tgactgaacgtcgtac

SEQ ID NO: 39527 - DNA, 16 bp, synthetic construct
  misc_feature 1..16: note = synthetic [barcode part1]
  source 1..16: mol_type = other DNA
atcagtctcagaaccg

SEQ ID NO: 39528 - DNA, 16 bp, synthetic construct
  misc_feature 1..16: note = synthetic [barcode part1]
  source 1..16: mol_type = other DNA
gtgcgtctctaacctg

SEQ ID NO: 39529 - DNA, 16 bp, synthetic construct
  misc_feature 1..16: note = synthetic [barcode part1]
  source 1..16: mol_type = other DNA
tatcggacactggatc

SEQ ID NO: 39530 - DNA, 16 bp, synthetic construct
  misc_feature 1..16: note = synthetic [barcode part1]
  source 1..16: mol_type = other DNA
ttcctgaggagttggt

SEQ ID NO: 39531 - DNA, 16 bp, synthetic construct
  misc_feature 1..16: note = synthetic [barcode part1]
  source 1..16: mol_type = other DNA
gtcacaggccttaagt

SEQ ID NO: 39532 - DNA, 16 bp, synthetic construct
  misc_feature 1..16: note = synthetic [barcode part1]
  source 1..16: mol_type = other DNA
ttggtacactggtacg

SEQ ID NO: 39533 - DNA, 16 bp, synthetic construct
  misc_feature 1..16: note = synthetic [barcode part1]
  source 1..16: mol_type = other DNA
tgaacggaagtgagtg

SEQ ID NO: 39534 - DNA, 16 bp, synthetic construct
  misc_feature 1..16: note = synthetic [barcode part1]
  source 1..16: mol_type = other DNA
actctaggttggtcag

SEQ ID NO: 39535 - DNA, 16 bp, synthetic construct
  misc_feature 1..16: note = synthetic [barcode part1]
  source 1..16: mol_type = other DNA
acgtggagtagaagtg

SEQ ID NO: 39536 - DNA, 16 bp, synthetic construct
  misc_feature 1..16: note = synthetic [barcode part1]
  source 1..16: mol_type = other DNA
caatcaggtcagttgc

SEQ ID NO: 39537 - DNA, 16 bp, synthetic construct
  misc_feature 1..16: note = synthetic [barcode part1]
  source 1..16: mol_type = other DNA
tgactcactgtattcg

SEQ ID NO: 39538 - DNA, 16 bp, synthetic construct
  misc_feature 1..16: note = synthetic [barcode part1]
  source 1..16: mol_type = other DNA
cctcgcagtcgaatct

SEQ ID NO: 39539 - DNA, 16 bp, synthetic construct
  misc_feature 1..16: note = synthetic [barcode part1]
  source 1..16: mol_type = other DNA
acctagataagacgac

SEQ ID NO: 39540 - DNA, 16 bp, synthetic construct
  misc_feature 1..16: note = synthetic [barcode part1]
  source 1..16: mol_type = other DNA
aattctcaccggagac

SEQ ID NO: 39541 - DNA, 16 bp, synthetic construct
  misc_feature 1..16: note = synthetic [barcode part1]
  source 1..16: mol_type = other DNA
actccactaggttcgc

SEQ ID NO: 39542 - DNA, 16 bp, synthetic construct
  misc_feature 1..16: note = synthetic [barcode part1]
  source 1..16: mol_type = other DNA
tgtctgttctgaggtt

SEQ ID NO: 39543 - DNA, 16 bp, synthetic construct
  misc_feature 1..16: note = synthetic [barcode part1]
  source 1..16: mol_type = other DNA
gcacaactgacacact

SEQ ID NO: 39544 - DNA, 16 bp, synthetic construct
  misc_feature 1..16: note = synthetic [barcode part1]
  source 1..16: mol_type = other DNA
tagacactgtggatcc

SEQ ID NO: 39545 - DNA, 16 bp, synthetic construct
  misc_feature 1..16: note = synthetic [barcode part1]
  source 1..16: mol_type = other DNA
caatcagtcaggatcc

SEQ ID NO: 39546 - DNA, 16 bp, synthetic construct
  misc_feature 1..16: note = synthetic [barcode part1]
  source 1..16: mol_type = other DNA
cggtagtagaggcact

SEQ ID NO: 39547 - DNA, 16 bp, synthetic construct
  misc_feature 1..16: note = synthetic [barcode part1]
  source 1..16: mol_type = other DNA
tgtcttacaaggcgac

SEQ ID NO: 39548 - DNA, 16 bp, synthetic construct
  misc_feature 1..16: note = synthetic [barcode part1]
  source 1..16: mol_type = other DNA
tcgtgtctccaataac

SEQ ID NO: 39549 - DNA, 16 bp, synthetic construct
  misc_feature 1..16: note = synthetic [barcode part1]
  source 1..16: mol_type = other DNA
ttacaccggcggttct

SEQ ID NO: 39550 - DNA, 16 bp, synthetic construct
  misc_feature 1..16: note = synthetic [barcode part1]
  source 1..16: mol_type = other DNA
gcaaggaatactcctc

SEQ ID NO: 39551 - DNA, 16 bp, synthetic construct
  misc_feature 1..16: note = synthetic [barcode part1]
  source 1..16: mol_type = other DNA
gtggaggattagactt

SEQ ID NO: 39552 - DNA, 16 bp, synthetic construct
  misc_feature 1..16: note = synthetic [barcode part1]
  source 1..16: mol_type = other DNA
tctgtccgagtctcag

SEQ ID NO: 39553 - DNA, 16 bp, synthetic construct
  misc_feature 1..16: note = synthetic [barcode part1]
  source 1..16: mol_type = other DNA
acacgaggtaagaacg

SEQ ID NO: 39554 - DNA, 16 bp, synthetic construct
  misc_feature 1..16: note = synthetic [barcode part1]
  source 1..16: mol_type = other DNA
cctggtgttatcgaag

SEQ ID NO: 39555 - DNA, 16 bp, synthetic construct
  misc_feature 1..16: note = synthetic [barcode part1]
  source 1..16: mol_type = other DNA
aggaccagtacggttg

SEQ ID NO: 39556 - DNA, 16 bp, synthetic construct
  misc_feature 1..16: note = synthetic [barcode part1]
  source 1..16: mol_type = other DNA
ttataaccacgcgcag

SEQ ID NO: 39557 - DNA, 16 bp, synthetic construct
  misc_feature 1..16: note = synthetic [barcode part1]
  source 1..16: mol_type = other DNA
cgttggaacgaagatt

SEQ ID NO: 39558 - DNA, 16 bp, synthetic construct
  misc_feature 1..16: note = synthetic [barcode part1]
  source 1..16: mol_type = other DNA
gttgttggacttgacg

SEQ ID NO: 39559 - DNA, 16 bp, synthetic construct
  misc_feature 1..16: note = synthetic [barcode part1]
  source 1..16: mol_type = other DNA
tgtcacctacttcacc

SEQ ID NO: 39560 - DNA, 16 bp, synthetic construct
  misc_feature 1..16: note = synthetic [barcode part1]
  source 1..16: mol_type = other DNA
gatatcgtggttggtc

SEQ ID NO: 39561 - DNA, 16 bp, synthetic construct
  misc_feature 1..16: note = synthetic [barcode part1]
  source 1..16: mol_type = other DNA
tagttgccggaaggtg

SEQ ID NO: 39562 - DNA, 16 bp, synthetic construct
  misc_feature 1..16: note = synthetic [barcode part1]
  source 1..16: mol_type = other DNA
ttctcgagtactgact

SEQ ID NO: 39563 - DNA, 16 bp, synthetic construct
  misc_feature 1..16: note = synthetic [barcode part1]
  source 1..16: mol_type = other DNA
agactctgaccaatcg

SEQ ID NO: 39564 - DNA, 16 bp, synthetic construct
  misc_feature 1..16: note = synthetic [barcode part1]
  source 1..16: mol_type = other DNA
tctgaggtacggtgtt

SEQ ID NO: 39565 - DNA, 16 bp, synthetic construct
  misc_feature 1..16: note = synthetic [barcode part1]
  source 1..16: mol_type = other DNA
caatccacgttaggtg

SEQ ID NO: 39566 - DNA, 16 bp, synthetic construct
  misc_feature 1..16: note = synthetic [barcode part1]
  source 1..16: mol_type = other DNA
gcaggtaatcttgaag

SEQ ID NO: 39567 - DNA, 16 bp, synthetic construct
  misc_feature 1..16: note = synthetic [barcode part1]
  source 1..16: mol_type = other DNA
tagtgcgccagatact

SEQ ID NO: 39568 - DNA, 16 bp, synthetic construct
  misc_feature 1..16: note = synthetic [barcode part1]
  source 1..16: mol_type = other DNA
cagattcgtccacaag

SEQ ID NO: 39569 - DNA, 16 bp, synthetic construct
  misc_feature 1..16: note = synthetic [barcode part1]
  source 1..16: mol_type = other DNA
tacacactgcagtacg

SEQ ID NO: 39570 - DNA, 16 bp, synthetic construct
  misc_feature 1..16: note = synthetic [barcode part1]
  source 1..16: mol_type = other DNA
actctcggacagttcc

SEQ ID NO: 39571 - DNA, 16 bp, synthetic construct
  misc_feature 1..16: note = synthetic [barcode part1]
  source 1..16: mol_type = other DNA
cctgccagagatagtt

SEQ ID NO: 39572 - DNA, 16 bp, synthetic construct
  misc_feature 1..16: note = synthetic [barcode part1]
  source 1..16: mol_type = other DNA
gtggtcacacacaact

SEQ ID NO: 39573 - DNA, 16 bp, synthetic construct
  misc_feature 1..16: note = synthetic [barcode part1]
  source 1..16: mol_type = other DNA
tgatcttcgtacagtc

SEQ ID NO: 39574 - DNA, 16 bp, synthetic construct
  misc_feature 1..16: note = synthetic [barcode part1]
  source 1..16: mol_type = other DNA
acggttgccggttctt

SEQ ID NO: 39575 - DNA, 16 bp, synthetic construct
  misc_feature 1..16: note = synthetic [barcode part1]
  source 1..16: mol_type = other DNA
gataaggtgcggacct

SEQ ID NO: 39576 - DNA, 16 bp, synthetic construct
  misc_feature 1..16: note = synthetic [barcode part1]
  source 1..16: mol_type = other DNA
atcaacgttcacaggc

SEQ ID NO: 39577 - DNA, 16 bp, synthetic construct
  misc_feature 1..16: note = synthetic [barcode part1]
  source 1..16: mol_type = other DNA
agtgccaatacgcgtt

SEQ ID NO: 39578 - DNA, 16 bp, synthetic construct
  misc_feature 1..16: note = synthetic [barcode part1]
  source 1..16: mol_type = other DNA
attggaactctgaccg

SEQ ID NO: 39579 - DNA, 16 bp, synthetic construct
  misc_feature 1..16: note = synthetic [barcode part1]
  source 1..16: mol_type = other DNA
agtagtcctagtggtc

SEQ ID NO: 39580 - DNA, 16 bp, synthetic construct
  misc_feature 1..16: note = synthetic [barcode part1]
  source 1..16: mol_type = other DNA
cgaatacttcctggcc

SEQ ID NO: 39581 - DNA, 16 bp, synthetic construct
  misc_feature 1..16: note = synthetic [barcode part1]
  source 1..16: mol_type = other DNA
gtaggttaaccgtacc

SEQ ID NO: 39582 - DNA, 16 bp, synthetic construct
  misc_feature 1..16: note = synthetic [barcode part1]
  source 1..16: mol_type = other DNA
gacagtcagaacgcgt

SEQ ID NO: 39583 - DNA, 16 bp, synthetic construct
  misc_feature 1..16: note = synthetic [barcode part1]
  source 1..16: mol_type = other DNA
aggtcgtgtaatccgt

SEQ ID NO: 39584 - DNA, 16 bp, synthetic construct
  misc_feature 1..16: note = synthetic [barcode part1]
  source 1..16: mol_type = other DNA
agattccaccgtaacg

SEQ ID NO: 39585 - DNA, 16 bp, synthetic construct
  misc_feature 1..16: note = synthetic [barcode part1]
  source 1..16: mol_type = other DNA
tctacgaaggtaacag

SEQ ID NO: 39586 - DNA, 16 bp, synthetic construct
  misc_feature 1..16: note = synthetic [barcode part1]
  source 1..16: mol_type = other DNA
aattccgccacaacag

SEQ ID NO: 39587 - DNA, 16 bp, synthetic construct
  misc_feature 1..16: note = synthetic [barcode part1]
  source 1..16: mol_type = other DNA
ccttccaatccagacg

SEQ ID NO: 39588 - DNA, 16 bp, synthetic construct
  misc_feature 1..16: note = synthetic [barcode part1]
  source 1..16: mol_type = other DNA
tacctacagattccgt

SEQ ID NO: 39589 - DNA, 16 bp, synthetic construct
  misc_feature 1..16: note = synthetic [barcode part1]
  source 1..16: mol_type = other DNA
gccttaaggttgatcg

SEQ ID NO: 39590 - DNA, 16 bp, synthetic construct
  misc_feature 1..16: note = synthetic [barcode part1]
  source 1..16: mol_type = other DNA
acgacagagtgtattg

SEQ ID NO: 39591 - DNA, 16 bp, synthetic construct
  misc_feature 1..16: note = synthetic [barcode part1]
  source 1..16: mol_type = other DNA
tcaaggtcaagactcc

SEQ ID NO: 39592 - DNA, 16 bp, synthetic construct
  misc_feature 1..16: note = synthetic [barcode part1]
  source 1..16: mol_type = other DNA
tgagatctacgtacgc

SEQ ID NO: 39593 - DNA, 16 bp, synthetic construct
  misc_feature 1..16: note = synthetic [barcode part1]
  source 1..16: mol_type = other DNA
ttaggcacgccacttc

SEQ ID NO: 39594 - DNA, 16 bp, synthetic construct
  misc_feature 1..16: note = synthetic [barcode part1]
  source 1..16: mol_type = other DNA
ccgtctagaacctcac

SEQ ID NO: 39595 - DNA, 16 bp, synthetic construct
  misc_feature 1..16: note = synthetic [barcode part1]
  source 1..16: mol_type = other DNA
taggtggcaggacttg

SEQ ID NO: 39596 - DNA, 16 bp, synthetic construct
  misc_feature 1..16: note = synthetic [barcode part1]
  source 1..16: mol_type = other DNA
aacctggcgtggaagt

SEQ ID NO: 39597 - DNA, 16 bp, synthetic construct
  misc_feature 1..16: note = synthetic [barcode part1]
  source 1..16: mol_type = other DNA
gtactggaatcgcgtt

SEQ ID NO: 39598 - DNA, 16 bp, synthetic construct
  misc_feature 1..16: note = synthetic [barcode part1]
  source 1..16: mol_type = other DNA
cgtgcgtgttaactag

SEQ ID NO: 39599 - DNA, 16 bp, synthetic construct
  misc_feature 1..16: note = synthetic [barcode part1]
  source 1..16: mol_type = other DNA
aggtattcactgtcct

SEQ ID NO: 39600 - DNA, 16 bp, synthetic construct
  misc_feature 1..16: note = synthetic [barcode part1]
  source 1..16: mol_type = other DNA
atacctccgataacct

SEQ ID NO: 39601 - DNA, 16 bp, synthetic construct
  misc_feature 1..16: note = synthetic [barcode part1]
  source 1..16: mol_type = other DNA
gtggttggactggagt

SEQ ID NO: 39602 - DNA, 16 bp, synthetic construct
  misc_feature 1..16: note = synthetic [barcode part1]
  source 1..16: mol_type = other DNA
gacgtgattgtacctg

SEQ ID NO: 39603 - DNA, 16 bp, synthetic construct
  misc_feature 1..16: note = synthetic [barcode part1]
  source 1..16: mol_type = other DNA
tccgcacttaggtcgt

SEQ ID NO: 39604 - DNA, 16 bp, synthetic construct
  misc_feature 1..16: note = synthetic [barcode part1]
  source 1..16: mol_type = other DNA
ttcctggatacgttac

SEQ ID NO: 39605 - DNA, 16 bp, synthetic construct
  misc_feature 1..16: note = synthetic [barcode part1]
  source 1..16: mol_type = other DNA
cctaagagttgactgc

SEQ ID NO: 39606 - DNA, 16 bp, synthetic construct
  misc_feature 1..16: note = synthetic [barcode part1]
  source 1..16: mol_type = other DNA
gtcgatactgttactc

SEQ ID NO: 39607 - DNA, 16 bp, synthetic construct
  misc_feature 1..16: note = synthetic [barcode part1]
  source 1..16: mol_type = other DNA
agatattcgagacgac

SEQ ID NO: 39608 - DNA, 16 bp, synthetic construct
  misc_feature 1..16: note = synthetic [barcode part1]
  source 1..16: mol_type = other DNA
aacaggacggtcttct

SEQ ID NO: 39609 - DNA, 16 bp, synthetic construct
  misc_feature 1..16: note = synthetic [barcode part1]
  source 1..16: mol_type = other DNA
gtgttggttaacgcgt

SEQ ID NO: 39610 - DNA, 16 bp, synthetic construct
  misc_feature 1..16: note = synthetic [barcode part1]
  source 1..16: mol_type = other DNA
tctcacacggcagtct

SEQ ID NO: 39611 - DNA, 16 bp, synthetic construct
  misc_feature 1..16: note = synthetic [barcode part1]
  source 1..16: mol_type = other DNA
gaaggatacaggacgt

SEQ ID NO: 39612 - DNA, 16 bp, synthetic construct
  misc_feature 1..16: note = synthetic [barcode part1]
  source 1..16: mol_type = other DNA
ttggtccacgattatc

SEQ ID NO: 39613 - DNA, 16 bp, synthetic construct
  misc_feature 1..16: note = synthetic [barcode part1]
  source 1..16: mol_type = other DNA
tcctcgttctgtatcg

SEQ ID NO: 39614 - DNA, 16 bp, synthetic construct
  misc_feature 1..16: note = synthetic [barcode part1]
  source 1..16: mol_type = other DNA
caatcagtgaccaacc

SEQ ID NO: 39615 - DNA, 16 bp, synthetic construct
  misc_feature 1..16: note = synthetic [barcode part1]
  source 1..16: mol_type = other DNA
tagagtctgtgtgtgc

SEQ ID NO: 39616 - DNA, 16 bp, synthetic construct
  misc_feature 1..16: note = synthetic [barcode part1]
  source 1..16: mol_type = other DNA
taactccgttgacgtt

SEQ ID NO: 39617 - DNA, 16 bp, synthetic construct
  misc_feature 1..16: note = synthetic [barcode part1]
  source 1..16: mol_type = other DNA
gcgatatcagtcagtc

SEQ ID NO: 39618 - DNA, 16 bp, synthetic construct
  misc_feature 1..16: note = synthetic [barcode part1]
  source 1..16: mol_type = other DNA
gcaggattggatattg

SEQ ID NO: 39619 - DNA, 16 bp, synthetic construct
  misc_feature 1..16: note = synthetic [barcode part1]
  source 1..16: mol_type = other DNA
gttcgcctaccacagt

SEQ ID NO: 39620 - DNA, 16 bp, synthetic construct
  misc_feature 1..16: note = synthetic [barcode part1]
  source 1..16: mol_type = other DNA
tatccgagttactctg

SEQ ID NO: 39621 - DNA, 16 bp, synthetic construct
  misc_feature 1..16: note = synthetic [barcode part1]
  source 1..16: mol_type = other DNA
gcggttcaagtgcaag

SEQ ID NO: 39622 - DNA, 16 bp, synthetic construct
  misc_feature 1..16: note = synthetic [barcode part1]
  source 1..16: mol_type = other DNA
aatctgaagaacgcgt

SEQ ID NO: 39623 - DNA, 16 bp, synthetic construct
  misc_feature 1..16: note = synthetic [barcode part1]
  source 1..16: mol_type = other DNA
tgaacacagaagttgc

SEQ ID NO: 39624 - DNA, 16 bp, synthetic construct
  misc_feature 1..16: note = synthetic [barcode part1]
  source 1..16: mol_type = other DNA
ttctggtcctccgatt

SEQ ID NO: 39625 - DNA, 16 bp, synthetic construct
  misc_feature 1..16: note = synthetic [barcode part1]
  source 1..16: mol_type = other DNA
ccttcgagtcacacac

SEQ ID NO: 39626 - DNA, 16 bp, synthetic construct
  misc_feature 1..16: note = synthetic [barcode part1]
  source 1..16: mol_type = other DNA
aaggatagtggtctac

SEQ ID NO: 39627 - DNA, 16 bp, synthetic construct
  misc_feature 1..16: note = synthetic [barcode part1]
  source 1..16: mol_type = other DNA
ccttggtatcgagaac

SEQ ID NO: 39628 - DNA, 16 bp, synthetic construct
  misc_feature 1..16: note = synthetic [barcode part1]
  source 1..16: mol_type = other DNA
tcgagaccgaagtctt

SEQ ID NO: 39629 - DNA, 16 bp, synthetic construct
  misc_feature 1..16: note = synthetic [barcode part1]
  source 1..16: mol_type = other DNA
actcacttgtccgtct

SEQ ID NO: 39630 - DNA, 16 bp, synthetic construct
  misc_feature 1..16: note = synthetic [barcode part1]
  source 1..16: mol_type = other DNA
gcgattgtgcgtagtt

SEQ ID NO: 39631 - DNA, 16 bp, synthetic construct
  misc_feature 1..16: note = synthetic [barcode part1]
  source 1..16: mol_type = other DNA
tcagacgtcacctcgt

SEQ ID NO: 39632 - DNA, 16 bp, synthetic construct
  misc_feature 1..16: note = synthetic [barcode part1]
  source 1..16: mol_type = other DNA
aattgtactggaggac

SEQ ID NO: 39633 - DNA, 16 bp, synthetic construct
  misc_feature 1..16: note = synthetic [barcode part1]
  source 1..16: mol_type = other DNA
gttggattggaggtgc

SEQ ID NO: 39634 - DNA, 16 bp, synthetic construct
  misc_feature 1..16: note = synthetic [barcode part1]
  source 1..16: mol_type = other DNA
atctgtcgcaggtagt

SEQ ID NO: 39635 - DNA, 16 bp, synthetic construct
  misc_feature 1..16: note = synthetic [barcode part1]
  source 1..16: mol_type = other DNA
cggcaacgttgaattc

SEQ ID NO: 39636 - DNA, 16 bp, synthetic construct
  misc_feature 1..16: note = synthetic [barcode part1]
  source 1..16: mol_type = other DNA
ccaaggcctacaatac

SEQ ID NO: 39637 - DNA, 16 bp, synthetic construct
  misc_feature 1..16: note = synthetic [barcode part1]
  source 1..16: mol_type = other DNA
gccttctgacttcttg

SEQ ID NO: 39638 - DNA, 16 bp, synthetic construct
  misc_feature 1..16: note = synthetic [barcode part1]
  source 1..16: mol_type = other DNA
agtatcgttctcctcc

SEQ ID NO: 39639 - DNA, 16 bp, synthetic construct
  misc_feature 1..16: note = synthetic [barcode part1]
  source 1..16: mol_type = other DNA
acgaattcacaggcct

SEQ ID NO: 39640 - DNA, 16 bp, synthetic construct
  misc_feature 1..16: note = synthetic [barcode part1]
  source 1..16: mol_type = other DNA
gtgacacagaaggagt

SEQ ID NO: 39641 - DNA, 16 bp, synthetic construct
  misc_feature 1..16: note = synthetic [barcode part1]
  source 1..16: mol_type = other DNA
taggcactgatagagt

SEQ ID NO: 39642 - DNA, 16 bp, synthetic construct
  misc_feature 1..16: note = synthetic [barcode part1]
  source 1..16: mol_type = other DNA
taggtgtcacagatcc

SEQ ID NO: 39643 - DNA, 16 bp, synthetic construct
  misc_feature 1..16: note = synthetic [barcode part1]
  source 1..16: mol_type = other DNA
cggactgtatattctc

SEQ ID NO: 39644 - DNA, 16 bp, synthetic construct
  misc_feature 1..16: note = synthetic [barcode part1]
  source 1..16: mol_type = other DNA
tgacgagacctgcaag

SEQ ID NO: 39645 - DNA, 16 bp, synthetic construct
  misc_feature 1..16: note = synthetic [barcode part1]
  source 1..16: mol_type = other DNA
aactccttcaacacgt

SEQ ID NO: 39646 - DNA, 16 bp, synthetic construct
  misc_feature 1..16: note = synthetic [barcode part1]
  source 1..16: mol_type = other DNA
tatcggattcgcgtcc

SEQ ID NO: 39647 - DNA, 16 bp, synthetic construct
  misc_feature 1..16: note = synthetic [barcode part1]
  source 1..16: mol_type = other DNA
gtgaggaagttgtcgc

SEQ ID NO: 39648 - DNA, 16 bp, synthetic construct
  misc_feature 1..16: note = synthetic [barcode part1]
  source 1..16: mol_type = other DNA
gtacttgacggcgaag

SEQ ID NO: 39649 - DNA, 16 bp, synthetic construct
  misc_feature 1..16: note = synthetic [barcode part1]
  source 1..16: mol_type = other DNA
ataccttacgcaaggc

SEQ ID NO: 39650 - DNA, 16 bp, synthetic construct
  misc_feature 1..16: note = synthetic [barcode part1]
  source 1..16: mol_type = other DNA
tagagttaccgcgact

SEQ ID NO: 39651 - DNA, 16 bp, synthetic construct
  misc_feature 1..16: note = synthetic [barcode part1]
  source 1..16: mol_type = other DNA
gtgtgtgactgcaact

SEQ ID NO: 39652 - DNA, 16 bp, synthetic construct
  misc_feature 1..16: note = synthetic [barcode part1]
  source 1..16: mol_type = other DNA
gactgttagtgacctg

SEQ ID NO: 39653 - DNA, 16 bp, synthetic construct
  misc_feature 1..16: note = synthetic [barcode part1]
  source 1..16: mol_type = other DNA
aggaccagtgtctgag

SEQ ID NO: 39654 - DNA, 16 bp, synthetic construct
  misc_feature 1..16: note = synthetic [barcode part1]
  source 1..16: mol_type = other DNA
cactgaagtaactcgc

SEQ ID NO: 39655 - DNA, 16 bp, synthetic construct
  misc_feature 1..16: note = synthetic [barcode part1]
  source 1..16: mol_type = other DNA
tgtccaactgaacacg

SEQ ID NO: 39656 - DNA, 16 bp, synthetic construct
  misc_feature 1..16: note = synthetic [barcode part1]
  source 1..16: mol_type = other DNA
ttgcggagatagtagt

SEQ ID NO: 39657 - DNA, 16 bp, synthetic construct
  misc_feature 1..16: note = synthetic [barcode part1]
  source 1..16: mol_type = other DNA
actctgtaagtgtcct

SEQ ID NO: 39658 - DNA, 16 bp, synthetic construct
  misc_feature 1..16: note = synthetic [barcode part1]
  source 1..16: mol_type = other DNA
gaggtaatcgtaggtt

SEQ ID NO: 39659 - DNA, 16 bp, synthetic construct
  misc_feature 1..16: note = synthetic [barcode part1]
  source 1..16: mol_type = other DNA
taattgacgcacgtgc

SEQ ID NO: 39660 - DNA, 16 bp, synthetic construct
  misc_feature 1..16: note = synthetic [barcode part1]
  source 1..16: mol_type = other DNA
cagaaggttgacttcc

SEQ ID NO: 39661 - DNA, 16 bp, synthetic construct
  misc_feature 1..16: note = synthetic [barcode part1]
  source 1..16: mol_type = other DNA
tgatagattgcgaacg

SEQ ID NO: 39662 - DNA, 16 bp, synthetic construct
  misc_feature 1..16: note = synthetic [barcode part1]
  source 1..16: mol_type = other DNA
aagtattacctcgtcc

SEQ ID NO: 39663 - DNA, 16 bp, synthetic construct
  misc_feature 1..16: note = synthetic [barcode part1]
  source 1..16: mol_type = other DNA
gatctcctcttactgc

SEQ ID NO: 39664 - DNA, 16 bp, synthetic construct
  misc_feature 1..16: note = synthetic [barcode part1]
  source 1..16: mol_type = other DNA
gacagttgattgtcgc

SEQ ID NO: 39665 - DNA, 16 bp, synthetic construct
  misc_feature 1..16: note = synthetic [barcode part1]
  source 1..16: mol_type = other DNA
cgtagatcctattgtc

SEQ ID NO: 39666 - DNA, 16 bp, synthetic construct
  misc_feature 1..16: note = synthetic [barcode part1]
  source 1..16: mol_type = other DNA
gataactgtcgccagt

SEQ ID NO: 39667 - DNA, 16 bp, synthetic construct
  misc_feature 1..16: note = synthetic [barcode part1]
  source 1..16: mol_type = other DNA
agaataagtccgtggt

SEQ ID NO: 39668 - DNA, 16 bp, synthetic construct
  misc_feature 1..16: note = synthetic [barcode part1]
  source 1..16: mol_type = other DNA
taagttggatcgccgt

SEQ ID NO: 39669 - DNA, 16 bp, synthetic construct
  misc_feature 1..16: note = synthetic [barcode part1]
  source 1..16: mol_type = other DNA
tgaccttattgtgcgt

SEQ ID NO: 39670 - DNA, 16 bp, synthetic construct
  misc_feature 1..16: note = synthetic [barcode part1]
  source 1..16: mol_type = other DNA
ccgcaagtatcagtac

SEQ ID NO: 39671 - DNA, 16 bp, synthetic construct
  misc_feature 1..16: note = synthetic [barcode part1]
  source 1..16: mol_type = other DNA
gacctgcctatctcag

SEQ ID NO: 39672 - DNA, 16 bp, synthetic construct
  misc_feature 1..16: note = synthetic [barcode part1]
  source 1..16: mol_type = other DNA
gaacctgcgaattcgt

SEQ ID NO: 39673 - DNA, 16 bp, synthetic construct
  misc_feature 1..16: note = synthetic [barcode part1]
  source 1..16: mol_type = other DNA
acttgttacgacactc

SEQ ID NO: 39674 - DNA, 16 bp, synthetic construct
  misc_feature 1..16: note = synthetic [barcode part1]
  source 1..16: mol_type = other DNA
acgtagttgcgatcac

SEQ ID NO: 39675 - DNA, 16 bp, synthetic construct
  misc_feature 1..16: note = synthetic [barcode part1]
  source 1..16: mol_type = other DNA
ccgaacacactatctt

SEQ ID NO: 39676 - DNA, 16 bp, synthetic construct
  misc_feature 1..16: note = synthetic [barcode part1]
  source 1..16: mol_type = other DNA
cgattctactggtgtt

SEQ ID NO: 39677 - DNA, 16 bp, synthetic construct
  misc_feature 1..16: note = synthetic [barcode part1]
  source 1..16: mol_type = other DNA
agtgatacgagtgttg

SEQ ID NO: 39678 - DNA, 16 bp, synthetic construct
  misc_feature 1..16: note = synthetic [barcode part1]
  source 1..16: mol_type = other DNA
agattcacctgcaggt

SEQ ID NO: 39679 - DNA, 16 bp, synthetic construct
  misc_feature 1..16: note = synthetic [barcode part1]
  source 1..16: mol_type = other DNA
tggaactatacgtgcc

SEQ ID NO: 39680 - DNA, 16 bp, synthetic construct
  misc_feature 1..16: note = synthetic [barcode part1]
  source 1..16: mol_type = other DNA
actacgagacaggtgc

SEQ ID NO: 39681 - DNA, 16 bp, synthetic construct
  misc_feature 1..16: note = synthetic [barcode part1]
  source 1..16: mol_type = other DNA
tcgtgaactcacgaac

SEQ ID NO: 39682 - DNA, 16 bp, synthetic construct
  misc_feature 1..16: note = synthetic [barcode part1]
  source 1..16: mol_type = other DNA
cagttcctgatcgtgc

SEQ ID NO: 39683 - DNA, 16 bp, synthetic construct
  misc_feature 1..16: note = synthetic [barcode part1]
  source 1..16: mol_type = other DNA
ttactggtctcgcacg

SEQ ID NO: 39684 - DNA, 16 bp, synthetic construct
  misc_feature 1..16: note = synthetic [barcode part1]
  source 1..16: mol_type = other DNA
tgagttgtgacgatcc

SEQ ID NO: 39685 - DNA, 16 bp, synthetic construct
  misc_feature 1..16: note = synthetic [barcode part1]
  source 1..16: mol_type = other DNA
tgcgcaggtctcttac

SEQ ID NO: 39686 - DNA, 16 bp, synthetic construct
  misc_feature 1..16: note = synthetic [barcode part1]
  source 1..16: mol_type = other DNA
ttggacagagtggtgc

SEQ ID NO: 39687 - DNA, 16 bp, synthetic construct
  misc_feature 1..16: note = synthetic [barcode part1]
  source 1..16: mol_type = other DNA
aagacttggtaggtgt

SEQ ID NO: 39688 - DNA, 16 bp, synthetic construct
  misc_feature 1..16: note = synthetic [barcode part1]
  source 1..16: mol_type = other DNA
agaagtacgccttcac

SEQ ID NO: 39689 - DNA, 16 bp, synthetic construct
  misc_feature 1..16: note = synthetic [barcode part1]
  source 1..16: mol_type = other DNA
caggtagatctgtctg

SEQ ID NO: 39690 - DNA, 16 bp, synthetic construct
  misc_feature 1..16: note = synthetic [barcode part1]
  source 1..16: mol_type = other DNA
gaagaccttgaggaag

SEQ ID NO: 39691 - DNA, 16 bp, synthetic construct
  misc_feature 1..16: note = synthetic [barcode part1]
  source 1..16: mol_type = other DNA
aggtgttgcaatagac

SEQ ID NO: 39692 - DNA, 16 bp, synthetic construct
  misc_feature 1..16: note = synthetic [barcode part1]
  source 1..16: mol_type = other DNA
ttccggtcgcaagttc

SEQ ID NO: 39693 - DNA, 16 bp, synthetic construct
  misc_feature 1..16: note = synthetic [barcode part1]
  source 1..16: mol_type = other DNA
agtctaggactcaacc

SEQ ID NO: 39694 - DNA, 16 bp, synthetic construct
  misc_feature 1..16: note = synthetic [barcode part1]
  source 1..16: mol_type = other DNA
gtcctaatctctcctg

SEQ ID NO: 39695 - DNA, 16 bp, synthetic construct
  misc_feature 1..16: note = synthetic [barcode part1]
  source 1..16: mol_type = other DNA
attctgtctgtgcaac

SEQ ID NO: 39696 - DNA, 16 bp, synthetic construct
  misc_feature 1..16: note = synthetic [barcode part1]
  source 1..16: mol_type = other DNA
tctcggttgatcttcc

SEQ ID NO: 39697 - DNA, 16 bp, synthetic construct
  misc_feature 1..16: note = synthetic [barcode part1]
  source 1..16: mol_type = other DNA
ttaccgcactctgttc

SEQ ID NO: 39698 - DNA, 16 bp, synthetic construct
  misc_feature 1..16: note = synthetic [barcode part1]
  source 1..16: mol_type = other DNA
gtcaccggattgttag

SEQ ID NO: 39699 - DNA, 16 bp, synthetic construct
  misc_feature 1..16: note = synthetic [barcode part1]
  source 1..16: mol_type = other DNA
aacaacaggacttacg

SEQ ID NO: 39700 - DNA, 16 bp, synthetic construct
  misc_feature 1..16: note = synthetic [barcode part1]
  source 1..16: mol_type = other DNA
tagtctggaatcaccg

SEQ ID NO: 39701 - DNA, 16 bp, synthetic construct
  misc_feature 1..16: note = synthetic [barcode part1]
  source 1..16: mol_type = other DNA
caggaaggagattgac

SEQ ID NO: 39702 - DNA, 16 bp, synthetic construct
  misc_feature 1..16: note = synthetic [barcode part1]
  source 1..16: mol_type = other DNA
accagtgtgaggaatt

SEQ ID NO: 39703 - DNA, 16 bp, synthetic construct
  misc_feature 1..16: note = synthetic [barcode part1]
  source 1..16: mol_type = other DNA
atcagaatacgcagtg

SEQ ID NO: 39704 - DNA, 16 bp, synthetic construct
  misc_feature 1..16: note = synthetic [barcode part1]
  source 1..16: mol_type = other DNA
gaccaactggtactgt

SEQ ID NO: 39705 - DNA, 16 bp, synthetic construct
  misc_feature 1..16: note = synthetic [barcode part1]
  source 1..16: mol_type = other DNA
accgagtagtgacctt

SEQ ID NO: 39706 - DNA, 16 bp, synthetic construct
  misc_feature 1..16: note = synthetic [barcode part1]
  source 1..16: mol_type = other DNA
gtcttacgcctagatt

SEQ ID NO: 39707 - DNA, 16 bp, synthetic construct
  misc_feature 1..16: note = synthetic [barcode part1]
  source 1..16: mol_type = other DNA
aagtattctactccgc

SEQ ID NO: 39708 - DNA, 16 bp, synthetic construct
  misc_feature 1..16: note = synthetic [barcode part1]
  source 1..16: mol_type = other DNA
tgcggcagatattgtc

SEQ ID NO: 39709 - DNA, 16 bp, synthetic construct
  misc_feature 1..16: note = synthetic [barcode part1]
  source 1..16: mol_type = other DNA
agagtgcagagatacg

SEQ ID NO: 39710 - DNA, 16 bp, synthetic construct
  misc_feature 1..16: note = synthetic [barcode part1]
  source 1..16: mol_type = other DNA
tataacgtccgttcgt

SEQ ID NO: 39711 - DNA, 16 bp, synthetic construct
  misc_feature 1..16: note = synthetic [barcode part1]
  source 1..16: mol_type = other DNA
actggaggtaccaacg

SEQ ID NO: 39712 - DNA, 16 bp, synthetic construct
  misc_feature 1..16: note = synthetic [barcode part1]
  source 1..16: mol_type = other DNA
gacaattgccgtcagt

SEQ ID NO: 39713 - DNA, 16 bp, synthetic construct
  misc_feature 1..16: note = synthetic [barcode part1]
  source 1..16: mol_type = other DNA
tggtgacgaggtacgt

SEQ ID NO: 39714 - DNA, 16 bp, synthetic construct
  misc_feature 1..16: note = synthetic [barcode part1]
  source 1..16: mol_type = other DNA
gagtgaagtctgtcct

SEQ ID NO: 39715 - DNA, 16 bp, synthetic construct
  misc_feature 1..16: note = synthetic [barcode part1]
  source 1..16: mol_type = other DNA
acaattaggagtcgac

SEQ ID NO: 39716 - DNA, 16 bp, synthetic construct
  misc_feature 1..16: note = synthetic [barcode part1]
  source 1..16: mol_type = other DNA
cctagagaccgtgatt

SEQ ID NO: 39717 - DNA, 16 bp, synthetic construct
  misc_feature 1..16: note = synthetic [barcode part1]
  source 1..16: mol_type = other DNA
gtggagtaggtctacg

SEQ ID NO: 39718 - DNA, 16 bp, synthetic construct
  misc_feature 1..16: note = synthetic [barcode part1]
  source 1..16: mol_type = other DNA
cgaaggatccttcaac

SEQ ID NO: 39719 - DNA, 16 bp, synthetic construct
  misc_feature 1..16: note = synthetic [barcode part1]
  source 1..16: mol_type = other DNA
attaggccacttccgc

SEQ ID NO: 39720 - DNA, 16 bp, synthetic construct
  misc_feature 1..16: note = synthetic [barcode part1]
  source 1..16: mol_type = other DNA
aggtcgaaccaacgtg

SEQ ID NO: 39721 - DNA, 16 bp, synthetic construct
  misc_feature 1..16: note = synthetic [barcode part1]
  source 1..16: mol_type = other DNA
tccgatcactgcacac

SEQ ID NO: 39722 - DNA, 16 bp, synthetic construct
  misc_feature 1..16: note = synthetic [barcode part1]
  source 1..16: mol_type = other DNA
gcgttccgtattctct

SEQ ID NO: 39723 - DNA, 16 bp, synthetic construct
  misc_feature 1..16: note = synthetic [barcode part1]
  source 1..16: mol_type = other DNA
atactcttcctgcacc

SEQ ID NO: 39724 - DNA, 16 bp, synthetic construct
  misc_feature 1..16: note = synthetic [barcode part1]
  source 1..16: mol_type = other DNA
gcgaagaccaataatc

SEQ ID NO: 39725 - DNA, 16 bp, synthetic construct
  misc_feature 1..16: note = synthetic [barcode part1]
  source 1..16: mol_type = other DNA
cgtccgtcagagttct

SEQ ID NO: 39726 - DNA, 16 bp, synthetic construct
  misc_feature 1..16: note = synthetic [barcode part1]
  source 1..16: mol_type = other DNA
gcagacttacgttggt

SEQ ID NO: 39727 - DNA, 16 bp, synthetic construct
  misc_feature 1..16: note = synthetic [barcode part1]
  source 1..16: mol_type = other DNA
acgagagaatctgatc

SEQ ID NO: 39728 - DNA, 16 bp, synthetic construct
  misc_feature 1..16: note = synthetic [barcode part1]
  source 1..16: mol_type = other DNA
gatacgtccaattctc

SEQ ID NO: 39729 - DNA, 16 bp, synthetic construct
  misc_feature 1..16: note = synthetic [barcode part1]
  source 1..16: mol_type = other DNA
tagaagtctgtcgaag

SEQ ID NO: 39730 - DNA, 16 bp, synthetic construct
  misc_feature 1..16: note = synthetic [barcode part1]
  source 1..16: mol_type = other DNA
aacttggaaccaccac

SEQ ID NO: 39731 - DNA, 16 bp, synthetic construct
  misc_feature 1..16: note = synthetic [barcode part1]
  source 1..16: mol_type = other DNA
atagagtgtcctaccg

SEQ ID NO: 39732 - DNA, 16 bp, synthetic construct
  misc_feature 1..16: note = synthetic [barcode part1]
  source 1..16: mol_type = other DNA
atagtgttgacgccgt

SEQ ID NO: 39733 - DNA, 16 bp, synthetic construct
  misc_feature 1..16: note = synthetic [barcode part1]
  source 1..16: mol_type = other DNA
aaccaacctagttggc

SEQ ID NO: 39734 - DNA, 16 bp, synthetic construct
  misc_feature 1..16: note = synthetic [barcode part1]
  source 1..16: mol_type = other DNA
tggtctaacttccgcg

SEQ ID NO: 39735 - DNA, 16 bp, synthetic construct
  misc_feature 1..16: note = synthetic [barcode part1]
  source 1..16: mol_type = other DNA
gtctctgtctggtgac

SEQ ID NO: 39736 - DNA, 16 bp, synthetic construct
  misc_feature 1..16: note = synthetic [barcode part1]
  source 1..16: mol_type = other DNA
cgccgaatctatattc

SEQ ID NO: 39737 - DNA, 16 bp, synthetic construct
  misc_feature 1..16: note = synthetic [barcode part1]
  source 1..16: mol_type = other DNA
gatcgacaactctggt

SEQ ID NO: 39738 - DNA, 16 bp, synthetic construct
  misc_feature 1..16: note = synthetic [barcode part1]
  source 1..16: mol_type = other DNA
gtgtccttgtactctc

SEQ ID NO: 39739 - DNA, 16 bp, synthetic construct
  misc_feature 1..16: note = synthetic [barcode part1]
  source 1..16: mol_type = other DNA
gccactctcgtgagtt

SEQ ID NO: 39740 - DNA, 16 bp, synthetic construct
  misc_feature 1..16: note = synthetic [barcode part1]
  source 1..16: mol_type = other DNA
taaggaacaatcgtgc

SEQ ID NO: 39741 - DNA, 16 bp, synthetic construct
  misc_feature 1..16: note = synthetic [barcode part1]
  source 1..16: mol_type = other DNA
ccgttcactataacac

SEQ ID NO: 39742 - DNA, 16 bp, synthetic construct
  misc_feature 1..16: note = synthetic [barcode part1]
  source 1..16: mol_type = other DNA
aacctacggcaaggtg

SEQ ID NO: 39743 - DNA, 16 bp, synthetic construct
  misc_feature 1..16: note = synthetic [barcode part1]
  source 1..16: mol_type = other DNA
cacagatcgagtgttc

SEQ ID NO: 39744 - DNA, 16 bp, synthetic construct
  misc_feature 1..16: note = synthetic [barcode part1]
  source 1..16: mol_type = other DNA
ccacctaacaatatcc

SEQ ID NO: 39745 - DNA, 16 bp, synthetic construct
  misc_feature 1..16: note = synthetic [barcode part1]
  source 1..16: mol_type = other DNA
tagaagacacacggcc

SEQ ID NO: 39746 - DNA, 16 bp, synthetic construct
  misc_feature 1..16: note = synthetic [barcode part1]
  source 1..16: mol_type = other DNA
ttcttacacagtccag

SEQ ID NO: 39747 - DNA, 16 bp, synthetic construct
  misc_feature 1..16: note = synthetic [barcode part1]
  source 1..16: mol_type = other DNA
tccacacgttggatcc

SEQ ID NO: 39748 - DNA, 16 bp, synthetic construct
  misc_feature 1..16: note = synthetic [barcode part1]
  source 1..16: mol_type = other DNA
cgtccacacttcaggt

SEQ ID NO: 39749 - DNA, 16 bp, synthetic construct
  misc_feature 1..16: note = synthetic [barcode part1]
  source 1..16: mol_type = other DNA
actgacttgtgcgtag

SEQ ID NO: 39750 - DNA, 16 bp, synthetic construct
  misc_feature 1..16: note = synthetic [barcode part1]
  source 1..16: mol_type = other DNA
acaacggcggattcag

SEQ ID NO: 39751 - DNA, 16 bp, synthetic construct
  misc_feature 1..16: note = synthetic [barcode part1]
  source 1..16: mol_type = other DNA
gaaggcgagtgactct

SEQ ID NO: 39752 - DNA, 16 bp, synthetic construct
  misc_feature 1..16: note = synthetic [barcode part1]
  source 1..16: mol_type = other DNA
gtctacttactacggt

SEQ ID NO: 39753 - DNA, 16 bp, synthetic construct
  misc_feature 1..16: note = synthetic [barcode part1]
  source 1..16: mol_type = other DNA
ttcagtgagactaccg

SEQ ID NO: 39754 - DNA, 16 bp, synthetic construct
  misc_feature 1..16: note = synthetic [barcode part1]
  source 1..16: mol_type = other DNA
gcgactgttaagaggc

SEQ ID NO: 39755 - DNA, 16 bp, synthetic construct
  misc_feature 1..16: note = synthetic [barcode part1]
  source 1..16: mol_type = other DNA
cgcacctgatacaagt

SEQ ID NO: 39756 - DNA, 16 bp, synthetic construct
  misc_feature 1..16: note = synthetic [barcode part1]
  source 1..16: mol_type = other DNA
gtcaggatagttacag

SEQ ID NO: 39757 - DNA, 16 bp, synthetic construct
  misc_feature 1..16: note = synthetic [barcode part1]
  source 1..16: mol_type = other DNA
gttgtagtccgaagtc

SEQ ID NO: 39758 - DNA, 16 bp, synthetic construct
  misc_feature 1..16: note = synthetic [barcode part1]
  source 1..16: mol_type = other DNA
taccagtccaatcttg

SEQ ID NO: 39759 - DNA, 16 bp, synthetic construct
  misc_feature 1..16: note = synthetic [barcode part1]
  source 1..16: mol_type = other DNA
tactggaagtgcaggc

SEQ ID NO: 39760 - DNA, 16 bp, synthetic construct
  misc_feature 1..16: note = synthetic [barcode part1]
  source 1..16: mol_type = other DNA
tctaatccgacacgcc

SEQ ID NO: 39761 - DNA, 16 bp, synthetic construct
  misc_feature 1..16: note = synthetic [barcode part1]
  source 1..16: mol_type = other DNA
cgccttgataggtcct

SEQ ID NO: 39762 - DNA, 16 bp, synthetic construct
  misc_feature 1..16: note = synthetic [barcode part1]
  source 1..16: mol_type = other DNA
caacctagtggaggtg

SEQ ID NO: 39763 - DNA, 16 bp, synthetic construct
  misc_feature 1..16: note = synthetic [barcode part1]
  source 1..16: mol_type = other DNA
cgacacgactatcctc

SEQ ID NO: 39764 - DNA, 16 bp, synthetic construct
  misc_feature 1..16: note = synthetic [barcode part1]
  source 1..16: mol_type = other DNA
cgtatcacggttacag

SEQ ID NO: 39765 - DNA, 16 bp, synthetic construct
  misc_feature 1..16: note = synthetic [barcode part1]
  source 1..16: mol_type = other DNA
cgaactatcctgtatc

SEQ ID NO: 39766 - DNA, 16 bp, synthetic construct
  misc_feature 1..16: note = synthetic [barcode part1]
  source 1..16: mol_type = other DNA
gcagttacaatcgtgc

SEQ ID NO: 39767 - DNA, 16 bp, synthetic construct
  misc_feature 1..16: note = synthetic [barcode part1]
  source 1..16: mol_type = other DNA
gcggttaaggatcggt

SEQ ID NO: 39768 - DNA, 16 bp, synthetic construct
  misc_feature 1..16: note = synthetic [barcode part1]
  source 1..16: mol_type = other DNA
actaagttctgtgcct

SEQ ID NO: 39769 - DNA, 16 bp, synthetic construct
  misc_feature 1..16: note = synthetic [barcode part1]
  source 1..16: mol_type = other DNA
gaccggcacgtatatt

SEQ ID NO: 39770 - DNA, 16 bp, synthetic construct
  misc_feature 1..16: note = synthetic [barcode part1]
  source 1..16: mol_type = other DNA
tactactacgaggtgc

SEQ ID NO: 39771 - DNA, 16 bp, synthetic construct
  misc_feature 1..16: note = synthetic [barcode part1]
  source 1..16: mol_type = other DNA
tgaatactgcggacct

SEQ ID NO: 39772 - DNA, 16 bp, synthetic construct
  misc_feature 1..16: note = synthetic [barcode part1]
  source 1..16: mol_type = other DNA
cgcagattccaccgtt

SEQ ID NO: 39773 - DNA, 16 bp, synthetic construct
  misc_feature 1..16: note = synthetic [barcode part1]
  source 1..16: mol_type = other DNA
gacgagaccttactac

SEQ ID NO: 39774 - DNA, 16 bp, synthetic construct
  misc_feature 1..16: note = synthetic [barcode part1]
  source 1..16: mol_type = other DNA
gtcaagtcggagacac

SEQ ID NO: 39775 - DNA, 16 bp, synthetic construct
  misc_feature 1..16: note = synthetic [barcode part1]
  source 1..16: mol_type = other DNA
tctcagtggagactgt

SEQ ID NO: 39776 - DNA, 16 bp, synthetic construct
  misc_feature 1..16: note = synthetic [barcode part1]
  source 1..16: mol_type = other DNA
gattacggatctcttc

SEQ ID NO: 39777 - DNA, 16 bp, synthetic construct
  misc_feature 1..16: note = synthetic [barcode part1]
  source 1..16: mol_type = other DNA
atacacaggttggcct

SEQ ID NO: 39778 - DNA, 16 bp, synthetic construct
  misc_feature 1..16: note = synthetic [barcode part1]
  source 1..16: mol_type = other DNA
gtagtcggcgtattgt

SEQ ID NO: 39779 - DNA, 16 bp, synthetic construct
  misc_feature 1..16: note = synthetic [barcode part1]
  source 1..16: mol_type = other DNA
acctcctaatcaggag

SEQ ID NO: 39780 - DNA, 16 bp, synthetic construct
  misc_feature 1..16: note = synthetic [barcode part1]
  source 1..16: mol_type = other DNA
cgaattgtcctcgcac

SEQ ID NO: 39781 - DNA, 16 bp, synthetic construct
  misc_feature 1..16: note = synthetic [barcode part1]
  source 1..16: mol_type = other DNA
agtcaactacgcgtac

SEQ ID NO: 39782 - DNA, 16 bp, synthetic construct
  misc_feature 1..16: note = synthetic [barcode part1]
  source 1..16: mol_type = other DNA
tctaactatacaccgc

SEQ ID NO: 39783 - DNA, 16 bp, synthetic construct
  misc_feature 1..16: note = synthetic [barcode part1]
  source 1..16: mol_type = other DNA
gtcgtagtatccgcct

SEQ ID NO: 39784 - DNA, 16 bp, synthetic construct
  misc_feature 1..16: note = synthetic [barcode part1]
  source 1..16: mol_type = other DNA
aaggattatactggcg

SEQ ID NO: 39785 - DNA, 16 bp, synthetic construct
  misc_feature 1..16: note = synthetic [barcode part1]
  source 1..16: mol_type = other DNA
acgccttaggatacac

SEQ ID NO: 39786 - DNA, 16 bp, synthetic construct
  misc_feature 1..16: note = synthetic [barcode part1]
  source 1..16: mol_type = other DNA
gtgacaccaactggtt

SEQ ID NO: 39787 - DNA, 16 bp, synthetic construct
  misc_feature 1..16: note = synthetic [barcode part1]
  source 1..16: mol_type = other DNA
gatcgcaccttgacct

SEQ ID NO: 39788 - DNA, 16 bp, synthetic construct
  misc_feature 1..16: note = synthetic [barcode part1]
  source 1..16: mol_type = other DNA
caagtgcactagaagt

SEQ ID NO: 39789 - DNA, 16 bp, synthetic construct
  misc_feature 1..16: note = synthetic [barcode part1]
  source 1..16: mol_type = other DNA
tctctccgatcctagt

SEQ ID NO: 39790 - DNA, 16 bp, synthetic construct
  misc_feature 1..16: note = synthetic [barcode part1]
  source 1..16: mol_type = other DNA
tactggagacaactcc

SEQ ID NO: 39791 - DNA, 16 bp, synthetic construct
  misc_feature 1..16: note = synthetic [barcode part1]
  source 1..16: mol_type = other DNA
tgcctacgtaatatcc

SEQ ID NO: 39792 - DNA, 16 bp, synthetic construct
  misc_feature 1..16: note = synthetic [barcode part1]
  source 1..16: mol_type = other DNA
tcgtatcgcaacttgt

SEQ ID NO: 39793 - DNA, 16 bp, synthetic construct
  misc_feature 1..16: note = synthetic [barcode part1]
  source 1..16: mol_type = other DNA
tgcgttccttgataac

SEQ ID NO: 39794 - DNA, 16 bp, synthetic construct
  misc_feature 1..16: note = synthetic [barcode part1]
  source 1..16: mol_type = other DNA
taatcaacggttggcc

SEQ ID NO: 39795 - DNA, 16 bp, synthetic construct
  misc_feature 1..16: note = synthetic [barcode part1]
  source 1..16: mol_type = other DNA
atctctgttcgcgtct

SEQ ID NO: 39796 - DNA, 16 bp, synthetic construct
  misc_feature 1..16: note = synthetic [barcode part1]
  source 1..16: mol_type = other DNA
tggttctcgtaactgt

SEQ ID NO: 39797 - DNA, 16 bp, synthetic construct
  misc_feature 1..16: note = synthetic [barcode part1]
  source 1..16: mol_type = other DNA
aacaagtgtaacaccg

SEQ ID NO: 39798 - DNA, 16 bp, synthetic construct
  misc_feature 1..16: note = synthetic [barcode part1]
  source 1..16: mol_type = other DNA
atagaagtctcgtgcc

SEQ ID NO: 39799 - DNA, 16 bp, synthetic construct
  misc_feature 1..16: note = synthetic [barcode part1]
  source 1..16: mol_type = other DNA
cacaagtaacacctgc

SEQ ID NO: 39800 - DNA, 16 bp, synthetic construct
  misc_feature 1..16: note = synthetic [barcode part1]
  source 1..16: mol_type = other DNA
gtgtcgagactgtact

SEQ ID NO: 39801 - DNA, 16 bp, synthetic construct
  misc_feature 1..16: note = synthetic [barcode part1]
  source 1..16: mol_type = other DNA
tcctctccttcgaagt

SEQ ID NO: 39802 - DNA, 16 bp, synthetic construct
  misc_feature 1..16: note = synthetic [barcode part1]
  source 1..16: mol_type = other DNA
gagacgactatcttgc

SEQ ID NO: 39803 - DNA, 16 bp, synthetic construct
  misc_feature 1..16: note = synthetic [barcode part1]
  source 1..16: mol_type = other DNA
taatcggtagttggcc

SEQ ID NO: 39804 - DNA, 16 bp, synthetic construct
  misc_feature 1..16: note = synthetic [barcode part1]
  source 1..16: mol_type = other DNA
cactgttatctggact

SEQ ID NO: 39805 - DNA, 16 bp, synthetic construct
  misc_feature 1..16: note = synthetic [barcode part1]
  source 1..16: mol_type = other DNA
ccttaagagtactgcg

SEQ ID NO: 39806 - DNA, 16 bp, synthetic construct
  misc_feature 1..16: note = synthetic [barcode part1]
  source 1..16: mol_type = other DNA
ttgaagtaggcctcgt

SEQ ID NO: 39807 - DNA, 16 bp, synthetic construct
  misc_feature 1..16: note = synthetic [barcode part1]
  source 1..16: mol_type = other DNA
ttatcgcgaacctgtt

SEQ ID NO: 39808 - DNA, 16 bp, synthetic construct
  misc_feature 1..16: note = synthetic [barcode part1]
  source 1..16: mol_type = other DNA
cagtccttctcgattc

SEQ ID NO: 39809 - DNA, 16 bp, synthetic construct
  misc_feature 1..16: note = synthetic [barcode part1]
  source 1..16: mol_type = other DNA
aagtcaacacggttag

SEQ ID NO: 39810 - DNA, 16 bp, synthetic construct
  misc_feature 1..16: note = synthetic [barcode part1]
  source 1..16: mol_type = other DNA
gaggcgacgttcaagt

SEQ ID NO: 39811 - DNA, 16 bp, synthetic construct
  misc_feature 1..16: note = synthetic [barcode part1]
  source 1..16: mol_type = other DNA
acacgacgcgtattgt

SEQ ID NO: 39812 - DNA, 16 bp, synthetic construct
  misc_feature 1..16: note = synthetic [barcode part1]
  source 1..16: mol_type = other DNA
cgttctctggcaactg

SEQ ID NO: 39813 - DNA, 16 bp, synthetic construct
  misc_feature 1..16: note = synthetic [barcode part1]
  source 1..16: mol_type = other DNA
cgtctaacggtgagag

SEQ ID NO: 39814 - DNA, 16 bp, synthetic construct
  misc_feature 1..16: note = synthetic [barcode part1]
  source 1..16: mol_type = other DNA
cactctgtcacgaacc

SEQ ID NO: 39815 - DNA, 16 bp, synthetic construct
  misc_feature 1..16: note = synthetic [barcode part1]
  source 1..16: mol_type = other DNA
atctaggccgtagatc

SEQ ID NO: 39816 - DNA, 16 bp, synthetic construct
  misc_feature 1..16: note = synthetic [barcode part1]
  source 1..16: mol_type = other DNA
tcggtatctggccttg

SEQ ID NO: 39817 - DNA, 16 bp, synthetic construct
  misc_feature 1..16: note = synthetic [barcode part1]
  source 1..16: mol_type = other DNA
tcctgtcgcgaattcg

SEQ ID NO: 39818 - DNA, 16 bp, synthetic construct
  misc_feature 1..16: note = synthetic [barcode part1]
  source 1..16: mol_type = other DNA
ttctggaatctatccg

SEQ ID NO: 39819 - DNA, 16 bp, synthetic construct
  misc_feature 1..16: note = synthetic [barcode part1]
  source 1..16: mol_type = other DNA
gatcgatctgagactc

SEQ ID NO: 39820 - DNA, 16 bp, synthetic construct
  misc_feature 1..16: note = synthetic [barcode part1]
  source 1..16: mol_type = other DNA
tgatacgcgatcctcc

SEQ ID NO: 39821 - DNA, 16 bp, synthetic construct
  misc_feature 1..16: note = synthetic [barcode part1]
  source 1..16: mol_type = other DNA
taaggtacgtcaacag

SEQ ID NO: 39822 - DNA, 16 bp, synthetic construct
  misc_feature 1..16: note = synthetic [barcode part1]
  source 1..16: mol_type = other DNA
tgtgtgttgactggtg

SEQ ID NO: 39823 - DNA, 16 bp, synthetic construct
  misc_feature 1..16: note = synthetic [barcode part1]
  source 1..16: mol_type = other DNA
tcaggtagtcctattc

SEQ ID NO: 39824 - DNA, 16 bp, synthetic construct
  misc_feature 1..16: note = synthetic [barcode part1]
  source 1..16: mol_type = other DNA
ttagacggcgacgaac

SEQ ID NO: 39825 - DNA, 16 bp, synthetic construct
  misc_feature 1..16: note = synthetic [barcode part1]
  source 1..16: mol_type = other DNA
agacggttaacggaag

SEQ ID NO: 39826 - DNA, 16 bp, synthetic construct
  misc_feature 1..16: note = synthetic [barcode part1]
  source 1..16: mol_type = other DNA
gcgtattcggagagtg

SEQ ID NO: 39827 - DNA, 16 bp, synthetic construct
  misc_feature 1..16: note = synthetic [barcode part1]
  source 1..16: mol_type = other DNA
ttcgtaccaactcagt

SEQ ID NO: 39828 - DNA, 16 bp, synthetic construct
  misc_feature 1..16: note = synthetic [barcode part1]
  source 1..16: mol_type = other DNA
agaacctataggcggc

SEQ ID NO: 39829 - DNA, 16 bp, synthetic construct
  misc_feature 1..16: note = synthetic [barcode part1]
  source 1..16: mol_type = other DNA
gtgattggcgtatcac

SEQ ID NO: 39830 - DNA, 16 bp, synthetic construct
  misc_feature 1..16: note = synthetic [barcode part1]
  source 1..16: mol_type = other DNA
ttagaccactaggtcg

SEQ ID NO: 39831 - DNA, 16 bp, synthetic construct
  misc_feature 1..16: note = synthetic [barcode part1]
  source 1..16: mol_type = other DNA
tcttcagattacgcgt

SEQ ID NO: 39832 - DNA, 16 bp, synthetic construct
  misc_feature 1..16: note = synthetic [barcode part1]
  source 1..16: mol_type = other DNA
cactggcaaggaatcg

SEQ ID NO: 39833 - DNA, 16 bp, synthetic construct
  misc_feature 1..16: note = synthetic [barcode part1]
  source 1..16: mol_type = other DNA
tatcttggacggagtc

SEQ ID NO: 39834 - DNA, 16 bp, synthetic construct
  misc_feature 1..16: note = synthetic [barcode part1]
  source 1..16: mol_type = other DNA
caataagacctcaccg

SEQ ID NO: 39835 - DNA, 16 bp, synthetic construct
  misc_feature 1..16: note = synthetic [barcode part1]
  source 1..16: mol_type = other DNA
ttgttactcgcagatc

SEQ ID NO: 39836 - DNA, 16 bp, synthetic construct
  misc_feature 1..16: note = synthetic [barcode part1]
  source 1..16: mol_type = other DNA
gatcaactacgtgtgc

SEQ ID NO: 39837 - DNA, 16 bp, synthetic construct
  misc_feature 1..16: note = synthetic [barcode part1]
  source 1..16: mol_type = other DNA
accagtggcaactgtt

SEQ ID NO: 39838 - DNA, 16 bp, synthetic construct
  misc_feature 1..16: note = synthetic [barcode part1]
  source 1..16: mol_type = other DNA
attcggttaacggtcg

SEQ ID NO: 39839 - DNA, 16 bp, synthetic construct
  misc_feature 1..16: note = synthetic [barcode part1]
  source 1..16: mol_type = other DNA
ccagtaagttcctgcc

SEQ ID NO: 39840 - DNA, 16 bp, synthetic construct
  misc_feature 1..16: note = synthetic [barcode part1]
  source 1..16: mol_type = other DNA
gttacttccacagatc

SEQ ID NO: 39841 - DNA, 16 bp, synthetic construct
  misc_feature 1..16: note = synthetic [barcode part1]
  source 1..16: mol_type = other DNA
cctgcgtctaagtcgt

SEQ ID NO: 39842 - DNA, 16 bp, synthetic construct
  misc_feature 1..16: note = synthetic [barcode part1]
  source 1..16: mol_type = other DNA
tggcacactcctgact

SEQ ID NO: 39843 - DNA, 16 bp, synthetic construct
  misc_feature 1..16: note = synthetic [barcode part1]
  source 1..16: mol_type = other DNA
tggtgttgtccactcg

SEQ ID NO: 39844 - DNA, 16 bp, synthetic construct
  misc_feature 1..16: note = synthetic [barcode part1]
  source 1..16: mol_type = other DNA
cagtggtaccagactt

SEQ ID NO: 39845 - DNA, 16 bp, synthetic construct
  misc_feature 1..16: note = synthetic [barcode part1]
  source 1..16: mol_type = other DNA
aggcaactacgagtcg

SEQ ID NO: 39846 - DNA, 16 bp, synthetic construct
  misc_feature 1..16: note = synthetic [barcode part1]
  source 1..16: mol_type = other DNA
acttctaccactgaac

SEQ ID NO: 39847 - DNA, 16 bp, synthetic construct
  misc_feature 1..16: note = synthetic [barcode part1]
  source 1..16: mol_type = other DNA
agaccttgaccttgag

SEQ ID NO: 39848 - DNA, 16 bp, synthetic construct
  misc_feature 1..16: note = synthetic [barcode part1]
  source 1..16: mol_type = other DNA
tctctaacttcggtcc

SEQ ID NO: 39849 - DNA, 16 bp, synthetic construct
  misc_feature 1..16: note = synthetic [barcode part1]
  source 1..16: mol_type = other DNA
ataagacggatctacg

SEQ ID NO: 39850 - DNA, 16 bp, synthetic construct
  misc_feature 1..16: note = synthetic [barcode part1]
  source 1..16: mol_type = other DNA
ataccttccagattgc

SEQ ID NO: 39851 - DNA, 16 bp, synthetic construct
  misc_feature 1..16: note = synthetic [barcode part1]
  source 1..16: mol_type = other DNA
gttggatcaagaacac

SEQ ID NO: 39852 - DNA, 16 bp, synthetic construct
  misc_feature 1..16: note = synthetic [barcode part1]
  source 1..16: mol_type = other DNA
tcactccactgttctg

SEQ ID NO: 39853 - DNA, 16 bp, synthetic construct
  misc_feature 1..16: note = synthetic [barcode part1]
  source 1..16: mol_type = other DNA
gcgttaagacttgcac

SEQ ID NO: 39854 - DNA, 16 bp, synthetic construct
  misc_feature 1..16: note = synthetic [barcode part1]
  source 1..16: mol_type = other DNA
aggccaattctgactg

SEQ ID NO: 39855 - DNA, 16 bp, synthetic construct
  misc_feature 1..16: note = synthetic [barcode part1]
  source 1..16: mol_type = other DNA
cgtgtggagtatatcc

SEQ ID NO: 39856 - DNA, 16 bp, synthetic construct
  misc_feature 1..16: note = synthetic [barcode part1]
  source 1..16: mol_type = other DNA
gtaccaatcttatcgc

SEQ ID NO: 39857 - DNA, 16 bp, synthetic construct
  misc_feature 1..16: note = synthetic [barcode part1]
  source 1..16: mol_type = other DNA
agacctaactctctac

SEQ ID NO: 39858 - DNA, 16 bp, synthetic construct
  misc_feature 1..16: note = synthetic [barcode part1]
  source 1..16: mol_type = other DNA
accacttgcggacctt

SEQ ID NO: 39859 - DNA, 16 bp, synthetic construct
  misc_feature 1..16: note = synthetic [barcode part1]
  source 1..16: mol_type = other DNA
accagttaactggtcg

SEQ ID NO: 39860 - DNA, 16 bp, synthetic construct
  misc_feature 1..16: note = synthetic [barcode part1]
  source 1..16: mol_type = other DNA
attcgcctattgtgac

SEQ ID NO: 39861 - DNA, 16 bp, synthetic construct
  misc_feature 1..16: note = synthetic [barcode part1]
  source 1..16: mol_type = other DNA
tacactctaccgaact

SEQ ID NO: 39862 - DNA, 16 bp, synthetic construct
  misc_feature 1..16: note = synthetic [barcode part1]
  source 1..16: mol_type = other DNA
cgtgaacaacgagatt

SEQ ID NO: 39863 - DNA, 16 bp, synthetic construct
  misc_feature 1..16: note = synthetic [barcode part1]
  source 1..16: mol_type = other DNA
gtattgaggaagtcgt

SEQ ID NO: 39864 - DNA, 16 bp, synthetic construct
  misc_feature 1..16: note = synthetic [barcode part1]
  source 1..16: mol_type = other DNA
atagagaggtcactac

SEQ ID NO: 39865 - DNA, 16 bp, synthetic construct
  misc_feature 1..16: note = synthetic [barcode part1]
  source 1..16: mol_type = other DNA
actgcaactcgtctgc

SEQ ID NO: 39866 - DNA, 16 bp, synthetic construct
  misc_feature 1..16: note = synthetic [barcode part1]
  source 1..16: mol_type = other DNA
agtgaagacgcgacct

SEQ ID NO: 39867 - DNA, 16 bp, synthetic construct
  misc_feature 1..16: note = synthetic [barcode part1]
  source 1..16: mol_type = other DNA
acgtctcaactcggtc

SEQ ID NO: 39868 - DNA, 16 bp, synthetic construct
  misc_feature 1..16: note = synthetic [barcode part1]
  source 1..16: mol_type = other DNA
gaggcctaacgagtac

SEQ ID NO: 39869 - DNA, 16 bp, synthetic construct
  misc_feature 1..16: note = synthetic [barcode part1]
  source 1..16: mol_type = other DNA
cactcaatcaagtgcg

SEQ ID NO: 39870 - DNA, 16 bp, synthetic construct
  misc_feature 1..16: note = synthetic [barcode part1]
  source 1..16: mol_type = other DNA
acaattgacgcgtcgt

SEQ ID NO: 39871 - DNA, 16 bp, synthetic construct
  misc_feature 1..16: note = synthetic [barcode part1]
  source 1..16: mol_type = other DNA
gtcactaccttgtgcg

SEQ ID NO: 39872 - DNA, 16 bp, synthetic construct
  misc_feature 1..16: note = synthetic [barcode part1]
  source 1..16: mol_type = other DNA
ttgacgttcttagtcg

SEQ ID NO: 39873 - DNA, 16 bp, synthetic construct
  misc_feature 1..16: note = synthetic [barcode part1]
  source 1..16: mol_type = other DNA
gagattcgtagtgtcc

SEQ ID NO: 39874 - DNA, 16 bp, synthetic construct
  misc_feature 1..16: note = synthetic [barcode part1]
  source 1..16: mol_type = other DNA
gattcctatacggtct

SEQ ID NO: 39875 - DNA, 16 bp, synthetic construct
  misc_feature 1..16: note = synthetic [barcode part1]
  source 1..16: mol_type = other DNA
gagattatcagacacg

SEQ ID NO: 39876 - DNA, 16 bp, synthetic construct
  misc_feature 1..16: note = synthetic [barcode part1]
  source 1..16: mol_type = other DNA
agatccttgtaacgcg

SEQ ID NO: 39877 - DNA, 16 bp, synthetic construct
  misc_feature 1..16: note = synthetic [barcode part1]
  source 1..16: mol_type = other DNA
cggtgtctattgtgag

SEQ ID NO: 39878 - DNA, 16 bp, synthetic construct
  misc_feature 1..16: note = synthetic [barcode part1]
  source 1..16: mol_type = other DNA
ttggagttggagtctc

SEQ ID NO: 39879 - DNA, 16 bp, synthetic construct
  misc_feature 1..16: note = synthetic [barcode part1]
  source 1..16: mol_type = other DNA
ttgcactcggattgtt

SEQ ID NO: 39880 - DNA, 16 bp, synthetic construct
  misc_feature 1..16: note = synthetic [barcode part1]
  source 1..16: mol_type = other DNA
acttgagagactcacc

SEQ ID NO: 39881 - DNA, 16 bp, synthetic construct
  misc_feature 1..16: note = synthetic [barcode part1]
  source 1..16: mol_type = other DNA
ttatcggtacaggaag

SEQ ID NO: 39882 - DNA, 16 bp, synthetic construct
  misc_feature 1..16: note = synthetic [barcode part1]
  source 1..16: mol_type = other DNA
ttctgatccaggtgcc

SEQ ID NO: 39883 - DNA, 16 bp, synthetic construct
  misc_feature 1..16: note = synthetic [barcode part1]
  source 1..16: mol_type = other DNA
gaagtattcggtaacg

SEQ ID NO: 39884 - DNA, 16 bp, synthetic construct
  misc_feature 1..16: note = synthetic [barcode part1]
  source 1..16: mol_type = other DNA
gatataggtctctgcg

SEQ ID NO: 39885 - DNA, 16 bp, synthetic construct
  misc_feature 1..16: note = synthetic [barcode part1]
  source 1..16: mol_type = other DNA
tgactctaccgtgcgt

SEQ ID NO: 39886 - DNA, 16 bp, synthetic construct
  misc_feature 1..16: note = synthetic [barcode part1]
  source 1..16: mol_type = other DNA
taccactgacgcgtct

SEQ ID NO: 39887 - DNA, 16 bp, synthetic construct
  misc_feature 1..16: note = synthetic [barcode part1]
  source 1..16: mol_type = other DNA
gcgttaattggacgtc

SEQ ID NO: 39888 - DNA, 16 bp, synthetic construct
  misc_feature 1..16: note = synthetic [barcode part1]
  source 1..16: mol_type = other DNA
gagtacgcgatccaag

SEQ ID NO: 39889 - DNA, 16 bp, synthetic construct
  misc_feature 1..16: note = synthetic [barcode part1]
  source 1..16: mol_type = other DNA
attcactctgtccgtc

SEQ ID NO: 39890 - DNA, 16 bp, synthetic construct
  misc_feature 1..16: note = synthetic [barcode part1]
  source 1..16: mol_type = other DNA
acacggaatagtctag

SEQ ID NO: 39891 - DNA, 16 bp, synthetic construct
  misc_feature 1..16: note = synthetic [barcode part1]
  source 1..16: mol_type = other DNA
acaggccttctgtcac

SEQ ID NO: 39892 - DNA, 16 bp, synthetic construct
  misc_feature 1..16: note = synthetic [barcode part1]
  source 1..16: mol_type = other DNA
gccacagtggatagac

SEQ ID NO: 39893 - DNA, 16 bp, synthetic construct
  misc_feature 1..16: note = synthetic [barcode part1]
  source 1..16: mol_type = other DNA
tgtcgccacaaccact

SEQ ID NO: 39894 - DNA, 16 bp, synthetic construct
  misc_feature 1..16: note = synthetic [barcode part1]
  source 1..16: mol_type = other DNA
aaggttagtgcctaag

SEQ ID NO: 39895 - DNA, 16 bp, synthetic construct
  misc_feature 1..16: note = synthetic [barcode part1]
  source 1..16: mol_type = other DNA
ccactgtctgtagacc

SEQ ID NO: 39896 - DNA, 16 bp, synthetic construct
  misc_feature 1..16: note = synthetic [barcode part1]
  source 1..16: mol_type = other DNA
gtcactacgacaatcg

SEQ ID NO: 39897 - DNA, 16 bp, synthetic construct
  misc_feature 1..16: note = synthetic [barcode part1]
  source 1..16: mol_type = other DNA
acctactagaccttgt

SEQ ID NO: 39898 - DNA, 16 bp, synthetic construct
  misc_feature 1..16: note = synthetic [barcode part1]
  source 1..16: mol_type = other DNA
gtgtatccacctcacg

SEQ ID NO: 39899 - DNA, 16 bp, synthetic construct
  misc_feature 1..16: note = synthetic [barcode part1]
  source 1..16: mol_type = other DNA
ttacctggcggtgtct

SEQ ID NO: 39900 - DNA, 16 bp, synthetic construct
  misc_feature 1..16: note = synthetic [barcode part1]
  source 1..16: mol_type = other DNA
ccaatcagagacttcg

SEQ ID NO: 39901 - DNA, 16 bp, synthetic construct
  misc_feature 1..16: note = synthetic [barcode part1]
  source 1..16: mol_type = other DNA
gcgtgcaatatcacac

SEQ ID NO: 39902 - DNA, 16 bp, synthetic construct
  misc_feature 1..16: note = synthetic [barcode part1]
  source 1..16: mol_type = other DNA
tcgcaggtcgttatcc

SEQ ID NO: 39903 - DNA, 16 bp, synthetic construct
  misc_feature 1..16: note = synthetic [barcode part1]
  source 1..16: mol_type = other DNA
attcctgccgtcaggt

SEQ ID NO: 39904 - DNA, 16 bp, synthetic construct
  misc_feature 1..16: note = synthetic [barcode part1]
  source 1..16: mol_type = other DNA
tacgttcttcgcgtct

SEQ ID NO: 39905 - DNA, 16 bp, synthetic construct
  misc_feature 1..16: note = synthetic [barcode part1]
  source 1..16: mol_type = other DNA
cacacaggagtacctt

SEQ ID NO: 39906 - DNA, 16 bp, synthetic construct
  misc_feature 1..16: note = synthetic [barcode part1]
  source 1..16: mol_type = other DNA
ataggtcagttgtgcc

SEQ ID NO: 39907 - DNA, 16 bp, synthetic construct
  misc_feature 1..16: note = synthetic [barcode part1]
  source 1..16: mol_type = other DNA
tgaccaggcgtgtatt

SEQ ID NO: 39908 - DNA, 16 bp, synthetic construct
  misc_feature 1..16: note = synthetic [barcode part1]
  source 1..16: mol_type = other DNA
aagtgatcgcagattg

SEQ ID NO: 39909 - DNA, 16 bp, synthetic construct
  misc_feature 1..16: note = synthetic [barcode part1]
  source 1..16: mol_type = other DNA
cctaatcggtccttct

SEQ ID NO: 39910 - DNA, 16 bp, synthetic construct
  misc_feature 1..16: note = synthetic [barcode part1]
  source 1..16: mol_type = other DNA
gagttcgtcgttgcct

SEQ ID NO: 39911 - DNA, 16 bp, synthetic construct
  misc_feature 1..16: note = synthetic [barcode part1]
  source 1..16: mol_type = other DNA
tcggcaaggattacct

SEQ ID NO: 39912 - DNA, 16 bp, synthetic construct
  misc_feature 1..16: note = synthetic [barcode part1]
  source 1..16: mol_type = other DNA
ccttaactacaccagt

SEQ ID NO: 39913 - DNA, 16 bp, synthetic construct
  misc_feature 1..16: note = synthetic [barcode part1]
  source 1..16: mol_type = other DNA
tcacagtgatcggttg

SEQ ID NO: 39914 - DNA, 16 bp, synthetic construct
  misc_feature 1..16: note = synthetic [barcode part1]
  source 1..16: mol_type = other DNA
gtgattgcaattgcgc

SEQ ID NO: 39915 - DNA, 16 bp, synthetic construct
  misc_feature 1..16: note = synthetic [barcode part1]
  source 1..16: mol_type = other DNA
tcgttccaatctgtag

SEQ ID NO: 39916 - DNA, 16 bp, synthetic construct
  misc_feature 1..16: note = synthetic [barcode part1]
  source 1..16: mol_type = other DNA
agtccggactgaattc

SEQ ID NO: 39917 - DNA, 16 bp, synthetic construct
  misc_feature 1..16: note = synthetic [barcode part1]
  source 1..16: mol_type = other DNA
tgcgttataacgcgtg

SEQ ID NO: 39918 - DNA, 16 bp, synthetic construct
  misc_feature 1..16: note = synthetic [barcode part1]
  source 1..16: mol_type = other DNA
atcgccgattaggttg

SEQ ID NO: 39919 - DNA, 16 bp, synthetic construct
  misc_feature 1..16: note = synthetic [barcode part1]
  source 1..16: mol_type = other DNA
taccgttacggccgtt

SEQ ID NO: 39920 - DNA, 16 bp, synthetic construct
  misc_feature 1..16: note = synthetic [barcode part1]
  source 1..16: mol_type = other DNA
gtaatcgtgcagtcac

SEQ ID NO: 39921 - DNA, 16 bp, synthetic construct
  misc_feature 1..16: note = synthetic [barcode part1]
  source 1..16: mol_type = other DNA
gaactcgaggtgttct

SEQ ID NO: 39922 - DNA, 16 bp, synthetic construct
  misc_feature 1..16: note = synthetic [barcode part1]
  source 1..16: mol_type = other DNA
cagaaccgtgttacgt

SEQ ID NO: 39923 - DNA, 16 bp, synthetic construct
  misc_feature 1..16: note = synthetic [barcode part1]
  source 1..16: mol_type = other DNA
ttcctcgtactaacag

SEQ ID NO: 39924 - DNA, 16 bp, synthetic construct
  misc_feature 1..16: note = synthetic [barcode part1]
  source 1..16: mol_type = other DNA
aactgtggacttcttc

SEQ ID NO: 39925 - DNA, 16 bp, synthetic construct
  misc_feature 1..16: note = synthetic [barcode part1]
  source 1..16: mol_type = other DNA
taggccacgcacttct

SEQ ID NO: 39926 - DNA, 16 bp, synthetic construct
  misc_feature 1..16: note = synthetic [barcode part1]
  source 1..16: mol_type = other DNA
ttggtcctctacggac

SEQ ID NO: 39927 - DNA, 16 bp, synthetic construct
  misc_feature 1..16: note = synthetic [barcode part1]
  source 1..16: mol_type = other DNA
tacttaagaggcggcg

SEQ ID NO: 39928 - DNA, 16 bp, synthetic construct
  misc_feature 1..16: note = synthetic [barcode part1]
  source 1..16: mol_type = other DNA
cactctcactactaag

SEQ ID NO: 39929 - DNA, 16 bp, synthetic construct
  misc_feature 1..16: note = synthetic [barcode part1]
  source 1..16: mol_type = other DNA
acagtggaacagtgag

SEQ ID NO: 39930 - DNA, 16 bp, synthetic construct
  misc_feature 1..16: note = synthetic [barcode part1]
  source 1..16: mol_type = other DNA
ataccaggttatctcc

SEQ ID NO: 39931 - DNA, 16 bp, synthetic construct
  misc_feature 1..16: note = synthetic [barcode part1]
  source 1..16: mol_type = other DNA
caggtgtagaagttgt

SEQ ID NO: 39932 - DNA, 16 bp, synthetic construct
  misc_feature 1..16: note = synthetic [barcode part1]
  source 1..16: mol_type = other DNA
gcgtcagttcttaatc

SEQ ID NO: 39933 - DNA, 16 bp, synthetic construct
  misc_feature 1..16: note = synthetic [barcode part1]
  source 1..16: mol_type = other DNA
gagttggagaaggttg

SEQ ID NO: 39934 - DNA, 16 bp, synthetic construct
  misc_feature 1..16: note = synthetic [barcode part1]
  source 1..16: mol_type = other DNA
ttactggcacgaggag

SEQ ID NO: 39935 - DNA, 16 bp, synthetic construct
  misc_feature 1..16: note = synthetic [barcode part1]
  source 1..16: mol_type = other DNA
tagtatacgcggactc

SEQ ID NO: 39936 - DNA, 16 bp, synthetic construct
  misc_feature 1..16: note = synthetic [barcode part1]
  source 1..16: mol_type = other DNA
atagaagaccgaactc

SEQ ID NO: 39937 - DNA, 16 bp, synthetic construct
  misc_feature 1..16: note = synthetic [barcode part1]
  source 1..16: mol_type = other DNA
tcactgtggtggagtt

SEQ ID NO: 39938 - DNA, 16 bp, synthetic construct
  misc_feature 1..16: note = synthetic [barcode part1]
  source 1..16: mol_type = other DNA
aggattcctcgtccac

SEQ ID NO: 39939 - DNA, 16 bp, synthetic construct
  misc_feature 1..16: note = synthetic [barcode part1]
  source 1..16: mol_type = other DNA
cactattcggaggatc

SEQ ID NO: 39940 - DNA, 16 bp, synthetic construct
  misc_feature 1..16: note = synthetic [barcode part1]
  source 1..16: mol_type = other DNA
cgaattaccggatcgt

SEQ ID NO: 39941 - DNA, 16 bp, synthetic construct
  misc_feature 1..16: note = synthetic [barcode part1]
  source 1..16: mol_type = other DNA
ccttggtatcgttctc

SEQ ID NO: 39942 - DNA, 16 bp, synthetic construct
  misc_feature 1..16: note = synthetic [barcode part1]
  source 1..16: mol_type = other DNA
tgagatacgttgacag

SEQ ID NO: 39943 - DNA, 16 bp, synthetic construct
  misc_feature 1..16: note = synthetic [barcode part1]
  source 1..16: mol_type = other DNA
cactggattgtcaggt

SEQ ID NO: 39944 - DNA, 16 bp, synthetic construct
  misc_feature 1..16: note = synthetic [barcode part1]
  source 1..16: mol_type = other DNA
agacggaagtagacac

SEQ ID NO: 39945 - DNA, 16 bp, synthetic construct
  misc_feature 1..16: note = synthetic [barcode part1]
  source 1..16: mol_type = other DNA
tctgtcgttgagtatc

SEQ ID NO: 39946 - DNA, 16 bp, synthetic construct
  misc_feature 1..16: note = synthetic [barcode part1]
  source 1..16: mol_type = other DNA
gatactcgttcaggtg

SEQ ID NO: 39947 - DNA, 16 bp, synthetic construct
  misc_feature 1..16: note = synthetic [barcode part1]
  source 1..16: mol_type = other DNA
tggttccgtgcgttac

SEQ ID NO: 39948 - DNA, 16 bp, synthetic construct
  misc_feature 1..16: note = synthetic [barcode part1]
  source 1..16: mol_type = other DNA
tccaattgactcctcc

SEQ ID NO: 39949 - DNA, 16 bp, synthetic construct
  misc_feature 1..16: note = synthetic [barcode part1]
  source 1..16: mol_type = other DNA
ttagacacgtcactct

SEQ ID NO: 39950 - DNA, 16 bp, synthetic construct
  misc_feature 1..16: note = synthetic [barcode part1]
  source 1..16: mol_type = other DNA
cgcagtaggacaggtt

SEQ ID NO: 39951 - DNA, 16 bp, synthetic construct
  misc_feature 1..16: note = synthetic [barcode part1]
  source 1..16: mol_type = other DNA
ccggaatcgagatctt

SEQ ID NO: 39952 - DNA, 16 bp, synthetic construct
  misc_feature 1..16: note = synthetic [barcode part1]
  source 1..16: mol_type = other DNA
tgaaggcgtctaatag

SEQ ID NO: 39953 - DNA, 16 bp, synthetic construct
  misc_feature 1..16: note = synthetic [barcode part1]
  source 1..16: mol_type = other DNA
cgagtacttctgttgt

SEQ ID NO: 39954 - DNA, 16 bp, synthetic construct
  misc_feature 1..16: note = synthetic [barcode part1]
  source 1..16: mol_type = other DNA
caacgtggattcgtgt

SEQ ID NO: 39955 - DNA, 16 bp, synthetic construct
  misc_feature 1..16: note = synthetic [barcode part1]
  source 1..16: mol_type = other DNA
aggcctactgtcgtct

SEQ ID NO: 39956 - DNA, 16 bp, synthetic construct
  misc_feature 1..16: note = synthetic [barcode part1]
  source 1..16: mol_type = other DNA
aatccgtggatctacg

SEQ ID NO: 39957 - DNA, 16 bp, synthetic construct
  misc_feature 1..16: note = synthetic [barcode part1]
  source 1..16: mol_type = other DNA
cacacaatcgtacgac

SEQ ID NO: 39958 - DNA, 16 bp, synthetic construct
  misc_feature 1..16: note = synthetic [barcode part1]
  source 1..16: mol_type = other DNA
caacaacctagaccac

SEQ ID NO: 39959 - DNA, 16 bp, synthetic construct
  misc_feature 1..16: note = synthetic [barcode part1]
  source 1..16: mol_type = other DNA
cgccttacttattgcc

SEQ ID NO: 39960 - DNA, 16 bp, synthetic construct
  misc_feature 1..16: note = synthetic [barcode part1]
  source 1..16: mol_type = other DNA
taagaccgaagtctcc

SEQ ID NO: 39961 - DNA, 16 bp, synthetic construct
  misc_feature 1..16: note = synthetic [barcode part1]
  source 1..16: mol_type = other DNA
tactccgacgatagac

SEQ ID NO: 39962 - DNA, 16 bp, synthetic construct
  misc_feature 1..16: note = synthetic [barcode part1]
  source 1..16: mol_type = other DNA
gaacgtgaactgttag

SEQ ID NO: 39963 - DNA, 16 bp, synthetic construct
  misc_feature 1..16: note = synthetic [barcode part1]
  source 1..16: mol_type = other DNA
cgagagatagtgtgcc

SEQ ID NO: 39964 - DNA, 16 bp, synthetic construct
  misc_feature 1..16: note = synthetic [barcode part1]
  source 1..16: mol_type = other DNA
actggtaattcggacc

SEQ ID NO: 39965 - DNA, 16 bp, synthetic construct
  misc_feature 1..16: note = synthetic [barcode part1]
  source 1..16: mol_type = other DNA
gaacgcaactaggtcg

SEQ ID NO: 39966 - DNA, 16 bp, synthetic construct
  misc_feature 1..16: note = synthetic [barcode part1]
  source 1..16: mol_type = other DNA
tacctacttcgtccgt

SEQ ID NO: 39967 - DNA, 16 bp, synthetic construct
  misc_feature 1..16: note = synthetic [barcode part1]
  source 1..16: mol_type = other DNA
cctcacaggttcagtc

SEQ ID NO: 39968 - DNA, 16 bp, synthetic construct
  misc_feature 1..16: note = synthetic [barcode part1]
  source 1..16: mol_type = other DNA
gtggtgaacgagatag

SEQ ID NO: 39969 - DNA, 16 bp, synthetic construct
  misc_feature 1..16: note = synthetic [barcode part1]
  source 1..16: mol_type = other DNA
tctcctccagtatcgt

SEQ ID NO: 39970 - DNA, 16 bp, synthetic construct
  misc_feature 1..16: note = synthetic [barcode part1]
  source 1..16: mol_type = other DNA
acagtacgtgttgcac

SEQ ID NO: 39971 - DNA, 16 bp, synthetic construct
  misc_feature 1..16: note = synthetic [barcode part1]
  source 1..16: mol_type = other DNA
gaagacaggcggtctt

SEQ ID NO: 39972 - DNA, 16 bp, synthetic construct
  misc_feature 1..16: note = synthetic [barcode part1]
  source 1..16: mol_type = other DNA
atagagattgacggtc

SEQ ID NO: 39973 - DNA, 16 bp, synthetic construct
  misc_feature 1..16: note = synthetic [barcode part1]
  source 1..16: mol_type = other DNA
tcctccagtaaccgtg

SEQ ID NO: 39974 - DNA, 16 bp, synthetic construct
  misc_feature 1..16: note = synthetic [barcode part1]
  source 1..16: mol_type = other DNA
gaacttgtgtctcgcc

SEQ ID NO: 39975 - DNA, 16 bp, synthetic construct
  misc_feature 1..16: note = synthetic [barcode part1]
  source 1..16: mol_type = other DNA
acgactagttaacgcc

SEQ ID NO: 39976 - DNA, 16 bp, synthetic construct
  misc_feature 1..16: note = synthetic [barcode part1]
  source 1..16: mol_type = other DNA
tagaactccgatcggt

SEQ ID NO: 39977 - DNA, 16 bp, synthetic construct
  misc_feature 1..16: note = synthetic [barcode part1]
  source 1..16: mol_type = other DNA
cctagttcggtgcact

SEQ ID NO: 39978 - DNA, 16 bp, synthetic construct
  misc_feature 1..16: note = synthetic [barcode part1]
  source 1..16: mol_type = other DNA
tctgcgtgtcgaatcc

SEQ ID NO: 39979 - DNA, 16 bp, synthetic construct
  misc_feature 1..16: note = synthetic [barcode part1]
  source 1..16: mol_type = other DNA
tctaacggaacgtaag

SEQ ID NO: 39980 - DNA, 16 bp, synthetic construct
  misc_feature 1..16: note = synthetic [barcode part1]
  source 1..16: mol_type = other DNA
gtgtggttcttccggt

SEQ ID NO: 39981 - DNA, 16 bp, synthetic construct
  misc_feature 1..16: note = synthetic [barcode part1]
  source 1..16: mol_type = other DNA
ttgtgagacaggatac

SEQ ID NO: 39982 - DNA, 16 bp, synthetic construct
  misc_feature 1..16: note = synthetic [barcode part1]
  source 1..16: mol_type = other DNA
tcggttcgtggttgtc

SEQ ID NO: 39983 - DNA, 16 bp, synthetic construct
  misc_feature 1..16: note = synthetic [barcode part1]
  source 1..16: mol_type = other DNA
aatccggacgtcctct

SEQ ID NO: 39984 - DNA, 16 bp, synthetic construct
  misc_feature 1..16: note = synthetic [barcode part1]
  source 1..16: mol_type = other DNA
caacctatcacgcctg

SEQ ID NO: 39985 - DNA, 16 bp, synthetic construct
  misc_feature 1..16: note = synthetic [barcode part1]
  source 1..16: mol_type = other DNA
acaggtcctctcaatt

SEQ ID NO: 39986 - DNA, 16 bp, synthetic construct
  misc_feature 1..16: note = synthetic [barcode part1]
  source 1..16: mol_type = other DNA
ccagaaggttaaggag

SEQ ID NO: 39987 - DNA, 16 bp, synthetic construct
  misc_feature 1..16: note = synthetic [barcode part1]
  source 1..16: mol_type = other DNA
tatcttcggtccgacg

SEQ ID NO: 39988 - DNA, 16 bp, synthetic construct
  misc_feature 1..16: note = synthetic [barcode part1]
  source 1..16: mol_type = other DNA
tcacgtcaacgacctc

SEQ ID NO: 39989 - DNA, 16 bp, synthetic construct
  misc_feature 1..16: note = synthetic [barcode part1]
  source 1..16: mol_type = other DNA
ttatctcacgcgaccg

SEQ ID NO: 39990 - DNA, 16 bp, synthetic construct
  misc_feature 1..16: note = synthetic [barcode part1]
  source 1..16: mol_type = other DNA
gactatctatcaggcg

SEQ ID NO: 39991 - DNA, 16 bp, synthetic construct
  misc_feature 1..16: note = synthetic [barcode part1]
  source 1..16: mol_type = other DNA
gacgtactcttgatct

SEQ ID NO: 39992 - DNA, 16 bp, synthetic construct
  misc_feature 1..16: note = synthetic [barcode part1]
  source 1..16: mol_type = other DNA
tgacttgtgtcaggtg

SEQ ID NO: 39993 - DNA, 16 bp, synthetic construct
  misc_feature 1..16: note = synthetic [barcode part1]
  source 1..16: mol_type = other DNA
gatcgagacaatcgcg

SEQ ID NO: 39994 - DNA, 16 bp, synthetic construct
  misc_feature 1..16: note = synthetic [barcode part1]
  source 1..16: mol_type = other DNA
aggtcaggtcaacgtg

SEQ ID NO: 39995 - DNA, 16 bp, synthetic construct
  misc_feature 1..16: note = synthetic [barcode part1]
  source 1..16: mol_type = other DNA
aggtgtcgatacctgt

SEQ ID NO: 39996 - DNA, 16 bp, synthetic construct
  misc_feature 1..16: note = synthetic [barcode part1]
  source 1..16: mol_type = other DNA
gtagtgcaccgcaatt

SEQ ID NO: 39997 - DNA, 16 bp, synthetic construct
  misc_feature 1..16: note = synthetic [barcode part1]
  source 1..16: mol_type = other DNA
tataccgttccaactg

SEQ ID NO: 39998 - DNA, 16 bp, synthetic construct
  misc_feature 1..16: note = synthetic [barcode part1]
  source 1..16: mol_type = other DNA
tatacctaggcgtgac

SEQ ID NO: 39999 - DNA, 16 bp, synthetic construct
  misc_feature 1..16: note = synthetic [barcode part1]
  source 1..16: mol_type = other DNA
cactctgcactacttc

SEQ ID NO: 40000 - DNA, 16 bp, synthetic construct
  misc_feature 1..16: note = synthetic [barcode part1]
  source 1..16: mol_type = other DNA
gttgtggtattcgtct

SEQ ID NO: 40001 - DNA, 16 bp, synthetic construct
  misc_feature 1..16: note = synthetic [barcode part1]
  source 1..16: mol_type = other DNA
aactcgtgtggtggag

SEQ ID NO: 40002 - DNA, 16 bp, synthetic construct
  misc_feature 1..16: note = synthetic [barcode part1]
  source 1..16: mol_type = other DNA
agacgtgccgagttag

SEQ ID NO: 40003 - DNA, 16 bp, synthetic construct
  misc_feature 1..16: note = synthetic [barcode part1]
  source 1..16: mol_type = other DNA
atacgcggtacgtact

SEQ ID NO: 40004 - DNA, 16 bp, synthetic construct
  misc_feature 1..16: note = synthetic [barcode part1]
  source 1..16: mol_type = other DNA
ttccaagtgcctgtcg

SEQ ID NO: 40005 - DNA, 16 bp, synthetic construct
  misc_feature 1..16: note = synthetic [barcode part1]
  source 1..16: mol_type = other DNA
ttgatcctaccaacgt

SEQ ID NO: 40006 - DNA, 16 bp, synthetic construct
  misc_feature 1..16: note = synthetic [barcode part1]
  source 1..16: mol_type = other DNA
atcctatcaccttgcc

SEQ ID NO: 40007 - DNA, 16 bp, synthetic construct
  misc_feature 1..16: note = synthetic [barcode part1]
  source 1..16: mol_type = other DNA
ttagagaaggacgacg

SEQ ID NO: 40008 - DNA, 16 bp, synthetic construct
  misc_feature 1..16: note = synthetic [barcode part1]
  source 1..16: mol_type = other DNA
acagatattcgagacg

SEQ ID NO: 40009 - DNA, 16 bp, synthetic construct
  misc_feature 1..16: note = synthetic [barcode part1]
  source 1..16: mol_type = other DNA
gcaacgatactctgtg

SEQ ID NO: 40010 - DNA, 16 bp, synthetic construct
  misc_feature 1..16: note = synthetic [barcode part1]
  source 1..16: mol_type = other DNA
tgttcaccgcctatct

SEQ ID NO: 40011 - DNA, 16 bp, synthetic construct
  misc_feature 1..16: note = synthetic [barcode part1]
  source 1..16: mol_type = other DNA
actcaagtgagacggc

SEQ ID NO: 40012 - DNA, 16 bp, synthetic construct
  misc_feature 1..16: note = synthetic [barcode part1]
  source 1..16: mol_type = other DNA
atagaggccggcagtt

SEQ ID NO: 40013 - DNA, 16 bp, synthetic construct
  misc_feature 1..16: note = synthetic [barcode part1]
  source 1..16: mol_type = other DNA
tcgagttcttcacgcg

SEQ ID NO: 40014 - DNA, 16 bp, synthetic construct
  misc_feature 1..16: note = synthetic [barcode part1]
  source 1..16: mol_type = other DNA
acttgcctctaagatc

SEQ ID NO: 40015 - DNA, 16 bp, synthetic construct
  misc_feature 1..16: note = synthetic [barcode part1]
  source 1..16: mol_type = other DNA
tacgttgaccaacacg

SEQ ID NO: 40016 - DNA, 16 bp, synthetic construct
  misc_feature 1..16: note = synthetic [barcode part1]
  source 1..16: mol_type = other DNA
attcaaggtccgcagt

SEQ ID NO: 40017 - DNA, 16 bp, synthetic construct
  misc_feature 1..16: note = synthetic [barcode part1]
  source 1..16: mol_type = other DNA
cactcacagatcttac

SEQ ID NO: 40018 - DNA, 16 bp, synthetic construct
  misc_feature 1..16: note = synthetic [barcode part1]
  source 1..16: mol_type = other DNA
caagttgttaacggcc

SEQ ID NO: 40019 - DNA, 16 bp, synthetic construct
  misc_feature 1..16: note = synthetic [barcode part1]
  source 1..16: mol_type = other DNA
cactcgtatagtatcc

SEQ ID NO: 40020 - DNA, 16 bp, synthetic construct
  misc_feature 1..16: note = synthetic [barcode part1]
  source 1..16: mol_type = other DNA
gactgttgcaaggacg

SEQ ID NO: 40021 - DNA, 16 bp, synthetic construct
  misc_feature 1..16: note = synthetic [barcode part1]
  source 1..16: mol_type = other DNA
gaggccttactcgttc

SEQ ID NO: 40022 - DNA, 16 bp, synthetic construct
  misc_feature 1..16: note = synthetic [barcode part1]
  source 1..16: mol_type = other DNA
gttgtcagttggactg

SEQ ID NO: 40023 - DNA, 16 bp, synthetic construct
  misc_feature 1..16: note = synthetic [barcode part1]
  source 1..16: mol_type = other DNA
gactggattgtacaag

SEQ ID NO: 40024 - DNA, 16 bp, synthetic construct
  misc_feature 1..16: note = synthetic [barcode part1]
  source 1..16: mol_type = other DNA
gacttgagacctgatc

SEQ ID NO: 40025 - DNA, 16 bp, synthetic construct
  misc_feature 1..16: note = synthetic [barcode part1]
  source 1..16: mol_type = other DNA
cgataacaggagtgcc

SEQ ID NO: 40026 - DNA, 16 bp, synthetic construct
  misc_feature 1..16: note = synthetic [barcode part1]
  source 1..16: mol_type = other DNA
cagatcttgccgttcg

SEQ ID NO: 40027 - DNA, 16 bp, synthetic construct
  misc_feature 1..16: note = synthetic [barcode part1]
  source 1..16: mol_type = other DNA
gttcttacgtcttcgc

SEQ ID NO: 40028 - DNA, 16 bp, synthetic construct
  misc_feature 1..16: note = synthetic [barcode part1]
  source 1..16: mol_type = other DNA
cgatacgcgtagactt

SEQ ID NO: 40029 - DNA, 16 bp, synthetic construct
  misc_feature 1..16: note = synthetic [barcode part1]
  source 1..16: mol_type = other DNA
gcctatctgttacggc

SEQ ID NO: 40030 - DNA, 16 bp, synthetic construct
  misc_feature 1..16: note = synthetic [barcode part1]
  source 1..16: mol_type = other DNA
tgttgccaggtactcc

SEQ ID NO: 40031 - DNA, 16 bp, synthetic construct
  misc_feature 1..16: note = synthetic [barcode part1]
  source 1..16: mol_type = other DNA
caacttggaatcgtcg

SEQ ID NO: 40032 - DNA, 16 bp, synthetic construct
  misc_feature 1..16: note = synthetic [barcode part1]
  source 1..16: mol_type = other DNA
tactctaggtacttgc

SEQ ID NO: 40033 - DNA, 16 bp, synthetic construct
  misc_feature 1..16: note = synthetic [barcode part1]
  source 1..16: mol_type = other DNA
ttaatctccacgtggt

SEQ ID NO: 40034 - DNA, 16 bp, synthetic construct
  misc_feature 1..16: note = synthetic [barcode part1]
  source 1..16: mol_type = other DNA
tgtcaacctgaagaag

SEQ ID NO: 40035 - DNA, 16 bp, synthetic construct
  misc_feature 1..16: note = synthetic [barcode part1]
  source 1..16: mol_type = other DNA
tcttacggttgccggt

SEQ ID NO: 40036 - DNA, 16 bp, synthetic construct
  misc_feature 1..16: note = synthetic [barcode part1]
  source 1..16: mol_type = other DNA
gtgcgcgattacaact

SEQ ID NO: 40037 - DNA, 16 bp, synthetic construct
  misc_feature 1..16: note = synthetic [barcode part1]
  source 1..16: mol_type = other DNA
cctactatcctcgact

SEQ ID NO: 40038 - DNA, 16 bp, synthetic construct
  misc_feature 1..16: note = synthetic [barcode part1]
  source 1..16: mol_type = other DNA
agttcacttcgtcgcg

SEQ ID NO: 40039 - DNA, 16 bp, synthetic construct
  misc_feature 1..16: note = synthetic [barcode part1]
  source 1..16: mol_type = other DNA
aacgcgaacaagaacg

SEQ ID NO: 40040 - DNA, 16 bp, synthetic construct
  misc_feature 1..16: note = synthetic [barcode part1]
  source 1..16: mol_type = other DNA
tacttctatcggatcg

SEQ ID NO: 40041 - DNA, 16 bp, synthetic construct
  misc_feature 1..16: note = synthetic [barcode part1]
  source 1..16: mol_type = other DNA
caatacggactacacc

SEQ ID NO: 40042 - DNA, 16 bp, synthetic construct
  misc_feature 1..16: note = synthetic [barcode part1]
  source 1..16: mol_type = other DNA
tagtacgcgtagactc

SEQ ID NO: 40043 - DNA, 16 bp, synthetic construct
  misc_feature 1..16: note = synthetic [barcode part1]
  source 1..16: mol_type = other DNA
tcggttcgcagaatac

SEQ ID NO: 40044 - DNA, 16 bp, synthetic construct
  misc_feature 1..16: note = synthetic [barcode part1]
  source 1..16: mol_type = other DNA
cgtaggtctcgttatt

SEQ ID NO: 40045 - DNA, 16 bp, synthetic construct
  misc_feature 1..16: note = synthetic [barcode part1]
  source 1..16: mol_type = other DNA
tggcaagattccgttg

SEQ ID NO: 40046 - DNA, 16 bp, synthetic construct
  misc_feature 1..16: note = synthetic [barcode part1]
  source 1..16: mol_type = other DNA
atcctagtgcagtacg

SEQ ID NO: 40047 - DNA, 16 bp, synthetic construct
  misc_feature 1..16: note = synthetic [barcode part1]
  source 1..16: mol_type = other DNA
tactggattaccaggc

SEQ ID NO: 40048 - DNA, 16 bp, synthetic construct
  misc_feature 1..16: note = synthetic [barcode part1]
  source 1..16: mol_type = other DNA
agtactgcacagtgtc

SEQ ID NO: 40049 - DNA, 16 bp, synthetic construct
  misc_feature 1..16: note = synthetic [barcode part1]
  source 1..16: mol_type = other DNA
tgtaggcggcaggatt

SEQ ID NO: 40050 - DNA, 16 bp, synthetic construct
  misc_feature 1..16: note = synthetic [barcode part1]
  source 1..16: mol_type = other DNA
tgagtgtgacttgtgc

SEQ ID NO: 40051 - DNA, 16 bp, synthetic construct
  misc_feature 1..16: note = synthetic [barcode part1]
  source 1..16: mol_type = other DNA
tagaattgtaccgcgc

SEQ ID NO: 40052 - DNA, 16 bp, synthetic construct
  misc_feature 1..16: note = synthetic [barcode part1]
  source 1..16: mol_type = other DNA
aggacaatagacacct

SEQ ID NO: 40053 - DNA, 16 bp, synthetic construct
  misc_feature 1..16: note = synthetic [barcode part1]
  source 1..16: mol_type = other DNA
caatagttctccacgt

SEQ ID NO: 40054 - DNA, 16 bp, synthetic construct
  misc_feature 1..16: note = synthetic [barcode part1]
  source 1..16: mol_type = other DNA
gtctagagtggcagac

SEQ ID NO: 40055 - DNA, 16 bp, synthetic construct
  misc_feature 1..16: note = synthetic [barcode part1]
  source 1..16: mol_type = other DNA
acgtgcagatcagtct

SEQ ID NO: 40056 - DNA, 16 bp, synthetic construct
  misc_feature 1..16: note = synthetic [barcode part1]
  source 1..16: mol_type = other DNA
agaacctcttgttcac

SEQ ID NO: 40057 - DNA, 16 bp, synthetic construct
  misc_feature 1..16: note = synthetic [barcode part1]
  source 1..16: mol_type = other DNA
gttagtcgtaccacag

SEQ ID NO: 40058 - DNA, 16 bp, synthetic construct
  misc_feature 1..16: note = synthetic [barcode part1]
  source 1..16: mol_type = other DNA
gagattcaggtggacc

SEQ ID NO: 40059 - DNA, 16 bp, synthetic construct
  misc_feature 1..16: note = synthetic [barcode part1]
  source 1..16: mol_type = other DNA
ccaatccgaatacttc

SEQ ID NO: 40060 - DNA, 16 bp, synthetic construct
  misc_feature 1..16: note = synthetic [barcode part1]
  source 1..16: mol_type = other DNA
acgtaggtgttaggcg

SEQ ID NO: 40061 - DNA, 16 bp, synthetic construct
  misc_feature 1..16: note = synthetic [barcode part1]
  source 1..16: mol_type = other DNA
atatcttcgatccggt

SEQ ID NO: 40062 - DNA, 16 bp, synthetic construct
  misc_feature 1..16: note = synthetic [barcode part1]
  source 1..16: mol_type = other DNA
tatcgagacctaacgc

SEQ ID NO: 40063 - DNA, 16 bp, synthetic construct
  misc_feature 1..16: note = synthetic [barcode part1]
  source 1..16: mol_type = other DNA
gtgttagttccgttac

SEQ ID NO: 40064 - DNA, 16 bp, synthetic construct
  misc_feature 1..16: note = synthetic [barcode part1]
  source 1..16: mol_type = other DNA
cacttacaggtcttgt

SEQ ID NO: 40065 - DNA, 16 bp, synthetic construct
  misc_feature 1..16: note = synthetic [barcode part1]
  source 1..16: mol_type = other DNA
gattacaccagttcct

SEQ ID NO: 40066 - DNA, 16 bp, synthetic construct
  misc_feature 1..16: note = synthetic [barcode part1]
  source 1..16: mol_type = other DNA
gacgtgattacgtctg

SEQ ID NO: 40067 - DNA, 16 bp, synthetic construct
  misc_feature 1..16: note = synthetic [barcode part1]
  source 1..16: mol_type = other DNA
tcttgtatctccgcac

SEQ ID NO: 40068 - DNA, 16 bp, synthetic construct
  misc_feature 1..16: note = synthetic [barcode part1]
  source 1..16: mol_type = other DNA
aggtaccaggcctatt

SEQ ID NO: 40069 - DNA, 16 bp, synthetic construct
  misc_feature 1..16: note = synthetic [barcode part1]
  source 1..16: mol_type = other DNA
taaggccttggaacct

SEQ ID NO: 40070 - DNA, 16 bp, synthetic construct
  misc_feature 1..16: note = synthetic [barcode part1]
  source 1..16: mol_type = other DNA
aaccacgtcctctggt

SEQ ID NO: 40071 - DNA, 16 bp, synthetic construct
  misc_feature 1..16: note = synthetic [barcode part1]
  source 1..16: mol_type = other DNA
cactcggatacttgag

SEQ ID NO: 40072 - DNA, 16 bp, synthetic construct
  misc_feature 1..16: note = synthetic [barcode part1]
  source 1..16: mol_type = other DNA
gtacctacctactgcg

SEQ ID NO: 40073 - DNA, 16 bp, synthetic construct
  misc_feature 1..16: note = synthetic [barcode part1]
  source 1..16: mol_type = other DNA
acactcacacttggag

SEQ ID NO: 40074 - DNA, 16 bp, synthetic construct
  misc_feature 1..16: note = synthetic [barcode part1]
  source 1..16: mol_type = other DNA
acttcttacaccagtg

SEQ ID NO: 40075 - DNA, 16 bp, synthetic construct
  misc_feature 1..16: note = synthetic [barcode part1]
  source 1..16: mol_type = other DNA
agtaccacagtaccac

SEQ ID NO: 40076 - DNA, 16 bp, synthetic construct
  misc_feature 1..16: note = synthetic [barcode part1]
  source 1..16: mol_type = other DNA
ccggtaccaactatag

SEQ ID NO: 40077 - DNA, 16 bp, synthetic construct
  misc_feature 1..16: note = synthetic [barcode part1]
  source 1..16: mol_type = other DNA
cactcgcgaacgaatt

SEQ ID NO: 40078 - DNA, 16 bp, synthetic construct
  misc_feature 1..16: note = synthetic [barcode part1]
  source 1..16: mol_type = other DNA
acaaggaccttcacgt

SEQ ID NO: 40079 - DNA, 16 bp, synthetic construct
  misc_feature 1..16: note = synthetic [barcode part1]
  source 1..16: mol_type = other DNA
tatcttcgcgtggaag

SEQ ID NO: 40080 - DNA, 16 bp, synthetic construct
  misc_feature 1..16: note = synthetic [barcode part1]
  source 1..16: mol_type = other DNA
aagtcgtggtgcgaac

SEQ ID NO: 40081 - DNA, 16 bp, synthetic construct
  misc_feature 1..16: note = synthetic [barcode part1]
  source 1..16: mol_type = other DNA
gtaatcactctctggt

SEQ ID NO: 40082 - DNA, 16 bp, synthetic construct
  misc_feature 1..16: note = synthetic [barcode part1]
  source 1..16: mol_type = other DNA
gcagttggtacgttgt

SEQ ID NO: 40083 - DNA, 16 bp, synthetic construct
  misc_feature 1..16: note = synthetic [barcode part1]
  source 1..16: mol_type = other DNA
gtctgccgtgacactt

SEQ ID NO: 40084 - DNA, 16 bp, synthetic construct
  misc_feature 1..16: note = synthetic [barcode part1]
  source 1..16: mol_type = other DNA
cacgttagagagattg

SEQ ID NO: 40085 - DNA, 16 bp, synthetic construct
  misc_feature 1..16: note = synthetic [barcode part1]
  source 1..16: mol_type = other DNA
ttgaacgccacgaatc

SEQ ID NO: 40086 - DNA, 16 bp, synthetic construct
  misc_feature 1..16: note = synthetic [barcode part1]
  source 1..16: mol_type = other DNA
tcgtagactgtacgac

SEQ ID NO: 40087 - DNA, 16 bp, synthetic construct
  misc_feature 1..16: note = synthetic [barcode part1]
  source 1..16: mol_type = other DNA
accttacagtgcactt

SEQ ID NO: 40088 - DNA, 16 bp, synthetic construct
  misc_feature 1..16: note = synthetic [barcode part1]
  source 1..16: mol_type = other DNA
acacgaggttcgacag

SEQ ID NO: 40089 - DNA, 16 bp, synthetic construct
  misc_feature 1..16: note = synthetic [barcode part1]
  source 1..16: mol_type = other DNA
agacaggtagataggc

SEQ ID NO: 40090 - DNA, 16 bp, synthetic construct
  misc_feature 1..16: note = synthetic [barcode part1]
  source 1..16: mol_type = other DNA
tccttggacacaccac

SEQ ID NO: 40091 - DNA, 16 bp, synthetic construct
  misc_feature 1..16: note = synthetic [barcode part1]
  source 1..16: mol_type = other DNA
acagtcacacagttgc

SEQ ID NO: 40092 - DNA, 16 bp, synthetic construct
  misc_feature 1..16: note = synthetic [barcode part1]
  source 1..16: mol_type = other DNA
aggcctcggttaattg

SEQ ID NO: 40093 - DNA, 16 bp, synthetic construct
  misc_feature 1..16: note = synthetic [barcode part1]
  source 1..16: mol_type = other DNA
agacgaggtctatctc

SEQ ID NO: 40094 - DNA, 16 bp, synthetic construct
  misc_feature 1..16: note = synthetic [barcode part1]
  source 1..16: mol_type = other DNA
attgtgcaactacgcg

SEQ ID NO: 40095 - DNA, 16 bp, synthetic construct
  misc_feature 1..16: note = synthetic [barcode part1]
  source 1..16: mol_type = other DNA
caggtgtattaggagt

SEQ ID NO: 40096 - DNA, 16 bp, synthetic construct
  misc_feature 1..16: note = synthetic [barcode part1]
  source 1..16: mol_type = other DNA
aggtacttgcctagac

SEQ ID NO: 40097 - DNA, 16 bp, synthetic construct
  misc_feature 1..16: note = synthetic [barcode part1]
  source 1..16: mol_type = other DNA
tatcagagagtcgcct

SEQ ID NO: 40098 - DNA, 16 bp, synthetic construct
  misc_feature 1..16: note = synthetic [barcode part1]
  source 1..16: mol_type = other DNA
actcctctgtgattag

SEQ ID NO: 40099 - DNA, 16 bp, synthetic construct
  misc_feature 1..16: note = synthetic [barcode part1]
  source 1..16: mol_type = other DNA
attcttcgcactagtg

SEQ ID NO: 40100 - DNA, 16 bp, synthetic construct
  misc_feature 1..16: note = synthetic [barcode part1]
  source 1..16: mol_type = other DNA
cgccaacaagaggttg

SEQ ID NO: 40101 - DNA, 16 bp, synthetic construct
  misc_feature 1..16: note = synthetic [barcode part1]
  source 1..16: mol_type = other DNA
ttatctcacgcagttg

SEQ ID NO: 40102 - DNA, 16 bp, synthetic construct
  misc_feature 1..16: note = synthetic [barcode part1]
  source 1..16: mol_type = other DNA
tacagtcctccaccag

SEQ ID NO: 40103 - DNA, 16 bp, synthetic construct
  misc_feature 1..16: note = synthetic [barcode part1]
  source 1..16: mol_type = other DNA
ccgacagtgttcttgc

SEQ ID NO: 40104 - DNA, 16 bp, synthetic construct
  misc_feature 1..16: note = synthetic [barcode part1]
  source 1..16: mol_type = other DNA
atctcgtgcagagtgt

SEQ ID NO: 40105 - DNA, 16 bp, synthetic construct
  misc_feature 1..16: note = synthetic [barcode part1]
  source 1..16: mol_type = other DNA
aactaaggacgtgccg

SEQ ID NO: 40106 - DNA, 16 bp, synthetic construct
  misc_feature 1..16: note = synthetic [barcode part1]
  source 1..16: mol_type = other DNA
aggagtccgatacacg

SEQ ID NO: 40107 - DNA, 16 bp, synthetic construct
  misc_feature 1..16: note = synthetic [barcode part1]
  source 1..16: mol_type = other DNA
tcgtctccgtgaatcg

SEQ ID NO: 40108 - DNA, 16 bp, synthetic construct
  misc_feature 1..16: note = synthetic [barcode part1]
  source 1..16: mol_type = other DNA
cctgaatcgagtctag

SEQ ID NO: 40109 - DNA, 16 bp, synthetic construct
  misc_feature 1..16: note = synthetic [barcode part1]
  source 1..16: mol_type = other DNA
ttggcaaggtaacctc

SEQ ID NO: 40110 - DNA, 16 bp, synthetic construct
  misc_feature 1..16: note = synthetic [barcode part1]
  source 1..16: mol_type = other DNA
gcagtatcggtgttac

SEQ ID NO: 40111 - DNA, 16 bp, synthetic construct
  misc_feature 1..16: note = synthetic [barcode part1]
  source 1..16: mol_type = other DNA
tcttggcactaaggac

SEQ ID NO: 40112 - DNA, 16 bp, synthetic construct
  misc_feature 1..16: note = synthetic [barcode part1]
  source 1..16: mol_type = other DNA
aactagattcgtggag

SEQ ID NO: 40113 - DNA, 16 bp, synthetic construct
  misc_feature 1..16: note = synthetic [barcode part1]
  source 1..16: mol_type = other DNA
taggagactctctggt

SEQ ID NO: 40114 - DNA, 16 bp, synthetic construct
  misc_feature 1..16: note = synthetic [barcode part1]
  source 1..16: mol_type = other DNA
tataactggaacggtg

SEQ ID NO: 40115 - DNA, 16 bp, synthetic construct
  misc_feature 1..16: note = synthetic [barcode part1]
  source 1..16: mol_type = other DNA
atctgtgcgtagatcg

SEQ ID NO: 40116 - DNA, 16 bp, synthetic construct
  misc_feature 1..16: note = synthetic [barcode part1]
  source 1..16: mol_type = other DNA
gtcgcacttgaatacg

SEQ ID NO: 40117 - DNA, 16 bp, synthetic construct
  misc_feature 1..16: note = synthetic [barcode part1]
  source 1..16: mol_type = other DNA
tcgtctcttaggtgcg

SEQ ID NO: 40118 - DNA, 16 bp, synthetic construct
  misc_feature 1..16: note = synthetic [barcode part1]
  source 1..16: mol_type = other DNA
ttaatactgcgcggtg

SEQ ID NO: 40119 - DNA, 16 bp, synthetic construct
  misc_feature 1..16: note = synthetic [barcode part1]
  source 1..16: mol_type = other DNA
tcacttgcctatccgt

SEQ ID NO: 40120 - DNA, 16 bp, synthetic construct
  misc_feature 1..16: note = synthetic [barcode part1]
  source 1..16: mol_type = other DNA
cagtaatcgcggaggt

SEQ ID NO: 40121 - DNA, 16 bp, synthetic construct
  misc_feature 1..16: note = synthetic [barcode part1]
  source 1..16: mol_type = other DNA
aagaggcctcaacttc

SEQ ID NO: 40122 - DNA, 16 bp, synthetic construct
  misc_feature 1..16: note = synthetic [barcode part1]
  source 1..16: mol_type = other DNA
tgaccagatcaaccgt

SEQ ID NO: 40123 - DNA, 16 bp, synthetic construct
  misc_feature 1..16: note = synthetic [barcode part1]
  source 1..16: mol_type = other DNA
acaacacctccagaac

SEQ ID NO: 40124 - DNA, 16 bp, synthetic construct
  misc_feature 1..16: note = synthetic [barcode part1]
  source 1..16: mol_type = other DNA
tatcggtagaggaccg

SEQ ID NO: 40125 - DNA, 16 bp, synthetic construct
  misc_feature 1..16: note = synthetic [barcode part1]
  source 1..16: mol_type = other DNA
cggtagttaacgacct

SEQ ID NO: 40126 - DNA, 16 bp, synthetic construct
  misc_feature 1..16: note = synthetic [barcode part1]
  source 1..16: mol_type = other DNA
cactcctcggtagttg

SEQ ID NO: 40127 - DNA, 16 bp, synthetic construct
  misc_feature 1..16: note = synthetic [barcode part1]
  source 1..16: mol_type = other DNA
cgcctactagacaagt

SEQ ID NO: 40128 - DNA, 16 bp, synthetic construct
  misc_feature 1..16: note = synthetic [barcode part1]
  source 1..16: mol_type = other DNA
tcaagtggaacctacc

SEQ ID NO: 40129 - DNA, 16 bp, synthetic construct
  misc_feature 1..16: note = synthetic [barcode part1]
  source 1..16: mol_type = other DNA
aggtgtgaaccaccag

SEQ ID NO: 40130 - DNA, 16 bp, synthetic construct
  misc_feature 1..16: note = synthetic [barcode part1]
  source 1..16: mol_type = other DNA
acgttcagtgaatccg

SEQ ID NO: 40131 - DNA, 16 bp, synthetic construct
  misc_feature 1..16: note = synthetic [barcode part1]
  source 1..16: mol_type = other DNA
cagtacaaggaaccgc

SEQ ID NO: 40132 - DNA, 16 bp, synthetic construct
  misc_feature 1..16: note = synthetic [barcode part1]
  source 1..16: mol_type = other DNA
acacagtagaactgac

SEQ ID NO: 40133 - DNA, 16 bp, synthetic construct
  misc_feature 1..16: note = synthetic [barcode part1]
  source 1..16: mol_type = other DNA
gacaaccaagacgcgt

SEQ ID NO: 40134 - DNA, 16 bp, synthetic construct
  misc_feature 1..16: note = synthetic [barcode part1]
  source 1..16: mol_type = other DNA
gttcggactgttccgt

SEQ ID NO: 40135 - DNA, 16 bp, synthetic construct
  misc_feature 1..16: note = synthetic [barcode part1]
  source 1..16: mol_type = other DNA
tgtggcaggtgagtgt

SEQ ID NO: 40136 - DNA, 16 bp, synthetic construct
  misc_feature 1..16: note = synthetic [barcode part1]
  source 1..16: mol_type = other DNA
tattccaactccgtcc

SEQ ID NO: 40137 - DNA, 16 bp, synthetic construct
  misc_feature 1..16: note = synthetic [barcode part1]
  source 1..16: mol_type = other DNA
gacttcagtagacaag

SEQ ID NO: 40138 - DNA, 16 bp, synthetic construct
  misc_feature 1..16: note = synthetic [barcode part1]
  source 1..16: mol_type = other DNA
agagattcgactgtag

SEQ ID NO: 40139 - DNA, 16 bp, synthetic construct
  misc_feature 1..16: note = synthetic [barcode part1]
  source 1..16: mol_type = other DNA
gttgtgttgacagaag

SEQ ID NO: 40140 - DNA, 16 bp, synthetic construct
  misc_feature 1..16: note = synthetic [barcode part1]
  source 1..16: mol_type = other DNA
cagacaggacaagtag

SEQ ID NO: 40141 - DNA, 16 bp, synthetic construct
  misc_feature 1..16: note = synthetic [barcode part1]
  source 1..16: mol_type = other DNA
tgattgccggagagtg

SEQ ID NO: 40142 - DNA, 16 bp, synthetic construct
  misc_feature 1..16: note = synthetic [barcode part1]
  source 1..16: mol_type = other DNA
ttctgtggactatcgt

SEQ ID NO: 40143 - DNA, 16 bp, synthetic construct
  misc_feature 1..16: note = synthetic [barcode part1]
  source 1..16: mol_type = other DNA
acgacgcgttaactac

SEQ ID NO: 40144 - DNA, 16 bp, synthetic construct
  misc_feature 1..16: note = synthetic [barcode part1]
  source 1..16: mol_type = other DNA
gcgaagtaccttatcg

SEQ ID NO: 40145 - DNA, 16 bp, synthetic construct
  misc_feature 1..16: note = synthetic [barcode part1]
  source 1..16: mol_type = other DNA
tgaacgtgtgtgactc

SEQ ID NO: 40146 - DNA, 16 bp, synthetic construct
  misc_feature 1..16: note = synthetic [barcode part1]
  source 1..16: mol_type = other DNA
acgtcaacttctaacc

SEQ ID NO: 40147 - DNA, 16 bp, synthetic construct
  misc_feature 1..16: note = synthetic [barcode part1]
  source 1..16: mol_type = other DNA
cactgaactacacttc

SEQ ID NO: 40148 - DNA, 16 bp, synthetic construct
  misc_feature 1..16: note = synthetic [barcode part1]
  source 1..16: mol_type = other DNA
gttgactgtgttgcag

SEQ ID NO: 40149 - DNA, 16 bp, synthetic construct
  misc_feature 1..16: note = synthetic [barcode part1]
  source 1..16: mol_type = other DNA
taagtgtgtacggcct

SEQ ID NO: 40150 - DNA, 16 bp, synthetic construct
  misc_feature 1..16: note = synthetic [barcode part1]
  source 1..16: mol_type = other DNA
agactaccgttcttac

SEQ ID NO: 40151 - DNA, 16 bp, synthetic construct
  misc_feature 1..16: note = synthetic [barcode part1]
  source 1..16: mol_type = other DNA
gagacctgaatctcgt

SEQ ID NO: 40152 - DNA, 16 bp, synthetic construct
  misc_feature 1..16: note = synthetic [barcode part1]
  source 1..16: mol_type = other DNA
tactgagagtggttcc

SEQ ID NO: 40153 - DNA, 16 bp, synthetic construct
  misc_feature 1..16: note = synthetic [barcode part1]
  source 1..16: mol_type = other DNA
cgtgataactccgaac

SEQ ID NO: 40154 - DNA, 16 bp, synthetic construct
  misc_feature 1..16: note = synthetic [barcode part1]
  source 1..16: mol_type = other DNA
gtacgtgtcggaactt

SEQ ID NO: 40155 - DNA, 16 bp, synthetic construct
  misc_feature 1..16: note = synthetic [barcode part1]
  source 1..16: mol_type = other DNA
ttcactatcctcgacc

SEQ ID NO: 40156 - DNA, 16 bp, synthetic construct
  misc_feature 1..16: note = synthetic [barcode part1]
  source 1..16: mol_type = other DNA
atcgcgccgattcttg

SEQ ID NO: 40157 - DNA, 16 bp, synthetic construct
  misc_feature 1..16: note = synthetic [barcode part1]
  source 1..16: mol_type = other DNA
gaggatactgtcaagt

SEQ ID NO: 40158 - DNA, 16 bp, synthetic construct
  misc_feature 1..16: note = synthetic [barcode part1]
  source 1..16: mol_type = other DNA
gaacgttactcgtgac

SEQ ID NO: 40159 - DNA, 16 bp, synthetic construct
  misc_feature 1..16: note = synthetic [barcode part1]
  source 1..16: mol_type = other DNA
ttacgttcaggaacgc

SEQ ID NO: 40160 - DNA, 16 bp, synthetic construct
  misc_feature 1..16: note = synthetic [barcode part1]
  source 1..16: mol_type = other DNA
actcaaccagtggttg

SEQ ID NO: 40161 - DNA, 16 bp, synthetic construct
  misc_feature 1..16: note = synthetic [barcode part1]
  source 1..16: mol_type = other DNA
tgactagagtcttggc

SEQ ID NO: 40162 - DNA, 16 bp, synthetic construct
  misc_feature 1..16: note = synthetic [barcode part1]
  source 1..16: mol_type = other DNA
tgtgttccacttccgt

SEQ ID NO: 40163 - DNA, 16 bp, synthetic construct
  misc_feature 1..16: note = synthetic [barcode part1]
  source 1..16: mol_type = other DNA
cgtacgcaatcaatcg

SEQ ID NO: 40164 - DNA, 16 bp, synthetic construct
  misc_feature 1..16: note = synthetic [barcode part1]
  source 1..16: mol_type = other DNA
caccgaactcgtgtct

SEQ ID NO: 40165 - DNA, 16 bp, synthetic construct
  misc_feature 1..16: note = synthetic [barcode part1]
  source 1..16: mol_type = other DNA
gacagaaccaatacgt

SEQ ID NO: 40166 - DNA, 16 bp, synthetic construct
  misc_feature 1..16: note = synthetic [barcode part1]
  source 1..16: mol_type = other DNA
actagtcaaccggttg

SEQ ID NO: 40167 - DNA, 16 bp, synthetic construct
  misc_feature 1..16: note = synthetic [barcode part1]
  source 1..16: mol_type = other DNA
tgatcgtcctacagag

SEQ ID NO: 40168 - DNA, 16 bp, synthetic construct
  misc_feature 1..16: note = synthetic [barcode part1]
  source 1..16: mol_type = other DNA
tgttgcactgaccaag

SEQ ID NO: 40169 - DNA, 16 bp, synthetic construct
  misc_feature 1..16: note = synthetic [barcode part1]
  source 1..16: mol_type = other DNA
aagagtaccgccgaac

SEQ ID NO: 40170 - DNA, 16 bp, synthetic construct
  misc_feature 1..16: note = synthetic [barcode part1]
  source 1..16: mol_type = other DNA
tccgtatagaggcact

SEQ ID NO: 40171 - DNA, 16 bp, synthetic construct
  misc_feature 1..16: note = synthetic [barcode part1]
  source 1..16: mol_type = other DNA
aagtagtggtcgcgtg

SEQ ID NO: 40172 - DNA, 16 bp, synthetic construct
  misc_feature 1..16: note = synthetic [barcode part1]
  source 1..16: mol_type = other DNA
ttgttactatccggac

SEQ ID NO: 40173 - DNA, 16 bp, synthetic construct
  misc_feature 1..16: note = synthetic [barcode part1]
  source 1..16: mol_type = other DNA
tccacctcgagattcg

SEQ ID NO: 40174 - DNA, 16 bp, synthetic construct
  misc_feature 1..16: note = synthetic [barcode part1]
  source 1..16: mol_type = other DNA
tcactacactctgcct

SEQ ID NO: 40175 - DNA, 16 bp, synthetic construct
  misc_feature 1..16: note = synthetic [barcode part1]
  source 1..16: mol_type = other DNA
gtctccactcaacgac

SEQ ID NO: 40176 - DNA, 16 bp, synthetic construct
  misc_feature 1..16: note = synthetic [barcode part1]
  source 1..16: mol_type = other DNA
agtcggtgaagtctct

SEQ ID NO: 40177 - DNA, 16 bp, synthetic construct
  misc_feature 1..16: note = synthetic [barcode part1]
  source 1..16: mol_type = other DNA
caagataaggcacttg

SEQ ID NO: 40178 - DNA, 16 bp, synthetic construct
  misc_feature 1..16: note = synthetic [barcode part1]
  source 1..16: mol_type = other DNA
cctcactgttctatcg

SEQ ID NO: 40179 - DNA, 16 bp, synthetic construct
  misc_feature 1..16: note = synthetic [barcode part1]
  source 1..16: mol_type = other DNA
tctccgaacgcgttac

SEQ ID NO: 40180 - DNA, 16 bp, synthetic construct
  misc_feature 1..16: note = synthetic [barcode part1]
  source 1..16: mol_type = other DNA
tacctactccacctgt

SEQ ID NO: 40181 - DNA, 16 bp, synthetic construct
  misc_feature 1..16: note = synthetic [barcode part1]
  source 1..16: mol_type = other DNA
gattcggaccgttagt

SEQ ID NO: 40182 - DNA, 16 bp, synthetic construct
  misc_feature 1..16: note = synthetic [barcode part1]
  source 1..16: mol_type = other DNA
ttacgttctcaacgac

SEQ ID NO: 40183 - DNA, 16 bp, synthetic construct
  misc_feature 1..16: note = synthetic [barcode part1]
  source 1..16: mol_type = other DNA
tcgacctagattggac

SEQ ID NO: 40184 - DNA, 16 bp, synthetic construct
  misc_feature 1..16: note = synthetic [barcode part1]
  source 1..16: mol_type = other DNA
gtataccacaactgcg

SEQ ID NO: 40185 - DNA, 16 bp, synthetic construct
  misc_feature 1..16: note = synthetic [barcode part1]
  source 1..16: mol_type = other DNA
tggtatcgtaggcgag

SEQ ID NO: 40186 - DNA, 16 bp, synthetic construct
  misc_feature 1..16: note = synthetic [barcode part1]
  source 1..16: mol_type = other DNA
taccgcgtaataccag

SEQ ID NO: 40187 - DNA, 16 bp, synthetic construct
  misc_feature 1..16: note = synthetic [barcode part1]
  source 1..16: mol_type = other DNA
tccgactcagttgcac

SEQ ID NO: 40188 - DNA, 16 bp, synthetic construct
  misc_feature 1..16: note = synthetic [barcode part1]
  source 1..16: mol_type = other DNA
agtaacacggatactg

SEQ ID NO: 40189 - DNA, 16 bp, synthetic construct
  misc_feature 1..16: note = synthetic [barcode part1]
  source 1..16: mol_type = other DNA
tgtgtcttcgtgtcct

SEQ ID NO: 40190 - DNA, 16 bp, synthetic construct
  misc_feature 1..16: note = synthetic [barcode part1]
  source 1..16: mol_type = other DNA
ccttaagtccaaggtg

SEQ ID NO: 40191 - DNA, 16 bp, synthetic construct
  misc_feature 1..16: note = synthetic [barcode part1]
  source 1..16: mol_type = other DNA
gttgagtccgtacctc

SEQ ID NO: 40192 - DNA, 16 bp, synthetic construct
  misc_feature 1..16: note = synthetic [barcode part1]
  source 1..16: mol_type = other DNA
gacacttgagtactcg

SEQ ID NO: 40193 - DNA, 16 bp, synthetic construct
  misc_feature 1..16: note = synthetic [barcode part1]
  source 1..16: mol_type = other DNA
ttcgcgtatcaagttc

SEQ ID NO: 40194 - DNA, 16 bp, synthetic construct
  misc_feature 1..16: note = synthetic [barcode part1]
  source 1..16: mol_type = other DNA
atcgcgatcacttact

SEQ ID NO: 40195 - DNA, 16 bp, synthetic construct
  misc_feature 1..16: note = synthetic [barcode part1]
  source 1..16: mol_type = other DNA
gacttgaatacctctc

SEQ ID NO: 40196 - DNA, 16 bp, synthetic construct
  misc_feature 1..16: note = synthetic [barcode part1]
  source 1..16: mol_type = other DNA
tgcagatagtaggatc

SEQ ID NO: 40197 - DNA, 16 bp, synthetic construct
  misc_feature 1..16: note = synthetic [barcode part1]
  source 1..16: mol_type = other DNA
gacgagtagtgtcacg

SEQ ID NO: 40198 - DNA, 16 bp, synthetic construct
  misc_feature 1..16: note = synthetic [barcode part1]
  source 1..16: mol_type = other DNA
ttcacaggcaatagag

SEQ ID NO: 40199 - DNA, 16 bp, synthetic construct
  misc_feature 1..16: note = synthetic [barcode part1]
  source 1..16: mol_type = other DNA
agatctcgcactacag

SEQ ID NO: 40200 - DNA, 16 bp, synthetic construct
  misc_feature 1..16: note = synthetic [barcode part1]
  source 1..16: mol_type = other DNA
ccagtggatagaggtc

SEQ ID NO: 40201 - DNA, 16 bp, synthetic construct
  misc_feature 1..16: note = synthetic [barcode part1]
  source 1..16: mol_type = other DNA
cctaaccagtcaagac

SEQ ID NO: 40202 - DNA, 16 bp, synthetic construct
  misc_feature 1..16: note = synthetic [barcode part1]
  source 1..16: mol_type = other DNA
ttctggacaccacaag

SEQ ID NO: 40203 - DNA, 16 bp, synthetic construct
  misc_feature 1..16: note = synthetic [barcode part1]
  source 1..16: mol_type = other DNA
ttcggataacgcgttg

SEQ ID NO: 40204 - DNA, 16 bp, synthetic construct
  misc_feature 1..16: note = synthetic [barcode part1]
  source 1..16: mol_type = other DNA
gaagacgcggactatc

SEQ ID NO: 40205 - DNA, 16 bp, synthetic construct
  misc_feature 1..16: note = synthetic [barcode part1]
  source 1..16: mol_type = other DNA
acgttccgtcgtcaac

SEQ ID NO: 40206 - DNA, 16 bp, synthetic construct
  misc_feature 1..16: note = synthetic [barcode part1]
  source 1..16: mol_type = other DNA
atcgtaggcggtattc

SEQ ID NO: 40207 - DNA, 16 bp, synthetic construct
  misc_feature 1..16: note = synthetic [barcode part1]
  source 1..16: mol_type = other DNA
actgacagacacgttc

SEQ ID NO: 40208 - DNA, 16 bp, synthetic construct
  misc_feature 1..16: note = synthetic [barcode part1]
  source 1..16: mol_type = other DNA
attctgtacctgagtc

SEQ ID NO: 40209 - DNA, 16 bp, synthetic construct
  misc_feature 1..16: note = synthetic [barcode part1]
  source 1..16: mol_type = other DNA
tatacgcaactgaccg

SEQ ID NO: 40210 - DNA, 16 bp, synthetic construct
  misc_feature 1..16: note = synthetic [barcode part1]
  source 1..16: mol_type = other DNA
cagttccggaactaac

SEQ ID NO: 40211 - DNA, 16 bp, synthetic construct
  misc_feature 1..16: note = synthetic [barcode part1]
  source 1..16: mol_type = other DNA
gttgataggtgtgcct

SEQ ID NO: 40212 - DNA, 16 bp, synthetic construct
  misc_feature 1..16: note = synthetic [barcode part1]
  source 1..16: mol_type = other DNA
taccggagacgtgagt

SEQ ID NO: 40213 - DNA, 16 bp, synthetic construct
  misc_feature 1..16: note = synthetic [barcode part1]
  source 1..16: mol_type = other DNA
gagtactgacacttgc

SEQ ID NO: 40214 - DNA, 16 bp, synthetic construct
  misc_feature 1..16: note = synthetic [barcode part1]
  source 1..16: mol_type = other DNA
gtctcaagtcgatcag

SEQ ID NO: 40215 - DNA, 16 bp, synthetic construct
  misc_feature 1..16: note = synthetic [barcode part1]
  source 1..16: mol_type = other DNA
tgcacgaccactacct

SEQ ID NO: 40216 - DNA, 16 bp, synthetic construct
  misc_feature 1..16: note = synthetic [barcode part1]
  source 1..16: mol_type = other DNA
gccaagtgcgaggatt

SEQ ID NO: 40217 - DNA, 16 bp, synthetic construct
  misc_feature 1..16: note = synthetic [barcode part1]
  source 1..16: mol_type = other DNA
tagtcctcggtgcact

SEQ ID NO: 40218 - DNA, 16 bp, synthetic construct
  misc_feature 1..16: note = synthetic [barcode part1]
  source 1..16: mol_type = other DNA
gtgaattggttcgcgt

SEQ ID NO: 40219 - DNA, 16 bp, synthetic construct
  misc_feature 1..16: note = synthetic [barcode part1]
  source 1..16: mol_type = other DNA
tgccttaaggtggtgt

SEQ ID NO: 40220 - DNA, 16 bp, synthetic construct
  misc_feature 1..16: note = synthetic [barcode part1]
  source 1..16: mol_type = other DNA
cctgttggtacctgac

SEQ ID NO: 40221 - DNA, 16 bp, synthetic construct
  misc_feature 1..16: note = synthetic [barcode part1]
  source 1..16: mol_type = other DNA
gcgacggtagatctag

SEQ ID NO: 40222 - DNA, 16 bp, synthetic construct
  misc_feature 1..16: note = synthetic [barcode part1]
  source 1..16: mol_type = other DNA
atcttatcggatccgt

SEQ ID NO: 40223 - DNA, 16 bp, synthetic construct
  misc_feature 1..16: note = synthetic [barcode part1]
  source 1..16: mol_type = other DNA
acgacgttacgacgtt

SEQ ID NO: 40224 - DNA, 16 bp, synthetic construct
  misc_feature 1..16: note = synthetic [barcode part1]
  source 1..16: mol_type = other DNA
gtagtgtgaggagaac

SEQ ID NO: 40225 - DNA, 16 bp, synthetic construct
  misc_feature 1..16: note = synthetic [barcode part1]
  source 1..16: mol_type = other DNA
tgccttgtaagtgttc

SEQ ID NO: 40226 - DNA, 16 bp, synthetic construct
  misc_feature 1..16: note = synthetic [barcode part1]
  source 1..16: mol_type = other DNA
tcgatacagaggattg

SEQ ID NO: 40227 - DNA, 16 bp, synthetic construct
  misc_feature 1..16: note = synthetic [barcode part1]
  source 1..16: mol_type = other DNA
tgtctgtggtgccgtt

SEQ ID NO: 40228 - DNA, 16 bp, synthetic construct
  misc_feature 1..16: note = synthetic [barcode part1]
  source 1..16: mol_type = other DNA
tgatcgacgtagtgtc

SEQ ID NO: 40229 - DNA, 16 bp, synthetic construct
  misc_feature 1..16: note = synthetic [barcode part1]
  source 1..16: mol_type = other DNA
tctccgacgtgattgc

SEQ ID NO: 40230 - DNA, 16 bp, synthetic construct
  misc_feature 1..16: note = synthetic [barcode part1]
  source 1..16: mol_type = other DNA
aggagatcggatccgt

SEQ ID NO: 40231 - DNA, 16 bp, synthetic construct
  misc_feature 1..16: note = synthetic [barcode part1]
  source 1..16: mol_type = other DNA
acaacggtcacgtgag

SEQ ID NO: 40232 - DNA, 16 bp, synthetic construct
  misc_feature 1..16: note = synthetic [barcode part1]
  source 1..16: mol_type = other DNA
gaacttgcactctatc

SEQ ID NO: 40233 - DNA, 16 bp, synthetic construct
  misc_feature 1..16: note = synthetic [barcode part1]
  source 1..16: mol_type = other DNA
tagtgaacgttgcctg

SEQ ID NO: 40234 - DNA, 16 bp, synthetic construct
  misc_feature 1..16: note = synthetic [barcode part1]
  source 1..16: mol_type = other DNA
actcgaatatcgtctc

SEQ ID NO: 40235 - DNA, 16 bp, synthetic construct
  misc_feature 1..16: note = synthetic [barcode part1]
  source 1..16: mol_type = other DNA
agatcgtgtaagaacc

SEQ ID NO: 40236 - DNA, 16 bp, synthetic construct
  misc_feature 1..16: note = synthetic [barcode part1]
  source 1..16: mol_type = other DNA
gttcgtaggttgtacg

SEQ ID NO: 40237 - DNA, 16 bp, synthetic construct
  misc_feature 1..16: note = synthetic [barcode part1]
  source 1..16: mol_type = other DNA
acaccgcaagtcttag

SEQ ID NO: 40238 - DNA, 16 bp, synthetic construct
  misc_feature 1..16: note = synthetic [barcode part1]
  source 1..16: mol_type = other DNA
tgtggcgattcactcc

SEQ ID NO: 40239 - DNA, 16 bp, synthetic construct
  misc_feature 1..16: note = synthetic [barcode part1]
  source 1..16: mol_type = other DNA
aatagtggcggactcg

SEQ ID NO: 40240 - DNA, 16 bp, synthetic construct
  misc_feature 1..16: note = synthetic [barcode part1]
  source 1..16: mol_type = other DNA
tgttctatactcaggc

SEQ ID NO: 40241 - DNA, 16 bp, synthetic construct
  misc_feature 1..16: note = synthetic [barcode part1]
  source 1..16: mol_type = other DNA
tgaagagtcggtctct

SEQ ID NO: 40242 - DNA, 16 bp, synthetic construct
  misc_feature 1..16: note = synthetic [barcode part1]
  source 1..16: mol_type = other DNA
ttactgtctgtctcgc

SEQ ID NO: 40243 - DNA, 16 bp, synthetic construct
  misc_feature 1..16: note = synthetic [barcode part1]
  source 1..16: mol_type = other DNA
aggaggcaagtgcctt

SEQ ID NO: 40244 - DNA, 16 bp, synthetic construct
  misc_feature 1..16: note = synthetic [barcode part1]
  source 1..16: mol_type = other DNA
gtaatcacacgcggtt

SEQ ID NO: 40245 - DNA, 16 bp, synthetic construct
  misc_feature 1..16: note = synthetic [barcode part1]
  source 1..16: mol_type = other DNA
aaggtctcttgttcac

SEQ ID NO: 40246 - DNA, 16 bp, synthetic construct
  misc_feature 1..16: note = synthetic [barcode part1]
  source 1..16: mol_type = other DNA
ttacttgttgcagtgc

SEQ ID NO: 40247 - DNA, 16 bp, synthetic construct
  misc_feature 1..16: note = synthetic [barcode part1]
  source 1..16: mol_type = other DNA
tagttctcgcgcgatc

SEQ ID NO: 40248 - DNA, 16 bp, synthetic construct
  misc_feature 1..16: note = synthetic [barcode part1]
  source 1..16: mol_type = other DNA
tactccgtactactcc

SEQ ID NO: 40249 - DNA, 16 bp, synthetic construct
  misc_feature 1..16: note = synthetic [barcode part1]
  source 1..16: mol_type = other DNA
gtagtaaggacgcctg

SEQ ID NO: 40250 - DNA, 16 bp, synthetic construct
  misc_feature 1..16: note = synthetic [barcode part1]
  source 1..16: mol_type = other DNA
ttacctgtccgaagtt

SEQ ID NO: 40251 - DNA, 16 bp, synthetic construct
  misc_feature 1..16: note = synthetic [barcode part1]
  source 1..16: mol_type = other DNA
accttacgaacactct

SEQ ID NO: 40252 - DNA, 16 bp, synthetic construct
  misc_feature 1..16: note = synthetic [barcode part1]
  source 1..16: mol_type = other DNA
caggtcagaggacgtt

SEQ ID NO: 40253 - DNA, 16 bp, synthetic construct
  misc_feature 1..16: note = synthetic [barcode part1]
  source 1..16: mol_type = other DNA
gtctcgttaccgacac

SEQ ID NO: 40254 - DNA, 16 bp, synthetic construct
  misc_feature 1..16: note = synthetic [barcode part1]
  source 1..16: mol_type = other DNA
ccttgactatattggc

SEQ ID NO: 40255 - DNA, 16 bp, synthetic construct
  misc_feature 1..16: note = synthetic [barcode part1]
  source 1..16: mol_type = other DNA
ttactcaacggcgtcc

SEQ ID NO: 40256 - DNA, 16 bp, synthetic construct
  misc_feature 1..16: note = synthetic [barcode part1]
  source 1..16: mol_type = other DNA
ttctgattgtaccgac

SEQ ID NO: 40257 - DNA, 16 bp, synthetic construct
  misc_feature 1..16: note = synthetic [barcode part1]
  source 1..16: mol_type = other DNA
tatcaccacgatcgtt

SEQ ID NO: 40258 - DNA, 16 bp, synthetic construct
  misc_feature 1..16: note = synthetic [barcode part1]
  source 1..16: mol_type = other DNA
tgagtcgtctccacgt

SEQ ID NO: 40259 - DNA, 16 bp, synthetic construct
  misc_feature 1..16: note = synthetic [barcode part1]
  source 1..16: mol_type = other DNA
ttcctatccgttgaag

SEQ ID NO: 40260 - DNA, 16 bp, synthetic construct
  misc_feature 1..16: note = synthetic [barcode part1]
  source 1..16: mol_type = other DNA
acgacgttggtatcgt

SEQ ID NO: 40261 - DNA, 16 bp, synthetic construct
  misc_feature 1..16: note = synthetic [barcode part1]
  source 1..16: mol_type = other DNA
ccttacacgcagaagt

SEQ ID NO: 40262 - DNA, 16 bp, synthetic construct
  misc_feature 1..16: note = synthetic [barcode part1]
  source 1..16: mol_type = other DNA
cgactataggtatccg

SEQ ID NO: 40263 - DNA, 16 bp, synthetic construct
  misc_feature 1..16: note = synthetic [barcode part1]
  source 1..16: mol_type = other DNA
ttcggagtcagttggt

SEQ ID NO: 40264 - DNA, 16 bp, synthetic construct
  misc_feature 1..16: note = synthetic [barcode part1]
  source 1..16: mol_type = other DNA
actcagagaacaacac

SEQ ID NO: 40265 - DNA, 16 bp, synthetic construct
  misc_feature 1..16: note = synthetic [barcode part1]
  source 1..16: mol_type = other DNA
cgaatcacgacaatcc

SEQ ID NO: 40266 - DNA, 16 bp, synthetic construct
  misc_feature 1..16: note = synthetic [barcode part1]
  source 1..16: mol_type = other DNA
cgcacacagaattctg

SEQ ID NO: 40267 - DNA, 16 bp, synthetic construct
  misc_feature 1..16: note = synthetic [barcode part1]
  source 1..16: mol_type = other DNA
ttctgtagtgcaggac

SEQ ID NO: 40268 - DNA, 16 bp, synthetic construct
  misc_feature 1..16: note = synthetic [barcode part1]
  source 1..16: mol_type = other DNA
tgtagacggtattcgc

SEQ ID NO: 40269 - DNA, 16 bp, synthetic construct
  misc_feature 1..16: note = synthetic [barcode part1]
  source 1..16: mol_type = other DNA
gtagatcactgagaac

SEQ ID NO: 40270 - DNA, 16 bp, synthetic construct
  misc_feature 1..16: note = synthetic [barcode part1]
  source 1..16: mol_type = other DNA
tgcggtgtagaacttc

SEQ ID NO: 40271 - DNA, 16 bp, synthetic construct
  misc_feature 1..16: note = synthetic [barcode part1]
  source 1..16: mol_type = other DNA
gcgcggttcctaactt

SEQ ID NO: 40272 - DNA, 16 bp, synthetic construct
  misc_feature 1..16: note = synthetic [barcode part1]
  source 1..16: mol_type = other DNA
aatcttcgcacctaac

SEQ ID NO: 40273 - DNA, 16 bp, synthetic construct
  misc_feature 1..16: note = synthetic [barcode part1]
  source 1..16: mol_type = other DNA
ccggcgaatccttact

SEQ ID NO: 40274 - DNA, 16 bp, synthetic construct
  misc_feature 1..16: note = synthetic [barcode part1]
  source 1..16: mol_type = other DNA
atcttcagtcctcgtc

SEQ ID NO: 40275 - DNA, 16 bp, synthetic construct
  misc_feature 1..16: note = synthetic [barcode part1]
  source 1..16: mol_type = other DNA
cgacaatagagatacc

SEQ ID NO: 40276 - DNA, 16 bp, synthetic construct
  misc_feature 1..16: note = synthetic [barcode part1]
  source 1..16: mol_type = other DNA
cgtactctctggtgac

SEQ ID NO: 40277 - DNA, 16 bp, synthetic construct
  misc_feature 1..16: note = synthetic [barcode part1]
  source 1..16: mol_type = other DNA
cagtgcgtgattcctc

SEQ ID NO: 40278 - DNA, 16 bp, synthetic construct
  misc_feature 1..16: note = synthetic [barcode part1]
  source 1..16: mol_type = other DNA
cgcaagaaccaggttg

SEQ ID NO: 40279 - DNA, 16 bp, synthetic construct
  misc_feature 1..16: note = synthetic [barcode part1]
  source 1..16: mol_type = other DNA
ccgcgagttattactt

SEQ ID NO: 40280 - DNA, 16 bp, synthetic construct
  misc_feature 1..16: note = synthetic [barcode part1]
  source 1..16: mol_type = other DNA
tcgaactgaccgttag

SEQ ID NO: 40281 - DNA, 16 bp, synthetic construct
  misc_feature 1..16: note = synthetic [barcode part1]
  source 1..16: mol_type = other DNA
agacctggtccttcgt

SEQ ID NO: 40282 - DNA, 16 bp, synthetic construct
  misc_feature 1..16: note = synthetic [barcode part1]
  source 1..16: mol_type = other DNA
tgcaacgacttactct

SEQ ID NO: 40283 - DNA, 16 bp, synthetic construct
  misc_feature 1..16: note = synthetic [barcode part1]
  source 1..16: mol_type = other DNA
gagataggacggaact

SEQ ID NO: 40284 - DNA, 16 bp, synthetic construct
  misc_feature 1..16: note = synthetic [barcode part1]
  source 1..16: mol_type = other DNA
cctaattaccaacgtc

SEQ ID NO: 40285 - DNA, 16 bp, synthetic construct
  misc_feature 1..16: note = synthetic [barcode part1]
  source 1..16: mol_type = other DNA
gaataagatccgcctc

SEQ ID NO: 40286 - DNA, 16 bp, synthetic construct
  misc_feature 1..16: note = synthetic [barcode part1]
  source 1..16: mol_type = other DNA
acgatctcctgacaag

SEQ ID NO: 40287 - DNA, 16 bp, synthetic construct
  misc_feature 1..16: note = synthetic [barcode part1]
  source 1..16: mol_type = other DNA
tcggtctctcacgaac

SEQ ID NO: 40288 - DNA, 16 bp, synthetic construct
  misc_feature 1..16: note = synthetic [barcode part1]
  source 1..16: mol_type = other DNA
cagattaagaacgcgt

SEQ ID NO: 40289 - DNA, 16 bp, synthetic construct
  misc_feature 1..16: note = synthetic [barcode part1]
  source 1..16: mol_type = other DNA
tcagtccacttagatc

SEQ ID NO: 40290 - DNA, 16 bp, synthetic construct
  misc_feature 1..16: note = synthetic [barcode part1]
  source 1..16: mol_type = other DNA
gaggatccaacacacg

SEQ ID NO: 40291 - DNA, 16 bp, synthetic construct
  misc_feature 1..16: note = synthetic [barcode part1]
  source 1..16: mol_type = other DNA
gaacggtccgaatacg

SEQ ID NO: 40292 - DNA, 16 bp, synthetic construct
  misc_feature 1..16: note = synthetic [barcode part1]
  source 1..16: mol_type = other DNA
ccttcctcaatcggtt

SEQ ID NO: 40293 - DNA, 16 bp, synthetic construct
  misc_feature 1..16: note = synthetic [barcode part1]
  source 1..16: mol_type = other DNA
cgccaagtgttctcac

SEQ ID NO: 40294 - DNA, 16 bp, synthetic construct
  misc_feature 1..16: note = synthetic [barcode part1]
  source 1..16: mol_type = other DNA
actgatacggatccgt

SEQ ID NO: 40295 - DNA, 16 bp, synthetic construct
  misc_feature 1..16: note = synthetic [barcode part1]
  source 1..16: mol_type = other DNA
cgatcagaacctcagt

SEQ ID NO: 40296 - DNA, 16 bp, synthetic construct
  misc_feature 1..16: note = synthetic [barcode part1]
  source 1..16: mol_type = other DNA
tatacctctactaggc

SEQ ID NO: 40297 - DNA, 16 bp, synthetic construct
  misc_feature 1..16: note = synthetic [barcode part1]
  source 1..16: mol_type = other DNA
tgtacgattcaactcc

SEQ ID NO: 40298 - DNA, 16 bp, synthetic construct
  misc_feature 1..16: note = synthetic [barcode part1]
  source 1..16: mol_type = other DNA
accaggtgacacaggt

SEQ ID NO: 40299 - DNA, 16 bp, synthetic construct
  misc_feature 1..16: note = synthetic [barcode part1]
  source 1..16: mol_type = other DNA
cacagagaaggatacg

SEQ ID NO: 40300 - DNA, 16 bp, synthetic construct
  misc_feature 1..16: note = synthetic [barcode part1]
  source 1..16: mol_type = other DNA
gtaacgtgatcttggc

SEQ ID NO: 40301 - DNA, 16 bp, synthetic construct
  misc_feature 1..16: note = synthetic [barcode part1]
  source 1..16: mol_type = other DNA
tccgtgtgatcgttgc

SEQ ID NO: 40302 - DNA, 16 bp, synthetic construct
  misc_feature 1..16: note = synthetic [barcode part1]
  source 1..16: mol_type = other DNA
tgcaacgtgcctgtct

SEQ ID NO: 40303 - DNA, 16 bp, synthetic construct
  misc_feature 1..16: note = synthetic [barcode part1]
  source 1..16: mol_type = other DNA
gttaggccttgacagt

SEQ ID NO: 40304 - DNA, 16 bp, synthetic construct
  misc_feature 1..16: note = synthetic [barcode part1]
  source 1..16: mol_type = other DNA
tgccttaacagactct

SEQ ID NO: 40305 - DNA, 16 bp, synthetic construct
  misc_feature 1..16: note = synthetic [barcode part1]
  source 1..16: mol_type = other DNA
atagacaaggtaggcg

SEQ ID NO: 40306 - DNA, 16 bp, synthetic construct
  misc_feature 1..16: note = synthetic [barcode part1]
  source 1..16: mol_type = other DNA
gcagaaggttaccgac

SEQ ID NO: 40307 - DNA, 16 bp, synthetic construct
  misc_feature 1..16: note = synthetic [barcode part1]
  source 1..16: mol_type = other DNA
tcctacgaccaggttc

SEQ ID NO: 40308 - DNA, 16 bp, synthetic construct
  misc_feature 1..16: note = synthetic [barcode part1]
  source 1..16: mol_type = other DNA
cgtattgaggatcaag

SEQ ID NO: 40309 - DNA, 16 bp, synthetic construct
  misc_feature 1..16: note = synthetic [barcode part1]
  source 1..16: mol_type = other DNA
actacttgaacggtgc

SEQ ID NO: 40310 - DNA, 16 bp, synthetic construct
  misc_feature 1..16: note = synthetic [barcode part1]
  source 1..16: mol_type = other DNA
ttcgcacaatcactac

SEQ ID NO: 40311 - DNA, 16 bp, synthetic construct
  misc_feature 1..16: note = synthetic [barcode part1]
  source 1..16: mol_type = other DNA
acagagatctcgcact

SEQ ID NO: 40312 - DNA, 16 bp, synthetic construct
  misc_feature 1..16: note = synthetic [barcode part1]
  source 1..16: mol_type = other DNA
atctcagagtcggttg

SEQ ID NO: 40313 - DNA, 16 bp, synthetic construct
  misc_feature 1..16: note = synthetic [barcode part1]
  source 1..16: mol_type = other DNA
acgtatcacgattgcg

SEQ ID NO: 40314 - DNA, 16 bp, synthetic construct
  misc_feature 1..16: note = synthetic [barcode part1]
  source 1..16: mol_type = other DNA
gatactcttcggtccg

SEQ ID NO: 40315 - DNA, 16 bp, synthetic construct
  misc_feature 1..16: note = synthetic [barcode part1]
  source 1..16: mol_type = other DNA
ccagataagatccacc

SEQ ID NO: 40316 - DNA, 16 bp, synthetic construct
  misc_feature 1..16: note = synthetic [barcode part1]
  source 1..16: mol_type = other DNA
actcgagaacagaact

SEQ ID NO: 40317 - DNA, 16 bp, synthetic construct
  misc_feature 1..16: note = synthetic [barcode part1]
  source 1..16: mol_type = other DNA
gttgatactactgcct

SEQ ID NO: 40318 - DNA, 16 bp, synthetic construct
  misc_feature 1..16: note = synthetic [barcode part1]
  source 1..16: mol_type = other DNA
gaacaccgtgagtctt

SEQ ID NO: 40319 - DNA, 16 bp, synthetic construct
  misc_feature 1..16: note = synthetic [barcode part1]
  source 1..16: mol_type = other DNA
gattgtaaggaggtct

SEQ ID NO: 40320 - DNA, 16 bp, synthetic construct
  misc_feature 1..16: note = synthetic [barcode part1]
  source 1..16: mol_type = other DNA
gatcggacctaattcg

SEQ ID NO: 40321 - DNA, 16 bp, synthetic construct
  misc_feature 1..16: note = synthetic [barcode part1]
  source 1..16: mol_type = other DNA
tcgcgttagtaattcc

SEQ ID NO: 40322 - DNA, 16 bp, synthetic construct
  misc_feature 1..16: note = synthetic [barcode part1]
  source 1..16: mol_type = other DNA
cctcgtgccgatagtt

SEQ ID NO: 40323 - DNA, 16 bp, synthetic construct
  misc_feature 1..16: note = synthetic [barcode part1]
  source 1..16: mol_type = other DNA
tgatcggaatcgacct

SEQ ID NO: 40324 - DNA, 16 bp, synthetic construct
  misc_feature 1..16: note = synthetic [barcode part1]
  source 1..16: mol_type = other DNA
atagtcgtcctgattc

SEQ ID NO: 40325 - DNA, 16 bp, synthetic construct
  misc_feature 1..16: note = synthetic [barcode part1]
  source 1..16: mol_type = other DNA
attctggtgattggcg

SEQ ID NO: 40326 - DNA, 16 bp, synthetic construct
  misc_feature 1..16: note = synthetic [barcode part1]
  source 1..16: mol_type = other DNA
tcttgcaggagtgtgt

SEQ ID NO: 40327 - DNA, 16 bp, synthetic construct
  misc_feature 1..16: note = synthetic [barcode part1]
  source 1..16: mol_type = other DNA
cacaatcttaggcgtg

SEQ ID NO: 40328 - DNA, 16 bp, synthetic construct
  misc_feature 1..16: note = synthetic [barcode part1]
  source 1..16: mol_type = other DNA
tgtactggttggtgtg

SEQ ID NO: 40329 - DNA, 16 bp, synthetic construct
  misc_feature 1..16: note = synthetic [barcode part1]
  source 1..16: mol_type = other DNA
tgacgtacagttcttc

SEQ ID NO: 40330 - DNA, 16 bp, synthetic construct
  misc_feature 1..16: note = synthetic [barcode part1]
  source 1..16: mol_type = other DNA
actgaggtatagtcag

SEQ ID NO: 40331 - DNA, 16 bp, synthetic construct
  misc_feature 1..16: note = synthetic [barcode part1]
  source 1..16: mol_type = other DNA
tataatctcctcggtg

SEQ ID NO: 40332 - DNA, 16 bp, synthetic construct
  misc_feature 1..16: note = synthetic [barcode part1]
  source 1..16: mol_type = other DNA
tcctgtctaagtactg

SEQ ID NO: 40333 - DNA, 16 bp, synthetic construct
  misc_feature 1..16: note = synthetic [barcode part1]
  source 1..16: mol_type = other DNA
tgtgtacactggtcag

SEQ ID NO: 40334 - DNA, 16 bp, synthetic construct
  misc_feature 1..16: note = synthetic [barcode part1]
  source 1..16: mol_type = other DNA
gatcttctgtagacct

SEQ ID NO: 40335 - DNA, 16 bp, synthetic construct
  misc_feature 1..16: note = synthetic [barcode part1]
  source 1..16: mol_type = other DNA
tctgaacgagtcggag

SEQ ID NO: 40336 - DNA, 16 bp, synthetic construct
  misc_feature 1..16: note = synthetic [barcode part1]
  source 1..16: mol_type = other DNA
tggtgaggagtaacag

SEQ ID NO: 40337 - DNA, 16 bp, synthetic construct
  misc_feature 1..16: note = synthetic [barcode part1]
  source 1..16: mol_type = other DNA
accactacgtgaggag

SEQ ID NO: 40338 - DNA, 16 bp, synthetic construct
  misc_feature 1..16: note = synthetic [barcode part1]
  source 1..16: mol_type = other DNA
tgtctaccaggtgagt

SEQ ID NO: 40339 - DNA, 16 bp, synthetic construct
  misc_feature 1..16: note = synthetic [barcode part1]
  source 1..16: mol_type = other DNA
gatactcttgccaccg

SEQ ID NO: 40340 - DNA, 16 bp, synthetic construct
  misc_feature 1..16: note = synthetic [barcode part1]
  source 1..16: mol_type = other DNA
gtatcgaacgtggttc

SEQ ID NO: 40341 - DNA, 16 bp, synthetic construct
  misc_feature 1..16: note = synthetic [barcode part1]
  source 1..16: mol_type = other DNA
cgatacaagaggttac

SEQ ID NO: 40342 - DNA, 16 bp, synthetic construct
  misc_feature 1..16: note = synthetic [barcode part1]
  source 1..16: mol_type = other DNA
agaagtacttgacgac

SEQ ID NO: 40343 - DNA, 16 bp, synthetic construct
  misc_feature 1..16: note = synthetic [barcode part1]
  source 1..16: mol_type = other DNA
cgtcggtgattcttcg

SEQ ID NO: 40344 - DNA, 16 bp, synthetic construct
  misc_feature 1..16: note = synthetic [barcode part1]
  source 1..16: mol_type = other DNA
gtctaacgcacaggag

SEQ ID NO: 40345 - DNA, 16 bp, synthetic construct
  misc_feature 1..16: note = synthetic [barcode part1]
  source 1..16: mol_type = other DNA
gcaagtggtcctgaag

SEQ ID NO: 40346 - DNA, 16 bp, synthetic construct
  misc_feature 1..16: note = synthetic [barcode part1]
  source 1..16: mol_type = other DNA
taccagtgtacaccag

SEQ ID NO: 40347 - DNA, 16 bp, synthetic construct
  misc_feature 1..16: note = synthetic [barcode part1]
  source 1..16: mol_type = other DNA
ccttaattgcaccggc

SEQ ID NO: 40348 - DNA, 16 bp, synthetic construct
  misc_feature 1..16: note = synthetic [barcode part1]
  source 1..16: mol_type = other DNA
atcgccgacacagaag

SEQ ID NO: 40349 - DNA, 16 bp, synthetic construct
  misc_feature 1..16: note = synthetic [barcode part1]
  source 1..16: mol_type = other DNA
aggtattggacagtgt

SEQ ID NO: 40350 - DNA, 16 bp, synthetic construct
  misc_feature 1..16: note = synthetic [barcode part1]
  source 1..16: mol_type = other DNA
aacctagttcttgtgc

SEQ ID NO: 40351 - DNA, 16 bp, synthetic construct
  misc_feature 1..16: note = synthetic [barcode part1]
  source 1..16: mol_type = other DNA
ccgtgtggactagaag

SEQ ID NO: 40352 - DNA, 16 bp, synthetic construct
  misc_feature 1..16: note = synthetic [barcode part1]
  source 1..16: mol_type = other DNA
atattcctgcgtcctc

SEQ ID NO: 40353 - DNA, 16 bp, synthetic construct
  misc_feature 1..16: note = synthetic [barcode part1]
  source 1..16: mol_type = other DNA
agttcaccgttatctg

SEQ ID NO: 40354 - DNA, 16 bp, synthetic construct
  misc_feature 1..16: note = synthetic [barcode part1]
  source 1..16: mol_type = other DNA
caaggttaaccgatcc

SEQ ID NO: 40355 - DNA, 16 bp, synthetic construct
  misc_feature 1..16: note = synthetic [barcode part1]
  source 1..16: mol_type = other DNA
ccagtctatccaggtc

SEQ ID NO: 40356 - DNA, 16 bp, synthetic construct
  misc_feature 1..16: note = synthetic [barcode part1]
  source 1..16: mol_type = other DNA
tggtgtaaggaaccgc

SEQ ID NO: 40357 - DNA, 16 bp, synthetic construct
  misc_feature 1..16: note = synthetic [barcode part1]
  source 1..16: mol_type = other DNA
cgaacttcaagtaccg

SEQ ID NO: 40358 - DNA, 16 bp, synthetic construct
  misc_feature 1..16: note = synthetic [barcode part1]
  source 1..16: mol_type = other DNA
tgttctggtaagtcct

SEQ ID NO: 40359 - DNA, 16 bp, synthetic construct
  misc_feature 1..16: note = synthetic [barcode part1]
  source 1..16: mol_type = other DNA
caatcgtcctacgaag

SEQ ID NO: 40360 - DNA, 16 bp, synthetic construct
  misc_feature 1..16: note = synthetic [barcode part1]
  source 1..16: mol_type = other DNA
aggatcttatcacggc

SEQ ID NO: 40361 - DNA, 16 bp, synthetic construct
  misc_feature 1..16: note = synthetic [barcode part1]
  source 1..16: mol_type = other DNA
agattcgtgaactcgc

SEQ ID NO: 40362 - DNA, 16 bp, synthetic construct
  misc_feature 1..16: note = synthetic [barcode part1]
  source 1..16: mol_type = other DNA
tgtgtcaagtcctccg

SEQ ID NO: 40363 - DNA, 16 bp, synthetic construct
  misc_feature 1..16: note = synthetic [barcode part1]
  source 1..16: mol_type = other DNA
agataccactctatcc

SEQ ID NO: 40364 - DNA, 16 bp, synthetic construct
  misc_feature 1..16: note = synthetic [barcode part1]
  source 1..16: mol_type = other DNA
ttctgcagtgtggagt

SEQ ID NO: 40365 - DNA, 16 bp, synthetic construct
  misc_feature 1..16: note = synthetic [barcode part1]
  source 1..16: mol_type = other DNA
acgtcaattagtgcgc

SEQ ID NO: 40366 - DNA, 16 bp, synthetic construct
  misc_feature 1..16: note = synthetic [barcode part1]
  source 1..16: mol_type = other DNA
agataactcggatacg

SEQ ID NO: 40367 - DNA, 16 bp, synthetic construct
  misc_feature 1..16: note = synthetic [barcode part1]
  source 1..16: mol_type = other DNA
tacacagtggagaatc

SEQ ID NO: 40368 - DNA, 16 bp, synthetic construct
  misc_feature 1..16: note = synthetic [barcode part1]
  source 1..16: mol_type = other DNA
cggaatcaatcggtct

SEQ ID NO: 40369 - DNA, 16 bp, synthetic construct
  misc_feature 1..16: note = synthetic [barcode part1]
  source 1..16: mol_type = other DNA
cacagacagactcgtt

SEQ ID NO: 40370 - DNA, 16 bp, synthetic construct
  misc_feature 1..16: note = synthetic [barcode part1]
  source 1..16: mol_type = other DNA
tacaggcagtagagtt

SEQ ID NO: 40371 - DNA, 16 bp, synthetic construct
  misc_feature 1..16: note = synthetic [barcode part1]
  source 1..16: mol_type = other DNA
gtccagaatctcgcct

SEQ ID NO: 40372 - DNA, 16 bp, synthetic construct
  misc_feature 1..16: note = synthetic [barcode part1]
  source 1..16: mol_type = other DNA
tggaacttcaaggtcc

SEQ ID NO: 40373 - DNA, 16 bp, synthetic construct
  misc_feature 1..16: note = synthetic [barcode part1]
  source 1..16: mol_type = other DNA
accgaatcgttgagtc

SEQ ID NO: 40374 - DNA, 16 bp, synthetic construct
  misc_feature 1..16: note = synthetic [barcode part1]
  source 1..16: mol_type = other DNA
gcgtattctgtgtgag

SEQ ID NO: 40375 - DNA, 16 bp, synthetic construct
  misc_feature 1..16: note = synthetic [barcode part1]
  source 1..16: mol_type = other DNA
aatcagatactccgcg

SEQ ID NO: 40376 - DNA, 16 bp, synthetic construct
  misc_feature 1..16: note = synthetic [barcode part1]
  source 1..16: mol_type = other DNA
aggaatagtccgacgc

SEQ ID NO: 40377 - DNA, 16 bp, synthetic construct
  misc_feature 1..16: note = synthetic [barcode part1]
  source 1..16: mol_type = other DNA
ccgcagaccactattc

SEQ ID NO: 40378 - DNA, 16 bp, synthetic construct
  misc_feature 1..16: note = synthetic [barcode part1]
  source 1..16: mol_type = other DNA
tggagttatacgcacc

SEQ ID NO: 40379 - DNA, 16 bp, synthetic construct
  misc_feature 1..16: note = synthetic [barcode part1]
  source 1..16: mol_type = other DNA
cgtacctaacaacttc

SEQ ID NO: 40380 - DNA, 16 bp, synthetic construct
  misc_feature 1..16: note = synthetic [barcode part1]
  source 1..16: mol_type = other DNA
tcaacagagaccactc

SEQ ID NO: 40381 - DNA, 16 bp, synthetic construct
  misc_feature 1..16: note = synthetic [barcode part1]
  source 1..16: mol_type = other DNA
cagacttcttactgtg

SEQ ID NO: 40382 - DNA, 16 bp, synthetic construct
  misc_feature 1..16: note = synthetic [barcode part1]
  source 1..16: mol_type = other DNA
attcggtaaggcgcag

SEQ ID NO: 40383 - DNA, 16 bp, synthetic construct
  misc_feature 1..16: note = synthetic [barcode part1]
  source 1..16: mol_type = other DNA
ttgtaggcaagaagtc

SEQ ID NO: 40384 - DNA, 16 bp, synthetic construct
  misc_feature 1..16: note = synthetic [barcode part1]
  source 1..16: mol_type = other DNA
ccaagtagtctcgtcc

SEQ ID NO: 40385 - DNA, 16 bp, synthetic construct
  misc_feature 1..16: note = synthetic [barcode part1]
  source 1..16: mol_type = other DNA
gattcttaaccgtgtc

SEQ ID NO: 40386 - DNA, 16 bp, synthetic construct
  misc_feature 1..16: note = synthetic [barcode part1]
  source 1..16: mol_type = other DNA
tccgtacctagattac

SEQ ID NO: 40387 - DNA, 16 bp, synthetic construct
  misc_feature 1..16: note = synthetic [barcode part1]
  source 1..16: mol_type = other DNA
tccgtaaggcaagacg

SEQ ID NO: 40388 - DNA, 16 bp, synthetic construct
  misc_feature 1..16: note = synthetic [barcode part1]
  source 1..16: mol_type = other DNA
actcgagaagtccact

SEQ ID NO: 40389 - DNA, 16 bp, synthetic construct
  misc_feature 1..16: note = synthetic [barcode part1]
  source 1..16: mol_type = other DNA
tcacctgttgttcgtc

SEQ ID NO: 40390 - DNA, 16 bp, synthetic construct
  misc_feature 1..16: note = synthetic [barcode part1]
  source 1..16: mol_type = other DNA
tccttggactgtgtgc

SEQ ID NO: 40391 - DNA, 16 bp, synthetic construct
  misc_feature 1..16: note = synthetic [barcode part1]
  source 1..16: mol_type = other DNA
cgcggactagaacagt

SEQ ID NO: 40392 - DNA, 16 bp, synthetic construct
  misc_feature 1..16: note = synthetic [barcode part1]
  source 1..16: mol_type = other DNA
tactactcaagtctgc

SEQ ID NO: 40393 - DNA, 16 bp, synthetic construct
  misc_feature 1..16: note = synthetic [barcode part1]
  source 1..16: mol_type = other DNA
gcaacgaacttcctag

SEQ ID NO: 40394 - DNA, 16 bp, synthetic construct
  misc_feature 1..16: note = synthetic [barcode part1]
  source 1..16: mol_type = other DNA
gttgacgagtacgtct

SEQ ID NO: 40395 - DNA, 16 bp, synthetic construct
  misc_feature 1..16: note = synthetic [barcode part1]
  source 1..16: mol_type = other DNA
actcctagacgcaagt

SEQ ID NO: 40396 - DNA, 16 bp, synthetic construct
  misc_feature 1..16: note = synthetic [barcode part1]
  source 1..16: mol_type = other DNA
tgatcttgccgacacc

SEQ ID NO: 40397 - DNA, 16 bp, synthetic construct
  misc_feature 1..16: note = synthetic [barcode part1]
  source 1..16: mol_type = other DNA
cactgtctattccgtc

SEQ ID NO: 40398 - DNA, 16 bp, synthetic construct
  misc_feature 1..16: note = synthetic [barcode part1]
  source 1..16: mol_type = other DNA
gcagtgcgattgattc

SEQ ID NO: 40399 - DNA, 16 bp, synthetic construct
  misc_feature 1..16: note = synthetic [barcode part1]
  source 1..16: mol_type = other DNA
cctccgcgtaattcag

SEQ ID NO: 40400 - DNA, 16 bp, synthetic construct
  misc_feature 1..16: note = synthetic [barcode part1]
  source 1..16: mol_type = other DNA
cgtgaacagactcgtt

SEQ ID NO: 40401 - DNA, 16 bp, synthetic construct
  misc_feature 1..16: note = synthetic [barcode part1]
  source 1..16: mol_type = other DNA
cgcgcagaagttgagt

SEQ ID NO: 40402 - DNA, 16 bp, synthetic construct
  misc_feature 1..16: note = synthetic [barcode part1]
  source 1..16: mol_type = other DNA
gttgatccacaacacg

SEQ ID NO: 40403 - DNA, 16 bp, synthetic construct
  misc_feature 1..16: note = synthetic [barcode part1]
  source 1..16: mol_type = other DNA
gttacggtctgaggtt

SEQ ID NO: 40404 - DNA, 16 bp, synthetic construct
  misc_feature 1..16: note = synthetic [barcode part1]
  source 1..16: mol_type = other DNA
cagtgagtaggtgtcg

SEQ ID NO: 40405 - DNA, 16 bp, synthetic construct
  misc_feature 1..16: note = synthetic [barcode part1]
  source 1..16: mol_type = other DNA
agatcctatcacggtg

SEQ ID NO: 40406 - DNA, 16 bp, synthetic construct
  misc_feature 1..16: note = synthetic [barcode part1]
  source 1..16: mol_type = other DNA
taggcacgattcacgt

SEQ ID NO: 40407 - DNA, 16 bp, synthetic construct
  misc_feature 1..16: note = synthetic [barcode part1]
  source 1..16: mol_type = other DNA
gtggtgttgcagtact

SEQ ID NO: 40408 - DNA, 16 bp, synthetic construct
  misc_feature 1..16: note = synthetic [barcode part1]
  source 1..16: mol_type = other DNA
ccaactcgtctcttac

SEQ ID NO: 40409 - DNA, 16 bp, synthetic construct
  misc_feature 1..16: note = synthetic [barcode part1]
  source 1..16: mol_type = other DNA
acacctctgacaattc

SEQ ID NO: 40410 - DNA, 16 bp, synthetic construct
  misc_feature 1..16: note = synthetic [barcode part1]
  source 1..16: mol_type = other DNA
tcctcagactgatatc

SEQ ID NO: 40411 - DNA, 16 bp, synthetic construct
  misc_feature 1..16: note = synthetic [barcode part1]
  source 1..16: mol_type = other DNA
tgtgagttggagtggc

SEQ ID NO: 40412 - DNA, 16 bp, synthetic construct
  misc_feature 1..16: note = synthetic [barcode part1]
  source 1..16: mol_type = other DNA
caattatcaggagacg

SEQ ID NO: 40413 - DNA, 16 bp, synthetic construct
  misc_feature 1..16: note = synthetic [barcode part1]
  source 1..16: mol_type = other DNA
tcagtgaacaggaatc

SEQ ID NO: 40414 - DNA, 16 bp, synthetic construct
  misc_feature 1..16: note = synthetic [barcode part1]
  source 1..16: mol_type = other DNA
tcggaacgaacagatt

SEQ ID NO: 40415 - DNA, 16 bp, synthetic construct
  misc_feature 1..16: note = synthetic [barcode part1]
  source 1..16: mol_type = other DNA
attggaccaggagtgc

SEQ ID NO: 40416 - DNA, 16 bp, synthetic construct
  misc_feature 1..16: note = synthetic [barcode part1]
  source 1..16: mol_type = other DNA
tatccgcctcagaacc

SEQ ID NO: 40417 - DNA, 16 bp, synthetic construct
  misc_feature 1..16: note = synthetic [barcode part1]
  source 1..16: mol_type = other DNA
tacgtaattcggcctt

SEQ ID NO: 40418 - DNA, 16 bp, synthetic construct
  misc_feature 1..16: note = synthetic [barcode part1]
  source 1..16: mol_type = other DNA
tgccgacactaatacg

SEQ ID NO: 40419 - DNA, 16 bp, synthetic construct
  misc_feature 1..16: note = synthetic [barcode part1]
  source 1..16: mol_type = other DNA
acagtctgtggtctag

SEQ ID NO: 40420 - DNA, 16 bp, synthetic construct
  misc_feature 1..16: note = synthetic [barcode part1]
  source 1..16: mol_type = other DNA
gtctgccttactcact

SEQ ID NO: 40421 - DNA, 16 bp, synthetic construct
  misc_feature 1..16: note = synthetic [barcode part1]
  source 1..16: mol_type = other DNA
acacaacgaggtcgac

SEQ ID NO: 40422 - DNA, 16 bp, synthetic construct
  misc_feature 1..16: note = synthetic [barcode part1]
  source 1..16: mol_type = other DNA
tggattcagtgaggcg

SEQ ID NO: 40423 - DNA, 16 bp, synthetic construct
  misc_feature 1..16: note = synthetic [barcode part1]
  source 1..16: mol_type = other DNA
ttataggtccgcgagt

SEQ ID NO: 40424 - DNA, 16 bp, synthetic construct
  misc_feature 1..16: note = synthetic [barcode part1]
  source 1..16: mol_type = other DNA
gactacaactagtgcc

SEQ ID NO: 40425 - DNA, 16 bp, synthetic construct
  misc_feature 1..16: note = synthetic [barcode part1]
  source 1..16: mol_type = other DNA
acacgtgataccgtgt

SEQ ID NO: 40426 - DNA, 16 bp, synthetic construct
  misc_feature 1..16: note = synthetic [barcode part1]
  source 1..16: mol_type = other DNA
tctagtgcaagtcgtg

SEQ ID NO: 40427 - DNA, 16 bp, synthetic construct
  misc_feature 1..16: note = synthetic [barcode part1]
  source 1..16: mol_type = other DNA
acttcactcacgtagt

SEQ ID NO: 40428 - DNA, 16 bp, synthetic construct
  misc_feature 1..16: note = synthetic [barcode part1]
  source 1..16: mol_type = other DNA
ttggatcaagaacacg

SEQ ID NO: 40429 - DNA, 16 bp, synthetic construct
  misc_feature 1..16: note = synthetic [barcode part1]
  source 1..16: mol_type = other DNA
tgtcaaggccttcgtc

SEQ ID NO: 40430 - DNA, 16 bp, synthetic construct
  misc_feature 1..16: note = synthetic [barcode part1]
  source 1..16: mol_type = other DNA
agtacgtggaggatcc

SEQ ID NO: 40431 - DNA, 16 bp, synthetic construct
  misc_feature 1..16: note = synthetic [barcode part1]
  source 1..16: mol_type = other DNA
gcgttctggagatatc

SEQ ID NO: 40432 - DNA, 16 bp, synthetic construct
  misc_feature 1..16: note = synthetic [barcode part1]
  source 1..16: mol_type = other DNA
aactggtcctcaagac

SEQ ID NO: 40433 - DNA, 16 bp, synthetic construct
  misc_feature 1..16: note = synthetic [barcode part1]
  source 1..16: mol_type = other DNA
cgttagatcgtgcctc

SEQ ID NO: 40434 - DNA, 16 bp, synthetic construct
  misc_feature 1..16: note = synthetic [barcode part1]
  source 1..16: mol_type = other DNA
cgtctaacggtccttg

SEQ ID NO: 40435 - DNA, 16 bp, synthetic construct
  misc_feature 1..16: note = synthetic [barcode part1]
  source 1..16: mol_type = other DNA
atccgttcactacagt

SEQ ID NO: 40436 - DNA, 16 bp, synthetic construct
  misc_feature 1..16: note = synthetic [barcode part1]
  source 1..16: mol_type = other DNA
ttattgcggcacctgc

SEQ ID NO: 40437 - DNA, 16 bp, synthetic construct
  misc_feature 1..16: note = synthetic [barcode part1]
  source 1..16: mol_type = other DNA
aacgagacggttctct

SEQ ID NO: 40438 - DNA, 16 bp, synthetic construct
  misc_feature 1..16: note = synthetic [barcode part1]
  source 1..16: mol_type = other DNA
gccgacaggattagac

SEQ ID NO: 40439 - DNA, 16 bp, synthetic construct
  misc_feature 1..16: note = synthetic [barcode part1]
  source 1..16: mol_type = other DNA
cggtcggttagttagt

SEQ ID NO: 40440 - DNA, 16 bp, synthetic construct
  misc_feature 1..16: note = synthetic [barcode part1]
  source 1..16: mol_type = other DNA
ttaggcgacgagttct

SEQ ID NO: 40441 - DNA, 16 bp, synthetic construct
  misc_feature 1..16: note = synthetic [barcode part1]
  source 1..16: mol_type = other DNA
aacacctcctacgaag

SEQ ID NO: 40442 - DNA, 16 bp, synthetic construct
  misc_feature 1..16: note = synthetic [barcode part1]
  source 1..16: mol_type = other DNA
taccacctatcggcac

SEQ ID NO: 40443 - DNA, 16 bp, synthetic construct
  misc_feature 1..16: note = synthetic [barcode part1]
  source 1..16: mol_type = other DNA
acaggaggttgttaac

SEQ ID NO: 40444 - DNA, 16 bp, synthetic construct
  misc_feature 1..16: note = synthetic [barcode part1]
  source 1..16: mol_type = other DNA
aattgcgtcctagttc

SEQ ID NO: 40445 - DNA, 16 bp, synthetic construct
  misc_feature 1..16: note = synthetic [barcode part1]
  source 1..16: mol_type = other DNA
tggagttccttaaggc

SEQ ID NO: 40446 - DNA, 16 bp, synthetic construct
  misc_feature 1..16: note = synthetic [barcode part1]
  source 1..16: mol_type = other DNA
attggtcgattggtcg

SEQ ID NO: 40447 - DNA, 16 bp, synthetic construct
  misc_feature 1..16: note = synthetic [barcode part1]
  source 1..16: mol_type = other DNA
atccggacgttgcctt

SEQ ID NO: 40448 - DNA, 16 bp, synthetic construct
  misc_feature 1..16: note = synthetic [barcode part1]
  source 1..16: mol_type = other DNA
tgcagtagataggtac

SEQ ID NO: 40449 - DNA, 16 bp, synthetic construct
  misc_feature 1..16: note = synthetic [barcode part1]
  source 1..16: mol_type = other DNA
tgtacggactcggatt

SEQ ID NO: 40450 - DNA, 16 bp, synthetic construct
  misc_feature 1..16: note = synthetic [barcode part1]
  source 1..16: mol_type = other DNA
ttatcgtagatccgtc

SEQ ID NO: 40451 - DNA, 16 bp, synthetic construct
  misc_feature 1..16: note = synthetic [barcode part1]
  source 1..16: mol_type = other DNA
ttcctgagtactggtt

SEQ ID NO: 40452 - DNA, 16 bp, synthetic construct
  misc_feature 1..16: note = synthetic [barcode part1]
  source 1..16: mol_type = other DNA
gattgcgttccggtct

SEQ ID NO: 40453 - DNA, 16 bp, synthetic construct
  misc_feature 1..16: note = synthetic [barcode part1]
  source 1..16: mol_type = other DNA
acgtacttctacggag

SEQ ID NO: 40454 - DNA, 16 bp, synthetic construct
  misc_feature 1..16: note = synthetic [barcode part1]
  source 1..16: mol_type = other DNA
gaactacgtggtctac

SEQ ID NO: 40455 - DNA, 16 bp, synthetic construct
  misc_feature 1..16: note = synthetic [barcode part1]
  source 1..16: mol_type = other DNA
actaagaagaaggccg

SEQ ID NO: 40456 - DNA, 16 bp, synthetic construct
  misc_feature 1..16: note = synthetic [barcode part1]
  source 1..16: mol_type = other DNA
accacagagacttcgt

SEQ ID NO: 40457 - DNA, 16 bp, synthetic construct
  misc_feature 1..16: note = synthetic [barcode part1]
  source 1..16: mol_type = other DNA
ttctctcaccgatcac

SEQ ID NO: 40458 - DNA, 16 bp, synthetic construct
  misc_feature 1..16: note = synthetic [barcode part1]
  source 1..16: mol_type = other DNA
attctcagacgacttc

SEQ ID NO: 40459 - DNA, 16 bp, synthetic construct
  misc_feature 1..16: note = synthetic [barcode part1]
  source 1..16: mol_type = other DNA
cacagagactagaccg

SEQ ID NO: 40460 - DNA, 16 bp, synthetic construct
  misc_feature 1..16: note = synthetic [barcode part1]
  source 1..16: mol_type = other DNA
ttatcacttcgccacc

SEQ ID NO: 40461 - DNA, 16 bp, synthetic construct
  misc_feature 1..16: note = synthetic [barcode part1]
  source 1..16: mol_type = other DNA
gtcaatctcggaatcg

SEQ ID NO: 40462 - DNA, 16 bp, synthetic construct
  misc_feature 1..16: note = synthetic [barcode part1]
  source 1..16: mol_type = other DNA
atcactcctacggatt

SEQ ID NO: 40463 - DNA, 16 bp, synthetic construct
  misc_feature 1..16: note = synthetic [barcode part1]
  source 1..16: mol_type = other DNA
ttcgcacagttattgc

SEQ ID NO: 40464 - DNA, 16 bp, synthetic construct
  misc_feature 1..16: note = synthetic [barcode part1]
  source 1..16: mol_type = other DNA
tgtgtccagtgactcc

SEQ ID NO: 40465 - DNA, 16 bp, synthetic construct
  misc_feature 1..16: note = synthetic [barcode part1]
  source 1..16: mol_type = other DNA
tgtgaactggacactc

SEQ ID NO: 40466 - DNA, 16 bp, synthetic construct
  misc_feature 1..16: note = synthetic [barcode part1]
  source 1..16: mol_type = other DNA
cctgatctaatcacac

SEQ ID NO: 40467 - DNA, 16 bp, synthetic construct
  misc_feature 1..16: note = synthetic [barcode part1]
  source 1..16: mol_type = other DNA
gtaccagactatctct

SEQ ID NO: 40468 - DNA, 16 bp, synthetic construct
  misc_feature 1..16: note = synthetic [barcode part1]
  source 1..16: mol_type = other DNA
taggactgtgtacacc

SEQ ID NO: 40469 - DNA, 16 bp, synthetic construct
  misc_feature 1..16: note = synthetic [barcode part1]
  source 1..16: mol_type = other DNA
taatcggcgtggtatc

SEQ ID NO: 40470 - DNA, 16 bp, synthetic construct
  misc_feature 1..16: note = synthetic [barcode part1]
  source 1..16: mol_type = other DNA
tcttcaggtgttggtt

SEQ ID NO: 40471 - DNA, 16 bp, synthetic construct
  misc_feature 1..16: note = synthetic [barcode part1]
  source 1..16: mol_type = other DNA
tcacgcggttgtatag

SEQ ID NO: 40472 - DNA, 16 bp, synthetic construct
  misc_feature 1..16: note = synthetic [barcode part1]
  source 1..16: mol_type = other DNA
actcagactataggcc

SEQ ID NO: 40473 - DNA, 16 bp, synthetic construct
  misc_feature 1..16: note = synthetic [barcode part1]
  source 1..16: mol_type = other DNA
gtcgttccaggtactc

SEQ ID NO: 40474 - DNA, 16 bp, synthetic construct
  misc_feature 1..16: note = synthetic [barcode part1]
  source 1..16: mol_type = other DNA
ccaagagttagtgtag

SEQ ID NO: 40475 - DNA, 16 bp, synthetic construct
  misc_feature 1..16: note = synthetic [barcode part1]
  source 1..16: mol_type = other DNA
acttgcctgttgtggc

SEQ ID NO: 40476 - DNA, 16 bp, synthetic construct
  misc_feature 1..16: note = synthetic [barcode part1]
  source 1..16: mol_type = other DNA
ttcgtaggagttcgtg

SEQ ID NO: 40477 - DNA, 16 bp, synthetic construct
  misc_feature 1..16: note = synthetic [barcode part1]
  source 1..16: mol_type = other DNA
ttcaccaggagtgact

SEQ ID NO: 40478 - DNA, 16 bp, synthetic construct
  misc_feature 1..16: note = synthetic [barcode part1]
  source 1..16: mol_type = other DNA
actacaacggacaagt

SEQ ID NO: 40479 - DNA, 16 bp, synthetic construct
  misc_feature 1..16: note = synthetic [barcode part1]
  source 1..16: mol_type = other DNA
gcgtgtgatattgcac

SEQ ID NO: 40480 - DNA, 16 bp, synthetic construct
  misc_feature 1..16: note = synthetic [barcode part1]
  source 1..16: mol_type = other DNA
tccaatccgacgcgtt

SEQ ID NO: 40481 - DNA, 16 bp, synthetic construct
  misc_feature 1..16: note = synthetic [barcode part1]
  source 1..16: mol_type = other DNA
tgtggtacctgagatc

SEQ ID NO: 40482 - DNA, 16 bp, synthetic construct
  misc_feature 1..16: note = synthetic [barcode part1]
  source 1..16: mol_type = other DNA
tgtatcgaagaggttg

SEQ ID NO: 40483 - DNA, 16 bp, synthetic construct
  misc_feature 1..16: note = synthetic [barcode part1]
  source 1..16: mol_type = other DNA
ttggtgttgtgaccag

SEQ ID NO: 40484 - DNA, 16 bp, synthetic construct
  misc_feature 1..16: note = synthetic [barcode part1]
  source 1..16: mol_type = other DNA
cgcaacgttcacttgc

SEQ ID NO: 40485 - DNA, 16 bp, synthetic construct
  misc_feature 1..16: note = synthetic [barcode part1]
  source 1..16: mol_type = other DNA
tcactcggaacgaatc

SEQ ID NO: 40486 - DNA, 16 bp, synthetic construct
  misc_feature 1..16: note = synthetic [barcode part1]
  source 1..16: mol_type = other DNA
acctcactgaacctgc

SEQ ID NO: 40487 - DNA, 16 bp, synthetic construct
  misc_feature 1..16: note = synthetic [barcode part1]
  source 1..16: mol_type = other DNA
aagttgataacacgcg

SEQ ID NO: 40488 - DNA, 16 bp, synthetic construct
  misc_feature 1..16: note = synthetic [barcode part1]
  source 1..16: mol_type = other DNA
cgactcgaatagtctg

SEQ ID NO: 40489 - DNA, 16 bp, synthetic construct
  misc_feature 1..16: note = synthetic [barcode part1]
  source 1..16: mol_type = other DNA
agagtattcctacgcg

SEQ ID NO: 40490 - DNA, 16 bp, synthetic construct
  misc_feature 1..16: note = synthetic [barcode part1]
  source 1..16: mol_type = other DNA
acgaggaattggattc

SEQ ID NO: 40491 - DNA, 16 bp, synthetic construct
  misc_feature 1..16: note = synthetic [barcode part1]
  source 1..16: mol_type = other DNA
gtctgaggtaggttct

SEQ ID NO: 40492 - DNA, 16 bp, synthetic construct
  misc_feature 1..16: note = synthetic [barcode part1]
  source 1..16: mol_type = other DNA
gatatcgtcttcctcc

SEQ ID NO: 40493 - DNA, 16 bp, synthetic construct
  misc_feature 1..16: note = synthetic [barcode part1]
  source 1..16: mol_type = other DNA
actgaacgagtgcgac

SEQ ID NO: 40494 - DNA, 16 bp, synthetic construct
  misc_feature 1..16: note = synthetic [barcode part1]
  source 1..16: mol_type = other DNA
actgcaagacagatac

SEQ ID NO: 40495 - DNA, 16 bp, synthetic construct
  misc_feature 1..16: note = synthetic [barcode part1]
  source 1..16: mol_type = other DNA
accaaggtagtcgcag

SEQ ID NO: 40496 - DNA, 16 bp, synthetic construct
  misc_feature 1..16: note = synthetic [barcode part1]
  source 1..16: mol_type = other DNA
acgcgcactaatcaac

SEQ ID NO: 40497 - DNA, 16 bp, synthetic construct
  misc_feature 1..16: note = synthetic [barcode part1]
  source 1..16: mol_type = other DNA
gtaccgacaatctctt

SEQ ID NO: 40498 - DNA, 16 bp, synthetic construct
  misc_feature 1..16: note = synthetic [barcode part1]
  source 1..16: mol_type = other DNA
aggttattccacgtct

SEQ ID NO: 40499 - DNA, 16 bp, synthetic construct
  misc_feature 1..16: note = synthetic [barcode part1]
  source 1..16: mol_type = other DNA
tgaactgcaacttggc

SEQ ID NO: 40500 - DNA, 16 bp, synthetic construct
  misc_feature 1..16: note = synthetic [barcode part1]
  source 1..16: mol_type = other DNA
gcaagtgagacaagtg

SEQ ID NO: 40501 - DNA, 16 bp, synthetic construct
  misc_feature 1..16: note = synthetic [barcode part1]
  source 1..16: mol_type = other DNA
tgtctcgcctgttatc

SEQ ID NO: 40502 - DNA, 16 bp, synthetic construct
  misc_feature 1..16: note = synthetic [barcode part1]
  source 1..16: mol_type = other DNA
cagtagtcgtgaaggc

SEQ ID NO: 40503 - DNA, 16 bp, synthetic construct
  misc_feature 1..16: note = synthetic [barcode part1]
  source 1..16: mol_type = other DNA
gccgcagttatagtgt

SEQ ID NO: 40504 - DNA, 16 bp, synthetic construct
  misc_feature 1..16: note = synthetic [barcode part1]
  source 1..16: mol_type = other DNA
ttctcgcgtccagtag

SEQ ID NO: 40505 - DNA, 16 bp, synthetic construct
  misc_feature 1..16: note = synthetic [barcode part1]
  source 1..16: mol_type = other DNA
aggtccgtatctcacc

SEQ ID NO: 40506 - DNA, 16 bp, synthetic construct
  misc_feature 1..16: note = synthetic [barcode part1]
  source 1..16: mol_type = other DNA
atctctacctggtaac

SEQ ID NO: 40507 - DNA, 16 bp, synthetic construct
  misc_feature 1..16: note = synthetic [barcode part1]
  source 1..16: mol_type = other DNA
cgttgcctgagagatt

SEQ ID NO: 40508 - DNA, 16 bp, synthetic construct
  misc_feature 1..16: note = synthetic [barcode part1]
  source 1..16: mol_type = other DNA
tcctgtagtcgaatct

SEQ ID NO: 40509 - DNA, 16 bp, synthetic construct
  misc_feature 1..16: note = synthetic [barcode part1]
  source 1..16: mol_type = other DNA
aggtcgttaagagtgt

SEQ ID NO: 40510 - DNA, 16 bp, synthetic construct
  misc_feature 1..16: note = synthetic [barcode part1]
  source 1..16: mol_type = other DNA
acctgtacgacaggag

SEQ ID NO: 40511 - DNA, 16 bp, synthetic construct
  misc_feature 1..16: note = synthetic [barcode part1]
  source 1..16: mol_type = other DNA
agtctcacgagatctg

SEQ ID NO: 40512 - DNA, 16 bp, synthetic construct
  misc_feature 1..16: note = synthetic [barcode part1]
  source 1..16: mol_type = other DNA
atactggcggttctcc

SEQ ID NO: 40513 - DNA, 16 bp, synthetic construct
  misc_feature 1..16: note = synthetic [barcode part1]
  source 1..16: mol_type = other DNA
ccacgtccgtcagatt

SEQ ID NO: 40514 - DNA, 16 bp, synthetic construct
  misc_feature 1..16: note = synthetic [barcode part1]
  source 1..16: mol_type = other DNA
cacgatacaggattcc

SEQ ID NO: 40515 - DNA, 16 bp, synthetic construct
  misc_feature 1..16: note = synthetic [barcode part1]
  source 1..16: mol_type = other DNA
cacctgccttaggact

SEQ ID NO: 40516 - DNA, 16 bp, synthetic construct
  misc_feature 1..16: note = synthetic [barcode part1]
  source 1..16: mol_type = other DNA
agagaactggattcgt

SEQ ID NO: 40517 - DNA, 16 bp, synthetic construct
  misc_feature 1..16: note = synthetic [barcode part1]
  source 1..16: mol_type = other DNA
gtgcgtcgaactagag

SEQ ID NO: 40518 - DNA, 16 bp, synthetic construct
  misc_feature 1..16: note = synthetic [barcode part1]
  source 1..16: mol_type = other DNA
cctcttgtcacacgag

SEQ ID NO: 40519 - DNA, 16 bp, synthetic construct
  misc_feature 1..16: note = synthetic [barcode part1]
  source 1..16: mol_type = other DNA
ccttcgttctgtgttg

SEQ ID NO: 40520 - DNA, 16 bp, synthetic construct
  misc_feature 1..16: note = synthetic [barcode part1]
  source 1..16: mol_type = other DNA
cagttcactcgtaccg

SEQ ID NO: 40521 - DNA, 16 bp, synthetic construct
  misc_feature 1..16: note = synthetic [barcode part1]
  source 1..16: mol_type = other DNA
gcgtcacaacaggtag

SEQ ID NO: 40522 - DNA, 16 bp, synthetic construct
  misc_feature 1..16: note = synthetic [barcode part1]
  source 1..16: mol_type = other DNA
tagactcacctcaccg

SEQ ID NO: 40523 - DNA, 16 bp, synthetic construct
  misc_feature 1..16: note = synthetic [barcode part1]
  source 1..16: mol_type = other DNA
aggtgtccaggtatct

SEQ ID NO: 40524 - DNA, 16 bp, synthetic construct
  misc_feature 1..16: note = synthetic [barcode part1]
  source 1..16: mol_type = other DNA
gttgcaaggtattgcc

SEQ ID NO: 40525 - DNA, 16 bp, synthetic construct
  misc_feature 1..16: note = synthetic [barcode part1]
  source 1..16: mol_type = other DNA
aattccttcctgccac

SEQ ID NO: 40526 - DNA, 16 bp, synthetic construct
  misc_feature 1..16: note = synthetic [barcode part1]
  source 1..16: mol_type = other DNA
gtaacgcagttggtct

SEQ ID NO: 40527 - DNA, 16 bp, synthetic construct
  misc_feature 1..16: note = synthetic [barcode part1]
  source 1..16: mol_type = other DNA
tctactattccgtcgc

SEQ ID NO: 40528 - DNA, 16 bp, synthetic construct
  misc_feature 1..16: note = synthetic [barcode part1]
  source 1..16: mol_type = other DNA
acaaccgtctcggtct

SEQ ID NO: 40529 - DNA, 16 bp, synthetic construct
  misc_feature 1..16: note = synthetic [barcode part1]
  source 1..16: mol_type = other DNA
cgacacagttgcctct

SEQ ID NO: 40530 - DNA, 16 bp, synthetic construct
  misc_feature 1..16: note = synthetic [barcode part1]
  source 1..16: mol_type = other DNA
tcggatacctactatc

SEQ ID NO: 40531 - DNA, 16 bp, synthetic construct
  misc_feature 1..16: note = synthetic [barcode part1]
  source 1..16: mol_type = other DNA
gactgacttaaggcct

SEQ ID NO: 40532 - DNA, 16 bp, synthetic construct
  misc_feature 1..16: note = synthetic [barcode part1]
  source 1..16: mol_type = other DNA
acagatccgatcctcc

SEQ ID NO: 40533 - DNA, 16 bp, synthetic construct
  misc_feature 1..16: note = synthetic [barcode part1]
  source 1..16: mol_type = other DNA
gcctgaggacaagatc

SEQ ID NO: 40534 - DNA, 16 bp, synthetic construct
  misc_feature 1..16: note = synthetic [barcode part1]
  source 1..16: mol_type = other DNA
gacgtattctcaatcc

SEQ ID NO: 40535 - DNA, 16 bp, synthetic construct
  misc_feature 1..16: note = synthetic [barcode part1]
  source 1..16: mol_type = other DNA
aagtgcgtgattcaag

SEQ ID NO: 40536 - DNA, 16 bp, synthetic construct
  misc_feature 1..16: note = synthetic [barcode part1]
  source 1..16: mol_type = other DNA
cggcacttattgtgag

SEQ ID NO: 40537 - DNA, 16 bp, synthetic construct
  misc_feature 1..16: note = synthetic [barcode part1]
  source 1..16: mol_type = other DNA
cgtacgacaagttcgt

SEQ ID NO: 40538 - DNA, 16 bp, synthetic construct
  misc_feature 1..16: note = synthetic [barcode part1]
  source 1..16: mol_type = other DNA
cagtaggacttgtaag

SEQ ID NO: 40539 - DNA, 16 bp, synthetic construct
  misc_feature 1..16: note = synthetic [barcode part1]
  source 1..16: mol_type = other DNA
tagatacgagaaccgt

SEQ ID NO: 40540 - DNA, 16 bp, synthetic construct
  misc_feature 1..16: note = synthetic [barcode part1]
  source 1..16: mol_type = other DNA
ccgtctattgttcacc

SEQ ID NO: 40541 - DNA, 16 bp, synthetic construct
  misc_feature 1..16: note = synthetic [barcode part1]
  source 1..16: mol_type = other DNA
gagtggataggacctc

SEQ ID NO: 40542 - DNA, 16 bp, synthetic construct
  misc_feature 1..16: note = synthetic [barcode part1]
  source 1..16: mol_type = other DNA
cgtccgtagaccttgt

SEQ ID NO: 40543 - DNA, 16 bp, synthetic construct
  misc_feature 1..16: note = synthetic [barcode part1]
  source 1..16: mol_type = other DNA
tcggtcctatcgacgt

SEQ ID NO: 40544 - DNA, 16 bp, synthetic construct
  misc_feature 1..16: note = synthetic [barcode part1]
  source 1..16: mol_type = other DNA
tcggagtgtgatacct

SEQ ID NO: 40545 - DNA, 16 bp, synthetic construct
  misc_feature 1..16: note = synthetic [barcode part1]
  source 1..16: mol_type = other DNA
tccgtctatagtatcg

SEQ ID NO: 40546 - DNA, 16 bp, synthetic construct
  misc_feature 1..16: note = synthetic [barcode part1]
  source 1..16: mol_type = other DNA
tctccacggtagtctg

SEQ ID NO: 40547 - DNA, 16 bp, synthetic construct
  misc_feature 1..16: note = synthetic [barcode part1]
  source 1..16: mol_type = other DNA
tgagtatccaggcgtt

SEQ ID NO: 40548 - DNA, 16 bp, synthetic construct
  misc_feature 1..16: note = synthetic [barcode part1]
  source 1..16: mol_type = other DNA
agagataacaatccgc

SEQ ID NO: 40549 - DNA, 16 bp, synthetic construct
  misc_feature 1..16: note = synthetic [barcode part1]
  source 1..16: mol_type = other DNA
tgaaccgaccgaactt

SEQ ID NO: 40550 - DNA, 16 bp, synthetic construct
  misc_feature 1..16: note = synthetic [barcode part1]
  source 1..16: mol_type = other DNA
acggaaggacctagtc

SEQ ID NO: 40551 - DNA, 16 bp, synthetic construct
  misc_feature 1..16: note = synthetic [barcode part1]
  source 1..16: mol_type = other DNA
aacacaattgccgaag

SEQ ID NO: 40552 - DNA, 16 bp, synthetic construct
  misc_feature 1..16: note = synthetic [barcode part1]
  source 1..16: mol_type = other DNA
gtccactagtaagtgc

SEQ ID NO: 40553 - DNA, 16 bp, synthetic construct
  misc_feature 1..16: note = synthetic [barcode part1]
  source 1..16: mol_type = other DNA
cactccacttggacac

SEQ ID NO: 40554 - DNA, 16 bp, synthetic construct
  misc_feature 1..16: note = synthetic [barcode part1]
  source 1..16: mol_type = other DNA
cggccgaagttaactt

SEQ ID NO: 40555 - DNA, 16 bp, synthetic construct
  misc_feature 1..16: note = synthetic [barcode part1]
  source 1..16: mol_type = other DNA
ccgtattcttgcacct

SEQ ID NO: 40556 - DNA, 16 bp, synthetic construct
  misc_feature 1..16: note = synthetic [barcode part1]
  source 1..16: mol_type = other DNA
gtcggcagttccttac

SEQ ID NO: 40557 - DNA, 16 bp, synthetic construct
  misc_feature 1..16: note = synthetic [barcode part1]
  source 1..16: mol_type = other DNA
aatacttgcctcctag

SEQ ID NO: 40558 - DNA, 16 bp, synthetic construct
  misc_feature 1..16: note = synthetic [barcode part1]
  source 1..16: mol_type = other DNA
gtattctgactcaacc

SEQ ID NO: 40559 - DNA, 16 bp, synthetic construct
  misc_feature 1..16: note = synthetic [barcode part1]
  source 1..16: mol_type = other DNA
cctgtacctagactgc

SEQ ID NO: 40560 - DNA, 16 bp, synthetic construct
  misc_feature 1..16: note = synthetic [barcode part1]
  source 1..16: mol_type = other DNA
cagtaacaatccgacc

SEQ ID NO: 40561 - DNA, 16 bp, synthetic construct
  misc_feature 1..16: note = synthetic [barcode part1]
  source 1..16: mol_type = other DNA
aattggccgactagtc

SEQ ID NO: 40562 - DNA, 16 bp, synthetic construct
  misc_feature 1..16: note = synthetic [barcode part1]
  source 1..16: mol_type = other DNA
gagtactagtgtccac

SEQ ID NO: 40563 - DNA, 16 bp, synthetic construct
  misc_feature 1..16: note = synthetic [barcode part1]
  source 1..16: mol_type = other DNA
tcttcttcctcggagt

SEQ ID NO: 40564 - DNA, 16 bp, synthetic construct
  misc_feature 1..16: note = synthetic [barcode part1]
  source 1..16: mol_type = other DNA
ttgagatacggcgtct

SEQ ID NO: 40565 - DNA, 16 bp, synthetic construct
  misc_feature 1..16: note = synthetic [barcode part1]
  source 1..16: mol_type = other DNA
ttggtagtccgtattc

SEQ ID NO: 40566 - DNA, 16 bp, synthetic construct
  misc_feature 1..16: note = synthetic [barcode part1]
  source 1..16: mol_type = other DNA
gtctccaatccgacac

SEQ ID NO: 40567 - DNA, 16 bp, synthetic construct
  misc_feature 1..16: note = synthetic [barcode part1]
  source 1..16: mol_type = other DNA
ccttaagactcacttg

SEQ ID NO: 40568 - DNA, 16 bp, synthetic construct
  misc_feature 1..16: note = synthetic [barcode part1]
  source 1..16: mol_type = other DNA
gacttggtacgcctct

SEQ ID NO: 40569 - DNA, 16 bp, synthetic construct
  misc_feature 1..16: note = synthetic [barcode part1]
  source 1..16: mol_type = other DNA
aaccggtaccgcaatt

SEQ ID NO: 40570 - DNA, 16 bp, synthetic construct
  misc_feature 1..16: note = synthetic [barcode part1]
  source 1..16: mol_type = other DNA
gtctaaggtaacagac

SEQ ID NO: 40571 - DNA, 16 bp, synthetic construct
  misc_feature 1..16: note = synthetic [barcode part1]
  source 1..16: mol_type = other DNA
gcgtagtcgacgtatt

SEQ ID NO: 40572 - DNA, 16 bp, synthetic construct
  misc_feature 1..16: note = synthetic [barcode part1]
  source 1..16: mol_type = other DNA
tgtctgtaggcggatt

SEQ ID NO: 40573 - DNA, 16 bp, synthetic construct
  misc_feature 1..16: note = synthetic [barcode part1]
  source 1..16: mol_type = other DNA
agaatcacacggattg

SEQ ID NO: 40574 - DNA, 16 bp, synthetic construct
  misc_feature 1..16: note = synthetic [barcode part1]
  source 1..16: mol_type = other DNA
tcaactccgccagtgt

SEQ ID NO: 40575 - DNA, 16 bp, synthetic construct
  misc_feature 1..16: note = synthetic [barcode part1]
  source 1..16: mol_type = other DNA
agtccggagtctaatc

SEQ ID NO: 40576 - DNA, 16 bp, synthetic construct
  misc_feature 1..16: note = synthetic [barcode part1]
  source 1..16: mol_type = other DNA
gattattcaggtcgcg

SEQ ID NO: 40577 - DNA, 16 bp, synthetic construct
  misc_feature 1..16: note = synthetic [barcode part1]
  source 1..16: mol_type = other DNA
ccaatagtgtcagacc

SEQ ID NO: 40578 - DNA, 16 bp, synthetic construct
  misc_feature 1..16: note = synthetic [barcode part1]
  source 1..16: mol_type = other DNA
ttgaacgtatcgttcc

SEQ ID NO: 40579 - DNA, 16 bp, synthetic construct
  misc_feature 1..16: note = synthetic [barcode part1]
  source 1..16: mol_type = other DNA
cgccaacgactagaag

SEQ ID NO: 40580 - DNA, 16 bp, synthetic construct
  misc_feature 1..16: note = synthetic [barcode part1]
  source 1..16: mol_type = other DNA
accttccaactcttcg

SEQ ID NO: 40581 - DNA, 16 bp, synthetic construct
  misc_feature 1..16: note = synthetic [barcode part1]
  source 1..16: mol_type = other DNA
tgcctattgaggtctt

SEQ ID NO: 40582 - DNA, 16 bp, synthetic construct
  misc_feature 1..16: note = synthetic [barcode part1]
  source 1..16: mol_type = other DNA
aattggcgtcgactac

SEQ ID NO: 40583 - DNA, 16 bp, synthetic construct
  misc_feature 1..16: note = synthetic [barcode part1]
  source 1..16: mol_type = other DNA
aattctcagagaccgc

SEQ ID NO: 40584 - DNA, 16 bp, synthetic construct
  misc_feature 1..16: note = synthetic [barcode part1]
  source 1..16: mol_type = other DNA
cagacttgcctacaag

SEQ ID NO: 40585 - DNA, 16 bp, synthetic construct
  misc_feature 1..16: note = synthetic [barcode part1]
  source 1..16: mol_type = other DNA
ataacgaaggtcggag

SEQ ID NO: 40586 - DNA, 16 bp, synthetic construct
  misc_feature 1..16: note = synthetic [barcode part1]
  source 1..16: mol_type = other DNA
gtgagaaggttcaact

SEQ ID NO: 40587 - DNA, 16 bp, synthetic construct
  misc_feature 1..16: note = synthetic [barcode part1]
  source 1..16: mol_type = other DNA
gttcctgtatctctgc

SEQ ID NO: 40588 - DNA, 16 bp, synthetic construct
  misc_feature 1..16: note = synthetic [barcode part1]
  source 1..16: mol_type = other DNA
acgacttgtcctcacg

SEQ ID NO: 40589 - DNA, 16 bp, synthetic construct
  misc_feature 1..16: note = synthetic [barcode part1]
  source 1..16: mol_type = other DNA
tacaacaggacaggtt

SEQ ID NO: 40590 - DNA, 16 bp, synthetic construct
  misc_feature 1..16: note = synthetic [barcode part1]
  source 1..16: mol_type = other DNA
aagagttgaccgagag

SEQ ID NO: 40591 - DNA, 16 bp, synthetic construct
  misc_feature 1..16: note = synthetic [barcode part1]
  source 1..16: mol_type = other DNA
acggtgtgatcgactt

SEQ ID NO: 40592 - DNA, 16 bp, synthetic construct
  misc_feature 1..16: note = synthetic [barcode part1]
  source 1..16: mol_type = other DNA
gtcggtattcaacctt

SEQ ID NO: 40593 - DNA, 16 bp, synthetic construct
  misc_feature 1..16: note = synthetic [barcode part1]
  source 1..16: mol_type = other DNA
aagtcaccactaggtc

SEQ ID NO: 40594 - DNA, 16 bp, synthetic construct
  misc_feature 1..16: note = synthetic [barcode part1]
  source 1..16: mol_type = other DNA
gtctaagatagtaggc

SEQ ID NO: 40595 - DNA, 16 bp, synthetic construct
  misc_feature 1..16: note = synthetic [barcode part1]
  source 1..16: mol_type = other DNA
gattcgactgaactgc

SEQ ID NO: 40596 - DNA, 16 bp, synthetic construct
  misc_feature 1..16: note = synthetic [barcode part1]
  source 1..16: mol_type = other DNA
tgttggaagtggttcc

SEQ ID NO: 40597 - DNA, 16 bp, synthetic construct
  misc_feature 1..16: note = synthetic [barcode part1]
  source 1..16: mol_type = other DNA
acgattgcgactgtac

SEQ ID NO: 40598 - DNA, 16 bp, synthetic construct
  misc_feature 1..16: note = synthetic [barcode part1]
  source 1..16: mol_type = other DNA
tatctacgcaggtgac

SEQ ID NO: 40599 - DNA, 16 bp, synthetic construct
  misc_feature 1..16: note = synthetic [barcode part1]
  source 1..16: mol_type = other DNA
aattcaaccttgtgcc

SEQ ID NO: 40600 - DNA, 16 bp, synthetic construct
  misc_feature 1..16: note = synthetic [barcode part1]
  source 1..16: mol_type = other DNA
cctggtcaactaaggt

SEQ ID NO: 40601 - DNA, 16 bp, synthetic construct
  misc_feature 1..16: note = synthetic [barcode part1]
  source 1..16: mol_type = other DNA
cagtgtggactacact

SEQ ID NO: 40602 - DNA, 16 bp, synthetic construct
  misc_feature 1..16: note = synthetic [barcode part1]
  source 1..16: mol_type = other DNA
attgtcggagaatacg

SEQ ID NO: 40603 - DNA, 16 bp, synthetic construct
  misc_feature 1..16: note = synthetic [barcode part1]
  source 1..16: mol_type = other DNA
cacctcgagacttatt

SEQ ID NO: 40604 - DNA, 16 bp, synthetic construct
  misc_feature 1..16: note = synthetic [barcode part1]
  source 1..16: mol_type = other DNA
caatccaggcaacttg

SEQ ID NO: 40605 - DNA, 16 bp, synthetic construct
  misc_feature 1..16: note = synthetic [barcode part1]
  source 1..16: mol_type = other DNA
gtactgttcacggtag

SEQ ID NO: 40606 - DNA, 16 bp, synthetic construct
  misc_feature 1..16: note = synthetic [barcode part1]
  source 1..16: mol_type = other DNA
gcgtcgaagtctatac

SEQ ID NO: 40607 - DNA, 16 bp, synthetic construct
  misc_feature 1..16: note = synthetic [barcode part1]
  source 1..16: mol_type = other DNA
tacttcagtaggttcc

SEQ ID NO: 40608 - DNA, 16 bp, synthetic construct
  misc_feature 1..16: note = synthetic [barcode part1]
  source 1..16: mol_type = other DNA
actggtgacaaggcgt

SEQ ID NO: 40609 - DNA, 16 bp, synthetic construct
  misc_feature 1..16: note = synthetic [barcode part1]
  source 1..16: mol_type = other DNA
tacgttgttctggttg

SEQ ID NO: 40610 - DNA, 16 bp, synthetic construct
  misc_feature 1..16: note = synthetic [barcode part1]
  source 1..16: mol_type = other DNA
aagactaggtcacgcg

SEQ ID NO: 40611 - DNA, 16 bp, synthetic construct
  misc_feature 1..16: note = synthetic [barcode part1]
  source 1..16: mol_type = other DNA
cagtccgttgttagag

SEQ ID NO: 40612 - DNA, 16 bp, synthetic construct
  misc_feature 1..16: note = synthetic [barcode part1]
  source 1..16: mol_type = other DNA
cgtactccggattacc

SEQ ID NO: 40613 - DNA, 16 bp, synthetic construct
  misc_feature 1..16: note = synthetic [barcode part1]
  source 1..16: mol_type = other DNA
tgacaggatagatctg

SEQ ID NO: 40614 - DNA, 16 bp, synthetic construct
  misc_feature 1..16: note = synthetic [barcode part1]
  source 1..16: mol_type = other DNA
gacacgtgtcaacact

SEQ ID NO: 40615 - DNA, 16 bp, synthetic construct
  misc_feature 1..16: note = synthetic [barcode part1]
  source 1..16: mol_type = other DNA
cctggttagtctcttc

SEQ ID NO: 40616 - DNA, 16 bp, synthetic construct
  misc_feature 1..16: note = synthetic [barcode part1]
  source 1..16: mol_type = other DNA
tccgcacaatccggtt

SEQ ID NO: 40617 - DNA, 16 bp, synthetic construct
  misc_feature 1..16: note = synthetic [barcode part1]
  source 1..16: mol_type = other DNA
atcggactcaccaagt

SEQ ID NO: 40618 - DNA, 16 bp, synthetic construct
  misc_feature 1..16: note = synthetic [barcode part1]
  source 1..16: mol_type = other DNA
gacttacacgaacctg

SEQ ID NO: 40619 - DNA, 16 bp, synthetic construct
  misc_feature 1..16: note = synthetic [barcode part1]
  source 1..16: mol_type = other DNA
cgtagtacctaaggtc

SEQ ID NO: 40620 - DNA, 16 bp, synthetic construct
  misc_feature 1..16: note = synthetic [barcode part1]
  source 1..16: mol_type = other DNA
gaattactgcctctgt

SEQ ID NO: 40621 - DNA, 16 bp, synthetic construct
  misc_feature 1..16: note = synthetic [barcode part1]
  source 1..16: mol_type = other DNA
cggtcggtgatattgt

SEQ ID NO: 40622 - DNA, 16 bp, synthetic construct
  misc_feature 1..16: note = synthetic [barcode part1]
  source 1..16: mol_type = other DNA
gtgagtcgtacaacct

SEQ ID NO: 40623 - DNA, 16 bp, synthetic construct
  misc_feature 1..16: note = synthetic [barcode part1]
  source 1..16: mol_type = other DNA
attctcgaacgcaggt

SEQ ID NO: 40624 - DNA, 16 bp, synthetic construct
  misc_feature 1..16: note = synthetic [barcode part1]
  source 1..16: mol_type = other DNA
gaggtccggataagtc

SEQ ID NO: 40625 - DNA, 16 bp, synthetic construct
  misc_feature 1..16: note = synthetic [barcode part1]
  source 1..16: mol_type = other DNA
gtatcacgttcgcctg

SEQ ID NO: 40626 - DNA, 16 bp, synthetic construct
  misc_feature 1..16: note = synthetic [barcode part1]
  source 1..16: mol_type = other DNA
tggagaggcactaacc

SEQ ID NO: 40627 - DNA, 16 bp, synthetic construct
  misc_feature 1..16: note = synthetic [barcode part1]
  source 1..16: mol_type = other DNA
cgcctacgataccact

SEQ ID NO: 40628 - DNA, 16 bp, synthetic construct
  misc_feature 1..16: note = synthetic [barcode part1]
  source 1..16: mol_type = other DNA
caagtcacctccgtac

SEQ ID NO: 40629 - DNA, 16 bp, synthetic construct
  misc_feature 1..16: note = synthetic [barcode part1]
  source 1..16: mol_type = other DNA
gccgtacctagtatag

SEQ ID NO: 40630 - DNA, 16 bp, synthetic construct
  misc_feature 1..16: note = synthetic [barcode part1]
  source 1..16: mol_type = other DNA
agatcggtgcgactag

SEQ ID NO: 40631 - DNA, 16 bp, synthetic construct
  misc_feature 1..16: note = synthetic [barcode part1]
  source 1..16: mol_type = other DNA
cagtggtatcgtcagt

SEQ ID NO: 40632 - DNA, 16 bp, synthetic construct
  misc_feature 1..16: note = synthetic [barcode part1]
  source 1..16: mol_type = other DNA
gtcgcgttaacttccg

SEQ ID NO: 40633 - DNA, 16 bp, synthetic construct
  misc_feature 1..16: note = synthetic [barcode part1]
  source 1..16: mol_type = other DNA
ccgttgttgcctagac

SEQ ID NO: 40634 - DNA, 16 bp, synthetic construct
  misc_feature 1..16: note = synthetic [barcode part1]
  source 1..16: mol_type = other DNA
gagtggaagacgaatc

SEQ ID NO: 40635 - DNA, 16 bp, synthetic construct
  misc_feature 1..16: note = synthetic [barcode part1]
  source 1..16: mol_type = other DNA
gacttcttcagtgtgt

SEQ ID NO: 40636 - DNA, 16 bp, synthetic construct
  misc_feature 1..16: note = synthetic [barcode part1]
  source 1..16: mol_type = other DNA
ccacactacaacttac

SEQ ID NO: 40637 - DNA, 16 bp, synthetic construct
  misc_feature 1..16: note = synthetic [barcode part1]
  source 1..16: mol_type = other DNA
tgtcctactacggatt

SEQ ID NO: 40638 - DNA, 16 bp, synthetic construct
  misc_feature 1..16: note = synthetic [barcode part1]
  source 1..16: mol_type = other DNA
cgtgatactacctgcc

SEQ ID NO: 40639 - DNA, 16 bp, synthetic construct
  misc_feature 1..16: note = synthetic [barcode part1]
  source 1..16: mol_type = other DNA
cgagtccttgtcctag

SEQ ID NO: 40640 - DNA, 16 bp, synthetic construct
  misc_feature 1..16: note = synthetic [barcode part1]
  source 1..16: mol_type = other DNA
atcacagatctcggac

SEQ ID NO: 40641 - DNA, 16 bp, synthetic construct
  misc_feature 1..16: note = synthetic [barcode part1]
  source 1..16: mol_type = other DNA
gtgacttgcaaggacg

SEQ ID NO: 40642 - DNA, 16 bp, synthetic construct
  misc_feature 1..16: note = synthetic [barcode part1]
  source 1..16: mol_type = other DNA
ttaacctcttggcctc

SEQ ID NO: 40643 - DNA, 16 bp, synthetic construct
  misc_feature 1..16: note = synthetic [barcode part1]
  source 1..16: mol_type = other DNA
cgagaagtagtacgcc

SEQ ID NO: 40644 - DNA, 16 bp, synthetic construct
  misc_feature 1..16: note = synthetic [barcode part1]
  source 1..16: mol_type = other DNA
tacctgttccaaggtt

SEQ ID NO: 40645 - DNA, 16 bp, synthetic construct
  misc_feature 1..16: note = synthetic [barcode part1]
  source 1..16: mol_type = other DNA
cacagatatccacgac

SEQ ID NO: 40646 - DNA, 16 bp, synthetic construct
  misc_feature 1..16: note = synthetic [barcode part1]
  source 1..16: mol_type = other DNA
ccgcgagatagagtgt

SEQ ID NO: 40647 - DNA, 16 bp, synthetic construct
  misc_feature 1..16: note = synthetic [barcode part1]
  source 1..16: mol_type = other DNA
agacacgtgataatcg

SEQ ID NO: 40648 - DNA, 16 bp, synthetic construct
  misc_feature 1..16: note = synthetic [barcode part1]
  source 1..16: mol_type = other DNA
cagagtcacgtgtgtt

SEQ ID NO: 40649 - DNA, 16 bp, synthetic construct
  misc_feature 1..16: note = synthetic [barcode part1]
  source 1..16: mol_type = other DNA
gtctcactctgacttc

SEQ ID NO: 40650 - DNA, 16 bp, synthetic construct
  misc_feature 1..16: note = synthetic [barcode part1]
  source 1..16: mol_type = other DNA
cggaccagtactcttc

SEQ ID NO: 40651 - DNA, 16 bp, synthetic construct
  misc_feature 1..16: note = synthetic [barcode part1]
  source 1..16: mol_type = other DNA
cgaggtagtgactgtg

SEQ ID NO: 40652 - DNA, 16 bp, synthetic construct
  misc_feature 1..16: note = synthetic [barcode part1]
  source 1..16: mol_type = other DNA
cgattgttactctgtg

SEQ ID NO: 40653 - DNA, 16 bp, synthetic construct
  misc_feature 1..16: note = synthetic [barcode part1]
  source 1..16: mol_type = other DNA
tacagaacaacaaccg

SEQ ID NO: 40654 - DNA, 16 bp, synthetic construct
  misc_feature 1..16: note = synthetic [barcode part1]
  source 1..16: mol_type = other DNA
acacgacaatcttcct

SEQ ID NO: 40655 - DNA, 16 bp, synthetic construct
  misc_feature 1..16: note = synthetic [barcode part1]
  source 1..16: mol_type = other DNA
gcaactggtaccagtt

SEQ ID NO: 40656 - DNA, 16 bp, synthetic construct
  misc_feature 1..16: note = synthetic [barcode part1]
  source 1..16: mol_type = other DNA
atacgtaggccgactt

SEQ ID NO: 40657 - DNA, 16 bp, synthetic construct
  misc_feature 1..16: note = synthetic [barcode part1]
  source 1..16: mol_type = other DNA
tatcgtcagacacctt

SEQ ID NO: 40658 - DNA, 16 bp, synthetic construct
  misc_feature 1..16: note = synthetic [barcode part1]
  source 1..16: mol_type = other DNA
ttggtggacaaggatt

SEQ ID NO: 40659 - DNA, 16 bp, synthetic construct
  misc_feature 1..16: note = synthetic [barcode part1]
  source 1..16: mol_type = other DNA
gcgtaactaaccacgt

SEQ ID NO: 40660 - DNA, 16 bp, synthetic construct
  misc_feature 1..16: note = synthetic [barcode part1]
  source 1..16: mol_type = other DNA
atactgcgaacctcag

SEQ ID NO: 40661 - DNA, 16 bp, synthetic construct
  misc_feature 1..16: note = synthetic [barcode part1]
  source 1..16: mol_type = other DNA
ttgatatacaccggcg

SEQ ID NO: 40662 - DNA, 16 bp, synthetic construct
  misc_feature 1..16: note = synthetic [barcode part1]
  source 1..16: mol_type = other DNA
gttggacacctagtgt

SEQ ID NO: 40663 - DNA, 16 bp, synthetic construct
  misc_feature 1..16: note = synthetic [barcode part1]
  source 1..16: mol_type = other DNA
ttgtcgattggaccag

SEQ ID NO: 40664 - DNA, 16 bp, synthetic construct
  misc_feature 1..16: note = synthetic [barcode part1]
  source 1..16: mol_type = other DNA
ttatcctggtcgcacg

SEQ ID NO: 40665 - DNA, 16 bp, synthetic construct
  misc_feature 1..16: note = synthetic [barcode part1]
  source 1..16: mol_type = other DNA
taatcggcacgtacac

SEQ ID NO: 40666 - DNA, 16 bp, synthetic construct
  misc_feature 1..16: note = synthetic [barcode part1]
  source 1..16: mol_type = other DNA
tctgcctgccttgaag

SEQ ID NO: 40667 - DNA, 16 bp, synthetic construct
  misc_feature 1..16: note = synthetic [barcode part1]
  source 1..16: mol_type = other DNA
cgttactacagtcact

SEQ ID NO: 40668 - DNA, 16 bp, synthetic construct
  misc_feature 1..16: note = synthetic [barcode part1]
  source 1..16: mol_type = other DNA
tgaatccgacgttcag

SEQ ID NO: 40669 - DNA, 16 bp, synthetic construct
  misc_feature 1..16: note = synthetic [barcode part1]
  source 1..16: mol_type = other DNA
tagtacggacttacgc

SEQ ID NO: 40670 - DNA, 16 bp, synthetic construct
  misc_feature 1..16: note = synthetic [barcode part1]
  source 1..16: mol_type = other DNA
cgcgtgaagtgtattc

SEQ ID NO: 40671 - DNA, 16 bp, synthetic construct
  misc_feature 1..16: note = synthetic [barcode part1]
  source 1..16: mol_type = other DNA
gcaactaatcaacgcc

SEQ ID NO: 40672 - DNA, 16 bp, synthetic construct
  misc_feature 1..16: note = synthetic [barcode part1]
  source 1..16: mol_type = other DNA
ttgtaggtggatctgc

SEQ ID NO: 40673 - DNA, 16 bp, synthetic construct
  misc_feature 1..16: note = synthetic [barcode part1]
  source 1..16: mol_type = other DNA
aggagtatcgtgcctt

SEQ ID NO: 40674 - DNA, 16 bp, synthetic construct
  misc_feature 1..16: note = synthetic [barcode part1]
  source 1..16: mol_type = other DNA
atacacacaacgccgt

SEQ ID NO: 40675 - DNA, 16 bp, synthetic construct
  misc_feature 1..16: note = synthetic [barcode part1]
  source 1..16: mol_type = other DNA
accgttagattcggtg

SEQ ID NO: 40676 - DNA, 16 bp, synthetic construct
  misc_feature 1..16: note = synthetic [barcode part1]
  source 1..16: mol_type = other DNA
ttacttcgcgttcaag

SEQ ID NO: 40677 - DNA, 16 bp, synthetic construct
  misc_feature 1..16: note = synthetic [barcode part1]
  source 1..16: mol_type = other DNA
ttatcctcgacctctg

SEQ ID NO: 40678 - DNA, 16 bp, synthetic construct
  misc_feature 1..16: note = synthetic [barcode part1]
  source 1..16: mol_type = other DNA
attctattgccggtgt

SEQ ID NO: 40679 - DNA, 16 bp, synthetic construct
  misc_feature 1..16: note = synthetic [barcode part1]
  source 1..16: mol_type = other DNA
ttcggttgttgacact

SEQ ID NO: 40680 - DNA, 16 bp, synthetic construct
  misc_feature 1..16: note = synthetic [barcode part1]
  source 1..16: mol_type = other DNA
gatagagaggacggtt

SEQ ID NO: 40681 - DNA, 16 bp, synthetic construct
  misc_feature 1..16: note = synthetic [barcode part1]
  source 1..16: mol_type = other DNA
ccaagtgtgagacggt

SEQ ID NO: 40682 - DNA, 16 bp, synthetic construct
  misc_feature 1..16: note = synthetic [barcode part1]
  source 1..16: mol_type = other DNA
cctctaggttggtgtc

SEQ ID NO: 40683 - DNA, 16 bp, synthetic construct
  misc_feature 1..16: note = synthetic [barcode part1]
  source 1..16: mol_type = other DNA
tataagtcactgcctc

SEQ ID NO: 40684 - DNA, 16 bp, synthetic construct
  misc_feature 1..16: note = synthetic [barcode part1]
  source 1..16: mol_type = other DNA
gacgagtcagaactcg

SEQ ID NO: 40685 - DNA, 16 bp, synthetic construct
  misc_feature 1..16: note = synthetic [barcode part1]
  source 1..16: mol_type = other DNA
tggacgaagacctcag

SEQ ID NO: 40686 - DNA, 16 bp, synthetic construct
  misc_feature 1..16: note = synthetic [barcode part1]
  source 1..16: mol_type = other DNA
acggaactactgtctg

SEQ ID NO: 40687 - DNA, 16 bp, synthetic construct
  misc_feature 1..16: note = synthetic [barcode part1]
  source 1..16: mol_type = other DNA
cagtcagaccaatcgt

SEQ ID NO: 40688 - DNA, 16 bp, synthetic construct
  misc_feature 1..16: note = synthetic [barcode part1]
  source 1..16: mol_type = other DNA
cacggtcctctactag

SEQ ID NO: 40689 - DNA, 16 bp, synthetic construct
  misc_feature 1..16: note = synthetic [barcode part1]
  source 1..16: mol_type = other DNA
actcagacagaacaac

SEQ ID NO: 40690 - DNA, 16 bp, synthetic construct
  misc_feature 1..16: note = synthetic [barcode part1]
  source 1..16: mol_type = other DNA
atagttgcggcgtact

SEQ ID NO: 40691 - DNA, 16 bp, synthetic construct
  misc_feature 1..16: note = synthetic [barcode part1]
  source 1..16: mol_type = other DNA
acagttcggtgcagag

SEQ ID NO: 40692 - DNA, 16 bp, synthetic construct
  misc_feature 1..16: note = synthetic [barcode part1]
  source 1..16: mol_type = other DNA
tgaatacaaggcgact

SEQ ID NO: 40693 - DNA, 16 bp, synthetic construct
  misc_feature 1..16: note = synthetic [barcode part1]
  source 1..16: mol_type = other DNA
gtccgttctcagaacc

SEQ ID NO: 40694 - DNA, 16 bp, synthetic construct
  misc_feature 1..16: note = synthetic [barcode part1]
  source 1..16: mol_type = other DNA
cgttcactattgcggc

SEQ ID NO: 40695 - DNA, 16 bp, synthetic construct
  misc_feature 1..16: note = synthetic [barcode part1]
  source 1..16: mol_type = other DNA
ccgtcgtagatccgtt

SEQ ID NO: 40696 - DNA, 16 bp, synthetic construct
  misc_feature 1..16: note = synthetic [barcode part1]
  source 1..16: mol_type = other DNA
attccacgccttctgt

SEQ ID NO: 40697 - DNA, 16 bp, synthetic construct
  misc_feature 1..16: note = synthetic [barcode part1]
  source 1..16: mol_type = other DNA
tcaaggtgtgaacaac

SEQ ID NO: 40698 - DNA, 16 bp, synthetic construct
  misc_feature 1..16: note = synthetic [barcode part1]
  source 1..16: mol_type = other DNA
tatcctggcggacctt

SEQ ID NO: 40699 - DNA, 16 bp, synthetic construct
  misc_feature 1..16: note = synthetic [barcode part1]
  source 1..16: mol_type = other DNA
ccaggtgactctgttc

SEQ ID NO: 40700 - DNA, 16 bp, synthetic construct
  misc_feature 1..16: note = synthetic [barcode part1]
  source 1..16: mol_type = other DNA
tcctagtctctcgact

SEQ ID NO: 40701 - DNA, 16 bp, synthetic construct
  misc_feature 1..16: note = synthetic [barcode part1]
  source 1..16: mol_type = other DNA
cagattgttagtggcc

SEQ ID NO: 40702 - DNA, 16 bp, synthetic construct
  misc_feature 1..16: note = synthetic [barcode part1]
  source 1..16: mol_type = other DNA
gaagtgaccaccttgt

SEQ ID NO: 40703 - DNA, 16 bp, synthetic construct
  misc_feature 1..16: note = synthetic [barcode part1]
  source 1..16: mol_type = other DNA
agatagacaggtaggc

SEQ ID NO: 40704 - DNA, 16 bp, synthetic construct
  misc_feature 1..16: note = synthetic [barcode part1]
  source 1..16: mol_type = other DNA
gttgtctacggcaagt

SEQ ID NO: 40705 - DNA, 16 bp, synthetic construct
  misc_feature 1..16: note = synthetic [barcode part1]
  source 1..16: mol_type = other DNA
cgtgtaagttcggatc

SEQ ID NO: 40706 - DNA, 16 bp, synthetic construct
  misc_feature 1..16: note = synthetic [barcode part1]
  source 1..16: mol_type = other DNA
tccgatcacaccaacc

SEQ ID NO: 40707 - DNA, 16 bp, synthetic construct
  misc_feature 1..16: note = synthetic [barcode part1]
  source 1..16: mol_type = other DNA
gacacacacactggtt

SEQ ID NO: 40708 - DNA, 16 bp, synthetic construct
  misc_feature 1..16: note = synthetic [barcode part1]
  source 1..16: mol_type = other DNA
cactctatccgtcact

SEQ ID NO: 40709 - DNA, 16 bp, synthetic construct
  misc_feature 1..16: note = synthetic [barcode part1]
  source 1..16: mol_type = other DNA
tgtgacactcgagatc

SEQ ID NO: 40710 - DNA, 16 bp, synthetic construct
  misc_feature 1..16: note = synthetic [barcode part1]
  source 1..16: mol_type = other DNA
gttagtcgttggtcag

SEQ ID NO: 40711 - DNA, 16 bp, synthetic construct
  misc_feature 1..16: note = synthetic [barcode part1]
  source 1..16: mol_type = other DNA
gacgagaatcactctc

SEQ ID NO: 40712 - DNA, 16 bp, synthetic construct
  misc_feature 1..16: note = synthetic [barcode part1]
  source 1..16: mol_type = other DNA
aacaaccgaggtgtgc

SEQ ID NO: 40713 - DNA, 16 bp, synthetic construct
  misc_feature 1..16: note = synthetic [barcode part1]
  source 1..16: mol_type = other DNA
acaggacgaattcgcg

SEQ ID NO: 40714 - DNA, 16 bp, synthetic construct
  misc_feature 1..16: note = synthetic [barcode part1]
  source 1..16: mol_type = other DNA
aatcagttgcacgcgt

SEQ ID NO: 40715 - DNA, 16 bp, synthetic construct
  misc_feature 1..16: note = synthetic [barcode part1]
  source 1..16: mol_type = other DNA
ttccgcacggtagttc

SEQ ID NO: 40716 - DNA, 16 bp, synthetic construct
  misc_feature 1..16: note = synthetic [barcode part1]
  source 1..16: mol_type = other DNA
tcaggcgataagtctc

SEQ ID NO: 40717 - DNA, 16 bp, synthetic construct
  misc_feature 1..16: note = synthetic [barcode part1]
  source 1..16: mol_type = other DNA
gcgtcagtaatagaac

SEQ ID NO: 40718 - DNA, 16 bp, synthetic construct
  misc_feature 1..16: note = synthetic [barcode part1]
  source 1..16: mol_type = other DNA
cgattgtccgtacaag

SEQ ID NO: 40719 - DNA, 16 bp, synthetic construct
  misc_feature 1..16: note = synthetic [barcode part1]
  source 1..16: mol_type = other DNA
aagtggacagacgagt

SEQ ID NO: 40720 - DNA, 16 bp, synthetic construct
  misc_feature 1..16: note = synthetic [barcode part1]
  source 1..16: mol_type = other DNA
aacgatcggttaccac

SEQ ID NO: 40721 - DNA, 16 bp, synthetic construct
  misc_feature 1..16: note = synthetic [barcode part1]
  source 1..16: mol_type = other DNA
actacgtgttgaagag

SEQ ID NO: 40722 - DNA, 16 bp, synthetic construct
  misc_feature 1..16: note = synthetic [barcode part1]
  source 1..16: mol_type = other DNA
gaggtgacgaagtaac

SEQ ID NO: 40723 - DNA, 16 bp, synthetic construct
  misc_feature 1..16: note = synthetic [barcode part1]
  source 1..16: mol_type = other DNA
aaccaacacacgtacc

SEQ ID NO: 40724 - DNA, 16 bp, synthetic construct
  misc_feature 1..16: note = synthetic [barcode part1]
  source 1..16: mol_type = other DNA
gtggcacagttaatcc

SEQ ID NO: 40725 - DNA, 16 bp, synthetic construct
  misc_feature 1..16: note = synthetic [barcode part1]
  source 1..16: mol_type = other DNA
agtactgtcgattggc

SEQ ID NO: 40726 - DNA, 16 bp, synthetic construct
  misc_feature 1..16: note = synthetic [barcode part1]
  source 1..16: mol_type = other DNA
gagttgtagacacggc

SEQ ID NO: 40727 - DNA, 16 bp, synthetic construct
  misc_feature 1..16: note = synthetic [barcode part1]
  source 1..16: mol_type = other DNA
tgagactggccttaac

SEQ ID NO: 40728 - DNA, 16 bp, synthetic construct
  misc_feature 1..16: note = synthetic [barcode part1]
  source 1..16: mol_type = other DNA
gaacggagttccagac

SEQ ID NO: 40729 - DNA, 16 bp, synthetic construct
  misc_feature 1..16: note = synthetic [barcode part1]
  source 1..16: mol_type = other DNA
gcctgagataagtctc

SEQ ID NO: 40730 - DNA, 16 bp, synthetic construct
  misc_feature 1..16: note = synthetic [barcode part1]
  source 1..16: mol_type = other DNA
ccaacctctcacagac

SEQ ID NO: 40731 - DNA, 16 bp, synthetic construct
  misc_feature 1..16: note = synthetic [barcode part1]
  source 1..16: mol_type = other DNA
cgagattctggaactc

SEQ ID NO: 40732 - DNA, 16 bp, synthetic construct
  misc_feature 1..16: note = synthetic [barcode part1]
  source 1..16: mol_type = other DNA
aatagagtcctgtcgc

SEQ ID NO: 40733 - DNA, 16 bp, synthetic construct
  misc_feature 1..16: note = synthetic [barcode part1]
  source 1..16: mol_type = other DNA
atatatccgtcctacg

SEQ ID NO: 40734 - DNA, 16 bp, synthetic construct
  misc_feature 1..16: note = synthetic [barcode part1]
  source 1..16: mol_type = other DNA
attaacactgtcgtcc

SEQ ID NO: 40735 - DNA, 16 bp, synthetic construct
  misc_feature 1..16: note = synthetic [barcode part1]
  source 1..16: mol_type = other DNA
attacgccggtaggag

SEQ ID NO: 40736 - DNA, 16 bp, synthetic construct
  misc_feature 1..16: note = synthetic [barcode part1]
  source 1..16: mol_type = other DNA
cgatcaagtattgcgc

SEQ ID NO: 40737 - DNA, 16 bp, synthetic construct
  misc_feature 1..16: note = synthetic [barcode part1]
  source 1..16: mol_type = other DNA
accaggtggcgtaagt

SEQ ID NO: 40738 - DNA, 16 bp, synthetic construct
  misc_feature 1..16: note = synthetic [barcode part1]
  source 1..16: mol_type = other DNA
tcctgattcaacacgt

SEQ ID NO: 40739 - DNA, 16 bp, synthetic construct
  misc_feature 1..16: note = synthetic [barcode part1]
  source 1..16: mol_type = other DNA
gcgtctcttagtgatt

SEQ ID NO: 40740 - DNA, 16 bp, synthetic construct
  misc_feature 1..16: note = synthetic [barcode part1]
  source 1..16: mol_type = other DNA
attctacgacggtgac

SEQ ID NO: 40741 - DNA, 16 bp, synthetic construct
  misc_feature 1..16: note = synthetic [barcode part1]
  source 1..16: mol_type = other DNA
tagtaacgccactggt

SEQ ID NO: 40742 - DNA, 16 bp, synthetic construct
  misc_feature 1..16: note = synthetic [barcode part1]
  source 1..16: mol_type = other DNA
caccgaagtagaagtt

SEQ ID NO: 40743 - DNA, 16 bp, synthetic construct
  misc_feature 1..16: note = synthetic [barcode part1]
  source 1..16: mol_type = other DNA
tgagaattctgtgccg

SEQ ID NO: 40744 - DNA, 16 bp, synthetic construct
  misc_feature 1..16: note = synthetic [barcode part1]
  source 1..16: mol_type = other DNA
aagactaccgaatacg

SEQ ID NO: 40745 - DNA, 16 bp, synthetic construct
  misc_feature 1..16: note = synthetic [barcode part1]
  source 1..16: mol_type = other DNA
tgttaataagaggccg

SEQ ID NO: 40746 - DNA, 16 bp, synthetic construct
  misc_feature 1..16: note = synthetic [barcode part1]
  source 1..16: mol_type = other DNA
aactcagacacttctc

SEQ ID NO: 40747 - DNA, 16 bp, synthetic construct
  misc_feature 1..16: note = synthetic [barcode part1]
  source 1..16: mol_type = other DNA
accggcgacttaagtt

SEQ ID NO: 40748 - DNA, 16 bp, synthetic construct
  misc_feature 1..16: note = synthetic [barcode part1]
  source 1..16: mol_type = other DNA
tcttcggcacgattgc

SEQ ID NO: 40749 - DNA, 16 bp, synthetic construct
  misc_feature 1..16: note = synthetic [barcode part1]
  source 1..16: mol_type = other DNA
tgttatctccgcaggc

SEQ ID NO: 40750 - DNA, 16 bp, synthetic construct
  misc_feature 1..16: note = synthetic [barcode part1]
  source 1..16: mol_type = other DNA
ttcaggagtcgtgatc

SEQ ID NO: 40751 - DNA, 16 bp, synthetic construct
  misc_feature 1..16: note = synthetic [barcode part1]
  source 1..16: mol_type = other DNA
atagaggcctctgtgt

SEQ ID NO: 40752 - DNA, 16 bp, synthetic construct
  misc_feature 1..16: note = synthetic [barcode part1]
  source 1..16: mol_type = other DNA
aagtcgccagactact

SEQ ID NO: 40753 - DNA, 16 bp, synthetic construct
  misc_feature 1..16: note = synthetic [barcode part1]
  source 1..16: mol_type = other DNA
tgaccttgcgttgatt

SEQ ID NO: 40754 - DNA, 16 bp, synthetic construct
  misc_feature 1..16: note = synthetic [barcode part1]
  source 1..16: mol_type = other DNA
cacacaacacttcgcc

SEQ ID NO: 40755 - DNA, 16 bp, synthetic construct
  misc_feature 1..16: note = synthetic [barcode part1]
  source 1..16: mol_type = other DNA
gaccagtctagttggt

SEQ ID NO: 40756 - DNA, 16 bp, synthetic construct
  misc_feature 1..16: note = synthetic [barcode part1]
  source 1..16: mol_type = other DNA
cactactggatactct

SEQ ID NO: 40757 - DNA, 16 bp, synthetic construct
  misc_feature 1..16: note = synthetic [barcode part1]
  source 1..16: mol_type = other DNA
atagagtgagtccgcg

SEQ ID NO: 40758 - DNA, 16 bp, synthetic construct
  misc_feature 1..16: note = synthetic [barcode part1]
  source 1..16: mol_type = other DNA
taggtgcaaggtgatt

SEQ ID NO: 40759 - DNA, 16 bp, synthetic construct
  misc_feature 1..16: note = synthetic [barcode part1]
  source 1..16: mol_type = other DNA
actctgtggcagtagt

SEQ ID NO: 40760 - DNA, 16 bp, synthetic construct
  misc_feature 1..16: note = synthetic [barcode part1]
  source 1..16: mol_type = other DNA
aattacaggtcggaac

SEQ ID NO: 40761 - DNA, 16 bp, synthetic construct
  misc_feature 1..16: note = synthetic [barcode part1]
  source 1..16: mol_type = other DNA
agaagattagacctgc

SEQ ID NO: 40762 - DNA, 16 bp, synthetic construct
  misc_feature 1..16: note = synthetic [barcode part1]
  source 1..16: mol_type = other DNA
tagaggagtcgatact

SEQ ID NO: 40763 - DNA, 16 bp, synthetic construct
  misc_feature 1..16: note = synthetic [barcode part1]
  source 1..16: mol_type = other DNA
gtgtgcactccttctt

SEQ ID NO: 40764 - DNA, 16 bp, synthetic construct
  misc_feature 1..16: note = synthetic [barcode part1]
  source 1..16: mol_type = other DNA
taccaggaacacaagt

SEQ ID NO: 40765 - DNA, 16 bp, synthetic construct
  misc_feature 1..16: note = synthetic [barcode part1]
  source 1..16: mol_type = other DNA
tcggacgttattccgc

SEQ ID NO: 40766 - DNA, 16 bp, synthetic construct
  misc_feature 1..16: note = synthetic [barcode part1]
  source 1..16: mol_type = other DNA
tccaagaactgcgatc

SEQ ID NO: 40767 - DNA, 16 bp, synthetic construct
  misc_feature 1..16: note = synthetic [barcode part1]
  source 1..16: mol_type = other DNA
ccgtgtcttattgagt

SEQ ID NO: 40768 - DNA, 16 bp, synthetic construct
  misc_feature 1..16: note = synthetic [barcode part1]
  source 1..16: mol_type = other DNA
actctcctcttccaag

SEQ ID NO: 40769 - DNA, 16 bp, synthetic construct
  misc_feature 1..16: note = synthetic [barcode part1]
  source 1..16: mol_type = other DNA
atcgtgtcaactcttg

SEQ ID NO: 40770 - DNA, 16 bp, synthetic construct
  misc_feature 1..16: note = synthetic [barcode part1]
  source 1..16: mol_type = other DNA
gcgtaattgtggttgc

SEQ ID NO: 40771 - DNA, 16 bp, synthetic construct
  misc_feature 1..16: note = synthetic [barcode part1]
  source 1..16: mol_type = other DNA
caaccggttaattggc

SEQ ID NO: 40772 - DNA, 16 bp, synthetic construct
  misc_feature 1..16: note = synthetic [barcode part1]
  source 1..16: mol_type = other DNA
gcgagaggattcggtt

SEQ ID NO: 40773 - DNA, 16 bp, synthetic construct
  misc_feature 1..16: note = synthetic [barcode part1]
  source 1..16: mol_type = other DNA
gccgtagtctatctgc

SEQ ID NO: 40774 - DNA, 16 bp, synthetic construct
  misc_feature 1..16: note = synthetic [barcode part1]
  source 1..16: mol_type = other DNA
gacggcgtacttgaag

SEQ ID NO: 40775 - DNA, 16 bp, synthetic construct
  misc_feature 1..16: note = synthetic [barcode part1]
  source 1..16: mol_type = other DNA
tgcagagattgttgag

SEQ ID NO: 40776 - DNA, 16 bp, synthetic construct
  misc_feature 1..16: note = synthetic [barcode part1]
  source 1..16: mol_type = other DNA
attgataggtgacgac

SEQ ID NO: 40777 - DNA, 16 bp, synthetic construct
  misc_feature 1..16: note = synthetic [barcode part1]
  source 1..16: mol_type = other DNA
gtgaccgtgatatacc

SEQ ID NO: 40778 - DNA, 16 bp, synthetic construct
  misc_feature 1..16: note = synthetic [barcode part1]
  source 1..16: mol_type = other DNA
tccttagtgtacggtt

SEQ ID NO: 40779 - DNA, 16 bp, synthetic construct
  misc_feature 1..16: note = synthetic [barcode part1]
  source 1..16: mol_type = other DNA
taacacggattgtgcc

SEQ ID NO: 40780 - DNA, 16 bp, synthetic construct
  misc_feature 1..16: note = synthetic [barcode part1]
  source 1..16: mol_type = other DNA
tcggcggttacgttct

SEQ ID NO: 40781 - DNA, 16 bp, synthetic construct
  misc_feature 1..16: note = synthetic [barcode part1]
  source 1..16: mol_type = other DNA
cctattgttgacgtgt

SEQ ID NO: 40782 - DNA, 16 bp, synthetic construct
  misc_feature 1..16: note = synthetic [barcode part1]
  source 1..16: mol_type = other DNA
aagagtaggtgcagac

SEQ ID NO: 40783 - DNA, 16 bp, synthetic construct
  misc_feature 1..16: note = synthetic [barcode part1]
  source 1..16: mol_type = other DNA
cgtcactcttgacttc

SEQ ID NO: 40784 - DNA, 16 bp, synthetic construct
  misc_feature 1..16: note = synthetic [barcode part1]
  source 1..16: mol_type = other DNA
tcctggtgatcgtgtc

SEQ ID NO: 40785 - DNA, 16 bp, synthetic construct
  misc_feature 1..16: note = synthetic [barcode part1]
  source 1..16: mol_type = other DNA
caatccacaggaatag

SEQ ID NO: 40786 - DNA, 16 bp, synthetic construct
  misc_feature 1..16: note = synthetic [barcode part1]
  source 1..16: mol_type = other DNA
atactcctacgcctct

SEQ ID NO: 40787 - DNA, 16 bp, synthetic construct
  misc_feature 1..16: note = synthetic [barcode part1]
  source 1..16: mol_type = other DNA
cggtgattgcgttcct

SEQ ID NO: 40788 - DNA, 16 bp, synthetic construct
  misc_feature 1..16: note = synthetic [barcode part1]
  source 1..16: mol_type = other DNA
ccgttggtgcaagaag

SEQ ID NO: 40789 - DNA, 16 bp, synthetic construct
  misc_feature 1..16: note = synthetic [barcode part1]
  source 1..16: mol_type = other DNA
taacctgcagatcacg

SEQ ID NO: 40790 - DNA, 16 bp, synthetic construct
  misc_feature 1..16: note = synthetic [barcode part1]
  source 1..16: mol_type = other DNA
tcctgcgtacaagagt

SEQ ID NO: 40791 - DNA, 16 bp, synthetic construct
  misc_feature 1..16: note = synthetic [barcode part1]
  source 1..16: mol_type = other DNA
acacttcctctcacgt

SEQ ID NO: 40792 - DNA, 16 bp, synthetic construct
  misc_feature 1..16: note = synthetic [barcode part1]
  source 1..16: mol_type = other DNA
tcctgtacgtggaagt

SEQ ID NO: 40793 - DNA, 16 bp, synthetic construct
  misc_feature 1..16: note = synthetic [barcode part1]
  source 1..16: mol_type = other DNA
agtgaatacctcgaag

SEQ ID NO: 40794 - DNA, 16 bp, synthetic construct
  misc_feature 1..16: note = synthetic [barcode part1]
  source 1..16: mol_type = other DNA
cctagtaactcttacg

SEQ ID NO: 40795 - DNA, 16 bp, synthetic construct
  misc_feature 1..16: note = synthetic [barcode part1]
  source 1..16: mol_type = other DNA
tgtgtgtgttggtcag

SEQ ID NO: 40796 - DNA, 16 bp, synthetic construct
  misc_feature 1..16: note = synthetic [barcode part1]
  source 1..16: mol_type = other DNA
ttccgtcttgtaggcg

SEQ ID NO: 40797 - DNA, 16 bp, synthetic construct
  misc_feature 1..16: note = synthetic [barcode part1]
  source 1..16: mol_type = other DNA
ttgttaccagacactc

SEQ ID NO: 40798 - DNA, 16 bp, synthetic construct
  misc_feature 1..16: note = synthetic [barcode part1]
  source 1..16: mol_type = other DNA
gaaccgaattgtacag

SEQ ID NO: 40799 - DNA, 16 bp, synthetic construct
  misc_feature 1..16: note = synthetic [barcode part1]
  source 1..16: mol_type = other DNA
gccagtagtctctcgt

SEQ ID NO: 40800 - DNA, 16 bp, synthetic construct
  misc_feature 1..16: note = synthetic [barcode part1]
  source 1..16: mol_type = other DNA
taacacgtaacctctc

SEQ ID NO: 40801 - DNA, 16 bp, synthetic construct
  misc_feature 1..16: note = synthetic [barcode part1]
  source 1..16: mol_type = other DNA
gcacagtagaactagt

SEQ ID NO: 40802 - DNA, 16 bp, synthetic construct
  misc_feature 1..16: note = synthetic [barcode part1]
  source 1..16: mol_type = other DNA
ccgtggttaataccag

SEQ ID NO: 40803 - DNA, 16 bp, synthetic construct
  misc_feature 1..16: note = synthetic [barcode part1]
  source 1..16: mol_type = other DNA
gtacgagtaagttacg

SEQ ID NO: 40804 - DNA, 16 bp, synthetic construct
  misc_feature 1..16: note = synthetic [barcode part1]
  source 1..16: mol_type = other DNA
gaagtgccgacctaag

SEQ ID NO: 40805 - DNA, 16 bp, synthetic construct
  misc_feature 1..16: note = synthetic [barcode part1]
  source 1..16: mol_type = other DNA
cgcacgacgtcttatc

SEQ ID NO: 40806 - DNA, 16 bp, synthetic construct
  misc_feature 1..16: note = synthetic [barcode part1]
  source 1..16: mol_type = other DNA
tcggaccttgatagtg

SEQ ID NO: 40807 - DNA, 16 bp, synthetic construct
  misc_feature 1..16: note = synthetic [barcode part1]
  source 1..16: mol_type = other DNA
ccgcctcgtacttaag

SEQ ID NO: 40808 - DNA, 16 bp, synthetic construct
  misc_feature 1..16: note = synthetic [barcode part1]
  source 1..16: mol_type = other DNA
atcaggttgccaagtc

SEQ ID NO: 40809 - DNA, 16 bp, synthetic construct
  misc_feature 1..16: note = synthetic [barcode part1]
  source 1..16: mol_type = other DNA
cctggtgatccttacg

SEQ ID NO: 40810 - DNA, 16 bp, synthetic construct
  misc_feature 1..16: note = synthetic [barcode part1]
  source 1..16: mol_type = other DNA
cgtgaagtagtggtcg

SEQ ID NO: 40811 - DNA, 16 bp, synthetic construct
  misc_feature 1..16: note = synthetic [barcode part1]
  source 1..16: mol_type = other DNA
aatcggttagtgtcgc

SEQ ID NO: 40812 - DNA, 16 bp, synthetic construct
  misc_feature 1..16: note = synthetic [barcode part1]
  source 1..16: mol_type = other DNA
tctctctcggtgttac

SEQ ID NO: 40813 - DNA, 16 bp, synthetic construct
  misc_feature 1..16: note = synthetic [barcode part1]
  source 1..16: mol_type = other DNA
gacaccaactggttgt

SEQ ID NO: 40814 - DNA, 16 bp, synthetic construct
  misc_feature 1..16: note = synthetic [barcode part1]
  source 1..16: mol_type = other DNA
gtgacacactgtgact

SEQ ID NO: 40815 - DNA, 16 bp, synthetic construct
  misc_feature 1..16: note = synthetic [barcode part1]
  source 1..16: mol_type = other DNA
acagttactggtcctt

SEQ ID NO: 40816 - DNA, 16 bp, synthetic construct
  misc_feature 1..16: note = synthetic [barcode part1]
  source 1..16: mol_type = other DNA
gtatacctagaaggtg

SEQ ID NO: 40817 - DNA, 16 bp, synthetic construct
  misc_feature 1..16: note = synthetic [barcode part1]
  source 1..16: mol_type = other DNA
accaccttagatactc

SEQ ID NO: 40818 - DNA, 16 bp, synthetic construct
  misc_feature 1..16: note = synthetic [barcode part1]
  source 1..16: mol_type = other DNA
gtctgccttgtctact

SEQ ID NO: 40819 - DNA, 16 bp, synthetic construct
  misc_feature 1..16: note = synthetic [barcode part1]
  source 1..16: mol_type = other DNA
gtcgcactcctgttag

SEQ ID NO: 40820 - DNA, 16 bp, synthetic construct
  misc_feature 1..16: note = synthetic [barcode part1]
  source 1..16: mol_type = other DNA
tcagtggcgagttact

SEQ ID NO: 40821 - DNA, 16 bp, synthetic construct
  misc_feature 1..16: note = synthetic [barcode part1]
  source 1..16: mol_type = other DNA
tctaacgtatcggacg

SEQ ID NO: 40822 - DNA, 16 bp, synthetic construct
  misc_feature 1..16: note = synthetic [barcode part1]
  source 1..16: mol_type = other DNA
ataccagagagattgc

SEQ ID NO: 40823 - DNA, 16 bp, synthetic construct
  misc_feature 1..16: note = synthetic [barcode part1]
  source 1..16: mol_type = other DNA
gtaagtcgccgaagac

SEQ ID NO: 40824 - DNA, 16 bp, synthetic construct
  misc_feature 1..16: note = synthetic [barcode part1]
  source 1..16: mol_type = other DNA
ttcctggtaacgtatc

SEQ ID NO: 40825 - DNA, 16 bp, synthetic construct
  misc_feature 1..16: note = synthetic [barcode part1]
  source 1..16: mol_type = other DNA
tcgagacggattctgt

SEQ ID NO: 40826 - DNA, 16 bp, synthetic construct
  misc_feature 1..16: note = synthetic [barcode part1]
  source 1..16: mol_type = other DNA
agtagtcctccacacc

SEQ ID NO: 40827 - DNA, 16 bp, synthetic construct
  misc_feature 1..16: note = synthetic [barcode part1]
  source 1..16: mol_type = other DNA
cctactgtatagatcc

SEQ ID NO: 40828 - DNA, 16 bp, synthetic construct
  misc_feature 1..16: note = synthetic [barcode part1]
  source 1..16: mol_type = other DNA
gagtcaggactagaag

SEQ ID NO: 40829 - DNA, 16 bp, synthetic construct
  misc_feature 1..16: note = synthetic [barcode part1]
  source 1..16: mol_type = other DNA
ttgttgttgcctgaac

SEQ ID NO: 40830 - DNA, 16 bp, synthetic construct
  misc_feature 1..16: note = synthetic [barcode part1]
  source 1..16: mol_type = other DNA
aggcggcgtacttaag

SEQ ID NO: 40831 - DNA, 16 bp, synthetic construct
  misc_feature 1..16: note = synthetic [barcode part1]
  source 1..16: mol_type = other DNA
ttccgacgagataacc

SEQ ID NO: 40832 - DNA, 16 bp, synthetic construct
  misc_feature 1..16: note = synthetic [barcode part1]
  source 1..16: mol_type = other DNA
tgagtcaagtcactgc

SEQ ID NO: 40833 - DNA, 16 bp, synthetic construct
  misc_feature 1..16: note = synthetic [barcode part1]
  source 1..16: mol_type = other DNA
gtaagaacctcacacc

SEQ ID NO: 40834 - DNA, 16 bp, synthetic construct
  misc_feature 1..16: note = synthetic [barcode part1]
  source 1..16: mol_type = other DNA
tagaggaaccggcact

SEQ ID NO: 40835 - DNA, 16 bp, synthetic construct
  misc_feature 1..16: note = synthetic [barcode part1]
  source 1..16: mol_type = other DNA
gtaactactctccagt

SEQ ID NO: 40836 - DNA, 16 bp, synthetic construct
  misc_feature 1..16: note = synthetic [barcode part1]
  source 1..16: mol_type = other DNA
acgcctcgactcaact

SEQ ID NO: 40837 - DNA, 16 bp, synthetic construct
  misc_feature 1..16: note = synthetic [barcode part1]
  source 1..16: mol_type = other DNA
cgactattccgactcg

SEQ ID NO: 40838 - DNA, 16 bp, synthetic construct
  misc_feature 1..16: note = synthetic [barcode part1]
  source 1..16: mol_type = other DNA
taccttggtaagtcct

SEQ ID NO: 40839 - DNA, 16 bp, synthetic construct
  misc_feature 1..16: note = synthetic [barcode part1]
  source 1..16: mol_type = other DNA
taccgttacctcctgt

SEQ ID NO: 40840 - DNA, 16 bp, synthetic construct
  misc_feature 1..16: note = synthetic [barcode part1]
  source 1..16: mol_type = other DNA
cggaaggtctcaatct

SEQ ID NO: 40841 - DNA, 16 bp, synthetic construct
  misc_feature 1..16: note = synthetic [barcode part1]
  source 1..16: mol_type = other DNA
gtctctcagagttgag

SEQ ID NO: 40842 - DNA, 16 bp, synthetic construct
  misc_feature 1..16: note = synthetic [barcode part1]
  source 1..16: mol_type = other DNA
cggcgacctaacaatt

SEQ ID NO: 40843 - DNA, 16 bp, synthetic construct
  misc_feature 1..16: note = synthetic [barcode part1]
  source 1..16: mol_type = other DNA
ccgtcacacaataggt

SEQ ID NO: 40844 - DNA, 16 bp, synthetic construct
  misc_feature 1..16: note = synthetic [barcode part1]
  source 1..16: mol_type = other DNA
atctgacactgtcgag

SEQ ID NO: 40845 - DNA, 16 bp, synthetic construct
  misc_feature 1..16: note = synthetic [barcode part1]
  source 1..16: mol_type = other DNA
attgaccgtcgtagtg

SEQ ID NO: 40846 - DNA, 16 bp, synthetic construct
  misc_feature 1..16: note = synthetic [barcode part1]
  source 1..16: mol_type = other DNA
cgaattgcgcacttcc

SEQ ID NO: 40847 - DNA, 16 bp, synthetic construct
  misc_feature 1..16: note = synthetic [barcode part1]
  source 1..16: mol_type = other DNA
cggttcttcttctgac

SEQ ID NO: 40848 - DNA, 16 bp, synthetic construct
  misc_feature 1..16: note = synthetic [barcode part1]
  source 1..16: mol_type = other DNA
gaggcagtcgtggatt

SEQ ID NO: 40849 - DNA, 16 bp, synthetic construct
  misc_feature 1..16: note = synthetic [barcode part1]
  source 1..16: mol_type = other DNA
actgtacggagtggtg

SEQ ID NO: 40850 - DNA, 16 bp, synthetic construct
  misc_feature 1..16: note = synthetic [barcode part1]
  source 1..16: mol_type = other DNA
gtccttgagattactc

SEQ ID NO: 40851 - DNA, 16 bp, synthetic construct
  misc_feature 1..16: note = synthetic [barcode part1]
  source 1..16: mol_type = other DNA
ttgtacggaggagtcg

SEQ ID NO: 40852 - DNA, 16 bp, synthetic construct
  misc_feature 1..16: note = synthetic [barcode part1]
  source 1..16: mol_type = other DNA
attctctctctccgag

SEQ ID NO: 40853 - DNA, 16 bp, synthetic construct
  misc_feature 1..16: note = synthetic [barcode part1]
  source 1..16: mol_type = other DNA
gattcggcgtgtcctt

SEQ ID NO: 40854 - DNA, 16 bp, synthetic construct
  misc_feature 1..16: note = synthetic [barcode part1]
  source 1..16: mol_type = other DNA
aggttaagttggcgcg

SEQ ID NO: 40855 - DNA, 16 bp, synthetic construct
  misc_feature 1..16: note = synthetic [barcode part1]
  source 1..16: mol_type = other DNA
tgaagtaaggcgcctg

SEQ ID NO: 40856 - DNA, 16 bp, synthetic construct
  misc_feature 1..16: note = synthetic [barcode part1]
  source 1..16: mol_type = other DNA
gaactgttcgtacttc

SEQ ID NO: 40857 - DNA, 16 bp, synthetic construct
  misc_feature 1..16: note = synthetic [barcode part1]
  source 1..16: mol_type = other DNA
tgtatcgatcgacgtg

SEQ ID NO: 40858 - DNA, 16 bp, synthetic construct
  misc_feature 1..16: note = synthetic [barcode part1]
  source 1..16: mol_type = other DNA
taccaacgtcagtacg

SEQ ID NO: 40859 - DNA, 16 bp, synthetic construct
  misc_feature 1..16: note = synthetic [barcode part1]
  source 1..16: mol_type = other DNA
aacggaactctaccgt

SEQ ID NO: 40860 - DNA, 16 bp, synthetic construct
  misc_feature 1..16: note = synthetic [barcode part1]
  source 1..16: mol_type = other DNA
tggacttgtcctgtcg

SEQ ID NO: 40861 - DNA, 16 bp, synthetic construct
  misc_feature 1..16: note = synthetic [barcode part1]
  source 1..16: mol_type = other DNA
ttgccgcctacggatt

SEQ ID NO: 40862 - DNA, 16 bp, synthetic construct
  misc_feature 1..16: note = synthetic [barcode part1]
  source 1..16: mol_type = other DNA
acactgagaggcagtc

SEQ ID NO: 40863 - DNA, 16 bp, synthetic construct
  misc_feature 1..16: note = synthetic [barcode part1]
  source 1..16: mol_type = other DNA
gcaattggaagtcggc

SEQ ID NO: 40864 - DNA, 16 bp, synthetic construct
  misc_feature 1..16: note = synthetic [barcode part1]
  source 1..16: mol_type = other DNA
gactacaattgcgtgc

SEQ ID NO: 40865 - DNA, 16 bp, synthetic construct
  misc_feature 1..16: note = synthetic [barcode part1]
  source 1..16: mol_type = other DNA
aacaagacgcgaattc

SEQ ID NO: 40866 - DNA, 16 bp, synthetic construct
  misc_feature 1..16: note = synthetic [barcode part1]
  source 1..16: mol_type = other DNA
cagaattcgcgacact

SEQ ID NO: 40867 - DNA, 16 bp, synthetic construct
  misc_feature 1..16: note = synthetic [barcode part1]
  source 1..16: mol_type = other DNA
tcttgacgtacggcct

SEQ ID NO: 40868 - DNA, 16 bp, synthetic construct
  misc_feature 1..16: note = synthetic [barcode part1]
  source 1..16: mol_type = other DNA
atactccgtacggagt

SEQ ID NO: 40869 - DNA, 16 bp, synthetic construct
  misc_feature 1..16: note = synthetic [barcode part1]
  source 1..16: mol_type = other DNA
atcgtctggacctatt

SEQ ID NO: 40870 - DNA, 16 bp, synthetic construct
  misc_feature 1..16: note = synthetic [barcode part1]
  source 1..16: mol_type = other DNA
taacgcgcctccagtt

SEQ ID NO: 40871 - DNA, 16 bp, synthetic construct
  misc_feature 1..16: note = synthetic [barcode part1]
  source 1..16: mol_type = other DNA
tacacgtccaactgag

SEQ ID NO: 40872 - DNA, 16 bp, synthetic construct
  misc_feature 1..16: note = synthetic [barcode part1]
  source 1..16: mol_type = other DNA
taggtcgatcaccagt

SEQ ID NO: 40873 - DNA, 16 bp, synthetic construct
  misc_feature 1..16: note = synthetic [barcode part1]
  source 1..16: mol_type = other DNA
cctgtatccgagtcgt

SEQ ID NO: 40874 - DNA, 16 bp, synthetic construct
  misc_feature 1..16: note = synthetic [barcode part1]
  source 1..16: mol_type = other DNA
tctctcgccgtacaag

SEQ ID NO: 40875 - DNA, 16 bp, synthetic construct
  misc_feature 1..16: note = synthetic [barcode part1]
  source 1..16: mol_type = other DNA
gagagacgcaactacc

SEQ ID NO: 40876 - DNA, 16 bp, synthetic construct
  misc_feature 1..16: note = synthetic [barcode part1]
  source 1..16: mol_type = other DNA
gaaggtaggatcgcct

SEQ ID NO: 40877 - DNA, 16 bp, synthetic construct
  misc_feature 1..16: note = synthetic [barcode part1]
  source 1..16: mol_type = other DNA
gcaattgtagtcgcac

SEQ ID NO: 40878 - DNA, 16 bp, synthetic construct
  misc_feature 1..16: note = synthetic [barcode part1]
  source 1..16: mol_type = other DNA
caatcttactgtgtgc

SEQ ID NO: 40879 - DNA, 16 bp, synthetic construct
  misc_feature 1..16: note = synthetic [barcode part1]
  source 1..16: mol_type = other DNA
acggtgattgttaccg

SEQ ID NO: 40880 - DNA, 16 bp, synthetic construct
  misc_feature 1..16: note = synthetic [barcode part1]
  source 1..16: mol_type = other DNA
cactgtagaagaggag

SEQ ID NO: 40881 - DNA, 16 bp, synthetic construct
  misc_feature 1..16: note = synthetic [barcode part1]
  source 1..16: mol_type = other DNA
agttatagaggccggc

SEQ ID NO: 40882 - DNA, 16 bp, synthetic construct
  misc_feature 1..16: note = synthetic [barcode part1]
  source 1..16: mol_type = other DNA
tcagaggcagtaagag

SEQ ID NO: 40883 - DNA, 16 bp, synthetic construct
  misc_feature 1..16: note = synthetic [barcode part1]
  source 1..16: mol_type = other DNA
tacacgttacgcgtag

SEQ ID NO: 40884 - DNA, 16 bp, synthetic construct
  misc_feature 1..16: note = synthetic [barcode part1]
  source 1..16: mol_type = other DNA
tcggtaaggcacgaac

SEQ ID NO: 40885 - DNA, 16 bp, synthetic construct
  misc_feature 1..16: note = synthetic [barcode part1]
  source 1..16: mol_type = other DNA
taactatcagaaggcg

SEQ ID NO: 40886 - DNA, 16 bp, synthetic construct
  misc_feature 1..16: note = synthetic [barcode part1]
  source 1..16: mol_type = other DNA
atatcaggtgtggcct

SEQ ID NO: 40887 - DNA, 16 bp, synthetic construct
  misc_feature 1..16: note = synthetic [barcode part1]
  source 1..16: mol_type = other DNA
acagaccagagaccgt

SEQ ID NO: 40888 - DNA, 16 bp, synthetic construct
  misc_feature 1..16: note = synthetic [barcode part1]
  source 1..16: mol_type = other DNA
tctacttccacaacag

SEQ ID NO: 40889 - DNA, 16 bp, synthetic construct
  misc_feature 1..16: note = synthetic [barcode part1]
  source 1..16: mol_type = other DNA
gccttcttgtgcagtg

SEQ ID NO: 40890 - DNA, 16 bp, synthetic construct
  misc_feature 1..16: note = synthetic [barcode part1]
  source 1..16: mol_type = other DNA
aagaatcaccgtgtag

SEQ ID NO: 40891 - DNA, 16 bp, synthetic construct
  misc_feature 1..16: note = synthetic [barcode part1]
  source 1..16: mol_type = other DNA
tggaatccgacgttac

SEQ ID NO: 40892 - DNA, 16 bp, synthetic construct
  misc_feature 1..16: note = synthetic [barcode part1]
  source 1..16: mol_type = other DNA
caggacaataactgtg

SEQ ID NO: 40893 - DNA, 16 bp, synthetic construct
  misc_feature 1..16: note = synthetic [barcode part1]
  source 1..16: mol_type = other DNA
acaagaaggagacacc

SEQ ID NO: 40894 - DNA, 16 bp, synthetic construct
  misc_feature 1..16: note = synthetic [barcode part1]
  source 1..16: mol_type = other DNA
tatctacgacgagtgc

SEQ ID NO: 40895 - DNA, 16 bp, synthetic construct
  misc_feature 1..16: note = synthetic [barcode part1]
  source 1..16: mol_type = other DNA
tcgtatctgccgaatt

SEQ ID NO: 40896 - DNA, 16 bp, synthetic construct
  misc_feature 1..16: note = synthetic [barcode part1]
  source 1..16: mol_type = other DNA
acaactcactcctgcg

SEQ ID NO: 40897 - DNA, 16 bp, synthetic construct
  misc_feature 1..16: note = synthetic [barcode part1]
  source 1..16: mol_type = other DNA
tacgtgtcagtgtcag

SEQ ID NO: 40898 - DNA, 16 bp, synthetic construct
  misc_feature 1..16: note = synthetic [barcode part1]
  source 1..16: mol_type = other DNA
gtctaagtcgtagacc

SEQ ID NO: 40899 - DNA, 16 bp, synthetic construct
  misc_feature 1..16: note = synthetic [barcode part1]
  source 1..16: mol_type = other DNA
cctcgtaacgtagaac

SEQ ID NO: 40900 - DNA, 16 bp, synthetic construct
  misc_feature 1..16: note = synthetic [barcode part1]
  source 1..16: mol_type = other DNA
tctaccggcgtctaac

SEQ ID NO: 40901 - DNA, 16 bp, synthetic construct
  misc_feature 1..16: note = synthetic [barcode part1]
  source 1..16: mol_type = other DNA
caggaccactaatcac

SEQ ID NO: 40902 - DNA, 16 bp, synthetic construct
  misc_feature 1..16: note = synthetic [barcode part1]
  source 1..16: mol_type = other DNA
gaacgcctgtcacttc

SEQ ID NO: 40903 - DNA, 16 bp, synthetic construct
  misc_feature 1..16: note = synthetic [barcode part1]
  source 1..16: mol_type = other DNA
gatacgtcctcttggc

SEQ ID NO: 40904 - DNA, 16 bp, synthetic construct
  misc_feature 1..16: note = synthetic [barcode part1]
  source 1..16: mol_type = other DNA
tgcacagacgaggtgt

SEQ ID NO: 40905 - DNA, 16 bp, synthetic construct
  misc_feature 1..16: note = synthetic [barcode part1]
  source 1..16: mol_type = other DNA
tagtcagagtcttggc

SEQ ID NO: 40906 - DNA, 16 bp, synthetic construct
  misc_feature 1..16: note = synthetic [barcode part1]
  source 1..16: mol_type = other DNA
cgaacgcagagtaacc

SEQ ID NO: 40907 - DNA, 16 bp, synthetic construct
  misc_feature 1..16: note = synthetic [barcode part1]
  source 1..16: mol_type = other DNA
cgagtagtctatccag

SEQ ID NO: 40908 - DNA, 16 bp, synthetic construct
  misc_feature 1..16: note = synthetic [barcode part1]
  source 1..16: mol_type = other DNA
atacgtggtcgatcac

SEQ ID NO: 40909 - DNA, 16 bp, synthetic construct
  misc_feature 1..16: note = synthetic [barcode part1]
  source 1..16: mol_type = other DNA
agtgtctatccttcag

SEQ ID NO: 40910 - DNA, 16 bp, synthetic construct
  misc_feature 1..16: note = synthetic [barcode part1]
  source 1..16: mol_type = other DNA
aatccgtcagacgttg

SEQ ID NO: 40911 - DNA, 16 bp, synthetic construct
  misc_feature 1..16: note = synthetic [barcode part1]
  source 1..16: mol_type = other DNA
aaccgcgagaaccaac

SEQ ID NO: 40912 - DNA, 16 bp, synthetic construct
  misc_feature 1..16: note = synthetic [barcode part1]
  source 1..16: mol_type = other DNA
cagatcttccggatag

SEQ ID NO: 40913 - DNA, 16 bp, synthetic construct
  misc_feature 1..16: note = synthetic [barcode part1]
  source 1..16: mol_type = other DNA
tataacactactcgcc

SEQ ID NO: 40914 - DNA, 16 bp, synthetic construct
  misc_feature 1..16: note = synthetic [barcode part1]
  source 1..16: mol_type = other DNA
gacctcttgcgaactc

SEQ ID NO: 40915 - DNA, 16 bp, synthetic construct
  misc_feature 1..16: note = synthetic [barcode part1]
  source 1..16: mol_type = other DNA
caacaggcgttacttg

SEQ ID NO: 40916 - DNA, 16 bp, synthetic construct
  misc_feature 1..16: note = synthetic [barcode part1]
  source 1..16: mol_type = other DNA
agataggatctcgagt

SEQ ID NO: 40917 - DNA, 16 bp, synthetic construct
  misc_feature 1..16: note = synthetic [barcode part1]
  source 1..16: mol_type = other DNA
gcgaagatcgaactgc

SEQ ID NO: 40918 - DNA, 16 bp, synthetic construct
  misc_feature 1..16: note = synthetic [barcode part1]
  source 1..16: mol_type = other DNA
actcgcgtgacagaag

SEQ ID NO: 40919 - DNA, 16 bp, synthetic construct
  misc_feature 1..16: note = synthetic [barcode part1]
  source 1..16: mol_type = other DNA
agtactgtgcagtacc

SEQ ID NO: 40920 - DNA, 16 bp, synthetic construct
  misc_feature 1..16: note = synthetic [barcode part1]
  source 1..16: mol_type = other DNA
cgattcacctgacaag

SEQ ID NO: 40921 - DNA, 16 bp, synthetic construct
  misc_feature 1..16: note = synthetic [barcode part1]
  source 1..16: mol_type = other DNA
gagttattgtctccgt

SEQ ID NO: 40922 - DNA, 16 bp, synthetic construct
  misc_feature 1..16: note = synthetic [barcode part1]
  source 1..16: mol_type = other DNA
ccagattaactcggtg

SEQ ID NO: 40923 - DNA, 16 bp, synthetic construct
  misc_feature 1..16: note = synthetic [barcode part1]
  source 1..16: mol_type = other DNA
cgtaatctggccttcg

SEQ ID NO: 40924 - DNA, 16 bp, synthetic construct
  misc_feature 1..16: note = synthetic [barcode part1]
  source 1..16: mol_type = other DNA
agaatccggtgaatac

SEQ ID NO: 40925 - DNA, 16 bp, synthetic construct
  misc_feature 1..16: note = synthetic [barcode part1]
  source 1..16: mol_type = other DNA
cagaaggttagaaggc

SEQ ID NO: 40926 - DNA, 16 bp, synthetic construct
  misc_feature 1..16: note = synthetic [barcode part1]
  source 1..16: mol_type = other DNA
agtctgaagtctgacc

SEQ ID NO: 40927 - DNA, 16 bp, synthetic construct
  misc_feature 1..16: note = synthetic [barcode part1]
  source 1..16: mol_type = other DNA
cctaattcctcctgac

SEQ ID NO: 40928 - DNA, 16 bp, synthetic construct
  misc_feature 1..16: note = synthetic [barcode part1]
  source 1..16: mol_type = other DNA
acactgaagaacagtc

SEQ ID NO: 40929 - DNA, 16 bp, synthetic construct
  misc_feature 1..16: note = synthetic [barcode part1]
  source 1..16: mol_type = other DNA
gaccttcgacctacac

SEQ ID NO: 40930 - DNA, 16 bp, synthetic construct
  misc_feature 1..16: note = synthetic [barcode part1]
  source 1..16: mol_type = other DNA
tgattccaggaccagt

SEQ ID NO: 40931 - DNA, 16 bp, synthetic construct
  misc_feature 1..16: note = synthetic [barcode part1]
  source 1..16: mol_type = other DNA
ccacgactacaatacg

SEQ ID NO: 40932 - DNA, 16 bp, synthetic construct
  misc_feature 1..16: note = synthetic [barcode part1]
  source 1..16: mol_type = other DNA
acagtgtccaatcgac

SEQ ID NO: 40933 - DNA, 16 bp, synthetic construct
  misc_feature 1..16: note = synthetic [barcode part1]
  source 1..16: mol_type = other DNA
tcgacagtggatcact

SEQ ID NO: 40934 - DNA, 16 bp, synthetic construct
  misc_feature 1..16: note = synthetic [barcode part1]
  source 1..16: mol_type = other DNA
accaacggagttaagt

SEQ ID NO: 40935 - DNA, 16 bp, synthetic construct
  misc_feature 1..16: note = synthetic [barcode part1]
  source 1..16: mol_type = other DNA
tagatacaccgagagt

SEQ ID NO: 40936 - DNA, 16 bp, synthetic construct
  misc_feature 1..16: note = synthetic [barcode part1]
  source 1..16: mol_type = other DNA
tctatctacgacgccg

SEQ ID NO: 40937 - DNA, 16 bp, synthetic construct
  misc_feature 1..16: note = synthetic [barcode part1]
  source 1..16: mol_type = other DNA
gtaggtgttatccgtg

SEQ ID NO: 40938 - DNA, 16 bp, synthetic construct
  misc_feature 1..16: note = synthetic [barcode part1]
  source 1..16: mol_type = other DNA
atcgcgatagataggt

SEQ ID NO: 40939 - DNA, 16 bp, synthetic construct
  misc_feature 1..16: note = synthetic [barcode part1]
  source 1..16: mol_type = other DNA
taataggcagacgccg

SEQ ID NO: 40940 - DNA, 16 bp, synthetic construct
  misc_feature 1..16: note = synthetic [barcode part1]
  source 1..16: mol_type = other DNA
cgtggtatacttgtct

SEQ ID NO: 40941 - DNA, 16 bp, synthetic construct
  misc_feature 1..16: note = synthetic [barcode part1]
  source 1..16: mol_type = other DNA
ttaggcggcggtaagt

SEQ ID NO: 40942 - DNA, 16 bp, synthetic construct
  misc_feature 1..16: note = synthetic [barcode part1]
  source 1..16: mol_type = other DNA
taagaaggaccggaac

SEQ ID NO: 40943 - DNA, 16 bp, synthetic construct
  misc_feature 1..16: note = synthetic [barcode part1]
  source 1..16: mol_type = other DNA
tcggtgaagactacct

SEQ ID NO: 40944 - DNA, 16 bp, synthetic construct
  misc_feature 1..16: note = synthetic [barcode part1]
  source 1..16: mol_type = other DNA
gattcaggaggcgtac

SEQ ID NO: 40945 - DNA, 16 bp, synthetic construct
  misc_feature 1..16: note = synthetic [barcode part1]
  source 1..16: mol_type = other DNA
acaggttacacttggc

SEQ ID NO: 40946 - DNA, 16 bp, synthetic construct
  misc_feature 1..16: note = synthetic [barcode part1]
  source 1..16: mol_type = other DNA
tccgtgtggcctaatc

SEQ ID NO: 40947 - DNA, 16 bp, synthetic construct
  misc_feature 1..16: note = synthetic [barcode part1]
  source 1..16: mol_type = other DNA
cggtgtcttatccgtg

SEQ ID NO: 40948 - DNA, 16 bp, synthetic construct
  misc_feature 1..16: note = synthetic [barcode part1]
  source 1..16: mol_type = other DNA
tggtcctgcactgatc

SEQ ID NO: 40949 - DNA, 16 bp, synthetic construct
  misc_feature 1..16: note = synthetic [barcode part1]
  source 1..16: mol_type = other DNA
acagattgagagtcgt

SEQ ID NO: 40950 - DNA, 16 bp, synthetic construct
  misc_feature 1..16: note = synthetic [barcode part1]
  source 1..16: mol_type = other DNA
tgtgatctcaggtgtg

SEQ ID NO: 40951 - DNA, 16 bp, synthetic construct
  misc_feature 1..16: note = synthetic [barcode part1]
  source 1..16: mol_type = other DNA
tacctgcggattctgc

SEQ ID NO: 40952 - DNA, 16 bp, synthetic construct
  misc_feature 1..16: note = synthetic [barcode part1]
  source 1..16: mol_type = other DNA
cgacaattctcgtatc

SEQ ID NO: 40953 - DNA, 16 bp, synthetic construct
  misc_feature 1..16: note = synthetic [barcode part1]
  source 1..16: mol_type = other DNA
taaggaactctctggc

SEQ ID NO: 40954 - DNA, 16 bp, synthetic construct
  misc_feature 1..16: note = synthetic [barcode part1]
  source 1..16: mol_type = other DNA
cgcgttggttgtatag

SEQ ID NO: 40955 - DNA, 16 bp, synthetic construct
  misc_feature 1..16: note = synthetic [barcode part1]
  source 1..16: mol_type = other DNA
actcagtgaggtatag

SEQ ID NO: 40956 - DNA, 16 bp, synthetic construct
  misc_feature 1..16: note = synthetic [barcode part1]
  source 1..16: mol_type = other DNA
taaggtatatcggcag

SEQ ID NO: 40957 - DNA, 16 bp, synthetic construct
  misc_feature 1..16: note = synthetic [barcode part1]
  source 1..16: mol_type = other DNA
actcacactagacgtg

SEQ ID NO: 40958 - DNA, 16 bp, synthetic construct
  misc_feature 1..16: note = synthetic [barcode part1]
  source 1..16: mol_type = other DNA
aacggtccttctgcgt

SEQ ID NO: 40959 - DNA, 16 bp, synthetic construct
  misc_feature 1..16: note = synthetic [barcode part1]
  source 1..16: mol_type = other DNA
tctgttgcgcgttggt

SEQ ID NO: 40960 - DNA, 16 bp, synthetic construct
  misc_feature 1..16: note = synthetic [barcode part1]
  source 1..16: mol_type = other DNA
gaggactgtgtgtcag

SEQ ID NO: 40961 - DNA, 16 bp, synthetic construct
  misc_feature 1..16: note = synthetic [barcode part1]
  source 1..16: mol_type = other DNA
cgtgtcgaatctctcg

SEQ ID NO: 40962 - DNA, 16 bp, synthetic construct
  misc_feature 1..16: note = synthetic [barcode part1]
  source 1..16: mol_type = other DNA
taacgcagtgcctaac

SEQ ID NO: 40963 - DNA, 16 bp, synthetic construct
  misc_feature 1..16: note = synthetic [barcode part1]
  source 1..16: mol_type = other DNA
taagtaggtccacctg

SEQ ID NO: 40964 - DNA, 16 bp, synthetic construct
  misc_feature 1..16: note = synthetic [barcode part1]
  source 1..16: mol_type = other DNA
acgtcggactaaggac

SEQ ID NO: 40965 - DNA, 16 bp, synthetic construct
  misc_feature 1..16: note = synthetic [barcode part1]
  source 1..16: mol_type = other DNA
cagaggataacgtatc

SEQ ID NO: 40966 - DNA, 16 bp, synthetic construct
  misc_feature 1..16: note = synthetic [barcode part1]
  source 1..16: mol_type = other DNA
agtcggaatagtcgcg

SEQ ID NO: 40967 - DNA, 16 bp, synthetic construct
  misc_feature 1..16: note = synthetic [barcode part1]
  source 1..16: mol_type = other DNA
cgacgacactattgac

SEQ ID NO: 40968 - DNA, 16 bp, synthetic construct
  misc_feature 1..16: note = synthetic [barcode part1]
  source 1..16: mol_type = other DNA
gagacttagtgttgcc

SEQ ID NO: 40969 - DNA, 16 bp, synthetic construct
  misc_feature 1..16: note = synthetic [barcode part1]
  source 1..16: mol_type = other DNA
atcgatcgactagtcg

SEQ ID NO: 40970 - DNA, 16 bp, synthetic construct
  misc_feature 1..16: note = synthetic [barcode part1]
  source 1..16: mol_type = other DNA
cgtcactctactgttc

SEQ ID NO: 40971 - DNA, 16 bp, synthetic construct
  misc_feature 1..16: note = synthetic [barcode part1]
  source 1..16: mol_type = other DNA
gatcgattgcagtacc

SEQ ID NO: 40972 - DNA, 16 bp, synthetic construct
  misc_feature 1..16: note = synthetic [barcode part1]
  source 1..16: mol_type = other DNA
attcgacggtctagtg

SEQ ID NO: 40973 - DNA, 16 bp, synthetic construct
  misc_feature 1..16: note = synthetic [barcode part1]
  source 1..16: mol_type = other DNA
acgaaggaggagtatc

SEQ ID NO: 40974 - DNA, 16 bp, synthetic construct
  misc_feature 1..16: note = synthetic [barcode part1]
  source 1..16: mol_type = other DNA
gttgcggaatagatac

SEQ ID NO: 40975 - DNA, 16 bp, synthetic construct
  misc_feature 1..16: note = synthetic [barcode part1]
  source 1..16: mol_type = other DNA
cacttagactagagag

SEQ ID NO: 40976 - DNA, 16 bp, synthetic construct
  misc_feature 1..16: note = synthetic [barcode part1]
  source 1..16: mol_type = other DNA
accacggtaagtaggc

SEQ ID NO: 40977 - DNA, 16 bp, synthetic construct
  misc_feature 1..16: note = synthetic [barcode part1]
  source 1..16: mol_type = other DNA
gattctctctccgact

SEQ ID NO: 40978 - DNA, 16 bp, synthetic construct
  misc_feature 1..16: note = synthetic [barcode part1]
  source 1..16: mol_type = other DNA
tcttacagtgcggaac

SEQ ID NO: 40979 - DNA, 16 bp, synthetic construct
  misc_feature 1..16: note = synthetic [barcode part1]
  source 1..16: mol_type = other DNA
tcaacgacaccgaatc

SEQ ID NO: 40980 - DNA, 16 bp, synthetic construct
  misc_feature 1..16: note = synthetic [barcode part1]
  source 1..16: mol_type = other DNA
ataccacctcgtccag

SEQ ID NO: 40981 - DNA, 16 bp, synthetic construct
  misc_feature 1..16: note = synthetic [barcode part1]
  source 1..16: mol_type = other DNA
aaggtctaacaccgtc

SEQ ID NO: 40982 - DNA, 16 bp, synthetic construct
  misc_feature 1..16: note = synthetic [barcode part1]
  source 1..16: mol_type = other DNA
cactagttgcggttag

SEQ ID NO: 40983 - DNA, 16 bp, synthetic construct
  misc_feature 1..16: note = synthetic [barcode part1]
  source 1..16: mol_type = other DNA
gattgaagttcgaacg

SEQ ID NO: 40984 - DNA, 16 bp, synthetic construct
  misc_feature 1..16: note = synthetic [barcode part1]
  source 1..16: mol_type = other DNA
gtggagagaaggtatc

SEQ ID NO: 40985 - DNA, 16 bp, synthetic construct
  misc_feature 1..16: note = synthetic [barcode part1]
  source 1..16: mol_type = other DNA
ttcggattatcggcag

SEQ ID NO: 40986 - DNA, 16 bp, synthetic construct
  misc_feature 1..16: note = synthetic [barcode part1]
  source 1..16: mol_type = other DNA
cgtctggttgatacag

SEQ ID NO: 40987 - DNA, 16 bp, synthetic construct
  misc_feature 1..16: note = synthetic [barcode part1]
  source 1..16: mol_type = other DNA
tactggtcgatcgtag

SEQ ID NO: 40988 - DNA, 16 bp, synthetic construct
  misc_feature 1..16: note = synthetic [barcode part1]
  source 1..16: mol_type = other DNA
acctactgtagtgtct

SEQ ID NO: 40989 - DNA, 16 bp, synthetic construct
  misc_feature 1..16: note = synthetic [barcode part1]
  source 1..16: mol_type = other DNA
aaggcggcagacactt

SEQ ID NO: 40990 - DNA, 16 bp, synthetic construct
  misc_feature 1..16: note = synthetic [barcode part1]
  source 1..16: mol_type = other DNA
tccacaactgtgaacg

SEQ ID NO: 40991 - DNA, 16 bp, synthetic construct
  misc_feature 1..16: note = synthetic [barcode part1]
  source 1..16: mol_type = other DNA
atacgacgcaccaatc

SEQ ID NO: 40992 - DNA, 16 bp, synthetic construct
  misc_feature 1..16: note = synthetic [barcode part1]
  source 1..16: mol_type = other DNA
agtaggaatactcggt

SEQ ID NO: 40993 - DNA, 16 bp, synthetic construct
  misc_feature 1..16: note = synthetic [barcode part1]
  source 1..16: mol_type = other DNA
agacttctcggagttg

SEQ ID NO: 40994 - DNA, 16 bp, synthetic construct
  misc_feature 1..16: note = synthetic [barcode part1]
  source 1..16: mol_type = other DNA
gttcctgttacgttcc

SEQ ID NO: 40995 - DNA, 16 bp, synthetic construct
  misc_feature 1..16: note = synthetic [barcode part1]
  source 1..16: mol_type = other DNA
gccacggtaagattct

SEQ ID NO: 40996 - DNA, 16 bp, synthetic construct
  misc_feature 1..16: note = synthetic [barcode part1]
  source 1..16: mol_type = other DNA
acttactggcgtcacc

SEQ ID NO: 40997 - DNA, 16 bp, synthetic construct
  misc_feature 1..16: note = synthetic [barcode part1]
  source 1..16: mol_type = other DNA
ccagttatacagtgcg

SEQ ID NO: 40998 - DNA, 16 bp, synthetic construct
  misc_feature 1..16: note = synthetic [barcode part1]
  source 1..16: mol_type = other DNA
tggtgtacacgttgac

SEQ ID NO: 40999 - DNA, 16 bp, synthetic construct
  misc_feature 1..16: note = synthetic [barcode part1]
  source 1..16: mol_type = other DNA
cactccacggatactc

SEQ ID NO: 41000 - DNA, 16 bp, synthetic construct
  misc_feature 1..16: note = synthetic [barcode part1]
  source 1..16: mol_type = other DNA
ccacttcgaagtaacg

SEQ ID NO: 41001 - DNA, 16 bp, synthetic construct
  misc_feature 1..16: note = synthetic [barcode part1]
  source 1..16: mol_type = other DNA
cacgatattatccgtc

SEQ ID NO: 41002 - DNA, 16 bp, synthetic construct
  misc_feature 1..16: note = synthetic [barcode part1]
  source 1..16: mol_type = other DNA
cagttctgtactgact

SEQ ID NO: 41003 - DNA, 16 bp, synthetic construct
  misc_feature 1..16: note = synthetic [barcode part1]
  source 1..16: mol_type = other DNA
agacaccgtgaatcct

SEQ ID NO: 41004 - DNA, 16 bp, synthetic construct
  misc_feature 1..16: note = synthetic [barcode part1]
  source 1..16: mol_type = other DNA
cgacgtcgtaggtaag

SEQ ID NO: 41005 - DNA, 16 bp, synthetic construct
  misc_feature 1..16: note = synthetic [barcode part1]
  source 1..16: mol_type = other DNA
aagttcggttcggatc

SEQ ID NO: 41006 - DNA, 16 bp, synthetic construct
  misc_feature 1..16: note = synthetic [barcode part1]
  source 1..16: mol_type = other DNA
cagtgtagaaggccac

SEQ ID NO: 41007 - DNA, 16 bp, synthetic construct
  misc_feature 1..16: note = synthetic [barcode part1]
  source 1..16: mol_type = other DNA
gtataatccggaagac

SEQ ID NO: 41008 - DNA, 16 bp, synthetic construct
  misc_feature 1..16: note = synthetic [barcode part1]
  source 1..16: mol_type = other DNA
gattgacgactgatcc

SEQ ID NO: 41009 - DNA, 16 bp, synthetic construct
  misc_feature 1..16: note = synthetic [barcode part1]
  source 1..16: mol_type = other DNA
actcctaggcaatctt

SEQ ID NO: 41010 - DNA, 16 bp, synthetic construct
  misc_feature 1..16: note = synthetic [barcode part1]
  source 1..16: mol_type = other DNA
cgacctctgtggttgt

SEQ ID NO: 41011 - DNA, 16 bp, synthetic construct
  misc_feature 1..16: note = synthetic [barcode part1]
  source 1..16: mol_type = other DNA
aatcgtatcttccggt

SEQ ID NO: 41012 - DNA, 16 bp, synthetic construct
  misc_feature 1..16: note = synthetic [barcode part1]
  source 1..16: mol_type = other DNA
taagaaccaccggacg

SEQ ID NO: 41013 - DNA, 16 bp, synthetic construct
  misc_feature 1..16: note = synthetic [barcode part1]
  source 1..16: mol_type = other DNA
tccgtattgcgaaggt

SEQ ID NO: 41014 - DNA, 16 bp, synthetic construct
  misc_feature 1..16: note = synthetic [barcode part1]
  source 1..16: mol_type = other DNA
gaactaacgacgtgcg

SEQ ID NO: 41015 - DNA, 16 bp, synthetic construct
  misc_feature 1..16: note = synthetic [barcode part1]
  source 1..16: mol_type = other DNA
tgagtaactcagagtg

SEQ ID NO: 41016 - DNA, 16 bp, synthetic construct
  misc_feature 1..16: note = synthetic [barcode part1]
  source 1..16: mol_type = other DNA
aggttgtaacgcaggc

SEQ ID NO: 41017 - DNA, 16 bp, synthetic construct
  misc_feature 1..16: note = synthetic [barcode part1]
  source 1..16: mol_type = other DNA
atccttgcgttaggtt

SEQ ID NO: 41018 - DNA, 16 bp, synthetic construct
  misc_feature 1..16: note = synthetic [barcode part1]
  source 1..16: mol_type = other DNA
tctccttccttggaac

SEQ ID NO: 41019 - DNA, 16 bp, synthetic construct
  misc_feature 1..16: note = synthetic [barcode part1]
  source 1..16: mol_type = other DNA
taggtcaagtctggtc

SEQ ID NO: 41020 - DNA, 16 bp, synthetic construct
  misc_feature 1..16: note = synthetic [barcode part1]
  source 1..16: mol_type = other DNA
ttgacgacgtcctcac

SEQ ID NO: 41021 - DNA, 16 bp, synthetic construct
  misc_feature 1..16: note = synthetic [barcode part1]
  source 1..16: mol_type = other DNA
ccgtcgataatccaag

SEQ ID NO: 41022 - DNA, 16 bp, synthetic construct
  misc_feature 1..16: note = synthetic [barcode part1]
  source 1..16: mol_type = other DNA
tgccgtccagattcgt

SEQ ID NO: 41023 - DNA, 16 bp, synthetic construct
  misc_feature 1..16: note = synthetic [barcode part1]
  source 1..16: mol_type = other DNA
gcaaccaccaaggagt

SEQ ID NO: 41024 - DNA, 16 bp, synthetic construct
  misc_feature 1..16: note = synthetic [barcode part1]
  source 1..16: mol_type = other DNA
acgcaagtatcaggcg

SEQ ID NO: 41025 - DNA, 16 bp, synthetic construct
  misc_feature 1..16: note = synthetic [barcode part1]
  source 1..16: mol_type = other DNA
cacggaatagtgaccg

SEQ ID NO: 41026 - DNA, 16 bp, synthetic construct
  misc_feature 1..16: note = synthetic [barcode part1]
  source 1..16: mol_type = other DNA
actggtgacctctcgt

SEQ ID NO: 41027 - DNA, 16 bp, synthetic construct
  misc_feature 1..16: note = synthetic [barcode part1]
  source 1..16: mol_type = other DNA
agtagaatataccggc

SEQ ID NO: 41028 - DNA, 16 bp, synthetic construct
  misc_feature 1..16: note = synthetic [barcode part1]
  source 1..16: mol_type = other DNA
atctgttctgcgacgc

SEQ ID NO: 41029 - DNA, 16 bp, synthetic construct
  misc_feature 1..16: note = synthetic [barcode part1]
  source 1..16: mol_type = other DNA
cgtgtagttcagttct

SEQ ID NO: 41030 - DNA, 16 bp, synthetic construct
  misc_feature 1..16: note = synthetic [barcode part1]
  source 1..16: mol_type = other DNA
gaactactagaccacc

SEQ ID NO: 41031 - DNA, 16 bp, synthetic construct
  misc_feature 1..16: note = synthetic [barcode part1]
  source 1..16: mol_type = other DNA
cggtaagtcgtgagtg

SEQ ID NO: 41032 - DNA, 16 bp, synthetic construct
  misc_feature 1..16: note = synthetic [barcode part1]
  source 1..16: mol_type = other DNA
acttggtcgtacctcg

SEQ ID NO: 41033 - DNA, 16 bp, synthetic construct
  misc_feature 1..16: note = synthetic [barcode part1]
  source 1..16: mol_type = other DNA
gttcctctggtcacag

SEQ ID NO: 41034 - DNA, 16 bp, synthetic construct
  misc_feature 1..16: note = synthetic [barcode part1]
  source 1..16: mol_type = other DNA
tgtctcgtaggcactc

SEQ ID NO: 41035 - DNA, 16 bp, synthetic construct
  misc_feature 1..16: note = synthetic [barcode part1]
  source 1..16: mol_type = other DNA
agagtcttccagaacc

SEQ ID NO: 41036 - DNA, 16 bp, synthetic construct
  misc_feature 1..16: note = synthetic [barcode part1]
  source 1..16: mol_type = other DNA
gtcaaggaaggtcaag

SEQ ID NO: 41037 - DNA, 16 bp, synthetic construct
  misc_feature 1..16: note = synthetic [barcode part1]
  source 1..16: mol_type = other DNA
ttgagtcgtacaagag

SEQ ID NO: 41038 - DNA, 16 bp, synthetic construct
  misc_feature 1..16: note = synthetic [barcode part1]
  source 1..16: mol_type = other DNA
gtccgtggagataacg

SEQ ID NO: 41039 - DNA, 16 bp, synthetic construct
  misc_feature 1..16: note = synthetic [barcode part1]
  source 1..16: mol_type = other DNA
agtacaacgaggacag

SEQ ID NO: 41040 - DNA, 16 bp, synthetic construct
  misc_feature 1..16: note = synthetic [barcode part1]
  source 1..16: mol_type = other DNA
gccaggcgaattactt

SEQ ID NO: 41041 - DNA, 16 bp, synthetic construct
  misc_feature 1..16: note = synthetic [barcode part1]
  source 1..16: mol_type = other DNA
aagtgccgccttgtct

SEQ ID NO: 41042 - DNA, 16 bp, synthetic construct
  misc_feature 1..16: note = synthetic [barcode part1]
  source 1..16: mol_type = other DNA
cgcctcgcgaatattc

SEQ ID NO: 41043 - DNA, 16 bp, synthetic construct
  misc_feature 1..16: note = synthetic [barcode part1]
  source 1..16: mol_type = other DNA
tggttcctgtagtcgc

SEQ ID NO: 41044 - DNA, 16 bp, synthetic construct
  misc_feature 1..16: note = synthetic [barcode part1]
  source 1..16: mol_type = other DNA
tctcgaatatccactg

SEQ ID NO: 41045 - DNA, 16 bp, synthetic construct
  misc_feature 1..16: note = synthetic [barcode part1]
  source 1..16: mol_type = other DNA
caataattgcagaggc

SEQ ID NO: 41046 - DNA, 16 bp, synthetic construct
  misc_feature 1..16: note = synthetic [barcode part1]
  source 1..16: mol_type = other DNA
gaatattggtgagacc

SEQ ID NO: 41047 - DNA, 16 bp, synthetic construct
  misc_feature 1..16: note = synthetic [barcode part1]
  source 1..16: mol_type = other DNA
tactgccacagagtac

SEQ ID NO: 41048 - DNA, 16 bp, synthetic construct
  misc_feature 1..16: note = synthetic [barcode part1]
  source 1..16: mol_type = other DNA
cacgcgatagaggatc

SEQ ID NO: 41049 - DNA, 16 bp, synthetic construct
  misc_feature 1..16: note = synthetic [barcode part1]
  source 1..16: mol_type = other DNA
tctggtacaagagtag

SEQ ID NO: 41050 - DNA, 16 bp, synthetic construct
  misc_feature 1..16: note = synthetic [barcode part1]
  source 1..16: mol_type = other DNA
tacgttgagaaggttg

SEQ ID NO: 41051 - DNA, 16 bp, synthetic construct
  misc_feature 1..16: note = synthetic [barcode part1]
  source 1..16: mol_type = other DNA
ccaacgacgaatcgtt

SEQ ID NO: 41052 - DNA, 16 bp, synthetic construct
  misc_feature 1..16: note = synthetic [barcode part1]
  source 1..16: mol_type = other DNA
tgcgaatctgtagacc

SEQ ID NO: 41053 - DNA, 16 bp, synthetic construct
  misc_feature 1..16: note = synthetic [barcode part1]
  source 1..16: mol_type = other DNA
gtgagttgaccgtatc

SEQ ID NO: 41054 - DNA, 16 bp, synthetic construct
  misc_feature 1..16: note = synthetic [barcode part1]
  source 1..16: mol_type = other DNA
aatctctgcacaatcc

SEQ ID NO: 41055 - DNA, 16 bp, synthetic construct
  misc_feature 1..16: note = synthetic [barcode part1]
  source 1..16: mol_type = other DNA
tgtactgacgtgtcag

SEQ ID NO: 41056 - DNA, 16 bp, synthetic construct
  misc_feature 1..16: note = synthetic [barcode part1]
  source 1..16: mol_type = other DNA
gtcgacctcaattgag

SEQ ID NO: 41057 - DNA, 16 bp, synthetic construct
  misc_feature 1..16: note = synthetic [barcode part1]
  source 1..16: mol_type = other DNA
gattcaatctccgtgt

SEQ ID NO: 41058 - DNA, 16 bp, synthetic construct
  misc_feature 1..16: note = synthetic [barcode part1]
  source 1..16: mol_type = other DNA
tgagacggcagttacg

SEQ ID NO: 41059 - DNA, 16 bp, synthetic construct
  misc_feature 1..16: note = synthetic [barcode part1]
  source 1..16: mol_type = other DNA
tcgaatccgtgtctcg

SEQ ID NO: 41060 - DNA, 16 bp, synthetic construct
  misc_feature 1..16: note = synthetic [barcode part1]
  source 1..16: mol_type = other DNA
caacactgttcgcctg

SEQ ID NO: 41061 - DNA, 16 bp, synthetic construct
  misc_feature 1..16: note = synthetic [barcode part1]
  source 1..16: mol_type = other DNA
tgttcgcaacgtcacc

SEQ ID NO: 41062 - DNA, 16 bp, synthetic construct
  misc_feature 1..16: note = synthetic [barcode part1]
  source 1..16: mol_type = other DNA
cactcgtggtgttgtc

SEQ ID NO: 41063 - DNA, 16 bp, synthetic construct
  misc_feature 1..16: note = synthetic [barcode part1]
  source 1..16: mol_type = other DNA
aacctcaggtggacag

SEQ ID NO: 41064 - DNA, 16 bp, synthetic construct
  misc_feature 1..16: note = synthetic [barcode part1]
  source 1..16: mol_type = other DNA
gacacgagaactgtcg

SEQ ID NO: 41065 - DNA, 16 bp, synthetic construct
  misc_feature 1..16: note = synthetic [barcode part1]
  source 1..16: mol_type = other DNA
tcacgcgagaagactg

SEQ ID NO: 41066 - DNA, 16 bp, synthetic construct
  misc_feature 1..16: note = synthetic [barcode part1]
  source 1..16: mol_type = other DNA
tgttcagagtccacag

SEQ ID NO: 41067 - DNA, 16 bp, synthetic construct
  misc_feature 1..16: note = synthetic [barcode part1]
  source 1..16: mol_type = other DNA
tgacaggacctgtgag

SEQ ID NO: 41068 - DNA, 16 bp, synthetic construct
  misc_feature 1..16: note = synthetic [barcode part1]
  source 1..16: mol_type = other DNA
caagacgtcgtgcaag

SEQ ID NO: 41069 - DNA, 16 bp, synthetic construct
  misc_feature 1..16: note = synthetic [barcode part1]
  source 1..16: mol_type = other DNA
gatccgacttcgtatt

SEQ ID NO: 41070 - DNA, 16 bp, synthetic construct
  misc_feature 1..16: note = synthetic [barcode part1]
  source 1..16: mol_type = other DNA
ttaactcgttcgagtc

SEQ ID NO: 41071 - DNA, 16 bp, synthetic construct
  misc_feature 1..16: note = synthetic [barcode part1]
  source 1..16: mol_type = other DNA
tgcctaattgaacgcg

SEQ ID NO: 41072 - DNA, 16 bp, synthetic construct
  misc_feature 1..16: note = synthetic [barcode part1]
  source 1..16: mol_type = other DNA
gaacctagtctagacc

SEQ ID NO: 41073 - DNA, 16 bp, synthetic construct
  misc_feature 1..16: note = synthetic [barcode part1]
  source 1..16: mol_type = other DNA
gagagtcctgaagaag

SEQ ID NO: 41074 - DNA, 16 bp, synthetic construct
  misc_feature 1..16: note = synthetic [barcode part1]
  source 1..16: mol_type = other DNA
aggtctgtcgttgcct

SEQ ID NO: 41075 - DNA, 16 bp, synthetic construct
  misc_feature 1..16: note = synthetic [barcode part1]
  source 1..16: mol_type = other DNA
ttctaacaccgtcctc

SEQ ID NO: 41076 - DNA, 16 bp, synthetic construct
  misc_feature 1..16: note = synthetic [barcode part1]
  source 1..16: mol_type = other DNA
gtggtcagttggtact

SEQ ID NO: 41077 - DNA, 16 bp, synthetic construct
  misc_feature 1..16: note = synthetic [barcode part1]
  source 1..16: mol_type = other DNA
gtctccttgatatacg

SEQ ID NO: 41078 - DNA, 16 bp, synthetic construct
  misc_feature 1..16: note = synthetic [barcode part1]
  source 1..16: mol_type = other DNA
cagtacactggtacac

SEQ ID NO: 41079 - DNA, 16 bp, synthetic construct
  misc_feature 1..16: note = synthetic [barcode part1]
  source 1..16: mol_type = other DNA
gtcttgaattgcggtg

SEQ ID NO: 41080 - DNA, 16 bp, synthetic construct
  misc_feature 1..16: note = synthetic [barcode part1]
  source 1..16: mol_type = other DNA
ttgcctggagtcttgc

SEQ ID NO: 41081 - DNA, 16 bp, synthetic construct
  misc_feature 1..16: note = synthetic [barcode part1]
  source 1..16: mol_type = other DNA
tgatcagttaaccggc

SEQ ID NO: 41082 - DNA, 16 bp, synthetic construct
  misc_feature 1..16: note = synthetic [barcode part1]
  source 1..16: mol_type = other DNA
taacgcaccagtacac

SEQ ID NO: 41083 - DNA, 16 bp, synthetic construct
  misc_feature 1..16: note = synthetic [barcode part1]
  source 1..16: mol_type = other DNA
taatcctcgacacgcc

SEQ ID NO: 41084 - DNA, 16 bp, synthetic construct
  misc_feature 1..16: note = synthetic [barcode part1]
  source 1..16: mol_type = other DNA
tccgaggaagaagaac

SEQ ID NO: 41085 - DNA, 16 bp, synthetic construct
  misc_feature 1..16: note = synthetic [barcode part1]
  source 1..16: mol_type = other DNA
caggtcacagtagtct

SEQ ID NO: 41086 - DNA, 16 bp, synthetic construct
  misc_feature 1..16: note = synthetic [barcode part1]
  source 1..16: mol_type = other DNA
ccgattcttgttgtcc

SEQ ID NO: 41087 - DNA, 16 bp, synthetic construct
  misc_feature 1..16: note = synthetic [barcode part1]
  source 1..16: mol_type = other DNA
agtaccttattccacg

SEQ ID NO: 41088 - DNA, 16 bp, synthetic construct
  misc_feature 1..16: note = synthetic [barcode part1]
  source 1..16: mol_type = other DNA
tcagtagagacgtggc

SEQ ID NO: 41089 - DNA, 16 bp, synthetic construct
  misc_feature 1..16: note = synthetic [barcode part1]
  source 1..16: mol_type = other DNA
ccttattgcgaattcg

SEQ ID NO: 41090 - DNA, 16 bp, synthetic construct
  misc_feature 1..16: note = synthetic [barcode part1]
  source 1..16: mol_type = other DNA
gtagacttgtgagtcc

SEQ ID NO: 41091 - DNA, 16 bp, synthetic construct
  misc_feature 1..16: note = synthetic [barcode part1]
  source 1..16: mol_type = other DNA
tactgagatcttcacc

SEQ ID NO: 41092 - DNA, 16 bp, synthetic construct
  misc_feature 1..16: note = synthetic [barcode part1]
  source 1..16: mol_type = other DNA
tctggtcaatcaaggc

SEQ ID NO: 41093 - DNA, 16 bp, synthetic construct
  misc_feature 1..16: note = synthetic [barcode part1]
  source 1..16: mol_type = other DNA
aggcctgatctagatc

SEQ ID NO: 41094 - DNA, 16 bp, synthetic construct
  misc_feature 1..16: note = synthetic [barcode part1]
  source 1..16: mol_type = other DNA
cgattcttggttgtgt

SEQ ID NO: 41095 - DNA, 16 bp, synthetic construct
  misc_feature 1..16: note = synthetic [barcode part1]
  source 1..16: mol_type = other DNA
tgacaatcggtgacct

SEQ ID NO: 41096 - DNA, 16 bp, synthetic construct
  misc_feature 1..16: note = synthetic [barcode part1]
  source 1..16: mol_type = other DNA
ttgacgagacaactcc

SEQ ID NO: 41097 - DNA, 16 bp, synthetic construct
  misc_feature 1..16: note = synthetic [barcode part1]
  source 1..16: mol_type = other DNA
tctccggatcgacact

SEQ ID NO: 41098 - DNA, 16 bp, synthetic construct
  misc_feature 1..16: note = synthetic [barcode part1]
  source 1..16: mol_type = other DNA
gcgacactgtgatatc

SEQ ID NO: 41099 - DNA, 16 bp, synthetic construct
  misc_feature 1..16: note = synthetic [barcode part1]
  source 1..16: mol_type = other DNA
tggtgttggtagatag

SEQ ID NO: 41100 - DNA, 16 bp, synthetic construct
  misc_feature 1..16: note = synthetic [barcode part1]
  source 1..16: mol_type = other DNA
tcttcctgtcgattgc

SEQ ID NO: 41101 - DNA, 16 bp, synthetic construct
  misc_feature 1..16: note = synthetic [barcode part1]
  source 1..16: mol_type = other DNA
tctctggcgacgtatc

SEQ ID NO: 41102 - DNA, 16 bp, synthetic construct
  misc_feature 1..16: note = synthetic [barcode part1]
  source 1..16: mol_type = other DNA
tgagacgtctgcagag

SEQ ID NO: 41103 - DNA, 16 bp, synthetic construct
  misc_feature 1..16: note = synthetic [barcode part1]
  source 1..16: mol_type = other DNA
gcagaaggattgtcgc

SEQ ID NO: 41104 - DNA, 16 bp, synthetic construct
  misc_feature 1..16: note = synthetic [barcode part1]
  source 1..16: mol_type = other DNA
agtgcgtctctccagt

SEQ ID NO: 41105 - DNA, 16 bp, synthetic construct
  misc_feature 1..16: note = synthetic [barcode part1]
  source 1..16: mol_type = other DNA
gaacttgtaccttacc

SEQ ID NO: 41106 - DNA, 16 bp, synthetic construct
  misc_feature 1..16: note = synthetic [barcode part1]
  source 1..16: mol_type = other DNA
ccaaggtccacctact

SEQ ID NO: 41107 - DNA, 16 bp, synthetic construct
  misc_feature 1..16: note = synthetic [barcode part1]
  source 1..16: mol_type = other DNA
gtggacaacagacaag

SEQ ID NO: 41108 - DNA, 16 bp, synthetic construct
  misc_feature 1..16: note = synthetic [barcode part1]
  source 1..16: mol_type = other DNA
aactcctgtatctggt

SEQ ID NO: 41109 - DNA, 16 bp, synthetic construct
  misc_feature 1..16: note = synthetic [barcode part1]
  source 1..16: mol_type = other DNA
gtgacttcttacgttg

SEQ ID NO: 41110 - DNA, 16 bp, synthetic construct
  misc_feature 1..16: note = synthetic [barcode part1]
  source 1..16: mol_type = other DNA
caaccgaccagaactt

SEQ ID NO: 41111 - DNA, 16 bp, synthetic construct
  misc_feature 1..16: note = synthetic [barcode part1]
  source 1..16: mol_type = other DNA
tcgatccacctcttac

SEQ ID NO: 41112 - DNA, 16 bp, synthetic construct
  misc_feature 1..16: note = synthetic [barcode part1]
  source 1..16: mol_type = other DNA
ttctgcaagtcgccgt

SEQ ID NO: 41113 - DNA, 16 bp, synthetic construct
  misc_feature 1..16: note = synthetic [barcode part1]
  source 1..16: mol_type = other DNA
aaggaaggagaccttg

SEQ ID NO: 41114 - DNA, 16 bp, synthetic construct
  misc_feature 1..16: note = synthetic [barcode part1]
  source 1..16: mol_type = other DNA
caacgattgacgactc

SEQ ID NO: 41115 - DNA, 16 bp, synthetic construct
  misc_feature 1..16: note = synthetic [barcode part1]
  source 1..16: mol_type = other DNA
gttcgaagtagacctc

SEQ ID NO: 41116 - DNA, 16 bp, synthetic construct
  misc_feature 1..16: note = synthetic [barcode part1]
  source 1..16: mol_type = other DNA
tgtcctgtgttgtctc

SEQ ID NO: 41117 - DNA, 16 bp, synthetic construct
  misc_feature 1..16: note = synthetic [barcode part1]
  source 1..16: mol_type = other DNA
ttcggttctccagtct

SEQ ID NO: 41118 - DNA, 16 bp, synthetic construct
  misc_feature 1..16: note = synthetic [barcode part1]
  source 1..16: mol_type = other DNA
acttgacctccgtgtg

SEQ ID NO: 41119 - DNA, 16 bp, synthetic construct
  misc_feature 1..16: note = synthetic [barcode part1]
  source 1..16: mol_type = other DNA
tcaacgtggaggatcg

SEQ ID NO: 41120 - DNA, 16 bp, synthetic construct
  misc_feature 1..16: note = synthetic [barcode part1]
  source 1..16: mol_type = other DNA
tcaacttgcaaggtgc

SEQ ID NO: 41121 - DNA, 16 bp, synthetic construct
  misc_feature 1..16: note = synthetic [barcode part1]
  source 1..16: mol_type = other DNA
cgttgttagacacctt

SEQ ID NO: 41122 - DNA, 16 bp, synthetic construct
  misc_feature 1..16: note = synthetic [barcode part1]
  source 1..16: mol_type = other DNA
ttgcacctaggtcgtc

SEQ ID NO: 41123 - DNA, 16 bp, synthetic construct
  misc_feature 1..16: note = synthetic [barcode part1]
  source 1..16: mol_type = other DNA
aggattctggatagac

SEQ ID NO: 41124 - DNA, 16 bp, synthetic construct
  misc_feature 1..16: note = synthetic [barcode part1]
  source 1..16: mol_type = other DNA
gatcttgacggtactg

SEQ ID NO: 41125 - DNA, 16 bp, synthetic construct
  misc_feature 1..16: note = synthetic [barcode part1]
  source 1..16: mol_type = other DNA
tatctaacggttctcg

SEQ ID NO: 41126 - DNA, 16 bp, synthetic construct
  misc_feature 1..16: note = synthetic [barcode part1]
  source 1..16: mol_type = other DNA
cgtagatcctaccacc

SEQ ID NO: 41127 - DNA, 16 bp, synthetic construct
  misc_feature 1..16: note = synthetic [barcode part1]
  source 1..16: mol_type = other DNA
taggacttggtcagtc

SEQ ID NO: 41128 - DNA, 16 bp, synthetic construct
  misc_feature 1..16: note = synthetic [barcode part1]
  source 1..16: mol_type = other DNA
gcgcagtaagaggttc

SEQ ID NO: 41129 - DNA, 16 bp, synthetic construct
  misc_feature 1..16: note = synthetic [barcode part1]
  source 1..16: mol_type = other DNA
gataaccgccgttaac

SEQ ID NO: 41130 - DNA, 16 bp, synthetic construct
  misc_feature 1..16: note = synthetic [barcode part1]
  source 1..16: mol_type = other DNA
aagaccgtgatctctg

SEQ ID NO: 41131 - DNA, 16 bp, synthetic construct
  misc_feature 1..16: note = synthetic [barcode part1]
  source 1..16: mol_type = other DNA
tgtcctctcttacgtg

SEQ ID NO: 41132 - DNA, 16 bp, synthetic construct
  misc_feature 1..16: note = synthetic [barcode part1]
  source 1..16: mol_type = other DNA
tctgaactccgactcg

SEQ ID NO: 41133 - DNA, 16 bp, synthetic construct
  misc_feature 1..16: note = synthetic [barcode part1]
  source 1..16: mol_type = other DNA
taccactatccaggtt

SEQ ID NO: 41134 - DNA, 16 bp, synthetic construct
  misc_feature 1..16: note = synthetic [barcode part1]
  source 1..16: mol_type = other DNA
gtcgcaggataggtac

SEQ ID NO: 41135 - DNA, 16 bp, synthetic construct
  misc_feature 1..16: note = synthetic [barcode part1]
  source 1..16: mol_type = other DNA
acgagaactaggccgt

SEQ ID NO: 41136 - DNA, 16 bp, synthetic construct
  misc_feature 1..16: note = synthetic [barcode part1]
  source 1..16: mol_type = other DNA
gacttactggacactg

SEQ ID NO: 41137 - DNA, 16 bp, synthetic construct
  misc_feature 1..16: note = synthetic [barcode part1]
  source 1..16: mol_type = other DNA
cctaaggatcaaccgt

SEQ ID NO: 41138 - DNA, 16 bp, synthetic construct
  misc_feature 1..16: note = synthetic [barcode part1]
  source 1..16: mol_type = other DNA
taacctcactgcgcgt

SEQ ID NO: 41139 - DNA, 16 bp, synthetic construct
  misc_feature 1..16: note = synthetic [barcode part1]
  source 1..16: mol_type = other DNA
ccactcgataacactt

SEQ ID NO: 41140 - DNA, 16 bp, synthetic construct
  misc_feature 1..16: note = synthetic [barcode part1]
  source 1..16: mol_type = other DNA
aacggcaacctacgag

SEQ ID NO: 41141 - DNA, 16 bp, synthetic construct
  misc_feature 1..16: note = synthetic [barcode part1]
  source 1..16: mol_type = other DNA
gtattatcaggtggag

SEQ ID NO: 41142 - DNA, 16 bp, synthetic construct
  misc_feature 1..16: note = synthetic [barcode part1]
  source 1..16: mol_type = other DNA
tcttggaggtaagtag

SEQ ID NO: 41143 - DNA, 16 bp, synthetic construct
  misc_feature 1..16: note = synthetic [barcode part1]
  source 1..16: mol_type = other DNA
cctgtcggcacaatct

SEQ ID NO: 41144 - DNA, 16 bp, synthetic construct
  misc_feature 1..16: note = synthetic [barcode part1]
  source 1..16: mol_type = other DNA
gttatctcaccgttcc

SEQ ID NO: 41145 - DNA, 16 bp, synthetic construct
  misc_feature 1..16: note = synthetic [barcode part1]
  source 1..16: mol_type = other DNA
aaccgcaacgccaatt

SEQ ID NO: 41146 - DNA, 16 bp, synthetic construct
  misc_feature 1..16: note = synthetic [barcode part1]
  source 1..16: mol_type = other DNA
gtgttgatctccgacc

SEQ ID NO: 41147 - DNA, 16 bp, synthetic construct
  misc_feature 1..16: note = synthetic [barcode part1]
  source 1..16: mol_type = other DNA
tacgcaattgtcgttc

SEQ ID NO: 41148 - DNA, 16 bp, synthetic construct
  misc_feature 1..16: note = synthetic [barcode part1]
  source 1..16: mol_type = other DNA
ttgccgtgtagtgaac

SEQ ID NO: 41149 - DNA, 16 bp, synthetic construct
  misc_feature 1..16: note = synthetic [barcode part1]
  source 1..16: mol_type = other DNA
tacaagaagtctggtg

SEQ ID NO: 41150 - DNA, 16 bp, synthetic construct
  misc_feature 1..16: note = synthetic [barcode part1]
  source 1..16: mol_type = other DNA
tctccagatcaatacc

SEQ ID NO: 41151 - DNA, 16 bp, synthetic construct
  misc_feature 1..16: note = synthetic [barcode part1]
  source 1..16: mol_type = other DNA
ttcggcgtctatattg

SEQ ID NO: 41152 - DNA, 16 bp, synthetic construct
  misc_feature 1..16: note = synthetic [barcode part1]
  source 1..16: mol_type = other DNA
gtggtattccttctcc

SEQ ID NO: 41153 - DNA, 16 bp, synthetic construct
  misc_feature 1..16: note = synthetic [barcode part1]
  source 1..16: mol_type = other DNA
tcgtaggtctacgagt

SEQ ID NO: 41154 - DNA, 16 bp, synthetic construct
  misc_feature 1..16: note = synthetic [barcode part1]
  source 1..16: mol_type = other DNA
cgtactaggtccttcg

SEQ ID NO: 41155 - DNA, 16 bp, synthetic construct
  misc_feature 1..16: note = synthetic [barcode part1]
  source 1..16: mol_type = other DNA
tcttccgacagttgcg

SEQ ID NO: 41156 - DNA, 16 bp, synthetic construct
  misc_feature 1..16: note = synthetic [barcode part1]
  source 1..16: mol_type = other DNA
gtcgtctgatagagtc

SEQ ID NO: 41157 - DNA, 16 bp, synthetic construct
  misc_feature 1..16: note = synthetic [barcode part1]
  source 1..16: mol_type = other DNA
taactggtctctctcc

SEQ ID NO: 41158 - DNA, 16 bp, synthetic construct
  misc_feature 1..16: note = synthetic [barcode part1]
  source 1..16: mol_type = other DNA
ttctgccagacctgtg

SEQ ID NO: 41159 - DNA, 16 bp, synthetic construct
  misc_feature 1..16: note = synthetic [barcode part1]
  source 1..16: mol_type = other DNA
cagaggaataccaatc

SEQ ID NO: 41160 - DNA, 16 bp, synthetic construct
  misc_feature 1..16: note = synthetic [barcode part1]
  source 1..16: mol_type = other DNA
atcacctctactccgt

SEQ ID NO: 41161 - DNA, 16 bp, synthetic construct
  misc_feature 1..16: note = synthetic [barcode part1]
  source 1..16: mol_type = other DNA
tgccggagatacgaac

SEQ ID NO: 41162 - DNA, 16 bp, synthetic construct
  misc_feature 1..16: note = synthetic [barcode part1]
  source 1..16: mol_type = other DNA
tgtacttgaacgtggc

SEQ ID NO: 41163 - DNA, 16 bp, synthetic construct
  misc_feature 1..16: note = synthetic [barcode part1]
  source 1..16: mol_type = other DNA
gttgtcagatctgacg

SEQ ID NO: 41164 - DNA, 16 bp, synthetic construct
  misc_feature 1..16: note = synthetic [barcode part1]
  source 1..16: mol_type = other DNA
tctatctggtaggcag

SEQ ID NO: 41165 - DNA, 16 bp, synthetic construct
  misc_feature 1..16: note = synthetic [barcode part1]
  source 1..16: mol_type = other DNA
tatcttccgacctaag

SEQ ID NO: 41166 - DNA, 16 bp, synthetic construct
  misc_feature 1..16: note = synthetic [barcode part1]
  source 1..16: mol_type = other DNA
actcacttctgtccgt

SEQ ID NO: 41167 - DNA, 16 bp, synthetic construct
  misc_feature 1..16: note = synthetic [barcode part1]
  source 1..16: mol_type = other DNA
aacgtaacgccgaacg

SEQ ID NO: 41168 - DNA, 16 bp, synthetic construct
  misc_feature 1..16: note = synthetic [barcode part1]
  source 1..16: mol_type = other DNA
tcaacaccagtacgtg

SEQ ID NO: 41169 - DNA, 16 bp, synthetic construct
  misc_feature 1..16: note = synthetic [barcode part1]
  source 1..16: mol_type = other DNA
tgatcagtggtatcgc

SEQ ID NO: 41170 - DNA, 16 bp, synthetic construct
  misc_feature 1..16: note = synthetic [barcode part1]
  source 1..16: mol_type = other DNA
tagtgaccgatctgac

SEQ ID NO: 41171 - DNA, 16 bp, synthetic construct
  misc_feature 1..16: note = synthetic [barcode part1]
  source 1..16: mol_type = other DNA
gcggtgttataacacc

SEQ ID NO: 41172 - DNA, 16 bp, synthetic construct
  misc_feature 1..16: note = synthetic [barcode part1]
  source 1..16: mol_type = other DNA
agtggaatcaacacgt

SEQ ID NO: 41173 - DNA, 16 bp, synthetic construct
  misc_feature 1..16: note = synthetic [barcode part1]
  source 1..16: mol_type = other DNA
actggaccgttaggtt

SEQ ID NO: 41174 - DNA, 16 bp, synthetic construct
  misc_feature 1..16: note = synthetic [barcode part1]
  source 1..16: mol_type = other DNA
attcggtctggatcag

SEQ ID NO: 41175 - DNA, 16 bp, synthetic construct
  misc_feature 1..16: note = synthetic [barcode part1]
  source 1..16: mol_type = other DNA
aagatagacctgcaac

SEQ ID NO: 41176 - DNA, 16 bp, synthetic construct
  misc_feature 1..16: note = synthetic [barcode part1]
  source 1..16: mol_type = other DNA
cggcgtaagaacaacc

SEQ ID NO: 41177 - DNA, 16 bp, synthetic construct
  misc_feature 1..16: note = synthetic [barcode part1]
  source 1..16: mol_type = other DNA
gtcgatacttggcctc

SEQ ID NO: 41178 - DNA, 16 bp, synthetic construct
  misc_feature 1..16: note = synthetic [barcode part1]
  source 1..16: mol_type = other DNA
tcaggtagacaaggcc

SEQ ID NO: 41179 - DNA, 16 bp, synthetic construct
  misc_feature 1..16: note = synthetic [barcode part1]
  source 1..16: mol_type = other DNA
tgttgtgtgcaacgtg

SEQ ID NO: 41180 - DNA, 16 bp, synthetic construct
  misc_feature 1..16: note = synthetic [barcode part1]
  source 1..16: mol_type = other DNA
tcgcctgatctcaggt

SEQ ID NO: 41181 - DNA, 16 bp, synthetic construct
  misc_feature 1..16: note = synthetic [barcode part1]
  source 1..16: mol_type = other DNA
accgcagataggtgac

SEQ ID NO: 41182 - DNA, 16 bp, synthetic construct
  misc_feature 1..16: note = synthetic [barcode part1]
  source 1..16: mol_type = other DNA
aggacactcttgtacg

SEQ ID NO: 41183 - DNA, 16 bp, synthetic construct
  misc_feature 1..16: note = synthetic [barcode part1]
  source 1..16: mol_type = other DNA
cctaccactgaacgtc

SEQ ID NO: 41184 - DNA, 16 bp, synthetic construct
  misc_feature 1..16: note = synthetic [barcode part1]
  source 1..16: mol_type = other DNA
tgttggatactcttgc

SEQ ID NO: 41185 - DNA, 16 bp, synthetic construct
  misc_feature 1..16: note = synthetic [barcode part1]
  source 1..16: mol_type = other DNA
gtgtcggccttattgc

SEQ ID NO: 41186 - DNA, 16 bp, synthetic construct
  misc_feature 1..16: note = synthetic [barcode part1]
  source 1..16: mol_type = other DNA
gttcttactcggtaac

SEQ ID NO: 41187 - DNA, 16 bp, synthetic construct
  misc_feature 1..16: note = synthetic [barcode part1]
  source 1..16: mol_type = other DNA
taacaccgaacaagtg

SEQ ID NO: 41188 - DNA, 16 bp, synthetic construct
  misc_feature 1..16: note = synthetic [barcode part1]
  source 1..16: mol_type = other DNA
actcgttctcagaact

SEQ ID NO: 41189 - DNA, 16 bp, synthetic construct
  misc_feature 1..16: note = synthetic [barcode part1]
  source 1..16: mol_type = other DNA
tcggattaccgaatcg

SEQ ID NO: 41190 - DNA, 16 bp, synthetic construct
  misc_feature 1..16: note = synthetic [barcode part1]
  source 1..16: mol_type = other DNA
cgttgaggccttcgtt

SEQ ID NO: 41191 - DNA, 16 bp, synthetic construct
  misc_feature 1..16: note = synthetic [barcode part1]
  source 1..16: mol_type = other DNA
gtctcgtaccttctac

SEQ ID NO: 41192 - DNA, 16 bp, synthetic construct
  misc_feature 1..16: note = synthetic [barcode part1]
  source 1..16: mol_type = other DNA
tcagagtggatcctac

SEQ ID NO: 41193 - DNA, 16 bp, synthetic construct
  misc_feature 1..16: note = synthetic [barcode part1]
  source 1..16: mol_type = other DNA
taggtaacttggagtg

SEQ ID NO: 41194 - DNA, 16 bp, synthetic construct
  misc_feature 1..16: note = synthetic [barcode part1]
  source 1..16: mol_type = other DNA
gagaacacactgaact

SEQ ID NO: 41195 - DNA, 16 bp, synthetic construct
  misc_feature 1..16: note = synthetic [barcode part1]
  source 1..16: mol_type = other DNA
ccggttggttgattag

SEQ ID NO: 41196 - DNA, 16 bp, synthetic construct
  misc_feature 1..16: note = synthetic [barcode part1]
  source 1..16: mol_type = other DNA
accttcgacaatctac

SEQ ID NO: 41197 - DNA, 16 bp, synthetic construct
  misc_feature 1..16: note = synthetic [barcode part1]
  source 1..16: mol_type = other DNA
gttgacaacgaagtac

SEQ ID NO: 41198 - DNA, 16 bp, synthetic construct
  misc_feature 1..16: note = synthetic [barcode part1]
  source 1..16: mol_type = other DNA
agtcgcgactgatatc

SEQ ID NO: 41199 - DNA, 16 bp, synthetic construct
  misc_feature 1..16: note = synthetic [barcode part1]
  source 1..16: mol_type = other DNA
gataccttgtcgacag

SEQ ID NO: 41200 - DNA, 16 bp, synthetic construct
  misc_feature 1..16: note = synthetic [barcode part1]
  source 1..16: mol_type = other DNA
tagtacctgtctactg

SEQ ID NO: 41201 - DNA, 16 bp, synthetic construct
  misc_feature 1..16: note = synthetic [barcode part1]
  source 1..16: mol_type = other DNA
gatatcgaccaaccac

SEQ ID NO: 41202 - DNA, 16 bp, synthetic construct
  misc_feature 1..16: note = synthetic [barcode part1]
  source 1..16: mol_type = other DNA
ttgagtgagtgtctgc

SEQ ID NO: 41203 - DNA, 16 bp, synthetic construct
  misc_feature 1..16: note = synthetic [barcode part1]
  source 1..16: mol_type = other DNA
tgatacgcgtattggc

SEQ ID NO: 41204 - DNA, 16 bp, synthetic construct
  misc_feature 1..16: note = synthetic [barcode part1]
  source 1..16: mol_type = other DNA
cgttaacggaagaccg

SEQ ID NO: 41205 - DNA, 16 bp, synthetic construct
  misc_feature 1..16: note = synthetic [barcode part1]
  source 1..16: mol_type = other DNA
gatctgtcgagtgttg

SEQ ID NO: 41206 - DNA, 16 bp, synthetic construct
  misc_feature 1..16: note = synthetic [barcode part1]
  source 1..16: mol_type = other DNA
actggcgtacttcacc

SEQ ID NO: 41207 - DNA, 16 bp, synthetic construct
  misc_feature 1..16: note = synthetic [barcode part1]
  source 1..16: mol_type = other DNA
cctagtctggttatac

SEQ ID NO: 41208 - DNA, 16 bp, synthetic construct
  misc_feature 1..16: note = synthetic [barcode part1]
  source 1..16: mol_type = other DNA
acaacctctgttggag

SEQ ID NO: 41209 - DNA, 16 bp, synthetic construct
  misc_feature 1..16: note = synthetic [barcode part1]
  source 1..16: mol_type = other DNA
gtcgcgtactacttcg

SEQ ID NO: 41210 - DNA, 16 bp, synthetic construct
  misc_feature 1..16: note = synthetic [barcode part1]
  source 1..16: mol_type = other DNA
atcgttgcaactcgag

SEQ ID NO: 41211 - DNA, 16 bp, synthetic construct
  misc_feature 1..16: note = synthetic [barcode part1]
  source 1..16: mol_type = other DNA
acaactggttgcacac

SEQ ID NO: 41212 - DNA, 16 bp, synthetic construct
  misc_feature 1..16: note = synthetic [barcode part1]
  source 1..16: mol_type = other DNA
caggaacaataatccg

SEQ ID NO: 41213 - DNA, 16 bp, synthetic construct
  misc_feature 1..16: note = synthetic [barcode part1]
  source 1..16: mol_type = other DNA
acaactggttggtacc

SEQ ID NO: 41214 - DNA, 16 bp, synthetic construct
  misc_feature 1..16: note = synthetic [barcode part1]
  source 1..16: mol_type = other DNA
cgagtagacagtattg

SEQ ID NO: 41215 - DNA, 16 bp, synthetic construct
  misc_feature 1..16: note = synthetic [barcode part1]
  source 1..16: mol_type = other DNA
gtaaggacgacttagt

SEQ ID NO: 41216 - DNA, 16 bp, synthetic construct
  misc_feature 1..16: note = synthetic [barcode part1]
  source 1..16: mol_type = other DNA
gtgaggtgaacctgtg

SEQ ID NO: 41217 - DNA, 16 bp, synthetic construct
  misc_feature 1..16: note = synthetic [barcode part1]
  source 1..16: mol_type = other DNA
ccagtaacactctcgc

SEQ ID NO: 41218 - DNA, 16 bp, synthetic construct
  misc_feature 1..16: note = synthetic [barcode part1]
  source 1..16: mol_type = other DNA
tctgtgagacactcag

SEQ ID NO: 41219 - DNA, 16 bp, synthetic construct
  misc_feature 1..16: note = synthetic [barcode part1]
  source 1..16: mol_type = other DNA
cacttgatctccggtg

SEQ ID NO: 41220 - DNA, 16 bp, synthetic construct
  misc_feature 1..16: note = synthetic [barcode part1]
  source 1..16: mol_type = other DNA
ttgacagtccgcgttc

SEQ ID NO: 41221 - DNA, 16 bp, synthetic construct
  misc_feature 1..16: note = synthetic [barcode part1]
  source 1..16: mol_type = other DNA
tgtaccttcactgagt

SEQ ID NO: 41222 - DNA, 16 bp, synthetic construct
  misc_feature 1..16: note = synthetic [barcode part1]
  source 1..16: mol_type = other DNA
cactactcagaggact

SEQ ID NO: 41223 - DNA, 16 bp, synthetic construct
  misc_feature 1..16: note = synthetic [barcode part1]
  source 1..16: mol_type = other DNA
aacgtcaactgtggtc

SEQ ID NO: 41224 - DNA, 16 bp, synthetic construct
  misc_feature 1..16: note = synthetic [barcode part1]
  source 1..16: mol_type = other DNA
ttgtctgatccgcctt

SEQ ID NO: 41225 - DNA, 16 bp, synthetic construct
  misc_feature 1..16: note = synthetic [barcode part1]
  source 1..16: mol_type = other DNA
actcaacactgtcgag

SEQ ID NO: 41226 - DNA, 16 bp, synthetic construct
  misc_feature 1..16: note = synthetic [barcode part1]
  source 1..16: mol_type = other DNA
agaccaggtatatcag

SEQ ID NO: 41227 - DNA, 16 bp, synthetic construct
  misc_feature 1..16: note = synthetic [barcode part1]
  source 1..16: mol_type = other DNA
gtacgttcgttgacag

SEQ ID NO: 41228 - DNA, 16 bp, synthetic construct
  misc_feature 1..16: note = synthetic [barcode part1]
  source 1..16: mol_type = other DNA
tgtcctgttgttccac

SEQ ID NO: 41229 - DNA, 16 bp, synthetic construct
  misc_feature 1..16: note = synthetic [barcode part1]
  source 1..16: mol_type = other DNA
gtgacgaacaggatag

SEQ ID NO: 41230 - DNA, 16 bp, synthetic construct
  misc_feature 1..16: note = synthetic [barcode part1]
  source 1..16: mol_type = other DNA
ttgtccaagatctcgt

SEQ ID NO: 41231 - DNA, 16 bp, synthetic construct
  misc_feature 1..16: note = synthetic [barcode part1]
  source 1..16: mol_type = other DNA
cgtacaatcacacgac

SEQ ID NO: 41232 - DNA, 16 bp, synthetic construct
  misc_feature 1..16: note = synthetic [barcode part1]
  source 1..16: mol_type = other DNA
actgcggattcgtctc

SEQ ID NO: 41233 - DNA, 16 bp, synthetic construct
  misc_feature 1..16: note = synthetic [barcode part1]
  source 1..16: mol_type = other DNA
taccttatccgtcacc

SEQ ID NO: 41234 - DNA, 16 bp, synthetic construct
  misc_feature 1..16: note = synthetic [barcode part1]
  source 1..16: mol_type = other DNA
tctcgtcgcctgtaag

SEQ ID NO: 41235 - DNA, 16 bp, synthetic construct
  misc_feature 1..16: note = synthetic [barcode part1]
  source 1..16: mol_type = other DNA
cctaactacgccgact

SEQ ID NO: 41236 - DNA, 16 bp, synthetic construct
  misc_feature 1..16: note = synthetic [barcode part1]
  source 1..16: mol_type = other DNA
ccaccttcaatccttg

SEQ ID NO: 41237 - DNA, 16 bp, synthetic construct
  misc_feature 1..16: note = synthetic [barcode part1]
  source 1..16: mol_type = other DNA
gcaccgttaggtagag

SEQ ID NO: 41238 - DNA, 16 bp, synthetic construct
  misc_feature 1..16: note = synthetic [barcode part1]
  source 1..16: mol_type = other DNA
gttagacagtgacctc

SEQ ID NO: 41239 - DNA, 16 bp, synthetic construct
  misc_feature 1..16: note = synthetic [barcode part1]
  source 1..16: mol_type = other DNA
acgcacgagttctaac

SEQ ID NO: 41240 - DNA, 16 bp, synthetic construct
  misc_feature 1..16: note = synthetic [barcode part1]
  source 1..16: mol_type = other DNA
gacgaggttggtacgt

SEQ ID NO: 41241 - DNA, 16 bp, synthetic construct
  misc_feature 1..16: note = synthetic [barcode part1]
  source 1..16: mol_type = other DNA
gacttccgcgtaatcc

SEQ ID NO: 41242 - DNA, 16 bp, synthetic construct
  misc_feature 1..16: note = synthetic [barcode part1]
  source 1..16: mol_type = other DNA
tctatacggaagtgcc

SEQ ID NO: 41243 - DNA, 16 bp, synthetic construct
  misc_feature 1..16: note = synthetic [barcode part1]
  source 1..16: mol_type = other DNA
atccgagtcgtcctgt

SEQ ID NO: 41244 - DNA, 16 bp, synthetic construct
  misc_feature 1..16: note = synthetic [barcode part1]
  source 1..16: mol_type = other DNA
tggtcctcttcctaac

SEQ ID NO: 41245 - DNA, 16 bp, synthetic construct
  misc_feature 1..16: note = synthetic [barcode part1]
  source 1..16: mol_type = other DNA
cggaggaatactagtt

SEQ ID NO: 41246 - DNA, 16 bp, synthetic construct
  misc_feature 1..16: note = synthetic [barcode part1]
  source 1..16: mol_type = other DNA
gtatcgtagataggtg

SEQ ID NO: 41247 - DNA, 16 bp, synthetic construct
  misc_feature 1..16: note = synthetic [barcode part1]
  source 1..16: mol_type = other DNA
acgttaccaagatccg

SEQ ID NO: 41248 - DNA, 16 bp, synthetic construct
  misc_feature 1..16: note = synthetic [barcode part1]
  source 1..16: mol_type = other DNA
agaaccggtgcaatcg

SEQ ID NO: 41249 - DNA, 16 bp, synthetic construct
  misc_feature 1..16: note = synthetic [barcode part1]
  source 1..16: mol_type = other DNA
ccgcagtactgattag

SEQ ID NO: 41250 - DNA, 16 bp, synthetic construct
  misc_feature 1..16: note = synthetic [barcode part1]
  source 1..16: mol_type = other DNA
ccggcaagagtacaac

SEQ ID NO: 41251 - DNA, 16 bp, synthetic construct
  misc_feature 1..16: note = synthetic [barcode part1]
  source 1..16: mol_type = other DNA
agtcaatacgccgtgt

SEQ ID NO: 41252 - DNA, 16 bp, synthetic construct
  misc_feature 1..16: note = synthetic [barcode part1]
  source 1..16: mol_type = other DNA
acttcgcgaactgaac

SEQ ID NO: 41253 - DNA, 16 bp, synthetic construct
  misc_feature 1..16: note = synthetic [barcode part1]
  source 1..16: mol_type = other DNA
accttagtctccttcg

SEQ ID NO: 41254 - DNA, 16 bp, synthetic construct
  misc_feature 1..16: note = synthetic [barcode part1]
  source 1..16: mol_type = other DNA
attggaacgtgtagtg

SEQ ID NO: 41255 - DNA, 16 bp, synthetic construct
  misc_feature 1..16: note = synthetic [barcode part1]
  source 1..16: mol_type = other DNA
tggacaccaacctcct

SEQ ID NO: 41256 - DNA, 16 bp, synthetic construct
  misc_feature 1..16: note = synthetic [barcode part1]
  source 1..16: mol_type = other DNA
cgtattcggatcactt

SEQ ID NO: 41257 - DNA, 16 bp, synthetic construct
  misc_feature 1..16: note = synthetic [barcode part1]
  source 1..16: mol_type = other DNA
gtcaacggcaactgtt

SEQ ID NO: 41258 - DNA, 16 bp, synthetic construct
  misc_feature 1..16: note = synthetic [barcode part1]
  source 1..16: mol_type = other DNA
aacggtcaactgtcgt

SEQ ID NO: 41259 - DNA, 16 bp, synthetic construct
  misc_feature 1..16: note = synthetic [barcode part1]
  source 1..16: mol_type = other DNA
gatcttgttatccgtg

SEQ ID NO: 41260 - DNA, 16 bp, synthetic construct
  misc_feature 1..16: note = synthetic [barcode part1]
  source 1..16: mol_type = other DNA
tgcaactgccacttcg

SEQ ID NO: 41261 - DNA, 16 bp, synthetic construct
  misc_feature 1..16: note = synthetic [barcode part1]
  source 1..16: mol_type = other DNA
tgtcggcggagaattg

SEQ ID NO: 41262 - DNA, 16 bp, synthetic construct
  misc_feature 1..16: note = synthetic [barcode part1]
  source 1..16: mol_type = other DNA
ataccaggtgcaatcc

SEQ ID NO: 41263 - DNA, 16 bp, synthetic construct
  misc_feature 1..16: note = synthetic [barcode part1]
  source 1..16: mol_type = other DNA
attgtggaagtgaacc

SEQ ID NO: 41264 - DNA, 16 bp, synthetic construct
  misc_feature 1..16: note = synthetic [barcode part1]
  source 1..16: mol_type = other DNA
tcgagtggcctcactt

SEQ ID NO: 41265 - DNA, 16 bp, synthetic construct
  misc_feature 1..16: note = synthetic [barcode part1]
  source 1..16: mol_type = other DNA
attcgttcgttgtgac

SEQ ID NO: 41266 - DNA, 16 bp, synthetic construct
  misc_feature 1..16: note = synthetic [barcode part1]
  source 1..16: mol_type = other DNA
gcgacgttatagtacc

SEQ ID NO: 41267 - DNA, 16 bp, synthetic construct
  misc_feature 1..16: note = synthetic [barcode part1]
  source 1..16: mol_type = other DNA
accttacggtatacct

SEQ ID NO: 41268 - DNA, 16 bp, synthetic construct
  misc_feature 1..16: note = synthetic [barcode part1]
  source 1..16: mol_type = other DNA
acgtatcgcaatcgtg

SEQ ID NO: 41269 - DNA, 16 bp, synthetic construct
  misc_feature 1..16: note = synthetic [barcode part1]
  source 1..16: mol_type = other DNA
gagaggttggacctac

SEQ ID NO: 41270 - DNA, 16 bp, synthetic construct
  misc_feature 1..16: note = synthetic [barcode part1]
  source 1..16: mol_type = other DNA
ttcctcgattcctcag

SEQ ID NO: 41271 - DNA, 16 bp, synthetic construct
  misc_feature 1..16: note = synthetic [barcode part1]
  source 1..16: mol_type = other DNA
tcacttgcgaggcctt

SEQ ID NO: 41272 - DNA, 16 bp, synthetic construct
  misc_feature 1..16: note = synthetic [barcode part1]
  source 1..16: mol_type = other DNA
ttgttaccgtctagac

SEQ ID NO: 41273 - DNA, 16 bp, synthetic construct
  misc_feature 1..16: note = synthetic [barcode part1]
  source 1..16: mol_type = other DNA
atagtagacagtcgtg

SEQ ID NO: 41274 - DNA, 16 bp, synthetic construct
  misc_feature 1..16: note = synthetic [barcode part1]
  source 1..16: mol_type = other DNA
tattcgtgacggacac

SEQ ID NO: 41275 - DNA, 16 bp, synthetic construct
  misc_feature 1..16: note = synthetic [barcode part1]
  source 1..16: mol_type = other DNA
tgacggattgcgagtg

SEQ ID NO: 41276 - DNA, 16 bp, synthetic construct
  misc_feature 1..16: note = synthetic [barcode part1]
  source 1..16: mol_type = other DNA
atagtaggacacgccg

SEQ ID NO: 41277 - DNA, 16 bp, synthetic construct
  misc_feature 1..16: note = synthetic [barcode part1]
  source 1..16: mol_type = other DNA
agtagtactcactgcg

SEQ ID NO: 41278 - DNA, 16 bp, synthetic construct
  misc_feature 1..16: note = synthetic [barcode part1]
  source 1..16: mol_type = other DNA
ttcaatcaccggcgtc

SEQ ID NO: 41279 - DNA, 16 bp, synthetic construct
  misc_feature 1..16: note = synthetic [barcode part1]
  source 1..16: mol_type = other DNA
cgtaacgatctacctt

SEQ ID NO: 41280 - DNA, 16 bp, synthetic construct
  misc_feature 1..16: note = synthetic [barcode part1]
  source 1..16: mol_type = other DNA
caagactgatcgactc

SEQ ID NO: 41281 - DNA, 16 bp, synthetic construct
  misc_feature 1..16: note = synthetic [barcode part1]
  source 1..16: mol_type = other DNA
taaccacagactagag

SEQ ID NO: 41282 - DNA, 16 bp, synthetic construct
  misc_feature 1..16: note = synthetic [barcode part1]
  source 1..16: mol_type = other DNA
gtctgaagtggcgaac

SEQ ID NO: 41283 - DNA, 16 bp, synthetic construct
  misc_feature 1..16: note = synthetic [barcode part1]
  source 1..16: mol_type = other DNA
gcagacctagtaaggc

SEQ ID NO: 41284 - DNA, 16 bp, synthetic construct
  misc_feature 1..16: note = synthetic [barcode part1]
  source 1..16: mol_type = other DNA
gataccggcgtatact

SEQ ID NO: 41285 - DNA, 16 bp, synthetic construct
  misc_feature 1..16: note = synthetic [barcode part1]
  source 1..16: mol_type = other DNA
tcctaacctctcggtt

SEQ ID NO: 41286 - DNA, 16 bp, synthetic construct
  misc_feature 1..16: note = synthetic [barcode part1]
  source 1..16: mol_type = other DNA
acacgagacaagagtg

SEQ ID NO: 41287 - DNA, 16 bp, synthetic construct
  misc_feature 1..16: note = synthetic [barcode part1]
  source 1..16: mol_type = other DNA
gtactacgtctgcctg

SEQ ID NO: 41288 - DNA, 16 bp, synthetic construct
  misc_feature 1..16: note = synthetic [barcode part1]
  source 1..16: mol_type = other DNA
cctgtcacgtattaac

SEQ ID NO: 41289 - DNA, 16 bp, synthetic construct
  misc_feature 1..16: note = synthetic [barcode part1]
  source 1..16: mol_type = other DNA
cctcctagtaagacag

SEQ ID NO: 41290 - DNA, 16 bp, synthetic construct
  misc_feature 1..16: note = synthetic [barcode part1]
  source 1..16: mol_type = other DNA
cacaccgtcaatctcg

SEQ ID NO: 41291 - DNA, 16 bp, synthetic construct
  misc_feature 1..16: note = synthetic [barcode part1]
  source 1..16: mol_type = other DNA
tctcagttcaggtact

SEQ ID NO: 41292 - DNA, 16 bp, synthetic construct
  misc_feature 1..16: note = synthetic [barcode part1]
  source 1..16: mol_type = other DNA
ttgatcttcgccactc

SEQ ID NO: 41293 - DNA, 16 bp, synthetic construct
  misc_feature 1..16: note = synthetic [barcode part1]
  source 1..16: mol_type = other DNA
tggtgccgcaatattg

SEQ ID NO: 41294 - DNA, 16 bp, synthetic construct
  misc_feature 1..16: note = synthetic [barcode part1]
  source 1..16: mol_type = other DNA
tacggtattcaaggcc

SEQ ID NO: 41295 - DNA, 16 bp, synthetic construct
  misc_feature 1..16: note = synthetic [barcode part1]
  source 1..16: mol_type = other DNA
caccactctcaacttc

SEQ ID NO: 41296 - DNA, 16 bp, synthetic construct
  misc_feature 1..16: note = synthetic [barcode part1]
  source 1..16: mol_type = other DNA
ccaagtgcaccactct

SEQ ID NO: 41297 - DNA, 16 bp, synthetic construct
  misc_feature 1..16: note = synthetic [barcode part1]
  source 1..16: mol_type = other DNA
tataatacgtccgcct

SEQ ID NO: 41298 - DNA, 16 bp, synthetic construct
  misc_feature 1..16: note = synthetic [barcode part1]
  source 1..16: mol_type = other DNA
tctgaggagaagaggt

SEQ ID NO: 41299 - DNA, 16 bp, synthetic construct
  misc_feature 1..16: note = synthetic [barcode part1]
  source 1..16: mol_type = other DNA
acgcctgtctatcacg

SEQ ID NO: 41300 - DNA, 16 bp, synthetic construct
  misc_feature 1..16: note = synthetic [barcode part1]
  source 1..16: mol_type = other DNA
accgaatatccttacc

SEQ ID NO: 41301 - DNA, 16 bp, synthetic construct
  misc_feature 1..16: note = synthetic [barcode part1]
  source 1..16: mol_type = other DNA
gaggaacacgaagtac

SEQ ID NO: 41302 - DNA, 16 bp, synthetic construct
  misc_feature 1..16: note = synthetic [barcode part1]
  source 1..16: mol_type = other DNA
tctcaccttcaggcag

SEQ ID NO: 41303 - DNA, 16 bp, synthetic construct
  misc_feature 1..16: note = synthetic [barcode part1]
  source 1..16: mol_type = other DNA
ccttggcactattcct

SEQ ID NO: 41304 - DNA, 16 bp, synthetic construct
  misc_feature 1..16: note = synthetic [barcode part1]
  source 1..16: mol_type = other DNA
cactagtattgcgcag

SEQ ID NO: 41305 - DNA, 16 bp, synthetic construct
  misc_feature 1..16: note = synthetic [barcode part1]
  source 1..16: mol_type = other DNA
cgatcgatacggtact

SEQ ID NO: 41306 - DNA, 16 bp, synthetic construct
  misc_feature 1..16: note = synthetic [barcode part1]
  source 1..16: mol_type = other DNA
caattggaccaatcgc

SEQ ID NO: 41307 - DNA, 16 bp, synthetic construct
  misc_feature 1..16: note = synthetic [barcode part1]
  source 1..16: mol_type = other DNA
tcgtgaacggacttac

SEQ ID NO: 41308 - DNA, 16 bp, synthetic construct
  misc_feature 1..16: note = synthetic [barcode part1]
  source 1..16: mol_type = other DNA
tgaacgtgtcacctcc

SEQ ID NO: 41309 - DNA, 16 bp, synthetic construct
  misc_feature 1..16: note = synthetic [barcode part1]
  source 1..16: mol_type = other DNA
gacagtgacgaacctg

SEQ ID NO: 41310 - DNA, 16 bp, synthetic construct
  misc_feature 1..16: note = synthetic [barcode part1]
  source 1..16: mol_type = other DNA
aggagtaatagtccgt

SEQ ID NO: 41311 - DNA, 16 bp, synthetic construct
  misc_feature 1..16: note = synthetic [barcode part1]
  source 1..16: mol_type = other DNA
cgacctggaacgtaag

SEQ ID NO: 41312 - DNA, 16 bp, synthetic construct
  misc_feature 1..16: note = synthetic [barcode part1]
  source 1..16: mol_type = other DNA
cctgccacaatcttct

SEQ ID NO: 41313 - DNA, 16 bp, synthetic construct
  misc_feature 1..16: note = synthetic [barcode part1]
  source 1..16: mol_type = other DNA
cactgtaatacgtgcg

SEQ ID NO: 41314 - DNA, 16 bp, synthetic construct
  misc_feature 1..16: note = synthetic [barcode part1]
  source 1..16: mol_type = other DNA
gagtacgtaatagtcg

SEQ ID NO: 41315 - DNA, 16 bp, synthetic construct
  misc_feature 1..16: note = synthetic [barcode part1]
  source 1..16: mol_type = other DNA
gataccgtagtcggtt

SEQ ID NO: 41316 - DNA, 16 bp, synthetic construct
  misc_feature 1..16: note = synthetic [barcode part1]
  source 1..16: mol_type = other DNA
acggttatcggccttc

SEQ ID NO: 41317 - DNA, 16 bp, synthetic construct
  misc_feature 1..16: note = synthetic [barcode part1]
  source 1..16: mol_type = other DNA
gccagtataaggaact

SEQ ID NO: 41318 - DNA, 16 bp, synthetic construct
  misc_feature 1..16: note = synthetic [barcode part1]
  source 1..16: mol_type = other DNA
ttcacagacgaacctg

SEQ ID NO: 41319 - DNA, 16 bp, synthetic construct
  misc_feature 1..16: note = synthetic [barcode part1]
  source 1..16: mol_type = other DNA
gtcgtaagttctaggc

SEQ ID NO: 41320 - DNA, 16 bp, synthetic construct
  misc_feature 1..16: note = synthetic [barcode part1]
  source 1..16: mol_type = other DNA
agtcagtaattccggc

SEQ ID NO: 41321 - DNA, 16 bp, synthetic construct
  misc_feature 1..16: note = synthetic [barcode part1]
  source 1..16: mol_type = other DNA
cgacgtcaggtaagtg

SEQ ID NO: 41322 - DNA, 16 bp, synthetic construct
  misc_feature 1..16: note = synthetic [barcode part1]
  source 1..16: mol_type = other DNA
cacagtagatagacac

SEQ ID NO: 41323 - DNA, 16 bp, synthetic construct
  misc_feature 1..16: note = synthetic [barcode part1]
  source 1..16: mol_type = other DNA
aggaggtctatcactc

SEQ ID NO: 41324 - DNA, 16 bp, synthetic construct
  misc_feature 1..16: note = synthetic [barcode part1]
  source 1..16: mol_type = other DNA
tgaaggcgtggtctag

SEQ ID NO: 41325 - DNA, 16 bp, synthetic construct
  misc_feature 1..16: note = synthetic [barcode part1]
  source 1..16: mol_type = other DNA
gcacgtaagtcgatct

SEQ ID NO: 41326 - DNA, 16 bp, synthetic construct
  misc_feature 1..16: note = synthetic [barcode part1]
  source 1..16: mol_type = other DNA
taacgacttccgcacc

SEQ ID NO: 41327 - DNA, 16 bp, synthetic construct
  misc_feature 1..16: note = synthetic [barcode part1]
  source 1..16: mol_type = other DNA
tcctgtaaccgtcggt

SEQ ID NO: 41328 - DNA, 16 bp, synthetic construct
  misc_feature 1..16: note = synthetic [barcode part1]
  source 1..16: mol_type = other DNA
tggcggttgataatcc

SEQ ID NO: 41329 - DNA, 16 bp, synthetic construct
  misc_feature 1..16: note = synthetic [barcode part1]
  source 1..16: mol_type = other DNA
atccgagttcgaacgt

SEQ ID NO: 41330 - DNA, 16 bp, synthetic construct
  misc_feature 1..16: note = synthetic [barcode part1]
  source 1..16: mol_type = other DNA
tgtcctataagtgcct

SEQ ID NO: 41331 - DNA, 16 bp, synthetic construct
  misc_feature 1..16: note = synthetic [barcode part1]
  source 1..16: mol_type = other DNA
tcgtgtctgtcaggtc

SEQ ID NO: 41332 - DNA, 16 bp, synthetic construct
  misc_feature 1..16: note = synthetic [barcode part1]
  source 1..16: mol_type = other DNA
aaccgataacctcgac

SEQ ID NO: 41333 - DNA, 16 bp, synthetic construct
  misc_feature 1..16: note = synthetic [barcode part1]
  source 1..16: mol_type = other DNA
actcacctactcgttc

SEQ ID NO: 41334 - DNA, 16 bp, synthetic construct
  misc_feature 1..16: note = synthetic [barcode part1]
  source 1..16: mol_type = other DNA
agtggagaattcgtac

SEQ ID NO: 41335 - DNA, 16 bp, synthetic construct
  misc_feature 1..16: note = synthetic [barcode part1]
  source 1..16: mol_type = other DNA
caaggtctctctctct

SEQ ID NO: 41336 - DNA, 16 bp, synthetic construct
  misc_feature 1..16: note = synthetic [barcode part1]
  source 1..16: mol_type = other DNA
aacctagtacgtcttc

SEQ ID NO: 41337 - DNA, 16 bp, synthetic construct
  misc_feature 1..16: note = synthetic [barcode part1]
  source 1..16: mol_type = other DNA
tgtccgtagacaagtc

SEQ ID NO: 41338 - DNA, 16 bp, synthetic construct
  misc_feature 1..16: note = synthetic [barcode part1]
  source 1..16: mol_type = other DNA
gttccaacacagtgtg

SEQ ID NO: 41339 - DNA, 16 bp, synthetic construct
  misc_feature 1..16: note = synthetic [barcode part1]
  source 1..16: mol_type = other DNA
gcaactgcctcctagt

SEQ ID NO: 41340 - DNA, 16 bp, synthetic construct
  misc_feature 1..16: note = synthetic [barcode part1]
  source 1..16: mol_type = other DNA
aggactctgtctatct

SEQ ID NO: 41341 - DNA, 16 bp, synthetic construct
  misc_feature 1..16: note = synthetic [barcode part1]
  source 1..16: mol_type = other DNA
tgttcttcacacctcg

SEQ ID NO: 41342 - DNA, 16 bp, synthetic construct
  misc_feature 1..16: note = synthetic [barcode part1]
  source 1..16: mol_type = other DNA
caacagtaccactgac

SEQ ID NO: 41343 - DNA, 16 bp, synthetic construct
  misc_feature 1..16: note = synthetic [barcode part1]
  source 1..16: mol_type = other DNA
gttaggtccgtactcc

SEQ ID NO: 41344 - DNA, 16 bp, synthetic construct
  misc_feature 1..16: note = synthetic [barcode part1]
  source 1..16: mol_type = other DNA
cagacgaccgtgatag

SEQ ID NO: 41345 - DNA, 16 bp, synthetic construct
  misc_feature 1..16: note = synthetic [barcode part1]
  source 1..16: mol_type = other DNA
agagaattgtctcgcc

SEQ ID NO: 41346 - DNA, 16 bp, synthetic construct
  misc_feature 1..16: note = synthetic [barcode part1]
  source 1..16: mol_type = other DNA
tagtaaccgacggtct

SEQ ID NO: 41347 - DNA, 16 bp, synthetic construct
  misc_feature 1..16: note = synthetic [barcode part1]
  source 1..16: mol_type = other DNA
ttattcggcaggcaac

SEQ ID NO: 41348 - DNA, 16 bp, synthetic construct
  misc_feature 1..16: note = synthetic [barcode part1]
  source 1..16: mol_type = other DNA
cggtagacggatactg

SEQ ID NO: 41349 - DNA, 16 bp, synthetic construct
  misc_feature 1..16: note = synthetic [barcode part1]
  source 1..16: mol_type = other DNA
caccggttctcgattg

SEQ ID NO: 41350 - DNA, 16 bp, synthetic construct
  misc_feature 1..16: note = synthetic [barcode part1]
  source 1..16: mol_type = other DNA
ttgtgttagacacggc

SEQ ID NO: 41351 - DNA, 16 bp, synthetic construct
  misc_feature 1..16: note = synthetic [barcode part1]
  source 1..16: mol_type = other DNA
ttcgcgtactactaac

SEQ ID NO: 41352 - DNA, 16 bp, synthetic construct
  misc_feature 1..16: note = synthetic [barcode part1]
  source 1..16: mol_type = other DNA
cgaaccagtacttctt

SEQ ID NO: 41353 - DNA, 16 bp, synthetic construct
  misc_feature 1..16: note = synthetic [barcode part1]
  source 1..16: mol_type = other DNA
gcgactcctcaataag

SEQ ID NO: 41354 - DNA, 16 bp, synthetic construct
  misc_feature 1..16: note = synthetic [barcode part1]
  source 1..16: mol_type = other DNA
actgccgaagacgtag

SEQ ID NO: 41355 - DNA, 16 bp, synthetic construct
  misc_feature 1..16: note = synthetic [barcode part1]
  source 1..16: mol_type = other DNA
ttgacacagaactgag

SEQ ID NO: 41356 - DNA, 16 bp, synthetic construct
  misc_feature 1..16: note = synthetic [barcode part1]
  source 1..16: mol_type = other DNA
tagatagatcctggag

SEQ ID NO: 41357 - DNA, 16 bp, synthetic construct
  misc_feature 1..16: note = synthetic [barcode part1]
  source 1..16: mol_type = other DNA
tcaataagtgaggacc

SEQ ID NO: 41358 - DNA, 16 bp, synthetic construct
  misc_feature 1..16: note = synthetic [barcode part1]
  source 1..16: mol_type = other DNA
gcgcgtgattgcaatt

SEQ ID NO: 41359 - DNA, 16 bp, synthetic construct
  misc_feature 1..16: note = synthetic [barcode part1]
  source 1..16: mol_type = other DNA
gcctgtgacacttaag

SEQ ID NO: 41360 - DNA, 16 bp, synthetic construct
  misc_feature 1..16: note = synthetic [barcode part1]
  source 1..16: mol_type = other DNA
cctagatagtaacgag

SEQ ID NO: 41361 - DNA, 16 bp, synthetic construct
  misc_feature 1..16: note = synthetic [barcode part1]
  source 1..16: mol_type = other DNA
gaggactaccaacgtg

SEQ ID NO: 41362 - DNA, 16 bp, synthetic construct
  misc_feature 1..16: note = synthetic [barcode part1]
  source 1..16: mol_type = other DNA
ttcagttaccggtgcc

SEQ ID NO: 41363 - DNA, 16 bp, synthetic construct
  misc_feature 1..16: note = synthetic [barcode part1]
  source 1..16: mol_type = other DNA
atctgactgtgtcttg

SEQ ID NO: 41364 - DNA, 16 bp, synthetic construct
  misc_feature 1..16: note = synthetic [barcode part1]
  source 1..16: mol_type = other DNA
gaactcgagaccaggt

SEQ ID NO: 41365 - DNA, 16 bp, synthetic construct
  misc_feature 1..16: note = synthetic [barcode part1]
  source 1..16: mol_type = other DNA
aaggacggaattatcc

SEQ ID NO: 41366 - DNA, 16 bp, synthetic construct
  misc_feature 1..16: note = synthetic [barcode part1]
  source 1..16: mol_type = other DNA
gatacctcactccgtg

SEQ ID NO: 41367 - DNA, 16 bp, synthetic construct
  misc_feature 1..16: note = synthetic [barcode part1]
  source 1..16: mol_type = other DNA
tatagttctcttggcg

SEQ ID NO: 41368 - DNA, 16 bp, synthetic construct
  misc_feature 1..16: note = synthetic [barcode part1]
  source 1..16: mol_type = other DNA
gaattacgcctgacgt

SEQ ID NO: 41369 - DNA, 16 bp, synthetic construct
  misc_feature 1..16: note = synthetic [barcode part1]
  source 1..16: mol_type = other DNA
ttacctgcacctacct

SEQ ID NO: 41370 - DNA, 16 bp, synthetic construct
  misc_feature 1..16: note = synthetic [barcode part1]
  source 1..16: mol_type = other DNA
acgttaacctctggtt

SEQ ID NO: 41371 - DNA, 16 bp, synthetic construct
  misc_feature 1..16: note = synthetic [barcode part1]
  source 1..16: mol_type = other DNA
tgccactatccggatc

SEQ ID NO: 41372 - DNA, 16 bp, synthetic construct
  misc_feature 1..16: note = synthetic [barcode part1]
  source 1..16: mol_type = other DNA
tgtattcgtgatctgc

SEQ ID NO: 41373 - DNA, 16 bp, synthetic construct
  misc_feature 1..16: note = synthetic [barcode part1]
  source 1..16: mol_type = other DNA
tccgatccacaactgc

SEQ ID NO: 41374 - DNA, 16 bp, synthetic construct
  misc_feature 1..16: note = synthetic [barcode part1]
  source 1..16: mol_type = other DNA
taagacctggcactac

SEQ ID NO: 41375 - DNA, 16 bp, synthetic construct
  misc_feature 1..16: note = synthetic [barcode part1]
  source 1..16: mol_type = other DNA
cacggaatctctgtag

SEQ ID NO: 41376 - DNA, 16 bp, synthetic construct
  misc_feature 1..16: note = synthetic [barcode part1]
  source 1..16: mol_type = other DNA
tatattgccagaggag

SEQ ID NO: 41377 - DNA, 16 bp, synthetic construct
  misc_feature 1..16: note = synthetic [barcode part1]
  source 1..16: mol_type = other DNA
cgagagtgacagttcg

SEQ ID NO: 41378 - DNA, 16 bp, synthetic construct
  misc_feature 1..16: note = synthetic [barcode part1]
  source 1..16: mol_type = other DNA
gcagaaccgaatattg

SEQ ID NO: 41379 - DNA, 16 bp, synthetic construct
  misc_feature 1..16: note = synthetic [barcode part1]
  source 1..16: mol_type = other DNA
gttgacaacaggatac

SEQ ID NO: 41380 - DNA, 16 bp, synthetic construct
  misc_feature 1..16: note = synthetic [barcode part1]
  source 1..16: mol_type = other DNA
gcctgactgtgttctg

SEQ ID NO: 41381 - DNA, 16 bp, synthetic construct
  misc_feature 1..16: note = synthetic [barcode part1]
  source 1..16: mol_type = other DNA
agagagtgtccttcgt

SEQ ID NO: 41382 - DNA, 16 bp, synthetic construct
  misc_feature 1..16: note = synthetic [barcode part1]
  source 1..16: mol_type = other DNA
gaatctcgattccgag

SEQ ID NO: 41383 - DNA, 16 bp, synthetic construct
  misc_feature 1..16: note = synthetic [barcode part1]
  source 1..16: mol_type = other DNA
gaatcacggtgacttc

SEQ ID NO: 41384 - DNA, 16 bp, synthetic construct
  misc_feature 1..16: note = synthetic [barcode part1]
  source 1..16: mol_type = other DNA
gagacgtacacagaag

SEQ ID NO: 41385 - DNA, 16 bp, synthetic construct
  misc_feature 1..16: note = synthetic [barcode part1]
  source 1..16: mol_type = other DNA
gtgacttgaactgtcg

SEQ ID NO: 41386 - DNA, 16 bp, synthetic construct
  misc_feature 1..16: note = synthetic [barcode part1]
  source 1..16: mol_type = other DNA
tactgacactgtgcag

SEQ ID NO: 41387 - DNA, 16 bp, synthetic construct
  misc_feature 1..16: note = synthetic [barcode part1]
  source 1..16: mol_type = other DNA
agtcttcaactcacgt

SEQ ID NO: 41388 - DNA, 16 bp, synthetic construct
  misc_feature 1..16: note = synthetic [barcode part1]
  source 1..16: mol_type = other DNA
ttatccactcactcgc

SEQ ID NO: 41389 - DNA, 16 bp, synthetic construct
  misc_feature 1..16: note = synthetic [barcode part1]
  source 1..16: mol_type = other DNA
ccacgaactatacggt

SEQ ID NO: 41390 - DNA, 16 bp, synthetic construct
  misc_feature 1..16: note = synthetic [barcode part1]
  source 1..16: mol_type = other DNA
tgcctgtagtaagtgc

SEQ ID NO: 41391 - DNA, 16 bp, synthetic construct
  misc_feature 1..16: note = synthetic [barcode part1]
  source 1..16: mol_type = other DNA
accggtacaagtctgt

SEQ ID NO: 41392 - DNA, 16 bp, synthetic construct
  misc_feature 1..16: note = synthetic [barcode part1]
  source 1..16: mol_type = other DNA
gtcacgcgagagttag

SEQ ID NO: 41393 - DNA, 16 bp, synthetic construct
  misc_feature 1..16: note = synthetic [barcode part1]
  source 1..16: mol_type = other DNA
cctgatctatagtcac

SEQ ID NO: 41394 - DNA, 16 bp, synthetic construct
  misc_feature 1..16: note = synthetic [barcode part1]
  source 1..16: mol_type = other DNA
gcgtaacagttgaagt

SEQ ID NO: 41395 - DNA, 16 bp, synthetic construct
  misc_feature 1..16: note = synthetic [barcode part1]
  source 1..16: mol_type = other DNA
gatcggtgcgtgtatt

SEQ ID NO: 41396 - DNA, 16 bp, synthetic construct
  misc_feature 1..16: note = synthetic [barcode part1]
  source 1..16: mol_type = other DNA
atcttcaggatcactc

SEQ ID NO: 41397 - DNA, 16 bp, synthetic construct
  misc_feature 1..16: note = synthetic [barcode part1]
  source 1..16: mol_type = other DNA
tcaactcggactgagt

SEQ ID NO: 41398 - DNA, 16 bp, synthetic construct
  misc_feature 1..16: note = synthetic [barcode part1]
  source 1..16: mol_type = other DNA
ttctcgagactctcct

SEQ ID NO: 41399 - DNA, 16 bp, synthetic construct
  misc_feature 1..16: note = synthetic [barcode part1]
  source 1..16: mol_type = other DNA
cgaggttgtactacgt

SEQ ID NO: 41400 - DNA, 16 bp, synthetic construct
  misc_feature 1..16: note = synthetic [barcode part1]
  source 1..16: mol_type = other DNA
gcaactaactacgtgc

SEQ ID NO: 41401 - DNA, 16 bp, synthetic construct
  misc_feature 1..16: note = synthetic [barcode part1]
  source 1..16: mol_type = other DNA
cgttaggtggatcgtt

SEQ ID NO: 41402 - DNA, 16 bp, synthetic construct
  misc_feature 1..16: note = synthetic [barcode part1]
  source 1..16: mol_type = other DNA
gagtcaccactgagtt

SEQ ID NO: 41403 - DNA, 16 bp, synthetic construct
  misc_feature 1..16: note = synthetic [barcode part1]
  source 1..16: mol_type = other DNA
ataccagtgattcctc

SEQ ID NO: 41404 - DNA, 16 bp, synthetic construct
  misc_feature 1..16: note = synthetic [barcode part1]
  source 1..16: mol_type = other DNA
gtacaactgtgcgatc

SEQ ID NO: 41405 - DNA, 16 bp, synthetic construct
  misc_feature 1..16: note = synthetic [barcode part1]
  source 1..16: mol_type = other DNA
ccttacctgaacaccg

SEQ ID NO: 41406 - DNA, 16 bp, synthetic construct
  misc_feature 1..16: note = synthetic [barcode part1]
  source 1..16: mol_type = other DNA
gacaatagtgacggag

SEQ ID NO: 41407 - DNA, 16 bp, synthetic construct
  misc_feature 1..16: note = synthetic [barcode part1]
  source 1..16: mol_type = other DNA
tgtcggactgttaggt

SEQ ID NO: 41408 - DNA, 16 bp, synthetic construct
  misc_feature 1..16: note = synthetic [barcode part1]
  source 1..16: mol_type = other DNA
ttgacttgtgattgcc

SEQ ID NO: 41409 - DNA, 16 bp, synthetic construct
  misc_feature 1..16: note = synthetic [barcode part1]
  source 1..16: mol_type = other DNA
cgatcctgcgttagtc

SEQ ID NO: 41410 - DNA, 16 bp, synthetic construct
  misc_feature 1..16: note = synthetic [barcode part1]
  source 1..16: mol_type = other DNA
gtacggcagtcaagac

SEQ ID NO: 41411 - DNA, 16 bp, synthetic construct
  misc_feature 1..16: note = synthetic [barcode part1]
  source 1..16: mol_type = other DNA
attctgcacagtcact

SEQ ID NO: 41412 - DNA, 16 bp, synthetic construct
  misc_feature 1..16: note = synthetic [barcode part1]
  source 1..16: mol_type = other DNA
cacttgtcaccacggt

SEQ ID NO: 41413 - DNA, 16 bp, synthetic construct
  misc_feature 1..16: note = synthetic [barcode part1]
  source 1..16: mol_type = other DNA
gtcgacggtaattacc

SEQ ID NO: 41414 - DNA, 16 bp, synthetic construct
  misc_feature 1..16: note = synthetic [barcode part1]
  source 1..16: mol_type = other DNA
tattgccgtccaagtt

SEQ ID NO: 41415 - DNA, 16 bp, synthetic construct
  misc_feature 1..16: note = synthetic [barcode part1]
  source 1..16: mol_type = other DNA
tcctaatcgtaccggc

SEQ ID NO: 41416 - DNA, 16 bp, synthetic construct
  misc_feature 1..16: note = synthetic [barcode part1]
  source 1..16: mol_type = other DNA
agtgaccagttaccgt

SEQ ID NO: 41417 - DNA, 16 bp, synthetic construct
  misc_feature 1..16: note = synthetic [barcode part1]
  source 1..16: mol_type = other DNA
tgtggagaccagatcg

SEQ ID NO: 41418 - DNA, 16 bp, synthetic construct
  misc_feature 1..16: note = synthetic [barcode part1]
  source 1..16: mol_type = other DNA
tggatctcgtctgaag

SEQ ID NO: 41419 - DNA, 16 bp, synthetic construct
  misc_feature 1..16: note = synthetic [barcode part1]
  source 1..16: mol_type = other DNA
tatccttcgacgattg

SEQ ID NO: 41420 - DNA, 16 bp, synthetic construct
  misc_feature 1..16: note = synthetic [barcode part1]
  source 1..16: mol_type = other DNA
tacctaggatcacacg

SEQ ID NO: 41421 - DNA, 16 bp, synthetic construct
  misc_feature 1..16: note = synthetic [barcode part1]
  source 1..16: mol_type = other DNA
gataacctcaggtcac

SEQ ID NO: 41422 - DNA, 16 bp, synthetic construct
  misc_feature 1..16: note = synthetic [barcode part1]
  source 1..16: mol_type = other DNA
aagactcacctcagac

SEQ ID NO: 41423 - DNA, 16 bp, synthetic construct
  misc_feature 1..16: note = synthetic [barcode part1]
  source 1..16: mol_type = other DNA
acagactcacaggttc

SEQ ID NO: 41424 - DNA, 16 bp, synthetic construct
  misc_feature 1..16: note = synthetic [barcode part1]
  source 1..16: mol_type = other DNA
atcactccaggtactt

SEQ ID NO: 41425 - DNA, 16 bp, synthetic construct
  misc_feature 1..16: note = synthetic [barcode part1]
  source 1..16: mol_type = other DNA
atacgacctaactctc

SEQ ID NO: 41426 - DNA, 16 bp, synthetic construct
  misc_feature 1..16: note = synthetic [barcode part1]
  source 1..16: mol_type = other DNA
attaggatcggtcctg

SEQ ID NO: 41427 - DNA, 16 bp, synthetic construct
  misc_feature 1..16: note = synthetic [barcode part1]
  source 1..16: mol_type = other DNA
ccagtagagtggtctt

SEQ ID NO: 41428 - DNA, 16 bp, synthetic construct
  misc_feature 1..16: note = synthetic [barcode part1]
  source 1..16: mol_type = other DNA
tggactagagagtatc

SEQ ID NO: 41429 - DNA, 16 bp, synthetic construct
  misc_feature 1..16: note = synthetic [barcode part1]
  source 1..16: mol_type = other DNA
aaggtgccaatctaag

SEQ ID NO: 41430 - DNA, 16 bp, synthetic construct
  misc_feature 1..16: note = synthetic [barcode part1]
  source 1..16: mol_type = other DNA
atagagtggcgtccag

SEQ ID NO: 41431 - DNA, 16 bp, synthetic construct
  misc_feature 1..16: note = synthetic [barcode part1]
  source 1..16: mol_type = other DNA
gttacttggattcacc

SEQ ID NO: 41432 - DNA, 16 bp, synthetic construct
  misc_feature 1..16: note = synthetic [barcode part1]
  source 1..16: mol_type = other DNA
atatcaacggtctctc

SEQ ID NO: 41433 - DNA, 16 bp, synthetic construct
  misc_feature 1..16: note = synthetic [barcode part1]
  source 1..16: mol_type = other DNA
ccggcgattatatctt

SEQ ID NO: 41434 - DNA, 16 bp, synthetic construct
  misc_feature 1..16: note = synthetic [barcode part1]
  source 1..16: mol_type = other DNA
cgttggcgattaggag

SEQ ID NO: 41435 - DNA, 16 bp, synthetic construct
  misc_feature 1..16: note = synthetic [barcode part1]
  source 1..16: mol_type = other DNA
attgataacaaggcgc

SEQ ID NO: 41436 - DNA, 16 bp, synthetic construct
  misc_feature 1..16: note = synthetic [barcode part1]
  source 1..16: mol_type = other DNA
caccaagtctacgcct

SEQ ID NO: 41437 - DNA, 16 bp, synthetic construct
  misc_feature 1..16: note = synthetic [barcode part1]
  source 1..16: mol_type = other DNA
acaaccaccggtcttc

SEQ ID NO: 41438 - DNA, 16 bp, synthetic construct
  misc_feature 1..16: note = synthetic [barcode part1]
  source 1..16: mol_type = other DNA
cacgttcagtaattcc

SEQ ID NO: 41439 - DNA, 16 bp, synthetic construct
  misc_feature 1..16: note = synthetic [barcode part1]
  source 1..16: mol_type = other DNA
gtgttagaactcgtgc

SEQ ID NO: 41440 - DNA, 16 bp, synthetic construct
  misc_feature 1..16: note = synthetic [barcode part1]
  source 1..16: mol_type = other DNA
aacttggatcgttggc

SEQ ID NO: 41441 - DNA, 16 bp, synthetic construct
  misc_feature 1..16: note = synthetic [barcode part1]
  source 1..16: mol_type = other DNA
gcgtggtgttgatatc

SEQ ID NO: 41442 - DNA, 16 bp, synthetic construct
  misc_feature 1..16: note = synthetic [barcode part1]
  source 1..16: mol_type = other DNA
gtatagaggacgtgag

SEQ ID NO: 41443 - DNA, 16 bp, synthetic construct
  misc_feature 1..16: note = synthetic [barcode part1]
  source 1..16: mol_type = other DNA
gtactagtacgagtcc

SEQ ID NO: 41444 - DNA, 16 bp, synthetic construct
  misc_feature 1..16: note = synthetic [barcode part1]
  source 1..16: mol_type = other DNA
gtactgagaggatcgc

SEQ ID NO: 41445 - DNA, 16 bp, synthetic construct
  misc_feature 1..16: note = synthetic [barcode part1]
  source 1..16: mol_type = other DNA
gcctggataggacaac

SEQ ID NO: 41446 - DNA, 16 bp, synthetic construct
  misc_feature 1..16: note = synthetic [barcode part1]
  source 1..16: mol_type = other DNA
ccgtccaactctaggt

SEQ ID NO: 41447 - DNA, 16 bp, synthetic construct
  misc_feature 1..16: note = synthetic [barcode part1]
  source 1..16: mol_type = other DNA
tcctagacctagagtg

SEQ ID NO: 41448 - DNA, 16 bp, synthetic construct
  misc_feature 1..16: note = synthetic [barcode part1]
  source 1..16: mol_type = other DNA
tggtagttgcgtcctc

SEQ ID NO: 41449 - DNA, 16 bp, synthetic construct
  misc_feature 1..16: note = synthetic [barcode part1]
  source 1..16: mol_type = other DNA
cgtcaataactggaag

SEQ ID NO: 41450 - DNA, 16 bp, synthetic construct
  misc_feature 1..16: note = synthetic [barcode part1]
  source 1..16: mol_type = other DNA
cggcggttgtactctt

SEQ ID NO: 41451 - DNA, 16 bp, synthetic construct
  misc_feature 1..16: note = synthetic [barcode part1]
  source 1..16: mol_type = other DNA
tgagagagtatcgact

SEQ ID NO: 41452 - DNA, 16 bp, synthetic construct
  misc_feature 1..16: note = synthetic [barcode part1]
  source 1..16: mol_type = other DNA
aatccaggccaagttc

SEQ ID NO: 41453 - DNA, 16 bp, synthetic construct
  misc_feature 1..16: note = synthetic [barcode part1]
  source 1..16: mol_type = other DNA
cgtatagacggttacc

SEQ ID NO: 41454 - DNA, 16 bp, synthetic construct
  misc_feature 1..16: note = synthetic [barcode part1]
  source 1..16: mol_type = other DNA
tataagtggcactcgc

SEQ ID NO: 41455 - DNA, 16 bp, synthetic construct
  misc_feature 1..16: note = synthetic [barcode part1]
  source 1..16: mol_type = other DNA
accgacgttatcgtcc

SEQ ID NO: 41456 - DNA, 16 bp, synthetic construct
  misc_feature 1..16: note = synthetic [barcode part1]
  source 1..16: mol_type = other DNA
aagtatccaagacggt

SEQ ID NO: 41457 - DNA, 16 bp, synthetic construct
  misc_feature 1..16: note = synthetic [barcode part1]
  source 1..16: mol_type = other DNA
gcgtggcagagaatct

SEQ ID NO: 41458 - DNA, 16 bp, synthetic construct
  misc_feature 1..16: note = synthetic [barcode part1]
  source 1..16: mol_type = other DNA
gtcggacttatattcc

SEQ ID NO: 41459 - DNA, 16 bp, synthetic construct
  misc_feature 1..16: note = synthetic [barcode part1]
  source 1..16: mol_type = other DNA
cgcaacgaggtaagtc

SEQ ID NO: 41460 - DNA, 16 bp, synthetic construct
  misc_feature 1..16: note = synthetic [barcode part1]
  source 1..16: mol_type = other DNA
aagatcttggacaggt

SEQ ID NO: 41461 - DNA, 16 bp, synthetic construct
  misc_feature 1..16: note = synthetic [barcode part1]
  source 1..16: mol_type = other DNA
attccagtgatcggtg

SEQ ID NO: 41462 - DNA, 16 bp, synthetic construct
  misc_feature 1..16: note = synthetic [barcode part1]
  source 1..16: mol_type = other DNA
gaatcgtcctatatcc

SEQ ID NO: 41463 - DNA, 16 bp, synthetic construct
  misc_feature 1..16: note = synthetic [barcode part1]
  source 1..16: mol_type = other DNA
tcctcagtgcaattac

SEQ ID NO: 41464 - DNA, 16 bp, synthetic construct
  misc_feature 1..16: note = synthetic [barcode part1]
  source 1..16: mol_type = other DNA
tgatcttatcgacgtc

SEQ ID NO: 41465 - DNA, 16 bp, synthetic construct
  misc_feature 1..16: note = synthetic [barcode part1]
  source 1..16: mol_type = other DNA
tgtctgtactccaagt

SEQ ID NO: 41466 - DNA, 16 bp, synthetic construct
  misc_feature 1..16: note = synthetic [barcode part1]
  source 1..16: mol_type = other DNA
agactctaggatcctg

SEQ ID NO: 41467 - DNA, 16 bp, synthetic construct
  misc_feature 1..16: note = synthetic [barcode part1]
  source 1..16: mol_type = other DNA
tcgaacgagactcact

SEQ ID NO: 41468 - DNA, 16 bp, synthetic construct
  misc_feature 1..16: note = synthetic [barcode part1]
  source 1..16: mol_type = other DNA
tgaattgccgaaccgt

SEQ ID NO: 41469 - DNA, 16 bp, synthetic construct
  misc_feature 1..16: note = synthetic [barcode part1]
  source 1..16: mol_type = other DNA
tcactgcaatacttgc

SEQ ID NO: 41470 - DNA, 16 bp, synthetic construct
  misc_feature 1..16: note = synthetic [barcode part1]
  source 1..16: mol_type = other DNA
tggtgattcctcgcac

SEQ ID NO: 41471 - DNA, 16 bp, synthetic construct
  misc_feature 1..16: note = synthetic [barcode part1]
  source 1..16: mol_type = other DNA
aagtccttagtcgacg

SEQ ID NO: 41472 - DNA, 16 bp, synthetic construct
  misc_feature 1..16: note = synthetic [barcode part1]
  source 1..16: mol_type = other DNA
cctgtcagttgtcttc

SEQ ID NO: 41473 - DNA, 16 bp, synthetic construct
  misc_feature 1..16: note = synthetic [barcode part1]
  source 1..16: mol_type = other DNA
cgattctcagtgtgtt

SEQ ID NO: 41474 - DNA, 16 bp, synthetic construct
  misc_feature 1..16: note = synthetic [barcode part1]
  source 1..16: mol_type = other DNA
tacgtctgacgattct

SEQ ID NO: 41475 - DNA, 16 bp, synthetic construct
  misc_feature 1..16: note = synthetic [barcode part1]
  source 1..16: mol_type = other DNA
acacgttcttgatctg

SEQ ID NO: 41476 - DNA, 16 bp, synthetic construct
  misc_feature 1..16: note = synthetic [barcode part1]
  source 1..16: mol_type = other DNA
tataggaccttgcgtg

SEQ ID NO: 41477 - DNA, 16 bp, synthetic construct
  misc_feature 1..16: note = synthetic [barcode part1]
  source 1..16: mol_type = other DNA
tcaaggtgacactacc

SEQ ID NO: 41478 - DNA, 16 bp, synthetic construct
  misc_feature 1..16: note = synthetic [barcode part1]
  source 1..16: mol_type = other DNA
cgccttggataaggtt

SEQ ID NO: 41479 - DNA, 16 bp, synthetic construct
  misc_feature 1..16: note = synthetic [barcode part1]
  source 1..16: mol_type = other DNA
cgtatagtacctcgcc

SEQ ID NO: 41480 - DNA, 16 bp, synthetic construct
  misc_feature 1..16: note = synthetic [barcode part1]
  source 1..16: mol_type = other DNA
ttggtgaccacgtctc

SEQ ID NO: 41481 - DNA, 16 bp, synthetic construct
  misc_feature 1..16: note = synthetic [barcode part1]
  source 1..16: mol_type = other DNA
gcagtgaacttaggcg

SEQ ID NO: 41482 - DNA, 16 bp, synthetic construct
  misc_feature 1..16: note = synthetic [barcode part1]
  source 1..16: mol_type = other DNA
ccgcactaagttactt

SEQ ID NO: 41483 - DNA, 16 bp, synthetic construct
  misc_feature 1..16: note = synthetic [barcode part1]
  source 1..16: mol_type = other DNA
ccgtaagtaaggaact

SEQ ID NO: 41484 - DNA, 16 bp, synthetic construct
  misc_feature 1..16: note = synthetic [barcode part1]
  source 1..16: mol_type = other DNA
agtccaggtatagagt

SEQ ID NO: 41485 - DNA, 16 bp, synthetic construct
  misc_feature 1..16: note = synthetic [barcode part1]
  source 1..16: mol_type = other DNA
ttgttcactcggaatc

SEQ ID NO: 41486 - DNA, 16 bp, synthetic construct
  misc_feature 1..16: note = synthetic [barcode part1]
  source 1..16: mol_type = other DNA
tatcacggtcggttag

SEQ ID NO: 41487 - DNA, 16 bp, synthetic construct
  misc_feature 1..16: note = synthetic [barcode part1]
  source 1..16: mol_type = other DNA
tgttcgattctgtcag

SEQ ID NO: 41488 - DNA, 16 bp, synthetic construct
  misc_feature 1..16: note = synthetic [barcode part1]
  source 1..16: mol_type = other DNA
cacacggacaaggtac

SEQ ID NO: 41489 - DNA, 16 bp, synthetic construct
  misc_feature 1..16: note = synthetic [barcode part1]
  source 1..16: mol_type = other DNA
gtacactcgttggtag

SEQ ID NO: 41490 - DNA, 16 bp, synthetic construct
  misc_feature 1..16: note = synthetic [barcode part1]
  source 1..16: mol_type = other DNA
gaggtcaatatctgag

SEQ ID NO: 41491 - DNA, 16 bp, synthetic construct
  misc_feature 1..16: note = synthetic [barcode part1]
  source 1..16: mol_type = other DNA
tagtgtaccgacgtgt

SEQ ID NO: 41492 - DNA, 16 bp, synthetic construct
  misc_feature 1..16: note = synthetic [barcode part1]
  source 1..16: mol_type = other DNA
ccacgtcctatcaggt

SEQ ID NO: 41493 - DNA, 16 bp, synthetic construct
  misc_feature 1..16: note = synthetic [barcode part1]
  source 1..16: mol_type = other DNA
cggagtatcgttactg

SEQ ID NO: 41494 - DNA, 16 bp, synthetic construct
  misc_feature 1..16: note = synthetic [barcode part1]
  source 1..16: mol_type = other DNA
accttgtgtgagacgt

SEQ ID NO: 41495 - DNA, 16 bp, synthetic construct
  misc_feature 1..16: note = synthetic [barcode part1]
  source 1..16: mol_type = other DNA
tgtgacttacgccaag

SEQ ID NO: 41496 - DNA, 16 bp, synthetic construct
  misc_feature 1..16: note = synthetic [barcode part1]
  source 1..16: mol_type = other DNA
ccttagtctaacacgt

SEQ ID NO: 41497 - DNA, 16 bp, synthetic construct
  misc_feature 1..16: note = synthetic [barcode part1]
  source 1..16: mol_type = other DNA
tacaccaatcgcgtag

SEQ ID NO: 41498 - DNA, 16 bp, synthetic construct
  misc_feature 1..16: note = synthetic [barcode part1]
  source 1..16: mol_type = other DNA
agattccggaaggaag

SEQ ID NO: 41499 - DNA, 16 bp, synthetic construct
  misc_feature 1..16: note = synthetic [barcode part1]
  source 1..16: mol_type = other DNA
tcacctcgtgtggttg

SEQ ID NO: 41500 - DNA, 16 bp, synthetic construct
  misc_feature 1..16: note = synthetic [barcode part1]
  source 1..16: mol_type = other DNA
actcggacggatatct

SEQ ID NO: 41501 - DNA, 16 bp, synthetic construct
  misc_feature 1..16: note = synthetic [barcode part1]
  source 1..16: mol_type = other DNA
gacacgatatcctcag

SEQ ID NO: 41502 - DNA, 16 bp, synthetic construct
  misc_feature 1..16: note = synthetic [barcode part1]
  source 1..16: mol_type = other DNA
gacgacctaacaactc

SEQ ID NO: 41503 - DNA, 16 bp, synthetic construct
  misc_feature 1..16: note = synthetic [barcode part1]
  source 1..16: mol_type = other DNA
caggagttccgtattg

SEQ ID NO: 41504 - DNA, 16 bp, synthetic construct
  misc_feature 1..16: note = synthetic [barcode part1]
  source 1..16: mol_type = other DNA
atccaaggacacttgc

SEQ ID NO: 41505 - DNA, 16 bp, synthetic construct
  misc_feature 1..16: note = synthetic [barcode part1]
  source 1..16: mol_type = other DNA
tggaatcgtcgtaacc

SEQ ID NO: 41506 - DNA, 16 bp, synthetic construct
  misc_feature 1..16: note = synthetic [barcode part1]
  source 1..16: mol_type = other DNA
actcgcgttaagtgtg

SEQ ID NO: 41507 - DNA, 16 bp, synthetic construct
  misc_feature 1..16: note = synthetic [barcode part1]
  source 1..16: mol_type = other DNA
acaggtcgttactctt

SEQ ID NO: 41508 - DNA, 16 bp, synthetic construct
  misc_feature 1..16: note = synthetic [barcode part1]
  source 1..16: mol_type = other DNA
tcaggacgtctgtcct

SEQ ID NO: 41509 - DNA, 16 bp, synthetic construct
  misc_feature 1..16: note = synthetic [barcode part1]
  source 1..16: mol_type = other DNA
gagagaactgagactg

SEQ ID NO: 41510 - DNA, 16 bp, synthetic construct
  misc_feature 1..16: note = synthetic [barcode part1]
  source 1..16: mol_type = other DNA
cctgcgagatacttag

SEQ ID NO: 41511 - DNA, 16 bp, synthetic construct
  misc_feature 1..16: note = synthetic [barcode part1]
  source 1..16: mol_type = other DNA
cgtacgacctgacctt

SEQ ID NO: 41512 - DNA, 16 bp, synthetic construct
  misc_feature 1..16: note = synthetic [barcode part1]
  source 1..16: mol_type = other DNA
cggccttattgcgtgt

SEQ ID NO: 41513 - DNA, 16 bp, synthetic construct
  misc_feature 1..16: note = synthetic [barcode part1]
  source 1..16: mol_type = other DNA
atccagtcagttcgag

SEQ ID NO: 41514 - DNA, 16 bp, synthetic construct
  misc_feature 1..16: note = synthetic [barcode part1]
  source 1..16: mol_type = other DNA
cctccaacgatacacc

SEQ ID NO: 41515 - DNA, 16 bp, synthetic construct
  misc_feature 1..16: note = synthetic [barcode part1]
  source 1..16: mol_type = other DNA
ttcttctgtgtcgcgt

SEQ ID NO: 41516 - DNA, 16 bp, synthetic construct
  misc_feature 1..16: note = synthetic [barcode part1]
  source 1..16: mol_type = other DNA
tcgtagacgaggagtc

SEQ ID NO: 41517 - DNA, 16 bp, synthetic construct
  misc_feature 1..16: note = synthetic [barcode part1]
  source 1..16: mol_type = other DNA
atctaggtactcaggc

SEQ ID NO: 41518 - DNA, 16 bp, synthetic construct
  misc_feature 1..16: note = synthetic [barcode part1]
  source 1..16: mol_type = other DNA
agtcgcgatatcagtc

SEQ ID NO: 41519 - DNA, 16 bp, synthetic construct
  misc_feature 1..16: note = synthetic [barcode part1]
  source 1..16: mol_type = other DNA
ttgcaccacaggaatc

SEQ ID NO: 41520 - DNA, 16 bp, synthetic construct
  misc_feature 1..16: note = synthetic [barcode part1]
  source 1..16: mol_type = other DNA
cagtcaatcctccttc

SEQ ID NO: 41521 - DNA, 16 bp, synthetic construct
  misc_feature 1..16: note = synthetic [barcode part1]
  source 1..16: mol_type = other DNA
gagtggtatattcgag

SEQ ID NO: 41522 - DNA, 16 bp, synthetic construct
  misc_feature 1..16: note = synthetic [barcode part1]
  source 1..16: mol_type = other DNA
cgcaagaacacaagag

SEQ ID NO: 41523 - DNA, 16 bp, synthetic construct
  misc_feature 1..16: note = synthetic [barcode part1]
  source 1..16: mol_type = other DNA
tcgacagtcgcgtctt

SEQ ID NO: 41524 - DNA, 16 bp, synthetic construct
  misc_feature 1..16: note = synthetic [barcode part1]
  source 1..16: mol_type = other DNA
tgaacacttggtgcac

SEQ ID NO: 41525 - DNA, 16 bp, synthetic construct
  misc_feature 1..16: note = synthetic [barcode part1]
  source 1..16: mol_type = other DNA
agtataggatagtccg

SEQ ID NO: 41526 - DNA, 16 bp, synthetic construct
  misc_feature 1..16: note = synthetic [barcode part1]
  source 1..16: mol_type = other DNA
gaactgtgtctaacgc

SEQ ID NO: 41527 - DNA, 16 bp, synthetic construct
  misc_feature 1..16: note = synthetic [barcode part1]
  source 1..16: mol_type = other DNA
cagaatcttgactggc

SEQ ID NO: 41528 - DNA, 16 bp, synthetic construct
  misc_feature 1..16: note = synthetic [barcode part1]
  source 1..16: mol_type = other DNA
acctgagatctgtggt

SEQ ID NO: 41529 - DNA, 16 bp, synthetic construct
  misc_feature 1..16: note = synthetic [barcode part1]
  source 1..16: mol_type = other DNA
acaccgaccgagtatt

SEQ ID NO: 41530 - DNA, 16 bp, synthetic construct
  misc_feature 1..16: note = synthetic [barcode part1]
  source 1..16: mol_type = other DNA
gttgtcacctcgtgtg

SEQ ID NO: 41531 - DNA, 16 bp, synthetic construct
  misc_feature 1..16: note = synthetic [barcode part1]
  source 1..16: mol_type = other DNA
cgtgagatcctatacg

SEQ ID NO: 41532 - DNA, 16 bp, synthetic construct
  misc_feature 1..16: note = synthetic [barcode part1]
  source 1..16: mol_type = other DNA
tatctcggaacggtgt

SEQ ID NO: 41533 - DNA, 16 bp, synthetic construct
  misc_feature 1..16: note = synthetic [barcode part1]
  source 1..16: mol_type = other DNA
ttgacttggtacgttc

SEQ ID NO: 41534 - DNA, 16 bp, synthetic construct
  misc_feature 1..16: note = synthetic [barcode part1]
  source 1..16: mol_type = other DNA
acaacctaagtcaccg

SEQ ID NO: 41535 - DNA, 16 bp, synthetic construct
  misc_feature 1..16: note = synthetic [barcode part1]
  source 1..16: mol_type = other DNA
acttggacaagacaac

SEQ ID NO: 41536 - DNA, 16 bp, synthetic construct
  misc_feature 1..16: note = synthetic [barcode part1]
  source 1..16: mol_type = other DNA
tcgacaatcgtatctc

SEQ ID NO: 41537 - DNA, 16 bp, synthetic construct
  misc_feature 1..16: note = synthetic [barcode part1]
  source 1..16: mol_type = other DNA
tgtatctaacgcaggc

SEQ ID NO: 41538 - DNA, 16 bp, synthetic construct
  misc_feature 1..16: note = synthetic [barcode part1]
  source 1..16: mol_type = other DNA
gattgtaccagaaggt

SEQ ID NO: 41539 - DNA, 16 bp, synthetic construct
  misc_feature 1..16: note = synthetic [barcode part1]
  source 1..16: mol_type = other DNA
ccaccttcttctagtg

SEQ ID NO: 41540 - DNA, 16 bp, synthetic construct
  misc_feature 1..16: note = synthetic [barcode part1]
  source 1..16: mol_type = other DNA
tcgcggacttgacttc

SEQ ID NO: 41541 - DNA, 16 bp, synthetic construct
  misc_feature 1..16: note = synthetic [barcode part1]
  source 1..16: mol_type = other DNA
tcgacaagacgacttc

SEQ ID NO: 41542 - DNA, 16 bp, synthetic construct
  misc_feature 1..16: note = synthetic [barcode part1]
  source 1..16: mol_type = other DNA
gagtccaatagaacgt

SEQ ID NO: 41543 - DNA, 16 bp, synthetic construct
  misc_feature 1..16: note = synthetic [barcode part1]
  source 1..16: mol_type = other DNA
gatatccgacgtatcg

SEQ ID NO: 41544 - DNA, 16 bp, synthetic construct
  misc_feature 1..16: note = synthetic [barcode part1]
  source 1..16: mol_type = other DNA
ttgaacgtgaggcgac

SEQ ID NO: 41545 - DNA, 16 bp, synthetic construct
  misc_feature 1..16: note = synthetic [barcode part1]
  source 1..16: mol_type = other DNA
gtagaccaactcacgt

SEQ ID NO: 41546 - DNA, 16 bp, synthetic construct
  misc_feature 1..16: note = synthetic [barcode part1]
  source 1..16: mol_type = other DNA
cgaagttagagaggac

SEQ ID NO: 41547 - DNA, 16 bp, synthetic construct
  misc_feature 1..16: note = synthetic [barcode part1]
  source 1..16: mol_type = other DNA
tccttatctgtcagag

SEQ ID NO: 41548 - DNA, 16 bp, synthetic construct
  misc_feature 1..16: note = synthetic [barcode part1]
  source 1..16: mol_type = other DNA
gactgtaaggaagttc

SEQ ID NO: 41549 - DNA, 16 bp, synthetic construct
  misc_feature 1..16: note = synthetic [barcode part1]
  source 1..16: mol_type = other DNA
taggaatcctacgtcg

SEQ ID NO: 41550 - DNA, 16 bp, synthetic construct
  misc_feature 1..16: note = synthetic [barcode part1]
  source 1..16: mol_type = other DNA
tgagaattcacgtccg

SEQ ID NO: 41551 - DNA, 16 bp, synthetic construct
  misc_feature 1..16: note = synthetic [barcode part1]
  source 1..16: mol_type = other DNA
tggagagtgtaactac

SEQ ID NO: 41552 - DNA, 16 bp, synthetic construct
  misc_feature 1..16: note = synthetic [barcode part1]
  source 1..16: mol_type = other DNA
ccgttgtcagatattc

SEQ ID NO: 41553 - DNA, 16 bp, synthetic construct
  misc_feature 1..16: note = synthetic [barcode part1]
  source 1..16: mol_type = other DNA
gactggcgttatagtc

SEQ ID NO: 41554 - DNA, 16 bp, synthetic construct
  misc_feature 1..16: note = synthetic [barcode part1]
  source 1..16: mol_type = other DNA
tggagaggagactaac

SEQ ID NO: 41555 - DNA, 16 bp, synthetic construct
  misc_feature 1..16: note = synthetic [barcode part1]
  source 1..16: mol_type = other DNA
tccaacttacacggtt

SEQ ID NO: 41556 - DNA, 16 bp, synthetic construct
  misc_feature 1..16: note = synthetic [barcode part1]
  source 1..16: mol_type = other DNA
gcaacgagagtgtctg

SEQ ID NO: 41557 - DNA, 16 bp, synthetic construct
  misc_feature 1..16: note = synthetic [barcode part1]
  source 1..16: mol_type = other DNA
tacggaggacttggtg

SEQ ID NO: 41558 - DNA, 16 bp, synthetic construct
  misc_feature 1..16: note = synthetic [barcode part1]
  source 1..16: mol_type = other DNA
atcttactcgcacaac

SEQ ID NO: 41559 - DNA, 16 bp, synthetic construct
  misc_feature 1..16: note = synthetic [barcode part1]
  source 1..16: mol_type = other DNA
ttcggatcgtcaacag

SEQ ID NO: 41560 - DNA, 16 bp, synthetic construct
  misc_feature 1..16: note = synthetic [barcode part1]
  source 1..16: mol_type = other DNA
gtccggagtcttgttc

SEQ ID NO: 41561 - DNA, 16 bp, synthetic construct
  misc_feature 1..16: note = synthetic [barcode part1]
  source 1..16: mol_type = other DNA
gtctggaataacgagt

SEQ ID NO: 41562 - DNA, 16 bp, synthetic construct
  misc_feature 1..16: note = synthetic [barcode part1]
  source 1..16: mol_type = other DNA
gtctgcctggaacctt

SEQ ID NO: 41563 - DNA, 16 bp, synthetic construct
  misc_feature 1..16: note = synthetic [barcode part1]
  source 1..16: mol_type = other DNA
tcacgccggactactt

SEQ ID NO: 41564 - DNA, 16 bp, synthetic construct
  misc_feature 1..16: note = synthetic [barcode part1]
  source 1..16: mol_type = other DNA
actcgttgttctgagt

SEQ ID NO: 41565 - DNA, 16 bp, synthetic construct
  misc_feature 1..16: note = synthetic [barcode part1]
  source 1..16: mol_type = other DNA
gttactcacggcaagt

SEQ ID NO: 41566 - DNA, 16 bp, synthetic construct
  misc_feature 1..16: note = synthetic [barcode part1]
  source 1..16: mol_type = other DNA
ttggtaaggacgtagt

SEQ ID NO: 41567 - DNA, 16 bp, synthetic construct
  misc_feature 1..16: note = synthetic [barcode part1]
  source 1..16: mol_type = other DNA
tgtagaactaggtcag

SEQ ID NO: 41568 - DNA, 16 bp, synthetic construct
  misc_feature 1..16: note = synthetic [barcode part1]
  source 1..16: mol_type = other DNA
tacggtaattcgtctc

SEQ ID NO: 41569 - DNA, 16 bp, synthetic construct
  misc_feature 1..16: note = synthetic [barcode part1]
  source 1..16: mol_type = other DNA
attaggaaggagaccg

SEQ ID NO: 41570 - DNA, 16 bp, synthetic construct
  misc_feature 1..16: note = synthetic [barcode part1]
  source 1..16: mol_type = other DNA
tcgagagttcctagtg

SEQ ID NO: 41571 - DNA, 16 bp, synthetic construct
  misc_feature 1..16: note = synthetic [barcode part1]
  source 1..16: mol_type = other DNA
tctcgtcacagatccg

SEQ ID NO: 41572 - DNA, 16 bp, synthetic construct
  misc_feature 1..16: note = synthetic [barcode part1]
  source 1..16: mol_type = other DNA
cacgcgtctaattgag

SEQ ID NO: 41573 - DNA, 16 bp, synthetic construct
  misc_feature 1..16: note = synthetic [barcode part1]
  source 1..16: mol_type = other DNA
atacagagagtgcgag

SEQ ID NO: 41574 - DNA, 16 bp, synthetic construct
  misc_feature 1..16: note = synthetic [barcode part1]
  source 1..16: mol_type = other DNA
ttggtaggtccttatc

SEQ ID NO: 41575 - DNA, 16 bp, synthetic construct
  misc_feature 1..16: note = synthetic [barcode part1]
  source 1..16: mol_type = other DNA
cggtaactacaagagt

SEQ ID NO: 41576 - DNA, 16 bp, synthetic construct
  misc_feature 1..16: note = synthetic [barcode part1]
  source 1..16: mol_type = other DNA
gtcagtatcactatcc

SEQ ID NO: 41577 - DNA, 16 bp, synthetic construct
  misc_feature 1..16: note = synthetic [barcode part1]
  source 1..16: mol_type = other DNA
ttgacacacgtcaacg

SEQ ID NO: 41578 - DNA, 16 bp, synthetic construct
  misc_feature 1..16: note = synthetic [barcode part1]
  source 1..16: mol_type = other DNA
ccgtcgtagtaagact

SEQ ID NO: 41579 - DNA, 16 bp, synthetic construct
  misc_feature 1..16: note = synthetic [barcode part1]
  source 1..16: mol_type = other DNA
acaaccgttccttagt

SEQ ID NO: 41580 - DNA, 16 bp, synthetic construct
  misc_feature 1..16: note = synthetic [barcode part1]
  source 1..16: mol_type = other DNA
gattctcgtcgagagt

SEQ ID NO: 41581 - DNA, 16 bp, synthetic construct
  misc_feature 1..16: note = synthetic [barcode part1]
  source 1..16: mol_type = other DNA
cagttcttcttccggt

SEQ ID NO: 41582 - DNA, 16 bp, synthetic construct
  misc_feature 1..16: note = synthetic [barcode part1]
  source 1..16: mol_type = other DNA
gatcgtacacacaacc

SEQ ID NO: 41583 - DNA, 16 bp, synthetic construct
  misc_feature 1..16: note = synthetic [barcode part1]
  source 1..16: mol_type = other DNA
tgacgtatcaggtacc

SEQ ID NO: 41584 - DNA, 16 bp, synthetic construct
  misc_feature 1..16: note = synthetic [barcode part1]
  source 1..16: mol_type = other DNA
gactaggacgactgtg

SEQ ID NO: 41585 - DNA, 16 bp, synthetic construct
  misc_feature 1..16: note = synthetic [barcode part1]
  source 1..16: mol_type = other DNA
gaatctaccaccactt

SEQ ID NO: 41586 - DNA, 16 bp, synthetic construct
  misc_feature 1..16: note = synthetic [barcode part1]
  source 1..16: mol_type = other DNA
ttgataacgtcttcgc

SEQ ID NO: 41587 - DNA, 16 bp, synthetic construct
  misc_feature 1..16: note = synthetic [barcode part1]
  source 1..16: mol_type = other DNA
ttctgccagtgtccag

SEQ ID NO: 41588 - DNA, 16 bp, synthetic construct
  misc_feature 1..16: note = synthetic [barcode part1]
  source 1..16: mol_type = other DNA
cctgttatacactggt

SEQ ID NO: 41589 - DNA, 16 bp, synthetic construct
  misc_feature 1..16: note = synthetic [barcode part1]
  source 1..16: mol_type = other DNA
gataaccaagagtgtc

SEQ ID NO: 41590 - DNA, 16 bp, synthetic construct
  misc_feature 1..16: note = synthetic [barcode part1]
  source 1..16: mol_type = other DNA
acaaccacgcgtaatc

SEQ ID NO: 41591 - DNA, 16 bp, synthetic construct
  misc_feature 1..16: note = synthetic [barcode part1]
  source 1..16: mol_type = other DNA
tctcacgattgaactc

SEQ ID NO: 41592 - DNA, 16 bp, synthetic construct
  misc_feature 1..16: note = synthetic [barcode part1]
  source 1..16: mol_type = other DNA
ccaccagtcctatacg

SEQ ID NO: 41593 - DNA, 16 bp, synthetic construct
  misc_feature 1..16: note = synthetic [barcode part1]
  source 1..16: mol_type = other DNA
attccgcactcggatc

SEQ ID NO: 41594 - DNA, 16 bp, synthetic construct
  misc_feature 1..16: note = synthetic [barcode part1]
  source 1..16: mol_type = other DNA
accgacgaccttctac

SEQ ID NO: 41595 - DNA, 16 bp, synthetic construct
  misc_feature 1..16: note = synthetic [barcode part1]
  source 1..16: mol_type = other DNA
aatcaatcgtggcacc

SEQ ID NO: 41596 - DNA, 16 bp, synthetic construct
  misc_feature 1..16: note = synthetic [barcode part1]
  source 1..16: mol_type = other DNA
ccaggtatcgcaagtt

SEQ ID NO: 41597 - DNA, 16 bp, synthetic construct
  misc_feature 1..16: note = synthetic [barcode part1]
  source 1..16: mol_type = other DNA
cgtacctacctaatac

SEQ ID NO: 41598 - DNA, 16 bp, synthetic construct
  misc_feature 1..16: note = synthetic [barcode part1]
  source 1..16: mol_type = other DNA
caccagaccgtactct

SEQ ID NO: 41599 - DNA, 16 bp, synthetic construct
  misc_feature 1..16: note = synthetic [barcode part1]
  source 1..16: mol_type = other DNA
tcggcaggtaaggatc

SEQ ID NO: 41600 - DNA, 16 bp, synthetic construct
  misc_feature 1..16: note = synthetic [barcode part1]
  source 1..16: mol_type = other DNA
tgccactcgagtctac

SEQ ID NO: 41601 - DNA, 16 bp, synthetic construct
  misc_feature 1..16: note = synthetic [barcode part1]
  source 1..16: mol_type = other DNA
tggagacggtagtctg

SEQ ID NO: 41602 - DNA, 16 bp, synthetic construct
  misc_feature 1..16: note = synthetic [barcode part1]
  source 1..16: mol_type = other DNA
gaggtctgaattccgt

SEQ ID NO: 41603 - DNA, 16 bp, synthetic construct
  misc_feature 1..16: note = synthetic [barcode part1]
  source 1..16: mol_type = other DNA
aacgtctcgttccgtg

SEQ ID NO: 41604 - DNA, 16 bp, synthetic construct
  misc_feature 1..16: note = synthetic [barcode part1]
  source 1..16: mol_type = other DNA
caggtatctaagtgcc

SEQ ID NO: 41605 - DNA, 16 bp, synthetic construct
  misc_feature 1..16: note = synthetic [barcode part1]
  source 1..16: mol_type = other DNA
gcaagacgtccgtaag

SEQ ID NO: 41606 - DNA, 16 bp, synthetic construct
  misc_feature 1..16: note = synthetic [barcode part1]
  source 1..16: mol_type = other DNA
taccgtactagaaccg

SEQ ID NO: 41607 - DNA, 16 bp, synthetic construct
  misc_feature 1..16: note = synthetic [barcode part1]
  source 1..16: mol_type = other DNA
cggattagtacgaggc

SEQ ID NO: 41608 - DNA, 16 bp, synthetic construct
  misc_feature 1..16: note = synthetic [barcode part1]
  source 1..16: mol_type = other DNA
tacgtgttcgagatcg

SEQ ID NO: 41609 - DNA, 16 bp, synthetic construct
  misc_feature 1..16: note = synthetic [barcode part1]
  source 1..16: mol_type = other DNA
gcctacttctacctac

SEQ ID NO: 41610 - DNA, 16 bp, synthetic construct
  misc_feature 1..16: note = synthetic [barcode part1]
  source 1..16: mol_type = other DNA
gagacttctatctgtc

SEQ ID NO: 41611 - DNA, 16 bp, synthetic construct
  misc_feature 1..16: note = synthetic [barcode part1]
  source 1..16: mol_type = other DNA
ttgaggtctcgagatc

SEQ ID NO: 41612 - DNA, 16 bp, synthetic construct
  misc_feature 1..16: note = synthetic [barcode part1]
  source 1..16: mol_type = other DNA
tacgcctaggttattc

SEQ ID NO: 41613 - DNA, 16 bp, synthetic construct
  misc_feature 1..16: note = synthetic [barcode part1]
  source 1..16: mol_type = other DNA
caagatctgtgtacgc

SEQ ID NO: 41614 - DNA, 16 bp, synthetic construct
  misc_feature 1..16: note = synthetic [barcode part1]
  source 1..16: mol_type = other DNA
attctctgtgcgttag

SEQ ID NO: 41615 - DNA, 16 bp, synthetic construct
  misc_feature 1..16: note = synthetic [barcode part1]
  source 1..16: mol_type = other DNA
ttcgacttacgtgact

SEQ ID NO: 41616 - DNA, 16 bp, synthetic construct
  misc_feature 1..16: note = synthetic [barcode part1]
  source 1..16: mol_type = other DNA
gaggatagtctaacgt

SEQ ID NO: 41617 - DNA, 16 bp, synthetic construct
  misc_feature 1..16: note = synthetic [barcode part1]
  source 1..16: mol_type = other DNA
gacacacggttgaggt

SEQ ID NO: 41618 - DNA, 16 bp, synthetic construct
  misc_feature 1..16: note = synthetic [barcode part1]
  source 1..16: mol_type = other DNA
tagtccaaggcgtgag

SEQ ID NO: 41619 - DNA, 16 bp, synthetic construct
  misc_feature 1..16: note = synthetic [barcode part1]
  source 1..16: mol_type = other DNA
tggtcttgtcaacgtt

SEQ ID NO: 41620 - DNA, 16 bp, synthetic construct
  misc_feature 1..16: note = synthetic [barcode part1]
  source 1..16: mol_type = other DNA
tctggttgtaccaact

SEQ ID NO: 41621 - DNA, 16 bp, synthetic construct
  misc_feature 1..16: note = synthetic [barcode part1]
  source 1..16: mol_type = other DNA
acgatcttaggtcacg

SEQ ID NO: 41622 - DNA, 16 bp, synthetic construct
  misc_feature 1..16: note = synthetic [barcode part1]
  source 1..16: mol_type = other DNA
tatcgaggcgaaggtc

SEQ ID NO: 41623 - DNA, 16 bp, synthetic construct
  misc_feature 1..16: note = synthetic [barcode part1]
  source 1..16: mol_type = other DNA
accgttcacggacttc

SEQ ID NO: 41624 - DNA, 16 bp, synthetic construct
  misc_feature 1..16: note = synthetic [barcode part1]
  source 1..16: mol_type = other DNA
acacagtggagttggc

SEQ ID NO: 41625 - DNA, 16 bp, synthetic construct
  misc_feature 1..16: note = synthetic [barcode part1]
  source 1..16: mol_type = other DNA
tcctgcagtcaagtcc

SEQ ID NO: 41626 - DNA, 16 bp, synthetic construct
  misc_feature 1..16: note = synthetic [barcode part1]
  source 1..16: mol_type = other DNA
gccgatagacgtactt

SEQ ID NO: 41627 - DNA, 16 bp, synthetic construct
  misc_feature 1..16: note = synthetic [barcode part1]
  source 1..16: mol_type = other DNA
acgaactccttcaatc

SEQ ID NO: 41628 - DNA, 16 bp, synthetic construct
  misc_feature 1..16: note = synthetic [barcode part1]
  source 1..16: mol_type = other DNA
gagacctctgtccact

SEQ ID NO: 41629 - DNA, 16 bp, synthetic construct
  misc_feature 1..16: note = synthetic [barcode part1]
  source 1..16: mol_type = other DNA
tggatctacttgcgag

SEQ ID NO: 41630 - DNA, 16 bp, synthetic construct
  misc_feature 1..16: note = synthetic [barcode part1]
  source 1..16: mol_type = other DNA
aacgatccgatccaac

SEQ ID NO: 41631 - DNA, 16 bp, synthetic construct
  misc_feature 1..16: note = synthetic [barcode part1]
  source 1..16: mol_type = other DNA
caggcacaaggattgc

SEQ ID NO: 41632 - DNA, 16 bp, synthetic construct
  misc_feature 1..16: note = synthetic [barcode part1]
  source 1..16: mol_type = other DNA
gacaattcacacctct

SEQ ID NO: 41633 - DNA, 16 bp, synthetic construct
  misc_feature 1..16: note = synthetic [barcode part1]
  source 1..16: mol_type = other DNA
ttacttacaccgtggt

SEQ ID NO: 41634 - DNA, 16 bp, synthetic construct
  misc_feature 1..16: note = synthetic [barcode part1]
  source 1..16: mol_type = other DNA
gtcttcgatagtccgc

SEQ ID NO: 41635 - DNA, 16 bp, synthetic construct
  misc_feature 1..16: note = synthetic [barcode part1]
  source 1..16: mol_type = other DNA
gaacgaggacgaatac

SEQ ID NO: 41636 - DNA, 16 bp, synthetic construct
  misc_feature 1..16: note = synthetic [barcode part1]
  source 1..16: mol_type = other DNA
ccttagacaggtggag

SEQ ID NO: 41637 - DNA, 16 bp, synthetic construct
  misc_feature 1..16: note = synthetic [barcode part1]
  source 1..16: mol_type = other DNA
tacggttgactacgtg

SEQ ID NO: 41638 - DNA, 16 bp, synthetic construct
  misc_feature 1..16: note = synthetic [barcode part1]
  source 1..16: mol_type = other DNA
cggtctccacgattgt

SEQ ID NO: 41639 - DNA, 16 bp, synthetic construct
  misc_feature 1..16: note = synthetic [barcode part1]
  source 1..16: mol_type = other DNA
tcagacgtccactatt

SEQ ID NO: 41640 - DNA, 16 bp, synthetic construct
  misc_feature 1..16: note = synthetic [barcode part1]
  source 1..16: mol_type = other DNA
gagatcgatatccaag

SEQ ID NO: 41641 - DNA, 16 bp, synthetic construct
  misc_feature 1..16: note = synthetic [barcode part1]
  source 1..16: mol_type = other DNA
tcggagttgttgcagt

SEQ ID NO: 41642 - DNA, 16 bp, synthetic construct
  misc_feature 1..16: note = synthetic [barcode part1]
  source 1..16: mol_type = other DNA
gtattcgacaacagag

SEQ ID NO: 41643 - DNA, 16 bp, synthetic construct
  misc_feature 1..16: note = synthetic [barcode part1]
  source 1..16: mol_type = other DNA
tgttactccacgcgac

SEQ ID NO: 41644 - DNA, 16 bp, synthetic construct
  misc_feature 1..16: note = synthetic [barcode part1]
  source 1..16: mol_type = other DNA
aaggagaccgaagttg

SEQ ID NO: 41645 - DNA, 16 bp, synthetic construct
  misc_feature 1..16: note = synthetic [barcode part1]
  source 1..16: mol_type = other DNA
gtggaacaggtctgtg

SEQ ID NO: 41646 - DNA, 16 bp, synthetic construct
  misc_feature 1..16: note = synthetic [barcode part1]
  source 1..16: mol_type = other DNA
tcggtcttctgatctc

SEQ ID NO: 41647 - DNA, 16 bp, synthetic construct
  misc_feature 1..16: note = synthetic [barcode part1]
  source 1..16: mol_type = other DNA
caagtctgacggagtg

SEQ ID NO: 41648 - DNA, 16 bp, synthetic construct
  misc_feature 1..16: note = synthetic [barcode part1]
  source 1..16: mol_type = other DNA
tcttcggtcctctaac

SEQ ID NO: 41649 - DNA, 16 bp, synthetic construct
  misc_feature 1..16: note = synthetic [barcode part1]
  source 1..16: mol_type = other DNA
gtacctcggttattac

SEQ ID NO: 41650 - DNA, 16 bp, synthetic construct
  misc_feature 1..16: note = synthetic [barcode part1]
  source 1..16: mol_type = other DNA
tgaacgcgattcgtgt

SEQ ID NO: 41651 - DNA, 16 bp, synthetic construct
  misc_feature 1..16: note = synthetic [barcode part1]
  source 1..16: mol_type = other DNA
cgttaacttccggtcg

SEQ ID NO: 41652 - DNA, 16 bp, synthetic construct
  misc_feature 1..16: note = synthetic [barcode part1]
  source 1..16: mol_type = other DNA
actggtgtcactgcct

SEQ ID NO: 41653 - DNA, 16 bp, synthetic construct
  misc_feature 1..16: note = synthetic [barcode part1]
  source 1..16: mol_type = other DNA
ttacgaagtaggacgt

SEQ ID NO: 41654 - DNA, 16 bp, synthetic construct
  misc_feature 1..16: note = synthetic [barcode part1]
  source 1..16: mol_type = other DNA
caatacgttggcacac

SEQ ID NO: 41655 - DNA, 16 bp, synthetic construct
  misc_feature 1..16: note = synthetic [barcode part1]
  source 1..16: mol_type = other DNA
tgttaggcaagtcacc

SEQ ID NO: 41656 - DNA, 16 bp, synthetic construct
  misc_feature 1..16: note = synthetic [barcode part1]
  source 1..16: mol_type = other DNA
tacaacgccgtagtac

SEQ ID NO: 41657 - DNA, 16 bp, synthetic construct
  misc_feature 1..16: note = synthetic [barcode part1]
  source 1..16: mol_type = other DNA
tcactcgagacttcgc

SEQ ID NO: 41658 - DNA, 16 bp, synthetic construct
  misc_feature 1..16: note = synthetic [barcode part1]
  source 1..16: mol_type = other DNA
caccttcgtcgtcaag

SEQ ID NO: 41659 - DNA, 16 bp, synthetic construct
  misc_feature 1..16: note = synthetic [barcode part1]
  source 1..16: mol_type = other DNA
cagatcgatatcctct

SEQ ID NO: 41660 - DNA, 16 bp, synthetic construct
  misc_feature 1..16: note = synthetic [barcode part1]
  source 1..16: mol_type = other DNA
caggacttgcaacgtt

SEQ ID NO: 41661 - DNA, 16 bp, synthetic construct
  misc_feature 1..16: note = synthetic [barcode part1]
  source 1..16: mol_type = other DNA
acgacacctgactagt

SEQ ID NO: 41662 - DNA, 16 bp, synthetic construct
  misc_feature 1..16: note = synthetic [barcode part1]
  source 1..16: mol_type = other DNA
ccttgtgtcttgtacc

SEQ ID NO: 41663 - DNA, 16 bp, synthetic construct
  misc_feature 1..16: note = synthetic [barcode part1]
  source 1..16: mol_type = other DNA
tacggagttggtgacg

SEQ ID NO: 41664 - DNA, 16 bp, synthetic construct
  misc_feature 1..16: note = synthetic [barcode part1]
  source 1..16: mol_type = other DNA
gacgtgatctataccg

SEQ ID NO: 41665 - DNA, 16 bp, synthetic construct
  misc_feature 1..16: note = synthetic [barcode part1]
  source 1..16: mol_type = other DNA
atagtcgtaacgcacc

SEQ ID NO: 41666 - DNA, 16 bp, synthetic construct
  misc_feature 1..16: note = synthetic [barcode part1]
  source 1..16: mol_type = other DNA
cacttagaactgcacg

SEQ ID NO: 41667 - DNA, 16 bp, synthetic construct
  misc_feature 1..16: note = synthetic [barcode part1]
  source 1..16: mol_type = other DNA
tctcagttacgttggt

SEQ ID NO: 41668 - DNA, 16 bp, synthetic construct
  misc_feature 1..16: note = synthetic [barcode part1]
  source 1..16: mol_type = other DNA
cctacgtcgtattctc

SEQ ID NO: 41669 - DNA, 16 bp, synthetic construct
  misc_feature 1..16: note = synthetic [barcode part1]
  source 1..16: mol_type = other DNA
gaggtaagtcttgcct

SEQ ID NO: 41670 - DNA, 16 bp, synthetic construct
  misc_feature 1..16: note = synthetic [barcode part1]
  source 1..16: mol_type = other DNA
acagtaccagtcaacc

SEQ ID NO: 41671 - DNA, 16 bp, synthetic construct
  misc_feature 1..16: note = synthetic [barcode part1]
  source 1..16: mol_type = other DNA
tgcgcggaataatagt

SEQ ID NO: 41672 - DNA, 16 bp, synthetic construct
  misc_feature 1..16: note = synthetic [barcode part1]
  source 1..16: mol_type = other DNA
tgccggaacaaggatc

SEQ ID NO: 41673 - DNA, 16 bp, synthetic construct
  misc_feature 1..16: note = synthetic [barcode part1]
  source 1..16: mol_type = other DNA
ttgtgcaacaccagtg

SEQ ID NO: 41674 - DNA, 16 bp, synthetic construct
  misc_feature 1..16: note = synthetic [barcode part1]
  source 1..16: mol_type = other DNA
gcacgcacaattgatc

SEQ ID NO: 41675 - DNA, 16 bp, synthetic construct
  misc_feature 1..16: note = synthetic [barcode part1]
  source 1..16: mol_type = other DNA
tacttggacactcgag

SEQ ID NO: 41676 - DNA, 16 bp, synthetic construct
  misc_feature 1..16: note = synthetic [barcode part1]
  source 1..16: mol_type = other DNA
taacaacgcgcgaggt

SEQ ID NO: 41677 - DNA, 16 bp, synthetic construct
  misc_feature 1..16: note = synthetic [barcode part1]
  source 1..16: mol_type = other DNA
tcaggttacacttctg

SEQ ID NO: 41678 - DNA, 16 bp, synthetic construct
  misc_feature 1..16: note = synthetic [barcode part1]
  source 1..16: mol_type = other DNA
gttccaccgaactcac

SEQ ID NO: 41679 - DNA, 16 bp, synthetic construct
  misc_feature 1..16: note = synthetic [barcode part1]
  source 1..16: mol_type = other DNA
aactattggacgcaag

SEQ ID NO: 41680 - DNA, 16 bp, synthetic construct
  misc_feature 1..16: note = synthetic [barcode part1]
  source 1..16: mol_type = other DNA
caattctgaggagtcc

SEQ ID NO: 41681 - DNA, 16 bp, synthetic construct
  misc_feature 1..16: note = synthetic [barcode part1]
  source 1..16: mol_type = other DNA
ccaagtgacgaactct

SEQ ID NO: 41682 - DNA, 16 bp, synthetic construct
  misc_feature 1..16: note = synthetic [barcode part1]
  source 1..16: mol_type = other DNA
aacagtctggtctgac

SEQ ID NO: 41683 - DNA, 16 bp, synthetic construct
  misc_feature 1..16: note = synthetic [barcode part1]
  source 1..16: mol_type = other DNA
gtctattaccttggac

SEQ ID NO: 41684 - DNA, 16 bp, synthetic construct
  misc_feature 1..16: note = synthetic [barcode part1]
  source 1..16: mol_type = other DNA
aggattaagtccacag

SEQ ID NO: 41685 - DNA, 16 bp, synthetic construct
  misc_feature 1..16: note = synthetic [barcode part1]
  source 1..16: mol_type = other DNA
gccgaattaccaggtt

SEQ ID NO: 41686 - DNA, 16 bp, synthetic construct
  misc_feature 1..16: note = synthetic [barcode part1]
  source 1..16: mol_type = other DNA
tcctcggattgatact

SEQ ID NO: 41687 - DNA, 16 bp, synthetic construct
  misc_feature 1..16: note = synthetic [barcode part1]
  source 1..16: mol_type = other DNA
tgtcaggtcgttgagt

SEQ ID NO: 41688 - DNA, 16 bp, synthetic construct
  misc_feature 1..16: note = synthetic [barcode part1]
  source 1..16: mol_type = other DNA
ttctaactgcgaactc

SEQ ID NO: 41689 - DNA, 16 bp, synthetic construct
  misc_feature 1..16: note = synthetic [barcode part1]
  source 1..16: mol_type = other DNA
tccactggtcaagaac

SEQ ID NO: 41690 - DNA, 16 bp, synthetic construct
  misc_feature 1..16: note = synthetic [barcode part1]
  source 1..16: mol_type = other DNA
atactaacggtcttcc

SEQ ID NO: 41691 - DNA, 16 bp, synthetic construct
  misc_feature 1..16: note = synthetic [barcode part1]
  source 1..16: mol_type = other DNA
tgcctactcacggtac

SEQ ID NO: 41692 - DNA, 16 bp, synthetic construct
  misc_feature 1..16: note = synthetic [barcode part1]
  source 1..16: mol_type = other DNA
ccggcgagataattct

SEQ ID NO: 41693 - DNA, 16 bp, synthetic construct
  misc_feature 1..16: note = synthetic [barcode part1]
  source 1..16: mol_type = other DNA
ttacttggtggcgtcc

SEQ ID NO: 41694 - DNA, 16 bp, synthetic construct
  misc_feature 1..16: note = synthetic [barcode part1]
  source 1..16: mol_type = other DNA
aattcgcctcgagtag

SEQ ID NO: 41695 - DNA, 16 bp, synthetic construct
  misc_feature 1..16: note = synthetic [barcode part1]
  source 1..16: mol_type = other DNA
tcaccgtgtagacctc

SEQ ID NO: 41696 - DNA, 16 bp, synthetic construct
  misc_feature 1..16: note = synthetic [barcode part1]
  source 1..16: mol_type = other DNA
cacgaatcactgcctc

SEQ ID NO: 41697 - DNA, 16 bp, synthetic construct
  misc_feature 1..16: note = synthetic [barcode part1]
  source 1..16: mol_type = other DNA
ataaggttccgaacag

SEQ ID NO: 41698 - DNA, 16 bp, synthetic construct
  misc_feature 1..16: note = synthetic [barcode part1]
  source 1..16: mol_type = other DNA
agtcgcaaggactggt

SEQ ID NO: 41699 - DNA, 16 bp, synthetic construct
  misc_feature 1..16: note = synthetic [barcode part1]
  source 1..16: mol_type = other DNA
atagtgcgcgtatacc

SEQ ID NO: 41700 - DNA, 16 bp, synthetic construct
  misc_feature 1..16: note = synthetic [barcode part1]
  source 1..16: mol_type = other DNA
tcaagatcgagtgagt

SEQ ID NO: 41701 - DNA, 16 bp, synthetic construct
  misc_feature 1..16: note = synthetic [barcode part1]
  source 1..16: mol_type = other DNA
tattccttggcgattg

SEQ ID NO: 41702 - DNA, 16 bp, synthetic construct
  misc_feature 1..16: note = synthetic [barcode part1]
  source 1..16: mol_type = other DNA
atccgcggtacttaag

SEQ ID NO: 41703 - DNA, 16 bp, synthetic construct
  misc_feature 1..16: note = synthetic [barcode part1]
  source 1..16: mol_type = other DNA
atctgacttctgcgcg

SEQ ID NO: 41704 - DNA, 16 bp, synthetic construct
  misc_feature 1..16: note = synthetic [barcode part1]
  source 1..16: mol_type = other DNA
taggccagtatagagt

SEQ ID NO: 41705 - DNA, 16 bp, synthetic construct
  misc_feature 1..16: note = synthetic [barcode part1]
  source 1..16: mol_type = other DNA
cagacgcgttacttcc

SEQ ID NO: 41706 - DNA, 16 bp, synthetic construct
  misc_feature 1..16: note = synthetic [barcode part1]
  source 1..16: mol_type = other DNA
aacaacaggcagaacg

SEQ ID NO: 41707 - DNA, 16 bp, synthetic construct
  misc_feature 1..16: note = synthetic [barcode part1]
  source 1..16: mol_type = other DNA
tgaatccggacggtag

SEQ ID NO: 41708 - DNA, 16 bp, synthetic construct
  misc_feature 1..16: note = synthetic [barcode part1]
  source 1..16: mol_type = other DNA
ccaacttaggtgtctt

SEQ ID NO: 41709 - DNA, 16 bp, synthetic construct
  misc_feature 1..16: note = synthetic [barcode part1]
  source 1..16: mol_type = other DNA
atctgaatccaggcgt

SEQ ID NO: 41710 - DNA, 16 bp, synthetic construct
  misc_feature 1..16: note = synthetic [barcode part1]
  source 1..16: mol_type = other DNA
tcttgcacacactcct

SEQ ID NO: 41711 - DNA, 16 bp, synthetic construct
  misc_feature 1..16: note = synthetic [barcode part1]
  source 1..16: mol_type = other DNA
actgaggtcttctgag

SEQ ID NO: 41712 - DNA, 16 bp, synthetic construct
  misc_feature 1..16: note = synthetic [barcode part1]
  source 1..16: mol_type = other DNA
ccaatccgaatcagac

SEQ ID NO: 41713 - DNA, 16 bp, synthetic construct
  misc_feature 1..16: note = synthetic [barcode part1]
  source 1..16: mol_type = other DNA
tcaagtgcaagtgtcc

SEQ ID NO: 41714 - DNA, 16 bp, synthetic construct
  misc_feature 1..16: note = synthetic [barcode part1]
  source 1..16: mol_type = other DNA
gtggtcagaggtcagt

SEQ ID NO: 41715 - DNA, 16 bp, synthetic construct
  misc_feature 1..16: note = synthetic [barcode part1]
  source 1..16: mol_type = other DNA
gacacacaaccgaggt

SEQ ID NO: 41716 - DNA, 16 bp, synthetic construct
  misc_feature 1..16: note = synthetic [barcode part1]
  source 1..16: mol_type = other DNA
gcgagtatattcgtcg

SEQ ID NO: 41717 - DNA, 16 bp, synthetic construct
  misc_feature 1..16: note = synthetic [barcode part1]
  source 1..16: mol_type = other DNA
gaagtcgaggagttag

SEQ ID NO: 41718 - DNA, 16 bp, synthetic construct
  misc_feature 1..16: note = synthetic [barcode part1]
  source 1..16: mol_type = other DNA
aggcctgacagaacac

SEQ ID NO: 41719 - DNA, 16 bp, synthetic construct
  misc_feature 1..16: note = synthetic [barcode part1]
  source 1..16: mol_type = other DNA
agtgatatagacaccg

SEQ ID NO: 41720 - DNA, 16 bp, synthetic construct
  misc_feature 1..16: note = synthetic [barcode part1]
  source 1..16: mol_type = other DNA
cagtgtaatcagagac

SEQ ID NO: 41721 - DNA, 16 bp, synthetic construct
  misc_feature 1..16: note = synthetic [barcode part1]
  source 1..16: mol_type = other DNA
ccacctaatagtgttc

SEQ ID NO: 41722 - DNA, 16 bp, synthetic construct
  misc_feature 1..16: note = synthetic [barcode part1]
  source 1..16: mol_type = other DNA
gtgtaacggtcgagac

SEQ ID NO: 41723 - DNA, 16 bp, synthetic construct
  misc_feature 1..16: note = synthetic [barcode part1]
  source 1..16: mol_type = other DNA
gagtccgtatcttgcc

SEQ ID NO: 41724 - DNA, 16 bp, synthetic construct
  misc_feature 1..16: note = synthetic [barcode part1]
  source 1..16: mol_type = other DNA
gtccgtggaagatcag

SEQ ID NO: 41725 - DNA, 16 bp, synthetic construct
  misc_feature 1..16: note = synthetic [barcode part1]
  source 1..16: mol_type = other DNA
tacactctcgtcaagt

SEQ ID NO: 41726 - DNA, 16 bp, synthetic construct
  misc_feature 1..16: note = synthetic [barcode part1]
  source 1..16: mol_type = other DNA
agactaacgtgtaacg

SEQ ID NO: 41727 - DNA, 16 bp, synthetic construct
  misc_feature 1..16: note = synthetic [barcode part1]
  source 1..16: mol_type = other DNA
ttattaggcgtccttg

SEQ ID NO: 41728 - DNA, 16 bp, synthetic construct
  misc_feature 1..16: note = synthetic [barcode part1]
  source 1..16: mol_type = other DNA
caaggagtgcacaacc

SEQ ID NO: 41729 - DNA, 16 bp, synthetic construct
  misc_feature 1..16: note = synthetic [barcode part1]
  source 1..16: mol_type = other DNA
gaaggcgcgaatcgtt

SEQ ID NO: 41730 - DNA, 16 bp, synthetic construct
  misc_feature 1..16: note = synthetic [barcode part1]
  source 1..16: mol_type = other DNA
cacagtactcactcgc

SEQ ID NO: 41731 - DNA, 16 bp, synthetic construct
  misc_feature 1..16: note = synthetic [barcode part1]
  source 1..16: mol_type = other DNA
gtccaataatccggtg

SEQ ID NO: 41732 - DNA, 16 bp, synthetic construct
  misc_feature 1..16: note = synthetic [barcode part1]
  source 1..16: mol_type = other DNA
ttagttccgagtctac

SEQ ID NO: 41733 - DNA, 16 bp, synthetic construct
  misc_feature 1..16: note = synthetic [barcode part1]
  source 1..16: mol_type = other DNA
tcctgtgtcgataatc

SEQ ID NO: 41734 - DNA, 16 bp, synthetic construct
  misc_feature 1..16: note = synthetic [barcode part1]
  source 1..16: mol_type = other DNA
gacgacttcagtgact

SEQ ID NO: 41735 - DNA, 16 bp, synthetic construct
  misc_feature 1..16: note = synthetic [barcode part1]
  source 1..16: mol_type = other DNA
gaactgtagtataggc

SEQ ID NO: 41736 - DNA, 16 bp, synthetic construct
  misc_feature 1..16: note = synthetic [barcode part1]
  source 1..16: mol_type = other DNA
gagtggttgcaccaag

SEQ ID NO: 41737 - DNA, 16 bp, synthetic construct
  misc_feature 1..16: note = synthetic [barcode part1]
  source 1..16: mol_type = other DNA
ccgacgatctagtaac

SEQ ID NO: 41738 - DNA, 16 bp, synthetic construct
  misc_feature 1..16: note = synthetic [barcode part1]
  source 1..16: mol_type = other DNA
atcttactccgacctc

SEQ ID NO: 41739 - DNA, 16 bp, synthetic construct
  misc_feature 1..16: note = synthetic [barcode part1]
  source 1..16: mol_type = other DNA
caactgacaaccagtc

SEQ ID NO: 41740 - DNA, 16 bp, synthetic construct
  misc_feature 1..16: note = synthetic [barcode part1]
  source 1..16: mol_type = other DNA
agacttatccggtctt

SEQ ID NO: 41741 - DNA, 16 bp, synthetic construct
  misc_feature 1..16: note = synthetic [barcode part1]
  source 1..16: mol_type = other DNA
gcgtcgttaagtggag

SEQ ID NO: 41742 - DNA, 16 bp, synthetic construct
  misc_feature 1..16: note = synthetic [barcode part1]
  source 1..16: mol_type = other DNA
tcagttccttgtgagt

SEQ ID NO: 41743 - DNA, 16 bp, synthetic construct
  misc_feature 1..16: note = synthetic [barcode part1]
  source 1..16: mol_type = other DNA
tgttgcaacgtgtacg

SEQ ID NO: 41744 - DNA, 16 bp, synthetic construct
  misc_feature 1..16: note = synthetic [barcode part1]
  source 1..16: mol_type = other DNA
tggcgaacgtctgaag

SEQ ID NO: 41745 - DNA, 16 bp, synthetic construct
  misc_feature 1..16: note = synthetic [barcode part1]
  source 1..16: mol_type = other DNA
ttgaacgatcttgtcc

SEQ ID NO: 41746 - DNA, 16 bp, synthetic construct
  misc_feature 1..16: note = synthetic [barcode part1]
  source 1..16: mol_type = other DNA
taacgtgtacaccgac

SEQ ID NO: 41747 - DNA, 16 bp, synthetic construct
  misc_feature 1..16: note = synthetic [barcode part1]
  source 1..16: mol_type = other DNA
tcttggtctgaacact

SEQ ID NO: 41748 - DNA, 16 bp, synthetic construct
  misc_feature 1..16: note = synthetic [barcode part1]
  source 1..16: mol_type = other DNA
cgtagtggacaggtgt

SEQ ID NO: 41749 - DNA, 16 bp, synthetic construct
  misc_feature 1..16: note = synthetic [barcode part1]
  source 1..16: mol_type = other DNA
taatcttcctcggcct

SEQ ID NO: 41750 - DNA, 16 bp, synthetic construct
  misc_feature 1..16: note = synthetic [barcode part1]
  source 1..16: mol_type = other DNA
cgttgagagacgtggt

SEQ ID NO: 41751 - DNA, 16 bp, synthetic construct
  misc_feature 1..16: note = synthetic [barcode part1]
  source 1..16: mol_type = other DNA
cggactaataccttct

SEQ ID NO: 41752 - DNA, 16 bp, synthetic construct
  misc_feature 1..16: note = synthetic [barcode part1]
  source 1..16: mol_type = other DNA
gttgcgactacaacgt

SEQ ID NO: 41753 - DNA, 16 bp, synthetic construct
  misc_feature 1..16: note = synthetic [barcode part1]
  source 1..16: mol_type = other DNA
cgaagtgacaggatag

SEQ ID NO: 41754 - DNA, 16 bp, synthetic construct
  misc_feature 1..16: note = synthetic [barcode part1]
  source 1..16: mol_type = other DNA
cctggtcttccttagt

SEQ ID NO: 41755 - DNA, 16 bp, synthetic construct
  misc_feature 1..16: note = synthetic [barcode part1]
  source 1..16: mol_type = other DNA
gtacgtactaggactc

SEQ ID NO: 41756 - DNA, 16 bp, synthetic construct
  misc_feature 1..16: note = synthetic [barcode part1]
  source 1..16: mol_type = other DNA
cagtgcgagttatacc

SEQ ID NO: 41757 - DNA, 16 bp, synthetic construct
  misc_feature 1..16: note = synthetic [barcode part1]
  source 1..16: mol_type = other DNA
cgttctctgtatcctg

SEQ ID NO: 41758 - DNA, 16 bp, synthetic construct
  misc_feature 1..16: note = synthetic [barcode part1]
  source 1..16: mol_type = other DNA
cgtaacttctctggcg

SEQ ID NO: 41759 - DNA, 16 bp, synthetic construct
  misc_feature 1..16: note = synthetic [barcode part1]
  source 1..16: mol_type = other DNA
tcgtacaattgacgcg

SEQ ID NO: 41760 - DNA, 16 bp, synthetic construct
  misc_feature 1..16: note = synthetic [barcode part1]
  source 1..16: mol_type = other DNA
tactatctaggcctac

SEQ ID NO: 41761 - DNA, 16 bp, synthetic construct
  misc_feature 1..16: note = synthetic [barcode part1]
  source 1..16: mol_type = other DNA
acaactgatatcggcc

SEQ ID NO: 41762 - DNA, 16 bp, synthetic construct
  misc_feature 1..16: note = synthetic [barcode part1]
  source 1..16: mol_type = other DNA
tccaccggagaattgt

SEQ ID NO: 41763 - DNA, 16 bp, synthetic construct
  misc_feature 1..16: note = synthetic [barcode part1]
  source 1..16: mol_type = other DNA
tattctccgcactctg

SEQ ID NO: 41764 - DNA, 16 bp, synthetic construct
  misc_feature 1..16: note = synthetic [barcode part1]
  source 1..16: mol_type = other DNA
gcgatatcaacaccac

SEQ ID NO: 41765 - DNA, 16 bp, synthetic construct
  misc_feature 1..16: note = synthetic [barcode part1]
  source 1..16: mol_type = other DNA
ttatctccgaccttcg

SEQ ID NO: 41766 - DNA, 16 bp, synthetic construct
  misc_feature 1..16: note = synthetic [barcode part1]
  source 1..16: mol_type = other DNA
agaatctcgtccgcct

SEQ ID NO: 41767 - DNA, 16 bp, synthetic construct
  misc_feature 1..16: note = synthetic [barcode part1]
  source 1..16: mol_type = other DNA
agtgtggtgtctctag

SEQ ID NO: 41768 - DNA, 16 bp, synthetic construct
  misc_feature 1..16: note = synthetic [barcode part1]
  source 1..16: mol_type = other DNA
caggtatccagatacc

SEQ ID NO: 41769 - DNA, 16 bp, synthetic construct
  misc_feature 1..16: note = synthetic [barcode part1]
  source 1..16: mol_type = other DNA
agtgtctggacacttg

SEQ ID NO: 41770 - DNA, 16 bp, synthetic construct
  misc_feature 1..16: note = synthetic [barcode part1]
  source 1..16: mol_type = other DNA
ttatcaacttcgcgtg

SEQ ID NO: 41771 - DNA, 16 bp, synthetic construct
  misc_feature 1..16: note = synthetic [barcode part1]
  source 1..16: mol_type = other DNA
acggaacagtgcctag

SEQ ID NO: 41772 - DNA, 16 bp, synthetic construct
  misc_feature 1..16: note = synthetic [barcode part1]
  source 1..16: mol_type = other DNA
cagatacctggatacc

SEQ ID NO: 41773 - DNA, 16 bp, synthetic construct
  misc_feature 1..16: note = synthetic [barcode part1]
  source 1..16: mol_type = other DNA
gtcgtgatccggaatt

SEQ ID NO: 41774 - DNA, 16 bp, synthetic construct
  misc_feature 1..16: note = synthetic [barcode part1]
  source 1..16: mol_type = other DNA
gtcgacgtagacttac

SEQ ID NO: 41775 - DNA, 16 bp, synthetic construct
  misc_feature 1..16: note = synthetic [barcode part1]
  source 1..16: mol_type = other DNA
aactcttggcctatac

SEQ ID NO: 41776 - DNA, 16 bp, synthetic construct
  misc_feature 1..16: note = synthetic [barcode part1]
  source 1..16: mol_type = other DNA
gcgtccttcggattgt

SEQ ID NO: 41777 - DNA, 16 bp, synthetic construct
  misc_feature 1..16: note = synthetic [barcode part1]
  source 1..16: mol_type = other DNA
gacacactcttagtct

SEQ ID NO: 41778 - DNA, 16 bp, synthetic construct
  misc_feature 1..16: note = synthetic [barcode part1]
  source 1..16: mol_type = other DNA
acaccggattaagaac

SEQ ID NO: 41779 - DNA, 16 bp, synthetic construct
  misc_feature 1..16: note = synthetic [barcode part1]
  source 1..16: mol_type = other DNA
ttgacgtcaacgtgtg

SEQ ID NO: 41780 - DNA, 16 bp, synthetic construct
  misc_feature 1..16: note = synthetic [barcode part1]
  source 1..16: mol_type = other DNA
ttctcctgccacaatc

SEQ ID NO: 41781 - DNA, 16 bp, synthetic construct
  misc_feature 1..16: note = synthetic [barcode part1]
  source 1..16: mol_type = other DNA
agtgactggagtgcac

SEQ ID NO: 41782 - DNA, 16 bp, synthetic construct
  misc_feature 1..16: note = synthetic [barcode part1]
  source 1..16: mol_type = other DNA
tgaccgcgaatattcg

SEQ ID NO: 41783 - DNA, 16 bp, synthetic construct
  misc_feature 1..16: note = synthetic [barcode part1]
  source 1..16: mol_type = other DNA
acgcgatcaactgtgt

SEQ ID NO: 41784 - DNA, 16 bp, synthetic construct
  misc_feature 1..16: note = synthetic [barcode part1]
  source 1..16: mol_type = other DNA
tcacagagtagttgcc

SEQ ID NO: 41785 - DNA, 16 bp, synthetic construct
  misc_feature 1..16: note = synthetic [barcode part1]
  source 1..16: mol_type = other DNA
agagtgacgaacactt

SEQ ID NO: 41786 - DNA, 16 bp, synthetic construct
  misc_feature 1..16: note = synthetic [barcode part1]
  source 1..16: mol_type = other DNA
gaatacaattggaccg

SEQ ID NO: 41787 - DNA, 16 bp, synthetic construct
  misc_feature 1..16: note = synthetic [barcode part1]
  source 1..16: mol_type = other DNA
tactgttgacacactc

SEQ ID NO: 41788 - DNA, 16 bp, synthetic construct
  misc_feature 1..16: note = synthetic [barcode part1]
  source 1..16: mol_type = other DNA
tcaattaccggagtcg

SEQ ID NO: 41789 - DNA, 16 bp, synthetic construct
  misc_feature 1..16: note = synthetic [barcode part1]
  source 1..16: mol_type = other DNA
tgagtctctgtgaacg

SEQ ID NO: 41790 - DNA, 16 bp, synthetic construct
  misc_feature 1..16: note = synthetic [barcode part1]
  source 1..16: mol_type = other DNA
gaagaaccacctcgtt

SEQ ID NO: 41791 - DNA, 16 bp, synthetic construct
  misc_feature 1..16: note = synthetic [barcode part1]
  source 1..16: mol_type = other DNA
aagtcgtccgcacttc

SEQ ID NO: 41792 - DNA, 16 bp, synthetic construct
  misc_feature 1..16: note = synthetic [barcode part1]
  source 1..16: mol_type = other DNA
tgacacggtcgtctct

SEQ ID NO: 41793 - DNA, 16 bp, synthetic construct
  misc_feature 1..16: note = synthetic [barcode part1]
  source 1..16: mol_type = other DNA
gttaccacacacctcg

SEQ ID NO: 41794 - DNA, 16 bp, synthetic construct
  misc_feature 1..16: note = synthetic [barcode part1]
  source 1..16: mol_type = other DNA
gtagaatcgttcgaag

SEQ ID NO: 41795 - DNA, 16 bp, synthetic construct
  misc_feature 1..16: note = synthetic [barcode part1]
  source 1..16: mol_type = other DNA
ttcactaggaacggtc

SEQ ID NO: 41796 - DNA, 16 bp, synthetic construct
  misc_feature 1..16: note = synthetic [barcode part1]
  source 1..16: mol_type = other DNA
cactgccagacgttct

SEQ ID NO: 41797 - DNA, 16 bp, synthetic construct
  misc_feature 1..16: note = synthetic [barcode part1]
  source 1..16: mol_type = other DNA
tgaacaactcaaggtg

SEQ ID NO: 41798 - DNA, 16 bp, synthetic construct
  misc_feature 1..16: note = synthetic [barcode part1]
  source 1..16: mol_type = other DNA
ttaggcggtgacaggt

SEQ ID NO: 41799 - DNA, 16 bp, synthetic construct
  misc_feature 1..16: note = synthetic [barcode part1]
  source 1..16: mol_type = other DNA
aaggtcttacctactc

SEQ ID NO: 41800 - DNA, 16 bp, synthetic construct
  misc_feature 1..16: note = synthetic [barcode part1]
  source 1..16: mol_type = other DNA
gcaacgaagacactcg

SEQ ID NO: 41801 - DNA, 16 bp, synthetic construct
  misc_feature 1..16: note = synthetic [barcode part1]
  source 1..16: mol_type = other DNA
tattcaagtcggagag

SEQ ID NO: 41802 - DNA, 16 bp, synthetic construct
  misc_feature 1..16: note = synthetic [barcode part1]
  source 1..16: mol_type = other DNA
cactagtgttagtgcg

SEQ ID NO: 41803 - DNA, 16 bp, synthetic construct
  misc_feature 1..16: note = synthetic [barcode part1]
  source 1..16: mol_type = other DNA
aggtaggttcaagatc

SEQ ID NO: 41804 - DNA, 16 bp, synthetic construct
  misc_feature 1..16: note = synthetic [barcode part1]
  source 1..16: mol_type = other DNA
aggagtgacagtctgc

SEQ ID NO: 41805 - DNA, 16 bp, synthetic construct
  misc_feature 1..16: note = synthetic [barcode part1]
  source 1..16: mol_type = other DNA
acagtcgtgtacggtt

SEQ ID NO: 41806 - DNA, 16 bp, synthetic construct
  misc_feature 1..16: note = synthetic [barcode part1]
  source 1..16: mol_type = other DNA
tctgaacctattgtcg

SEQ ID NO: 41807 - DNA, 16 bp, synthetic construct
  misc_feature 1..16: note = synthetic [barcode part1]
  source 1..16: mol_type = other DNA
cgcaccttctgtactt

SEQ ID NO: 41808 - DNA, 16 bp, synthetic construct
  misc_feature 1..16: note = synthetic [barcode part1]
  source 1..16: mol_type = other DNA
cacgttcttgccgaac

SEQ ID NO: 41809 - DNA, 16 bp, synthetic construct
  misc_feature 1..16: note = synthetic [barcode part1]
  source 1..16: mol_type = other DNA
ttcgccgttaagtgtt

SEQ ID NO: 41810 - DNA, 16 bp, synthetic construct
  misc_feature 1..16: note = synthetic [barcode part1]
  source 1..16: mol_type = other DNA
tgtggacggtgagact

SEQ ID NO: 41811 - DNA, 16 bp, synthetic construct
  misc_feature 1..16: note = synthetic [barcode part1]
  source 1..16: mol_type = other DNA
attaagtcggaggcgc

SEQ ID NO: 41812 - DNA, 16 bp, synthetic construct
  misc_feature 1..16: note = synthetic [barcode part1]
  source 1..16: mol_type = other DNA
gtatcagatcgagaac

SEQ ID NO: 41813 - DNA, 16 bp, synthetic construct
  misc_feature 1..16: note = synthetic [barcode part1]
  source 1..16: mol_type = other DNA
cagtcaagttagtcgc

SEQ ID NO: 41814 - DNA, 16 bp, synthetic construct
  misc_feature 1..16: note = synthetic [barcode part1]
  source 1..16: mol_type = other DNA
gaaccacacgaggact

SEQ ID NO: 41815 - DNA, 16 bp, synthetic construct
  misc_feature 1..16: note = synthetic [barcode part1]
  source 1..16: mol_type = other DNA
ttccacactagactgt

SEQ ID NO: 41816 - DNA, 16 bp, synthetic construct
  misc_feature 1..16: note = synthetic [barcode part1]
  source 1..16: mol_type = other DNA
agtgcgcgatcttctc

SEQ ID NO: 41817 - DNA, 16 bp, synthetic construct
  misc_feature 1..16: note = synthetic [barcode part1]
  source 1..16: mol_type = other DNA
tacgtagtgccttgcc

SEQ ID NO: 41818 - DNA, 16 bp, synthetic construct
  misc_feature 1..16: note = synthetic [barcode part1]
  source 1..16: mol_type = other DNA
aagaccgtagtccttg

SEQ ID NO: 41819 - DNA, 16 bp, synthetic construct
  misc_feature 1..16: note = synthetic [barcode part1]
  source 1..16: mol_type = other DNA
cactgaattgcgcctc

SEQ ID NO: 41820 - DNA, 16 bp, synthetic construct
  misc_feature 1..16: note = synthetic [barcode part1]
  source 1..16: mol_type = other DNA
aaccgtacgatacgtc

SEQ ID NO: 41821 - DNA, 16 bp, synthetic construct
  misc_feature 1..16: note = synthetic [barcode part1]
  source 1..16: mol_type = other DNA
gcaccaggttaccttc

SEQ ID NO: 41822 - DNA, 16 bp, synthetic construct
  misc_feature 1..16: note = synthetic [barcode part1]
  source 1..16: mol_type = other DNA
tctcgaaggtaggcag

SEQ ID NO: 41823 - DNA, 16 bp, synthetic construct
  misc_feature 1..16: note = synthetic [barcode part1]
  source 1..16: mol_type = other DNA
ttcgttaccgagtgcc

SEQ ID NO: 41824 - DNA, 16 bp, synthetic construct
  misc_feature 1..16: note = synthetic [barcode part1]
  source 1..16: mol_type = other DNA
ccgtatagaggaattg

SEQ ID NO: 41825 - DNA, 16 bp, synthetic construct
  misc_feature 1..16: note = synthetic [barcode part1]
  source 1..16: mol_type = other DNA
gaattcaagaccgagt

SEQ ID NO: 41826 - DNA, 16 bp, synthetic construct
  misc_feature 1..16: note = synthetic [barcode part1]
  source 1..16: mol_type = other DNA
tgactccaagaggttc

SEQ ID NO: 41827 - DNA, 16 bp, synthetic construct
  misc_feature 1..16: note = synthetic [barcode part1]
  source 1..16: mol_type = other DNA
gagtggaggtactacc

SEQ ID NO: 41828 - DNA, 16 bp, synthetic construct
  misc_feature 1..16: note = synthetic [barcode part1]
  source 1..16: mol_type = other DNA
ttcgaaggttaaccgc

SEQ ID NO: 41829 - DNA, 16 bp, synthetic construct
  misc_feature 1..16: note = synthetic [barcode part1]
  source 1..16: mol_type = other DNA
agttcttcgcgtcgac

SEQ ID NO: 41830 - DNA, 16 bp, synthetic construct
  misc_feature 1..16: note = synthetic [barcode part1]
  source 1..16: mol_type = other DNA
ttacgacaggagagag

SEQ ID NO: 41831 - DNA, 16 bp, synthetic construct
  misc_feature 1..16: note = synthetic [barcode part1]
  source 1..16: mol_type = other DNA
gtgtctcttgaatcac

SEQ ID NO: 41832 - DNA, 16 bp, synthetic construct
  misc_feature 1..16: note = synthetic [barcode part1]
  source 1..16: mol_type = other DNA
ccgcactgtaagagtt

SEQ ID NO: 41833 - DNA, 16 bp, synthetic construct
  misc_feature 1..16: note = synthetic [barcode part1]
  source 1..16: mol_type = other DNA
gtcctgttattagtgc

SEQ ID NO: 41834 - DNA, 16 bp, synthetic construct
  misc_feature 1..16: note = synthetic [barcode part1]
  source 1..16: mol_type = other DNA
cgtgaatagatagtgc

SEQ ID NO: 41835 - DNA, 16 bp, synthetic construct
  misc_feature 1..16: note = synthetic [barcode part1]
  source 1..16: mol_type = other DNA
aactgcgcacgattgt

SEQ ID NO: 41836 - DNA, 16 bp, synthetic construct
  misc_feature 1..16: note = synthetic [barcode part1]
  source 1..16: mol_type = other DNA
gtatcggaactgcgtt

SEQ ID NO: 41837 - DNA, 16 bp, synthetic construct
  misc_feature 1..16: note = synthetic [barcode part1]
  source 1..16: mol_type = other DNA
gacacgtgtactggtt

SEQ ID NO: 41838 - DNA, 16 bp, synthetic construct
  misc_feature 1..16: note = synthetic [barcode part1]
  source 1..16: mol_type = other DNA
cacagacgaacctgtt

SEQ ID NO: 41839 - DNA, 16 bp, synthetic construct
  misc_feature 1..16: note = synthetic [barcode part1]
  source 1..16: mol_type = other DNA
ccacaagatcttctgt

SEQ ID NO: 41840 - DNA, 16 bp, synthetic construct
  misc_feature 1..16: note = synthetic [barcode part1]
  source 1..16: mol_type = other DNA
aggtgttgtaggttcc

SEQ ID NO: 41841 - DNA, 16 bp, synthetic construct
  misc_feature 1..16: note = synthetic [barcode part1]
  source 1..16: mol_type = other DNA
attgcacaaggcggtg

SEQ ID NO: 41842 - DNA, 16 bp, synthetic construct
  misc_feature 1..16: note = synthetic [barcode part1]
  source 1..16: mol_type = other DNA
tctgtaccaacaacct

SEQ ID NO: 41843 - DNA, 16 bp, synthetic construct
  misc_feature 1..16: note = synthetic [barcode part1]
  source 1..16: mol_type = other DNA
aggttcgacctgaact

SEQ ID NO: 41844 - DNA, 16 bp, synthetic construct
  misc_feature 1..16: note = synthetic [barcode part1]
  source 1..16: mol_type = other DNA
ttgacgacagagacgc

SEQ ID NO: 41845 - DNA, 16 bp, synthetic construct
  misc_feature 1..16: note = synthetic [barcode part1]
  source 1..16: mol_type = other DNA
aattgtgcctcgactt

SEQ ID NO: 41846 - DNA, 16 bp, synthetic construct
  misc_feature 1..16: note = synthetic [barcode part1]
  source 1..16: mol_type = other DNA
atctctaagtgactcc

SEQ ID NO: 41847 - DNA, 16 bp, synthetic construct
  misc_feature 1..16: note = synthetic [barcode part1]
  source 1..16: mol_type = other DNA
cgaggcgaatacactg

SEQ ID NO: 41848 - DNA, 16 bp, synthetic construct
  misc_feature 1..16: note = synthetic [barcode part1]
  source 1..16: mol_type = other DNA
tcttgccgccttattg

SEQ ID NO: 41849 - DNA, 16 bp, synthetic construct
  misc_feature 1..16: note = synthetic [barcode part1]
  source 1..16: mol_type = other DNA
gtcctcgacagagatt

SEQ ID NO: 41850 - DNA, 16 bp, synthetic construct
  misc_feature 1..16: note = synthetic [barcode part1]
  source 1..16: mol_type = other DNA
atccttgtagaccact

SEQ ID NO: 41851 - DNA, 16 bp, synthetic construct
  misc_feature 1..16: note = synthetic [barcode part1]
  source 1..16: mol_type = other DNA
aactacgcgtagtcac

SEQ ID NO: 41852 - DNA, 16 bp, synthetic construct
  misc_feature 1..16: note = synthetic [barcode part1]
  source 1..16: mol_type = other DNA
atcgttgaacctggtg

SEQ ID NO: 41853 - DNA, 16 bp, synthetic construct
  misc_feature 1..16: note = synthetic [barcode part1]
  source 1..16: mol_type = other DNA
tagttccgcgtcaatt

SEQ ID NO: 41854 - DNA, 16 bp, synthetic construct
  misc_feature 1..16: note = synthetic [barcode part1]
  source 1..16: mol_type = other DNA
aagttaggtgcgccag

SEQ ID NO: 41855 - DNA, 16 bp, synthetic construct
  misc_feature 1..16: note = synthetic [barcode part1]
  source 1..16: mol_type = other DNA
cgagtcctactacctg

SEQ ID NO: 41856 - DNA, 16 bp, synthetic construct
  misc_feature 1..16: note = synthetic [barcode part1]
  source 1..16: mol_type = other DNA
cgcaaccttctattag

SEQ ID NO: 41857 - DNA, 16 bp, synthetic construct
  misc_feature 1..16: note = synthetic [barcode part1]
  source 1..16: mol_type = other DNA
gtctactcctggaatt

SEQ ID NO: 41858 - DNA, 16 bp, synthetic construct
  misc_feature 1..16: note = synthetic [barcode part1]
  source 1..16: mol_type = other DNA
gtctgtcctacctatc

SEQ ID NO: 41859 - DNA, 16 bp, synthetic construct
  misc_feature 1..16: note = synthetic [barcode part1]
  source 1..16: mol_type = other DNA
agtgtgtacacgttgc

SEQ ID NO: 41860 - DNA, 16 bp, synthetic construct
  misc_feature 1..16: note = synthetic [barcode part1]
  source 1..16: mol_type = other DNA
ccgtagaatagagtgt

SEQ ID NO: 41861 - DNA, 16 bp, synthetic construct
  misc_feature 1..16: note = synthetic [barcode part1]
  source 1..16: mol_type = other DNA
agactaacgacgcacg

SEQ ID NO: 41862 - DNA, 16 bp, synthetic construct
  misc_feature 1..16: note = synthetic [barcode part1]
  source 1..16: mol_type = other DNA
gttcgaactcgttgcc

SEQ ID NO: 41863 - DNA, 16 bp, synthetic construct
  misc_feature 1..16: note = synthetic [barcode part1]
  source 1..16: mol_type = other DNA
aacgcacgaagaactt

SEQ ID NO: 41864 - DNA, 16 bp, synthetic construct
  misc_feature 1..16: note = synthetic [barcode part1]
  source 1..16: mol_type = other DNA
tacaggtgagtaacac

SEQ ID NO: 41865 - DNA, 16 bp, synthetic construct
  misc_feature 1..16: note = synthetic [barcode part1]
  source 1..16: mol_type = other DNA
tcggcgttcctaactg

SEQ ID NO: 41866 - DNA, 16 bp, synthetic construct
  misc_feature 1..16: note = synthetic [barcode part1]
  source 1..16: mol_type = other DNA
gcctacttgaggtctc

SEQ ID NO: 41867 - DNA, 16 bp, synthetic construct
  misc_feature 1..16: note = synthetic [barcode part1]
  source 1..16: mol_type = other DNA
taggcactcaacgtgt

SEQ ID NO: 41868 - DNA, 16 bp, synthetic construct
  misc_feature 1..16: note = synthetic [barcode part1]
  source 1..16: mol_type = other DNA
tgatcttgtgtgccgc

SEQ ID NO: 41869 - DNA, 16 bp, synthetic construct
  misc_feature 1..16: note = synthetic [barcode part1]
  source 1..16: mol_type = other DNA
cctatatacgtgaggc

SEQ ID NO: 41870 - DNA, 16 bp, synthetic construct
  misc_feature 1..16: note = synthetic [barcode part1]
  source 1..16: mol_type = other DNA
gttccacgacaacaac

SEQ ID NO: 41871 - DNA, 16 bp, synthetic construct
  misc_feature 1..16: note = synthetic [barcode part1]
  source 1..16: mol_type = other DNA
tgtacacgtacgtacg

SEQ ID NO: 41872 - DNA, 16 bp, synthetic construct
  misc_feature 1..16: note = synthetic [barcode part1]
  source 1..16: mol_type = other DNA
gtaacacgtgttacgc

SEQ ID NO: 41873 - DNA, 16 bp, synthetic construct
  misc_feature 1..16: note = synthetic [barcode part1]
  source 1..16: mol_type = other DNA
gcaacgtgtcaactgt

SEQ ID NO: 41874 - DNA, 16 bp, synthetic construct
  misc_feature 1..16: note = synthetic [barcode part1]
  source 1..16: mol_type = other DNA
gtcgcctctataagtt

SEQ ID NO: 41875 - DNA, 16 bp, synthetic construct
  misc_feature 1..16: note = synthetic [barcode part1]
  source 1..16: mol_type = other DNA
cgagattatacgtgcc

SEQ ID NO: 41876 - DNA, 16 bp, synthetic construct
  misc_feature 1..16: note = synthetic [barcode part1]
  source 1..16: mol_type = other DNA
attccgcctcaacttc

SEQ ID NO: 41877 - DNA, 16 bp, synthetic construct
  misc_feature 1..16: note = synthetic [barcode part1]
  source 1..16: mol_type = other DNA
tgcagtgacttatcct

SEQ ID NO: 41878 - DNA, 16 bp, synthetic construct
  misc_feature 1..16: note = synthetic [barcode part1]
  source 1..16: mol_type = other DNA
tggtcttgttggtgtt

SEQ ID NO: 41879 - DNA, 16 bp, synthetic construct
  misc_feature 1..16: note = synthetic [barcode part1]
  source 1..16: mol_type = other DNA
cctgtgcaactattgt

SEQ ID NO: 41880 - DNA, 16 bp, synthetic construct
  misc_feature 1..16: note = synthetic [barcode part1]
  source 1..16: mol_type = other DNA
gattacgacacactgc

SEQ ID NO: 41881 - DNA, 16 bp, synthetic construct
  misc_feature 1..16: note = synthetic [barcode part1]
  source 1..16: mol_type = other DNA
cctgattccgacttct

SEQ ID NO: 41882 - DNA, 16 bp, synthetic construct
  misc_feature 1..16: note = synthetic [barcode part1]
  source 1..16: mol_type = other DNA
tggtctctagtacgcc

SEQ ID NO: 41883 - DNA, 16 bp, synthetic construct
  misc_feature 1..16: note = synthetic [barcode part1]
  source 1..16: mol_type = other DNA
cacgattaccgttccg

SEQ ID NO: 41884 - DNA, 16 bp, synthetic construct
  misc_feature 1..16: note = synthetic [barcode part1]
  source 1..16: mol_type = other DNA
attcttcgcaccgacg

SEQ ID NO: 41885 - DNA, 16 bp, synthetic construct
  misc_feature 1..16: note = synthetic [barcode part1]
  source 1..16: mol_type = other DNA
ttctaactcctaccgc

SEQ ID NO: 41886 - DNA, 16 bp, synthetic construct
  misc_feature 1..16: note = synthetic [barcode part1]
  source 1..16: mol_type = other DNA
gacaccgatactgtac

SEQ ID NO: 41887 - DNA, 16 bp, synthetic construct
  misc_feature 1..16: note = synthetic [barcode part1]
  source 1..16: mol_type = other DNA
acttgtccggagtcct

SEQ ID NO: 41888 - DNA, 16 bp, synthetic construct
  misc_feature 1..16: note = synthetic [barcode part1]
  source 1..16: mol_type = other DNA
tagtgcggtcgtctct

SEQ ID NO: 41889 - DNA, 16 bp, synthetic construct
  misc_feature 1..16: note = synthetic [barcode part1]
  source 1..16: mol_type = other DNA
actcttgtcgttgagt

SEQ ID NO: 41890 - DNA, 16 bp, synthetic construct
  misc_feature 1..16: note = synthetic [barcode part1]
  source 1..16: mol_type = other DNA
tcgccgagtatcttcg

SEQ ID NO: 41891 - DNA, 16 bp, synthetic construct
  misc_feature 1..16: note = synthetic [barcode part1]
  source 1..16: mol_type = other DNA
tgcgtagagaccgagt

SEQ ID NO: 41892 - DNA, 16 bp, synthetic construct
  misc_feature 1..16: note = synthetic [barcode part1]
  source 1..16: mol_type = other DNA
cgccaaggtagaagtc

SEQ ID NO: 41893 - DNA, 16 bp, synthetic construct
  misc_feature 1..16: note = synthetic [barcode part1]
  source 1..16: mol_type = other DNA
gtagatcgaggcagtc

SEQ ID NO: 41894 - DNA, 16 bp, synthetic construct
  misc_feature 1..16: note = synthetic [barcode part1]
  source 1..16: mol_type = other DNA
attcggattgcagacc

SEQ ID NO: 41895 - DNA, 16 bp, synthetic construct
  misc_feature 1..16: note = synthetic [barcode part1]
  source 1..16: mol_type = other DNA
ttacaggttcgtggac

SEQ ID NO: 41896 - DNA, 16 bp, synthetic construct
  misc_feature 1..16: note = synthetic [barcode part1]
  source 1..16: mol_type = other DNA
agattcgacaatcgcc

SEQ ID NO: 41897 - DNA, 16 bp, synthetic construct
  misc_feature 1..16: note = synthetic [barcode part1]
  source 1..16: mol_type = other DNA
tgcgttcttcggtgac

SEQ ID NO: 41898 - DNA, 16 bp, synthetic construct
  misc_feature 1..16: note = synthetic [barcode part1]
  source 1..16: mol_type = other DNA
actctcgcagagatac

SEQ ID NO: 41899 - DNA, 16 bp, synthetic construct
  misc_feature 1..16: note = synthetic [barcode part1]
  source 1..16: mol_type = other DNA
atcgcggttacgatac

SEQ ID NO: 41900 - DNA, 16 bp, synthetic construct
  misc_feature 1..16: note = synthetic [barcode part1]
  source 1..16: mol_type = other DNA
tcaacgtcctcaattg

SEQ ID NO: 41901 - DNA, 16 bp, synthetic construct
  misc_feature 1..16: note = synthetic [barcode part1]
  source 1..16: mol_type = other DNA
ttctgacgtacctagt

SEQ ID NO: 41902 - DNA, 16 bp, synthetic construct
  misc_feature 1..16: note = synthetic [barcode part1]
  source 1..16: mol_type = other DNA
tggccttataccgacc

SEQ ID NO: 41903 - DNA, 16 bp, synthetic construct
  misc_feature 1..16: note = synthetic [barcode part1]
  source 1..16: mol_type = other DNA
gttgaattgtcctcgt

SEQ ID NO: 41904 - DNA, 16 bp, synthetic construct
  misc_feature 1..16: note = synthetic [barcode part1]
  source 1..16: mol_type = other DNA
ccaaggtgcaatacct

SEQ ID NO: 41905 - DNA, 16 bp, synthetic construct
  misc_feature 1..16: note = synthetic [barcode part1]
  source 1..16: mol_type = other DNA
cgtcacgcaattagtg

SEQ ID NO: 41906 - DNA, 16 bp, synthetic construct
  misc_feature 1..16: note = synthetic [barcode part1]
  source 1..16: mol_type = other DNA
agttagattgcacgag

SEQ ID NO: 41907 - DNA, 16 bp, synthetic construct
  misc_feature 1..16: note = synthetic [barcode part1]
  source 1..16: mol_type = other DNA
tcgaagtcacttatcc

SEQ ID NO: 41908 - DNA, 16 bp, synthetic construct
  misc_feature 1..16: note = synthetic [barcode part1]
  source 1..16: mol_type = other DNA
gaggaatcgttccgtt

SEQ ID NO: 41909 - DNA, 16 bp, synthetic construct
  misc_feature 1..16: note = synthetic [barcode part1]
  source 1..16: mol_type = other DNA
cctcaggatagtgttg

SEQ ID NO: 41910 - DNA, 16 bp, synthetic construct
  misc_feature 1..16: note = synthetic [barcode part1]
  source 1..16: mol_type = other DNA
aatctgcaggttcgtg

SEQ ID NO: 41911 - DNA, 16 bp, synthetic construct
  misc_feature 1..16: note = synthetic [barcode part1]
  source 1..16: mol_type = other DNA
gaggtagttcagatac

SEQ ID NO: 41912 - DNA, 16 bp, synthetic construct
  misc_feature 1..16: note = synthetic [barcode part1]
  source 1..16: mol_type = other DNA
tattacctgtctcgcc

SEQ ID NO: 41913 - DNA, 16 bp, synthetic construct
  misc_feature 1..16: note = synthetic [barcode part1]
  source 1..16: mol_type = other DNA
tgccgacggaactaag

SEQ ID NO: 41914 - DNA, 16 bp, synthetic construct
  misc_feature 1..16: note = synthetic [barcode part1]
  source 1..16: mol_type = other DNA
gtcctgtgttccttac

SEQ ID NO: 41915 - DNA, 16 bp, synthetic construct
  misc_feature 1..16: note = synthetic [barcode part1]
  source 1..16: mol_type = other DNA
caacacaccggtatac

SEQ ID NO: 41916 - DNA, 16 bp, synthetic construct
  misc_feature 1..16: note = synthetic [barcode part1]
  source 1..16: mol_type = other DNA
acacgtgactaaccgt

SEQ ID NO: 41917 - DNA, 16 bp, synthetic construct
  misc_feature 1..16: note = synthetic [barcode part1]
  source 1..16: mol_type = other DNA
cggcctaatccaatag

SEQ ID NO: 41918 - DNA, 16 bp, synthetic construct
  misc_feature 1..16: note = synthetic [barcode part1]
  source 1..16: mol_type = other DNA
tacgcctcagactacc

SEQ ID NO: 41919 - DNA, 16 bp, synthetic construct
  misc_feature 1..16: note = synthetic [barcode part1]
  source 1..16: mol_type = other DNA
acacgcggtactatac

SEQ ID NO: 41920 - DNA, 16 bp, synthetic construct
  misc_feature 1..16: note = synthetic [barcode part1]
  source 1..16: mol_type = other DNA
tctgaccgattggaac

SEQ ID NO: 41921 - DNA, 16 bp, synthetic construct
  misc_feature 1..16: note = synthetic [barcode part1]
  source 1..16: mol_type = other DNA
gcaatcactaaccttc

SEQ ID NO: 41922 - DNA, 16 bp, synthetic construct
  misc_feature 1..16: note = synthetic [barcode part1]
  source 1..16: mol_type = other DNA
tcggtatccgacttcg

SEQ ID NO: 41923 - DNA, 16 bp, synthetic construct
  misc_feature 1..16: note = synthetic [barcode part1]
  source 1..16: mol_type = other DNA
tcgagaggattatacg

SEQ ID NO: 41924 - DNA, 16 bp, synthetic construct
  misc_feature 1..16: note = synthetic [barcode part1]
  source 1..16: mol_type = other DNA
ttgtgccagacacaac

SEQ ID NO: 41925 - DNA, 16 bp, synthetic construct
  misc_feature 1..16: note = synthetic [barcode part1]
  source 1..16: mol_type = other DNA
gattggttggtatcgc

SEQ ID NO: 41926 - DNA, 16 bp, synthetic construct
  misc_feature 1..16: note = synthetic [barcode part1]
  source 1..16: mol_type = other DNA
gtgttccttgaactac

SEQ ID NO: 41927 - DNA, 16 bp, synthetic construct
  misc_feature 1..16: note = synthetic [barcode part1]
  source 1..16: mol_type = other DNA
gtacgataccagtacc

SEQ ID NO: 41928 - DNA, 16 bp, synthetic construct
  misc_feature 1..16: note = synthetic [barcode part1]
  source 1..16: mol_type = other DNA
gcgttcggatacttag

SEQ ID NO: 41929 - DNA, 16 bp, synthetic construct
  misc_feature 1..16: note = synthetic [barcode part1]
  source 1..16: mol_type = other DNA
aggtccgaggttgaac

SEQ ID NO: 41930 - DNA, 16 bp, synthetic construct
  misc_feature 1..16: note = synthetic [barcode part1]
  source 1..16: mol_type = other DNA
accgtagacgatacct

SEQ ID NO: 41931 - DNA, 16 bp, synthetic construct
  misc_feature 1..16: note = synthetic [barcode part1]
  source 1..16: mol_type = other DNA
agtcggaggtgataag

SEQ ID NO: 41932 - DNA, 16 bp, synthetic construct
  misc_feature 1..16: note = synthetic [barcode part1]
  source 1..16: mol_type = other DNA
tgtgtctgacgatctt

SEQ ID NO: 41933 - DNA, 16 bp, synthetic construct
  misc_feature 1..16: note = synthetic [barcode part1]
  source 1..16: mol_type = other DNA
gtcagagtaactacag

SEQ ID NO: 41934 - DNA, 16 bp, synthetic construct
  misc_feature 1..16: note = synthetic [barcode part1]
  source 1..16: mol_type = other DNA
agaattgtcaacgcag

SEQ ID NO: 41935 - DNA, 16 bp, synthetic construct
  misc_feature 1..16: note = synthetic [barcode part1]
  source 1..16: mol_type = other DNA
atcgtcctggaacaac

SEQ ID NO: 41936 - DNA, 16 bp, synthetic construct
  misc_feature 1..16: note = synthetic [barcode part1]
  source 1..16: mol_type = other DNA
agattaggtcggcacg

SEQ ID NO: 41937 - DNA, 16 bp, synthetic construct
  misc_feature 1..16: note = synthetic [barcode part1]
  source 1..16: mol_type = other DNA
ttaggtgcgttcagac

SEQ ID NO: 41938 - DNA, 16 bp, synthetic construct
  misc_feature 1..16: note = synthetic [barcode part1]
  source 1..16: mol_type = other DNA
tcaataactgccaggc

SEQ ID NO: 41939 - DNA, 16 bp, synthetic construct
  misc_feature 1..16: note = synthetic [barcode part1]
  source 1..16: mol_type = other DNA
caagttcgataagacg

SEQ ID NO: 41940 - DNA, 16 bp, synthetic construct
  misc_feature 1..16: note = synthetic [barcode part1]
  source 1..16: mol_type = other DNA
caacgcagagaattgt

SEQ ID NO: 41941 - DNA, 16 bp, synthetic construct
  misc_feature 1..16: note = synthetic [barcode part1]
  source 1..16: mol_type = other DNA
gttaagtcttggcggt

SEQ ID NO: 41942 - DNA, 16 bp, synthetic construct
  misc_feature 1..16: note = synthetic [barcode part1]
  source 1..16: mol_type = other DNA
atcctcacgttgagtt

SEQ ID NO: 41943 - DNA, 16 bp, synthetic construct
  misc_feature 1..16: note = synthetic [barcode part1]
  source 1..16: mol_type = other DNA
gttgttcggtggagtt

SEQ ID NO: 41944 - DNA, 16 bp, synthetic construct
  misc_feature 1..16: note = synthetic [barcode part1]
  source 1..16: mol_type = other DNA
aaggcagtcacggatc

SEQ ID NO: 41945 - DNA, 16 bp, synthetic construct
  misc_feature 1..16: note = synthetic [barcode part1]
  source 1..16: mol_type = other DNA
acctaacctctgcgtg

SEQ ID NO: 41946 - DNA, 16 bp, synthetic construct
  misc_feature 1..16: note = synthetic [barcode part1]
  source 1..16: mol_type = other DNA
atctgttacagtgtcc

SEQ ID NO: 41947 - DNA, 16 bp, synthetic construct
  misc_feature 1..16: note = synthetic [barcode part1]
  source 1..16: mol_type = other DNA
cgtacctatccgacac

SEQ ID NO: 41948 - DNA, 16 bp, synthetic construct
  misc_feature 1..16: note = synthetic [barcode part1]
  source 1..16: mol_type = other DNA
ccaacgaatctggtgt

SEQ ID NO: 41949 - DNA, 16 bp, synthetic construct
  misc_feature 1..16: note = synthetic [barcode part1]
  source 1..16: mol_type = other DNA
tatcgaggatataggc

SEQ ID NO: 41950 - DNA, 16 bp, synthetic construct
  misc_feature 1..16: note = synthetic [barcode part1]
  source 1..16: mol_type = other DNA
cgcaacgtgttgtaac

SEQ ID NO: 41951 - DNA, 16 bp, synthetic construct
  misc_feature 1..16: note = synthetic [barcode part1]
  source 1..16: mol_type = other DNA
tcaccggcctctatag

SEQ ID NO: 41952 - DNA, 16 bp, synthetic construct
  misc_feature 1..16: note = synthetic [barcode part1]
  source 1..16: mol_type = other DNA
atacttcgaccaccgc

SEQ ID NO: 41953 - DNA, 16 bp, synthetic construct
  misc_feature 1..16: note = synthetic [barcode part1]
  source 1..16: mol_type = other DNA
gcgcaataatcagagt

SEQ ID NO: 41954 - DNA, 16 bp, synthetic construct
  misc_feature 1..16: note = synthetic [barcode part1]
  source 1..16: mol_type = other DNA
caatcctcacgattgt

SEQ ID NO: 41955 - DNA, 16 bp, synthetic construct
  misc_feature 1..16: note = synthetic [barcode part1]
  source 1..16: mol_type = other DNA
tacggcgaatactacc

SEQ ID NO: 41956 - DNA, 16 bp, synthetic construct
  misc_feature 1..16: note = synthetic [barcode part1]
  source 1..16: mol_type = other DNA
acttggaggtattcgc

SEQ ID NO: 41957 - DNA, 16 bp, synthetic construct
  misc_feature 1..16: note = synthetic [barcode part1]
  source 1..16: mol_type = other DNA
agtagtcacacaagac

SEQ ID NO: 41958 - DNA, 16 bp, synthetic construct
  misc_feature 1..16: note = synthetic [barcode part1]
  source 1..16: mol_type = other DNA
attaggacggttgtag

SEQ ID NO: 41959 - DNA, 16 bp, synthetic construct
  misc_feature 1..16: note = synthetic [barcode part1]
  source 1..16: mol_type = other DNA
taacggttcggactac

SEQ ID NO: 41960 - DNA, 16 bp, synthetic construct
  misc_feature 1..16: note = synthetic [barcode part1]
  source 1..16: mol_type = other DNA
caagactgtgtcgtac

SEQ ID NO: 41961 - DNA, 16 bp, synthetic construct
  misc_feature 1..16: note = synthetic [barcode part1]
  source 1..16: mol_type = other DNA
aatacgtaaccggagt

SEQ ID NO: 41962 - DNA, 16 bp, synthetic construct
  misc_feature 1..16: note = synthetic [barcode part1]
  source 1..16: mol_type = other DNA
gcgtctcgattaccgt

SEQ ID NO: 41963 - DNA, 16 bp, synthetic construct
  misc_feature 1..16: note = synthetic [barcode part1]
  source 1..16: mol_type = other DNA
tgcaatctctctaacg

SEQ ID NO: 41964 - DNA, 16 bp, synthetic construct
  misc_feature 1..16: note = synthetic [barcode part1]
  source 1..16: mol_type = other DNA
agaattgcacgagttg

SEQ ID NO: 41965 - DNA, 16 bp, synthetic construct
  misc_feature 1..16: note = synthetic [barcode part1]
  source 1..16: mol_type = other DNA
tcttacaccagatcac

SEQ ID NO: 41966 - DNA, 16 bp, synthetic construct
  misc_feature 1..16: note = synthetic [barcode part1]
  source 1..16: mol_type = other DNA
ccagtctgacgataac

SEQ ID NO: 41967 - DNA, 16 bp, synthetic construct
  misc_feature 1..16: note = synthetic [barcode part1]
  source 1..16: mol_type = other DNA
gagtatcgcaacggac

SEQ ID NO: 41968 - DNA, 16 bp, synthetic construct
  misc_feature 1..16: note = synthetic [barcode part1]
  source 1..16: mol_type = other DNA
cgcctatacttacctc

SEQ ID NO: 41969 - DNA, 16 bp, synthetic construct
  misc_feature 1..16: note = synthetic [barcode part1]
  source 1..16: mol_type = other DNA
aacacgttggttgcac

SEQ ID NO: 41970 - DNA, 16 bp, synthetic construct
  misc_feature 1..16: note = synthetic [barcode part1]
  source 1..16: mol_type = other DNA
cgagtacttctcaact

SEQ ID NO: 41971 - DNA, 16 bp, synthetic construct
  misc_feature 1..16: note = synthetic [barcode part1]
  source 1..16: mol_type = other DNA
cagtgcgtctcgttac

SEQ ID NO: 41972 - DNA, 16 bp, synthetic construct
  misc_feature 1..16: note = synthetic [barcode part1]
  source 1..16: mol_type = other DNA
tatcggtcacgatcag

SEQ ID NO: 41973 - DNA, 16 bp, synthetic construct
  misc_feature 1..16: note = synthetic [barcode part1]
  source 1..16: mol_type = other DNA
gagttaccgaactgtc

SEQ ID NO: 41974 - DNA, 16 bp, synthetic construct
  misc_feature 1..16: note = synthetic [barcode part1]
  source 1..16: mol_type = other DNA
gacctctgagatagtc

SEQ ID NO: 41975 - DNA, 16 bp, synthetic construct
  misc_feature 1..16: note = synthetic [barcode part1]
  source 1..16: mol_type = other DNA
tattcggtgataggag

SEQ ID NO: 41976 - DNA, 16 bp, synthetic construct
  misc_feature 1..16: note = synthetic [barcode part1]
  source 1..16: mol_type = other DNA
acttctggcagagact

SEQ ID NO: 41977 - DNA, 16 bp, synthetic construct
  misc_feature 1..16: note = synthetic [barcode part1]
  source 1..16: mol_type = other DNA
agacgaaccgtctgtt

SEQ ID NO: 41978 - DNA, 16 bp, synthetic construct
  misc_feature 1..16: note = synthetic [barcode part1]
  source 1..16: mol_type = other DNA
tcaccactaggcgttc

SEQ ID NO: 41979 - DNA, 16 bp, synthetic construct
  misc_feature 1..16: note = synthetic [barcode part1]
  source 1..16: mol_type = other DNA
gaacgttatccgcaac

SEQ ID NO: 41980 - DNA, 16 bp, synthetic construct
  misc_feature 1..16: note = synthetic [barcode part1]
  source 1..16: mol_type = other DNA
cgacaatactaggtcc

SEQ ID NO: 41981 - DNA, 16 bp, synthetic construct
  misc_feature 1..16: note = synthetic [barcode part1]
  source 1..16: mol_type = other DNA
tcctagtcggttcctt

SEQ ID NO: 41982 - DNA, 16 bp, synthetic construct
  misc_feature 1..16: note = synthetic [barcode part1]
  source 1..16: mol_type = other DNA
tgttcacgttcgtcct

SEQ ID NO: 41983 - DNA, 16 bp, synthetic construct
  misc_feature 1..16: note = synthetic [barcode part1]
  source 1..16: mol_type = other DNA
atatcaacggttctcc

SEQ ID NO: 41984 - DNA, 16 bp, synthetic construct
  misc_feature 1..16: note = synthetic [barcode part1]
  source 1..16: mol_type = other DNA
cgtggactagatatcc

SEQ ID NO: 41985 - DNA, 16 bp, synthetic construct
  misc_feature 1..16: note = synthetic [barcode part1]
  source 1..16: mol_type = other DNA
aaccggtagagaaggt

SEQ ID NO: 41986 - DNA, 16 bp, synthetic construct
  misc_feature 1..16: note = synthetic [barcode part1]
  source 1..16: mol_type = other DNA
acgtgaggtagtccag

SEQ ID NO: 41987 - DNA, 16 bp, synthetic construct
  misc_feature 1..16: note = synthetic [barcode part1]
  source 1..16: mol_type = other DNA
acttacctcgtccgtt

SEQ ID NO: 41988 - DNA, 16 bp, synthetic construct
  misc_feature 1..16: note = synthetic [barcode part1]
  source 1..16: mol_type = other DNA
gaggacgtattgagtt

SEQ ID NO: 41989 - DNA, 16 bp, synthetic construct
  misc_feature 1..16: note = synthetic [barcode part1]
  source 1..16: mol_type = other DNA
gcagtcaggttgaggt

SEQ ID NO: 41990 - DNA, 16 bp, synthetic construct
  misc_feature 1..16: note = synthetic [barcode part1]
  source 1..16: mol_type = other DNA
taggcgaacggataag

SEQ ID NO: 41991 - DNA, 16 bp, synthetic construct
  misc_feature 1..16: note = synthetic [barcode part1]
  source 1..16: mol_type = other DNA
ccagtagttcaacggt

SEQ ID NO: 41992 - DNA, 16 bp, synthetic construct
  misc_feature 1..16: note = synthetic [barcode part1]
  source 1..16: mol_type = other DNA
tgtggacctgtaggtt

SEQ ID NO: 41993 - DNA, 16 bp, synthetic construct
  misc_feature 1..16: note = synthetic [barcode part1]
  source 1..16: mol_type = other DNA
ttccgcacaattcggc

SEQ ID NO: 41994 - DNA, 16 bp, synthetic construct
  misc_feature 1..16: note = synthetic [barcode part1]
  source 1..16: mol_type = other DNA
tacggcactacttgtt

SEQ ID NO: 41995 - DNA, 16 bp, synthetic construct
  misc_feature 1..16: note = synthetic [barcode part1]
  source 1..16: mol_type = other DNA
gacaggaattgaaggc

SEQ ID NO: 41996 - DNA, 16 bp, synthetic construct
  misc_feature 1..16: note = synthetic [barcode part1]
  source 1..16: mol_type = other DNA
caatcaggtaccacac

SEQ ID NO: 41997 - DNA, 16 bp, synthetic construct
  misc_feature 1..16: note = synthetic [barcode part1]
  source 1..16: mol_type = other DNA
gcgaagatcgagtcac

SEQ ID NO: 41998 - DNA, 16 bp, synthetic construct
  misc_feature 1..16: note = synthetic [barcode part1]
  source 1..16: mol_type = other DNA
agtcgttctgtcgaag

SEQ ID NO: 41999 - DNA, 16 bp, synthetic construct
  misc_feature 1..16: note = synthetic [barcode part1]
  source 1..16: mol_type = other DNA
tagtattctgttcgcg

SEQ ID NO: 42000 - DNA, 16 bp, synthetic construct
  misc_feature 1..16: note = synthetic [barcode part1]
  source 1..16: mol_type = other DNA
agagttaacgcctaag

SEQ ID NO: 42001 - DNA, 16 bp, synthetic construct
  misc_feature 1..16: note = synthetic [barcode part1]
  source 1..16: mol_type = other DNA
gacgtcgcaattaacc

SEQ ID NO: 42002 - DNA, 16 bp, synthetic construct
  misc_feature 1..16: note = synthetic [barcode part1]
  source 1..16: mol_type = other DNA
gtgcgatccaacctct

SEQ ID NO: 42003 - DNA, 16 bp, synthetic construct
  misc_feature 1..16: note = synthetic [barcode part1]
  source 1..16: mol_type = other DNA
ttgtgaggtagagtac

SEQ ID NO: 42004 - DNA, 16 bp, synthetic construct
  misc_feature 1..16: note = synthetic [barcode part1]
  source 1..16: mol_type = other DNA
ccggtgtaattaagag

SEQ ID NO: 42005 - DNA, 16 bp, synthetic construct
  misc_feature 1..16: note = synthetic [barcode part1]
  source 1..16: mol_type = other DNA
tcttacacacgtcctc

SEQ ID NO: 42006 - DNA, 16 bp, synthetic construct
  misc_feature 1..16: note = synthetic [barcode part1]
  source 1..16: mol_type = other DNA
aggaacggtgaagatc

SEQ ID NO: 42007 - DNA, 16 bp, synthetic construct
  misc_feature 1..16: note = synthetic [barcode part1]
  source 1..16: mol_type = other DNA
gttctatctcggttcc

SEQ ID NO: 42008 - DNA, 16 bp, synthetic construct
  misc_feature 1..16: note = synthetic [barcode part1]
  source 1..16: mol_type = other DNA
ccgagtagatatccgt

SEQ ID NO: 42009 - DNA, 16 bp, synthetic construct
  misc_feature 1..16: note = synthetic [barcode part1]
  source 1..16: mol_type = other DNA
taggtacttctcaacc

SEQ ID NO: 42010 - DNA, 16 bp, synthetic construct
  misc_feature 1..16: note = synthetic [barcode part1]
  source 1..16: mol_type = other DNA
gtgccgtataacgttg

SEQ ID NO: 42011 - DNA, 16 bp, synthetic construct
  misc_feature 1..16: note = synthetic [barcode part1]
  source 1..16: mol_type = other DNA
taccaactggttgcag

SEQ ID NO: 42012 - DNA, 16 bp, synthetic construct
  misc_feature 1..16: note = synthetic [barcode part1]
  source 1..16: mol_type = other DNA
cgtcaggtaagagtgc

SEQ ID NO: 42013 - DNA, 16 bp, synthetic construct
  misc_feature 1..16: note = synthetic [barcode part1]
  source 1..16: mol_type = other DNA
attaggaactacgcag

SEQ ID NO: 42014 - DNA, 16 bp, synthetic construct
  misc_feature 1..16: note = synthetic [barcode part1]
  source 1..16: mol_type = other DNA
gatcagtcctcagaac

SEQ ID NO: 42015 - DNA, 16 bp, synthetic construct
  misc_feature 1..16: note = synthetic [barcode part1]
  source 1..16: mol_type = other DNA
tcacgaggatagtagt

SEQ ID NO: 42016 - DNA, 16 bp, synthetic construct
  misc_feature 1..16: note = synthetic [barcode part1]
  source 1..16: mol_type = other DNA
caacggttgcgtctct

SEQ ID NO: 42017 - DNA, 16 bp, synthetic construct
  misc_feature 1..16: note = synthetic [barcode part1]
  source 1..16: mol_type = other DNA
gacggatctgcaacag

SEQ ID NO: 42018 - DNA, 16 bp, synthetic construct
  misc_feature 1..16: note = synthetic [barcode part1]
  source 1..16: mol_type = other DNA
gtaccttgttaggtct

SEQ ID NO: 42019 - DNA, 16 bp, synthetic construct
  misc_feature 1..16: note = synthetic [barcode part1]
  source 1..16: mol_type = other DNA
gtcaatcaatcggtcg

SEQ ID NO: 42020 - DNA, 16 bp, synthetic construct
  misc_feature 1..16: note = synthetic [barcode part1]
  source 1..16: mol_type = other DNA
gcagtccttgtacctg

SEQ ID NO: 42021 - DNA, 16 bp, synthetic construct
  misc_feature 1..16: note = synthetic [barcode part1]
  source 1..16: mol_type = other DNA
ccaataccgactacag

SEQ ID NO: 42022 - DNA, 16 bp, synthetic construct
  misc_feature 1..16: note = synthetic [barcode part1]
  source 1..16: mol_type = other DNA
tgcgcaactattacct

SEQ ID NO: 42023 - DNA, 16 bp, synthetic construct
  misc_feature 1..16: note = synthetic [barcode part1]
  source 1..16: mol_type = other DNA
cgttatccacctcact

SEQ ID NO: 42024 - DNA, 16 bp, synthetic construct
  misc_feature 1..16: note = synthetic [barcode part1]
  source 1..16: mol_type = other DNA
aaggttaggtcgtgcg

SEQ ID NO: 42025 - DNA, 16 bp, synthetic construct
  misc_feature 1..16: note = synthetic [barcode part1]
  source 1..16: mol_type = other DNA
tacacactcagagtcg

SEQ ID NO: 42026 - DNA, 16 bp, synthetic construct
  misc_feature 1..16: note = synthetic [barcode part1]
  source 1..16: mol_type = other DNA
actgcagagtaggcgt

SEQ ID NO: 42027 - DNA, 16 bp, synthetic construct
  misc_feature 1..16: note = synthetic [barcode part1]
  source 1..16: mol_type = other DNA
agtctgaactgagtcc

SEQ ID NO: 42028 - DNA, 16 bp, synthetic construct
  misc_feature 1..16: note = synthetic [barcode part1]
  source 1..16: mol_type = other DNA
tgtccacaggtctcac

SEQ ID NO: 42029 - DNA, 16 bp, synthetic construct
  misc_feature 1..16: note = synthetic [barcode part1]
  source 1..16: mol_type = other DNA
taagagtgcaacctag

SEQ ID NO: 42030 - DNA, 16 bp, synthetic construct
  misc_feature 1..16: note = synthetic [barcode part1]
  source 1..16: mol_type = other DNA
tctaactcttctcggc

SEQ ID NO: 42031 - DNA, 16 bp, synthetic construct
  misc_feature 1..16: note = synthetic [barcode part1]
  source 1..16: mol_type = other DNA
gccttcggtctaacgt

SEQ ID NO: 42032 - DNA, 16 bp, synthetic construct
  misc_feature 1..16: note = synthetic [barcode part1]
  source 1..16: mol_type = other DNA
agtaagttctgagacg

SEQ ID NO: 42033 - DNA, 16 bp, synthetic construct
  misc_feature 1..16: note = synthetic [barcode part1]
  source 1..16: mol_type = other DNA
tccaattgtcacgtac

SEQ ID NO: 42034 - DNA, 16 bp, synthetic construct
  misc_feature 1..16: note = synthetic [barcode part1]
  source 1..16: mol_type = other DNA
acagtcaactgacacc

SEQ ID NO: 42035 - DNA, 16 bp, synthetic construct
  misc_feature 1..16: note = synthetic [barcode part1]
  source 1..16: mol_type = other DNA
atcgcgaggacgagtt

SEQ ID NO: 42036 - DNA, 16 bp, synthetic construct
  misc_feature 1..16: note = synthetic [barcode part1]
  source 1..16: mol_type = other DNA
gtccttcggaactaag

SEQ ID NO: 42037 - DNA, 16 bp, synthetic construct
  misc_feature 1..16: note = synthetic [barcode part1]
  source 1..16: mol_type = other DNA
ccggacgatagtaggt

SEQ ID NO: 42038 - DNA, 16 bp, synthetic construct
  misc_feature 1..16: note = synthetic [barcode part1]
  source 1..16: mol_type = other DNA
taaggtcttccaggac

SEQ ID NO: 42039 - DNA, 16 bp, synthetic construct
  misc_feature 1..16: note = synthetic [barcode part1]
  source 1..16: mol_type = other DNA
gtccgactccttgtag

SEQ ID NO: 42040 - DNA, 16 bp, synthetic construct
  misc_feature 1..16: note = synthetic [barcode part1]
  source 1..16: mol_type = other DNA
tcgttgactctacgcg

SEQ ID NO: 42041 - DNA, 16 bp, synthetic construct
  misc_feature 1..16: note = synthetic [barcode part1]
  source 1..16: mol_type = other DNA
caatagaactcacgag

SEQ ID NO: 42042 - DNA, 16 bp, synthetic construct
  misc_feature 1..16: note = synthetic [barcode part1]
  source 1..16: mol_type = other DNA
ccagaagaatcgcgtg

SEQ ID NO: 42043 - DNA, 16 bp, synthetic construct
  misc_feature 1..16: note = synthetic [barcode part1]
  source 1..16: mol_type = other DNA
ccaaggagaaggttag

SEQ ID NO: 42044 - DNA, 16 bp, synthetic construct
  misc_feature 1..16: note = synthetic [barcode part1]
  source 1..16: mol_type = other DNA
gttccggttaaggttg

SEQ ID NO: 42045 - DNA, 16 bp, synthetic construct
  misc_feature 1..16: note = synthetic [barcode part1]
  source 1..16: mol_type = other DNA
tacacacgtactgcag

SEQ ID NO: 42046 - DNA, 16 bp, synthetic construct
  misc_feature 1..16: note = synthetic [barcode part1]
  source 1..16: mol_type = other DNA
tagacgtcgtatcgac

SEQ ID NO: 42047 - DNA, 16 bp, synthetic construct
  misc_feature 1..16: note = synthetic [barcode part1]
  source 1..16: mol_type = other DNA
ttcagtgacgaggacg

SEQ ID NO: 42048 - DNA, 16 bp, synthetic construct
  misc_feature 1..16: note = synthetic [barcode part1]
  source 1..16: mol_type = other DNA
ttggcgatcgttaggt

SEQ ID NO: 42049 - DNA, 16 bp, synthetic construct
  misc_feature 1..16: note = synthetic [barcode part1]
  source 1..16: mol_type = other DNA
aaggaagtaactggcg

SEQ ID NO: 42050 - DNA, 16 bp, synthetic construct
  misc_feature 1..16: note = synthetic [barcode part1]
  source 1..16: mol_type = other DNA
tctcgtaaccagactt

SEQ ID NO: 42051 - DNA, 16 bp, synthetic construct
  misc_feature 1..16: note = synthetic [barcode part1]
  source 1..16: mol_type = other DNA
gacacttgtagttgcg

SEQ ID NO: 42052 - DNA, 16 bp, synthetic construct
  misc_feature 1..16: note = synthetic [barcode part1]
  source 1..16: mol_type = other DNA
ccaggtgatagatctc

SEQ ID NO: 42053 - DNA, 16 bp, synthetic construct
  misc_feature 1..16: note = synthetic [barcode part1]
  source 1..16: mol_type = other DNA
ttgttaaccaacggcg

SEQ ID NO: 42054 - DNA, 16 bp, synthetic construct
  misc_feature 1..16: note = synthetic [barcode part1]
  source 1..16: mol_type = other DNA
gtattggttctactgc

SEQ ID NO: 42055 - DNA, 16 bp, synthetic construct
  misc_feature 1..16: note = synthetic [barcode part1]
  source 1..16: mol_type = other DNA
agaacctaacaagtgc

SEQ ID NO: 42056 - DNA, 16 bp, synthetic construct
  misc_feature 1..16: note = synthetic [barcode part1]
  source 1..16: mol_type = other DNA
cacgttcgaatcgtcc

SEQ ID NO: 42057 - DNA, 16 bp, synthetic construct
  misc_feature 1..16: note = synthetic [barcode part1]
  source 1..16: mol_type = other DNA
tatagttcggtccttg

SEQ ID NO: 42058 - DNA, 16 bp, synthetic construct
  misc_feature 1..16: note = synthetic [barcode part1]
  source 1..16: mol_type = other DNA
gcagtcagtcagtact

SEQ ID NO: 42059 - DNA, 16 bp, synthetic construct
  misc_feature 1..16: note = synthetic [barcode part1]
  source 1..16: mol_type = other DNA
taccaacacacaccag

SEQ ID NO: 42060 - DNA, 16 bp, synthetic construct
  misc_feature 1..16: note = synthetic [barcode part1]
  source 1..16: mol_type = other DNA
tcgaccttaagtctac

SEQ ID NO: 42061 - DNA, 16 bp, synthetic construct
  misc_feature 1..16: note = synthetic [barcode part1]
  source 1..16: mol_type = other DNA
cggcaacacgttcttc

SEQ ID NO: 42062 - DNA, 16 bp, synthetic construct
  misc_feature 1..16: note = synthetic [barcode part1]
  source 1..16: mol_type = other DNA
gatactcacctgaacg

SEQ ID NO: 42063 - DNA, 16 bp, synthetic construct
  misc_feature 1..16: note = synthetic [barcode part1]
  source 1..16: mol_type = other DNA
tgtcaggaagtgtagt

SEQ ID NO: 42064 - DNA, 16 bp, synthetic construct
  misc_feature 1..16: note = synthetic [barcode part1]
  source 1..16: mol_type = other DNA
gtcaaggtacagttag

SEQ ID NO: 42065 - DNA, 16 bp, synthetic construct
  misc_feature 1..16: note = synthetic [barcode part1]
  source 1..16: mol_type = other DNA
ttccacgatactctcc

SEQ ID NO: 42066 - DNA, 16 bp, synthetic construct
  misc_feature 1..16: note = synthetic [barcode part1]
  source 1..16: mol_type = other DNA
gtcacgcctcttaacg

SEQ ID NO: 42067 - DNA, 16 bp, synthetic construct
  misc_feature 1..16: note = synthetic [barcode part1]
  source 1..16: mol_type = other DNA
gaagttcgtctgcctc

SEQ ID NO: 42068 - DNA, 16 bp, synthetic construct
  misc_feature 1..16: note = synthetic [barcode part1]
  source 1..16: mol_type = other DNA
gaatagtgtgcggtcg

SEQ ID NO: 42069 - DNA, 16 bp, synthetic construct
  misc_feature 1..16: note = synthetic [barcode part1]
  source 1..16: mol_type = other DNA
tgagtactgcaagtcc

SEQ ID NO: 42070 - DNA, 16 bp, synthetic construct
  misc_feature 1..16: note = synthetic [barcode part1]
  source 1..16: mol_type = other DNA
gcgagaggtcgaactt

SEQ ID NO: 42071 - DNA, 16 bp, synthetic construct
  misc_feature 1..16: note = synthetic [barcode part1]
  source 1..16: mol_type = other DNA
aataggattaggcacc

SEQ ID NO: 42072 - DNA, 16 bp, synthetic construct
  misc_feature 1..16: note = synthetic [barcode part1]
  source 1..16: mol_type = other DNA
ccttgtacgactcggt

SEQ ID NO: 42073 - DNA, 16 bp, synthetic construct
  misc_feature 1..16: note = synthetic [barcode part1]
  source 1..16: mol_type = other DNA
ttccagaagtgaacag

SEQ ID NO: 42074 - DNA, 16 bp, synthetic construct
  misc_feature 1..16: note = synthetic [barcode part1]
  source 1..16: mol_type = other DNA
aggagattctgtaggt

SEQ ID NO: 42075 - DNA, 16 bp, synthetic construct
  misc_feature 1..16: note = synthetic [barcode part1]
  source 1..16: mol_type = other DNA
tgtctattccgtccac

SEQ ID NO: 42076 - DNA, 16 bp, synthetic construct
  misc_feature 1..16: note = synthetic [barcode part1]
  source 1..16: mol_type = other DNA
tgtaacgcgaacaggc

SEQ ID NO: 42077 - DNA, 16 bp, synthetic construct
  misc_feature 1..16: note = synthetic [barcode part1]
  source 1..16: mol_type = other DNA
tattctgtacctggac

SEQ ID NO: 42078 - DNA, 16 bp, synthetic construct
  misc_feature 1..16: note = synthetic [barcode part1]
  source 1..16: mol_type = other DNA
cacagagtagtggtcg

SEQ ID NO: 42079 - DNA, 16 bp, synthetic construct
  misc_feature 1..16: note = synthetic [barcode part1]
  source 1..16: mol_type = other DNA
agaatctgtaggtggt

SEQ ID NO: 42080 - DNA, 16 bp, synthetic construct
  misc_feature 1..16: note = synthetic [barcode part1]
  source 1..16: mol_type = other DNA
tccgtatagttcggtt

SEQ ID NO: 42081 - DNA, 16 bp, synthetic construct
  misc_feature 1..16: note = synthetic [barcode part1]
  source 1..16: mol_type = other DNA
agttcgagtcaccaac

SEQ ID NO: 42082 - DNA, 16 bp, synthetic construct
  misc_feature 1..16: note = synthetic [barcode part1]
  source 1..16: mol_type = other DNA
ccgtaggcagagaatc

SEQ ID NO: 42083 - DNA, 16 bp, synthetic construct
  misc_feature 1..16: note = synthetic [barcode part1]
  source 1..16: mol_type = other DNA
atactgcgaacggacg

SEQ ID NO: 42084 - DNA, 16 bp, synthetic construct
  misc_feature 1..16: note = synthetic [barcode part1]
  source 1..16: mol_type = other DNA
tgtattcgtccggcac

SEQ ID NO: 42085 - DNA, 16 bp, synthetic construct
  misc_feature 1..16: note = synthetic [barcode part1]
  source 1..16: mol_type = other DNA
ccgtcgttaagacagt

SEQ ID NO: 42086 - DNA, 16 bp, synthetic construct
  misc_feature 1..16: note = synthetic [barcode part1]
  source 1..16: mol_type = other DNA
attgcctggcgttcgt

SEQ ID NO: 42087 - DNA, 16 bp, synthetic construct
  misc_feature 1..16: note = synthetic [barcode part1]
  source 1..16: mol_type = other DNA
cgcagacgagtgatac

SEQ ID NO: 42088 - DNA, 16 bp, synthetic construct
  misc_feature 1..16: note = synthetic [barcode part1]
  source 1..16: mol_type = other DNA
ttccgtctgttatccg

SEQ ID NO: 42089 - DNA, 16 bp, synthetic construct
  misc_feature 1..16: note = synthetic [barcode part1]
  source 1..16: mol_type = other DNA
atacggtaccgtacac

SEQ ID NO: 42090 - DNA, 16 bp, synthetic construct
  misc_feature 1..16: note = synthetic [barcode part1]
  source 1..16: mol_type = other DNA
tggagactgttggacg

SEQ ID NO: 42091 - DNA, 16 bp, synthetic construct
  misc_feature 1..16: note = synthetic [barcode part1]
  source 1..16: mol_type = other DNA
agtctacgtctgtgag

SEQ ID NO: 42092 - DNA, 16 bp, synthetic construct
  misc_feature 1..16: note = synthetic [barcode part1]
  source 1..16: mol_type = other DNA
taagagtaggttaccg

SEQ ID NO: 42093 - DNA, 16 bp, synthetic construct
  misc_feature 1..16: note = synthetic [barcode part1]
  source 1..16: mol_type = other DNA
accgtattgtaggtcg

SEQ ID NO: 42094 - DNA, 16 bp, synthetic construct
  misc_feature 1..16: note = synthetic [barcode part1]
  source 1..16: mol_type = other DNA
tattccgcaccgtctt

SEQ ID NO: 42095 - DNA, 16 bp, synthetic construct
  misc_feature 1..16: note = synthetic [barcode part1]
  source 1..16: mol_type = other DNA
cgcctcgatcttattc

SEQ ID NO: 42096 - DNA, 16 bp, synthetic construct
  misc_feature 1..16: note = synthetic [barcode part1]
  source 1..16: mol_type = other DNA
tgtccgcctcaggatt

SEQ ID NO: 42097 - DNA, 16 bp, synthetic construct
  misc_feature 1..16: note = synthetic [barcode part1]
  source 1..16: mol_type = other DNA
acctaactggcgattg

SEQ ID NO: 42098 - DNA, 16 bp, synthetic construct
  misc_feature 1..16: note = synthetic [barcode part1]
  source 1..16: mol_type = other DNA
gattctgtagacagag

SEQ ID NO: 42099 - DNA, 16 bp, synthetic construct
  misc_feature 1..16: note = synthetic [barcode part1]
  source 1..16: mol_type = other DNA
actcgaatcgccttgc

SEQ ID NO: 42100 - DNA, 16 bp, synthetic construct
  misc_feature 1..16: note = synthetic [barcode part1]
  source 1..16: mol_type = other DNA
tattggcgtgcgttag

SEQ ID NO: 42101 - DNA, 16 bp, synthetic construct
  misc_feature 1..16: note = synthetic [barcode part1]
  source 1..16: mol_type = other DNA
aactgtaagaggacct

SEQ ID NO: 42102 - DNA, 16 bp, synthetic construct
  misc_feature 1..16: note = synthetic [barcode part1]
  source 1..16: mol_type = other DNA
caagtggttatccgtg

SEQ ID NO: 42103 - DNA, 16 bp, synthetic construct
  misc_feature 1..16: note = synthetic [barcode part1]
  source 1..16: mol_type = other DNA
cgttattggaccgaac

SEQ ID NO: 42104 - DNA, 16 bp, synthetic construct
  misc_feature 1..16: note = synthetic [barcode part1]
  source 1..16: mol_type = other DNA
gtggaggccggtaatt

SEQ ID NO: 42105 - DNA, 16 bp, synthetic construct
  misc_feature 1..16: note = synthetic [barcode part1]
  source 1..16: mol_type = other DNA
tagagtaacaactgcg

SEQ ID NO: 42106 - DNA, 16 bp, synthetic construct
  misc_feature 1..16: note = synthetic [barcode part1]
  source 1..16: mol_type = other DNA
gcgtgtctgaagagtg

SEQ ID NO: 42107 - DNA, 16 bp, synthetic construct
  misc_feature 1..16: note = synthetic [barcode part1]
  source 1..16: mol_type = other DNA
tgcaactgttaaggag

SEQ ID NO: 42108 - DNA, 16 bp, synthetic construct
  misc_feature 1..16: note = synthetic [barcode part1]
  source 1..16: mol_type = other DNA
gaattgacgtgatcag

SEQ ID NO: 42109 - DNA, 16 bp, synthetic construct
  misc_feature 1..16: note = synthetic [barcode part1]
  source 1..16: mol_type = other DNA
gtgttctggttcaact

SEQ ID NO: 42110 - DNA, 16 bp, synthetic construct
  misc_feature 1..16: note = synthetic [barcode part1]
  source 1..16: mol_type = other DNA
tacttgttgttgtggc

SEQ ID NO: 42111 - DNA, 16 bp, synthetic construct
  misc_feature 1..16: note = synthetic [barcode part1]
  source 1..16: mol_type = other DNA
tatcaggacctgacac

SEQ ID NO: 42112 - DNA, 16 bp, synthetic construct
  misc_feature 1..16: note = synthetic [barcode part1]
  source 1..16: mol_type = other DNA
atcactcctgttccgt

SEQ ID NO: 42113 - DNA, 16 bp, synthetic construct
  misc_feature 1..16: note = synthetic [barcode part1]
  source 1..16: mol_type = other DNA
agaagatctacgtgac

SEQ ID NO: 42114 - DNA, 16 bp, synthetic construct
  misc_feature 1..16: note = synthetic [barcode part1]
  source 1..16: mol_type = other DNA
agtccaacaacctgac

SEQ ID NO: 42115 - DNA, 16 bp, synthetic construct
  misc_feature 1..16: note = synthetic [barcode part1]
  source 1..16: mol_type = other DNA
cagagttgccagttac

SEQ ID NO: 42116 - DNA, 16 bp, synthetic construct
  misc_feature 1..16: note = synthetic [barcode part1]
  source 1..16: mol_type = other DNA
gtggagtagtgtccag

SEQ ID NO: 42117 - DNA, 16 bp, synthetic construct
  misc_feature 1..16: note = synthetic [barcode part1]
  source 1..16: mol_type = other DNA
tgagaggacgtactgc

SEQ ID NO: 42118 - DNA, 16 bp, synthetic construct
  misc_feature 1..16: note = synthetic [barcode part1]
  source 1..16: mol_type = other DNA
ttccaattgcgccgac

SEQ ID NO: 42119 - DNA, 16 bp, synthetic construct
  misc_feature 1..16: note = synthetic [barcode part1]
  source 1..16: mol_type = other DNA
cagaattgccgactgt

SEQ ID NO: 42120 - DNA, 16 bp, synthetic construct
  misc_feature 1..16: note = synthetic [barcode part1]
  source 1..16: mol_type = other DNA
tccgttccacttgttg

SEQ ID NO: 42121 - DNA, 16 bp, synthetic construct
  misc_feature 1..16: note = synthetic [barcode part1]
  source 1..16: mol_type = other DNA
gagacaggtagtagac

SEQ ID NO: 42122 - DNA, 16 bp, synthetic construct
  misc_feature 1..16: note = synthetic [barcode part1]
  source 1..16: mol_type = other DNA
gcctaggttgtcttgc

SEQ ID NO: 42123 - DNA, 16 bp, synthetic construct
  misc_feature 1..16: note = synthetic [barcode part1]
  source 1..16: mol_type = other DNA
tataggcgtcttgttc

SEQ ID NO: 42124 - DNA, 16 bp, synthetic construct
  misc_feature 1..16: note = synthetic [barcode part1]
  source 1..16: mol_type = other DNA
aacctgtcttggacag

SEQ ID NO: 42125 - DNA, 16 bp, synthetic construct
  misc_feature 1..16: note = synthetic [barcode part1]
  source 1..16: mol_type = other DNA
cagtatccagaacctg

SEQ ID NO: 42126 - DNA, 16 bp, synthetic construct
  misc_feature 1..16: note = synthetic [barcode part1]
  source 1..16: mol_type = other DNA
cagaatcttcctcctc

SEQ ID NO: 42127 - DNA, 16 bp, synthetic construct
  misc_feature 1..16: note = synthetic [barcode part1]
  source 1..16: mol_type = other DNA
gatatcgtgacgtcac

SEQ ID NO: 42128 - DNA, 16 bp, synthetic construct
  misc_feature 1..16: note = synthetic [barcode part1]
  source 1..16: mol_type = other DNA
agagtcgatacgattg

SEQ ID NO: 42129 - DNA, 16 bp, synthetic construct
  misc_feature 1..16: note = synthetic [barcode part1]
  source 1..16: mol_type = other DNA
gattgcgataccgact

SEQ ID NO: 42130 - DNA, 16 bp, synthetic construct
  misc_feature 1..16: note = synthetic [barcode part1]
  source 1..16: mol_type = other DNA
aatcttcgaagaccgc

SEQ ID NO: 42131 - DNA, 16 bp, synthetic construct
  misc_feature 1..16: note = synthetic [barcode part1]
  source 1..16: mol_type = other DNA
ttggcgcgactagaag

SEQ ID NO: 42132 - DNA, 16 bp, synthetic construct
  misc_feature 1..16: note = synthetic [barcode part1]
  source 1..16: mol_type = other DNA
tactggagaacgtggc

SEQ ID NO: 42133 - DNA, 16 bp, synthetic construct
  misc_feature 1..16: note = synthetic [barcode part1]
  source 1..16: mol_type = other DNA
ttggtggcggattact

SEQ ID NO: 42134 - DNA, 16 bp, synthetic construct
  misc_feature 1..16: note = synthetic [barcode part1]
  source 1..16: mol_type = other DNA
ttccttaagacgtctg

SEQ ID NO: 42135 - DNA, 16 bp, synthetic construct
  misc_feature 1..16: note = synthetic [barcode part1]
  source 1..16: mol_type = other DNA
gactgtaggtctcctc

SEQ ID NO: 42136 - DNA, 16 bp, synthetic construct
  misc_feature 1..16: note = synthetic [barcode part1]
  source 1..16: mol_type = other DNA
gtcgaatatcctcgcc

SEQ ID NO: 42137 - DNA, 16 bp, synthetic construct
  misc_feature 1..16: note = synthetic [barcode part1]
  source 1..16: mol_type = other DNA
ttaggacaggcagacc

SEQ ID NO: 42138 - DNA, 16 bp, synthetic construct
  misc_feature 1..16: note = synthetic [barcode part1]
  source 1..16: mol_type = other DNA
gtctgtcacaatatcc

SEQ ID NO: 42139 - DNA, 16 bp, synthetic construct
  misc_feature 1..16: note = synthetic [barcode part1]
  source 1..16: mol_type = other DNA
gactacgttggttctt

SEQ ID NO: 42140 - DNA, 16 bp, synthetic construct
  misc_feature 1..16: note = synthetic [barcode part1]
  source 1..16: mol_type = other DNA
tgacgttgtggtactg

SEQ ID NO: 42141 - DNA, 16 bp, synthetic construct
  misc_feature 1..16: note = synthetic [barcode part1]
  source 1..16: mol_type = other DNA
cgtcaccggtatacct

SEQ ID NO: 42142 - DNA, 16 bp, synthetic construct
  misc_feature 1..16: note = synthetic [barcode part1]
  source 1..16: mol_type = other DNA
tgactctcacggtcgt

SEQ ID NO: 42143 - DNA, 16 bp, synthetic construct
  misc_feature 1..16: note = synthetic [barcode part1]
  source 1..16: mol_type = other DNA
caccactgacgtatcc

SEQ ID NO: 42144 - DNA, 16 bp, synthetic construct
  misc_feature 1..16: note = synthetic [barcode part1]
  source 1..16: mol_type = other DNA
cacacgagacagtggt

SEQ ID NO: 42145 - DNA, 16 bp, synthetic construct
  misc_feature 1..16: note = synthetic [barcode part1]
  source 1..16: mol_type = other DNA
tacaaccaccaagaag

SEQ ID NO: 42146 - DNA, 16 bp, synthetic construct
  misc_feature 1..16: note = synthetic [barcode part1]
  source 1..16: mol_type = other DNA
gtactgatacgttggc

SEQ ID NO: 42147 - DNA, 16 bp, synthetic construct
  misc_feature 1..16: note = synthetic [barcode part1]
  source 1..16: mol_type = other DNA
acaggtcaggatagtt

SEQ ID NO: 42148 - DNA, 16 bp, synthetic construct
  misc_feature 1..16: note = synthetic [barcode part1]
  source 1..16: mol_type = other DNA
ttacaccaacgcaggt

SEQ ID NO: 42149 - DNA, 16 bp, synthetic construct
  misc_feature 1..16: note = synthetic [barcode part1]
  source 1..16: mol_type = other DNA
ttcggcgttacacctg

SEQ ID NO: 42150 - DNA, 16 bp, synthetic construct
  misc_feature 1..16: note = synthetic [barcode part1]
  source 1..16: mol_type = other DNA
taagaacgacaatccg

SEQ ID NO: 42151 - DNA, 16 bp, synthetic construct
  misc_feature 1..16: note = synthetic [barcode part1]
  source 1..16: mol_type = other DNA
ttcttctccggagtct

SEQ ID NO: 42152 - DNA, 16 bp, synthetic construct
  misc_feature 1..16: note = synthetic [barcode part1]
  source 1..16: mol_type = other DNA
agtaggcacggtactg

SEQ ID NO: 42153 - DNA, 16 bp, synthetic construct
  misc_feature 1..16: note = synthetic [barcode part1]
  source 1..16: mol_type = other DNA
ttcgtaccgtagaggt

SEQ ID NO: 42154 - DNA, 16 bp, synthetic construct
  misc_feature 1..16: note = synthetic [barcode part1]
  source 1..16: mol_type = other DNA
atctaggaggtgatac

SEQ ID NO: 42155 - DNA, 16 bp, synthetic construct
  misc_feature 1..16: note = synthetic [barcode part1]
  source 1..16: mol_type = other DNA
gtgattgtgatcacgc

SEQ ID NO: 42156 - DNA, 16 bp, synthetic construct
  misc_feature 1..16: note = synthetic [barcode part1]
  source 1..16: mol_type = other DNA
tgtagtctcgaacacg

SEQ ID NO: 42157 - DNA, 16 bp, synthetic construct
  misc_feature 1..16: note = synthetic [barcode part1]
  source 1..16: mol_type = other DNA
gttgttctgtctgagt

SEQ ID NO: 42158 - DNA, 16 bp, synthetic construct
  misc_feature 1..16: note = synthetic [barcode part1]
  source 1..16: mol_type = other DNA
gttacctcaggcacct

SEQ ID NO: 42159 - DNA, 16 bp, synthetic construct
  misc_feature 1..16: note = synthetic [barcode part1]
  source 1..16: mol_type = other DNA
tgatacaagaggtcgt

SEQ ID NO: 42160 - DNA, 16 bp, synthetic construct
  misc_feature 1..16: note = synthetic [barcode part1]
  source 1..16: mol_type = other DNA
tgtgaatatcctgcct

SEQ ID NO: 42161 - DNA, 16 bp, synthetic construct
  misc_feature 1..16: note = synthetic [barcode part1]
  source 1..16: mol_type = other DNA
aatagacacgataccg

SEQ ID NO: 42162 - DNA, 16 bp, synthetic construct
  misc_feature 1..16: note = synthetic [barcode part1]
  source 1..16: mol_type = other DNA
gttgacttgaccaacg

SEQ ID NO: 42163 - DNA, 16 bp, synthetic construct
  misc_feature 1..16: note = synthetic [barcode part1]
  source 1..16: mol_type = other DNA
taacgcgtcagtacgt

SEQ ID NO: 42164 - DNA, 16 bp, synthetic construct
  misc_feature 1..16: note = synthetic [barcode part1]
  source 1..16: mol_type = other DNA
gattattaggcgcaag

SEQ ID NO: 42165 - DNA, 16 bp, synthetic construct
  misc_feature 1..16: note = synthetic [barcode part1]
  source 1..16: mol_type = other DNA
agttccacacttgttg

SEQ ID NO: 42166 - DNA, 16 bp, synthetic construct
  misc_feature 1..16: note = synthetic [barcode part1]
  source 1..16: mol_type = other DNA
tgaggagtgtgatcgc

SEQ ID NO: 42167 - DNA, 16 bp, synthetic construct
  misc_feature 1..16: note = synthetic [barcode part1]
  source 1..16: mol_type = other DNA
aatccagaggacgtgc

SEQ ID NO: 42168 - DNA, 16 bp, synthetic construct
  misc_feature 1..16: note = synthetic [barcode part1]
  source 1..16: mol_type = other DNA
tggcctgaacgtgaag

SEQ ID NO: 42169 - DNA, 16 bp, synthetic construct
  misc_feature 1..16: note = synthetic [barcode part1]
  source 1..16: mol_type = other DNA
tgaatcacacgttcct

SEQ ID NO: 42170 - DNA, 16 bp, synthetic construct
  misc_feature 1..16: note = synthetic [barcode part1]
  source 1..16: mol_type = other DNA
aagttgaactacgcag

SEQ ID NO: 42171 - DNA, 16 bp, synthetic construct
  misc_feature 1..16: note = synthetic [barcode part1]
  source 1..16: mol_type = other DNA
ccgtcgaacgtaagag

SEQ ID NO: 42172 - DNA, 16 bp, synthetic construct
  misc_feature 1..16: note = synthetic [barcode part1]
  source 1..16: mol_type = other DNA
gtaggtctgtagacct

SEQ ID NO: 42173 - DNA, 16 bp, synthetic construct
  misc_feature 1..16: note = synthetic [barcode part1]
  source 1..16: mol_type = other DNA
atctggaccactctgc

SEQ ID NO: 42174 - DNA, 16 bp, synthetic construct
  misc_feature 1..16: note = synthetic [barcode part1]
  source 1..16: mol_type = other DNA
tgataccttcgagacg

SEQ ID NO: 42175 - DNA, 16 bp, synthetic construct
  misc_feature 1..16: note = synthetic [barcode part1]
  source 1..16: mol_type = other DNA
tgttactgtgactacc

SEQ ID NO: 42176 - DNA, 16 bp, synthetic construct
  misc_feature 1..16: note = synthetic [barcode part1]
  source 1..16: mol_type = other DNA
attaggtaggtacggt

SEQ ID NO: 42177 - DNA, 16 bp, synthetic construct
  misc_feature 1..16: note = synthetic [barcode part1]
  source 1..16: mol_type = other DNA
gaacgtggtatcttcg

SEQ ID NO: 42178 - DNA, 16 bp, synthetic construct
  misc_feature 1..16: note = synthetic [barcode part1]
  source 1..16: mol_type = other DNA
gtattggagtcacacc

SEQ ID NO: 42179 - DNA, 16 bp, synthetic construct
  misc_feature 1..16: note = synthetic [barcode part1]
  source 1..16: mol_type = other DNA
gttggtgacctcctgt

SEQ ID NO: 42180 - DNA, 16 bp, synthetic construct
  misc_feature 1..16: note = synthetic [barcode part1]
  source 1..16: mol_type = other DNA
agtgtcttcacacgag

SEQ ID NO: 42181 - DNA, 16 bp, synthetic construct
  misc_feature 1..16: note = synthetic [barcode part1]
  source 1..16: mol_type = other DNA
aaggcggtcgcagatt

SEQ ID NO: 42182 - DNA, 16 bp, synthetic construct
  misc_feature 1..16: note = synthetic [barcode part1]
  source 1..16: mol_type = other DNA
cctgaggaattctgac

SEQ ID NO: 42183 - DNA, 16 bp, synthetic construct
  misc_feature 1..16: note = synthetic [barcode part1]
  source 1..16: mol_type = other DNA
ttccacgagagtgtac

SEQ ID NO: 42184 - DNA, 16 bp, synthetic construct
  misc_feature 1..16: note = synthetic [barcode part1]
  source 1..16: mol_type = other DNA
gtccaaggaacctgtt

SEQ ID NO: 42185 - DNA, 16 bp, synthetic construct
  misc_feature 1..16: note = synthetic [barcode part1]
  source 1..16: mol_type = other DNA
aactcctgagacgact

SEQ ID NO: 42186 - DNA, 16 bp, synthetic construct
  misc_feature 1..16: note = synthetic [barcode part1]
  source 1..16: mol_type = other DNA
ccgcctgttacagtac

SEQ ID NO: 42187 - DNA, 16 bp, synthetic construct
  misc_feature 1..16: note = synthetic [barcode part1]
  source 1..16: mol_type = other DNA
gtgacactgacactgt

SEQ ID NO: 42188 - DNA, 16 bp, synthetic construct
  misc_feature 1..16: note = synthetic [barcode part1]
  source 1..16: mol_type = other DNA
acctcgtggtgataac

SEQ ID NO: 42189 - DNA, 16 bp, synthetic construct
  misc_feature 1..16: note = synthetic [barcode part1]
  source 1..16: mol_type = other DNA
gattcaagtcggacct

SEQ ID NO: 42190 - DNA, 16 bp, synthetic construct
  misc_feature 1..16: note = synthetic [barcode part1]
  source 1..16: mol_type = other DNA
tagaagattggcctcc

SEQ ID NO: 42191 - DNA, 16 bp, synthetic construct
  misc_feature 1..16: note = synthetic [barcode part1]
  source 1..16: mol_type = other DNA
atccgcgttaagtacg

SEQ ID NO: 42192 - DNA, 16 bp, synthetic construct
  misc_feature 1..16: note = synthetic [barcode part1]
  source 1..16: mol_type = other DNA
cgacctgattctcgtg

SEQ ID NO: 42193 - DNA, 16 bp, synthetic construct
  misc_feature 1..16: note = synthetic [barcode part1]
  source 1..16: mol_type = other DNA
actctgttcacgtagt

SEQ ID NO: 42194 - DNA, 16 bp, synthetic construct
  misc_feature 1..16: note = synthetic [barcode part1]
  source 1..16: mol_type = other DNA
tgacgtactagtgcac

SEQ ID NO: 42195 - DNA, 16 bp, synthetic construct
  misc_feature 1..16: note = synthetic [barcode part1]
  source 1..16: mol_type = other DNA
gtataagtcgtcagag

SEQ ID NO: 42196 - DNA, 16 bp, synthetic construct
  misc_feature 1..16: note = synthetic [barcode part1]
  source 1..16: mol_type = other DNA
gtatcaagtcgttcct

SEQ ID NO: 42197 - DNA, 16 bp, synthetic construct
  misc_feature 1..16: note = synthetic [barcode part1]
  source 1..16: mol_type = other DNA
gacttgatcggatcac

SEQ ID NO: 42198 - DNA, 16 bp, synthetic construct
  misc_feature 1..16: note = synthetic [barcode part1]
  source 1..16: mol_type = other DNA
tgtatctggattgtcc

SEQ ID NO: 42199 - DNA, 16 bp, synthetic construct
  misc_feature 1..16: note = synthetic [barcode part1]
  source 1..16: mol_type = other DNA
cgtatccaacaattcc

SEQ ID NO: 42200 - DNA, 16 bp, synthetic construct
  misc_feature 1..16: note = synthetic [barcode part1]
  source 1..16: mol_type = other DNA
gaccagaacttcctag

SEQ ID NO: 42201 - DNA, 16 bp, synthetic construct
  misc_feature 1..16: note = synthetic [barcode part1]
  source 1..16: mol_type = other DNA
atcctatcctgactcc

SEQ ID NO: 42202 - DNA, 16 bp, synthetic construct
  misc_feature 1..16: note = synthetic [barcode part1]
  source 1..16: mol_type = other DNA
gacgtacgtcagtgtt

SEQ ID NO: 42203 - DNA, 16 bp, synthetic construct
  misc_feature 1..16: note = synthetic [barcode part1]
  source 1..16: mol_type = other DNA
tattgcgtggcgttag

SEQ ID NO: 42204 - DNA, 16 bp, synthetic construct
  misc_feature 1..16: note = synthetic [barcode part1]
  source 1..16: mol_type = other DNA
atacctccagtagtct

SEQ ID NO: 42205 - DNA, 16 bp, synthetic construct
  misc_feature 1..16: note = synthetic [barcode part1]
  source 1..16: mol_type = other DNA
agagtccggtactgtt

SEQ ID NO: 42206 - DNA, 16 bp, synthetic construct
  misc_feature 1..16: note = synthetic [barcode part1]
  source 1..16: mol_type = other DNA
ccgtccagtaatatct

SEQ ID NO: 42207 - DNA, 16 bp, synthetic construct
  misc_feature 1..16: note = synthetic [barcode part1]
  source 1..16: mol_type = other DNA
tgattcggcgaagacg

SEQ ID NO: 42208 - DNA, 16 bp, synthetic construct
  misc_feature 1..16: note = synthetic [barcode part1]
  source 1..16: mol_type = other DNA
atctcttgtgtcaacg

SEQ ID NO: 42209 - DNA, 16 bp, synthetic construct
  misc_feature 1..16: note = synthetic [barcode part1]
  source 1..16: mol_type = other DNA
gttagacacagagatc

SEQ ID NO: 42210 - DNA, 16 bp, synthetic construct
  misc_feature 1..16: note = synthetic [barcode part1]
  source 1..16: mol_type = other DNA
tcgcggtaactaactg

SEQ ID NO: 42211 - DNA, 16 bp, synthetic construct
  misc_feature 1..16: note = synthetic [barcode part1]
  source 1..16: mol_type = other DNA
gttattcgtgaacctc

SEQ ID NO: 42212 - DNA, 16 bp, synthetic construct
  misc_feature 1..16: note = synthetic [barcode part1]
  source 1..16: mol_type = other DNA
aacacacacactgacc

SEQ ID NO: 42213 - DNA, 16 bp, synthetic construct
  misc_feature 1..16: note = synthetic [barcode part1]
  source 1..16: mol_type = other DNA
tcaactgacacgtacg

SEQ ID NO: 42214 - DNA, 16 bp, synthetic construct
  misc_feature 1..16: note = synthetic [barcode part1]
  source 1..16: mol_type = other DNA
attagtaggcaacgac

SEQ ID NO: 42215 - DNA, 16 bp, synthetic construct
  misc_feature 1..16: note = synthetic [barcode part1]
  source 1..16: mol_type = other DNA
acggacaataacactg

SEQ ID NO: 42216 - DNA, 16 bp, synthetic construct
  misc_feature 1..16: note = synthetic [barcode part1]
  source 1..16: mol_type = other DNA
acaactccggagacag

SEQ ID NO: 42217 - DNA, 16 bp, synthetic construct
  misc_feature 1..16: note = synthetic [barcode part1]
  source 1..16: mol_type = other DNA
attgtctgcgataggc

SEQ ID NO: 42218 - DNA, 16 bp, synthetic construct
  misc_feature 1..16: note = synthetic [barcode part1]
  source 1..16: mol_type = other DNA
tcaatccacctaggtt

SEQ ID NO: 42219 - DNA, 16 bp, synthetic construct
  misc_feature 1..16: note = synthetic [barcode part1]
  source 1..16: mol_type = other DNA
attgttccgagtatcc

SEQ ID NO: 42220 - DNA, 16 bp, synthetic construct
  misc_feature 1..16: note = synthetic [barcode part1]
  source 1..16: mol_type = other DNA
caccaataccgatacg

SEQ ID NO: 42221 - DNA, 16 bp, synthetic construct
  misc_feature 1..16: note = synthetic [barcode part1]
  source 1..16: mol_type = other DNA
agacggattcgaggtc

SEQ ID NO: 42222 - DNA, 16 bp, synthetic construct
  misc_feature 1..16: note = synthetic [barcode part1]
  source 1..16: mol_type = other DNA
tagtgaaccgccttag

SEQ ID NO: 42223 - DNA, 16 bp, synthetic construct
  misc_feature 1..16: note = synthetic [barcode part1]
  source 1..16: mol_type = other DNA
agaggcgcaagtcact

SEQ ID NO: 42224 - DNA, 16 bp, synthetic construct
  misc_feature 1..16: note = synthetic [barcode part1]
  source 1..16: mol_type = other DNA
acgcaatcacgtgatc

SEQ ID NO: 42225 - DNA, 16 bp, synthetic construct
  misc_feature 1..16: note = synthetic [barcode part1]
  source 1..16: mol_type = other DNA
gtaagtcagtcgtacc

SEQ ID NO: 42226 - DNA, 16 bp, synthetic construct
  misc_feature 1..16: note = synthetic [barcode part1]
  source 1..16: mol_type = other DNA
gtaatcggatcaagac

SEQ ID NO: 42227 - DNA, 16 bp, synthetic construct
  misc_feature 1..16: note = synthetic [barcode part1]
  source 1..16: mol_type = other DNA
gtcaatcggtctcaag

SEQ ID NO: 42228 - DNA, 16 bp, synthetic construct
  misc_feature 1..16: note = synthetic [barcode part1]
  source 1..16: mol_type = other DNA
acgatacctggtcaac

SEQ ID NO: 42229 - DNA, 16 bp, synthetic construct
  misc_feature 1..16: note = synthetic [barcode part1]
  source 1..16: mol_type = other DNA
acttacgttcttggtg

SEQ ID NO: 42230 - DNA, 16 bp, synthetic construct
  misc_feature 1..16: note = synthetic [barcode part1]
  source 1..16: mol_type = other DNA
gaggtacctagattag

SEQ ID NO: 42231 - DNA, 16 bp, synthetic construct
  misc_feature 1..16: note = synthetic [barcode part1]
  source 1..16: mol_type = other DNA
agatctctcaagaccg

SEQ ID NO: 42232 - DNA, 16 bp, synthetic construct
  misc_feature 1..16: note = synthetic [barcode part1]
  source 1..16: mol_type = other DNA
ccgcaactatagtacg

SEQ ID NO: 42233 - DNA, 16 bp, synthetic construct
  misc_feature 1..16: note = synthetic [barcode part1]
  source 1..16: mol_type = other DNA
taggccggtacaagac

SEQ ID NO: 42234 - DNA, 16 bp, synthetic construct
  misc_feature 1..16: note = synthetic [barcode part1]
  source 1..16: mol_type = other DNA
tcaacttcgtcctgtc

SEQ ID NO: 42235 - DNA, 16 bp, synthetic construct
  misc_feature 1..16: note = synthetic [barcode part1]
  source 1..16: mol_type = other DNA
acgaacctcttcaact

SEQ ID NO: 42236 - DNA, 16 bp, synthetic construct
  misc_feature 1..16: note = synthetic [barcode part1]
  source 1..16: mol_type = other DNA
gtgcagttgcaactgt

SEQ ID NO: 42237 - DNA, 16 bp, synthetic construct
  misc_feature 1..16: note = synthetic [barcode part1]
  source 1..16: mol_type = other DNA
gaactcgtaggtctgt

SEQ ID NO: 42238 - DNA, 16 bp, synthetic construct
  misc_feature 1..16: note = synthetic [barcode part1]
  source 1..16: mol_type = other DNA
tctccttaccgcaatc

SEQ ID NO: 42239 - DNA, 16 bp, synthetic construct
  misc_feature 1..16: note = synthetic [barcode part1]
  source 1..16: mol_type = other DNA
actaggtgcggagatc

SEQ ID NO: 42240 - DNA, 16 bp, synthetic construct
  misc_feature 1..16: note = synthetic [barcode part1]
  source 1..16: mol_type = other DNA
tgtcgtatcagaaccg

SEQ ID NO: 42241 - DNA, 16 bp, synthetic construct
  misc_feature 1..16: note = synthetic [barcode part1]
  source 1..16: mol_type = other DNA
gtagtctgcgacttag

SEQ ID NO: 42242 - DNA, 16 bp, synthetic construct
  misc_feature 1..16: note = synthetic [barcode part1]
  source 1..16: mol_type = other DNA
ccaattgaggatcctg

SEQ ID NO: 42243 - DNA, 16 bp, synthetic construct
  misc_feature 1..16: note = synthetic [barcode part1]
  source 1..16: mol_type = other DNA
gtacagtgttgcgtac

SEQ ID NO: 42244 - DNA, 16 bp, synthetic construct
  misc_feature 1..16: note = synthetic [barcode part1]
  source 1..16: mol_type = other DNA
tacgttcctcacacct

SEQ ID NO: 42245 - DNA, 16 bp, synthetic construct
  misc_feature 1..16: note = synthetic [barcode part1]
  source 1..16: mol_type = other DNA
gcgccttgacctagtt

SEQ ID NO: 42246 - DNA, 16 bp, synthetic construct
  misc_feature 1..16: note = synthetic [barcode part1]
  source 1..16: mol_type = other DNA
caccaccttacgtggt

SEQ ID NO: 42247 - DNA, 16 bp, synthetic construct
  misc_feature 1..16: note = synthetic [barcode part1]
  source 1..16: mol_type = other DNA
actgtgtacactcgag

SEQ ID NO: 42248 - DNA, 16 bp, synthetic construct
  misc_feature 1..16: note = synthetic [barcode part1]
  source 1..16: mol_type = other DNA
attggaacacgactag

SEQ ID NO: 42249 - DNA, 16 bp, synthetic construct
  misc_feature 1..16: note = synthetic [barcode part1]
  source 1..16: mol_type = other DNA
tataggcggcaaggtc

SEQ ID NO: 42250 - DNA, 16 bp, synthetic construct
  misc_feature 1..16: note = synthetic [barcode part1]
  source 1..16: mol_type = other DNA
gcggacttatatcgac

SEQ ID NO: 42251 - DNA, 16 bp, synthetic construct
  misc_feature 1..16: note = synthetic [barcode part1]
  source 1..16: mol_type = other DNA
ataaccgaggactaac

SEQ ID NO: 42252 - DNA, 16 bp, synthetic construct
  misc_feature 1..16: note = synthetic [barcode part1]
  source 1..16: mol_type = other DNA
tcctgacgatcacgtc

SEQ ID NO: 42253 - DNA, 16 bp, synthetic construct
  misc_feature 1..16: note = synthetic [barcode part1]
  source 1..16: mol_type = other DNA
gtcggtggttctctac

SEQ ID NO: 42254 - DNA, 16 bp, synthetic construct
  misc_feature 1..16: note = synthetic [barcode part1]
  source 1..16: mol_type = other DNA
actctcgtatcctcac

SEQ ID NO: 42255 - DNA, 16 bp, synthetic construct
  misc_feature 1..16: note = synthetic [barcode part1]
  source 1..16: mol_type = other DNA
gcgacacgtgttatac

SEQ ID NO: 42256 - DNA, 16 bp, synthetic construct
  misc_feature 1..16: note = synthetic [barcode part1]
  source 1..16: mol_type = other DNA
atactcgtgccgttcg

SEQ ID NO: 42257 - DNA, 16 bp, synthetic construct
  misc_feature 1..16: note = synthetic [barcode part1]
  source 1..16: mol_type = other DNA
tctctggaggattgac

SEQ ID NO: 42258 - DNA, 16 bp, synthetic construct
  misc_feature 1..16: note = synthetic [barcode part1]
  source 1..16: mol_type = other DNA
gtctctgaagtgtgac

SEQ ID NO: 42259 - DNA, 16 bp, synthetic construct
  misc_feature 1..16: note = synthetic [barcode part1]
  source 1..16: mol_type = other DNA
ttacacgccttggtcg

SEQ ID NO: 42260 - DNA, 16 bp, synthetic construct
  misc_feature 1..16: note = synthetic [barcode part1]
  source 1..16: mol_type = other DNA
agaactcactccagac

SEQ ID NO: 42261 - DNA, 16 bp, synthetic construct
  misc_feature 1..16: note = synthetic [barcode part1]
  source 1..16: mol_type = other DNA
tgtattacctcgatcg

SEQ ID NO: 42262 - DNA, 16 bp, synthetic construct
  misc_feature 1..16: note = synthetic [barcode part1]
  source 1..16: mol_type = other DNA
tgacgtaggttgtgtc

SEQ ID NO: 42263 - DNA, 16 bp, synthetic construct
  misc_feature 1..16: note = synthetic [barcode part1]
  source 1..16: mol_type = other DNA
gagtggttgtgttaag

SEQ ID NO: 42264 - DNA, 16 bp, synthetic construct
  misc_feature 1..16: note = synthetic [barcode part1]
  source 1..16: mol_type = other DNA
gaggcaaggtattcgc

SEQ ID NO: 42265 - DNA, 16 bp, synthetic construct
  misc_feature 1..16: note = synthetic [barcode part1]
  source 1..16: mol_type = other DNA
tactcgtcttggagtt

SEQ ID NO: 42266 - DNA, 16 bp, synthetic construct
  misc_feature 1..16: note = synthetic [barcode part1]
  source 1..16: mol_type = other DNA
cactagagtggaggtc

SEQ ID NO: 42267 - DNA, 16 bp, synthetic construct
  misc_feature 1..16: note = synthetic [barcode part1]
  source 1..16: mol_type = other DNA
agtacaacgccaggtg

SEQ ID NO: 42268 - DNA, 16 bp, synthetic construct
  misc_feature 1..16: note = synthetic [barcode part1]
  source 1..16: mol_type = other DNA
ttctcctgaccttgac

SEQ ID NO: 42269 - DNA, 16 bp, synthetic construct
  misc_feature 1..16: note = synthetic [barcode part1]
  source 1..16: mol_type = other DNA
gtctgtcacggataac

SEQ ID NO: 42270 - DNA, 16 bp, synthetic construct
  misc_feature 1..16: note = synthetic [barcode part1]
  source 1..16: mol_type = other DNA
taccgaggttcagtgt

SEQ ID NO: 42271 - DNA, 16 bp, synthetic construct
  misc_feature 1..16: note = synthetic [barcode part1]
  source 1..16: mol_type = other DNA
ttggacagtcctgtcc

SEQ ID NO: 42272 - DNA, 16 bp, synthetic construct
  misc_feature 1..16: note = synthetic [barcode part1]
  source 1..16: mol_type = other DNA
caacgtaacgtccaac

SEQ ID NO: 42273 - DNA, 16 bp, synthetic construct
  misc_feature 1..16: note = synthetic [barcode part1]
  source 1..16: mol_type = other DNA
gaccgtacaactacgt

SEQ ID NO: 42274 - DNA, 16 bp, synthetic construct
  misc_feature 1..16: note = synthetic [barcode part1]
  source 1..16: mol_type = other DNA
gtgcgtgactagttac

SEQ ID NO: 42275 - DNA, 16 bp, synthetic construct
  misc_feature 1..16: note = synthetic [barcode part1]
  source 1..16: mol_type = other DNA
ttattgccggacgtcc

SEQ ID NO: 42276 - DNA, 16 bp, synthetic construct
  misc_feature 1..16: note = synthetic [barcode part1]
  source 1..16: mol_type = other DNA
actacaacgccgtagt

SEQ ID NO: 42277 - DNA, 16 bp, synthetic construct
  misc_feature 1..16: note = synthetic [barcode part1]
  source 1..16: mol_type = other DNA
gacgaggtgtgtcagt

SEQ ID NO: 42278 - DNA, 16 bp, synthetic construct
  misc_feature 1..16: note = synthetic [barcode part1]
  source 1..16: mol_type = other DNA
ccggttcctcaatctt

SEQ ID NO: 42279 - DNA, 16 bp, synthetic construct
  misc_feature 1..16: note = synthetic [barcode part1]
  source 1..16: mol_type = other DNA
gtgtctaggatctgtg

SEQ ID NO: 42280 - DNA, 16 bp, synthetic construct
  misc_feature 1..16: note = synthetic [barcode part1]
  source 1..16: mol_type = other DNA
attctcgcaagtcact

SEQ ID NO: 42281 - DNA, 16 bp, synthetic construct
  misc_feature 1..16: note = synthetic [barcode part1]
  source 1..16: mol_type = other DNA
gttcctacgccgagtt

SEQ ID NO: 42282 - DNA, 16 bp, synthetic construct
  misc_feature 1..16: note = synthetic [barcode part1]
  source 1..16: mol_type = other DNA
cctcgttaagtgacag

SEQ ID NO: 42283 - DNA, 16 bp, synthetic construct
  misc_feature 1..16: note = synthetic [barcode part1]
  source 1..16: mol_type = other DNA
tgttcgcaatatcgtc

SEQ ID NO: 42284 - DNA, 16 bp, synthetic construct
  misc_feature 1..16: note = synthetic [barcode part1]
  source 1..16: mol_type = other DNA
gtgaatcaggataacc

SEQ ID NO: 42285 - DNA, 16 bp, synthetic construct
  misc_feature 1..16: note = synthetic [barcode part1]
  source 1..16: mol_type = other DNA
cgtcttgaacacctgc

SEQ ID NO: 42286 - DNA, 16 bp, synthetic construct
  misc_feature 1..16: note = synthetic [barcode part1]
  source 1..16: mol_type = other DNA
gtatcagatcggaggc

SEQ ID NO: 42287 - DNA, 16 bp, synthetic construct
  misc_feature 1..16: note = synthetic [barcode part1]
  source 1..16: mol_type = other DNA
aactgtcactcggtag

SEQ ID NO: 42288 - DNA, 16 bp, synthetic construct
  misc_feature 1..16: note = synthetic [barcode part1]
  source 1..16: mol_type = other DNA
agttgcacaacacacc

SEQ ID NO: 42289 - DNA, 16 bp, synthetic construct
  misc_feature 1..16: note = synthetic [barcode part1]
  source 1..16: mol_type = other DNA
tgttaatcggcacgtg

SEQ ID NO: 42290 - DNA, 16 bp, synthetic construct
  misc_feature 1..16: note = synthetic [barcode part1]
  source 1..16: mol_type = other DNA
acactgtctacttgtg

SEQ ID NO: 42291 - DNA, 16 bp, synthetic construct
  misc_feature 1..16: note = synthetic [barcode part1]
  source 1..16: mol_type = other DNA
tccaccgaatctgcgt

SEQ ID NO: 42292 - DNA, 16 bp, synthetic construct
  misc_feature 1..16: note = synthetic [barcode part1]
  source 1..16: mol_type = other DNA
gaacagaacagtgtct

SEQ ID NO: 42293 - DNA, 16 bp, synthetic construct
  misc_feature 1..16: note = synthetic [barcode part1]
  source 1..16: mol_type = other DNA
gcaaccactgattctt

SEQ ID NO: 42294 - DNA, 16 bp, synthetic construct
  misc_feature 1..16: note = synthetic [barcode part1]
  source 1..16: mol_type = other DNA
gacaatataggcactg

SEQ ID NO: 42295 - DNA, 16 bp, synthetic construct
  misc_feature 1..16: note = synthetic [barcode part1]
  source 1..16: mol_type = other DNA
ccagaatcgttgtgac

SEQ ID NO: 42296 - DNA, 16 bp, synthetic construct
  misc_feature 1..16: note = synthetic [barcode part1]
  source 1..16: mol_type = other DNA
ttgtctgcctatccgt

SEQ ID NO: 42297 - DNA, 16 bp, synthetic construct
  misc_feature 1..16: note = synthetic [barcode part1]
  source 1..16: mol_type = other DNA
acactacgcgatactg

SEQ ID NO: 42298 - DNA, 16 bp, synthetic construct
  misc_feature 1..16: note = synthetic [barcode part1]
  source 1..16: mol_type = other DNA
ttacgttccgccgaac

SEQ ID NO: 42299 - DNA, 16 bp, synthetic construct
  misc_feature 1..16: note = synthetic [barcode part1]
  source 1..16: mol_type = other DNA
aataaggttgagtgcc

SEQ ID NO: 42300 - DNA, 16 bp, synthetic construct
  misc_feature 1..16: note = synthetic [barcode part1]
  source 1..16: mol_type = other DNA
gatacgtatcgacacc

SEQ ID NO: 42301 - DNA, 16 bp, synthetic construct
  misc_feature 1..16: note = synthetic [barcode part1]
  source 1..16: mol_type = other DNA
cgaccgtcttatagag

SEQ ID NO: 42302 - DNA, 16 bp, synthetic construct
  misc_feature 1..16: note = synthetic [barcode part1]
  source 1..16: mol_type = other DNA
gacgttaaccgtagtc

SEQ ID NO: 42303 - DNA, 16 bp, synthetic construct
  misc_feature 1..16: note = synthetic [barcode part1]
  source 1..16: mol_type = other DNA
ttcgaactggatccag

SEQ ID NO: 42304 - DNA, 16 bp, synthetic construct
  misc_feature 1..16: note = synthetic [barcode part1]
  source 1..16: mol_type = other DNA
gacctggtcaagttac

SEQ ID NO: 42305 - DNA, 16 bp, synthetic construct
  misc_feature 1..16: note = synthetic [barcode part1]
  source 1..16: mol_type = other DNA
ttaagaggccagagag

SEQ ID NO: 42306 - DNA, 16 bp, synthetic construct
  misc_feature 1..16: note = synthetic [barcode part1]
  source 1..16: mol_type = other DNA
cagtactctcgcctag

SEQ ID NO: 42307 - DNA, 16 bp, synthetic construct
  misc_feature 1..16: note = synthetic [barcode part1]
  source 1..16: mol_type = other DNA
atacagtagtcgaggt

SEQ ID NO: 42308 - DNA, 16 bp, synthetic construct
  misc_feature 1..16: note = synthetic [barcode part1]
  source 1..16: mol_type = other DNA
agtctggtctcgtatt

SEQ ID NO: 42309 - DNA, 16 bp, synthetic construct
  misc_feature 1..16: note = synthetic [barcode part1]
  source 1..16: mol_type = other DNA
acttccagacgtaggt

SEQ ID NO: 42310 - DNA, 16 bp, synthetic construct
  misc_feature 1..16: note = synthetic [barcode part1]
  source 1..16: mol_type = other DNA
aacaacaactcacgag

SEQ ID NO: 42311 - DNA, 16 bp, synthetic construct
  misc_feature 1..16: note = synthetic [barcode part1]
  source 1..16: mol_type = other DNA
agtctccgatccacac

SEQ ID NO: 42312 - DNA, 16 bp, synthetic construct
  misc_feature 1..16: note = synthetic [barcode part1]
  source 1..16: mol_type = other DNA
gcgacaagtggttgtg

SEQ ID NO: 42313 - DNA, 16 bp, synthetic construct
  misc_feature 1..16: note = synthetic [barcode part1]
  source 1..16: mol_type = other DNA
gttactgagaagtgtg

SEQ ID NO: 42314 - DNA, 16 bp, synthetic construct
  misc_feature 1..16: note = synthetic [barcode part1]
  source 1..16: mol_type = other DNA
cgtcactgatatatcc

SEQ ID NO: 42315 - DNA, 16 bp, synthetic construct
  misc_feature 1..16: note = synthetic [barcode part1]
  source 1..16: mol_type = other DNA
tgtcttgataggcctt

SEQ ID NO: 42316 - DNA, 16 bp, synthetic construct
  misc_feature 1..16: note = synthetic [barcode part1]
  source 1..16: mol_type = other DNA
accaatcggtcgattg

SEQ ID NO: 42317 - DNA, 16 bp, synthetic construct
  misc_feature 1..16: note = synthetic [barcode part1]
  source 1..16: mol_type = other DNA
tgtagtagttcgcctt

SEQ ID NO: 42318 - DNA, 16 bp, synthetic construct
  misc_feature 1..16: note = synthetic [barcode part1]
  source 1..16: mol_type = other DNA
cgtacggtattccacc

SEQ ID NO: 42319 - DNA, 16 bp, synthetic construct
  misc_feature 1..16: note = synthetic [barcode part1]
  source 1..16: mol_type = other DNA
cgtacaactgtacgac

SEQ ID NO: 42320 - DNA, 16 bp, synthetic construct
  misc_feature 1..16: note = synthetic [barcode part1]
  source 1..16: mol_type = other DNA
aggtgagttgttcgtc

SEQ ID NO: 42321 - DNA, 16 bp, synthetic construct
  misc_feature 1..16: note = synthetic [barcode part1]
  source 1..16: mol_type = other DNA
gagagattgtcggcgt

SEQ ID NO: 42322 - DNA, 16 bp, synthetic construct
  misc_feature 1..16: note = synthetic [barcode part1]
  source 1..16: mol_type = other DNA
gttcgttacggcgtct

SEQ ID NO: 42323 - DNA, 16 bp, synthetic construct
  misc_feature 1..16: note = synthetic [barcode part1]
  source 1..16: mol_type = other DNA
acctctccaattgtag

SEQ ID NO: 42324 - DNA, 16 bp, synthetic construct
  misc_feature 1..16: note = synthetic [barcode part1]
  source 1..16: mol_type = other DNA
gagaggtgcaatcacc

SEQ ID NO: 42325 - DNA, 16 bp, synthetic construct
  misc_feature 1..16: note = synthetic [barcode part1]
  source 1..16: mol_type = other DNA
aacgcacggaaccagt

SEQ ID NO: 42326 - DNA, 16 bp, synthetic construct
  misc_feature 1..16: note = synthetic [barcode part1]
  source 1..16: mol_type = other DNA
gaggtggactcgtagt

SEQ ID NO: 42327 - DNA, 16 bp, synthetic construct
  misc_feature 1..16: note = synthetic [barcode part1]
  source 1..16: mol_type = other DNA
atcgtagtccggaatc

SEQ ID NO: 42328 - DNA, 16 bp, synthetic construct
  misc_feature 1..16: note = synthetic [barcode part1]
  source 1..16: mol_type = other DNA
tctcacgaccgagttc

SEQ ID NO: 42329 - DNA, 16 bp, synthetic construct
  misc_feature 1..16: note = synthetic [barcode part1]
  source 1..16: mol_type = other DNA
agtgtctgttccttag

SEQ ID NO: 42330 - DNA, 16 bp, synthetic construct
  misc_feature 1..16: note = synthetic [barcode part1]
  source 1..16: mol_type = other DNA
tccttggtgactgtgc

SEQ ID NO: 42331 - DNA, 16 bp, synthetic construct
  misc_feature 1..16: note = synthetic [barcode part1]
  source 1..16: mol_type = other DNA
attcactactccagac

SEQ ID NO: 42332 - DNA, 16 bp, synthetic construct
  misc_feature 1..16: note = synthetic [barcode part1]
  source 1..16: mol_type = other DNA
agttatagactcctcc

SEQ ID NO: 42333 - DNA, 16 bp, synthetic construct
  misc_feature 1..16: note = synthetic [barcode part1]
  source 1..16: mol_type = other DNA
taaggtctcggaactc

SEQ ID NO: 42334 - DNA, 16 bp, synthetic construct
  misc_feature 1..16: note = synthetic [barcode part1]
  source 1..16: mol_type = other DNA
ttacgtgcgtgactag

SEQ ID NO: 42335 - DNA, 16 bp, synthetic construct
  misc_feature 1..16: note = synthetic [barcode part1]
  source 1..16: mol_type = other DNA
cgatatctatcgcgag

SEQ ID NO: 42336 - DNA, 16 bp, synthetic construct
  misc_feature 1..16: note = synthetic [barcode part1]
  source 1..16: mol_type = other DNA
gccttactgccttatc

SEQ ID NO: 42337 - DNA, 16 bp, synthetic construct
  misc_feature 1..16: note = synthetic [barcode part1]
  source 1..16: mol_type = other DNA
gccagtatagagagtt

SEQ ID NO: 42338 - DNA, 16 bp, synthetic construct
  misc_feature 1..16: note = synthetic [barcode part1]
  source 1..16: mol_type = other DNA
tcttgcgagagtgtac

SEQ ID NO: 42339 - DNA, 16 bp, synthetic construct
  misc_feature 1..16: note = synthetic [barcode part1]
  source 1..16: mol_type = other DNA
gacgactcaacctagt

SEQ ID NO: 42340 - DNA, 16 bp, synthetic construct
  misc_feature 1..16: note = synthetic [barcode part1]
  source 1..16: mol_type = other DNA
tgttatcctgcacaac

SEQ ID NO: 42341 - DNA, 16 bp, synthetic construct
  misc_feature 1..16: note = synthetic [barcode part1]
  source 1..16: mol_type = other DNA
gtgttgtgacaggcag

SEQ ID NO: 42342 - DNA, 16 bp, synthetic construct
  misc_feature 1..16: note = synthetic [barcode part1]
  source 1..16: mol_type = other DNA
tagactacggtgacct

SEQ ID NO: 42343 - DNA, 16 bp, synthetic construct
  misc_feature 1..16: note = synthetic [barcode part1]
  source 1..16: mol_type = other DNA
tgccgcagtattacag

SEQ ID NO: 42344 - DNA, 16 bp, synthetic construct
  misc_feature 1..16: note = synthetic [barcode part1]
  source 1..16: mol_type = other DNA
ttcctgcgaaccactg

SEQ ID NO: 42345 - DNA, 16 bp, synthetic construct
  misc_feature 1..16: note = synthetic [barcode part1]
  source 1..16: mol_type = other DNA
caggcacaactatacc

SEQ ID NO: 42346 - DNA, 16 bp, synthetic construct
  misc_feature 1..16: note = synthetic [barcode part1]
  source 1..16: mol_type = other DNA
attgacagtgagacgt

SEQ ID NO: 42347 - DNA, 16 bp, synthetic construct
  misc_feature 1..16: note = synthetic [barcode part1]
  source 1..16: mol_type = other DNA
gagtctaggattgaac

SEQ ID NO: 42348 - DNA, 16 bp, synthetic construct
  misc_feature 1..16: note = synthetic [barcode part1]
  source 1..16: mol_type = other DNA
tccgatcgtgtcaacc

SEQ ID NO: 42349 - DNA, 16 bp, synthetic construct
  misc_feature 1..16: note = synthetic [barcode part1]
  source 1..16: mol_type = other DNA
caacactcaggcgaag

SEQ ID NO: 42350 - DNA, 16 bp, synthetic construct
  misc_feature 1..16: note = synthetic [barcode part1]
  source 1..16: mol_type = other DNA
ttcctggcgtggttac

SEQ ID NO: 42351 - DNA, 16 bp, synthetic construct
  misc_feature 1..16: note = synthetic [barcode part1]
  source 1..16: mol_type = other DNA
gttacgaacgacgttc

SEQ ID NO: 42352 - DNA, 16 bp, synthetic construct
  misc_feature 1..16: note = synthetic [barcode part1]
  source 1..16: mol_type = other DNA
tgatcttcggcgtgtc

SEQ ID NO: 42353 - DNA, 16 bp, synthetic construct
  misc_feature 1..16: note = synthetic [barcode part1]
  source 1..16: mol_type = other DNA
gcggttcgtaagaacg

SEQ ID NO: 42354 - DNA, 16 bp, synthetic construct
  misc_feature 1..16: note = synthetic [barcode part1]
  source 1..16: mol_type = other DNA
tctcctctcttctcct

SEQ ID NO: 42355 - DNA, 16 bp, synthetic construct
  misc_feature 1..16: note = synthetic [barcode part1]
  source 1..16: mol_type = other DNA
gcacagaacttagtag

SEQ ID NO: 42356 - DNA, 16 bp, synthetic construct
  misc_feature 1..16: note = synthetic [barcode part1]
  source 1..16: mol_type = other DNA
gagtactaggtctacc

SEQ ID NO: 42357 - DNA, 16 bp, synthetic construct
  misc_feature 1..16: note = synthetic [barcode part1]
  source 1..16: mol_type = other DNA
tactccgcagacgttc

SEQ ID NO: 42358 - DNA, 16 bp, synthetic construct
  misc_feature 1..16: note = synthetic [barcode part1]
  source 1..16: mol_type = other DNA
gtgcaacgtcaacgtt

SEQ ID NO: 42359 - DNA, 16 bp, synthetic construct
  misc_feature 1..16: note = synthetic [barcode part1]
  source 1..16: mol_type = other DNA
tgactgtggtgataag

SEQ ID NO: 42360 - DNA, 16 bp, synthetic construct
  misc_feature 1..16: note = synthetic [barcode part1]
  source 1..16: mol_type = other DNA
ttaattgccaggaccg

SEQ ID NO: 42361 - DNA, 16 bp, synthetic construct
  misc_feature 1..16: note = synthetic [barcode part1]
  source 1..16: mol_type = other DNA
ttgacgtgttggtgtg

SEQ ID NO: 42362 - DNA, 16 bp, synthetic construct
  misc_feature 1..16: note = synthetic [barcode part1]
  source 1..16: mol_type = other DNA
gtctcgtagtatactc

SEQ ID NO: 42363 - DNA, 16 bp, synthetic construct
  misc_feature 1..16: note = synthetic [barcode part1]
  source 1..16: mol_type = other DNA
acgttggtgacgaggt

SEQ ID NO: 42364 - DNA, 16 bp, synthetic construct
  misc_feature 1..16: note = synthetic [barcode part1]
  source 1..16: mol_type = other DNA
tcactccagaagtcag

SEQ ID NO: 42365 - DNA, 16 bp, synthetic construct
  misc_feature 1..16: note = synthetic [barcode part1]
  source 1..16: mol_type = other DNA
ttgtcgatcttcgtag

SEQ ID NO: 42366 - DNA, 16 bp, synthetic construct
  misc_feature 1..16: note = synthetic [barcode part1]
  source 1..16: mol_type = other DNA
agtggagagtctgcac

SEQ ID NO: 42367 - DNA, 16 bp, synthetic construct
  misc_feature 1..16: note = synthetic [barcode part1]
  source 1..16: mol_type = other DNA
acgtggcaaggagttc

SEQ ID NO: 42368 - DNA, 16 bp, synthetic construct
  misc_feature 1..16: note = synthetic [barcode part1]
  source 1..16: mol_type = other DNA
tcacaagaacggcgac

SEQ ID NO: 42369 - DNA, 16 bp, synthetic construct
  misc_feature 1..16: note = synthetic [barcode part1]
  source 1..16: mol_type = other DNA
gaagaccaatcttccg

SEQ ID NO: 42370 - DNA, 16 bp, synthetic construct
  misc_feature 1..16: note = synthetic [barcode part1]
  source 1..16: mol_type = other DNA
tgccttggaatccgtc

SEQ ID NO: 42371 - DNA, 16 bp, synthetic construct
  misc_feature 1..16: note = synthetic [barcode part1]
  source 1..16: mol_type = other DNA
gttctcgtctagtggc

SEQ ID NO: 42372 - DNA, 16 bp, synthetic construct
  misc_feature 1..16: note = synthetic [barcode part1]
  source 1..16: mol_type = other DNA
cagtgcctctatccag

SEQ ID NO: 42373 - DNA, 16 bp, synthetic construct
  misc_feature 1..16: note = synthetic [barcode part1]
  source 1..16: mol_type = other DNA
ttgtgccgtgattcgc

SEQ ID NO: 42374 - DNA, 16 bp, synthetic construct
  misc_feature 1..16: note = synthetic [barcode part1]
  source 1..16: mol_type = other DNA
accgtgatctaggact

SEQ ID NO: 42375 - DNA, 16 bp, synthetic construct
  misc_feature 1..16: note = synthetic [barcode part1]
  source 1..16: mol_type = other DNA
aattggtcaacgccgt

SEQ ID NO: 42376 - DNA, 16 bp, synthetic construct
  misc_feature 1..16: note = synthetic [barcode part1]
  source 1..16: mol_type = other DNA
ccgacgtcctcttaag

SEQ ID NO: 42377 - DNA, 16 bp, synthetic construct
  misc_feature 1..16: note = synthetic [barcode part1]
  source 1..16: mol_type = other DNA
aaccaacacgtgtgtc

SEQ ID NO: 42378 - DNA, 16 bp, synthetic construct
  misc_feature 1..16: note = synthetic [barcode part1]
  source 1..16: mol_type = other DNA
cggcaggtgaatatcg

SEQ ID NO: 42379 - DNA, 16 bp, synthetic construct
  misc_feature 1..16: note = synthetic [barcode part1]
  source 1..16: mol_type = other DNA
gcgtcttaagagtacc

SEQ ID NO: 42380 - DNA, 16 bp, synthetic construct
  misc_feature 1..16: note = synthetic [barcode part1]
  source 1..16: mol_type = other DNA
caatccagtctctgcg

SEQ ID NO: 42381 - DNA, 16 bp, synthetic construct
  misc_feature 1..16: note = synthetic [barcode part1]
  source 1..16: mol_type = other DNA
atacagatcgcgtctg

SEQ ID NO: 42382 - DNA, 16 bp, synthetic construct
  misc_feature 1..16: note = synthetic [barcode part1]
  source 1..16: mol_type = other DNA
cggcagtactgaattc

SEQ ID NO: 42383 - DNA, 16 bp, synthetic construct
  misc_feature 1..16: note = synthetic [barcode part1]
  source 1..16: mol_type = other DNA
gttgacaagtgacggc

SEQ ID NO: 42384 - DNA, 16 bp, synthetic construct
  misc_feature 1..16: note = synthetic [barcode part1]
  source 1..16: mol_type = other DNA
gaaggtctcctaactg

SEQ ID NO: 42385 - DNA, 16 bp, synthetic construct
  misc_feature 1..16: note = synthetic [barcode part1]
  source 1..16: mol_type = other DNA
gacgatcgaggtacgt

SEQ ID NO: 42386 - DNA, 16 bp, synthetic construct
  misc_feature 1..16: note = synthetic [barcode part1]
  source 1..16: mol_type = other DNA
cgtggattcgccttgt

SEQ ID NO: 42387 - DNA, 16 bp, synthetic construct
  misc_feature 1..16: note = synthetic [barcode part1]
  source 1..16: mol_type = other DNA
caatacgatcgtcttc

SEQ ID NO: 42388 - DNA, 16 bp, synthetic construct
  misc_feature 1..16: note = synthetic [barcode part1]
  source 1..16: mol_type = other DNA
ttctggcgagaactac

SEQ ID NO: 42389 - DNA, 16 bp, synthetic construct
  misc_feature 1..16: note = synthetic [barcode part1]
  source 1..16: mol_type = other DNA
tacaacgattcgtctc

SEQ ID NO: 42390 - DNA, 16 bp, synthetic construct
  misc_feature 1..16: note = synthetic [barcode part1]
  source 1..16: mol_type = other DNA
gacaacttctcgtgcc

SEQ ID NO: 42391 - DNA, 16 bp, synthetic construct
  misc_feature 1..16: note = synthetic [barcode part1]
  source 1..16: mol_type = other DNA
gactcttgtgtgactt

SEQ ID NO: 42392 - DNA, 16 bp, synthetic construct
  misc_feature 1..16: note = synthetic [barcode part1]
  source 1..16: mol_type = other DNA
cgatcttcgcgtgact

SEQ ID NO: 42393 - DNA, 16 bp, synthetic construct
  misc_feature 1..16: note = synthetic [barcode part1]
  source 1..16: mol_type = other DNA
gcgtggttaatcacac

SEQ ID NO: 42394 - DNA, 16 bp, synthetic construct
  misc_feature 1..16: note = synthetic [barcode part1]
  source 1..16: mol_type = other DNA
cgtagttcacgagttg

SEQ ID NO: 42395 - DNA, 16 bp, synthetic construct
  misc_feature 1..16: note = synthetic [barcode part1]
  source 1..16: mol_type = other DNA
gccgtgtatattcgag

SEQ ID NO: 42396 - DNA, 16 bp, synthetic construct
  misc_feature 1..16: note = synthetic [barcode part1]
  source 1..16: mol_type = other DNA
taagatctgtgcgcgt

SEQ ID NO: 42397 - DNA, 16 bp, synthetic construct
  misc_feature 1..16: note = synthetic [barcode part1]
  source 1..16: mol_type = other DNA
accgatagtaaggcgc

SEQ ID NO: 42398 - DNA, 16 bp, synthetic construct
  misc_feature 1..16: note = synthetic [barcode part1]
  source 1..16: mol_type = other DNA
gtctaagaagtagtgc

SEQ ID NO: 42399 - DNA, 16 bp, synthetic construct
  misc_feature 1..16: note = synthetic [barcode part1]
  source 1..16: mol_type = other DNA
cacgtggttattactc

SEQ ID NO: 42400 - DNA, 16 bp, synthetic construct
  misc_feature 1..16: note = synthetic [barcode part1]
  source 1..16: mol_type = other DNA
gtacgacaatcaaggt

SEQ ID NO: 42401 - DNA, 16 bp, synthetic construct
  misc_feature 1..16: note = synthetic [barcode part1]
  source 1..16: mol_type = other DNA
tctctccggagttctt

SEQ ID NO: 42402 - DNA, 16 bp, synthetic construct
  misc_feature 1..16: note = synthetic [barcode part1]
  source 1..16: mol_type = other DNA
agttggttggtgtcac

SEQ ID NO: 42403 - DNA, 16 bp, synthetic construct
  misc_feature 1..16: note = synthetic [barcode part1]
  source 1..16: mol_type = other DNA
gagtatcgtagtgaac

SEQ ID NO: 42404 - DNA, 16 bp, synthetic construct
  misc_feature 1..16: note = synthetic [barcode part1]
  source 1..16: mol_type = other DNA
tacggtgcaggcaagt

SEQ ID NO: 42405 - DNA, 16 bp, synthetic construct
  misc_feature 1..16: note = synthetic [barcode part1]
  source 1..16: mol_type = other DNA
gtgatactgataccgc

SEQ ID NO: 42406 - DNA, 16 bp, synthetic construct
  misc_feature 1..16: note = synthetic [barcode part1]
  source 1..16: mol_type = other DNA
gttcttgatccaacgt

SEQ ID NO: 42407 - DNA, 16 bp, synthetic construct
  misc_feature 1..16: note = synthetic [barcode part1]
  source 1..16: mol_type = other DNA
gactactcaagaacag

SEQ ID NO: 42408 - DNA, 16 bp, synthetic construct
  misc_feature 1..16: note = synthetic [barcode part1]
  source 1..16: mol_type = other DNA
caggttgacacttctt

SEQ ID NO: 42409 - DNA, 16 bp, synthetic construct
  misc_feature 1..16: note = synthetic [barcode part1]
  source 1..16: mol_type = other DNA
cgttccttacagagag

SEQ ID NO: 42410 - DNA, 16 bp, synthetic construct
  misc_feature 1..16: note = synthetic [barcode part1]
  source 1..16: mol_type = other DNA
cgttctccaatctaag

SEQ ID NO: 42411 - DNA, 16 bp, synthetic construct
  misc_feature 1..16: note = synthetic [barcode part1]
  source 1..16: mol_type = other DNA
acgaggtgtagtagag

SEQ ID NO: 42412 - DNA, 16 bp, synthetic construct
  misc_feature 1..16: note = synthetic [barcode part1]
  source 1..16: mol_type = other DNA
actgacactattgtcc

SEQ ID NO: 42413 - DNA, 16 bp, synthetic construct
  misc_feature 1..16: note = synthetic [barcode part1]
  source 1..16: mol_type = other DNA
gttaacggtagtcgtc

SEQ ID NO: 42414 - DNA, 16 bp, synthetic construct
  misc_feature 1..16: note = synthetic [barcode part1]
  source 1..16: mol_type = other DNA
gtaaccgagttaaggt

SEQ ID NO: 42415 - DNA, 16 bp, synthetic construct
  misc_feature 1..16: note = synthetic [barcode part1]
  source 1..16: mol_type = other DNA
gcctgaaggtgagact

SEQ ID NO: 42416 - DNA, 16 bp, synthetic construct
  misc_feature 1..16: note = synthetic [barcode part1]
  source 1..16: mol_type = other DNA
aacgactgaggtacgc

SEQ ID NO: 42417 - DNA, 16 bp, synthetic construct
  misc_feature 1..16: note = synthetic [barcode part1]
  source 1..16: mol_type = other DNA
tacgcgacttgtaggt

SEQ ID NO: 42418 - DNA, 16 bp, synthetic construct
  misc_feature 1..16: note = synthetic [barcode part1]
  source 1..16: mol_type = other DNA
tctggtagtccttgcg

SEQ ID NO: 42419 - DNA, 16 bp, synthetic construct
  misc_feature 1..16: note = synthetic [barcode part1]
  source 1..16: mol_type = other DNA
tatccgatcaagtgcg

SEQ ID NO: 42420 - DNA, 16 bp, synthetic construct
  misc_feature 1..16: note = synthetic [barcode part1]
  source 1..16: mol_type = other DNA
caggtaggcaagtaag

SEQ ID NO: 42421 - DNA, 16 bp, synthetic construct
  misc_feature 1..16: note = synthetic [barcode part1]
  source 1..16: mol_type = other DNA
tctgacctgtacaatc

SEQ ID NO: 42422 - DNA, 16 bp, synthetic construct
  misc_feature 1..16: note = synthetic [barcode part1]
  source 1..16: mol_type = other DNA
tacggacgtggtgagt

SEQ ID NO: 42423 - DNA, 16 bp, synthetic construct
  misc_feature 1..16: note = synthetic [barcode part1]
  source 1..16: mol_type = other DNA
ccttgcgattgtcggt

SEQ ID NO: 42424 - DNA, 16 bp, synthetic construct
  misc_feature 1..16: note = synthetic [barcode part1]
  source 1..16: mol_type = other DNA
atcctgactaggactg

SEQ ID NO: 42425 - DNA, 16 bp, synthetic construct
  misc_feature 1..16: note = synthetic [barcode part1]
  source 1..16: mol_type = other DNA
gacctatcttatcgtg

SEQ ID NO: 42426 - DNA, 16 bp, synthetic construct
  misc_feature 1..16: note = synthetic [barcode part1]
  source 1..16: mol_type = other DNA
tcgcgtctgccagatt

SEQ ID NO: 42427 - DNA, 16 bp, synthetic construct
  misc_feature 1..16: note = synthetic [barcode part1]
  source 1..16: mol_type = other DNA
tcctccttgtacacgt

SEQ ID NO: 42428 - DNA, 16 bp, synthetic construct
  misc_feature 1..16: note = synthetic [barcode part1]
  source 1..16: mol_type = other DNA
ttgttgttgccgtctc

SEQ ID NO: 42429 - DNA, 16 bp, synthetic construct
  misc_feature 1..16: note = synthetic [barcode part1]
  source 1..16: mol_type = other DNA
ccactaccactcagac

SEQ ID NO: 42430 - DNA, 16 bp, synthetic construct
  misc_feature 1..16: note = synthetic [barcode part1]
  source 1..16: mol_type = other DNA
ttggagtgtagacggc

SEQ ID NO: 42431 - DNA, 16 bp, synthetic construct
  misc_feature 1..16: note = synthetic [barcode part1]
  source 1..16: mol_type = other DNA
tgacgcgtcttcaacc

SEQ ID NO: 42432 - DNA, 16 bp, synthetic construct
  misc_feature 1..16: note = synthetic [barcode part1]
  source 1..16: mol_type = other DNA
atacgcgcagtcaact

SEQ ID NO: 42433 - DNA, 16 bp, synthetic construct
  misc_feature 1..16: note = synthetic [barcode part1]
  source 1..16: mol_type = other DNA
cactcctaccgaactg

SEQ ID NO: 42434 - DNA, 16 bp, synthetic construct
  misc_feature 1..16: note = synthetic [barcode part1]
  source 1..16: mol_type = other DNA
cacggtctgatctctg

SEQ ID NO: 42435 - DNA, 16 bp, synthetic construct
  misc_feature 1..16: note = synthetic [barcode part1]
  source 1..16: mol_type = other DNA
taacgacgtattcctc

SEQ ID NO: 42436 - DNA, 16 bp, synthetic construct
  misc_feature 1..16: note = synthetic [barcode part1]
  source 1..16: mol_type = other DNA
tcaagtaggacggcgt

SEQ ID NO: 42437 - DNA, 16 bp, synthetic construct
  misc_feature 1..16: note = synthetic [barcode part1]
  source 1..16: mol_type = other DNA
cgattcctgtacggtc

SEQ ID NO: 42438 - DNA, 16 bp, synthetic construct
  misc_feature 1..16: note = synthetic [barcode part1]
  source 1..16: mol_type = other DNA
gaggacttcttgatcg

SEQ ID NO: 42439 - DNA, 16 bp, synthetic construct
  misc_feature 1..16: note = synthetic [barcode part1]
  source 1..16: mol_type = other DNA
aggtgttcaagtgtcc

SEQ ID NO: 42440 - DNA, 16 bp, synthetic construct
  misc_feature 1..16: note = synthetic [barcode part1]
  source 1..16: mol_type = other DNA
gtctaacagagatacg

SEQ ID NO: 42441 - DNA, 16 bp, synthetic construct
  misc_feature 1..16: note = synthetic [barcode part1]
  source 1..16: mol_type = other DNA
tgtataacgtcttgcc

SEQ ID NO: 42442 - DNA, 16 bp, synthetic construct
  misc_feature 1..16: note = synthetic [barcode part1]
  source 1..16: mol_type = other DNA
tacacttgcctggtgc

SEQ ID NO: 42443 - DNA, 16 bp, synthetic construct
  misc_feature 1..16: note = synthetic [barcode part1]
  source 1..16: mol_type = other DNA
tgtgttccttggtagt

SEQ ID NO: 42444 - DNA, 16 bp, synthetic construct
  misc_feature 1..16: note = synthetic [barcode part1]
  source 1..16: mol_type = other DNA
cgaatactcctcgacc

SEQ ID NO: 42445 - DNA, 16 bp, synthetic construct
  misc_feature 1..16: note = synthetic [barcode part1]
  source 1..16: mol_type = other DNA
caggacctgattagtc

SEQ ID NO: 42446 - DNA, 16 bp, synthetic construct
  misc_feature 1..16: note = synthetic [barcode part1]
  source 1..16: mol_type = other DNA
agacaccacttgcagt

SEQ ID NO: 42447 - DNA, 16 bp, synthetic construct
  misc_feature 1..16: note = synthetic [barcode part1]
  source 1..16: mol_type = other DNA
aaccggaggcaataag

SEQ ID NO: 42448 - DNA, 16 bp, synthetic construct
  misc_feature 1..16: note = synthetic [barcode part1]
  source 1..16: mol_type = other DNA
tattaaggcgagagtc

SEQ ID NO: 42449 - DNA, 16 bp, synthetic construct
  misc_feature 1..16: note = synthetic [barcode part1]
  source 1..16: mol_type = other DNA
aggcgattacgaattg

SEQ ID NO: 42450 - DNA, 16 bp, synthetic construct
  misc_feature 1..16: note = synthetic [barcode part1]
  source 1..16: mol_type = other DNA
aattctaccacggcag

SEQ ID NO: 42451 - DNA, 16 bp, synthetic construct
  misc_feature 1..16: note = synthetic [barcode part1]
  source 1..16: mol_type = other DNA
agtcgttcgagaatag

SEQ ID NO: 42452 - DNA, 16 bp, synthetic construct
  misc_feature 1..16: note = synthetic [barcode part1]
  source 1..16: mol_type = other DNA
tcgagagaaggactag

SEQ ID NO: 42453 - DNA, 16 bp, synthetic construct
  misc_feature 1..16: note = synthetic [barcode part1]
  source 1..16: mol_type = other DNA
cggtctcaacttcctt

SEQ ID NO: 42454 - DNA, 16 bp, synthetic construct
  misc_feature 1..16: note = synthetic [barcode part1]
  source 1..16: mol_type = other DNA
tcctcaacgacgcgtt

SEQ ID NO: 42455 - DNA, 16 bp, synthetic construct
  misc_feature 1..16: note = synthetic [barcode part1]
  source 1..16: mol_type = other DNA
taagttacacgccttc

SEQ ID NO: 42456 - DNA, 16 bp, synthetic construct
  misc_feature 1..16: note = synthetic [barcode part1]
  source 1..16: mol_type = other DNA
atccagtcagtggttg

SEQ ID NO: 42457 - DNA, 16 bp, synthetic construct
  misc_feature 1..16: note = synthetic [barcode part1]
  source 1..16: mol_type = other DNA
caggccagattactac

SEQ ID NO: 42458 - DNA, 16 bp, synthetic construct
  misc_feature 1..16: note = synthetic [barcode part1]
  source 1..16: mol_type = other DNA
cacgagtacgaactct

SEQ ID NO: 42459 - DNA, 16 bp, synthetic construct
  misc_feature 1..16: note = synthetic [barcode part1]
  source 1..16: mol_type = other DNA
aggaggtattcagatc

SEQ ID NO: 42460 - DNA, 16 bp, synthetic construct
  misc_feature 1..16: note = synthetic [barcode part1]
  source 1..16: mol_type = other DNA
tctctcgattctccag

SEQ ID NO: 42461 - DNA, 16 bp, synthetic construct
  misc_feature 1..16: note = synthetic [barcode part1]
  source 1..16: mol_type = other DNA
aggtgaggaaccttgc

SEQ ID NO: 42462 - DNA, 16 bp, synthetic construct
  misc_feature 1..16: note = synthetic [barcode part1]
  source 1..16: mol_type = other DNA
tacgccgaaccaagag

SEQ ID NO: 42463 - DNA, 16 bp, synthetic construct
  misc_feature 1..16: note = synthetic [barcode part1]
  source 1..16: mol_type = other DNA
caccgagtagaggtac

SEQ ID NO: 42464 - DNA, 16 bp, synthetic construct
  misc_feature 1..16: note = synthetic [barcode part1]
  source 1..16: mol_type = other DNA
gcgttctgacttgacc

SEQ ID NO: 42465 - DNA, 16 bp, synthetic construct
  misc_feature 1..16: note = synthetic [barcode part1]
  source 1..16: mol_type = other DNA
ataggatctgcaggcg

SEQ ID NO: 42466 - DNA, 16 bp, synthetic construct
  misc_feature 1..16: note = synthetic [barcode part1]
  source 1..16: mol_type = other DNA
gtggcacgattaactc

SEQ ID NO: 42467 - DNA, 16 bp, synthetic construct
  misc_feature 1..16: note = synthetic [barcode part1]
  source 1..16: mol_type = other DNA
tgtgataacggcgtct

SEQ ID NO: 42468 - DNA, 16 bp, synthetic construct
  misc_feature 1..16: note = synthetic [barcode part1]
  source 1..16: mol_type = other DNA
gagtataatcgagtcg

SEQ ID NO: 42469 - DNA, 16 bp, synthetic construct
  misc_feature 1..16: note = synthetic [barcode part1]
  source 1..16: mol_type = other DNA
aattgcgtagtcgcac

SEQ ID NO: 42470 - DNA, 16 bp, synthetic construct
  misc_feature 1..16: note = synthetic [barcode part1]
  source 1..16: mol_type = other DNA
gcgcgattcttgactc

SEQ ID NO: 42471 - DNA, 16 bp, synthetic construct
  misc_feature 1..16: note = synthetic [barcode part1]
  source 1..16: mol_type = other DNA
gcgcacttgtcttgtg

SEQ ID NO: 42472 - DNA, 16 bp, synthetic construct
  misc_feature 1..16: note = synthetic [barcode part1]
  source 1..16: mol_type = other DNA
tggttccagttctctc

SEQ ID NO: 42473 - DNA, 16 bp, synthetic construct
  misc_feature 1..16: note = synthetic [barcode part1]
  source 1..16: mol_type = other DNA
atattccgcacaggac

SEQ ID NO: 42474 - DNA, 16 bp, synthetic construct
  misc_feature 1..16: note = synthetic [barcode part1]
  source 1..16: mol_type = other DNA
tcggaacgcaagtggt

SEQ ID NO: 42475 - DNA, 16 bp, synthetic construct
  misc_feature 1..16: note = synthetic [barcode part1]
  source 1..16: mol_type = other DNA
tagactgttggtgacc

SEQ ID NO: 42476 - DNA, 16 bp, synthetic construct
  misc_feature 1..16: note = synthetic [barcode part1]
  source 1..16: mol_type = other DNA
gacttacaggtctacg

SEQ ID NO: 42477 - DNA, 16 bp, synthetic construct
  misc_feature 1..16: note = synthetic [barcode part1]
  source 1..16: mol_type = other DNA
attatagttcgcctgc

SEQ ID NO: 42478 - DNA, 16 bp, synthetic construct
  misc_feature 1..16: note = synthetic [barcode part1]
  source 1..16: mol_type = other DNA
ttatcgtacggtaggc

SEQ ID NO: 42479 - DNA, 16 bp, synthetic construct
  misc_feature 1..16: note = synthetic [barcode part1]
  source 1..16: mol_type = other DNA
agaggacactcagacc

SEQ ID NO: 42480 - DNA, 16 bp, synthetic construct
  misc_feature 1..16: note = synthetic [barcode part1]
  source 1..16: mol_type = other DNA
ccgacttacttcttgc

SEQ ID NO: 42481 - DNA, 16 bp, synthetic construct
  misc_feature 1..16: note = synthetic [barcode part1]
  source 1..16: mol_type = other DNA
ttccaagatctatccg

SEQ ID NO: 42482 - DNA, 16 bp, synthetic construct
  misc_feature 1..16: note = synthetic [barcode part1]
  source 1..16: mol_type = other DNA
aacaatctgcgaaggt

SEQ ID NO: 42483 - DNA, 16 bp, synthetic construct
  misc_feature 1..16: note = synthetic [barcode part1]
  source 1..16: mol_type = other DNA
cacttcggtcttactc

SEQ ID NO: 42484 - DNA, 16 bp, synthetic construct
  misc_feature 1..16: note = synthetic [barcode part1]
  source 1..16: mol_type = other DNA
acgtgagatctgatag

SEQ ID NO: 42485 - DNA, 16 bp, synthetic construct
  misc_feature 1..16: note = synthetic [barcode part1]
  source 1..16: mol_type = other DNA
acgaagactccacact

SEQ ID NO: 42486 - DNA, 16 bp, synthetic construct
  misc_feature 1..16: note = synthetic [barcode part1]
  source 1..16: mol_type = other DNA
tgccggtagaggattg

SEQ ID NO: 42487 - DNA, 16 bp, synthetic construct
  misc_feature 1..16: note = synthetic [barcode part1]
  source 1..16: mol_type = other DNA
cctaattcagttgcac

SEQ ID NO: 42488 - DNA, 16 bp, synthetic construct
  misc_feature 1..16: note = synthetic [barcode part1]
  source 1..16: mol_type = other DNA
ccggaactctatctgc

SEQ ID NO: 42489 - DNA, 16 bp, synthetic construct
  misc_feature 1..16: note = synthetic [barcode part1]
  source 1..16: mol_type = other DNA
ttgtgtgtggtacacg

SEQ ID NO: 42490 - DNA, 16 bp, synthetic construct
  misc_feature 1..16: note = synthetic [barcode part1]
  source 1..16: mol_type = other DNA
gacacgcctcttcaac

SEQ ID NO: 42491 - DNA, 16 bp, synthetic construct
  misc_feature 1..16: note = synthetic [barcode part1]
  source 1..16: mol_type = other DNA
cggttgaagttctggt

SEQ ID NO: 42492 - DNA, 16 bp, synthetic construct
  misc_feature 1..16: note = synthetic [barcode part1]
  source 1..16: mol_type = other DNA
cacaagttcgtagacc

SEQ ID NO: 42493 - DNA, 16 bp, synthetic construct
  misc_feature 1..16: note = synthetic [barcode part1]
  source 1..16: mol_type = other DNA
gttgttccggatatct

SEQ ID NO: 42494 - DNA, 16 bp, synthetic construct
  misc_feature 1..16: note = synthetic [barcode part1]
  source 1..16: mol_type = other DNA
gagaatacttagtggc

SEQ ID NO: 42495 - DNA, 16 bp, synthetic construct
  misc_feature 1..16: note = synthetic [barcode part1]
  source 1..16: mol_type = other DNA
gtggtacagtcctagt

SEQ ID NO: 42496 - DNA, 16 bp, synthetic construct
  misc_feature 1..16: note = synthetic [barcode part1]
  source 1..16: mol_type = other DNA
caggattcgaccaatc

SEQ ID NO: 42497 - DNA, 16 bp, synthetic construct
  misc_feature 1..16: note = synthetic [barcode part1]
  source 1..16: mol_type = other DNA
taacgcgtgtggatct

SEQ ID NO: 42498 - DNA, 16 bp, synthetic construct
  misc_feature 1..16: note = synthetic [barcode part1]
  source 1..16: mol_type = other DNA
cctcacgatacaaggt

SEQ ID NO: 42499 - DNA, 16 bp, synthetic construct
  misc_feature 1..16: note = synthetic [barcode part1]
  source 1..16: mol_type = other DNA
gatactgacaccgtac

SEQ ID NO: 42500 - DNA, 16 bp, synthetic construct
  misc_feature 1..16: note = synthetic [barcode part1]
  source 1..16: mol_type = other DNA
aaccgcaaggatcggt

SEQ ID NO: 42501 - DNA, 16 bp, synthetic construct
  misc_feature 1..16: note = synthetic [barcode part1]
  source 1..16: mol_type = other DNA
cgacaaccaacttggt

SEQ ID NO: 42502 - DNA, 16 bp, synthetic construct
  misc_feature 1..16: note = synthetic [barcode part1]
  source 1..16: mol_type = other DNA
gttctatcaagtctgc

SEQ ID NO: 42503 - DNA, 16 bp, synthetic construct
  misc_feature 1..16: note = synthetic [barcode part1]
  source 1..16: mol_type = other DNA
ttctgcactagtggtt

SEQ ID NO: 42504 - DNA, 16 bp, synthetic construct
  misc_feature 1..16: note = synthetic [barcode part1]
  source 1..16: mol_type = other DNA
gcgtcggaggacaatt

SEQ ID NO: 42505 - DNA, 16 bp, synthetic construct
  misc_feature 1..16: note = synthetic [barcode part1]
  source 1..16: mol_type = other DNA
tgcactccactagacc

SEQ ID NO: 42506 - DNA, 16 bp, synthetic construct
  misc_feature 1..16: note = synthetic [barcode part1]
  source 1..16: mol_type = other DNA
tcgtgcggagactaag

SEQ ID NO: 42507 - DNA, 16 bp, synthetic construct
  misc_feature 1..16: note = synthetic [barcode part1]
  source 1..16: mol_type = other DNA
taaggaacggtacgcc

SEQ ID NO: 42508 - DNA, 16 bp, synthetic construct
  misc_feature 1..16: note = synthetic [barcode part1]
  source 1..16: mol_type = other DNA
atatccgattccgttg

SEQ ID NO: 42509 - DNA, 16 bp, synthetic construct
  misc_feature 1..16: note = synthetic [barcode part1]
  source 1..16: mol_type = other DNA
gccagtggtgattatc

SEQ ID NO: 42510 - DNA, 16 bp, synthetic construct
  misc_feature 1..16: note = synthetic [barcode part1]
  source 1..16: mol_type = other DNA
gaccaaccacaacgtt

SEQ ID NO: 42511 - DNA, 16 bp, synthetic construct
  misc_feature 1..16: note = synthetic [barcode part1]
  source 1..16: mol_type = other DNA
ccgtagagttcctcgt

SEQ ID NO: 42512 - DNA, 16 bp, synthetic construct
  misc_feature 1..16: note = synthetic [barcode part1]
  source 1..16: mol_type = other DNA
gacaaccttctgtgtt

SEQ ID NO: 42513 - DNA, 16 bp, synthetic construct
  misc_feature 1..16: note = synthetic [barcode part1]
  source 1..16: mol_type = other DNA
atcttaccagaggacc

SEQ ID NO: 42514 - DNA, 16 bp, synthetic construct
  misc_feature 1..16: note = synthetic [barcode part1]
  source 1..16: mol_type = other DNA
taaggcggaacgttcg

SEQ ID NO: 42515 - DNA, 16 bp, synthetic construct
  misc_feature 1..16: note = synthetic [barcode part1]
  source 1..16: mol_type = other DNA
taacttaccgtgtctg

SEQ ID NO: 42516 - DNA, 16 bp, synthetic construct
  misc_feature 1..16: note = synthetic [barcode part1]
  source 1..16: mol_type = other DNA
gtaaggacgacgacct

SEQ ID NO: 42517 - DNA, 16 bp, synthetic construct
  misc_feature 1..16: note = synthetic [barcode part1]
  source 1..16: mol_type = other DNA
gatctccactgtcttc

SEQ ID NO: 42518 - DNA, 16 bp, synthetic construct
  misc_feature 1..16: note = synthetic [barcode part1]
  source 1..16: mol_type = other DNA
ccggtagaataacctc

SEQ ID NO: 42519 - DNA, 16 bp, synthetic construct
  misc_feature 1..16: note = synthetic [barcode part1]
  source 1..16: mol_type = other DNA
gaatagtcgcagaccg

SEQ ID NO: 42520 - DNA, 16 bp, synthetic construct
  misc_feature 1..16: note = synthetic [barcode part1]
  source 1..16: mol_type = other DNA
ataggtaccacctacg

SEQ ID NO: 42521 - DNA, 16 bp, synthetic construct
  misc_feature 1..16: note = synthetic [barcode part1]
  source 1..16: mol_type = other DNA
acctatccagagtctt

SEQ ID NO: 42522 - DNA, 16 bp, synthetic construct
  misc_feature 1..16: note = synthetic [barcode part1]
  source 1..16: mol_type = other DNA
ttacacggaccggaag

SEQ ID NO: 42523 - DNA, 16 bp, synthetic construct
  misc_feature 1..16: note = synthetic [barcode part1]
  source 1..16: mol_type = other DNA
tggatcaccagtaacc

SEQ ID NO: 42524 - DNA, 16 bp, synthetic construct
  misc_feature 1..16: note = synthetic [barcode part1]
  source 1..16: mol_type = other DNA
agattgcaacacagac

SEQ ID NO: 42525 - DNA, 16 bp, synthetic construct
  misc_feature 1..16: note = synthetic [barcode part1]
  source 1..16: mol_type = other DNA
tgcacgaggatcaggt

SEQ ID NO: 42526 - DNA, 16 bp, synthetic construct
  misc_feature 1..16: note = synthetic [barcode part1]
  source 1..16: mol_type = other DNA
agaacctgcagtatcc

SEQ ID NO: 42527 - DNA, 16 bp, synthetic construct
  misc_feature 1..16: note = synthetic [barcode part1]
  source 1..16: mol_type = other DNA
ttagtggtgtcgaacc

SEQ ID NO: 42528 - DNA, 16 bp, synthetic construct
  misc_feature 1..16: note = synthetic [barcode part1]
  source 1..16: mol_type = other DNA
ccgttgttgttcggac

SEQ ID NO: 42529 - DNA, 16 bp, synthetic construct
  misc_feature 1..16: note = synthetic [barcode part1]
  source 1..16: mol_type = other DNA
tccactgacacgactc

SEQ ID NO: 42530 - DNA, 16 bp, synthetic construct
  misc_feature 1..16: note = synthetic [barcode part1]
  source 1..16: mol_type = other DNA
atccaactggttcgag

SEQ ID NO: 42531 - DNA, 16 bp, synthetic construct
  misc_feature 1..16: note = synthetic [barcode part1]
  source 1..16: mol_type = other DNA
aacgaaggccacttct

SEQ ID NO: 42532 - DNA, 16 bp, synthetic construct
  misc_feature 1..16: note = synthetic [barcode part1]
  source 1..16: mol_type = other DNA
gtctaggattctgtct

SEQ ID NO: 42533 - DNA, 16 bp, synthetic construct
  misc_feature 1..16: note = synthetic [barcode part1]
  source 1..16: mol_type = other DNA
tggccaatcagtcagt

SEQ ID NO: 42534 - DNA, 16 bp, synthetic construct
  misc_feature 1..16: note = synthetic [barcode part1]
  source 1..16: mol_type = other DNA
gactgtggtaccaact

SEQ ID NO: 42535 - DNA, 16 bp, synthetic construct
  misc_feature 1..16: note = synthetic [barcode part1]
  source 1..16: mol_type = other DNA
cacggatcctgttatt

SEQ ID NO: 42536 - DNA, 16 bp, synthetic construct
  misc_feature 1..16: note = synthetic [barcode part1]
  source 1..16: mol_type = other DNA
cgacttcagagaactc

SEQ ID NO: 42537 - DNA, 16 bp, synthetic construct
  misc_feature 1..16: note = synthetic [barcode part1]
  source 1..16: mol_type = other DNA
tctgcgccaacagtct

SEQ ID NO: 42538 - DNA, 16 bp, synthetic construct
  misc_feature 1..16: note = synthetic [barcode part1]
  source 1..16: mol_type = other DNA
agaatcacgcaggtcg

SEQ ID NO: 42539 - DNA, 16 bp, synthetic construct
  misc_feature 1..16: note = synthetic [barcode part1]
  source 1..16: mol_type = other DNA
tgtgttgacacgtcag

SEQ ID NO: 42540 - DNA, 16 bp, synthetic construct
  misc_feature 1..16: note = synthetic [barcode part1]
  source 1..16: mol_type = other DNA
aggtcttggttgatcg

SEQ ID NO: 42541 - DNA, 16 bp, synthetic construct
  misc_feature 1..16: note = synthetic [barcode part1]
  source 1..16: mol_type = other DNA
gaatcgtatagaggtc

SEQ ID NO: 42542 - DNA, 16 bp, synthetic construct
  misc_feature 1..16: note = synthetic [barcode part1]
  source 1..16: mol_type = other DNA
gtggaagactaagttc

SEQ ID NO: 42543 - DNA, 16 bp, synthetic construct
  misc_feature 1..16: note = synthetic [barcode part1]
  source 1..16: mol_type = other DNA
ccaattggattggtcg

SEQ ID NO: 42544 - DNA, 16 bp, synthetic construct
  misc_feature 1..16: note = synthetic [barcode part1]
  source 1..16: mol_type = other DNA
tattcggcacgagttg

SEQ ID NO: 42545 - DNA, 16 bp, synthetic construct
  misc_feature 1..16: note = synthetic [barcode part1]
  source 1..16: mol_type = other DNA
cacaataccgtgacgt

SEQ ID NO: 42546 - DNA, 16 bp, synthetic construct
  misc_feature 1..16: note = synthetic [barcode part1]
  source 1..16: mol_type = other DNA
ttacgccgtctaatac

SEQ ID NO: 42547 - DNA, 16 bp, synthetic construct
  misc_feature 1..16: note = synthetic [barcode part1]
  source 1..16: mol_type = other DNA
cagatcagaccactac

SEQ ID NO: 42548 - DNA, 16 bp, synthetic construct
  misc_feature 1..16: note = synthetic [barcode part1]
  source 1..16: mol_type = other DNA
tggacgtaagaactgt

SEQ ID NO: 42549 - DNA, 16 bp, synthetic construct
  misc_feature 1..16: note = synthetic [barcode part1]
  source 1..16: mol_type = other DNA
actacttgagtggcac

SEQ ID NO: 42550 - DNA, 16 bp, synthetic construct
  misc_feature 1..16: note = synthetic [barcode part1]
  source 1..16: mol_type = other DNA
gacactgtgtgacact

SEQ ID NO: 42551 - DNA, 16 bp, synthetic construct
  misc_feature 1..16: note = synthetic [barcode part1]
  source 1..16: mol_type = other DNA
aactacgatcggtacc

SEQ ID NO: 42552 - DNA, 16 bp, synthetic construct
  misc_feature 1..16: note = synthetic [barcode part1]
  source 1..16: mol_type = other DNA
gattgtggaggccaac

SEQ ID NO: 42553 - DNA, 16 bp, synthetic construct
  misc_feature 1..16: note = synthetic [barcode part1]
  source 1..16: mol_type = other DNA
gtgtcagaagacgatt

SEQ ID NO: 42554 - DNA, 16 bp, synthetic construct
  misc_feature 1..16: note = synthetic [barcode part1]
  source 1..16: mol_type = other DNA
ccggcgataagttgtt

SEQ ID NO: 42555 - DNA, 16 bp, synthetic construct
  misc_feature 1..16: note = synthetic [barcode part1]
  source 1..16: mol_type = other DNA
gtaaggcctacgagtg

SEQ ID NO: 42556 - DNA, 16 bp, synthetic construct
  misc_feature 1..16: note = synthetic [barcode part1]
  source 1..16: mol_type = other DNA
agtctcactcagagtg

SEQ ID NO: 42557 - DNA, 16 bp, synthetic construct
  misc_feature 1..16: note = synthetic [barcode part1]
  source 1..16: mol_type = other DNA
cgttactgtgatcact

SEQ ID NO: 42558 - DNA, 16 bp, synthetic construct
  misc_feature 1..16: note = synthetic [barcode part1]
  source 1..16: mol_type = other DNA
aggcactcttgaacgt

SEQ ID NO: 42559 - DNA, 16 bp, synthetic construct
  misc_feature 1..16: note = synthetic [barcode part1]
  source 1..16: mol_type = other DNA
actcaactacgcctcg

SEQ ID NO: 42560 - DNA, 16 bp, synthetic construct
  misc_feature 1..16: note = synthetic [barcode part1]
  source 1..16: mol_type = other DNA
taacggttctctgtac

SEQ ID NO: 42561 - DNA, 16 bp, synthetic construct
  misc_feature 1..16: note = synthetic [barcode part1]
  source 1..16: mol_type = other DNA
cacttcctgtaccttg

SEQ ID NO: 42562 - DNA, 16 bp, synthetic construct
  misc_feature 1..16: note = synthetic [barcode part1]
  source 1..16: mol_type = other DNA
tcagtccttgtgtaac

SEQ ID NO: 42563 - DNA, 16 bp, synthetic construct
  misc_feature 1..16: note = synthetic [barcode part1]
  source 1..16: mol_type = other DNA
gttgttgtggtccaag

SEQ ID NO: 42564 - DNA, 16 bp, synthetic construct
  misc_feature 1..16: note = synthetic [barcode part1]
  source 1..16: mol_type = other DNA
agaagacgacagtggt

SEQ ID NO: 42565 - DNA, 16 bp, synthetic construct
  misc_feature 1..16: note = synthetic [barcode part1]
  source 1..16: mol_type = other DNA
gcagtgtcagtcaact

SEQ ID NO: 42566 - DNA, 16 bp, synthetic construct
  misc_feature 1..16: note = synthetic [barcode part1]
  source 1..16: mol_type = other DNA
gccgtccttacagatc

SEQ ID NO: 42567 - DNA, 16 bp, synthetic construct
  misc_feature 1..16: note = synthetic [barcode part1]
  source 1..16: mol_type = other DNA
gtacgatacgtgttgc

SEQ ID NO: 42568 - DNA, 16 bp, synthetic construct
  misc_feature 1..16: note = synthetic [barcode part1]
  source 1..16: mol_type = other DNA
tatcacgtgattggcg

SEQ ID NO: 42569 - DNA, 16 bp, synthetic construct
  misc_feature 1..16: note = synthetic [barcode part1]
  source 1..16: mol_type = other DNA
ccgtcttgtacaaccg

SEQ ID NO: 42570 - DNA, 16 bp, synthetic construct
  misc_feature 1..16: note = synthetic [barcode part1]
  source 1..16: mol_type = other DNA
ccgagattcgtccgtt

SEQ ID NO: 42571 - DNA, 16 bp, synthetic construct
  misc_feature 1..16: note = synthetic [barcode part1]
  source 1..16: mol_type = other DNA
agtggagaagaatcgc

SEQ ID NO: 42572 - DNA, 16 bp, synthetic construct
  misc_feature 1..16: note = synthetic [barcode part1]
  source 1..16: mol_type = other DNA
atctgacgtacaagag

SEQ ID NO: 42573 - DNA, 16 bp, synthetic construct
  misc_feature 1..16: note = synthetic [barcode part1]
  source 1..16: mol_type = other DNA
gtcagatcgcctctac

SEQ ID NO: 42574 - DNA, 16 bp, synthetic construct
  misc_feature 1..16: note = synthetic [barcode part1]
  source 1..16: mol_type = other DNA
gactgatactacgacc

SEQ ID NO: 42575 - DNA, 16 bp, synthetic construct
  misc_feature 1..16: note = synthetic [barcode part1]
  source 1..16: mol_type = other DNA
gtcaactccagttgag

SEQ ID NO: 42576 - DNA, 16 bp, synthetic construct
  misc_feature 1..16: note = synthetic [barcode part1]
  source 1..16: mol_type = other DNA
cgtgaacacaggttct

SEQ ID NO: 42577 - DNA, 16 bp, synthetic construct
  misc_feature 1..16: note = synthetic [barcode part1]
  source 1..16: mol_type = other DNA
gatcactgtggagacg

SEQ ID NO: 42578 - DNA, 16 bp, synthetic construct
  misc_feature 1..16: note = synthetic [barcode part1]
  source 1..16: mol_type = other DNA
cacttcaagtgtctgt

SEQ ID NO: 42579 - DNA, 16 bp, synthetic construct
  misc_feature 1..16: note = synthetic [barcode part1]
  source 1..16: mol_type = other DNA
ataaccgaaggttgac

SEQ ID NO: 42580 - DNA, 16 bp, synthetic construct
  misc_feature 1..16: note = synthetic [barcode part1]
  source 1..16: mol_type = other DNA
cggatattcgatacgc

SEQ ID NO: 42581 - DNA, 16 bp, synthetic construct
  misc_feature 1..16: note = synthetic [barcode part1]
  source 1..16: mol_type = other DNA
tgaactacgtgttcct

SEQ ID NO: 42582 - DNA, 16 bp, synthetic construct
  misc_feature 1..16: note = synthetic [barcode part1]
  source 1..16: mol_type = other DNA
gtatcactagacagag

SEQ ID NO: 42583 - DNA, 16 bp, synthetic construct
  misc_feature 1..16: note = synthetic [barcode part1]
  source 1..16: mol_type = other DNA
tgaccgcgataataag

SEQ ID NO: 42584 - DNA, 16 bp, synthetic construct
  misc_feature 1..16: note = synthetic [barcode part1]
  source 1..16: mol_type = other DNA
gcggcgagaatattcg

SEQ ID NO: 42585 - DNA, 16 bp, synthetic construct
  misc_feature 1..16: note = synthetic [barcode part1]
  source 1..16: mol_type = other DNA
gtctgatctctcgcag

SEQ ID NO: 42586 - DNA, 16 bp, synthetic construct
  misc_feature 1..16: note = synthetic [barcode part1]
  source 1..16: mol_type = other DNA
agtggacgatatcgcg

SEQ ID NO: 42587 - DNA, 16 bp, synthetic construct
  misc_feature 1..16: note = synthetic [barcode part1]
  source 1..16: mol_type = other DNA
atcgtcttcgtctcgt

SEQ ID NO: 42588 - DNA, 16 bp, synthetic construct
  misc_feature 1..16: note = synthetic [barcode part1]
  source 1..16: mol_type = other DNA
gaccgtccgaagatag

SEQ ID NO: 42589 - DNA, 16 bp, synthetic construct
  misc_feature 1..16: note = synthetic [barcode part1]
  source 1..16: mol_type = other DNA
aggattccgtccactc

SEQ ID NO: 42590 - DNA, 16 bp, synthetic construct
  misc_feature 1..16: note = synthetic [barcode part1]
  source 1..16: mol_type = other DNA
gttatctgagttcacc

SEQ ID NO: 42591 - DNA, 16 bp, synthetic construct
  misc_feature 1..16: note = synthetic [barcode part1]
  source 1..16: mol_type = other DNA
agtggttgactgttgc

SEQ ID NO: 42592 - DNA, 16 bp, synthetic construct
  misc_feature 1..16: note = synthetic [barcode part1]
  source 1..16: mol_type = other DNA
gtcaataccactgtct

SEQ ID NO: 42593 - DNA, 16 bp, synthetic construct
  misc_feature 1..16: note = synthetic [barcode part1]
  source 1..16: mol_type = other DNA
aggtggtaaccacgtg

SEQ ID NO: 42594 - DNA, 16 bp, synthetic construct
  misc_feature 1..16: note = synthetic [barcode part1]
  source 1..16: mol_type = other DNA
aagtaccggcacttac

SEQ ID NO: 42595 - DNA, 16 bp, synthetic construct
  misc_feature 1..16: note = synthetic [barcode part1]
  source 1..16: mol_type = other DNA
gttcaacgttggatcg

SEQ ID NO: 42596 - DNA, 16 bp, synthetic construct
  misc_feature 1..16: note = synthetic [barcode part1]
  source 1..16: mol_type = other DNA
ttccaagtatcgcgag

SEQ ID NO: 42597 - DNA, 16 bp, synthetic construct
  misc_feature 1..16: note = synthetic [barcode part1]
  source 1..16: mol_type = other DNA
tgtccaccagagttcc

SEQ ID NO: 42598 - DNA, 16 bp, synthetic construct
  misc_feature 1..16: note = synthetic [barcode part1]
  source 1..16: mol_type = other DNA
cgtcgttcactagtgc

SEQ ID NO: 42599 - DNA, 16 bp, synthetic construct
  misc_feature 1..16: note = synthetic [barcode part1]
  source 1..16: mol_type = other DNA
ataggcctcgagtact

SEQ ID NO: 42600 - DNA, 16 bp, synthetic construct
  misc_feature 1..16: note = synthetic [barcode part1]
  source 1..16: mol_type = other DNA
ccgaatattgtggacc

SEQ ID NO: 42601 - DNA, 16 bp, synthetic construct
  misc_feature 1..16: note = synthetic [barcode part1]
  source 1..16: mol_type = other DNA
cagaggttatcctcag

SEQ ID NO: 42602 - DNA, 16 bp, synthetic construct
  misc_feature 1..16: note = synthetic [barcode part1]
  source 1..16: mol_type = other DNA
ttatcgcgcctgcagt

SEQ ID NO: 42603 - DNA, 16 bp, synthetic construct
  misc_feature 1..16: note = synthetic [barcode part1]
  source 1..16: mol_type = other DNA
gattggcaactgacct

SEQ ID NO: 42604 - DNA, 16 bp, synthetic construct
  misc_feature 1..16: note = synthetic [barcode part1]
  source 1..16: mol_type = other DNA
tgcgtgactcggttct

SEQ ID NO: 42605 - DNA, 16 bp, synthetic construct
  misc_feature 1..16: note = synthetic [barcode part1]
  source 1..16: mol_type = other DNA
cagactagagatacac

SEQ ID NO: 42606 - DNA, 16 bp, synthetic construct
  misc_feature 1..16: note = synthetic [barcode part1]
  source 1..16: mol_type = other DNA
tctagagtgtagtgcc

SEQ ID NO: 42607 - DNA, 16 bp, synthetic construct
  misc_feature 1..16: note = synthetic [barcode part1]
  source 1..16: mol_type = other DNA
ccggatcggagtatag

SEQ ID NO: 42608 - DNA, 16 bp, synthetic construct
  misc_feature 1..16: note = synthetic [barcode part1]
  source 1..16: mol_type = other DNA
acaacggtccacagag

SEQ ID NO: 42609 - DNA, 16 bp, synthetic construct
  misc_feature 1..16: note = synthetic [barcode part1]
  source 1..16: mol_type = other DNA
agtatactggccacgt

SEQ ID NO: 42610 - DNA, 16 bp, synthetic construct
  misc_feature 1..16: note = synthetic [barcode part1]
  source 1..16: mol_type = other DNA
aggtcgattctctgag

SEQ ID NO: 42611 - DNA, 16 bp, synthetic construct
  misc_feature 1..16: note = synthetic [barcode part1]
  source 1..16: mol_type = other DNA
cacgttcacctaacgc

SEQ ID NO: 42612 - DNA, 16 bp, synthetic construct
  misc_feature 1..16: note = synthetic [barcode part1]
  source 1..16: mol_type = other DNA
cgtcgaagtgaggact

SEQ ID NO: 42613 - DNA, 16 bp, synthetic construct
  misc_feature 1..16: note = synthetic [barcode part1]
  source 1..16: mol_type = other DNA
ttctagtaaggaccgc

SEQ ID NO: 42614 - DNA, 16 bp, synthetic construct
  misc_feature 1..16: note = synthetic [barcode part1]
  source 1..16: mol_type = other DNA
gagattccagagttcc

SEQ ID NO: 42615 - DNA, 16 bp, synthetic construct
  misc_feature 1..16: note = synthetic [barcode part1]
  source 1..16: mol_type = other DNA
aacagtacggagtgag

SEQ ID NO: 42616 - DNA, 16 bp, synthetic construct
  misc_feature 1..16: note = synthetic [barcode part1]
  source 1..16: mol_type = other DNA
gtactaggccgagaac

SEQ ID NO: 42617 - DNA, 16 bp, synthetic construct
  misc_feature 1..16: note = synthetic [barcode part1]
  source 1..16: mol_type = other DNA
ccgactcgttcagact

SEQ ID NO: 42618 - DNA, 16 bp, synthetic construct
  misc_feature 1..16: note = synthetic [barcode part1]
  source 1..16: mol_type = other DNA
ccaacagaggtcactt

SEQ ID NO: 42619 - DNA, 16 bp, synthetic construct
  misc_feature 1..16: note = synthetic [barcode part1]
  source 1..16: mol_type = other DNA
aatcttagtccgtctg

SEQ ID NO: 42620 - DNA, 16 bp, synthetic construct
  misc_feature 1..16: note = synthetic [barcode part1]
  source 1..16: mol_type = other DNA
cgcaattctgagtacg

SEQ ID NO: 42621 - DNA, 16 bp, synthetic construct
  misc_feature 1..16: note = synthetic [barcode part1]
  source 1..16: mol_type = other DNA
tattgatccgatcctg

SEQ ID NO: 42622 - DNA, 16 bp, synthetic construct
  misc_feature 1..16: note = synthetic [barcode part1]
  source 1..16: mol_type = other DNA
actcacttccactcgt

SEQ ID NO: 42623 - DNA, 16 bp, synthetic construct
  misc_feature 1..16: note = synthetic [barcode part1]
  source 1..16: mol_type = other DNA
agaggcaacggttcac

SEQ ID NO: 42624 - DNA, 16 bp, synthetic construct
  misc_feature 1..16: note = synthetic [barcode part1]
  source 1..16: mol_type = other DNA
accttgagtcgatcag

SEQ ID NO: 42625 - DNA, 16 bp, synthetic construct
  misc_feature 1..16: note = synthetic [barcode part1]
  source 1..16: mol_type = other DNA
tgatattgcgacaccg

SEQ ID NO: 42626 - DNA, 16 bp, synthetic construct
  misc_feature 1..16: note = synthetic [barcode part1]
  source 1..16: mol_type = other DNA
aactcttcctcaccac

SEQ ID NO: 42627 - DNA, 16 bp, synthetic construct
  misc_feature 1..16: note = synthetic [barcode part1]
  source 1..16: mol_type = other DNA
cacaggactggtagtg

SEQ ID NO: 42628 - DNA, 16 bp, synthetic construct
  misc_feature 1..16: note = synthetic [barcode part1]
  source 1..16: mol_type = other DNA
acactaggttggaggc

SEQ ID NO: 42629 - DNA, 16 bp, synthetic construct
  misc_feature 1..16: note = synthetic [barcode part1]
  source 1..16: mol_type = other DNA
attctcttctcgaccg

SEQ ID NO: 42630 - DNA, 16 bp, synthetic construct
  misc_feature 1..16: note = synthetic [barcode part1]
  source 1..16: mol_type = other DNA
caacgacgacctagtt

SEQ ID NO: 42631 - DNA, 16 bp, synthetic construct
  misc_feature 1..16: note = synthetic [barcode part1]
  source 1..16: mol_type = other DNA
tctagttgtgcactac

SEQ ID NO: 42632 - DNA, 16 bp, synthetic construct
  misc_feature 1..16: note = synthetic [barcode part1]
  source 1..16: mol_type = other DNA
gcctcaccactagtgt

SEQ ID NO: 42633 - DNA, 16 bp, synthetic construct
  misc_feature 1..16: note = synthetic [barcode part1]
  source 1..16: mol_type = other DNA
tgccaccttcaatcct

SEQ ID NO: 42634 - DNA, 16 bp, synthetic construct
  misc_feature 1..16: note = synthetic [barcode part1]
  source 1..16: mol_type = other DNA
aactggtacacacgtc

SEQ ID NO: 42635 - DNA, 16 bp, synthetic construct
  misc_feature 1..16: note = synthetic [barcode part1]
  source 1..16: mol_type = other DNA
gactctccacgaatcc

SEQ ID NO: 42636 - DNA, 16 bp, synthetic construct
  misc_feature 1..16: note = synthetic [barcode part1]
  source 1..16: mol_type = other DNA
tataatctgcgccgag

SEQ ID NO: 42637 - DNA, 16 bp, synthetic construct
  misc_feature 1..16: note = synthetic [barcode part1]
  source 1..16: mol_type = other DNA
attgttcaggcctatc

SEQ ID NO: 42638 - DNA, 16 bp, synthetic construct
  misc_feature 1..16: note = synthetic [barcode part1]
  source 1..16: mol_type = other DNA
tcctcctgttagtcgt

SEQ ID NO: 42639 - DNA, 16 bp, synthetic construct
  misc_feature 1..16: note = synthetic [barcode part1]
  source 1..16: mol_type = other DNA
tgaatccaagtggtag

SEQ ID NO: 42640 - DNA, 16 bp, synthetic construct
  misc_feature 1..16: note = synthetic [barcode part1]
  source 1..16: mol_type = other DNA
cacgcgttagtatcag

SEQ ID NO: 42641 - DNA, 16 bp, synthetic construct
  misc_feature 1..16: note = synthetic [barcode part1]
  source 1..16: mol_type = other DNA
agtcagttggtaccac

SEQ ID NO: 42642 - DNA, 16 bp, synthetic construct
  misc_feature 1..16: note = synthetic [barcode part1]
  source 1..16: mol_type = other DNA
tccaccaaccaagaac

SEQ ID NO: 42643 - DNA, 16 bp, synthetic construct
  misc_feature 1..16: note = synthetic [barcode part1]
  source 1..16: mol_type = other DNA
tagtcgaggccaattc

SEQ ID NO: 42644 - DNA, 16 bp, synthetic construct
  misc_feature 1..16: note = synthetic [barcode part1]
  source 1..16: mol_type = other DNA
accgagagattgagag

SEQ ID NO: 42645 - DNA, 16 bp, synthetic construct
  misc_feature 1..16: note = synthetic [barcode part1]
  source 1..16: mol_type = other DNA
gccgtacacacttaag

SEQ ID NO: 42646 - DNA, 16 bp, synthetic construct
  misc_feature 1..16: note = synthetic [barcode part1]
  source 1..16: mol_type = other DNA
cactaggtggactgtt

SEQ ID NO: 42647 - DNA, 16 bp, synthetic construct
  misc_feature 1..16: note = synthetic [barcode part1]
  source 1..16: mol_type = other DNA
aggaataggatcgttc

SEQ ID NO: 42648 - DNA, 16 bp, synthetic construct
  misc_feature 1..16: note = synthetic [barcode part1]
  source 1..16: mol_type = other DNA
tgtagtcctaggtgtg

SEQ ID NO: 42649 - DNA, 16 bp, synthetic construct
  misc_feature 1..16: note = synthetic [barcode part1]
  source 1..16: mol_type = other DNA
gtggacttaatcctct

SEQ ID NO: 42650 - DNA, 16 bp, synthetic construct
  misc_feature 1..16: note = synthetic [barcode part1]
  source 1..16: mol_type = other DNA
cggttgcaagtcgaag

SEQ ID NO: 42651 - DNA, 16 bp, synthetic construct
  misc_feature 1..16: note = synthetic [barcode part1]
  source 1..16: mol_type = other DNA
gtgtcttccggcaact

SEQ ID NO: 42652 - DNA, 16 bp, synthetic construct
  misc_feature 1..16: note = synthetic [barcode part1]
  source 1..16: mol_type = other DNA
ccacgttctactaggc

SEQ ID NO: 42653 - DNA, 16 bp, synthetic construct
  misc_feature 1..16: note = synthetic [barcode part1]
  source 1..16: mol_type = other DNA
tgattggtgtgcacac

SEQ ID NO: 42654 - DNA, 16 bp, synthetic construct
  misc_feature 1..16: note = synthetic [barcode part1]
  source 1..16: mol_type = other DNA
attctcggcggttcgt

SEQ ID NO: 42655 - DNA, 16 bp, synthetic construct
  misc_feature 1..16: note = synthetic [barcode part1]
  source 1..16: mol_type = other DNA
gtccttgactcaacgc

SEQ ID NO: 42656 - DNA, 16 bp, synthetic construct
  misc_feature 1..16: note = synthetic [barcode part1]
  source 1..16: mol_type = other DNA
ttggacgcacttaggt

SEQ ID NO: 42657 - DNA, 16 bp, synthetic construct
  misc_feature 1..16: note = synthetic [barcode part1]
  source 1..16: mol_type = other DNA
gttatccacctgcggt

SEQ ID NO: 42658 - DNA, 16 bp, synthetic construct
  misc_feature 1..16: note = synthetic [barcode part1]
  source 1..16: mol_type = other DNA
tcaagacaacgttgcc

SEQ ID NO: 42659 - DNA, 16 bp, synthetic construct
  misc_feature 1..16: note = synthetic [barcode part1]
  source 1..16: mol_type = other DNA
accggaagtgcactag

SEQ ID NO: 42660 - DNA, 16 bp, synthetic construct
  misc_feature 1..16: note = synthetic [barcode part1]
  source 1..16: mol_type = other DNA
acaactcgttctcgcg

SEQ ID NO: 42661 - DNA, 16 bp, synthetic construct
  misc_feature 1..16: note = synthetic [barcode part1]
  source 1..16: mol_type = other DNA
acgcgataccagtact

SEQ ID NO: 42662 - DNA, 16 bp, synthetic construct
  misc_feature 1..16: note = synthetic [barcode part1]
  source 1..16: mol_type = other DNA
cgccgaattacacctc

SEQ ID NO: 42663 - DNA, 16 bp, synthetic construct
  misc_feature 1..16: note = synthetic [barcode part1]
  source 1..16: mol_type = other DNA
tactcaccgagtaggt

SEQ ID NO: 42664 - DNA, 16 bp, synthetic construct
  misc_feature 1..16: note = synthetic [barcode part1]
  source 1..16: mol_type = other DNA
cgacgtaacgtctagt

SEQ ID NO: 42665 - DNA, 16 bp, synthetic construct
  misc_feature 1..16: note = synthetic [barcode part1]
  source 1..16: mol_type = other DNA
gtcgccaatcaagttg

SEQ ID NO: 42666 - DNA, 16 bp, synthetic construct
  misc_feature 1..16: note = synthetic [barcode part1]
  source 1..16: mol_type = other DNA
gttggcactgtcgtct

SEQ ID NO: 42667 - DNA, 16 bp, synthetic construct
  misc_feature 1..16: note = synthetic [barcode part1]
  source 1..16: mol_type = other DNA
ccgcgaattgtacaac

SEQ ID NO: 42668 - DNA, 16 bp, synthetic construct
  misc_feature 1..16: note = synthetic [barcode part1]
  source 1..16: mol_type = other DNA
gccacaagacgaacgt

SEQ ID NO: 42669 - DNA, 16 bp, synthetic construct
  misc_feature 1..16: note = synthetic [barcode part1]
  source 1..16: mol_type = other DNA
gttgagtggtacggac

SEQ ID NO: 42670 - DNA, 16 bp, synthetic construct
  misc_feature 1..16: note = synthetic [barcode part1]
  source 1..16: mol_type = other DNA
cacggtgtagataggc

SEQ ID NO: 42671 - DNA, 16 bp, synthetic construct
  misc_feature 1..16: note = synthetic [barcode part1]
  source 1..16: mol_type = other DNA
ttacctaggacaggtc

SEQ ID NO: 42672 - DNA, 16 bp, synthetic construct
  misc_feature 1..16: note = synthetic [barcode part1]
  source 1..16: mol_type = other DNA
tggttccgtgccaatc

SEQ ID NO: 42673 - DNA, 16 bp, synthetic construct
  misc_feature 1..16: note = synthetic [barcode part1]
  source 1..16: mol_type = other DNA
gaagacggatacagac

SEQ ID NO: 42674 - DNA, 16 bp, synthetic construct
  misc_feature 1..16: note = synthetic [barcode part1]
  source 1..16: mol_type = other DNA
tggcggtatcagattc

SEQ ID NO: 42675 - DNA, 16 bp, synthetic construct
  misc_feature 1..16: note = synthetic [barcode part1]
  source 1..16: mol_type = other DNA
ttagacgagataacgc

SEQ ID NO: 42676 - DNA, 16 bp, synthetic construct
  misc_feature 1..16: note = synthetic [barcode part1]
  source 1..16: mol_type = other DNA
accacgagagtgaatt

SEQ ID NO: 42677 - DNA, 16 bp, synthetic construct
  misc_feature 1..16: note = synthetic [barcode part1]
  source 1..16: mol_type = other DNA
attgaatcgccgagtc

SEQ ID NO: 42678 - DNA, 16 bp, synthetic construct
  misc_feature 1..16: note = synthetic [barcode part1]
  source 1..16: mol_type = other DNA
taacgacaggacgtgc

SEQ ID NO: 42679 - DNA, 16 bp, synthetic construct
  misc_feature 1..16: note = synthetic [barcode part1]
  source 1..16: mol_type = other DNA
ttacggtaatcggtcg

SEQ ID NO: 42680 - DNA, 16 bp, synthetic construct
  misc_feature 1..16: note = synthetic [barcode part1]
  source 1..16: mol_type = other DNA
ttcacgtcctctacgt

SEQ ID NO: 42681 - DNA, 16 bp, synthetic construct
  misc_feature 1..16: note = synthetic [barcode part1]
  source 1..16: mol_type = other DNA
attgcggtaggcgagt

SEQ ID NO: 42682 - DNA, 16 bp, synthetic construct
  misc_feature 1..16: note = synthetic [barcode part1]
  source 1..16: mol_type = other DNA
gacagacttactcacg

SEQ ID NO: 42683 - DNA, 16 bp, synthetic construct
  misc_feature 1..16: note = synthetic [barcode part1]
  source 1..16: mol_type = other DNA
tagactgagaagtgtc

SEQ ID NO: 42684 - DNA, 16 bp, synthetic construct
  misc_feature 1..16: note = synthetic [barcode part1]
  source 1..16: mol_type = other DNA
cagtgatccgatagtc

SEQ ID NO: 42685 - DNA, 16 bp, synthetic construct
  misc_feature 1..16: note = synthetic [barcode part1]
  source 1..16: mol_type = other DNA
agtatagttgccagag

SEQ ID NO: 42686 - DNA, 16 bp, synthetic construct
  misc_feature 1..16: note = synthetic [barcode part1]
  source 1..16: mol_type = other DNA
tgactggccagaatct

SEQ ID NO: 42687 - DNA, 16 bp, synthetic construct
  misc_feature 1..16: note = synthetic [barcode part1]
  source 1..16: mol_type = other DNA
gtatcgttcacctgcg

SEQ ID NO: 42688 - DNA, 16 bp, synthetic construct
  misc_feature 1..16: note = synthetic [barcode part1]
  source 1..16: mol_type = other DNA
atccgtaatcgtcttg

SEQ ID NO: 42689 - DNA, 16 bp, synthetic construct
  misc_feature 1..16: note = synthetic [barcode part1]
  source 1..16: mol_type = other DNA
acggaaggattattgc

SEQ ID NO: 42690 - DNA, 16 bp, synthetic construct
  misc_feature 1..16: note = synthetic [barcode part1]
  source 1..16: mol_type = other DNA
ttgaacaaggcggcgt

SEQ ID NO: 42691 - DNA, 16 bp, synthetic construct
  misc_feature 1..16: note = synthetic [barcode part1]
  source 1..16: mol_type = other DNA
accgattagaggagag

SEQ ID NO: 42692 - DNA, 16 bp, synthetic construct
  misc_feature 1..16: note = synthetic [barcode part1]
  source 1..16: mol_type = other DNA
caggtcactagatcgt

SEQ ID NO: 42693 - DNA, 16 bp, synthetic construct
  misc_feature 1..16: note = synthetic [barcode part1]
  source 1..16: mol_type = other DNA
tagtagaatcctgccg

SEQ ID NO: 42694 - DNA, 16 bp, synthetic construct
  misc_feature 1..16: note = synthetic [barcode part1]
  source 1..16: mol_type = other DNA
tgtgcgcgttgattag

SEQ ID NO: 42695 - DNA, 16 bp, synthetic construct
  misc_feature 1..16: note = synthetic [barcode part1]
  source 1..16: mol_type = other DNA
gcaggaatcaagttac

SEQ ID NO: 42696 - DNA, 16 bp, synthetic construct
  misc_feature 1..16: note = synthetic [barcode part1]
  source 1..16: mol_type = other DNA
agacactctcaccacc

SEQ ID NO: 42697 - DNA, 16 bp, synthetic construct
  misc_feature 1..16: note = synthetic [barcode part1]
  source 1..16: mol_type = other DNA
tgcagtgcctgttcgt

SEQ ID NO: 42698 - DNA, 16 bp, synthetic construct
  misc_feature 1..16: note = synthetic [barcode part1]
  source 1..16: mol_type = other DNA
cctaattcagtgtgtc

SEQ ID NO: 42699 - DNA, 16 bp, synthetic construct
  misc_feature 1..16: note = synthetic [barcode part1]
  source 1..16: mol_type = other DNA
ttgtggagtccttcgc

SEQ ID NO: 42700 - DNA, 16 bp, synthetic construct
  misc_feature 1..16: note = synthetic [barcode part1]
  source 1..16: mol_type = other DNA
gtgcaaccacacagtt

SEQ ID NO: 42701 - DNA, 16 bp, synthetic construct
  misc_feature 1..16: note = synthetic [barcode part1]
  source 1..16: mol_type = other DNA
ttctactcctgagtag

SEQ ID NO: 42702 - DNA, 16 bp, synthetic construct
  misc_feature 1..16: note = synthetic [barcode part1]
  source 1..16: mol_type = other DNA
actctccagaactgag

SEQ ID NO: 42703 - DNA, 16 bp, synthetic construct
  misc_feature 1..16: note = synthetic [barcode part1]
  source 1..16: mol_type = other DNA
cacgcgtatcaatcag

SEQ ID NO: 42704 - DNA, 16 bp, synthetic construct
  misc_feature 1..16: note = synthetic [barcode part1]
  source 1..16: mol_type = other DNA
atctgccttcacttgc

SEQ ID NO: 42705 - DNA, 16 bp, synthetic construct
  misc_feature 1..16: note = synthetic [barcode part1]
  source 1..16: mol_type = other DNA
ccttcgataatcgcgc

SEQ ID NO: 42706 - DNA, 16 bp, synthetic construct
  misc_feature 1..16: note = synthetic [barcode part1]
  source 1..16: mol_type = other DNA
ccaaggtcaagacctt

SEQ ID NO: 42707 - DNA, 16 bp, synthetic construct
  misc_feature 1..16: note = synthetic [barcode part1]
  source 1..16: mol_type = other DNA
acgactacggttacac

SEQ ID NO: 42708 - DNA, 16 bp, synthetic construct
  misc_feature 1..16: note = synthetic [barcode part1]
  source 1..16: mol_type = other DNA
acacgtacaaccgatc

SEQ ID NO: 42709 - DNA, 16 bp, synthetic construct
  misc_feature 1..16: note = synthetic [barcode part1]
  source 1..16: mol_type = other DNA
tcggcctcgaacttgt

SEQ ID NO: 42710 - DNA, 16 bp, synthetic construct
  misc_feature 1..16: note = synthetic [barcode part1]
  source 1..16: mol_type = other DNA
ccactactagatactc

SEQ ID NO: 42711 - DNA, 16 bp, synthetic construct
  misc_feature 1..16: note = synthetic [barcode part1]
  source 1..16: mol_type = other DNA
gtaagtagatactgcg

SEQ ID NO: 42712 - DNA, 16 bp, synthetic construct
  misc_feature 1..16: note = synthetic [barcode part1]
  source 1..16: mol_type = other DNA
ccttctggtggaatag

SEQ ID NO: 42713 - DNA, 16 bp, synthetic construct
  misc_feature 1..16: note = synthetic [barcode part1]
  source 1..16: mol_type = other DNA
tctaggaccgactaac

SEQ ID NO: 42714 - DNA, 16 bp, synthetic construct
  misc_feature 1..16: note = synthetic [barcode part1]
  source 1..16: mol_type = other DNA
gattgtcgtctccacg

SEQ ID NO: 42715 - DNA, 16 bp, synthetic construct
  misc_feature 1..16: note = synthetic [barcode part1]
  source 1..16: mol_type = other DNA
tcctgacgatcgtacc

SEQ ID NO: 42716 - DNA, 16 bp, synthetic construct
  misc_feature 1..16: note = synthetic [barcode part1]
  source 1..16: mol_type = other DNA
aattcggtagtggtcc

SEQ ID NO: 42717 - DNA, 16 bp, synthetic construct
  misc_feature 1..16: note = synthetic [barcode part1]
  source 1..16: mol_type = other DNA
acagtacctagagtcc

SEQ ID NO: 42718 - DNA, 16 bp, synthetic construct
  misc_feature 1..16: note = synthetic [barcode part1]
  source 1..16: mol_type = other DNA
gtacaactgaccgtac

SEQ ID NO: 42719 - DNA, 16 bp, synthetic construct
  misc_feature 1..16: note = synthetic [barcode part1]
  source 1..16: mol_type = other DNA
tggaaggaggattgac

SEQ ID NO: 42720 - DNA, 16 bp, synthetic construct
  misc_feature 1..16: note = synthetic [barcode part1]
  source 1..16: mol_type = other DNA
cgaaggttctataccg

SEQ ID NO: 42721 - DNA, 16 bp, synthetic construct
  misc_feature 1..16: note = synthetic [barcode part1]
  source 1..16: mol_type = other DNA
ccaaccttcgtgtgac

SEQ ID NO: 42722 - DNA, 16 bp, synthetic construct
  misc_feature 1..16: note = synthetic [barcode part1]
  source 1..16: mol_type = other DNA
gcgacctcgttcttag

SEQ ID NO: 42723 - DNA, 16 bp, synthetic construct
  misc_feature 1..16: note = synthetic [barcode part1]
  source 1..16: mol_type = other DNA
ccgtccaacggtatct

SEQ ID NO: 42724 - DNA, 16 bp, synthetic construct
  misc_feature 1..16: note = synthetic [barcode part1]
  source 1..16: mol_type = other DNA
tcactccagtctgcag

SEQ ID NO: 42725 - DNA, 16 bp, synthetic construct
  misc_feature 1..16: note = synthetic [barcode part1]
  source 1..16: mol_type = other DNA
ttaggcgtgttacctt

SEQ ID NO: 42726 - DNA, 16 bp, synthetic construct
  misc_feature 1..16: note = synthetic [barcode part1]
  source 1..16: mol_type = other DNA
taagtacgcgcagtct

SEQ ID NO: 42727 - DNA, 16 bp, synthetic construct
  misc_feature 1..16: note = synthetic [barcode part1]
  source 1..16: mol_type = other DNA
gtatcacaggcgaacg

SEQ ID NO: 42728 - DNA, 16 bp, synthetic construct
  misc_feature 1..16: note = synthetic [barcode part1]
  source 1..16: mol_type = other DNA
cgcagaattctgtgtg

SEQ ID NO: 42729 - DNA, 16 bp, synthetic construct
  misc_feature 1..16: note = synthetic [barcode part1]
  source 1..16: mol_type = other DNA
tgcaccgtaactacag

SEQ ID NO: 42730 - DNA, 16 bp, synthetic construct
  misc_feature 1..16: note = synthetic [barcode part1]
  source 1..16: mol_type = other DNA
cgttcaacgacttccg

SEQ ID NO: 42731 - DNA, 16 bp, synthetic construct
  misc_feature 1..16: note = synthetic [barcode part1]
  source 1..16: mol_type = other DNA
cgccggattatatctt

SEQ ID NO: 42732 - DNA, 16 bp, synthetic construct
  misc_feature 1..16: note = synthetic [barcode part1]
  source 1..16: mol_type = other DNA
cgtggtcgtataactg

SEQ ID NO: 42733 - DNA, 16 bp, synthetic construct
  misc_feature 1..16: note = synthetic [barcode part1]
  source 1..16: mol_type = other DNA
tcgccttcgtggattg

SEQ ID NO: 42734 - DNA, 16 bp, synthetic construct
  misc_feature 1..16: note = synthetic [barcode part1]
  source 1..16: mol_type = other DNA
ttgtatagtaccggcg

SEQ ID NO: 42735 - DNA, 16 bp, synthetic construct
  misc_feature 1..16: note = synthetic [barcode part1]
  source 1..16: mol_type = other DNA
gtgcaacttaaggagt

SEQ ID NO: 42736 - DNA, 16 bp, synthetic construct
  misc_feature 1..16: note = synthetic [barcode part1]
  source 1..16: mol_type = other DNA
caagtacacgtctgac

SEQ ID NO: 42737 - DNA, 16 bp, synthetic construct
  misc_feature 1..16: note = synthetic [barcode part1]
  source 1..16: mol_type = other DNA
ccaatctctcggttct

SEQ ID NO: 42738 - DNA, 16 bp, synthetic construct
  misc_feature 1..16: note = synthetic [barcode part1]
  source 1..16: mol_type = other DNA
acgcctgaggtagtag

SEQ ID NO: 42739 - DNA, 16 bp, synthetic construct
  misc_feature 1..16: note = synthetic [barcode part1]
  source 1..16: mol_type = other DNA
gtagtgtcagtcgatc

SEQ ID NO: 42740 - DNA, 16 bp, synthetic construct
  misc_feature 1..16: note = synthetic [barcode part1]
  source 1..16: mol_type = other DNA
cgttccgttacttcgt

SEQ ID NO: 42741 - DNA, 16 bp, synthetic construct
  misc_feature 1..16: note = synthetic [barcode part1]
  source 1..16: mol_type = other DNA
gagtctgtccaattct

SEQ ID NO: 42742 - DNA, 16 bp, synthetic construct
  misc_feature 1..16: note = synthetic [barcode part1]
  source 1..16: mol_type = other DNA
acagtaagacgcgtcg

SEQ ID NO: 42743 - DNA, 16 bp, synthetic construct
  misc_feature 1..16: note = synthetic [barcode part1]
  source 1..16: mol_type = other DNA
cactaccaagtatctc

SEQ ID NO: 42744 - DNA, 16 bp, synthetic construct
  misc_feature 1..16: note = synthetic [barcode part1]
  source 1..16: mol_type = other DNA
aaccagtcgtatacgc

SEQ ID NO: 42745 - DNA, 16 bp, synthetic construct
  misc_feature 1..16: note = synthetic [barcode part1]
  source 1..16: mol_type = other DNA
cacgattcttctagtg

SEQ ID NO: 42746 - DNA, 16 bp, synthetic construct
  misc_feature 1..16: note = synthetic [barcode part1]
  source 1..16: mol_type = other DNA
tctgcgtaactgttac

SEQ ID NO: 42747 - DNA, 16 bp, synthetic construct
  misc_feature 1..16: note = synthetic [barcode part1]
  source 1..16: mol_type = other DNA
ccgaggtaatactacc

SEQ ID NO: 42748 - DNA, 16 bp, synthetic construct
  misc_feature 1..16: note = synthetic [barcode part1]
  source 1..16: mol_type = other DNA
actgcagtctgagact

SEQ ID NO: 42749 - DNA, 16 bp, synthetic construct
  misc_feature 1..16: note = synthetic [barcode part1]
  source 1..16: mol_type = other DNA
ttgccgcagtacctgt

SEQ ID NO: 42750 - DNA, 16 bp, synthetic construct
  misc_feature 1..16: note = synthetic [barcode part1]
  source 1..16: mol_type = other DNA
tgtctgagaggtggtg

SEQ ID NO: 42751 - DNA, 16 bp, synthetic construct
  misc_feature 1..16: note = synthetic [barcode part1]
  source 1..16: mol_type = other DNA
tgtgaacagacctgtc

SEQ ID NO: 42752 - DNA, 16 bp, synthetic construct
  misc_feature 1..16: note = synthetic [barcode part1]
  source 1..16: mol_type = other DNA
cacgtaggcaaggtgt

SEQ ID NO: 42753 - DNA, 16 bp, synthetic construct
  misc_feature 1..16: note = synthetic [barcode part1]
  source 1..16: mol_type = other DNA
ccgtctagacactacc

SEQ ID NO: 42754 - DNA, 16 bp, synthetic construct
  misc_feature 1..16: note = synthetic [barcode part1]
  source 1..16: mol_type = other DNA
tcacctctcagacgtg

SEQ ID NO: 42755 - DNA, 16 bp, synthetic construct
  misc_feature 1..16: note = synthetic [barcode part1]
  source 1..16: mol_type = other DNA
ttgtagacggactcgt

SEQ ID NO: 42756 - DNA, 16 bp, synthetic construct
  misc_feature 1..16: note = synthetic [barcode part1]
  source 1..16: mol_type = other DNA
tgacgtatacgttggc

SEQ ID NO: 42757 - DNA, 16 bp, synthetic construct
  misc_feature 1..16: note = synthetic [barcode part1]
  source 1..16: mol_type = other DNA
tcctgatacgcaatct

SEQ ID NO: 42758 - DNA, 16 bp, synthetic construct
  misc_feature 1..16: note = synthetic [barcode part1]
  source 1..16: mol_type = other DNA
tacacgtcgcgtatag

SEQ ID NO: 42759 - DNA, 16 bp, synthetic construct
  misc_feature 1..16: note = synthetic [barcode part1]
  source 1..16: mol_type = other DNA
cgttgtagtcgtaacg

SEQ ID NO: 42760 - DNA, 16 bp, synthetic construct
  misc_feature 1..16: note = synthetic [barcode part1]
  source 1..16: mol_type = other DNA
ccggccgatattatag

SEQ ID NO: 42761 - DNA, 16 bp, synthetic construct
  misc_feature 1..16: note = synthetic [barcode part1]
  source 1..16: mol_type = other DNA
cgtcaatccgaccttg

SEQ ID NO: 42762 - DNA, 16 bp, synthetic construct
  misc_feature 1..16: note = synthetic [barcode part1]
  source 1..16: mol_type = other DNA
aattcctcttccggtc

SEQ ID NO: 42763 - DNA, 16 bp, synthetic construct
  misc_feature 1..16: note = synthetic [barcode part1]
  source 1..16: mol_type = other DNA
tgtcgagacggagact

SEQ ID NO: 42764 - DNA, 16 bp, synthetic construct
  misc_feature 1..16: note = synthetic [barcode part1]
  source 1..16: mol_type = other DNA
tataggacttcgtgcg

SEQ ID NO: 42765 - DNA, 16 bp, synthetic construct
  misc_feature 1..16: note = synthetic [barcode part1]
  source 1..16: mol_type = other DNA
gtaatcctaaggacag

SEQ ID NO: 42766 - DNA, 16 bp, synthetic construct
  misc_feature 1..16: note = synthetic [barcode part1]
  source 1..16: mol_type = other DNA
cgcctatataacgttc

SEQ ID NO: 42767 - DNA, 16 bp, synthetic construct
  misc_feature 1..16: note = synthetic [barcode part1]
  source 1..16: mol_type = other DNA
gtctagagttctgttc

SEQ ID NO: 42768 - DNA, 16 bp, synthetic construct
  misc_feature 1..16: note = synthetic [barcode part1]
  source 1..16: mol_type = other DNA
caccggtctctgattg

SEQ ID NO: 42769 - DNA, 16 bp, synthetic construct
  misc_feature 1..16: note = synthetic [barcode part1]
  source 1..16: mol_type = other DNA
aaccacagtacactgc

SEQ ID NO: 42770 - DNA, 16 bp, synthetic construct
  misc_feature 1..16: note = synthetic [barcode part1]
  source 1..16: mol_type = other DNA
gtcgaatctaccgaac

SEQ ID NO: 42771 - DNA, 16 bp, synthetic construct
  misc_feature 1..16: note = synthetic [barcode part1]
  source 1..16: mol_type = other DNA
ttaggacaggcgagtc

SEQ ID NO: 42772 - DNA, 16 bp, synthetic construct
  misc_feature 1..16: note = synthetic [barcode part1]
  source 1..16: mol_type = other DNA
ttatacaccttccgag

SEQ ID NO: 42773 - DNA, 16 bp, synthetic construct
  misc_feature 1..16: note = synthetic [barcode part1]
  source 1..16: mol_type = other DNA
gaattccgagaggaag

SEQ ID NO: 42774 - DNA, 16 bp, synthetic construct
  misc_feature 1..16: note = synthetic [barcode part1]
  source 1..16: mol_type = other DNA
gcacggtaactaggac

SEQ ID NO: 42775 - DNA, 16 bp, synthetic construct
  misc_feature 1..16: note = synthetic [barcode part1]
  source 1..16: mol_type = other DNA
gtagacttgcaccaac

SEQ ID NO: 42776 - DNA, 16 bp, synthetic construct
  misc_feature 1..16: note = synthetic [barcode part1]
  source 1..16: mol_type = other DNA
cagtgagttcaagtag

SEQ ID NO: 42777 - DNA, 16 bp, synthetic construct
  misc_feature 1..16: note = synthetic [barcode part1]
  source 1..16: mol_type = other DNA
cggactattcctgcgt

SEQ ID NO: 42778 - DNA, 16 bp, synthetic construct
  misc_feature 1..16: note = synthetic [barcode part1]
  source 1..16: mol_type = other DNA
ttgtggtgtcacagtg

SEQ ID NO: 42779 - DNA, 16 bp, synthetic construct
  misc_feature 1..16: note = synthetic [barcode part1]
  source 1..16: mol_type = other DNA
tcggaagactacttcg

SEQ ID NO: 42780 - DNA, 16 bp, synthetic construct
  misc_feature 1..16: note = synthetic [barcode part1]
  source 1..16: mol_type = other DNA
aaggcagtagagtgac

SEQ ID NO: 42781 - DNA, 16 bp, synthetic construct
  misc_feature 1..16: note = synthetic [barcode part1]
  source 1..16: mol_type = other DNA
tcgtcggactagattg

SEQ ID NO: 42782 - DNA, 16 bp, synthetic construct
  misc_feature 1..16: note = synthetic [barcode part1]
  source 1..16: mol_type = other DNA
aaggcggccgtaagtt

SEQ ID NO: 42783 - DNA, 16 bp, synthetic construct
  misc_feature 1..16: note = synthetic [barcode part1]
  source 1..16: mol_type = other DNA
attgcacggaataacg

SEQ ID NO: 42784 - DNA, 16 bp, synthetic construct
  misc_feature 1..16: note = synthetic [barcode part1]
  source 1..16: mol_type = other DNA
gacactaatacgtgcc

SEQ ID NO: 42785 - DNA, 16 bp, synthetic construct
  misc_feature 1..16: note = synthetic [barcode part1]
  source 1..16: mol_type = other DNA
ttgactggtgtacacg

SEQ ID NO: 42786 - DNA, 16 bp, synthetic construct
  misc_feature 1..16: note = synthetic [barcode part1]
  source 1..16: mol_type = other DNA
tgtgcggtctaactcc

SEQ ID NO: 42787 - DNA, 16 bp, synthetic construct
  misc_feature 1..16: note = synthetic [barcode part1]
  source 1..16: mol_type = other DNA
acttcagaagacctcg

SEQ ID NO: 42788 - DNA, 16 bp, synthetic construct
  misc_feature 1..16: note = synthetic [barcode part1]
  source 1..16: mol_type = other DNA
tgccacttaccaatac

SEQ ID NO: 42789 - DNA, 16 bp, synthetic construct
  misc_feature 1..16: note = synthetic [barcode part1]
  source 1..16: mol_type = other DNA
gtaggcctgactcttc

SEQ ID NO: 42790 - DNA, 16 bp, synthetic construct
  misc_feature 1..16: note = synthetic [barcode part1]
  source 1..16: mol_type = other DNA
tcgcggaatagagtgc

SEQ ID NO: 42791 - DNA, 16 bp, synthetic construct
  misc_feature 1..16: note = synthetic [barcode part1]
  source 1..16: mol_type = other DNA
ttcttgacgtggccac

SEQ ID NO: 42792 - DNA, 16 bp, synthetic construct
  misc_feature 1..16: note = synthetic [barcode part1]
  source 1..16: mol_type = other DNA
cgacctgatcttcacg

SEQ ID NO: 42793 - DNA, 16 bp, synthetic construct
  misc_feature 1..16: note = synthetic [barcode part1]
  source 1..16: mol_type = other DNA
tgagtcgtagtgacct

SEQ ID NO: 42794 - DNA, 16 bp, synthetic construct
  misc_feature 1..16: note = synthetic [barcode part1]
  source 1..16: mol_type = other DNA
ttcacacggttgttgt

SEQ ID NO: 42795 - DNA, 16 bp, synthetic construct
  misc_feature 1..16: note = synthetic [barcode part1]
  source 1..16: mol_type = other DNA
cggcacggttattcct

SEQ ID NO: 42796 - DNA, 16 bp, synthetic construct
  misc_feature 1..16: note = synthetic [barcode part1]
  source 1..16: mol_type = other DNA
aactcgaggagatatc

SEQ ID NO: 42797 - DNA, 16 bp, synthetic construct
  misc_feature 1..16: note = synthetic [barcode part1]
  source 1..16: mol_type = other DNA
agttagacactccacg

SEQ ID NO: 42798 - DNA, 16 bp, synthetic construct
  misc_feature 1..16: note = synthetic [barcode part1]
  source 1..16: mol_type = other DNA
gcgaattggagaccac

SEQ ID NO: 42799 - DNA, 16 bp, synthetic construct
  misc_feature 1..16: note = synthetic [barcode part1]
  source 1..16: mol_type = other DNA
agtctcaggcagacag

SEQ ID NO: 42800 - DNA, 16 bp, synthetic construct
  misc_feature 1..16: note = synthetic [barcode part1]
  source 1..16: mol_type = other DNA
tcgagatagatctcgc

SEQ ID NO: 42801 - DNA, 16 bp, synthetic construct
  misc_feature 1..16: note = synthetic [barcode part1]
  source 1..16: mol_type = other DNA
acctcgttccaatctc

SEQ ID NO: 42802 - DNA, 16 bp, synthetic construct
  misc_feature 1..16: note = synthetic [barcode part1]
  source 1..16: mol_type = other DNA
aggtacctcgtaggtt

SEQ ID NO: 42803 - DNA, 16 bp, synthetic construct
  misc_feature 1..16: note = synthetic [barcode part1]
  source 1..16: mol_type = other DNA
gataactggtccggtt

SEQ ID NO: 42804 - DNA, 16 bp, synthetic construct
  misc_feature 1..16: note = synthetic [barcode part1]
  source 1..16: mol_type = other DNA
cacgttctaagttacc

SEQ ID NO: 42805 - DNA, 16 bp, synthetic construct
  misc_feature 1..16: note = synthetic [barcode part1]
  source 1..16: mol_type = other DNA
tgtcacaccaatcgag

SEQ ID NO: 42806 - DNA, 16 bp, synthetic construct
  misc_feature 1..16: note = synthetic [barcode part1]
  source 1..16: mol_type = other DNA
tcgtctcggaatagtg

SEQ ID NO: 42807 - DNA, 16 bp, synthetic construct
  misc_feature 1..16: note = synthetic [barcode part1]
  source 1..16: mol_type = other DNA
tatcacgagagtcctg

SEQ ID NO: 42808 - DNA, 16 bp, synthetic construct
  misc_feature 1..16: note = synthetic [barcode part1]
  source 1..16: mol_type = other DNA
gtcaatcctctctctg

SEQ ID NO: 42809 - DNA, 16 bp, synthetic construct
  misc_feature 1..16: note = synthetic [barcode part1]
  source 1..16: mol_type = other DNA
tggcgcgcaacttctt

SEQ ID NO: 42810 - DNA, 16 bp, synthetic construct
  misc_feature 1..16: note = synthetic [barcode part1]
  source 1..16: mol_type = other DNA
aggtattacggtgagt

SEQ ID NO: 42811 - DNA, 16 bp, synthetic construct
  misc_feature 1..16: note = synthetic [barcode part1]
  source 1..16: mol_type = other DNA
aggcaagattctagac

SEQ ID NO: 42812 - DNA, 16 bp, synthetic construct
  misc_feature 1..16: note = synthetic [barcode part1]
  source 1..16: mol_type = other DNA
gacaactctggactac

SEQ ID NO: 42813 - DNA, 16 bp, synthetic construct
  misc_feature 1..16: note = synthetic [barcode part1]
  source 1..16: mol_type = other DNA
gaggtccgaacgaatc

SEQ ID NO: 42814 - DNA, 16 bp, synthetic construct
  misc_feature 1..16: note = synthetic [barcode part1]
  source 1..16: mol_type = other DNA
tgaagttcgtgtgcgt

SEQ ID NO: 42815 - DNA, 16 bp, synthetic construct
  misc_feature 1..16: note = synthetic [barcode part1]
  source 1..16: mol_type = other DNA
atcgtagacttactcc

SEQ ID NO: 42816 - DNA, 16 bp, synthetic construct
  misc_feature 1..16: note = synthetic [barcode part1]
  source 1..16: mol_type = other DNA
cgtacctctcaacgac

SEQ ID NO: 42817 - DNA, 16 bp, synthetic construct
  misc_feature 1..16: note = synthetic [barcode part1]
  source 1..16: mol_type = other DNA
acgattcacagaggcg

SEQ ID NO: 42818 - DNA, 16 bp, synthetic construct
  misc_feature 1..16: note = synthetic [barcode part1]
  source 1..16: mol_type = other DNA
ttccgatcacaagtct

SEQ ID NO: 42819 - DNA, 16 bp, synthetic construct
  misc_feature 1..16: note = synthetic [barcode part1]
  source 1..16: mol_type = other DNA
agtctaggatctgacc

SEQ ID NO: 42820 - DNA, 16 bp, synthetic construct
  misc_feature 1..16: note = synthetic [barcode part1]
  source 1..16: mol_type = other DNA
agaactacgacgagag

SEQ ID NO: 42821 - DNA, 16 bp, synthetic construct
  misc_feature 1..16: note = synthetic [barcode part1]
  source 1..16: mol_type = other DNA
cgcgaaccaagtattc

SEQ ID NO: 42822 - DNA, 16 bp, synthetic construct
  misc_feature 1..16: note = synthetic [barcode part1]
  source 1..16: mol_type = other DNA
tcacaggtcgtacagt

SEQ ID NO: 42823 - DNA, 16 bp, synthetic construct
  misc_feature 1..16: note = synthetic [barcode part1]
  source 1..16: mol_type = other DNA
gagttactaggtcacc

SEQ ID NO: 42824 - DNA, 16 bp, synthetic construct
  misc_feature 1..16: note = synthetic [barcode part1]
  source 1..16: mol_type = other DNA
cacttgagttagagag

SEQ ID NO: 42825 - DNA, 16 bp, synthetic construct
  misc_feature 1..16: note = synthetic [barcode part1]
  source 1..16: mol_type = other DNA
ttccgaacttaggacg

SEQ ID NO: 42826 - DNA, 16 bp, synthetic construct
  misc_feature 1..16: note = synthetic [barcode part1]
  source 1..16: mol_type = other DNA
attcctacgttcctgc

SEQ ID NO: 42827 - DNA, 16 bp, synthetic construct
  misc_feature 1..16: note = synthetic [barcode part1]
  source 1..16: mol_type = other DNA
aaggccacaataggag

SEQ ID NO: 42828 - DNA, 16 bp, synthetic construct
  misc_feature 1..16: note = synthetic [barcode part1]
  source 1..16: mol_type = other DNA
tatcctaaggcctatc

SEQ ID NO: 42829 - DNA, 16 bp, synthetic construct
  misc_feature 1..16: note = synthetic [barcode part1]
  source 1..16: mol_type = other DNA
ccttctgcggattcag

SEQ ID NO: 42830 - DNA, 16 bp, synthetic construct
  misc_feature 1..16: note = synthetic [barcode part1]
  source 1..16: mol_type = other DNA
ttacggaacctcttac

SEQ ID NO: 42831 - DNA, 16 bp, synthetic construct
  misc_feature 1..16: note = synthetic [barcode part1]
  source 1..16: mol_type = other DNA
tgagtgtgaggtggtc

SEQ ID NO: 42832 - DNA, 16 bp, synthetic construct
  misc_feature 1..16: note = synthetic [barcode part1]
  source 1..16: mol_type = other DNA
caagactctgaggttc

SEQ ID NO: 42833 - DNA, 16 bp, synthetic construct
  misc_feature 1..16: note = synthetic [barcode part1]
  source 1..16: mol_type = other DNA
tacgtacaccagtcag

SEQ ID NO: 42834 - DNA, 16 bp, synthetic construct
  misc_feature 1..16: note = synthetic [barcode part1]
  source 1..16: mol_type = other DNA
tcgtgttctcggtggt

SEQ ID NO: 42835 - DNA, 16 bp, synthetic construct
  misc_feature 1..16: note = synthetic [barcode part1]
  source 1..16: mol_type = other DNA
aacagatagtaccgtg

SEQ ID NO: 42836 - DNA, 16 bp, synthetic construct
  misc_feature 1..16: note = synthetic [barcode part1]
  source 1..16: mol_type = other DNA
agaccgtaacgtaagt

SEQ ID NO: 42837 - DNA, 16 bp, synthetic construct
  misc_feature 1..16: note = synthetic [barcode part1]
  source 1..16: mol_type = other DNA
atagagacacgaaggc

SEQ ID NO: 42838 - DNA, 16 bp, synthetic construct
  misc_feature 1..16: note = synthetic [barcode part1]
  source 1..16: mol_type = other DNA
cctgatagacgtggag

SEQ ID NO: 42839 - DNA, 16 bp, synthetic construct
  misc_feature 1..16: note = synthetic [barcode part1]
  source 1..16: mol_type = other DNA
cggcactgtctattcg

SEQ ID NO: 42840 - DNA, 16 bp, synthetic construct
  misc_feature 1..16: note = synthetic [barcode part1]
  source 1..16: mol_type = other DNA
cgacacggagataacc

SEQ ID NO: 42841 - DNA, 16 bp, synthetic construct
  misc_feature 1..16: note = synthetic [barcode part1]
  source 1..16: mol_type = other DNA
gtagtcgccagaaggt

SEQ ID NO: 42842 - DNA, 16 bp, synthetic construct
  misc_feature 1..16: note = synthetic [barcode part1]
  source 1..16: mol_type = other DNA
gcgtggtacgttaatc

SEQ ID NO: 42843 - DNA, 16 bp, synthetic construct
  misc_feature 1..16: note = synthetic [barcode part1]
  source 1..16: mol_type = other DNA
gaagtcgttgaacgcg

SEQ ID NO: 42844 - DNA, 16 bp, synthetic construct
  misc_feature 1..16: note = synthetic [barcode part1]
  source 1..16: mol_type = other DNA
cctgattgtgcgtcgt

SEQ ID NO: 42845 - DNA, 16 bp, synthetic construct
  misc_feature 1..16: note = synthetic [barcode part1]
  source 1..16: mol_type = other DNA
ttcgacaggtagtctg

SEQ ID NO: 42846 - DNA, 16 bp, synthetic construct
  misc_feature 1..16: note = synthetic [barcode part1]
  source 1..16: mol_type = other DNA
tggacgatatccgttg

SEQ ID NO: 42847 - DNA, 16 bp, synthetic construct
  misc_feature 1..16: note = synthetic [barcode part1]
  source 1..16: mol_type = other DNA
actcgttcggaatctt

SEQ ID NO: 42848 - DNA, 16 bp, synthetic construct
  misc_feature 1..16: note = synthetic [barcode part1]
  source 1..16: mol_type = other DNA
atacgtcgtaggatag

SEQ ID NO: 42849 - DNA, 16 bp, synthetic construct
  misc_feature 1..16: note = synthetic [barcode part1]
  source 1..16: mol_type = other DNA
acaaccgaaggtcggt

SEQ ID NO: 42850 - DNA, 16 bp, synthetic construct
  misc_feature 1..16: note = synthetic [barcode part1]
  source 1..16: mol_type = other DNA
ccgcacaattaacacg

SEQ ID NO: 42851 - DNA, 16 bp, synthetic construct
  misc_feature 1..16: note = synthetic [barcode part1]
  source 1..16: mol_type = other DNA
ccaggtctctctgtag

SEQ ID NO: 42852 - DNA, 16 bp, synthetic construct
  misc_feature 1..16: note = synthetic [barcode part1]
  source 1..16: mol_type = other DNA
cgcgttctgaaccgtt

SEQ ID NO: 42853 - DNA, 16 bp, synthetic construct
  misc_feature 1..16: note = synthetic [barcode part1]
  source 1..16: mol_type = other DNA
gacctcttaacaggac

SEQ ID NO: 42854 - DNA, 16 bp, synthetic construct
  misc_feature 1..16: note = synthetic [barcode part1]
  source 1..16: mol_type = other DNA
aatcgcgcaacacgtt

SEQ ID NO: 42855 - DNA, 16 bp, synthetic construct
  misc_feature 1..16: note = synthetic [barcode part1]
  source 1..16: mol_type = other DNA
aggtgttgagttcacc

SEQ ID NO: 42856 - DNA, 16 bp, synthetic construct
  misc_feature 1..16: note = synthetic [barcode part1]
  source 1..16: mol_type = other DNA
cgtcgtctgttggtgt

SEQ ID NO: 42857 - DNA, 16 bp, synthetic construct
  misc_feature 1..16: note = synthetic [barcode part1]
  source 1..16: mol_type = other DNA
cactggcaaggtcaag

SEQ ID NO: 42858 - DNA, 16 bp, synthetic construct
  misc_feature 1..16: note = synthetic [barcode part1]
  source 1..16: mol_type = other DNA
atcacttctcggacgc

SEQ ID NO: 42859 - DNA, 16 bp, synthetic construct
  misc_feature 1..16: note = synthetic [barcode part1]
  source 1..16: mol_type = other DNA
tggacacaagagttgt

SEQ ID NO: 42860 - DNA, 16 bp, synthetic construct
  misc_feature 1..16: note = synthetic [barcode part1]
  source 1..16: mol_type = other DNA
tggaaggactaatacc

SEQ ID NO: 42861 - DNA, 16 bp, synthetic construct
  misc_feature 1..16: note = synthetic [barcode part1]
  source 1..16: mol_type = other DNA
ttgtgcctacttccac

SEQ ID NO: 42862 - DNA, 16 bp, synthetic construct
  misc_feature 1..16: note = synthetic [barcode part1]
  source 1..16: mol_type = other DNA
tgttgcaccaactgag

SEQ ID NO: 42863 - DNA, 16 bp, synthetic construct
  misc_feature 1..16: note = synthetic [barcode part1]
  source 1..16: mol_type = other DNA
accaaggaaggttgag

SEQ ID NO: 42864 - DNA, 16 bp, synthetic construct
  misc_feature 1..16: note = synthetic [barcode part1]
  source 1..16: mol_type = other DNA
tcggataactctgttc

SEQ ID NO: 42865 - DNA, 16 bp, synthetic construct
  misc_feature 1..16: note = synthetic [barcode part1]
  source 1..16: mol_type = other DNA
ttgcgagacctcctgt

SEQ ID NO: 42866 - DNA, 16 bp, synthetic construct
  misc_feature 1..16: note = synthetic [barcode part1]
  source 1..16: mol_type = other DNA
taatacggttggaggt

SEQ ID NO: 42867 - DNA, 16 bp, synthetic construct
  misc_feature 1..16: note = synthetic [barcode part1]
  source 1..16: mol_type = other DNA
tcaggcctgacttaag

SEQ ID NO: 42868 - DNA, 16 bp, synthetic construct
  misc_feature 1..16: note = synthetic [barcode part1]
  source 1..16: mol_type = other DNA
attcggagtggcgaac

SEQ ID NO: 42869 - DNA, 16 bp, synthetic construct
  misc_feature 1..16: note = synthetic [barcode part1]
  source 1..16: mol_type = other DNA
gtaggagaaccaccac

SEQ ID NO: 42870 - DNA, 16 bp, synthetic construct
  misc_feature 1..16: note = synthetic [barcode part1]
  source 1..16: mol_type = other DNA
ccgattcttgtcactc

SEQ ID NO: 42871 - DNA, 16 bp, synthetic construct
  misc_feature 1..16: note = synthetic [barcode part1]
  source 1..16: mol_type = other DNA
cactaccagtagtgac

SEQ ID NO: 42872 - DNA, 16 bp, synthetic construct
  misc_feature 1..16: note = synthetic [barcode part1]
  source 1..16: mol_type = other DNA
agtaagaggagatcgc

SEQ ID NO: 42873 - DNA, 16 bp, synthetic construct
  misc_feature 1..16: note = synthetic [barcode part1]
  source 1..16: mol_type = other DNA
tgttcttcctccacag

SEQ ID NO: 42874 - DNA, 16 bp, synthetic construct
  misc_feature 1..16: note = synthetic [barcode part1]
  source 1..16: mol_type = other DNA
gtgttggacacaacct

SEQ ID NO: 42875 - DNA, 16 bp, synthetic construct
  misc_feature 1..16: note = synthetic [barcode part1]
  source 1..16: mol_type = other DNA
acttgactggtaaccg

SEQ ID NO: 42876 - DNA, 16 bp, synthetic construct
  misc_feature 1..16: note = synthetic [barcode part1]
  source 1..16: mol_type = other DNA
ttaccaggtgcctctg

SEQ ID NO: 42877 - DNA, 16 bp, synthetic construct
  misc_feature 1..16: note = synthetic [barcode part1]
  source 1..16: mol_type = other DNA
ttcagtgacttctacg

SEQ ID NO: 42878 - DNA, 16 bp, synthetic construct
  misc_feature 1..16: note = synthetic [barcode part1]
  source 1..16: mol_type = other DNA
gatcactgatacagag

SEQ ID NO: 42879 - DNA, 16 bp, synthetic construct
  misc_feature 1..16: note = synthetic [barcode part1]
  source 1..16: mol_type = other DNA
ttacacggcactaacg

SEQ ID NO: 42880 - DNA, 16 bp, synthetic construct
  misc_feature 1..16: note = synthetic [barcode part1]
  source 1..16: mol_type = other DNA
cgtaagtaggcctatc

SEQ ID NO: 42881 - DNA, 16 bp, synthetic construct
  misc_feature 1..16: note = synthetic [barcode part1]
  source 1..16: mol_type = other DNA
gtcggtagaacactct

SEQ ID NO: 42882 - DNA, 16 bp, synthetic construct
  misc_feature 1..16: note = synthetic [barcode part1]
  source 1..16: mol_type = other DNA
taacttatccgcgccg

SEQ ID NO: 42883 - DNA, 16 bp, synthetic construct
  misc_feature 1..16: note = synthetic [barcode part1]
  source 1..16: mol_type = other DNA
tcgaacgaggttcgtt

SEQ ID NO: 42884 - DNA, 16 bp, synthetic construct
  misc_feature 1..16: note = synthetic [barcode part1]
  source 1..16: mol_type = other DNA
tgacgagtaccacttg

SEQ ID NO: 42885 - DNA, 16 bp, synthetic construct
  misc_feature 1..16: note = synthetic [barcode part1]
  source 1..16: mol_type = other DNA
taagattcggtcggtc

SEQ ID NO: 42886 - DNA, 16 bp, synthetic construct
  misc_feature 1..16: note = synthetic [barcode part1]
  source 1..16: mol_type = other DNA
tatcggatagagacac

SEQ ID NO: 42887 - DNA, 16 bp, synthetic construct
  misc_feature 1..16: note = synthetic [barcode part1]
  source 1..16: mol_type = other DNA
acttacggtgtccaag

SEQ ID NO: 42888 - DNA, 16 bp, synthetic construct
  misc_feature 1..16: note = synthetic [barcode part1]
  source 1..16: mol_type = other DNA
tccgtggaagtgacag

SEQ ID NO: 42889 - DNA, 16 bp, synthetic construct
  misc_feature 1..16: note = synthetic [barcode part1]
  source 1..16: mol_type = other DNA
caggtacgtgtgactt

SEQ ID NO: 42890 - DNA, 16 bp, synthetic construct
  misc_feature 1..16: note = synthetic [barcode part1]
  source 1..16: mol_type = other DNA
gagagaactgaagtcg

SEQ ID NO: 42891 - DNA, 16 bp, synthetic construct
  misc_feature 1..16: note = synthetic [barcode part1]
  source 1..16: mol_type = other DNA
tacgacaacttgttcc

SEQ ID NO: 42892 - DNA, 16 bp, synthetic construct
  misc_feature 1..16: note = synthetic [barcode part1]
  source 1..16: mol_type = other DNA
cgtctactaagatctc

SEQ ID NO: 42893 - DNA, 16 bp, synthetic construct
  misc_feature 1..16: note = synthetic [barcode part1]
  source 1..16: mol_type = other DNA
aaggcaatatccgagt

SEQ ID NO: 42894 - DNA, 16 bp, synthetic construct
  misc_feature 1..16: note = synthetic [barcode part1]
  source 1..16: mol_type = other DNA
aagaacgtcgccaggt

SEQ ID NO: 42895 - DNA, 16 bp, synthetic construct
  misc_feature 1..16: note = synthetic [barcode part1]
  source 1..16: mol_type = other DNA
ttgcgttagtagtcct

SEQ ID NO: 42896 - DNA, 16 bp, synthetic construct
  misc_feature 1..16: note = synthetic [barcode part1]
  source 1..16: mol_type = other DNA
actgcaaggataagtc

SEQ ID NO: 42897 - DNA, 16 bp, synthetic construct
  misc_feature 1..16: note = synthetic [barcode part1]
  source 1..16: mol_type = other DNA
tgtggtaatctcaggc

SEQ ID NO: 42898 - DNA, 16 bp, synthetic construct
  misc_feature 1..16: note = synthetic [barcode part1]
  source 1..16: mol_type = other DNA
taaccggaaccaacct

SEQ ID NO: 42899 - DNA, 16 bp, synthetic construct
  misc_feature 1..16: note = synthetic [barcode part1]
  source 1..16: mol_type = other DNA
gttgcctcgaacgttc

SEQ ID NO: 42900 - DNA, 16 bp, synthetic construct
  misc_feature 1..16: note = synthetic [barcode part1]
  source 1..16: mol_type = other DNA
gttgtgtactgcctcg

SEQ ID NO: 42901 - DNA, 16 bp, synthetic construct
  misc_feature 1..16: note = synthetic [barcode part1]
  source 1..16: mol_type = other DNA
cagttgaccaggattc

SEQ ID NO: 42902 - DNA, 16 bp, synthetic construct
  misc_feature 1..16: note = synthetic [barcode part1]
  source 1..16: mol_type = other DNA
agactcagttcaggtc

SEQ ID NO: 42903 - DNA, 16 bp, synthetic construct
  misc_feature 1..16: note = synthetic [barcode part1]
  source 1..16: mol_type = other DNA
tctgtccacttactcg

SEQ ID NO: 42904 - DNA, 16 bp, synthetic construct
  misc_feature 1..16: note = synthetic [barcode part1]
  source 1..16: mol_type = other DNA
tggtcgcacgagatag

SEQ ID NO: 42905 - DNA, 16 bp, synthetic construct
  misc_feature 1..16: note = synthetic [barcode part1]
  source 1..16: mol_type = other DNA
tgactagacactacgc

SEQ ID NO: 42906 - DNA, 16 bp, synthetic construct
  misc_feature 1..16: note = synthetic [barcode part1]
  source 1..16: mol_type = other DNA
gtggaacggtacctag

SEQ ID NO: 42907 - DNA, 16 bp, synthetic construct
  misc_feature 1..16: note = synthetic [barcode part1]
  source 1..16: mol_type = other DNA
gacgagtatctatccg

SEQ ID NO: 42908 - DNA, 16 bp, synthetic construct
  misc_feature 1..16: note = synthetic [barcode part1]
  source 1..16: mol_type = other DNA
gtatcttctagaccac

SEQ ID NO: 42909 - DNA, 16 bp, synthetic construct
  misc_feature 1..16: note = synthetic [barcode part1]
  source 1..16: mol_type = other DNA
tacagtgtgccacaac

SEQ ID NO: 42910 - DNA, 16 bp, synthetic construct
  misc_feature 1..16: note = synthetic [barcode part1]
  source 1..16: mol_type = other DNA
ccggatcaagatatag

SEQ ID NO: 42911 - DNA, 16 bp, synthetic construct
  misc_feature 1..16: note = synthetic [barcode part1]
  source 1..16: mol_type = other DNA
actcgtattcttggtg

SEQ ID NO: 42912 - DNA, 16 bp, synthetic construct
  misc_feature 1..16: note = synthetic [barcode part1]
  source 1..16: mol_type = other DNA
tggtgcggaagactac

SEQ ID NO: 42913 - DNA, 16 bp, synthetic construct
  misc_feature 1..16: note = synthetic [barcode part1]
  source 1..16: mol_type = other DNA
ttggtcctggacctac

SEQ ID NO: 42914 - DNA, 16 bp, synthetic construct
  misc_feature 1..16: note = synthetic [barcode part1]
  source 1..16: mol_type = other DNA
tcggaatagtatcgcc

SEQ ID NO: 42915 - DNA, 16 bp, synthetic construct
  misc_feature 1..16: note = synthetic [barcode part1]
  source 1..16: mol_type = other DNA
tatcttgcaggcgtcc

SEQ ID NO: 42916 - DNA, 16 bp, synthetic construct
  misc_feature 1..16: note = synthetic [barcode part1]
  source 1..16: mol_type = other DNA
gattaacgcgtcacgt

SEQ ID NO: 42917 - DNA, 16 bp, synthetic construct
  misc_feature 1..16: note = synthetic [barcode part1]
  source 1..16: mol_type = other DNA
gtaatccggcacagag

SEQ ID NO: 42918 - DNA, 16 bp, synthetic construct
  misc_feature 1..16: note = synthetic [barcode part1]
  source 1..16: mol_type = other DNA
gtccgaactcgtcact

SEQ ID NO: 42919 - DNA, 16 bp, synthetic construct
  misc_feature 1..16: note = synthetic [barcode part1]
  source 1..16: mol_type = other DNA
attctcaccgccagac

SEQ ID NO: 42920 - DNA, 16 bp, synthetic construct
  misc_feature 1..16: note = synthetic [barcode part1]
  source 1..16: mol_type = other DNA
tatcgcctattagtgc

SEQ ID NO: 42921 - DNA, 16 bp, synthetic construct
  misc_feature 1..16: note = synthetic [barcode part1]
  source 1..16: mol_type = other DNA
tcctcgtgtggttcag

SEQ ID NO: 42922 - DNA, 16 bp, synthetic construct
  misc_feature 1..16: note = synthetic [barcode part1]
  source 1..16: mol_type = other DNA
gacaaggcgtggattc

SEQ ID NO: 42923 - DNA, 16 bp, synthetic construct
  misc_feature 1..16: note = synthetic [barcode part1]
  source 1..16: mol_type = other DNA
aatacttccgtcgttg

SEQ ID NO: 42924 - DNA, 16 bp, synthetic construct
  misc_feature 1..16: note = synthetic [barcode part1]
  source 1..16: mol_type = other DNA
cgcactggatcttctg

SEQ ID NO: 42925 - DNA, 16 bp, synthetic construct
  misc_feature 1..16: note = synthetic [barcode part1]
  source 1..16: mol_type = other DNA
acgagaggacctaacc

SEQ ID NO: 42926 - DNA, 16 bp, synthetic construct
  misc_feature 1..16: note = synthetic [barcode part1]
  source 1..16: mol_type = other DNA
cgtccacacttactct

SEQ ID NO: 42927 - DNA, 16 bp, synthetic construct
  misc_feature 1..16: note = synthetic [barcode part1]
  source 1..16: mol_type = other DNA
gaacgtctctactgtt

SEQ ID NO: 42928 - DNA, 16 bp, synthetic construct
  misc_feature 1..16: note = synthetic [barcode part1]
  source 1..16: mol_type = other DNA
agaggacagatacttc

SEQ ID NO: 42929 - DNA, 16 bp, synthetic construct
  misc_feature 1..16: note = synthetic [barcode part1]
  source 1..16: mol_type = other DNA
gtgtaatagaaccggt

SEQ ID NO: 42930 - DNA, 16 bp, synthetic construct
  misc_feature 1..16: note = synthetic [barcode part1]
  source 1..16: mol_type = other DNA
acgcgtgtgtatacac

SEQ ID NO: 42931 - DNA, 16 bp, synthetic construct
  misc_feature 1..16: note = synthetic [barcode part1]
  source 1..16: mol_type = other DNA
ccttgacacgttcgac

SEQ ID NO: 42932 - DNA, 16 bp, synthetic construct
  misc_feature 1..16: note = synthetic [barcode part1]
  source 1..16: mol_type = other DNA
actgatcacaccgtag

SEQ ID NO: 42933 - DNA, 16 bp, synthetic construct
  misc_feature 1..16: note = synthetic [barcode part1]
  source 1..16: mol_type = other DNA
attccttgcacgttag

SEQ ID NO: 42934 - DNA, 16 bp, synthetic construct
  misc_feature 1..16: note = synthetic [barcode part1]
  source 1..16: mol_type = other DNA
aggaacctggtacgtg

SEQ ID NO: 42935 - DNA, 16 bp, synthetic construct
  misc_feature 1..16: note = synthetic [barcode part1]
  source 1..16: mol_type = other DNA
tccgccaagttgtatt

SEQ ID NO: 42936 - DNA, 16 bp, synthetic construct
  misc_feature 1..16: note = synthetic [barcode part1]
  source 1..16: mol_type = other DNA
gcagaacagactcacg

SEQ ID NO: 42937 - DNA, 16 bp, synthetic construct
  misc_feature 1..16: note = synthetic [barcode part1]
  source 1..16: mol_type = other DNA
taatcgcgcaaggcag

SEQ ID NO: 42938 - DNA, 16 bp, synthetic construct
  misc_feature 1..16: note = synthetic [barcode part1]
  source 1..16: mol_type = other DNA
tcaagacgaaccttgc

SEQ ID NO: 42939 - DNA, 16 bp, synthetic construct
  misc_feature 1..16: note = synthetic [barcode part1]
  source 1..16: mol_type = other DNA
gcgaactccttgtcgt

SEQ ID NO: 42940 - DNA, 16 bp, synthetic construct
  misc_feature 1..16: note = synthetic [barcode part1]
  source 1..16: mol_type = other DNA
caagatccgtagtacc

SEQ ID NO: 42941 - DNA, 16 bp, synthetic construct
  misc_feature 1..16: note = synthetic [barcode part1]
  source 1..16: mol_type = other DNA
agtggagtcagatatc

SEQ ID NO: 42942 - DNA, 16 bp, synthetic construct
  misc_feature 1..16: note = synthetic [barcode part1]
  source 1..16: mol_type = other DNA
tacttcgcggacacct

SEQ ID NO: 42943 - DNA, 16 bp, synthetic construct
  misc_feature 1..16: note = synthetic [barcode part1]
  source 1..16: mol_type = other DNA
gcagttatctcaatcc

SEQ ID NO: 42944 - DNA, 16 bp, synthetic construct
  misc_feature 1..16: note = synthetic [barcode part1]
  source 1..16: mol_type = other DNA
taattctcgcgactgt

SEQ ID NO: 42945 - DNA, 16 bp, synthetic construct
  misc_feature 1..16: note = synthetic [barcode part1]
  source 1..16: mol_type = other DNA
tctcaagaacgagtag

SEQ ID NO: 42946 - DNA, 16 bp, synthetic construct
  misc_feature 1..16: note = synthetic [barcode part1]
  source 1..16: mol_type = other DNA
atccaaggaacctacc

SEQ ID NO: 42947 - DNA, 16 bp, synthetic construct
  misc_feature 1..16: note = synthetic [barcode part1]
  source 1..16: mol_type = other DNA
aaggagaaccgatcag

SEQ ID NO: 42948 - DNA, 16 bp, synthetic construct
  misc_feature 1..16: note = synthetic [barcode part1]
  source 1..16: mol_type = other DNA
attatccttcgagtgc

SEQ ID NO: 42949 - DNA, 16 bp, synthetic construct
  misc_feature 1..16: note = synthetic [barcode part1]
  source 1..16: mol_type = other DNA
cgtgattaactgcacg

SEQ ID NO: 42950 - DNA, 16 bp, synthetic construct
  misc_feature 1..16: note = synthetic [barcode part1]
  source 1..16: mol_type = other DNA
acttataccggtgcag

SEQ ID NO: 42951 - DNA, 16 bp, synthetic construct
  misc_feature 1..16: note = synthetic [barcode part1]
  source 1..16: mol_type = other DNA
tacctgtaacaccact

SEQ ID NO: 42952 - DNA, 16 bp, synthetic construct
  misc_feature 1..16: note = synthetic [barcode part1]
  source 1..16: mol_type = other DNA
gtacctcctagtaatc

SEQ ID NO: 42953 - DNA, 16 bp, synthetic construct
  misc_feature 1..16: note = synthetic [barcode part1]
  source 1..16: mol_type = other DNA
gtgaggttgagtgtcg

SEQ ID NO: 42954 - DNA, 16 bp, synthetic construct
  misc_feature 1..16: note = synthetic [barcode part1]
  source 1..16: mol_type = other DNA
ccttcgagtacactgc

SEQ ID NO: 42955 - DNA, 16 bp, synthetic construct
  misc_feature 1..16: note = synthetic [barcode part1]
  source 1..16: mol_type = other DNA
gttagtcacgtgtacg

SEQ ID NO: 42956 - DNA, 16 bp, synthetic construct
  misc_feature 1..16: note = synthetic [barcode part1]
  source 1..16: mol_type = other DNA
tgacgaggtggattcg

SEQ ID NO: 42957 - DNA, 16 bp, synthetic construct
  misc_feature 1..16: note = synthetic [barcode part1]
  source 1..16: mol_type = other DNA
ttacggtgattgaccg

SEQ ID NO: 42958 - DNA, 16 bp, synthetic construct
  misc_feature 1..16: note = synthetic [barcode part1]
  source 1..16: mol_type = other DNA
cagaatactgcacaag

SEQ ID NO: 42959 - DNA, 16 bp, synthetic construct
  misc_feature 1..16: note = synthetic [barcode part1]
  source 1..16: mol_type = other DNA
aagagtgtaggtcgtt

SEQ ID NO: 42960 - DNA, 16 bp, synthetic construct
  misc_feature 1..16: note = synthetic [barcode part1]
  source 1..16: mol_type = other DNA
gtactctgcgttcctt

SEQ ID NO: 42961 - DNA, 16 bp, synthetic construct
  misc_feature 1..16: note = synthetic [barcode part1]
  source 1..16: mol_type = other DNA
gtggtgtctagttggt

SEQ ID NO: 42962 - DNA, 16 bp, synthetic construct
  misc_feature 1..16: note = synthetic [barcode part1]
  source 1..16: mol_type = other DNA
ttcctcgccacacaag

SEQ ID NO: 42963 - DNA, 16 bp, synthetic construct
  misc_feature 1..16: note = synthetic [barcode part1]
  source 1..16: mol_type = other DNA
actcctgtctaacaac

SEQ ID NO: 42964 - DNA, 16 bp, synthetic construct
  misc_feature 1..16: note = synthetic [barcode part1]
  source 1..16: mol_type = other DNA
cgcagaacaacagtcg

SEQ ID NO: 42965 - DNA, 16 bp, synthetic construct
  misc_feature 1..16: note = synthetic [barcode part1]
  source 1..16: mol_type = other DNA
tccgataggtgcagag

SEQ ID NO: 42966 - DNA, 16 bp, synthetic construct
  misc_feature 1..16: note = synthetic [barcode part1]
  source 1..16: mol_type = other DNA
ccaatagtaccggatc

SEQ ID NO: 42967 - DNA, 16 bp, synthetic construct
  misc_feature 1..16: note = synthetic [barcode part1]
  source 1..16: mol_type = other DNA
cagagtgtctaatccg

SEQ ID NO: 42968 - DNA, 16 bp, synthetic construct
  misc_feature 1..16: note = synthetic [barcode part1]
  source 1..16: mol_type = other DNA
aagttgtcctggtggt

SEQ ID NO: 42969 - DNA, 16 bp, synthetic construct
  misc_feature 1..16: note = synthetic [barcode part1]
  source 1..16: mol_type = other DNA
actatcgcgatctgag

SEQ ID NO: 42970 - DNA, 16 bp, synthetic construct
  misc_feature 1..16: note = synthetic [barcode part1]
  source 1..16: mol_type = other DNA
actcgcctctggagtt

SEQ ID NO: 42971 - DNA, 16 bp, synthetic construct
  misc_feature 1..16: note = synthetic [barcode part1]
  source 1..16: mol_type = other DNA
gcgtccaagtaaggtg

SEQ ID NO: 42972 - DNA, 16 bp, synthetic construct
  misc_feature 1..16: note = synthetic [barcode part1]
  source 1..16: mol_type = other DNA
agactgcctcgtgtct

SEQ ID NO: 42973 - DNA, 16 bp, synthetic construct
  misc_feature 1..16: note = synthetic [barcode part1]
  source 1..16: mol_type = other DNA
caagatattgcgtgag

SEQ ID NO: 42974 - DNA, 16 bp, synthetic construct
  misc_feature 1..16: note = synthetic [barcode part1]
  source 1..16: mol_type = other DNA
agtccgaaggagtatt

SEQ ID NO: 42975 - DNA, 16 bp, synthetic construct
  misc_feature 1..16: note = synthetic [barcode part1]
  source 1..16: mol_type = other DNA
cacctcacgagtactc

SEQ ID NO: 42976 - DNA, 16 bp, synthetic construct
  misc_feature 1..16: note = synthetic [barcode part1]
  source 1..16: mol_type = other DNA
atatcaacggtaaggc

SEQ ID NO: 42977 - DNA, 16 bp, synthetic construct
  misc_feature 1..16: note = synthetic [barcode part1]
  source 1..16: mol_type = other DNA
gttattctgagacggc

SEQ ID NO: 42978 - DNA, 16 bp, synthetic construct
  misc_feature 1..16: note = synthetic [barcode part1]
  source 1..16: mol_type = other DNA
acaaggaacgcagagt

SEQ ID NO: 42979 - DNA, 16 bp, synthetic construct
  misc_feature 1..16: note = synthetic [barcode part1]
  source 1..16: mol_type = other DNA
aagactcaacagacac

SEQ ID NO: 42980 - DNA, 16 bp, synthetic construct
  misc_feature 1..16: note = synthetic [barcode part1]
  source 1..16: mol_type = other DNA
gcacggttaactacac

SEQ ID NO: 42981 - DNA, 16 bp, synthetic construct
  misc_feature 1..16: note = synthetic [barcode part1]
  source 1..16: mol_type = other DNA
atcaggcgttcagtgt

SEQ ID NO: 42982 - DNA, 16 bp, synthetic construct
  misc_feature 1..16: note = synthetic [barcode part1]
  source 1..16: mol_type = other DNA
gcacttcactactggc

SEQ ID NO: 42983 - DNA, 16 bp, synthetic construct
  misc_feature 1..16: note = synthetic [barcode part1]
  source 1..16: mol_type = other DNA
gaagtggcactcgaac

SEQ ID NO: 42984 - DNA, 16 bp, synthetic construct
  misc_feature 1..16: note = synthetic [barcode part1]
  source 1..16: mol_type = other DNA
tactccggacaagatc

SEQ ID NO: 42985 - DNA, 16 bp, synthetic construct
  misc_feature 1..16: note = synthetic [barcode part1]
  source 1..16: mol_type = other DNA
tctggtcaccgatacc

SEQ ID NO: 42986 - DNA, 16 bp, synthetic construct
  misc_feature 1..16: note = synthetic [barcode part1]
  source 1..16: mol_type = other DNA
atcggcgcagagaatc

SEQ ID NO: 42987 - DNA, 16 bp, synthetic construct
  misc_feature 1..16: note = synthetic [barcode part1]
  source 1..16: mol_type = other DNA
cacacgaagaccaggt

SEQ ID NO: 42988 - DNA, 16 bp, synthetic construct
  misc_feature 1..16: note = synthetic [barcode part1]
  source 1..16: mol_type = other DNA
attgccactggatcag

SEQ ID NO: 42989 - DNA, 16 bp, synthetic construct
  misc_feature 1..16: note = synthetic [barcode part1]
  source 1..16: mol_type = other DNA
gaactaacgtggttag

SEQ ID NO: 42990 - DNA, 16 bp, synthetic construct
  misc_feature 1..16: note = synthetic [barcode part1]
  source 1..16: mol_type = other DNA
ttacgttgacgtaggc

SEQ ID NO: 42991 - DNA, 16 bp, synthetic construct
  misc_feature 1..16: note = synthetic [barcode part1]
  source 1..16: mol_type = other DNA
ttcaccgtagtggaac

SEQ ID NO: 42992 - DNA, 16 bp, synthetic construct
  misc_feature 1..16: note = synthetic [barcode part1]
  source 1..16: mol_type = other DNA
aagtctcaggatctcg

SEQ ID NO: 42993 - DNA, 16 bp, synthetic construct
  misc_feature 1..16: note = synthetic [barcode part1]
  source 1..16: mol_type = other DNA
cgaacttctcgtcacg

SEQ ID NO: 42994 - DNA, 16 bp, synthetic construct
  misc_feature 1..16: note = synthetic [barcode part1]
  source 1..16: mol_type = other DNA
agtgaatagtaccgtg

SEQ ID NO: 42995 - DNA, 16 bp, synthetic construct
  misc_feature 1..16: note = synthetic [barcode part1]
  source 1..16: mol_type = other DNA
gagtgttggtacttgc

SEQ ID NO: 42996 - DNA, 16 bp, synthetic construct
  misc_feature 1..16: note = synthetic [barcode part1]
  source 1..16: mol_type = other DNA
gaacaccagactcact

SEQ ID NO: 42997 - DNA, 16 bp, synthetic construct
  misc_feature 1..16: note = synthetic [barcode part1]
  source 1..16: mol_type = other DNA
cgtaccgactaatacg

SEQ ID NO: 42998 - DNA, 16 bp, synthetic construct
  misc_feature 1..16: note = synthetic [barcode part1]
  source 1..16: mol_type = other DNA
cctcagtccggatatc

SEQ ID NO: 42999 - DNA, 16 bp, synthetic construct
  misc_feature 1..16: note = synthetic [barcode part1]
  source 1..16: mol_type = other DNA
gtcctaacgtgtgtag

SEQ ID NO: 43000 - DNA, 16 bp, synthetic construct
  misc_feature 1..16: note = synthetic [barcode part1]
  source 1..16: mol_type = other DNA
accgagtgaactgtct

SEQ ID NO: 43001 - DNA, 16 bp, synthetic construct
  misc_feature 1..16: note = synthetic [barcode part1]
  source 1..16: mol_type = other DNA
cactggataggtcact

SEQ ID NO: 43002 - DNA, 16 bp, synthetic construct
  misc_feature 1..16: note = synthetic [barcode part1]
  source 1..16: mol_type = other DNA
attgacacctgcaggt

SEQ ID NO: 43003 - DNA, 16 bp, synthetic construct
  misc_feature 1..16: note = synthetic [barcode part1]
  source 1..16: mol_type = other DNA
atagattcggtccttc

SEQ ID NO: 43004 - DNA, 16 bp, synthetic construct
  misc_feature 1..16: note = synthetic [barcode part1]
  source 1..16: mol_type = other DNA
cgttaagtagaggtac

SEQ ID NO: 43005 - DNA, 16 bp, synthetic construct
  misc_feature 1..16: note = synthetic [barcode part1]
  source 1..16: mol_type = other DNA
ccgtatcttacacctc

SEQ ID NO: 43006 - DNA, 16 bp, synthetic construct
  misc_feature 1..16: note = synthetic [barcode part1]
  source 1..16: mol_type = other DNA
acctaccgaatcctgc

SEQ ID NO: 43007 - DNA, 16 bp, synthetic construct
  misc_feature 1..16: note = synthetic [barcode part1]
  source 1..16: mol_type = other DNA
atcctccgacttcttg

SEQ ID NO: 43008 - DNA, 16 bp, synthetic construct
  misc_feature 1..16: note = synthetic [barcode part1]
  source 1..16: mol_type = other DNA
ttacctattgcctgcc

SEQ ID NO: 43009 - DNA, 16 bp, synthetic construct
  misc_feature 1..16: note = synthetic [barcode part1]
  source 1..16: mol_type = other DNA
gttgccttgagtgtcc

SEQ ID NO: 43010 - DNA, 16 bp, synthetic construct
  misc_feature 1..16: note = synthetic [barcode part1]
  source 1..16: mol_type = other DNA
gagaagtgtggccgtt

SEQ ID NO: 43011 - DNA, 16 bp, synthetic construct
  misc_feature 1..16: note = synthetic [barcode part1]
  source 1..16: mol_type = other DNA
cggtaagtagatactg

SEQ ID NO: 43012 - DNA, 16 bp, synthetic construct
  misc_feature 1..16: note = synthetic [barcode part1]
  source 1..16: mol_type = other DNA
attggacaagtcgtcc

SEQ ID NO: 43013 - DNA, 16 bp, synthetic construct
  misc_feature 1..16: note = synthetic [barcode part1]
  source 1..16: mol_type = other DNA
ccaacgcaactggaag

SEQ ID NO: 43014 - DNA, 16 bp, synthetic construct
  misc_feature 1..16: note = synthetic [barcode part1]
  source 1..16: mol_type = other DNA
gtccaggtaagtgttc

SEQ ID NO: 43015 - DNA, 16 bp, synthetic construct
  misc_feature 1..16: note = synthetic [barcode part1]
  source 1..16: mol_type = other DNA
tgtgttgcaacacgtg

SEQ ID NO: 43016 - DNA, 16 bp, synthetic construct
  misc_feature 1..16: note = synthetic [barcode part1]
  source 1..16: mol_type = other DNA
tgagtcgcgtgagagt

SEQ ID NO: 43017 - DNA, 16 bp, synthetic construct
  misc_feature 1..16: note = synthetic [barcode part1]
  source 1..16: mol_type = other DNA
acagacgacggtactg

SEQ ID NO: 43018 - DNA, 16 bp, synthetic construct
  misc_feature 1..16: note = synthetic [barcode part1]
  source 1..16: mol_type = other DNA
acaggttcacaagtcc

SEQ ID NO: 43019 - DNA, 16 bp, synthetic construct
  misc_feature 1..16: note = synthetic [barcode part1]
  source 1..16: mol_type = other DNA
cgttagacctagtgac

SEQ ID NO: 43020 - DNA, 16 bp, synthetic construct
  misc_feature 1..16: note = synthetic [barcode part1]
  source 1..16: mol_type = other DNA
gtggttattccagttc

SEQ ID NO: 43021 - DNA, 16 bp, synthetic construct
  misc_feature 1..16: note = synthetic [barcode part1]
  source 1..16: mol_type = other DNA
gtcttcagagtgcagt

SEQ ID NO: 43022 - DNA, 16 bp, synthetic construct
  misc_feature 1..16: note = synthetic [barcode part1]
  source 1..16: mol_type = other DNA
acctcctcttcttgag

SEQ ID NO: 43023 - DNA, 16 bp, synthetic construct
  misc_feature 1..16: note = synthetic [barcode part1]
  source 1..16: mol_type = other DNA
tcgcgcacttcaatcg

SEQ ID NO: 43024 - DNA, 16 bp, synthetic construct
  misc_feature 1..16: note = synthetic [barcode part1]
  source 1..16: mol_type = other DNA
acggtgatatcagtag

SEQ ID NO: 43025 - DNA, 16 bp, synthetic construct
  misc_feature 1..16: note = synthetic [barcode part1]
  source 1..16: mol_type = other DNA
aagtgaactacgacac

SEQ ID NO: 43026 - DNA, 16 bp, synthetic construct
  misc_feature 1..16: note = synthetic [barcode part1]
  source 1..16: mol_type = other DNA
tcactcaactctgagt

SEQ ID NO: 43027 - DNA, 16 bp, synthetic construct
  misc_feature 1..16: note = synthetic [barcode part1]
  source 1..16: mol_type = other DNA
aggtattcaggcacct

SEQ ID NO: 43028 - DNA, 16 bp, synthetic construct
  misc_feature 1..16: note = synthetic [barcode part1]
  source 1..16: mol_type = other DNA
cgttcgcacgatacct

SEQ ID NO: 43029 - DNA, 16 bp, synthetic construct
  misc_feature 1..16: note = synthetic [barcode part1]
  source 1..16: mol_type = other DNA
cgaacacacacgactt

SEQ ID NO: 43030 - DNA, 16 bp, synthetic construct
  misc_feature 1..16: note = synthetic [barcode part1]
  source 1..16: mol_type = other DNA
gtccgtcagtgttatt

SEQ ID NO: 43031 - DNA, 16 bp, synthetic construct
  misc_feature 1..16: note = synthetic [barcode part1]
  source 1..16: mol_type = other DNA
tcttgtgcggcgactt

SEQ ID NO: 43032 - DNA, 16 bp, synthetic construct
  misc_feature 1..16: note = synthetic [barcode part1]
  source 1..16: mol_type = other DNA
ccgatctgtgagatac

SEQ ID NO: 43033 - DNA, 16 bp, synthetic construct
  misc_feature 1..16: note = synthetic [barcode part1]
  source 1..16: mol_type = other DNA
cgcacaagtctcctgt

SEQ ID NO: 43034 - DNA, 16 bp, synthetic construct
  misc_feature 1..16: note = synthetic [barcode part1]
  source 1..16: mol_type = other DNA
aggattcgcctgtctc

SEQ ID NO: 43035 - DNA, 16 bp, synthetic construct
  misc_feature 1..16: note = synthetic [barcode part1]
  source 1..16: mol_type = other DNA
caggcctataacggag

SEQ ID NO: 43036 - DNA, 16 bp, synthetic construct
  misc_feature 1..16: note = synthetic [barcode part1]
  source 1..16: mol_type = other DNA
gcctgttccgtgatac

SEQ ID NO: 43037 - DNA, 16 bp, synthetic construct
  misc_feature 1..16: note = synthetic [barcode part1]
  source 1..16: mol_type = other DNA
ttgagtagtctcgtct

SEQ ID NO: 43038 - DNA, 16 bp, synthetic construct
  misc_feature 1..16: note = synthetic [barcode part1]
  source 1..16: mol_type = other DNA
tggcctgtgttctcag

SEQ ID NO: 43039 - DNA, 16 bp, synthetic construct
  misc_feature 1..16: note = synthetic [barcode part1]
  source 1..16: mol_type = other DNA
ataagtccgatctcct

SEQ ID NO: 43040 - DNA, 16 bp, synthetic construct
  misc_feature 1..16: note = synthetic [barcode part1]
  source 1..16: mol_type = other DNA
taatcctgcgtactac

SEQ ID NO: 43041 - DNA, 16 bp, synthetic construct
  misc_feature 1..16: note = synthetic [barcode part1]
  source 1..16: mol_type = other DNA
gactccttctcgttac

SEQ ID NO: 43042 - DNA, 16 bp, synthetic construct
  misc_feature 1..16: note = synthetic [barcode part1]
  source 1..16: mol_type = other DNA
ataggcctacgagtct

SEQ ID NO: 43043 - DNA, 16 bp, synthetic construct
  misc_feature 1..16: note = synthetic [barcode part1]
  source 1..16: mol_type = other DNA
cgttgtcttatcgtcc

SEQ ID NO: 43044 - DNA, 16 bp, synthetic construct
  misc_feature 1..16: note = synthetic [barcode part1]
  source 1..16: mol_type = other DNA
gacgatccacactcct

SEQ ID NO: 43045 - DNA, 16 bp, synthetic construct
  misc_feature 1..16: note = synthetic [barcode part1]
  source 1..16: mol_type = other DNA
tgaggttcctcagaac

SEQ ID NO: 43046 - DNA, 16 bp, synthetic construct
  misc_feature 1..16: note = synthetic [barcode part1]
  source 1..16: mol_type = other DNA
acctaggattctacct

SEQ ID NO: 43047 - DNA, 16 bp, synthetic construct
  misc_feature 1..16: note = synthetic [barcode part1]
  source 1..16: mol_type = other DNA
gtaatcgacgtcaacc

SEQ ID NO: 43048 - DNA, 16 bp, synthetic construct
  misc_feature 1..16: note = synthetic [barcode part1]
  source 1..16: mol_type = other DNA
aggttgtacttctacc

SEQ ID NO: 43049 - DNA, 16 bp, synthetic construct
  misc_feature 1..16: note = synthetic [barcode part1]
  source 1..16: mol_type = other DNA
agttgcgtctctcggt

SEQ ID NO: 43050 - DNA, 16 bp, synthetic construct
  misc_feature 1..16: note = synthetic [barcode part1]
  source 1..16: mol_type = other DNA
cctacgtctagtgacc

SEQ ID NO: 43051 - DNA, 16 bp, synthetic construct
  misc_feature 1..16: note = synthetic [barcode part1]
  source 1..16: mol_type = other DNA
aattcggagagacgcc

SEQ ID NO: 43052 - DNA, 16 bp, synthetic construct
  misc_feature 1..16: note = synthetic [barcode part1]
  source 1..16: mol_type = other DNA
gcactctattgttgac

SEQ ID NO: 43053 - DNA, 16 bp, synthetic construct
  misc_feature 1..16: note = synthetic [barcode part1]
  source 1..16: mol_type = other DNA
tgttcgagaggcagtg

SEQ ID NO: 43054 - DNA, 16 bp, synthetic construct
  misc_feature 1..16: note = synthetic [barcode part1]
  source 1..16: mol_type = other DNA
tcaagtacgcctgagt

SEQ ID NO: 43055 - DNA, 16 bp, synthetic construct
  misc_feature 1..16: note = synthetic [barcode part1]
  source 1..16: mol_type = other DNA
agtcgtgttgactctt

SEQ ID NO: 43056 - DNA, 16 bp, synthetic construct
  misc_feature 1..16: note = synthetic [barcode part1]
  source 1..16: mol_type = other DNA
aagactcagtaggtac

SEQ ID NO: 43057 - DNA, 16 bp, synthetic construct
  misc_feature 1..16: note = synthetic [barcode part1]
  source 1..16: mol_type = other DNA
cagtcttgtgtgccgt

SEQ ID NO: 43058 - DNA, 16 bp, synthetic construct
  misc_feature 1..16: note = synthetic [barcode part1]
  source 1..16: mol_type = other DNA
cgtcaattgcgtaacg

SEQ ID NO: 43059 - DNA, 16 bp, synthetic construct
  misc_feature 1..16: note = synthetic [barcode part1]
  source 1..16: mol_type = other DNA
gttgacagagtgttcc

SEQ ID NO: 43060 - DNA, 16 bp, synthetic construct
  misc_feature 1..16: note = synthetic [barcode part1]
  source 1..16: mol_type = other DNA
aagtgaggcaagtggt

SEQ ID NO: 43061 - DNA, 16 bp, synthetic construct
  misc_feature 1..16: note = synthetic [barcode part1]
  source 1..16: mol_type = other DNA
gatcagtatcgtgacc

SEQ ID NO: 43062 - DNA, 16 bp, synthetic construct
  misc_feature 1..16: note = synthetic [barcode part1]
  source 1..16: mol_type = other DNA
tacaggcgacgagact

SEQ ID NO: 43063 - DNA, 16 bp, synthetic construct
  misc_feature 1..16: note = synthetic [barcode part1]
  source 1..16: mol_type = other DNA
gttattcggatccgcc

SEQ ID NO: 43064 - DNA, 16 bp, synthetic construct
  misc_feature 1..16: note = synthetic [barcode part1]
  source 1..16: mol_type = other DNA
cgatcagatcgcagtt

SEQ ID NO: 43065 - DNA, 16 bp, synthetic construct
  misc_feature 1..16: note = synthetic [barcode part1]
  source 1..16: mol_type = other DNA
cgttaccttatacgac

SEQ ID NO: 43066 - DNA, 16 bp, synthetic construct
  misc_feature 1..16: note = synthetic [barcode part1]
  source 1..16: mol_type = other DNA
tgactccttctgactc

SEQ ID NO: 43067 - DNA, 16 bp, synthetic construct
  misc_feature 1..16: note = synthetic [barcode part1]
  source 1..16: mol_type = other DNA
gtcgcaactatctgtt

SEQ ID NO: 43068 - DNA, 16 bp, synthetic construct
  misc_feature 1..16: note = synthetic [barcode part1]
  source 1..16: mol_type = other DNA
gtcctctcgtggttag

SEQ ID NO: 43069 - DNA, 16 bp, synthetic construct
  misc_feature 1..16: note = synthetic [barcode part1]
  source 1..16: mol_type = other DNA
tatcggttaacgtgcg

SEQ ID NO: 43070 - DNA, 16 bp, synthetic construct
  misc_feature 1..16: note = synthetic [barcode part1]
  source 1..16: mol_type = other DNA
gttgtccaatactcac

SEQ ID NO: 43071 - DNA, 16 bp, synthetic construct
  misc_feature 1..16: note = synthetic [barcode part1]
  source 1..16: mol_type = other DNA
gtgtctcaggaatacc

SEQ ID NO: 43072 - DNA, 16 bp, synthetic construct
  misc_feature 1..16: note = synthetic [barcode part1]
  source 1..16: mol_type = other DNA
tgtctcaactcgtagt

SEQ ID NO: 43073 - DNA, 16 bp, synthetic construct
  misc_feature 1..16: note = synthetic [barcode part1]
  source 1..16: mol_type = other DNA
cgttagtgcgttaacg

SEQ ID NO: 43074 - DNA, 16 bp, synthetic construct
  misc_feature 1..16: note = synthetic [barcode part1]
  source 1..16: mol_type = other DNA
tctaacttcggtcctc

SEQ ID NO: 43075 - DNA, 16 bp, synthetic construct
  misc_feature 1..16: note = synthetic [barcode part1]
  source 1..16: mol_type = other DNA
gtgttcagagttcacg

SEQ ID NO: 43076 - DNA, 16 bp, synthetic construct
  misc_feature 1..16: note = synthetic [barcode part1]
  source 1..16: mol_type = other DNA
attcaaggtgacgagt

SEQ ID NO: 43077 - DNA, 16 bp, synthetic construct
  misc_feature 1..16: note = synthetic [barcode part1]
  source 1..16: mol_type = other DNA
taacggcactggactt

SEQ ID NO: 43078 - DNA, 16 bp, synthetic construct
  misc_feature 1..16: note = synthetic [barcode part1]
  source 1..16: mol_type = other DNA
cgtgacgatagacgac

SEQ ID NO: 43079 - DNA, 16 bp, synthetic construct
  misc_feature 1..16: note = synthetic [barcode part1]
  source 1..16: mol_type = other DNA
ttcctccgttgcagtt

SEQ ID NO: 43080 - DNA, 16 bp, synthetic construct
  misc_feature 1..16: note = synthetic [barcode part1]
  source 1..16: mol_type = other DNA
aaggtggatccgcaac

SEQ ID NO: 43081 - DNA, 16 bp, synthetic construct
  misc_feature 1..16: note = synthetic [barcode part1]
  source 1..16: mol_type = other DNA
gttattcctgcaggcc

SEQ ID NO: 43082 - DNA, 16 bp, synthetic construct
  misc_feature 1..16: note = synthetic [barcode part1]
  source 1..16: mol_type = other DNA
cgtgttagattaggag

SEQ ID NO: 43083 - DNA, 16 bp, synthetic construct
  misc_feature 1..16: note = synthetic [barcode part1]
  source 1..16: mol_type = other DNA
ccagttatccttcctg

SEQ ID NO: 43084 - DNA, 16 bp, synthetic construct
  misc_feature 1..16: note = synthetic [barcode part1]
  source 1..16: mol_type = other DNA
ccgttattacctaggt

SEQ ID NO: 43085 - DNA, 16 bp, synthetic construct
  misc_feature 1..16: note = synthetic [barcode part1]
  source 1..16: mol_type = other DNA
gaccacgaaggtcaac

SEQ ID NO: 43086 - DNA, 16 bp, synthetic construct
  misc_feature 1..16: note = synthetic [barcode part1]
  source 1..16: mol_type = other DNA
aatctctcacgagttc

SEQ ID NO: 43087 - DNA, 16 bp, synthetic construct
  misc_feature 1..16: note = synthetic [barcode part1]
  source 1..16: mol_type = other DNA
ccgttctggcctatag

SEQ ID NO: 43088 - DNA, 16 bp, synthetic construct
  misc_feature 1..16: note = synthetic [barcode part1]
  source 1..16: mol_type = other DNA
gcggatcggagtaatc

SEQ ID NO: 43089 - DNA, 16 bp, synthetic construct
  misc_feature 1..16: note = synthetic [barcode part1]
  source 1..16: mol_type = other DNA
tcgacaggacacgagt

SEQ ID NO: 43090 - DNA, 16 bp, synthetic construct
  misc_feature 1..16: note = synthetic [barcode part1]
  source 1..16: mol_type = other DNA
gtaatcctccaacgag

SEQ ID NO: 43091 - DNA, 16 bp, synthetic construct
  misc_feature 1..16: note = synthetic [barcode part1]
  source 1..16: mol_type = other DNA
gtacaggatccaatag

SEQ ID NO: 43092 - DNA, 16 bp, synthetic construct
  misc_feature 1..16: note = synthetic [barcode part1]
  source 1..16: mol_type = other DNA
acgtcaacacggattc

SEQ ID NO: 43093 - DNA, 16 bp, synthetic construct
  misc_feature 1..16: note = synthetic [barcode part1]
  source 1..16: mol_type = other DNA
agtctctgattgcgtt

SEQ ID NO: 43094 - DNA, 16 bp, synthetic construct
  misc_feature 1..16: note = synthetic [barcode part1]
  source 1..16: mol_type = other DNA
cggtgtcacggataag

SEQ ID NO: 43095 - DNA, 16 bp, synthetic construct
  misc_feature 1..16: note = synthetic [barcode part1]
  source 1..16: mol_type = other DNA
acacctactaccttag

SEQ ID NO: 43096 - DNA, 16 bp, synthetic construct
  misc_feature 1..16: note = synthetic [barcode part1]
  source 1..16: mol_type = other DNA
tactcgagatctgcag

SEQ ID NO: 43097 - DNA, 16 bp, synthetic construct
  misc_feature 1..16: note = synthetic [barcode part1]
  source 1..16: mol_type = other DNA
aatccttcgacaggac

SEQ ID NO: 43098 - DNA, 16 bp, synthetic construct
  misc_feature 1..16: note = synthetic [barcode part1]
  source 1..16: mol_type = other DNA
caaggagtacgatcgc

SEQ ID NO: 43099 - DNA, 16 bp, synthetic construct
  misc_feature 1..16: note = synthetic [barcode part1]
  source 1..16: mol_type = other DNA
agagtctgcgatatcc

SEQ ID NO: 43100 - DNA, 16 bp, synthetic construct
  misc_feature 1..16: note = synthetic [barcode part1]
  source 1..16: mol_type = other DNA
tgacttccggtcgtgt

SEQ ID NO: 43101 - DNA, 16 bp, synthetic construct
  misc_feature 1..16: note = synthetic [barcode part1]
  source 1..16: mol_type = other DNA
cgataggttgtaagtg

SEQ ID NO: 43102 - DNA, 16 bp, synthetic construct
  misc_feature 1..16: note = synthetic [barcode part1]
  source 1..16: mol_type = other DNA
aaccgcctgaattgtg

SEQ ID NO: 43103 - DNA, 16 bp, synthetic construct
  misc_feature 1..16: note = synthetic [barcode part1]
  source 1..16: mol_type = other DNA
tcttaacgtgcctggc

SEQ ID NO: 43104 - DNA, 16 bp, synthetic construct
  misc_feature 1..16: note = synthetic [barcode part1]
  source 1..16: mol_type = other DNA
ccaatctccgttacct

SEQ ID NO: 43105 - DNA, 16 bp, synthetic construct
  misc_feature 1..16: note = synthetic [barcode part1]
  source 1..16: mol_type = other DNA
aatcgaacagaaggcg

SEQ ID NO: 43106 - DNA, 16 bp, synthetic construct
  misc_feature 1..16: note = synthetic [barcode part1]
  source 1..16: mol_type = other DNA
cgtccgttgttcactt

SEQ ID NO: 43107 - DNA, 16 bp, synthetic construct
  misc_feature 1..16: note = synthetic [barcode part1]
  source 1..16: mol_type = other DNA
gatcggtaacttcggt

SEQ ID NO: 43108 - DNA, 16 bp, synthetic construct
  misc_feature 1..16: note = synthetic [barcode part1]
  source 1..16: mol_type = other DNA
gacagtgcgaatattg

SEQ ID NO: 43109 - DNA, 16 bp, synthetic construct
  misc_feature 1..16: note = synthetic [barcode part1]
  source 1..16: mol_type = other DNA
tgcgtctgacgacttc

SEQ ID NO: 43110 - DNA, 16 bp, synthetic construct
  misc_feature 1..16: note = synthetic [barcode part1]
  source 1..16: mol_type = other DNA
tgttataacgtgcgcg

SEQ ID NO: 43111 - DNA, 16 bp, synthetic construct
  misc_feature 1..16: note = synthetic [barcode part1]
  source 1..16: mol_type = other DNA
tgtactccgagttact

SEQ ID NO: 43112 - DNA, 16 bp, synthetic construct
  misc_feature 1..16: note = synthetic [barcode part1]
  source 1..16: mol_type = other DNA
actgaacctatactcc

SEQ ID NO: 43113 - DNA, 16 bp, synthetic construct
  misc_feature 1..16: note = synthetic [barcode part1]
  source 1..16: mol_type = other DNA
gcgacgtattaaccac

SEQ ID NO: 43114 - DNA, 16 bp, synthetic construct
  misc_feature 1..16: note = synthetic [barcode part1]
  source 1..16: mol_type = other DNA
gtgacagatctaagtg

SEQ ID NO: 43115 - DNA, 16 bp, synthetic construct
  misc_feature 1..16: note = synthetic [barcode part1]
  source 1..16: mol_type = other DNA
tggaatctcctaaggc

SEQ ID NO: 43116 - DNA, 16 bp, synthetic construct
  misc_feature 1..16: note = synthetic [barcode part1]
  source 1..16: mol_type = other DNA
gactaacggtcagttc

SEQ ID NO: 43117 - DNA, 16 bp, synthetic construct
  misc_feature 1..16: note = synthetic [barcode part1]
  source 1..16: mol_type = other DNA
cgagaggtgtgtggtt

SEQ ID NO: 43118 - DNA, 16 bp, synthetic construct
  misc_feature 1..16: note = synthetic [barcode part1]
  source 1..16: mol_type = other DNA
ttatcacgtggtaggc

SEQ ID NO: 43119 - DNA, 16 bp, synthetic construct
  misc_feature 1..16: note = synthetic [barcode part1]
  source 1..16: mol_type = other DNA
tcttggtacacggcct

SEQ ID NO: 43120 - DNA, 16 bp, synthetic construct
  misc_feature 1..16: note = synthetic [barcode part1]
  source 1..16: mol_type = other DNA
tgtggtggttccaagt

SEQ ID NO: 43121 - DNA, 16 bp, synthetic construct
  misc_feature 1..16: note = synthetic [barcode part1]
  source 1..16: mol_type = other DNA
taactgcgacaacaag

SEQ ID NO: 43122 - DNA, 16 bp, synthetic construct
  misc_feature 1..16: note = synthetic [barcode part1]
  source 1..16: mol_type = other DNA
tcttgttgagttcacg

SEQ ID NO: 43123 - DNA, 16 bp, synthetic construct
  misc_feature 1..16: note = synthetic [barcode part1]
  source 1..16: mol_type = other DNA
gaacgttcggatactc

SEQ ID NO: 43124 - DNA, 16 bp, synthetic construct
  misc_feature 1..16: note = synthetic [barcode part1]
  source 1..16: mol_type = other DNA
gacaggaatacggtcc

SEQ ID NO: 43125 - DNA, 16 bp, synthetic construct
  misc_feature 1..16: note = synthetic [barcode part1]
  source 1..16: mol_type = other DNA
agacctacctacgaac

SEQ ID NO: 43126 - DNA, 16 bp, synthetic construct
  misc_feature 1..16: note = synthetic [barcode part1]
  source 1..16: mol_type = other DNA
gacttgtcgaacgttg

SEQ ID NO: 43127 - DNA, 16 bp, synthetic construct
  misc_feature 1..16: note = synthetic [barcode part1]
  source 1..16: mol_type = other DNA
aacaggatcaacgtgt

SEQ ID NO: 43128 - DNA, 16 bp, synthetic construct
  misc_feature 1..16: note = synthetic [barcode part1]
  source 1..16: mol_type = other DNA
tgaggagtacggtcac

SEQ ID NO: 43129 - DNA, 16 bp, synthetic construct
  misc_feature 1..16: note = synthetic [barcode part1]
  source 1..16: mol_type = other DNA
tggtgtacttcgccac

SEQ ID NO: 43130 - DNA, 16 bp, synthetic construct
  misc_feature 1..16: note = synthetic [barcode part1]
  source 1..16: mol_type = other DNA
tcaaggtcaccgtaac

SEQ ID NO: 43131 - DNA, 16 bp, synthetic construct
  misc_feature 1..16: note = synthetic [barcode part1]
  source 1..16: mol_type = other DNA
tcagtgtacgtcagtg

SEQ ID NO: 43132 - DNA, 16 bp, synthetic construct
  misc_feature 1..16: note = synthetic [barcode part1]
  source 1..16: mol_type = other DNA
ttagattcggtccgag

SEQ ID NO: 43133 - DNA, 16 bp, synthetic construct
  misc_feature 1..16: note = synthetic [barcode part1]
  source 1..16: mol_type = other DNA
accggaacggtatacg

SEQ ID NO: 43134 - DNA, 16 bp, synthetic construct
  misc_feature 1..16: note = synthetic [barcode part1]
  source 1..16: mol_type = other DNA
gtaatatccggtcgac

SEQ ID NO: 43135 - DNA, 16 bp, synthetic construct
  misc_feature 1..16: note = synthetic [barcode part1]
  source 1..16: mol_type = other DNA
gaagacgacctgacac

SEQ ID NO: 43136 - DNA, 16 bp, synthetic construct
  misc_feature 1..16: note = synthetic [barcode part1]
  source 1..16: mol_type = other DNA
attcacttcacgacac

SEQ ID NO: 43137 - DNA, 16 bp, synthetic construct
  misc_feature 1..16: note = synthetic [barcode part1]
  source 1..16: mol_type = other DNA
tgcgagttgagatagt

SEQ ID NO: 43138 - DNA, 16 bp, synthetic construct
  misc_feature 1..16: note = synthetic [barcode part1]
  source 1..16: mol_type = other DNA
cggaggaagttctctt

SEQ ID NO: 43139 - DNA, 16 bp, synthetic construct
  misc_feature 1..16: note = synthetic [barcode part1]
  source 1..16: mol_type = other DNA
tagacaagttctggag

SEQ ID NO: 43140 - DNA, 16 bp, synthetic construct
  misc_feature 1..16: note = synthetic [barcode part1]
  source 1..16: mol_type = other DNA
gatacgcctggagagt

SEQ ID NO: 43141 - DNA, 16 bp, synthetic construct
  misc_feature 1..16: note = synthetic [barcode part1]
  source 1..16: mol_type = other DNA
tactcacactcgtcct

SEQ ID NO: 43142 - DNA, 16 bp, synthetic construct
  misc_feature 1..16: note = synthetic [barcode part1]
  source 1..16: mol_type = other DNA
gaatagagtggacgac

SEQ ID NO: 43143 - DNA, 16 bp, synthetic construct
  misc_feature 1..16: note = synthetic [barcode part1]
  source 1..16: mol_type = other DNA
tgacagtagtctgacc

SEQ ID NO: 43144 - DNA, 16 bp, synthetic construct
  misc_feature 1..16: note = synthetic [barcode part1]
  source 1..16: mol_type = other DNA
caagttgcagtctgac

SEQ ID NO: 43145 - DNA, 16 bp, synthetic construct
  misc_feature 1..16: note = synthetic [barcode part1]
  source 1..16: mol_type = other DNA
ccaacgacaccttcgt

SEQ ID NO: 43146 - DNA, 16 bp, synthetic construct
  misc_feature 1..16: note = synthetic [barcode part1]
  source 1..16: mol_type = other DNA
tattagtacgccggtg

SEQ ID NO: 43147 - DNA, 16 bp, synthetic construct
  misc_feature 1..16: note = synthetic [barcode part1]
  source 1..16: mol_type = other DNA
tgtcaaggtccttgcc

SEQ ID NO: 43148 - DNA, 16 bp, synthetic construct
  misc_feature 1..16: note = synthetic [barcode part1]
  source 1..16: mol_type = other DNA
gagactcgcgatatct

SEQ ID NO: 43149 - DNA, 16 bp, synthetic construct
  misc_feature 1..16: note = synthetic [barcode part1]
  source 1..16: mol_type = other DNA
ttaagttcgtgttccg

SEQ ID NO: 43150 - DNA, 16 bp, synthetic construct
  misc_feature 1..16: note = synthetic [barcode part1]
  source 1..16: mol_type = other DNA
gtcgcctatcttgtct

SEQ ID NO: 43151 - DNA, 16 bp, synthetic construct
  misc_feature 1..16: note = synthetic [barcode part1]
  source 1..16: mol_type = other DNA
gtcttaggaagtctcg

SEQ ID NO: 43152 - DNA, 16 bp, synthetic construct
  misc_feature 1..16: note = synthetic [barcode part1]
  source 1..16: mol_type = other DNA
atctcacgcagttgtt

SEQ ID NO: 43153 - DNA, 16 bp, synthetic construct
  misc_feature 1..16: note = synthetic [barcode part1]
  source 1..16: mol_type = other DNA
accaataccgtcgcct

SEQ ID NO: 43154 - DNA, 16 bp, synthetic construct
  misc_feature 1..16: note = synthetic [barcode part1]
  source 1..16: mol_type = other DNA
tactaggacttctgtc

SEQ ID NO: 43155 - DNA, 16 bp, synthetic construct
  misc_feature 1..16: note = synthetic [barcode part1]
  source 1..16: mol_type = other DNA
gcgtcgatataagtcc

SEQ ID NO: 43156 - DNA, 16 bp, synthetic construct
  misc_feature 1..16: note = synthetic [barcode part1]
  source 1..16: mol_type = other DNA
cgcgataagatctcgt

SEQ ID NO: 43157 - DNA, 16 bp, synthetic construct
  misc_feature 1..16: note = synthetic [barcode part1]
  source 1..16: mol_type = other DNA
aacaagaccggtgtgc

SEQ ID NO: 43158 - DNA, 16 bp, synthetic construct
  misc_feature 1..16: note = synthetic [barcode part1]
  source 1..16: mol_type = other DNA
taatcaacgtggtgcc

SEQ ID NO: 43159 - DNA, 16 bp, synthetic construct
  misc_feature 1..16: note = synthetic [barcode part1]
  source 1..16: mol_type = other DNA
gacgtataccgatacc

SEQ ID NO: 43160 - DNA, 16 bp, synthetic construct
  misc_feature 1..16: note = synthetic [barcode part1]
  source 1..16: mol_type = other DNA
tcctgcgagttcgact

SEQ ID NO: 43161 - DNA, 16 bp, synthetic construct
  misc_feature 1..16: note = synthetic [barcode part1]
  source 1..16: mol_type = other DNA
cggaagagttgcacac

SEQ ID NO: 43162 - DNA, 16 bp, synthetic construct
  misc_feature 1..16: note = synthetic [barcode part1]
  source 1..16: mol_type = other DNA
gttagtccagtcaacg

SEQ ID NO: 43163 - DNA, 16 bp, synthetic construct
  misc_feature 1..16: note = synthetic [barcode part1]
  source 1..16: mol_type = other DNA
tcgtctgatccacttc

SEQ ID NO: 43164 - DNA, 16 bp, synthetic construct
  misc_feature 1..16: note = synthetic [barcode part1]
  source 1..16: mol_type = other DNA
tattcacctcaggatc

SEQ ID NO: 43165 - DNA, 16 bp, synthetic construct
  misc_feature 1..16: note = synthetic [barcode part1]
  source 1..16: mol_type = other DNA
tgactcttgcgaccgt

SEQ ID NO: 43166 - DNA, 16 bp, synthetic construct
  misc_feature 1..16: note = synthetic [barcode part1]
  source 1..16: mol_type = other DNA
gtgtgcggttataacc

SEQ ID NO: 43167 - DNA, 16 bp, synthetic construct
  misc_feature 1..16: note = synthetic [barcode part1]
  source 1..16: mol_type = other DNA
agtcacacagtgtgtc

SEQ ID NO: 43168 - DNA, 16 bp, synthetic construct
  misc_feature 1..16: note = synthetic [barcode part1]
  source 1..16: mol_type = other DNA
ccgtggaggattgaac

SEQ ID NO: 43169 - DNA, 16 bp, synthetic construct
  misc_feature 1..16: note = synthetic [barcode part1]
  source 1..16: mol_type = other DNA
tgcaatacgtctacct

SEQ ID NO: 43170 - DNA, 16 bp, synthetic construct
  misc_feature 1..16: note = synthetic [barcode part1]
  source 1..16: mol_type = other DNA
tatatccgcagttcac

SEQ ID NO: 43171 - DNA, 16 bp, synthetic construct
  misc_feature 1..16: note = synthetic [barcode part1]
  source 1..16: mol_type = other DNA
cgagactaccacagtt

SEQ ID NO: 43172 - DNA, 16 bp, synthetic construct
  misc_feature 1..16: note = synthetic [barcode part1]
  source 1..16: mol_type = other DNA
attactcgcgacgaac

SEQ ID NO: 43173 - DNA, 16 bp, synthetic construct
  misc_feature 1..16: note = synthetic [barcode part1]
  source 1..16: mol_type = other DNA
gagtatatcagaccag

SEQ ID NO: 43174 - DNA, 16 bp, synthetic construct
  misc_feature 1..16: note = synthetic [barcode part1]
  source 1..16: mol_type = other DNA
cggtgaacactattcg

SEQ ID NO: 43175 - DNA, 16 bp, synthetic construct
  misc_feature 1..16: note = synthetic [barcode part1]
  source 1..16: mol_type = other DNA
gacttacctcggatag

SEQ ID NO: 43176 - DNA, 16 bp, synthetic construct
  misc_feature 1..16: note = synthetic [barcode part1]
  source 1..16: mol_type = other DNA
gtcgttcaagtggtac

SEQ ID NO: 43177 - DNA, 16 bp, synthetic construct
  misc_feature 1..16: note = synthetic [barcode part1]
  source 1..16: mol_type = other DNA
acttactcgtccactc

SEQ ID NO: 43178 - DNA, 16 bp, synthetic construct
  misc_feature 1..16: note = synthetic [barcode part1]
  source 1..16: mol_type = other DNA
gtggattagttgtgcc

SEQ ID NO: 43179 - DNA, 16 bp, synthetic construct
  misc_feature 1..16: note = synthetic [barcode part1]
  source 1..16: mol_type = other DNA
agagattgcgtactag

SEQ ID NO: 43180 - DNA, 16 bp, synthetic construct
  misc_feature 1..16: note = synthetic [barcode part1]
  source 1..16: mol_type = other DNA
gaggaaccaccttatc

SEQ ID NO: 43181 - DNA, 16 bp, synthetic construct
  misc_feature 1..16: note = synthetic [barcode part1]
  source 1..16: mol_type = other DNA
accactaattgccgag

SEQ ID NO: 43182 - DNA, 16 bp, synthetic construct
  misc_feature 1..16: note = synthetic [barcode part1]
  source 1..16: mol_type = other DNA
gttaaccagtcagtcg

SEQ ID NO: 43183 - DNA, 16 bp, synthetic construct
  misc_feature 1..16: note = synthetic [barcode part1]
  source 1..16: mol_type = other DNA
ccgcctaagattccgt

SEQ ID NO: 43184 - DNA, 16 bp, synthetic construct
  misc_feature 1..16: note = synthetic [barcode part1]
  source 1..16: mol_type = other DNA
acaagaactaggttgc

SEQ ID NO: 43185 - DNA, 16 bp, synthetic construct
  misc_feature 1..16: note = synthetic [barcode part1]
  source 1..16: mol_type = other DNA
taactggcggtcaatc

SEQ ID NO: 43186 - DNA, 16 bp, synthetic construct
  misc_feature 1..16: note = synthetic [barcode part1]
  source 1..16: mol_type = other DNA
tctcacgattgtcggc

SEQ ID NO: 43187 - DNA, 16 bp, synthetic construct
  misc_feature 1..16: note = synthetic [barcode part1]
  source 1..16: mol_type = other DNA
aagtaaggacgccacc

SEQ ID NO: 43188 - DNA, 16 bp, synthetic construct
  misc_feature 1..16: note = synthetic [barcode part1]
  source 1..16: mol_type = other DNA
tcaggcgaatatccac

SEQ ID NO: 43189 - DNA, 16 bp, synthetic construct
  misc_feature 1..16: note = synthetic [barcode part1]
  source 1..16: mol_type = other DNA
tagtgcaccaacacac

SEQ ID NO: 43190 - DNA, 16 bp, synthetic construct
  misc_feature 1..16: note = synthetic [barcode part1]
  source 1..16: mol_type = other DNA
tgtaagacagtagtcg

SEQ ID NO: 43191 - DNA, 16 bp, synthetic construct
  misc_feature 1..16: note = synthetic [barcode part1]
  source 1..16: mol_type = other DNA
gacgtgtactggtact

SEQ ID NO: 43192 - DNA, 16 bp, synthetic construct
  misc_feature 1..16: note = synthetic [barcode part1]
  source 1..16: mol_type = other DNA
gaacaggtcacggtac

SEQ ID NO: 43193 - DNA, 16 bp, synthetic construct
  misc_feature 1..16: note = synthetic [barcode part1]
  source 1..16: mol_type = other DNA
tcacgagttgcgtagt

SEQ ID NO: 43194 - DNA, 16 bp, synthetic construct
  misc_feature 1..16: note = synthetic [barcode part1]
  source 1..16: mol_type = other DNA
cagaagacaaccgcgt

SEQ ID NO: 43195 - DNA, 16 bp, synthetic construct
  misc_feature 1..16: note = synthetic [barcode part1]
  source 1..16: mol_type = other DNA
caacaatcggttcggt

SEQ ID NO: 43196 - DNA, 16 bp, synthetic construct
  misc_feature 1..16: note = synthetic [barcode part1]
  source 1..16: mol_type = other DNA
tgtggacaagtccgtt

SEQ ID NO: 43197 - DNA, 16 bp, synthetic construct
  misc_feature 1..16: note = synthetic [barcode part1]
  source 1..16: mol_type = other DNA
aggtgtccggagtagt

SEQ ID NO: 43198 - DNA, 16 bp, synthetic construct
  misc_feature 1..16: note = synthetic [barcode part1]
  source 1..16: mol_type = other DNA
ttgacagaacgcggac

SEQ ID NO: 43199 - DNA, 16 bp, synthetic construct
  misc_feature 1..16: note = synthetic [barcode part1]
  source 1..16: mol_type = other DNA
gttagaacacaaccag

SEQ ID NO: 43200 - DNA, 16 bp, synthetic construct
  misc_feature 1..16: note = synthetic [barcode part1]
  source 1..16: mol_type = other DNA
cgtcgtggattaatcg

SEQ ID NO: 43201 - DNA, 16 bp, synthetic construct
  misc_feature 1..16: note = synthetic [barcode part1]
  source 1..16: mol_type = other DNA
gtctcgttattccacc

SEQ ID NO: 43202 - DNA, 16 bp, synthetic construct
  misc_feature 1..16: note = synthetic [barcode part1]
  source 1..16: mol_type = other DNA
gaattactgccggact

SEQ ID NO: 43203 - DNA, 16 bp, synthetic construct
  misc_feature 1..16: note = synthetic [barcode part1]
  source 1..16: mol_type = other DNA
aattggccggtattgc

SEQ ID NO: 43204 - DNA, 16 bp, synthetic construct
  misc_feature 1..16: note = synthetic [barcode part1]
  source 1..16: mol_type = other DNA
tcgttgagagatacag

SEQ ID NO: 43205 - DNA, 16 bp, synthetic construct
  misc_feature 1..16: note = synthetic [barcode part1]
  source 1..16: mol_type = other DNA
tgatagataagtgccg

SEQ ID NO: 43206 - DNA, 16 bp, synthetic construct
  misc_feature 1..16: note = synthetic [barcode part1]
  source 1..16: mol_type = other DNA
gtggttactaactctc

SEQ ID NO: 43207 - DNA, 16 bp, synthetic construct
  misc_feature 1..16: note = synthetic [barcode part1]
  source 1..16: mol_type = other DNA
tactagacttgcgtct

SEQ ID NO: 43208 - DNA, 16 bp, synthetic construct
  misc_feature 1..16: note = synthetic [barcode part1]
  source 1..16: mol_type = other DNA
gattgtccggaggtag

SEQ ID NO: 43209 - DNA, 16 bp, synthetic construct
  misc_feature 1..16: note = synthetic [barcode part1]
  source 1..16: mol_type = other DNA
aacagtagacgagacg

SEQ ID NO: 43210 - DNA, 16 bp, synthetic construct
  misc_feature 1..16: note = synthetic [barcode part1]
  source 1..16: mol_type = other DNA
agtaacactacgaacg

SEQ ID NO: 43211 - DNA, 16 bp, synthetic construct
  misc_feature 1..16: note = synthetic [barcode part1]
  source 1..16: mol_type = other DNA
tccaattcgcgaccac

SEQ ID NO: 43212 - DNA, 16 bp, synthetic construct
  misc_feature 1..16: note = synthetic [barcode part1]
  source 1..16: mol_type = other DNA
tcaacacgtcacacag

SEQ ID NO: 43213 - DNA, 16 bp, synthetic construct
  misc_feature 1..16: note = synthetic [barcode part1]
  source 1..16: mol_type = other DNA
acagtactcgaagtcc

SEQ ID NO: 43214 - DNA, 16 bp, synthetic construct
  misc_feature 1..16: note = synthetic [barcode part1]
  source 1..16: mol_type = other DNA
cgttgtcgttcggatc

SEQ ID NO: 43215 - DNA, 16 bp, synthetic construct
  misc_feature 1..16: note = synthetic [barcode part1]
  source 1..16: mol_type = other DNA
acgcaatctctccgac

SEQ ID NO: 43216 - DNA, 16 bp, synthetic construct
  misc_feature 1..16: note = synthetic [barcode part1]
  source 1..16: mol_type = other DNA
ttggtctacctggatt

SEQ ID NO: 43217 - DNA, 16 bp, synthetic construct
  misc_feature 1..16: note = synthetic [barcode part1]
  source 1..16: mol_type = other DNA
acagttacacgcgact

SEQ ID NO: 43218 - DNA, 16 bp, synthetic construct
  misc_feature 1..16: note = synthetic [barcode part1]
  source 1..16: mol_type = other DNA
cgaattgcgtgaaggc

SEQ ID NO: 43219 - DNA, 16 bp, synthetic construct
  misc_feature 1..16: note = synthetic [barcode part1]
  source 1..16: mol_type = other DNA
gactcgcaggtagtag

SEQ ID NO: 43220 - DNA, 16 bp, synthetic construct
  misc_feature 1..16: note = synthetic [barcode part1]
  source 1..16: mol_type = other DNA
actcgtcagacgaatc

SEQ ID NO: 43221 - DNA, 16 bp, synthetic construct
  misc_feature 1..16: note = synthetic [barcode part1]
  source 1..16: mol_type = other DNA
gtcggtagaaccaggt

SEQ ID NO: 43222 - DNA, 16 bp, synthetic construct
  misc_feature 1..16: note = synthetic [barcode part1]
  source 1..16: mol_type = other DNA
accaacttctcaggag

SEQ ID NO: 43223 - DNA, 16 bp, synthetic construct
  misc_feature 1..16: note = synthetic [barcode part1]
  source 1..16: mol_type = other DNA
aactgtaggtcaaggt

SEQ ID NO: 43224 - DNA, 16 bp, synthetic construct
  misc_feature 1..16: note = synthetic [barcode part1]
  source 1..16: mol_type = other DNA
acctgagtctatcact

SEQ ID NO: 43225 - DNA, 16 bp, synthetic construct
  misc_feature 1..16: note = synthetic [barcode part1]
  source 1..16: mol_type = other DNA
tgtaggcacggattct

SEQ ID NO: 43226 - DNA, 16 bp, synthetic construct
  misc_feature 1..16: note = synthetic [barcode part1]
  source 1..16: mol_type = other DNA
ttgtggtggccttaag

SEQ ID NO: 43227 - DNA, 16 bp, synthetic construct
  misc_feature 1..16: note = synthetic [barcode part1]
  source 1..16: mol_type = other DNA
tcgactatagtcgacg

SEQ ID NO: 43228 - DNA, 16 bp, synthetic construct
  misc_feature 1..16: note = synthetic [barcode part1]
  source 1..16: mol_type = other DNA
tcaaccttcgtgtagt

SEQ ID NO: 43229 - DNA, 16 bp, synthetic construct
  misc_feature 1..16: note = synthetic [barcode part1]
  source 1..16: mol_type = other DNA
aacgaagaatccgtgt

SEQ ID NO: 43230 - DNA, 16 bp, synthetic construct
  misc_feature 1..16: note = synthetic [barcode part1]
  source 1..16: mol_type = other DNA
tcgtggaataagacgt

SEQ ID NO: 43231 - DNA, 16 bp, synthetic construct
  misc_feature 1..16: note = synthetic [barcode part1]
  source 1..16: mol_type = other DNA
ttgtggaataaggcac

SEQ ID NO: 43232 - DNA, 16 bp, synthetic construct
  misc_feature 1..16: note = synthetic [barcode part1]
  source 1..16: mol_type = other DNA
agatctctcggttgag

SEQ ID NO: 43233 - DNA, 16 bp, synthetic construct
  misc_feature 1..16: note = synthetic [barcode part1]
  source 1..16: mol_type = other DNA
aaggtggacctacgac

SEQ ID NO: 43234 - DNA, 16 bp, synthetic construct
  misc_feature 1..16: note = synthetic [barcode part1]
  source 1..16: mol_type = other DNA
aaccgcagaagtcggt

SEQ ID NO: 43235 - DNA, 16 bp, synthetic construct
  misc_feature 1..16: note = synthetic [barcode part1]
  source 1..16: mol_type = other DNA
tccacgtgttggactc

SEQ ID NO: 43236 - DNA, 16 bp, synthetic construct
  misc_feature 1..16: note = synthetic [barcode part1]
  source 1..16: mol_type = other DNA
cgtggcgaatactact

SEQ ID NO: 43237 - DNA, 16 bp, synthetic construct
  misc_feature 1..16: note = synthetic [barcode part1]
  source 1..16: mol_type = other DNA
tcaggtggaataacgt

SEQ ID NO: 43238 - DNA, 16 bp, synthetic construct
  misc_feature 1..16: note = synthetic [barcode part1]
  source 1..16: mol_type = other DNA
gtgcgtagactagtct

SEQ ID NO: 43239 - DNA, 16 bp, synthetic construct
  misc_feature 1..16: note = synthetic [barcode part1]
  source 1..16: mol_type = other DNA
aggcctaacaaccgtt

SEQ ID NO: 43240 - DNA, 16 bp, synthetic construct
  misc_feature 1..16: note = synthetic [barcode part1]
  source 1..16: mol_type = other DNA
tggtatacggcggagt

SEQ ID NO: 43241 - DNA, 16 bp, synthetic construct
  misc_feature 1..16: note = synthetic [barcode part1]
  source 1..16: mol_type = other DNA
tgtgatcgttgaagag

SEQ ID NO: 43242 - DNA, 16 bp, synthetic construct
  misc_feature 1..16: note = synthetic [barcode part1]
  source 1..16: mol_type = other DNA
tataggcctacttcac

SEQ ID NO: 43243 - DNA, 16 bp, synthetic construct
  misc_feature 1..16: note = synthetic [barcode part1]
  source 1..16: mol_type = other DNA
acgactgatcgacact

SEQ ID NO: 43244 - DNA, 16 bp, synthetic construct
  misc_feature 1..16: note = synthetic [barcode part1]
  source 1..16: mol_type = other DNA
actgtggtattcacct

SEQ ID NO: 43245 - DNA, 16 bp, synthetic construct
  misc_feature 1..16: note = synthetic [barcode part1]
  source 1..16: mol_type = other DNA
cacggtactatctgtt

SEQ ID NO: 43246 - DNA, 16 bp, synthetic construct
  misc_feature 1..16: note = synthetic [barcode part1]
  source 1..16: mol_type = other DNA
caacaggcactcgaag

SEQ ID NO: 43247 - DNA, 16 bp, synthetic construct
  misc_feature 1..16: note = synthetic [barcode part1]
  source 1..16: mol_type = other DNA
gtctaactacagagag

SEQ ID NO: 43248 - DNA, 16 bp, synthetic construct
  misc_feature 1..16: note = synthetic [barcode part1]
  source 1..16: mol_type = other DNA
aacgactgcgcagaac

SEQ ID NO: 43249 - DNA, 16 bp, synthetic construct
  misc_feature 1..16: note = synthetic [barcode part1]
  source 1..16: mol_type = other DNA
cacactagagaagttg

SEQ ID NO: 43250 - DNA, 16 bp, synthetic construct
  misc_feature 1..16: note = synthetic [barcode part1]
  source 1..16: mol_type = other DNA
gtagttctgtcagacg

SEQ ID NO: 43251 - DNA, 16 bp, synthetic construct
  misc_feature 1..16: note = synthetic [barcode part1]
  source 1..16: mol_type = other DNA
aattaggcctgacctg

SEQ ID NO: 43252 - DNA, 16 bp, synthetic construct
  misc_feature 1..16: note = synthetic [barcode part1]
  source 1..16: mol_type = other DNA
atacgacgcacgttac

SEQ ID NO: 43253 - DNA, 16 bp, synthetic construct
  misc_feature 1..16: note = synthetic [barcode part1]
  source 1..16: mol_type = other DNA
gtgttacttgttcacg

SEQ ID NO: 43254 - DNA, 16 bp, synthetic construct
  misc_feature 1..16: note = synthetic [barcode part1]
  source 1..16: mol_type = other DNA
aggcaggtattcacct

SEQ ID NO: 43255 - DNA, 16 bp, synthetic construct
  misc_feature 1..16: note = synthetic [barcode part1]
  source 1..16: mol_type = other DNA
caatcgtcgttccacg

SEQ ID NO: 43256 - DNA, 16 bp, synthetic construct
  misc_feature 1..16: note = synthetic [barcode part1]
  source 1..16: mol_type = other DNA
aaggcgtaaggatacg

SEQ ID NO: 43257 - DNA, 16 bp, synthetic construct
  misc_feature 1..16: note = synthetic [barcode part1]
  source 1..16: mol_type = other DNA
aactgtatctcggtct

SEQ ID NO: 43258 - DNA, 16 bp, synthetic construct
  misc_feature 1..16: note = synthetic [barcode part1]
  source 1..16: mol_type = other DNA
gagttggacactggtg

SEQ ID NO: 43259 - DNA, 16 bp, synthetic construct
  misc_feature 1..16: note = synthetic [barcode part1]
  source 1..16: mol_type = other DNA
tcaggtgacaagtcct

SEQ ID NO: 43260 - DNA, 16 bp, synthetic construct
  misc_feature 1..16: note = synthetic [barcode part1]
  source 1..16: mol_type = other DNA
tacactccacttccgt

SEQ ID NO: 43261 - DNA, 16 bp, synthetic construct
  misc_feature 1..16: note = synthetic [barcode part1]
  source 1..16: mol_type = other DNA
gcacagtgtgtcaact

SEQ ID NO: 43262 - DNA, 16 bp, synthetic construct
  misc_feature 1..16: note = synthetic [barcode part1]
  source 1..16: mol_type = other DNA
actcgattggtagtcg

SEQ ID NO: 43263 - DNA, 16 bp, synthetic construct
  misc_feature 1..16: note = synthetic [barcode part1]
  source 1..16: mol_type = other DNA
tgcagtgatctactct

SEQ ID NO: 43264 - DNA, 16 bp, synthetic construct
  misc_feature 1..16: note = synthetic [barcode part1]
  source 1..16: mol_type = other DNA
gaagtagacgagttct

SEQ ID NO: 43265 - DNA, 16 bp, synthetic construct
  misc_feature 1..16: note = synthetic [barcode part1]
  source 1..16: mol_type = other DNA
accggatcttacactt

SEQ ID NO: 43266 - DNA, 16 bp, synthetic construct
  misc_feature 1..16: note = synthetic [barcode part1]
  source 1..16: mol_type = other DNA
cctgtcgtaacaaggt

SEQ ID NO: 43267 - DNA, 16 bp, synthetic construct
  misc_feature 1..16: note = synthetic [barcode part1]
  source 1..16: mol_type = other DNA
cctctggaccgatact

SEQ ID NO: 43268 - DNA, 16 bp, synthetic construct
  misc_feature 1..16: note = synthetic [barcode part1]
  source 1..16: mol_type = other DNA
atcgcggagtggatac

SEQ ID NO: 43269 - DNA, 16 bp, synthetic construct
  misc_feature 1..16: note = synthetic [barcode part1]
  source 1..16: mol_type = other DNA
aatcggtactacgacc

SEQ ID NO: 43270 - DNA, 16 bp, synthetic construct
  misc_feature 1..16: note = synthetic [barcode part1]
  source 1..16: mol_type = other DNA
tcacttgccgcaacgt

SEQ ID NO: 43271 - DNA, 16 bp, synthetic construct
  misc_feature 1..16: note = synthetic [barcode part1]
  source 1..16: mol_type = other DNA
tgcacttccgtatcct

SEQ ID NO: 43272 - DNA, 16 bp, synthetic construct
  misc_feature 1..16: note = synthetic [barcode part1]
  source 1..16: mol_type = other DNA
tgcgtatcaattggcg

SEQ ID NO: 43273 - DNA, 16 bp, synthetic construct
  misc_feature 1..16: note = synthetic [barcode part1]
  source 1..16: mol_type = other DNA
gcctatcacttgttcc

SEQ ID NO: 43274 - DNA, 16 bp, synthetic construct
  misc_feature 1..16: note = synthetic [barcode part1]
  source 1..16: mol_type = other DNA
tgaagtccagttgacc

SEQ ID NO: 43275 - DNA, 16 bp, synthetic construct
  misc_feature 1..16: note = synthetic [barcode part1]
  source 1..16: mol_type = other DNA
gttattccaccactcc

SEQ ID NO: 43276 - DNA, 16 bp, synthetic construct
  misc_feature 1..16: note = synthetic [barcode part1]
  source 1..16: mol_type = other DNA
tgagagatcctctggt

SEQ ID NO: 43277 - DNA, 16 bp, synthetic construct
  misc_feature 1..16: note = synthetic [barcode part1]
  source 1..16: mol_type = other DNA
tcctacagtgcagagt

SEQ ID NO: 43278 - DNA, 16 bp, synthetic construct
  misc_feature 1..16: note = synthetic [barcode part1]
  source 1..16: mol_type = other DNA
gactggcagttagttc

SEQ ID NO: 43279 - DNA, 16 bp, synthetic construct
  misc_feature 1..16: note = synthetic [barcode part1]
  source 1..16: mol_type = other DNA
acctctgtaagaacgc

SEQ ID NO: 43280 - DNA, 16 bp, synthetic construct
  misc_feature 1..16: note = synthetic [barcode part1]
  source 1..16: mol_type = other DNA
gcggagaatacagagt

SEQ ID NO: 43281 - DNA, 16 bp, synthetic construct
  misc_feature 1..16: note = synthetic [barcode part1]
  source 1..16: mol_type = other DNA
tagtggtggagtacgc

SEQ ID NO: 43282 - DNA, 16 bp, synthetic construct
  misc_feature 1..16: note = synthetic [barcode part1]
  source 1..16: mol_type = other DNA
aagtcgttctgtactc

SEQ ID NO: 43283 - DNA, 16 bp, synthetic construct
  misc_feature 1..16: note = synthetic [barcode part1]
  source 1..16: mol_type = other DNA
caggtcagatcgttgt

SEQ ID NO: 43284 - DNA, 16 bp, synthetic construct
  misc_feature 1..16: note = synthetic [barcode part1]
  source 1..16: mol_type = other DNA
tatatccgttcaacgc

SEQ ID NO: 43285 - DNA, 16 bp, synthetic construct
  misc_feature 1..16: note = synthetic [barcode part1]
  source 1..16: mol_type = other DNA
tacaggtgaactcacc

SEQ ID NO: 43286 - DNA, 16 bp, synthetic construct
  misc_feature 1..16: note = synthetic [barcode part1]
  source 1..16: mol_type = other DNA
gtacggtaactctctt

SEQ ID NO: 43287 - DNA, 16 bp, synthetic construct
  misc_feature 1..16: note = synthetic [barcode part1]
  source 1..16: mol_type = other DNA
ttcggcgtggaagtag

SEQ ID NO: 43288 - DNA, 16 bp, synthetic construct
  misc_feature 1..16: note = synthetic [barcode part1]
  source 1..16: mol_type = other DNA
aggatctagacagatc

SEQ ID NO: 43289 - DNA, 16 bp, synthetic construct
  misc_feature 1..16: note = synthetic [barcode part1]
  source 1..16: mol_type = other DNA
atacggttacaaccgc

SEQ ID NO: 43290 - DNA, 16 bp, synthetic construct
  misc_feature 1..16: note = synthetic [barcode part1]
  source 1..16: mol_type = other DNA
gcacttcggtccaatc

SEQ ID NO: 43291 - DNA, 16 bp, synthetic construct
  misc_feature 1..16: note = synthetic [barcode part1]
  source 1..16: mol_type = other DNA
acgaacgacgacactg

SEQ ID NO: 43292 - DNA, 16 bp, synthetic construct
  misc_feature 1..16: note = synthetic [barcode part1]
  source 1..16: mol_type = other DNA
tcgtcgttagagtgac

SEQ ID NO: 43293 - DNA, 16 bp, synthetic construct
  misc_feature 1..16: note = synthetic [barcode part1]
  source 1..16: mol_type = other DNA
tatactccactgaacc

SEQ ID NO: 43294 - DNA, 16 bp, synthetic construct
  misc_feature 1..16: note = synthetic [barcode part1]
  source 1..16: mol_type = other DNA
tgcctcttgatagttg

SEQ ID NO: 43295 - DNA, 16 bp, synthetic construct
  misc_feature 1..16: note = synthetic [barcode part1]
  source 1..16: mol_type = other DNA
atctccacttgcacct

SEQ ID NO: 43296 - DNA, 16 bp, synthetic construct
  misc_feature 1..16: note = synthetic [barcode part1]
  source 1..16: mol_type = other DNA
aggagataggccaagt

SEQ ID NO: 43297 - DNA, 16 bp, synthetic construct
  misc_feature 1..16: note = synthetic [barcode part1]
  source 1..16: mol_type = other DNA
tggttcctgattgtac

SEQ ID NO: 43298 - DNA, 16 bp, synthetic construct
  misc_feature 1..16: note = synthetic [barcode part1]
  source 1..16: mol_type = other DNA
tcttcaggtactgact

SEQ ID NO: 43299 - DNA, 16 bp, synthetic construct
  misc_feature 1..16: note = synthetic [barcode part1]
  source 1..16: mol_type = other DNA
tcggtagtgccaagtt

SEQ ID NO: 43300 - DNA, 16 bp, synthetic construct
  misc_feature 1..16: note = synthetic [barcode part1]
  source 1..16: mol_type = other DNA
gcaccttagagtgtac

SEQ ID NO: 43301 - DNA, 16 bp, synthetic construct
  misc_feature 1..16: note = synthetic [barcode part1]
  source 1..16: mol_type = other DNA
atacctcgtcaccggt

SEQ ID NO: 43302 - DNA, 16 bp, synthetic construct
  misc_feature 1..16: note = synthetic [barcode part1]
  source 1..16: mol_type = other DNA
tgaaggaccgagaagt

SEQ ID NO: 43303 - DNA, 16 bp, synthetic construct
  misc_feature 1..16: note = synthetic [barcode part1]
  source 1..16: mol_type = other DNA
cacgttcgaattactc

SEQ ID NO: 43304 - DNA, 16 bp, synthetic construct
  misc_feature 1..16: note = synthetic [barcode part1]
  source 1..16: mol_type = other DNA
caccaagattcctact

SEQ ID NO: 43305 - DNA, 16 bp, synthetic construct
  misc_feature 1..16: note = synthetic [barcode part1]
  source 1..16: mol_type = other DNA
tcaggtataggacaac

SEQ ID NO: 43306 - DNA, 16 bp, synthetic construct
  misc_feature 1..16: note = synthetic [barcode part1]
  source 1..16: mol_type = other DNA
gtcgttcggacctatc

SEQ ID NO: 43307 - DNA, 16 bp, synthetic construct
  misc_feature 1..16: note = synthetic [barcode part1]
  source 1..16: mol_type = other DNA
tcagttgaccacagtg

SEQ ID NO: 43308 - DNA, 16 bp, synthetic construct
  misc_feature 1..16: note = synthetic [barcode part1]
  source 1..16: mol_type = other DNA
aaccagtgtgtacacc

SEQ ID NO: 43309 - DNA, 16 bp, synthetic construct
  misc_feature 1..16: note = synthetic [barcode part1]
  source 1..16: mol_type = other DNA
caggtcaattaggcct

SEQ ID NO: 43310 - DNA, 16 bp, synthetic construct
  misc_feature 1..16: note = synthetic [barcode part1]
  source 1..16: mol_type = other DNA
tcctgaagtggtgttg

SEQ ID NO: 43311 - DNA, 16 bp, synthetic construct
  misc_feature 1..16: note = synthetic [barcode part1]
  source 1..16: mol_type = other DNA
ttgatctaacgtgtcc

SEQ ID NO: 43312 - DNA, 16 bp, synthetic construct
  misc_feature 1..16: note = synthetic [barcode part1]
  source 1..16: mol_type = other DNA
tgccttccggtaactg

SEQ ID NO: 43313 - DNA, 16 bp, synthetic construct
  misc_feature 1..16: note = synthetic [barcode part1]
  source 1..16: mol_type = other DNA
cgtctaccgagattcc

SEQ ID NO: 43314 - DNA, 16 bp, synthetic construct
  misc_feature 1..16: note = synthetic [barcode part1]
  source 1..16: mol_type = other DNA
agttgacgttggttgc

SEQ ID NO: 43315 - DNA, 16 bp, synthetic construct
  misc_feature 1..16: note = synthetic [barcode part1]
  source 1..16: mol_type = other DNA
cgtgttagtcgtacag

SEQ ID NO: 43316 - DNA, 16 bp, synthetic construct
  misc_feature 1..16: note = synthetic [barcode part1]
  source 1..16: mol_type = other DNA
gtacctatctgccacg

SEQ ID NO: 43317 - DNA, 16 bp, synthetic construct
  misc_feature 1..16: note = synthetic [barcode part1]
  source 1..16: mol_type = other DNA
tattgtcacctcctgc

SEQ ID NO: 43318 - DNA, 16 bp, synthetic construct
  misc_feature 1..16: note = synthetic [barcode part1]
  source 1..16: mol_type = other DNA
gcggttaattgcgtgt

SEQ ID NO: 43319 - DNA, 16 bp, synthetic construct
  misc_feature 1..16: note = synthetic [barcode part1]
  source 1..16: mol_type = other DNA
cggccttcttcttagt

SEQ ID NO: 43320 - DNA, 16 bp, synthetic construct
  misc_feature 1..16: note = synthetic [barcode part1]
  source 1..16: mol_type = other DNA
atacggcctgagaggt

SEQ ID NO: 43321 - DNA, 16 bp, synthetic construct
  misc_feature 1..16: note = synthetic [barcode part1]
  source 1..16: mol_type = other DNA
tattggagacacgagt

SEQ ID NO: 43322 - DNA, 16 bp, synthetic construct
  misc_feature 1..16: note = synthetic [barcode part1]
  source 1..16: mol_type = other DNA
cggactatcggtaact

SEQ ID NO: 43323 - DNA, 16 bp, synthetic construct
  misc_feature 1..16: note = synthetic [barcode part1]
  source 1..16: mol_type = other DNA
gattctcttgacacgt

SEQ ID NO: 43324 - DNA, 16 bp, synthetic construct
  misc_feature 1..16: note = synthetic [barcode part1]
  source 1..16: mol_type = other DNA
gtgtgactcaggaggt

SEQ ID NO: 43325 - DNA, 16 bp, synthetic construct
  misc_feature 1..16: note = synthetic [barcode part1]
  source 1..16: mol_type = other DNA
tacttctctcctgcag

SEQ ID NO: 43326 - DNA, 16 bp, synthetic construct
  misc_feature 1..16: note = synthetic [barcode part1]
  source 1..16: mol_type = other DNA
cgaactagtgcggaac

SEQ ID NO: 43327 - DNA, 16 bp, synthetic construct
  misc_feature 1..16: note = synthetic [barcode part1]
  source 1..16: mol_type = other DNA
ttccaagttcactcag

SEQ ID NO: 43328 - DNA, 16 bp, synthetic construct
  misc_feature 1..16: note = synthetic [barcode part1]
  source 1..16: mol_type = other DNA
cgtgtctgatataggc

SEQ ID NO: 43329 - DNA, 16 bp, synthetic construct
  misc_feature 1..16: note = synthetic [barcode part1]
  source 1..16: mol_type = other DNA
tacgtctactcggcgt

SEQ ID NO: 43330 - DNA, 16 bp, synthetic construct
  misc_feature 1..16: note = synthetic [barcode part1]
  source 1..16: mol_type = other DNA
ttggatctatacctcg

SEQ ID NO: 43331 - DNA, 16 bp, synthetic construct
  misc_feature 1..16: note = synthetic [barcode part1]
  source 1..16: mol_type = other DNA
gcctatcttacaacac

SEQ ID NO: 43332 - DNA, 16 bp, synthetic construct
  misc_feature 1..16: note = synthetic [barcode part1]
  source 1..16: mol_type = other DNA
ttactctgtgcgattg

SEQ ID NO: 43333 - DNA, 16 bp, synthetic construct
  misc_feature 1..16: note = synthetic [barcode part1]
  source 1..16: mol_type = other DNA
agacctggaacgttct

SEQ ID NO: 43334 - DNA, 16 bp, synthetic construct
  misc_feature 1..16: note = synthetic [barcode part1]
  source 1..16: mol_type = other DNA
gattgcacctcgactc

SEQ ID NO: 43335 - DNA, 16 bp, synthetic construct
  misc_feature 1..16: note = synthetic [barcode part1]
  source 1..16: mol_type = other DNA
cgcgatcacacttaag

SEQ ID NO: 43336 - DNA, 16 bp, synthetic construct
  misc_feature 1..16: note = synthetic [barcode part1]
  source 1..16: mol_type = other DNA
gttagtcgtacgtacg

SEQ ID NO: 43337 - DNA, 16 bp, synthetic construct
  misc_feature 1..16: note = synthetic [barcode part1]
  source 1..16: mol_type = other DNA
gaacttgtcgttgttc

SEQ ID NO: 43338 - DNA, 16 bp, synthetic construct
  misc_feature 1..16: note = synthetic [barcode part1]
  source 1..16: mol_type = other DNA
gtcaggataacgcacg

SEQ ID NO: 43339 - DNA, 16 bp, synthetic construct
  misc_feature 1..16: note = synthetic [barcode part1]
  source 1..16: mol_type = other DNA
tatccgcgcgaataac

SEQ ID NO: 43340 - DNA, 16 bp, synthetic construct
  misc_feature 1..16: note = synthetic [barcode part1]
  source 1..16: mol_type = other DNA
cctgaccaaggttagt

SEQ ID NO: 43341 - DNA, 16 bp, synthetic construct
  misc_feature 1..16: note = synthetic [barcode part1]
  source 1..16: mol_type = other DNA
tcgagtaaggcaacgc

SEQ ID NO: 43342 - DNA, 16 bp, synthetic construct
  misc_feature 1..16: note = synthetic [barcode part1]
  source 1..16: mol_type = other DNA
gcgagtacgagatctg

SEQ ID NO: 43343 - DNA, 16 bp, synthetic construct
  misc_feature 1..16: note = synthetic [barcode part1]
  source 1..16: mol_type = other DNA
agaggtacttaacggt

SEQ ID NO: 43344 - DNA, 16 bp, synthetic construct
  misc_feature 1..16: note = synthetic [barcode part1]
  source 1..16: mol_type = other DNA
cgtaacgtggaatcct

SEQ ID NO: 43345 - DNA, 16 bp, synthetic construct
  misc_feature 1..16: note = synthetic [barcode part1]
  source 1..16: mol_type = other DNA
ccgtagaggtggtagt

SEQ ID NO: 43346 - DNA, 16 bp, synthetic construct
  misc_feature 1..16: note = synthetic [barcode part1]
  source 1..16: mol_type = other DNA
tgtacaccgcgtatag

SEQ ID NO: 43347 - DNA, 16 bp, synthetic construct
  misc_feature 1..16: note = synthetic [barcode part1]
  source 1..16: mol_type = other DNA
cactggcgagagattg

SEQ ID NO: 43348 - DNA, 16 bp, synthetic construct
  misc_feature 1..16: note = synthetic [barcode part1]
  source 1..16: mol_type = other DNA
ttgataacgaaccgcc

SEQ ID NO: 43349 - DNA, 16 bp, synthetic construct
  misc_feature 1..16: note = synthetic [barcode part1]
  source 1..16: mol_type = other DNA
gtccggttgtaggaag

SEQ ID NO: 43350 - DNA, 16 bp, synthetic construct
  misc_feature 1..16: note = synthetic [barcode part1]
  source 1..16: mol_type = other DNA
acactctgcgtgaagt

SEQ ID NO: 43351 - DNA, 16 bp, synthetic construct
  misc_feature 1..16: note = synthetic [barcode part1]
  source 1..16: mol_type = other DNA
caaccgaaggatcctt

SEQ ID NO: 43352 - DNA, 16 bp, synthetic construct
  misc_feature 1..16: note = synthetic [barcode part1]
  source 1..16: mol_type = other DNA
agttacgatcgacacc

SEQ ID NO: 43353 - DNA, 16 bp, synthetic construct
  misc_feature 1..16: note = synthetic [barcode part1]
  source 1..16: mol_type = other DNA
tgtacctcggattact

SEQ ID NO: 43354 - DNA, 16 bp, synthetic construct
  misc_feature 1..16: note = synthetic [barcode part1]
  source 1..16: mol_type = other DNA
atcgtgattacggtgc

SEQ ID NO: 43355 - DNA, 16 bp, synthetic construct
  misc_feature 1..16: note = synthetic [barcode part1]
  source 1..16: mol_type = other DNA
agagttctcgtgacac

SEQ ID NO: 43356 - DNA, 16 bp, synthetic construct
  misc_feature 1..16: note = synthetic [barcode part1]
  source 1..16: mol_type = other DNA
taggtacaccacctcc

SEQ ID NO: 43357 - DNA, 16 bp, synthetic construct
  misc_feature 1..16: note = synthetic [barcode part1]
  source 1..16: mol_type = other DNA
gttctcagtggagact

SEQ ID NO: 43358 - DNA, 16 bp, synthetic construct
  misc_feature 1..16: note = synthetic [barcode part1]
  source 1..16: mol_type = other DNA
tctgtgcctaatagtc

SEQ ID NO: 43359 - DNA, 16 bp, synthetic construct
  misc_feature 1..16: note = synthetic [barcode part1]
  source 1..16: mol_type = other DNA
cactggccaatatacg

SEQ ID NO: 43360 - DNA, 16 bp, synthetic construct
  misc_feature 1..16: note = synthetic [barcode part1]
  source 1..16: mol_type = other DNA
tgcagacggtaggact

SEQ ID NO: 43361 - DNA, 16 bp, synthetic construct
  misc_feature 1..16: note = synthetic [barcode part1]
  source 1..16: mol_type = other DNA
aacagagttccaccgt

SEQ ID NO: 43362 - DNA, 16 bp, synthetic construct
  misc_feature 1..16: note = synthetic [barcode part1]
  source 1..16: mol_type = other DNA
gcggacctcctcaatt

SEQ ID NO: 43363 - DNA, 16 bp, synthetic construct
  misc_feature 1..16: note = synthetic [barcode part1]
  source 1..16: mol_type = other DNA
tgaggttatcggtcac

SEQ ID NO: 43364 - DNA, 16 bp, synthetic construct
  misc_feature 1..16: note = synthetic [barcode part1]
  source 1..16: mol_type = other DNA
ccttggccttctaact

SEQ ID NO: 43365 - DNA, 16 bp, synthetic construct
  misc_feature 1..16: note = synthetic [barcode part1]
  source 1..16: mol_type = other DNA
tcaggcacttgccact

SEQ ID NO: 43366 - DNA, 16 bp, synthetic construct
  misc_feature 1..16: note = synthetic [barcode part1]
  source 1..16: mol_type = other DNA
ttcagtgtggaggcag

SEQ ID NO: 43367 - DNA, 16 bp, synthetic construct
  misc_feature 1..16: note = synthetic [barcode part1]
  source 1..16: mol_type = other DNA
gactgtgtcagttctt

SEQ ID NO: 43368 - DNA, 16 bp, synthetic construct
  misc_feature 1..16: note = synthetic [barcode part1]
  source 1..16: mol_type = other DNA
aggtacttactgttcc

SEQ ID NO: 43369 - DNA, 16 bp, synthetic construct
  misc_feature 1..16: note = synthetic [barcode part1]
  source 1..16: mol_type = other DNA
atcacagtgttcactc

SEQ ID NO: 43370 - DNA, 16 bp, synthetic construct
  misc_feature 1..16: note = synthetic [barcode part1]
  source 1..16: mol_type = other DNA
agtacacgtcagtacc

SEQ ID NO: 43371 - DNA, 16 bp, synthetic construct
  misc_feature 1..16: note = synthetic [barcode part1]
  source 1..16: mol_type = other DNA
acttcgatcgaagtcg

SEQ ID NO: 43372 - DNA, 16 bp, synthetic construct
  misc_feature 1..16: note = synthetic [barcode part1]
  source 1..16: mol_type = other DNA
aacagttccgagtcgt

SEQ ID NO: 43373 - DNA, 16 bp, synthetic construct
  misc_feature 1..16: note = synthetic [barcode part1]
  source 1..16: mol_type = other DNA
tatcttcgcaccttcg

SEQ ID NO: 43374 - DNA, 16 bp, synthetic construct
  misc_feature 1..16: note = synthetic [barcode part1]
  source 1..16: mol_type = other DNA
gcgaagactaggtcac

SEQ ID NO: 43375 - DNA, 16 bp, synthetic construct
  misc_feature 1..16: note = synthetic [barcode part1]
  source 1..16: mol_type = other DNA
gtaatcgtcagagaac

SEQ ID NO: 43376 - DNA, 16 bp, synthetic construct
  misc_feature 1..16: note = synthetic [barcode part1]
  source 1..16: mol_type = other DNA
atccgatagtcgtcag

SEQ ID NO: 43377 - DNA, 16 bp, synthetic construct
  misc_feature 1..16: note = synthetic [barcode part1]
  source 1..16: mol_type = other DNA
acgtacaagttccgac

SEQ ID NO: 43378 - DNA, 16 bp, synthetic construct
  misc_feature 1..16: note = synthetic [barcode part1]
  source 1..16: mol_type = other DNA
cagtctattcacgttg

SEQ ID NO: 43379 - DNA, 16 bp, synthetic construct
  misc_feature 1..16: note = synthetic [barcode part1]
  source 1..16: mol_type = other DNA
ccgaatatccgagtac

SEQ ID NO: 43380 - DNA, 16 bp, synthetic construct
  misc_feature 1..16: note = synthetic [barcode part1]
  source 1..16: mol_type = other DNA
agtgattggaacgtgt

SEQ ID NO: 43381 - DNA, 16 bp, synthetic construct
  misc_feature 1..16: note = synthetic [barcode part1]
  source 1..16: mol_type = other DNA
gaccgaattgtgcgag

SEQ ID NO: 43382 - DNA, 16 bp, synthetic construct
  misc_feature 1..16: note = synthetic [barcode part1]
  source 1..16: mol_type = other DNA
ccaggtaatcttgtct

SEQ ID NO: 43383 - DNA, 16 bp, synthetic construct
  misc_feature 1..16: note = synthetic [barcode part1]
  source 1..16: mol_type = other DNA
gcgccagattgagagt

SEQ ID NO: 43384 - DNA, 16 bp, synthetic construct
  misc_feature 1..16: note = synthetic [barcode part1]
  source 1..16: mol_type = other DNA
tgccacttagactcgc

SEQ ID NO: 43385 - DNA, 16 bp, synthetic construct
  misc_feature 1..16: note = synthetic [barcode part1]
  source 1..16: mol_type = other DNA
gagacgatccgaacac

SEQ ID NO: 43386 - DNA, 16 bp, synthetic construct
  misc_feature 1..16: note = synthetic [barcode part1]
  source 1..16: mol_type = other DNA
cgacgatctccacact

SEQ ID NO: 43387 - DNA, 16 bp, synthetic construct
  misc_feature 1..16: note = synthetic [barcode part1]
  source 1..16: mol_type = other DNA
aaggattatcagtgcg

SEQ ID NO: 43388 - DNA, 16 bp, synthetic construct
  misc_feature 1..16: note = synthetic [barcode part1]
  source 1..16: mol_type = other DNA
gatcacgtaaccgtgt

SEQ ID NO: 43389 - DNA, 16 bp, synthetic construct
  misc_feature 1..16: note = synthetic [barcode part1]
  source 1..16: mol_type = other DNA
gactagtgattggtcc

SEQ ID NO: 43390 - DNA, 16 bp, synthetic construct
  misc_feature 1..16: note = synthetic [barcode part1]
  source 1..16: mol_type = other DNA
gattcgactagaccac

SEQ ID NO: 43391 - DNA, 16 bp, synthetic construct
  misc_feature 1..16: note = synthetic [barcode part1]
  source 1..16: mol_type = other DNA
agaaccgtacaagttg

SEQ ID NO: 43392 - DNA, 16 bp, synthetic construct
  misc_feature 1..16: note = synthetic [barcode part1]
  source 1..16: mol_type = other DNA
aatagtgtcgcggacg

SEQ ID NO: 43393 - DNA, 16 bp, synthetic construct
  misc_feature 1..16: note = synthetic [barcode part1]
  source 1..16: mol_type = other DNA
gacaatccggtgattc

SEQ ID NO: 43394 - DNA, 16 bp, synthetic construct
  misc_feature 1..16: note = synthetic [barcode part1]
  source 1..16: mol_type = other DNA
cagtcaggactgactt

SEQ ID NO: 43395 - DNA, 16 bp, synthetic construct
  misc_feature 1..16: note = synthetic [barcode part1]
  source 1..16: mol_type = other DNA
tatccgaacgcaactg

SEQ ID NO: 43396 - DNA, 16 bp, synthetic construct
  misc_feature 1..16: note = synthetic [barcode part1]
  source 1..16: mol_type = other DNA
cctcgatagtccacac

SEQ ID NO: 43397 - DNA, 16 bp, synthetic construct
  misc_feature 1..16: note = synthetic [barcode part1]
  source 1..16: mol_type = other DNA
gttctgacgtaacacg

SEQ ID NO: 43398 - DNA, 16 bp, synthetic construct
  misc_feature 1..16: note = synthetic [barcode part1]
  source 1..16: mol_type = other DNA
tatcgcctgtcaatac

SEQ ID NO: 43399 - DNA, 16 bp, synthetic construct
  misc_feature 1..16: note = synthetic [barcode part1]
  source 1..16: mol_type = other DNA
tagagaacacagttgc

SEQ ID NO: 43400 - DNA, 16 bp, synthetic construct
  misc_feature 1..16: note = synthetic [barcode part1]
  source 1..16: mol_type = other DNA
ccttacggtacttctc

SEQ ID NO: 43401 - DNA, 16 bp, synthetic construct
  misc_feature 1..16: note = synthetic [barcode part1]
  source 1..16: mol_type = other DNA
gcacaacctgagaggt

SEQ ID NO: 43402 - DNA, 16 bp, synthetic construct
  misc_feature 1..16: note = synthetic [barcode part1]
  source 1..16: mol_type = other DNA
tgaagtcgatctcgac

SEQ ID NO: 43403 - DNA, 16 bp, synthetic construct
  misc_feature 1..16: note = synthetic [barcode part1]
  source 1..16: mol_type = other DNA
actagtgagaccggac

SEQ ID NO: 43404 - DNA, 16 bp, synthetic construct
  misc_feature 1..16: note = synthetic [barcode part1]
  source 1..16: mol_type = other DNA
atcaccactccgtgtg

SEQ ID NO: 43405 - DNA, 16 bp, synthetic construct
  misc_feature 1..16: note = synthetic [barcode part1]
  source 1..16: mol_type = other DNA
cgaaggaactatacac

SEQ ID NO: 43406 - DNA, 16 bp, synthetic construct
  misc_feature 1..16: note = synthetic [barcode part1]
  source 1..16: mol_type = other DNA
gttatcgaagaacacg

SEQ ID NO: 43407 - DNA, 16 bp, synthetic construct
  misc_feature 1..16: note = synthetic [barcode part1]
  source 1..16: mol_type = other DNA
cgaggattggactacg

SEQ ID NO: 43408 - DNA, 16 bp, synthetic construct
  misc_feature 1..16: note = synthetic [barcode part1]
  source 1..16: mol_type = other DNA
agagtctggcaagtgc

SEQ ID NO: 43409 - DNA, 16 bp, synthetic construct
  misc_feature 1..16: note = synthetic [barcode part1]
  source 1..16: mol_type = other DNA
gattcagtcgacagtc

SEQ ID NO: 43410 - DNA, 16 bp, synthetic construct
  misc_feature 1..16: note = synthetic [barcode part1]
  source 1..16: mol_type = other DNA
gttatctcaagtgtcc

SEQ ID NO: 43411 - DNA, 16 bp, synthetic construct
  misc_feature 1..16: note = synthetic [barcode part1]
  source 1..16: mol_type = other DNA
actacgaccgtaacac

SEQ ID NO: 43412 - DNA, 16 bp, synthetic construct
  misc_feature 1..16: note = synthetic [barcode part1]
  source 1..16: mol_type = other DNA
caaggacacaacttag

SEQ ID NO: 43413 - DNA, 16 bp, synthetic construct
  misc_feature 1..16: note = synthetic [barcode part1]
  source 1..16: mol_type = other DNA
gacaaccaccagactt

SEQ ID NO: 43414 - DNA, 16 bp, synthetic construct
  misc_feature 1..16: note = synthetic [barcode part1]
  source 1..16: mol_type = other DNA
tgcctgttcgtctatc

SEQ ID NO: 43415 - DNA, 16 bp, synthetic construct
  misc_feature 1..16: note = synthetic [barcode part1]
  source 1..16: mol_type = other DNA
actggccagaatcttg

SEQ ID NO: 43416 - DNA, 16 bp, synthetic construct
  misc_feature 1..16: note = synthetic [barcode part1]
  source 1..16: mol_type = other DNA
ttgagtgtctaccgcc

SEQ ID NO: 43417 - DNA, 16 bp, synthetic construct
  misc_feature 1..16: note = synthetic [barcode part1]
  source 1..16: mol_type = other DNA
gtcggtgatagttacc

SEQ ID NO: 43418 - DNA, 16 bp, synthetic construct
  misc_feature 1..16: note = synthetic [barcode part1]
  source 1..16: mol_type = other DNA
gcgtacgtatatacgc

SEQ ID NO: 43419 - DNA, 16 bp, synthetic construct
  misc_feature 1..16: note = synthetic [barcode part1]
  source 1..16: mol_type = other DNA
ttaattctcgccgcct

SEQ ID NO: 43420 - DNA, 16 bp, synthetic construct
  misc_feature 1..16: note = synthetic [barcode part1]
  source 1..16: mol_type = other DNA
agtcctatagacagag

SEQ ID NO: 43421 - DNA, 16 bp, synthetic construct
  misc_feature 1..16: note = synthetic [barcode part1]
  source 1..16: mol_type = other DNA
tcagacaccactctgc

SEQ ID NO: 43422 - DNA, 16 bp, synthetic construct
  misc_feature 1..16: note = synthetic [barcode part1]
  source 1..16: mol_type = other DNA
gtgaccgttccagttc

SEQ ID NO: 43423 - DNA, 16 bp, synthetic construct
  misc_feature 1..16: note = synthetic [barcode part1]
  source 1..16: mol_type = other DNA
aagaagttgtcagtgc

SEQ ID NO: 43424 - DNA, 16 bp, synthetic construct
  misc_feature 1..16: note = synthetic [barcode part1]
  source 1..16: mol_type = other DNA
cggaattaattccggc

SEQ ID NO: 43425 - DNA, 16 bp, synthetic construct
  misc_feature 1..16: note = synthetic [barcode part1]
  source 1..16: mol_type = other DNA
tgttctataggacggc

SEQ ID NO: 43426 - DNA, 16 bp, synthetic construct
  misc_feature 1..16: note = synthetic [barcode part1]
  source 1..16: mol_type = other DNA
agtaacactgtagacg

SEQ ID NO: 43427 - DNA, 16 bp, synthetic construct
  misc_feature 1..16: note = synthetic [barcode part1]
  source 1..16: mol_type = other DNA
aggacgagagttcacc

SEQ ID NO: 43428 - DNA, 16 bp, synthetic construct
  misc_feature 1..16: note = synthetic [barcode part1]
  source 1..16: mol_type = other DNA
tcacaacgtaccacag

SEQ ID NO: 43429 - DNA, 16 bp, synthetic construct
  misc_feature 1..16: note = synthetic [barcode part1]
  source 1..16: mol_type = other DNA
tgccaattagtcgcag

SEQ ID NO: 43430 - DNA, 16 bp, synthetic construct
  misc_feature 1..16: note = synthetic [barcode part1]
  source 1..16: mol_type = other DNA
gtctcaaccagagttg

SEQ ID NO: 43431 - DNA, 16 bp, synthetic construct
  misc_feature 1..16: note = synthetic [barcode part1]
  source 1..16: mol_type = other DNA
tagatcgttctcgcgc

SEQ ID NO: 43432 - DNA, 16 bp, synthetic construct
  misc_feature 1..16: note = synthetic [barcode part1]
  source 1..16: mol_type = other DNA
tgatagtggtccgact

SEQ ID NO: 43433 - DNA, 16 bp, synthetic construct
  misc_feature 1..16: note = synthetic [barcode part1]
  source 1..16: mol_type = other DNA
cgtagtaggtgaacgc

SEQ ID NO: 43434 - DNA, 16 bp, synthetic construct
  misc_feature 1..16: note = synthetic [barcode part1]
  source 1..16: mol_type = other DNA
ttcttcacgtcagtag

SEQ ID NO: 43435 - DNA, 16 bp, synthetic construct
  misc_feature 1..16: note = synthetic [barcode part1]
  source 1..16: mol_type = other DNA
gatacacagtcagaac

SEQ ID NO: 43436 - DNA, 16 bp, synthetic construct
  misc_feature 1..16: note = synthetic [barcode part1]
  source 1..16: mol_type = other DNA
ttcgacctagtatacc

SEQ ID NO: 43437 - DNA, 16 bp, synthetic construct
  misc_feature 1..16: note = synthetic [barcode part1]
  source 1..16: mol_type = other DNA
agtatatcgcgtgacc

SEQ ID NO: 43438 - DNA, 16 bp, synthetic construct
  misc_feature 1..16: note = synthetic [barcode part1]
  source 1..16: mol_type = other DNA
aactgtactcttcggt

SEQ ID NO: 43439 - DNA, 16 bp, synthetic construct
  misc_feature 1..16: note = synthetic [barcode part1]
  source 1..16: mol_type = other DNA
tcgagactctatctgt

SEQ ID NO: 43440 - DNA, 16 bp, synthetic construct
  misc_feature 1..16: note = synthetic [barcode part1]
  source 1..16: mol_type = other DNA
cgaaccacagtgactt

SEQ ID NO: 43441 - DNA, 16 bp, synthetic construct
  misc_feature 1..16: note = synthetic [barcode part1]
  source 1..16: mol_type = other DNA
tcacactgacgattct

SEQ ID NO: 43442 - DNA, 16 bp, synthetic construct
  misc_feature 1..16: note = synthetic [barcode part1]
  source 1..16: mol_type = other DNA
cgttcaagttacttcg

SEQ ID NO: 43443 - DNA, 16 bp, synthetic construct
  misc_feature 1..16: note = synthetic [barcode part1]
  source 1..16: mol_type = other DNA
cagatcacttcgcacc

SEQ ID NO: 43444 - DNA, 16 bp, synthetic construct
  misc_feature 1..16: note = synthetic [barcode part1]
  source 1..16: mol_type = other DNA
acaggttcacagactc

SEQ ID NO: 43445 - DNA, 16 bp, synthetic construct
  misc_feature 1..16: note = synthetic [barcode part1]
  source 1..16: mol_type = other DNA
ccgtcttacgtggttg

SEQ ID NO: 43446 - DNA, 16 bp, synthetic construct
  misc_feature 1..16: note = synthetic [barcode part1]
  source 1..16: mol_type = other DNA
cacttcaagactcgtt

SEQ ID NO: 43447 - DNA, 16 bp, synthetic construct
  misc_feature 1..16: note = synthetic [barcode part1]
  source 1..16: mol_type = other DNA
tacacaccaacaccag

SEQ ID NO: 43448 - DNA, 16 bp, synthetic construct
  misc_feature 1..16: note = synthetic [barcode part1]
  source 1..16: mol_type = other DNA
actgtactcttaccag

SEQ ID NO: 43449 - DNA, 16 bp, synthetic construct
  misc_feature 1..16: note = synthetic [barcode part1]
  source 1..16: mol_type = other DNA
cacttgtgtgagtggt

SEQ ID NO: 43450 - DNA, 16 bp, synthetic construct
  misc_feature 1..16: note = synthetic [barcode part1]
  source 1..16: mol_type = other DNA
ataaccgactagtgcc

SEQ ID NO: 43451 - DNA, 16 bp, synthetic construct
  misc_feature 1..16: note = synthetic [barcode part1]
  source 1..16: mol_type = other DNA
gccgtcaagaagtacg

SEQ ID NO: 43452 - DNA, 16 bp, synthetic construct
  misc_feature 1..16: note = synthetic [barcode part1]
  source 1..16: mol_type = other DNA
tgttgcctccgtagac

SEQ ID NO: 43453 - DNA, 16 bp, synthetic construct
  misc_feature 1..16: note = synthetic [barcode part1]
  source 1..16: mol_type = other DNA
acctgcgactaggaag

SEQ ID NO: 43454 - DNA, 16 bp, synthetic construct
  misc_feature 1..16: note = synthetic [barcode part1]
  source 1..16: mol_type = other DNA
tccaacctaatacgtc

SEQ ID NO: 43455 - DNA, 16 bp, synthetic construct
  misc_feature 1..16: note = synthetic [barcode part1]
  source 1..16: mol_type = other DNA
gtccaatcgacaactg

SEQ ID NO: 43456 - DNA, 16 bp, synthetic construct
  misc_feature 1..16: note = synthetic [barcode part1]
  source 1..16: mol_type = other DNA
acgttctgttgccggt

SEQ ID NO: 43457 - DNA, 16 bp, synthetic construct
  misc_feature 1..16: note = synthetic [barcode part1]
  source 1..16: mol_type = other DNA
atcggtaggattagac

SEQ ID NO: 43458 - DNA, 16 bp, synthetic construct
  misc_feature 1..16: note = synthetic [barcode part1]
  source 1..16: mol_type = other DNA
tagttggaccacaacc

SEQ ID NO: 43459 - DNA, 16 bp, synthetic construct
  misc_feature 1..16: note = synthetic [barcode part1]
  source 1..16: mol_type = other DNA
aaggccttgaggtctt

SEQ ID NO: 43460 - DNA, 16 bp, synthetic construct
  misc_feature 1..16: note = synthetic [barcode part1]
  source 1..16: mol_type = other DNA
gtccacgtcctatcag

SEQ ID NO: 43461 - DNA, 16 bp, synthetic construct
  misc_feature 1..16: note = synthetic [barcode part1]
  source 1..16: mol_type = other DNA
aatcacctgagtcgtg

SEQ ID NO: 43462 - DNA, 16 bp, synthetic construct
  misc_feature 1..16: note = synthetic [barcode part1]
  source 1..16: mol_type = other DNA
gtgtgatcaatcgtgc

SEQ ID NO: 43463 - DNA, 16 bp, synthetic construct
  misc_feature 1..16: note = synthetic [barcode part1]
  source 1..16: mol_type = other DNA
ttctcgcctattagag

SEQ ID NO: 43464 - DNA, 16 bp, synthetic construct
  misc_feature 1..16: note = synthetic [barcode part1]
  source 1..16: mol_type = other DNA
acaacgtacacgtgtc

SEQ ID NO: 43465 - DNA, 16 bp, synthetic construct
  misc_feature 1..16: note = synthetic [barcode part1]
  source 1..16: mol_type = other DNA
tactacttggaggacc

SEQ ID NO: 43466 - DNA, 16 bp, synthetic construct
  misc_feature 1..16: note = synthetic [barcode part1]
  source 1..16: mol_type = other DNA
tgcacttctcgcactt

SEQ ID NO: 43467 - DNA, 16 bp, synthetic construct
  misc_feature 1..16: note = synthetic [barcode part1]
  source 1..16: mol_type = other DNA
tctcgacttgaatacc

SEQ ID NO: 43468 - DNA, 16 bp, synthetic construct
  misc_feature 1..16: note = synthetic [barcode part1]
  source 1..16: mol_type = other DNA
gactgcagtcaacgtt

SEQ ID NO: 43469 - DNA, 16 bp, synthetic construct
  misc_feature 1..16: note = synthetic [barcode part1]
  source 1..16: mol_type = other DNA
tcgaacagaatccgtc

SEQ ID NO: 43470 - DNA, 16 bp, synthetic construct
  misc_feature 1..16: note = synthetic [barcode part1]
  source 1..16: mol_type = other DNA
gttgcggataacgttc

SEQ ID NO: 43471 - DNA, 16 bp, synthetic construct
  misc_feature 1..16: note = synthetic [barcode part1]
  source 1..16: mol_type = other DNA
acacctatcgtcttag

SEQ ID NO: 43472 - DNA, 16 bp, synthetic construct
  misc_feature 1..16: note = synthetic [barcode part1]
  source 1..16: mol_type = other DNA
accactctcacttcac

SEQ ID NO: 43473 - DNA, 16 bp, synthetic construct
  misc_feature 1..16: note = synthetic [barcode part1]
  source 1..16: mol_type = other DNA
gactactacttggcag

SEQ ID NO: 43474 - DNA, 16 bp, synthetic construct
  misc_feature 1..16: note = synthetic [barcode part1]
  source 1..16: mol_type = other DNA
gttcgccgtcttaggt

SEQ ID NO: 43475 - DNA, 16 bp, synthetic construct
  misc_feature 1..16: note = synthetic [barcode part1]
  source 1..16: mol_type = other DNA
tgacgcgttggtatac

SEQ ID NO: 43476 - DNA, 16 bp, synthetic construct
  misc_feature 1..16: note = synthetic [barcode part1]
  source 1..16: mol_type = other DNA
aattctataggcggag

SEQ ID NO: 43477 - DNA, 16 bp, synthetic construct
  misc_feature 1..16: note = synthetic [barcode part1]
  source 1..16: mol_type = other DNA
atcgcaacagacggac

SEQ ID NO: 43478 - DNA, 16 bp, synthetic construct
  misc_feature 1..16: note = synthetic [barcode part1]
  source 1..16: mol_type = other DNA
cacgcgtgattaactg

SEQ ID NO: 43479 - DNA, 16 bp, synthetic construct
  misc_feature 1..16: note = synthetic [barcode part1]
  source 1..16: mol_type = other DNA
ttgactcgttcggatt

SEQ ID NO: 43480 - DNA, 16 bp, synthetic construct
  misc_feature 1..16: note = synthetic [barcode part1]
  source 1..16: mol_type = other DNA
cacggcgcagataagt

SEQ ID NO: 43481 - DNA, 16 bp, synthetic construct
  misc_feature 1..16: note = synthetic [barcode part1]
  source 1..16: mol_type = other DNA
gttagtcgacttcgag

SEQ ID NO: 43482 - DNA, 16 bp, synthetic construct
  misc_feature 1..16: note = synthetic [barcode part1]
  source 1..16: mol_type = other DNA
acaagtcgttgaagac

SEQ ID NO: 43483 - DNA, 16 bp, synthetic construct
  misc_feature 1..16: note = synthetic [barcode part1]
  source 1..16: mol_type = other DNA
ttgcaactggtaccag

SEQ ID NO: 43484 - DNA, 16 bp, synthetic construct
  misc_feature 1..16: note = synthetic [barcode part1]
  source 1..16: mol_type = other DNA
tatcggacaggaacgc

SEQ ID NO: 43485 - DNA, 16 bp, synthetic construct
  misc_feature 1..16: note = synthetic [barcode part1]
  source 1..16: mol_type = other DNA
aggatatcctcgtgtg

SEQ ID NO: 43486 - DNA, 16 bp, synthetic construct
  misc_feature 1..16: note = synthetic [barcode part1]
  source 1..16: mol_type = other DNA
gcctctgcctagtagt

SEQ ID NO: 43487 - DNA, 16 bp, synthetic construct
  misc_feature 1..16: note = synthetic [barcode part1]
  source 1..16: mol_type = other DNA
ttagagttggacgagt

SEQ ID NO: 43488 - DNA, 16 bp, synthetic construct
  misc_feature 1..16: note = synthetic [barcode part1]
  source 1..16: mol_type = other DNA
gcgcggagtaacttag

SEQ ID NO: 43489 - DNA, 16 bp, synthetic construct
  misc_feature 1..16: note = synthetic [barcode part1]
  source 1..16: mol_type = other DNA
aactgcagttgtgtgc

SEQ ID NO: 43490 - DNA, 16 bp, synthetic construct
  misc_feature 1..16: note = synthetic [barcode part1]
  source 1..16: mol_type = other DNA
ttgtggtgtgtacgtg

SEQ ID NO: 43491 - DNA, 16 bp, synthetic construct
  misc_feature 1..16: note = synthetic [barcode part1]
  source 1..16: mol_type = other DNA
agacctgcctgactct

SEQ ID NO: 43492 - DNA, 16 bp, synthetic construct
  misc_feature 1..16: note = synthetic [barcode part1]
  source 1..16: mol_type = other DNA
attacctcacttggac

SEQ ID NO: 43493 - DNA, 16 bp, synthetic construct
  misc_feature 1..16: note = synthetic [barcode part1]
  source 1..16: mol_type = other DNA
aacggaggacttgtgc

SEQ ID NO: 43494 - DNA, 16 bp, synthetic construct
  misc_feature 1..16: note = synthetic [barcode part1]
  source 1..16: mol_type = other DNA
atataggagactgtcg

SEQ ID NO: 43495 - DNA, 16 bp, synthetic construct
  misc_feature 1..16: note = synthetic [barcode part1]
  source 1..16: mol_type = other DNA
gtgcaacgtactgact

SEQ ID NO: 43496 - DNA, 16 bp, synthetic construct
  misc_feature 1..16: note = synthetic [barcode part1]
  source 1..16: mol_type = other DNA
tggagtcaacctcagt

SEQ ID NO: 43497 - DNA, 16 bp, synthetic construct
  misc_feature 1..16: note = synthetic [barcode part1]
  source 1..16: mol_type = other DNA
tagaaccaacctcgac

SEQ ID NO: 43498 - DNA, 16 bp, synthetic construct
  misc_feature 1..16: note = synthetic [barcode part1]
  source 1..16: mol_type = other DNA
gcgatactctcctctt

SEQ ID NO: 43499 - DNA, 16 bp, synthetic construct
  misc_feature 1..16: note = synthetic [barcode part1]
  source 1..16: mol_type = other DNA
ttagtataccggtgcg

SEQ ID NO: 43500 - DNA, 16 bp, synthetic construct
  misc_feature 1..16: note = synthetic [barcode part1]
  source 1..16: mol_type = other DNA
gcgtgcaattaactgc

SEQ ID NO: 43501 - DNA, 16 bp, synthetic construct
  misc_feature 1..16: note = synthetic [barcode part1]
  source 1..16: mol_type = other DNA
tacgcctatctagtac

SEQ ID NO: 43502 - DNA, 16 bp, synthetic construct
  misc_feature 1..16: note = synthetic [barcode part1]
  source 1..16: mol_type = other DNA
acgtccttgatccgac

SEQ ID NO: 43503 - DNA, 16 bp, synthetic construct
  misc_feature 1..16: note = synthetic [barcode part1]
  source 1..16: mol_type = other DNA
actcttggcgacctgt

SEQ ID NO: 43504 - DNA, 16 bp, synthetic construct
  misc_feature 1..16: note = synthetic [barcode part1]
  source 1..16: mol_type = other DNA
agtgatcacgttcttc

SEQ ID NO: 43505 - DNA, 16 bp, synthetic construct
  misc_feature 1..16: note = synthetic [barcode part1]
  source 1..16: mol_type = other DNA
attcaggtattgcctc

SEQ ID NO: 43506 - DNA, 16 bp, synthetic construct
  misc_feature 1..16: note = synthetic [barcode part1]
  source 1..16: mol_type = other DNA
gtactcttcaacgact

SEQ ID NO: 43507 - DNA, 16 bp, synthetic construct
  misc_feature 1..16: note = synthetic [barcode part1]
  source 1..16: mol_type = other DNA
cgaacgcctctcaatc

SEQ ID NO: 43508 - DNA, 16 bp, synthetic construct
  misc_feature 1..16: note = synthetic [barcode part1]
  source 1..16: mol_type = other DNA
ttgcgattacggtacg

SEQ ID NO: 43509 - DNA, 16 bp, synthetic construct
  misc_feature 1..16: note = synthetic [barcode part1]
  source 1..16: mol_type = other DNA
gttctgcgtagtcacc

SEQ ID NO: 43510 - DNA, 16 bp, synthetic construct
  misc_feature 1..16: note = synthetic [barcode part1]
  source 1..16: mol_type = other DNA
cggaattcaacgttgc

SEQ ID NO: 43511 - DNA, 16 bp, synthetic construct
  misc_feature 1..16: note = synthetic [barcode part1]
  source 1..16: mol_type = other DNA
gtccgtgttagtacag

SEQ ID NO: 43512 - DNA, 16 bp, synthetic construct
  misc_feature 1..16: note = synthetic [barcode part1]
  source 1..16: mol_type = other DNA
gacacgtaccagtact

SEQ ID NO: 43513 - DNA, 16 bp, synthetic construct
  misc_feature 1..16: note = synthetic [barcode part1]
  source 1..16: mol_type = other DNA
actggacaacacaagt

SEQ ID NO: 43514 - DNA, 16 bp, synthetic construct
  misc_feature 1..16: note = synthetic [barcode part1]
  source 1..16: mol_type = other DNA
aacaccaaccagttgc

SEQ ID NO: 43515 - DNA, 16 bp, synthetic construct
  misc_feature 1..16: note = synthetic [barcode part1]
  source 1..16: mol_type = other DNA
gaagtatctaacggtg

SEQ ID NO: 43516 - DNA, 16 bp, synthetic construct
  misc_feature 1..16: note = synthetic [barcode part1]
  source 1..16: mol_type = other DNA
cacggaattagtagtg

SEQ ID NO: 43517 - DNA, 16 bp, synthetic construct
  misc_feature 1..16: note = synthetic [barcode part1]
  source 1..16: mol_type = other DNA
caatcggaaggtctct

SEQ ID NO: 43518 - DNA, 16 bp, synthetic construct
  misc_feature 1..16: note = synthetic [barcode part1]
  source 1..16: mol_type = other DNA
cgcgtcagatcagaag

SEQ ID NO: 43519 - DNA, 16 bp, synthetic construct
  misc_feature 1..16: note = synthetic [barcode part1]
  source 1..16: mol_type = other DNA
acaatcactggagagt

SEQ ID NO: 43520 - DNA, 16 bp, synthetic construct
  misc_feature 1..16: note = synthetic [barcode part1]
  source 1..16: mol_type = other DNA
atacgtggaccgattc

SEQ ID NO: 43521 - DNA, 16 bp, synthetic construct
  misc_feature 1..16: note = synthetic [barcode part1]
  source 1..16: mol_type = other DNA
cgaacacgatcacgtt

SEQ ID NO: 43522 - DNA, 16 bp, synthetic construct
  misc_feature 1..16: note = synthetic [barcode part1]
  source 1..16: mol_type = other DNA
gcgtaacgcgtcaatt

SEQ ID NO: 43523 - DNA, 16 bp, synthetic construct
  misc_feature 1..16: note = synthetic [barcode part1]
  source 1..16: mol_type = other DNA
gtgcgtatcagtcagt

SEQ ID NO: 43524 - DNA, 16 bp, synthetic construct
  misc_feature 1..16: note = synthetic [barcode part1]
  source 1..16: mol_type = other DNA
tcctccaagtacaccg

SEQ ID NO: 43525 - DNA, 16 bp, synthetic construct
  misc_feature 1..16: note = synthetic [barcode part1]
  source 1..16: mol_type = other DNA
atctctgcgttcctgt

SEQ ID NO: 43526 - DNA, 16 bp, synthetic construct
  misc_feature 1..16: note = synthetic [barcode part1]
  source 1..16: mol_type = other DNA
gtaacgcaactgacct

SEQ ID NO: 43527 - DNA, 16 bp, synthetic construct
  misc_feature 1..16: note = synthetic [barcode part1]
  source 1..16: mol_type = other DNA
ttctaacgtgcggtcc

SEQ ID NO: 43528 - DNA, 16 bp, synthetic construct
  misc_feature 1..16: note = synthetic [barcode part1]
  source 1..16: mol_type = other DNA
agacgaaccgttcact

SEQ ID NO: 43529 - DNA, 16 bp, synthetic construct
  misc_feature 1..16: note = synthetic [barcode part1]
  source 1..16: mol_type = other DNA
taacgacaaggtgcgc

SEQ ID NO: 43530 - DNA, 16 bp, synthetic construct
  misc_feature 1..16: note = synthetic [barcode part1]
  source 1..16: mol_type = other DNA
caagactcgatactgc

SEQ ID NO: 43531 - DNA, 16 bp, synthetic construct
  misc_feature 1..16: note = synthetic [barcode part1]
  source 1..16: mol_type = other DNA
atccaggagtaagact

SEQ ID NO: 43532 - DNA, 16 bp, synthetic construct
  misc_feature 1..16: note = synthetic [barcode part1]
  source 1..16: mol_type = other DNA
acgtgcactgactagt

SEQ ID NO: 43533 - DNA, 16 bp, synthetic construct
  misc_feature 1..16: note = synthetic [barcode part1]
  source 1..16: mol_type = other DNA
cgtatactcctccttg

SEQ ID NO: 43534 - DNA, 16 bp, synthetic construct
  misc_feature 1..16: note = synthetic [barcode part1]
  source 1..16: mol_type = other DNA
gcagaagaacttaacc

SEQ ID NO: 43535 - DNA, 16 bp, synthetic construct
  misc_feature 1..16: note = synthetic [barcode part1]
  source 1..16: mol_type = other DNA
acactgtgtctacttg

SEQ ID NO: 43536 - DNA, 16 bp, synthetic construct
  misc_feature 1..16: note = synthetic [barcode part1]
  source 1..16: mol_type = other DNA
tcaggattcgcctgtc

SEQ ID NO: 43537 - DNA, 16 bp, synthetic construct
  misc_feature 1..16: note = synthetic [barcode part1]
  source 1..16: mol_type = other DNA
gacaatcctaagtcgc

SEQ ID NO: 43538 - DNA, 16 bp, synthetic construct
  misc_feature 1..16: note = synthetic [barcode part1]
  source 1..16: mol_type = other DNA
caattcgccgcacttg

SEQ ID NO: 43539 - DNA, 16 bp, synthetic construct
  misc_feature 1..16: note = synthetic [barcode part1]
  source 1..16: mol_type = other DNA
acggtcaatcggtgtt

SEQ ID NO: 43540 - DNA, 16 bp, synthetic construct
  misc_feature 1..16: note = synthetic [barcode part1]
  source 1..16: mol_type = other DNA
gactgccgaacacaag

SEQ ID NO: 43541 - DNA, 16 bp, synthetic construct
  misc_feature 1..16: note = synthetic [barcode part1]
  source 1..16: mol_type = other DNA
tcctggttcagtatac

SEQ ID NO: 43542 - DNA, 16 bp, synthetic construct
  misc_feature 1..16: note = synthetic [barcode part1]
  source 1..16: mol_type = other DNA
aacaagtacggcaccg

SEQ ID NO: 43543 - DNA, 16 bp, synthetic construct
  misc_feature 1..16: note = synthetic [barcode part1]
  source 1..16: mol_type = other DNA
actggcacctataggt

SEQ ID NO: 43544 - DNA, 16 bp, synthetic construct
  misc_feature 1..16: note = synthetic [barcode part1]
  source 1..16: mol_type = other DNA
ccagtggtagattgtc

SEQ ID NO: 43545 - DNA, 16 bp, synthetic construct
  misc_feature 1..16: note = synthetic [barcode part1]
  source 1..16: mol_type = other DNA
gtactggttccgtcgt

SEQ ID NO: 43546 - DNA, 16 bp, synthetic construct
  misc_feature 1..16: note = synthetic [barcode part1]
  source 1..16: mol_type = other DNA
tcgattcagacacctt

SEQ ID NO: 43547 - DNA, 16 bp, synthetic construct
  misc_feature 1..16: note = synthetic [barcode part1]
  source 1..16: mol_type = other DNA
ccgaagacaacaagag

SEQ ID NO: 43548 - DNA, 16 bp, synthetic construct
  misc_feature 1..16: note = synthetic [barcode part1]
  source 1..16: mol_type = other DNA
aggacttagacaagtc

SEQ ID NO: 43549 - DNA, 16 bp, synthetic construct
  misc_feature 1..16: note = synthetic [barcode part1]
  source 1..16: mol_type = other DNA
gcaagaggacctgatc

SEQ ID NO: 43550 - DNA, 16 bp, synthetic construct
  misc_feature 1..16: note = synthetic [barcode part1]
  source 1..16: mol_type = other DNA
tggtgttgagtggacg

SEQ ID NO: 43551 - DNA, 16 bp, synthetic construct
  misc_feature 1..16: note = synthetic [barcode part1]
  source 1..16: mol_type = other DNA
tgtggcacggataggt

SEQ ID NO: 43552 - DNA, 16 bp, synthetic construct
  misc_feature 1..16: note = synthetic [barcode part1]
  source 1..16: mol_type = other DNA
aggttgtcttagtggc

SEQ ID NO: 43553 - DNA, 16 bp, synthetic construct
  misc_feature 1..16: note = synthetic [barcode part1]
  source 1..16: mol_type = other DNA
tgcgtcgatcaatacg

SEQ ID NO: 43554 - DNA, 16 bp, synthetic construct
  misc_feature 1..16: note = synthetic [barcode part1]
  source 1..16: mol_type = other DNA
aaggaaggtcgtagtg

SEQ ID NO: 43555 - DNA, 16 bp, synthetic construct
  misc_feature 1..16: note = synthetic [barcode part1]
  source 1..16: mol_type = other DNA
cggtacagttatctct

SEQ ID NO: 43556 - DNA, 16 bp, synthetic construct
  misc_feature 1..16: note = synthetic [barcode part1]
  source 1..16: mol_type = other DNA
tctctcgcaccgatag

SEQ ID NO: 43557 - DNA, 16 bp, synthetic construct
  misc_feature 1..16: note = synthetic [barcode part1]
  source 1..16: mol_type = other DNA
tcaggccacgtagaag

SEQ ID NO: 43558 - DNA, 16 bp, synthetic construct
  misc_feature 1..16: note = synthetic [barcode part1]
  source 1..16: mol_type = other DNA
ttgatcgcgtagtacg

SEQ ID NO: 43559 - DNA, 16 bp, synthetic construct
  misc_feature 1..16: note = synthetic [barcode part1]
  source 1..16: mol_type = other DNA
tgttcgttgaagtcct

SEQ ID NO: 43560 - DNA, 16 bp, synthetic construct
  misc_feature 1..16: note = synthetic [barcode part1]
  source 1..16: mol_type = other DNA
atccggaggcagagtt

SEQ ID NO: 43561 - DNA, 16 bp, synthetic construct
  misc_feature 1..16: note = synthetic [barcode part1]
  source 1..16: mol_type = other DNA
ccagagatcaacgcag

SEQ ID NO: 43562 - DNA, 16 bp, synthetic construct
  misc_feature 1..16: note = synthetic [barcode part1]
  source 1..16: mol_type = other DNA
tgtacttcgaactacc

SEQ ID NO: 43563 - DNA, 16 bp, synthetic construct
  misc_feature 1..16: note = synthetic [barcode part1]
  source 1..16: mol_type = other DNA
acagatacactgcaag

SEQ ID NO: 43564 - DNA, 16 bp, synthetic construct
  misc_feature 1..16: note = synthetic [barcode part1]
  source 1..16: mol_type = other DNA
gagattcgtagacggc

SEQ ID NO: 43565 - DNA, 16 bp, synthetic construct
  misc_feature 1..16: note = synthetic [barcode part1]
  source 1..16: mol_type = other DNA
cacgaacttaccttgt

SEQ ID NO: 43566 - DNA, 16 bp, synthetic construct
  misc_feature 1..16: note = synthetic [barcode part1]
  source 1..16: mol_type = other DNA
gcctctatctagtaac

SEQ ID NO: 43567 - DNA, 16 bp, synthetic construct
  misc_feature 1..16: note = synthetic [barcode part1]
  source 1..16: mol_type = other DNA
accgttcgacgtctac

SEQ ID NO: 43568 - DNA, 16 bp, synthetic construct
  misc_feature 1..16: note = synthetic [barcode part1]
  source 1..16: mol_type = other DNA
tgacaacaccaagtcc

SEQ ID NO: 43569 - DNA, 16 bp, synthetic construct
  misc_feature 1..16: note = synthetic [barcode part1]
  source 1..16: mol_type = other DNA
tgaacctataggcctg

SEQ ID NO: 43570 - DNA, 16 bp, synthetic construct
  misc_feature 1..16: note = synthetic [barcode part1]
  source 1..16: mol_type = other DNA
agtcaacactggttgc

SEQ ID NO: 43571 - DNA, 16 bp, synthetic construct
  misc_feature 1..16: note = synthetic [barcode part1]
  source 1..16: mol_type = other DNA
cagagtgacgattgcg

SEQ ID NO: 43572 - DNA, 16 bp, synthetic construct
  misc_feature 1..16: note = synthetic [barcode part1]
  source 1..16: mol_type = other DNA
gtgtacagaccaactc

SEQ ID NO: 43573 - DNA, 16 bp, synthetic construct
  misc_feature 1..16: note = synthetic [barcode part1]
  source 1..16: mol_type = other DNA
cacaggcacaacgaac

SEQ ID NO: 43574 - DNA, 16 bp, synthetic construct
  misc_feature 1..16: note = synthetic [barcode part1]
  source 1..16: mol_type = other DNA
aacctccagtcgtacc

SEQ ID NO: 43575 - DNA, 16 bp, synthetic construct
  misc_feature 1..16: note = synthetic [barcode part1]
  source 1..16: mol_type = other DNA
ttgtcaccgcctaggt

SEQ ID NO: 43576 - DNA, 16 bp, synthetic construct
  misc_feature 1..16: note = synthetic [barcode part1]
  source 1..16: mol_type = other DNA
accgcctctgcgaatt

SEQ ID NO: 43577 - DNA, 16 bp, synthetic construct
  misc_feature 1..16: note = synthetic [barcode part1]
  source 1..16: mol_type = other DNA
tgaactcaacagagtg

SEQ ID NO: 43578 - DNA, 16 bp, synthetic construct
  misc_feature 1..16: note = synthetic [barcode part1]
  source 1..16: mol_type = other DNA
caaggccaaccttaac

SEQ ID NO: 43579 - DNA, 16 bp, synthetic construct
  misc_feature 1..16: note = synthetic [barcode part1]
  source 1..16: mol_type = other DNA
ccggttgtaataccag

SEQ ID NO: 43580 - DNA, 16 bp, synthetic construct
  misc_feature 1..16: note = synthetic [barcode part1]
  source 1..16: mol_type = other DNA
accaccgattggattg

SEQ ID NO: 43581 - DNA, 16 bp, synthetic construct
  misc_feature 1..16: note = synthetic [barcode part1]
  source 1..16: mol_type = other DNA
ccttgcgagttcaatt

SEQ ID NO: 43582 - DNA, 16 bp, synthetic construct
  misc_feature 1..16: note = synthetic [barcode part1]
  source 1..16: mol_type = other DNA
acgttgtgcctacctg

SEQ ID NO: 43583 - DNA, 16 bp, synthetic construct
  misc_feature 1..16: note = synthetic [barcode part1]
  source 1..16: mol_type = other DNA
tctatactggcaactc

SEQ ID NO: 43584 - DNA, 16 bp, synthetic construct
  misc_feature 1..16: note = synthetic [barcode part1]
  source 1..16: mol_type = other DNA
gtgagagttgaactac

SEQ ID NO: 43585 - DNA, 16 bp, synthetic construct
  misc_feature 1..16: note = synthetic [barcode part1]
  source 1..16: mol_type = other DNA
gaatcggaccgtacag

SEQ ID NO: 43586 - DNA, 16 bp, synthetic construct
  misc_feature 1..16: note = synthetic [barcode part1]
  source 1..16: mol_type = other DNA
agtgtcgtctcctctt

SEQ ID NO: 43587 - DNA, 16 bp, synthetic construct
  misc_feature 1..16: note = synthetic [barcode part1]
  source 1..16: mol_type = other DNA
tgccagactatcaggt

SEQ ID NO: 43588 - DNA, 16 bp, synthetic construct
  misc_feature 1..16: note = synthetic [barcode part1]
  source 1..16: mol_type = other DNA
agatatctgagacggt

SEQ ID NO: 43589 - DNA, 16 bp, synthetic construct
  misc_feature 1..16: note = synthetic [barcode part1]
  source 1..16: mol_type = other DNA
gatcctcctgacgtac

SEQ ID NO: 43590 - DNA, 16 bp, synthetic construct
  misc_feature 1..16: note = synthetic [barcode part1]
  source 1..16: mol_type = other DNA
tgtgacgtacctgcct

SEQ ID NO: 43591 - DNA, 16 bp, synthetic construct
  misc_feature 1..16: note = synthetic [barcode part1]
  source 1..16: mol_type = other DNA
acagtcagatcaagac

SEQ ID NO: 43592 - DNA, 16 bp, synthetic construct
  misc_feature 1..16: note = synthetic [barcode part1]
  source 1..16: mol_type = other DNA
aggcgtcttcagatac

SEQ ID NO: 43593 - DNA, 16 bp, synthetic construct
  misc_feature 1..16: note = synthetic [barcode part1]
  source 1..16: mol_type = other DNA
tgtacgagtgagacgc

SEQ ID NO: 43594 - DNA, 16 bp, synthetic construct
  misc_feature 1..16: note = synthetic [barcode part1]
  source 1..16: mol_type = other DNA
gactgcaggttgaggt

SEQ ID NO: 43595 - DNA, 16 bp, synthetic construct
  misc_feature 1..16: note = synthetic [barcode part1]
  source 1..16: mol_type = other DNA
acactccttggactgc

SEQ ID NO: 43596 - DNA, 16 bp, synthetic construct
  misc_feature 1..16: note = synthetic [barcode part1]
  source 1..16: mol_type = other DNA
tgtgtacgtactgcag

SEQ ID NO: 43597 - DNA, 16 bp, synthetic construct
  misc_feature 1..16: note = synthetic [barcode part1]
  source 1..16: mol_type = other DNA
cgcaacgacagacaac

SEQ ID NO: 43598 - DNA, 16 bp, synthetic construct
  misc_feature 1..16: note = synthetic [barcode part1]
  source 1..16: mol_type = other DNA
agtacacgtcaacgtc

SEQ ID NO: 43599 - DNA, 16 bp, synthetic construct
  misc_feature 1..16: note = synthetic [barcode part1]
  source 1..16: mol_type = other DNA
tgcgtgatctagttct

SEQ ID NO: 43600 - DNA, 16 bp, synthetic construct
  misc_feature 1..16: note = synthetic [barcode part1]
  source 1..16: mol_type = other DNA
tagaagacaacgcgcc

SEQ ID NO: 43601 - DNA, 16 bp, synthetic construct
  misc_feature 1..16: note = synthetic [barcode part1]
  source 1..16: mol_type = other DNA
ttgcgagtctggcctt

SEQ ID NO: 43602 - DNA, 16 bp, synthetic construct
  misc_feature 1..16: note = synthetic [barcode part1]
  source 1..16: mol_type = other DNA
gatctgagactcgatc

SEQ ID NO: 43603 - DNA, 16 bp, synthetic construct
  misc_feature 1..16: note = synthetic [barcode part1]
  source 1..16: mol_type = other DNA
acggttaccgatctcc

SEQ ID NO: 43604 - DNA, 16 bp, synthetic construct
  misc_feature 1..16: note = synthetic [barcode part1]
  source 1..16: mol_type = other DNA
aactgatacgccgtgt

SEQ ID NO: 43605 - DNA, 16 bp, synthetic construct
  misc_feature 1..16: note = synthetic [barcode part1]
  source 1..16: mol_type = other DNA
gtatctccgtgtcctt

SEQ ID NO: 43606 - DNA, 16 bp, synthetic construct
  misc_feature 1..16: note = synthetic [barcode part1]
  source 1..16: mol_type = other DNA
ccacttaacttcgagt

SEQ ID NO: 43607 - DNA, 16 bp, synthetic construct
  misc_feature 1..16: note = synthetic [barcode part1]
  source 1..16: mol_type = other DNA
tctagtccgtacaact

SEQ ID NO: 43608 - DNA, 16 bp, synthetic construct
  misc_feature 1..16: note = synthetic [barcode part1]
  source 1..16: mol_type = other DNA
tcggcggttgtactct

SEQ ID NO: 43609 - DNA, 16 bp, synthetic construct
  misc_feature 1..16: note = synthetic [barcode part1]
  source 1..16: mol_type = other DNA
ttaggtcaatccggtg

SEQ ID NO: 43610 - DNA, 16 bp, synthetic construct
  misc_feature 1..16: note = synthetic [barcode part1]
  source 1..16: mol_type = other DNA
acacctattgcagacg

SEQ ID NO: 43611 - DNA, 16 bp, synthetic construct
  misc_feature 1..16: note = synthetic [barcode part1]
  source 1..16: mol_type = other DNA
actgtccgaacctacc

SEQ ID NO: 43612 - DNA, 16 bp, synthetic construct
  misc_feature 1..16: note = synthetic [barcode part1]
  source 1..16: mol_type = other DNA
ttccaatcgacctctc

SEQ ID NO: 43613 - DNA, 16 bp, synthetic construct
  misc_feature 1..16: note = synthetic [barcode part1]
  source 1..16: mol_type = other DNA
aagactcaggcggatc

SEQ ID NO: 43614 - DNA, 16 bp, synthetic construct
  misc_feature 1..16: note = synthetic [barcode part1]
  source 1..16: mol_type = other DNA
agtcacgaggagacct

SEQ ID NO: 43615 - DNA, 16 bp, synthetic construct
  misc_feature 1..16: note = synthetic [barcode part1]
  source 1..16: mol_type = other DNA
tccgactgtactggtc

SEQ ID NO: 43616 - DNA, 16 bp, synthetic construct
  misc_feature 1..16: note = synthetic [barcode part1]
  source 1..16: mol_type = other DNA
aggcgattgcagactg

SEQ ID NO: 43617 - DNA, 16 bp, synthetic construct
  misc_feature 1..16: note = synthetic [barcode part1]
  source 1..16: mol_type = other DNA
cctcagtaattgtgtc

SEQ ID NO: 43618 - DNA, 16 bp, synthetic construct
  misc_feature 1..16: note = synthetic [barcode part1]
  source 1..16: mol_type = other DNA
aagacctctcagagtc

SEQ ID NO: 43619 - DNA, 16 bp, synthetic construct
  misc_feature 1..16: note = synthetic [barcode part1]
  source 1..16: mol_type = other DNA
ttgcctccaactcttg

SEQ ID NO: 43620 - DNA, 16 bp, synthetic construct
  misc_feature 1..16: note = synthetic [barcode part1]
  source 1..16: mol_type = other DNA
tggatactctcactac

SEQ ID NO: 43621 - DNA, 16 bp, synthetic construct
  misc_feature 1..16: note = synthetic [barcode part1]
  source 1..16: mol_type = other DNA
cactaaggtctccacc

SEQ ID NO: 43622 - DNA, 16 bp, synthetic construct
  misc_feature 1..16: note = synthetic [barcode part1]
  source 1..16: mol_type = other DNA
cgtcagattcagtggt

SEQ ID NO: 43623 - DNA, 16 bp, synthetic construct
  misc_feature 1..16: note = synthetic [barcode part1]
  source 1..16: mol_type = other DNA
cgacgatactgtcagt

SEQ ID NO: 43624 - DNA, 16 bp, synthetic construct
  misc_feature 1..16: note = synthetic [barcode part1]
  source 1..16: mol_type = other DNA
ccgcgtattcttcgag

SEQ ID NO: 43625 - DNA, 16 bp, synthetic construct
  misc_feature 1..16: note = synthetic [barcode part1]
  source 1..16: mol_type = other DNA
gcagaacaggtctacg

SEQ ID NO: 43626 - DNA, 16 bp, synthetic construct
  misc_feature 1..16: note = synthetic [barcode part1]
  source 1..16: mol_type = other DNA
cggattaagtccagtc

SEQ ID NO: 43627 - DNA, 16 bp, synthetic construct
  misc_feature 1..16: note = synthetic [barcode part1]
  source 1..16: mol_type = other DNA
attactcgatatccgc

SEQ ID NO: 43628 - DNA, 16 bp, synthetic construct
  misc_feature 1..16: note = synthetic [barcode part1]
  source 1..16: mol_type = other DNA
ttgacgttgtgcagtg

SEQ ID NO: 43629 - DNA, 16 bp, synthetic construct
  misc_feature 1..16: note = synthetic [barcode part1]
  source 1..16: mol_type = other DNA
tcctggcactacttct

SEQ ID NO: 43630 - DNA, 16 bp, synthetic construct
  misc_feature 1..16: note = synthetic [barcode part1]
  source 1..16: mol_type = other DNA
cacactagtatcgacg

SEQ ID NO: 43631 - DNA, 16 bp, synthetic construct
  misc_feature 1..16: note = synthetic [barcode part1]
  source 1..16: mol_type = other DNA
tgaacgtgactacacc

SEQ ID NO: 43632 - DNA, 16 bp, synthetic construct
  misc_feature 1..16: note = synthetic [barcode part1]
  source 1..16: mol_type = other DNA
cacagattagaacgac

SEQ ID NO: 43633 - DNA, 16 bp, synthetic construct
  misc_feature 1..16: note = synthetic [barcode part1]
  source 1..16: mol_type = other DNA
tcagacggtcttatct

SEQ ID NO: 43634 - DNA, 16 bp, synthetic construct
  misc_feature 1..16: note = synthetic [barcode part1]
  source 1..16: mol_type = other DNA
actcaaggcaacggac

SEQ ID NO: 43635 - DNA, 16 bp, synthetic construct
  misc_feature 1..16: note = synthetic [barcode part1]
  source 1..16: mol_type = other DNA
tcaccactccggatac

SEQ ID NO: 43636 - DNA, 16 bp, synthetic construct
  misc_feature 1..16: note = synthetic [barcode part1]
  source 1..16: mol_type = other DNA
cacttgatctcgccag

SEQ ID NO: 43637 - DNA, 16 bp, synthetic construct
  misc_feature 1..16: note = synthetic [barcode part1]
  source 1..16: mol_type = other DNA
cggtaacaccgaatct

SEQ ID NO: 43638 - DNA, 16 bp, synthetic construct
  misc_feature 1..16: note = synthetic [barcode part1]
  source 1..16: mol_type = other DNA
cctcgacgtattcggt

SEQ ID NO: 43639 - DNA, 16 bp, synthetic construct
  misc_feature 1..16: note = synthetic [barcode part1]
  source 1..16: mol_type = other DNA
gagtatccagaacggc

SEQ ID NO: 43640 - DNA, 16 bp, synthetic construct
  misc_feature 1..16: note = synthetic [barcode part1]
  source 1..16: mol_type = other DNA
cctcgttatagatctg

SEQ ID NO: 43641 - DNA, 16 bp, synthetic construct
  misc_feature 1..16: note = synthetic [barcode part1]
  source 1..16: mol_type = other DNA
cgaccgttactaacag

SEQ ID NO: 43642 - DNA, 16 bp, synthetic construct
  misc_feature 1..16: note = synthetic [barcode part1]
  source 1..16: mol_type = other DNA
aacgttggtacacacc

SEQ ID NO: 43643 - DNA, 16 bp, synthetic construct
  misc_feature 1..16: note = synthetic [barcode part1]
  source 1..16: mol_type = other DNA
gacctggtgataactc

SEQ ID NO: 43644 - DNA, 16 bp, synthetic construct
  misc_feature 1..16: note = synthetic [barcode part1]
  source 1..16: mol_type = other DNA
gaacctgtgttctgtt

SEQ ID NO: 43645 - DNA, 16 bp, synthetic construct
  misc_feature 1..16: note = synthetic [barcode part1]
  source 1..16: mol_type = other DNA
caatcggttccagagt

SEQ ID NO: 43646 - DNA, 16 bp, synthetic construct
  misc_feature 1..16: note = synthetic [barcode part1]
  source 1..16: mol_type = other DNA
tgtctgagactacgtg

SEQ ID NO: 43647 - DNA, 16 bp, synthetic construct
  misc_feature 1..16: note = synthetic [barcode part1]
  source 1..16: mol_type = other DNA
acactgtactccagag

SEQ ID NO: 43648 - DNA, 16 bp, synthetic construct
  misc_feature 1..16: note = synthetic [barcode part1]
  source 1..16: mol_type = other DNA
aaccacagactaagac

SEQ ID NO: 43649 - DNA, 16 bp, synthetic construct
  misc_feature 1..16: note = synthetic [barcode part1]
  source 1..16: mol_type = other DNA
gcggagaatacttcct

SEQ ID NO: 43650 - DNA, 16 bp, synthetic construct
  misc_feature 1..16: note = synthetic [barcode part1]
  source 1..16: mol_type = other DNA
tggaactccagagttc

SEQ ID NO: 43651 - DNA, 16 bp, synthetic construct
  misc_feature 1..16: note = synthetic [barcode part1]
  source 1..16: mol_type = other DNA
gaagtatctctgcacg

SEQ ID NO: 43652 - DNA, 16 bp, synthetic construct
  misc_feature 1..16: note = synthetic [barcode part1]
  source 1..16: mol_type = other DNA
tacgtgtcaaccaacg

SEQ ID NO: 43653 - DNA, 16 bp, synthetic construct
  misc_feature 1..16: note = synthetic [barcode part1]
  source 1..16: mol_type = other DNA
tgtcgcggtgttatag

SEQ ID NO: 43654 - DNA, 16 bp, synthetic construct
  misc_feature 1..16: note = synthetic [barcode part1]
  source 1..16: mol_type = other DNA
ttgtcgattctgtacg

SEQ ID NO: 43655 - DNA, 16 bp, synthetic construct
  misc_feature 1..16: note = synthetic [barcode part1]
  source 1..16: mol_type = other DNA
ttctgtggaggtacgt

SEQ ID NO: 43656 - DNA, 16 bp, synthetic construct
  misc_feature 1..16: note = synthetic [barcode part1]
  source 1..16: mol_type = other DNA
cgtggtaatctacctt

SEQ ID NO: 43657 - DNA, 16 bp, synthetic construct
  misc_feature 1..16: note = synthetic [barcode part1]
  source 1..16: mol_type = other DNA
accaagtaagtgcaac

SEQ ID NO: 43658 - DNA, 16 bp, synthetic construct
  misc_feature 1..16: note = synthetic [barcode part1]
  source 1..16: mol_type = other DNA
gtctactcttaggact

SEQ ID NO: 43659 - DNA, 16 bp, synthetic construct
  misc_feature 1..16: note = synthetic [barcode part1]
  source 1..16: mol_type = other DNA
aattaggtggacctag

SEQ ID NO: 43660 - DNA, 16 bp, synthetic construct
  misc_feature 1..16: note = synthetic [barcode part1]
  source 1..16: mol_type = other DNA
actgcctcacctagac

SEQ ID NO: 43661 - DNA, 16 bp, synthetic construct
  misc_feature 1..16: note = synthetic [barcode part1]
  source 1..16: mol_type = other DNA
gagtgaaggacagact

SEQ ID NO: 43662 - DNA, 16 bp, synthetic construct
  misc_feature 1..16: note = synthetic [barcode part1]
  source 1..16: mol_type = other DNA
aggttggttctgactg

SEQ ID NO: 43663 - DNA, 16 bp, synthetic construct
  misc_feature 1..16: note = synthetic [barcode part1]
  source 1..16: mol_type = other DNA
agttgtctcgttggag

SEQ ID NO: 43664 - DNA, 16 bp, synthetic construct
  misc_feature 1..16: note = synthetic [barcode part1]
  source 1..16: mol_type = other DNA
gaacgagtctgttcac

SEQ ID NO: 43665 - DNA, 16 bp, synthetic construct
  misc_feature 1..16: note = synthetic [barcode part1]
  source 1..16: mol_type = other DNA
gataagtcgagacttg

SEQ ID NO: 43666 - DNA, 16 bp, synthetic construct
  misc_feature 1..16: note = synthetic [barcode part1]
  source 1..16: mol_type = other DNA
ttcggtatactctcag

SEQ ID NO: 43667 - DNA, 16 bp, synthetic construct
  misc_feature 1..16: note = synthetic [barcode part1]
  source 1..16: mol_type = other DNA
tatcgttggtgtgttc

SEQ ID NO: 43668 - DNA, 16 bp, synthetic construct
  misc_feature 1..16: note = synthetic [barcode part1]
  source 1..16: mol_type = other DNA
gttactcgcagatctt

SEQ ID NO: 43669 - DNA, 16 bp, synthetic construct
  misc_feature 1..16: note = synthetic [barcode part1]
  source 1..16: mol_type = other DNA
cctattgacgcaatct

SEQ ID NO: 43670 - DNA, 16 bp, synthetic construct
  misc_feature 1..16: note = synthetic [barcode part1]
  source 1..16: mol_type = other DNA
tgcgacaagacagatt

SEQ ID NO: 43671 - DNA, 16 bp, synthetic construct
  misc_feature 1..16: note = synthetic [barcode part1]
  source 1..16: mol_type = other DNA
gttactcgcgaattct

SEQ ID NO: 43672 - DNA, 16 bp, synthetic construct
  misc_feature 1..16: note = synthetic [barcode part1]
  source 1..16: mol_type = other DNA
ttgcctagataccact

SEQ ID NO: 43673 - DNA, 16 bp, synthetic construct
  misc_feature 1..16: note = synthetic [barcode part1]
  source 1..16: mol_type = other DNA
actgtggacctgcctt

SEQ ID NO: 43674 - DNA, 16 bp, synthetic construct
  misc_feature 1..16: note = synthetic [barcode part1]
  source 1..16: mol_type = other DNA
cacaaggcggtgattg

SEQ ID NO: 43675 - DNA, 16 bp, synthetic construct
  misc_feature 1..16: note = synthetic [barcode part1]
  source 1..16: mol_type = other DNA
cacgtgacagagaatt

SEQ ID NO: 43676 - DNA, 16 bp, synthetic construct
  misc_feature 1..16: note = synthetic [barcode part1]
  source 1..16: mol_type = other DNA
ccgttctggagattag

SEQ ID NO: 43677 - DNA, 16 bp, synthetic construct
  misc_feature 1..16: note = synthetic [barcode part1]
  source 1..16: mol_type = other DNA
gtgcagtaattgaggt

SEQ ID NO: 43678 - DNA, 16 bp, synthetic construct
  misc_feature 1..16: note = synthetic [barcode part1]
  source 1..16: mol_type = other DNA
atatccttcggtaacc

SEQ ID NO: 43679 - DNA, 16 bp, synthetic construct
  misc_feature 1..16: note = synthetic [barcode part1]
  source 1..16: mol_type = other DNA
gactatcgagtgcgag

SEQ ID NO: 43680 - DNA, 16 bp, synthetic construct
  misc_feature 1..16: note = synthetic [barcode part1]
  source 1..16: mol_type = other DNA
attgatagttcctcgc

SEQ ID NO: 43681 - DNA, 16 bp, synthetic construct
  misc_feature 1..16: note = synthetic [barcode part1]
  source 1..16: mol_type = other DNA
ccagttactctctctg

SEQ ID NO: 43682 - DNA, 16 bp, synthetic construct
  misc_feature 1..16: note = synthetic [barcode part1]
  source 1..16: mol_type = other DNA
ttcttggttggcctct

SEQ ID NO: 43683 - DNA, 16 bp, synthetic construct
  misc_feature 1..16: note = synthetic [barcode part1]
  source 1..16: mol_type = other DNA
tgcggtaacagtgtct

SEQ ID NO: 43684 - DNA, 16 bp, synthetic construct
  misc_feature 1..16: note = synthetic [barcode part1]
  source 1..16: mol_type = other DNA
tggaggtcaagaacag

SEQ ID NO: 43685 - DNA, 16 bp, synthetic construct
  misc_feature 1..16: note = synthetic [barcode part1]
  source 1..16: mol_type = other DNA
tgttgacgttggtgtg

SEQ ID NO: 43686 - DNA, 16 bp, synthetic construct
  misc_feature 1..16: note = synthetic [barcode part1]
  source 1..16: mol_type = other DNA
acttacgagtcgtacg

SEQ ID NO: 43687 - DNA, 16 bp, synthetic construct
  misc_feature 1..16: note = synthetic [barcode part1]
  source 1..16: mol_type = other DNA
tgcgcaggtaactatc

SEQ ID NO: 43688 - DNA, 16 bp, synthetic construct
  misc_feature 1..16: note = synthetic [barcode part1]
  source 1..16: mol_type = other DNA
agtctgttgtcgtccg

SEQ ID NO: 43689 - DNA, 16 bp, synthetic construct
  misc_feature 1..16: note = synthetic [barcode part1]
  source 1..16: mol_type = other DNA
tgactcaggtgatctg

SEQ ID NO: 43690 - DNA, 16 bp, synthetic construct
  misc_feature 1..16: note = synthetic [barcode part1]
  source 1..16: mol_type = other DNA
acggattctctactac

SEQ ID NO: 43691 - DNA, 16 bp, synthetic construct
  misc_feature 1..16: note = synthetic [barcode part1]
  source 1..16: mol_type = other DNA
taggatcgttgaccac

SEQ ID NO: 43692 - DNA, 16 bp, synthetic construct
  misc_feature 1..16: note = synthetic [barcode part1]
  source 1..16: mol_type = other DNA
gtaggcagacgttgtg

SEQ ID NO: 43693 - DNA, 16 bp, synthetic construct
  misc_feature 1..16: note = synthetic [barcode part1]
  source 1..16: mol_type = other DNA
actgagttggaggtgc

SEQ ID NO: 43694 - DNA, 16 bp, synthetic construct
  misc_feature 1..16: note = synthetic [barcode part1]
  source 1..16: mol_type = other DNA
tactctggcagatctt

SEQ ID NO: 43695 - DNA, 16 bp, synthetic construct
  misc_feature 1..16: note = synthetic [barcode part1]
  source 1..16: mol_type = other DNA
aataggtggcgtcgtg

SEQ ID NO: 43696 - DNA, 16 bp, synthetic construct
  misc_feature 1..16: note = synthetic [barcode part1]
  source 1..16: mol_type = other DNA
gtgattgccttaactc

SEQ ID NO: 43697 - DNA, 16 bp, synthetic construct
  misc_feature 1..16: note = synthetic [barcode part1]
  source 1..16: mol_type = other DNA
ttcgcctatctactcg

SEQ ID NO: 43698 - DNA, 16 bp, synthetic construct
  misc_feature 1..16: note = synthetic [barcode part1]
  source 1..16: mol_type = other DNA
tgaccgatctctctct

SEQ ID NO: 43699 - DNA, 16 bp, synthetic construct
  misc_feature 1..16: note = synthetic [barcode part1]
  source 1..16: mol_type = other DNA
gactgtactctctggc

SEQ ID NO: 43700 - DNA, 16 bp, synthetic construct
  misc_feature 1..16: note = synthetic [barcode part1]
  source 1..16: mol_type = other DNA
cagtaggtatccggag

SEQ ID NO: 43701 - DNA, 16 bp, synthetic construct
  misc_feature 1..16: note = synthetic [barcode part1]
  source 1..16: mol_type = other DNA
tgaccaacaactgacc

SEQ ID NO: 43702 - DNA, 16 bp, synthetic construct
  misc_feature 1..16: note = synthetic [barcode part1]
  source 1..16: mol_type = other DNA
acgtaacctaaggaac

SEQ ID NO: 43703 - DNA, 16 bp, synthetic construct
  misc_feature 1..16: note = synthetic [barcode part1]
  source 1..16: mol_type = other DNA
ataggatccactccag

SEQ ID NO: 43704 - DNA, 16 bp, synthetic construct
  misc_feature 1..16: note = synthetic [barcode part1]
  source 1..16: mol_type = other DNA
tcggataagtactcgc

SEQ ID NO: 43705 - DNA, 16 bp, synthetic construct
  misc_feature 1..16: note = synthetic [barcode part1]
  source 1..16: mol_type = other DNA
gcgatatacacgtacc

SEQ ID NO: 43706 - DNA, 16 bp, synthetic construct
  misc_feature 1..16: note = synthetic [barcode part1]
  source 1..16: mol_type = other DNA
cctacgtcgatagtcc

SEQ ID NO: 43707 - DNA, 16 bp, synthetic construct
  misc_feature 1..16: note = synthetic [barcode part1]
  source 1..16: mol_type = other DNA
acagatcacacggttc

SEQ ID NO: 43708 - DNA, 16 bp, synthetic construct
  misc_feature 1..16: note = synthetic [barcode part1]
  source 1..16: mol_type = other DNA
cctagatactcgaacg

SEQ ID NO: 43709 - DNA, 16 bp, synthetic construct
  misc_feature 1..16: note = synthetic [barcode part1]
  source 1..16: mol_type = other DNA
gcgttgacgtgttagt

SEQ ID NO: 43710 - DNA, 16 bp, synthetic construct
  misc_feature 1..16: note = synthetic [barcode part1]
  source 1..16: mol_type = other DNA
cgtccacttactcact

SEQ ID NO: 43711 - DNA, 16 bp, synthetic construct
  misc_feature 1..16: note = synthetic [barcode part1]
  source 1..16: mol_type = other DNA
tgatcaggactgactc

SEQ ID NO: 43712 - DNA, 16 bp, synthetic construct
  misc_feature 1..16: note = synthetic [barcode part1]
  source 1..16: mol_type = other DNA
caggccttaggtattg

SEQ ID NO: 43713 - DNA, 16 bp, synthetic construct
  misc_feature 1..16: note = synthetic [barcode part1]
  source 1..16: mol_type = other DNA
ttggccgtatagtacg

SEQ ID NO: 43714 - DNA, 16 bp, synthetic construct
  misc_feature 1..16: note = synthetic [barcode part1]
  source 1..16: mol_type = other DNA
cgaacgatctatccag

SEQ ID NO: 43715 - DNA, 16 bp, synthetic construct
  misc_feature 1..16: note = synthetic [barcode part1]
  source 1..16: mol_type = other DNA
acctaactcggtagtg

SEQ ID NO: 43716 - DNA, 16 bp, synthetic construct
  misc_feature 1..16: note = synthetic [barcode part1]
  source 1..16: mol_type = other DNA
ccgactgtaatcagtg

SEQ ID NO: 43717 - DNA, 16 bp, synthetic construct
  misc_feature 1..16: note = synthetic [barcode part1]
  source 1..16: mol_type = other DNA
tgcgaatacaacagac

SEQ ID NO: 43718 - DNA, 16 bp, synthetic construct
  misc_feature 1..16: note = synthetic [barcode part1]
  source 1..16: mol_type = other DNA
agaataacgaacgcct

SEQ ID NO: 43719 - DNA, 16 bp, synthetic construct
  misc_feature 1..16: note = synthetic [barcode part1]
  source 1..16: mol_type = other DNA
gcctgtcactctgagt

SEQ ID NO: 43720 - DNA, 16 bp, synthetic construct
  misc_feature 1..16: note = synthetic [barcode part1]
  source 1..16: mol_type = other DNA
gttagacgaacacggc

SEQ ID NO: 43721 - DNA, 16 bp, synthetic construct
  misc_feature 1..16: note = synthetic [barcode part1]
  source 1..16: mol_type = other DNA
gattacgtgactgcac

SEQ ID NO: 43722 - DNA, 16 bp, synthetic construct
  misc_feature 1..16: note = synthetic [barcode part1]
  source 1..16: mol_type = other DNA
gatcttgagataggtg

SEQ ID NO: 43723 - DNA, 16 bp, synthetic construct
  misc_feature 1..16: note = synthetic [barcode part1]
  source 1..16: mol_type = other DNA
cctcgtactgaattac

SEQ ID NO: 43724 - DNA, 16 bp, synthetic construct
  misc_feature 1..16: note = synthetic [barcode part1]
  source 1..16: mol_type = other DNA
gaattgcgacgacttc

SEQ ID NO: 43725 - DNA, 16 bp, synthetic construct
  misc_feature 1..16: note = synthetic [barcode part1]
  source 1..16: mol_type = other DNA
caatacggaggactgc

SEQ ID NO: 43726 - DNA, 16 bp, synthetic construct
  misc_feature 1..16: note = synthetic [barcode part1]
  source 1..16: mol_type = other DNA
gtcctgtcaggtctac

SEQ ID NO: 43727 - DNA, 16 bp, synthetic construct
  misc_feature 1..16: note = synthetic [barcode part1]
  source 1..16: mol_type = other DNA
tcacgattcgactgag

SEQ ID NO: 43728 - DNA, 16 bp, synthetic construct
  misc_feature 1..16: note = synthetic [barcode part1]
  source 1..16: mol_type = other DNA
tcgcaccaacgacctt

SEQ ID NO: 43729 - DNA, 16 bp, synthetic construct
  misc_feature 1..16: note = synthetic [barcode part1]
  source 1..16: mol_type = other DNA
gactaatactggccgt

SEQ ID NO: 43730 - DNA, 16 bp, synthetic construct
  misc_feature 1..16: note = synthetic [barcode part1]
  source 1..16: mol_type = other DNA
tcacgtaggccaagag

SEQ ID NO: 43731 - DNA, 16 bp, synthetic construct
  misc_feature 1..16: note = synthetic [barcode part1]
  source 1..16: mol_type = other DNA
gaactgtactcctatc

SEQ ID NO: 43732 - DNA, 16 bp, synthetic construct
  misc_feature 1..16: note = synthetic [barcode part1]
  source 1..16: mol_type = other DNA
gaatattcctatcgcc

SEQ ID NO: 43733 - DNA, 16 bp, synthetic construct
  misc_feature 1..16: note = synthetic [barcode part1]
  source 1..16: mol_type = other DNA
actatctctcgtcacc

SEQ ID NO: 43734 - DNA, 16 bp, synthetic construct
  misc_feature 1..16: note = synthetic [barcode part1]
  source 1..16: mol_type = other DNA
tccggtgtccaataag

SEQ ID NO: 43735 - DNA, 16 bp, synthetic construct
  misc_feature 1..16: note = synthetic [barcode part1]
  source 1..16: mol_type = other DNA
tacgtcagttgacgtg

SEQ ID NO: 43736 - DNA, 16 bp, synthetic construct
  misc_feature 1..16: note = synthetic [barcode part1]
  source 1..16: mol_type = other DNA
tcggagaccagtacag

SEQ ID NO: 43737 - DNA, 16 bp, synthetic construct
  misc_feature 1..16: note = synthetic [barcode part1]
  source 1..16: mol_type = other DNA
gatctcaatagtgccg

SEQ ID NO: 43738 - DNA, 16 bp, synthetic construct
  misc_feature 1..16: note = synthetic [barcode part1]
  source 1..16: mol_type = other DNA
gacttgtgcggtagag

SEQ ID NO: 43739 - DNA, 16 bp, synthetic construct
  misc_feature 1..16: note = synthetic [barcode part1]
  source 1..16: mol_type = other DNA
tccttgcgaattatcg

SEQ ID NO: 43740 - DNA, 16 bp, synthetic construct
  misc_feature 1..16: note = synthetic [barcode part1]
  source 1..16: mol_type = other DNA
aggaccactgagtgtg

SEQ ID NO: 43741 - DNA, 16 bp, synthetic construct
  misc_feature 1..16: note = synthetic [barcode part1]
  source 1..16: mol_type = other DNA
atcgacagtccaagtc

SEQ ID NO: 43742 - DNA, 16 bp, synthetic construct
  misc_feature 1..16: note = synthetic [barcode part1]
  source 1..16: mol_type = other DNA
gcgtgtaaggatcctt

SEQ ID NO: 43743 - DNA, 16 bp, synthetic construct
  misc_feature 1..16: note = synthetic [barcode part1]
  source 1..16: mol_type = other DNA
gtgtacgagtcagtct

SEQ ID NO: 43744 - DNA, 16 bp, synthetic construct
  misc_feature 1..16: note = synthetic [barcode part1]
  source 1..16: mol_type = other DNA
ttccgatcctccaact

SEQ ID NO: 43745 - DNA, 16 bp, synthetic construct
  misc_feature 1..16: note = synthetic [barcode part1]
  source 1..16: mol_type = other DNA
accactagtattcctg

SEQ ID NO: 43746 - DNA, 16 bp, synthetic construct
  misc_feature 1..16: note = synthetic [barcode part1]
  source 1..16: mol_type = other DNA
gttgaacagtgactcc

SEQ ID NO: 43747 - DNA, 16 bp, synthetic construct
  misc_feature 1..16: note = synthetic [barcode part1]
  source 1..16: mol_type = other DNA
cggtagacttgttacg

SEQ ID NO: 43748 - DNA, 16 bp, synthetic construct
  misc_feature 1..16: note = synthetic [barcode part1]
  source 1..16: mol_type = other DNA
agaggacaagttaggc

SEQ ID NO: 43749 - DNA, 16 bp, synthetic construct
  misc_feature 1..16: note = synthetic [barcode part1]
  source 1..16: mol_type = other DNA
ttgcctaccgcagtgt

SEQ ID NO: 43750 - DNA, 16 bp, synthetic construct
  misc_feature 1..16: note = synthetic [barcode part1]
  source 1..16: mol_type = other DNA
actatctccacagatc

SEQ ID NO: 43751 - DNA, 16 bp, synthetic construct
  misc_feature 1..16: note = synthetic [barcode part1]
  source 1..16: mol_type = other DNA
gtggaacggatagtag

SEQ ID NO: 43752 - DNA, 16 bp, synthetic construct
  misc_feature 1..16: note = synthetic [barcode part1]
  source 1..16: mol_type = other DNA
ttgttggtcgacaacg

SEQ ID NO: 43753 - DNA, 16 bp, synthetic construct
  misc_feature 1..16: note = synthetic [barcode part1]
  source 1..16: mol_type = other DNA
aggtaatcctccaacg

SEQ ID NO: 43754 - DNA, 16 bp, synthetic construct
  misc_feature 1..16: note = synthetic [barcode part1]
  source 1..16: mol_type = other DNA
tgtcctagtggattct

SEQ ID NO: 43755 - DNA, 16 bp, synthetic construct
  misc_feature 1..16: note = synthetic [barcode part1]
  source 1..16: mol_type = other DNA
attagaggcactggcg

SEQ ID NO: 43756 - DNA, 16 bp, synthetic construct
  misc_feature 1..16: note = synthetic [barcode part1]
  source 1..16: mol_type = other DNA
tggacgattgttcgtg

SEQ ID NO: 43757 - DNA, 16 bp, synthetic construct
  misc_feature 1..16: note = synthetic [barcode part1]
  source 1..16: mol_type = other DNA
acttggtctccgtacg

SEQ ID NO: 43758 - DNA, 16 bp, synthetic construct
  misc_feature 1..16: note = synthetic [barcode part1]
  source 1..16: mol_type = other DNA
cctccggcagtatatc

SEQ ID NO: 43759 - DNA, 16 bp, synthetic construct
  misc_feature 1..16: note = synthetic [barcode part1]
  source 1..16: mol_type = other DNA
gtcgccttactcaggt

SEQ ID NO: 43760 - DNA, 16 bp, synthetic construct
  misc_feature 1..16: note = synthetic [barcode part1]
  source 1..16: mol_type = other DNA
gtatcttgtcactgac

SEQ ID NO: 43761 - DNA, 16 bp, synthetic construct
  misc_feature 1..16: note = synthetic [barcode part1]
  source 1..16: mol_type = other DNA
atccaccgcggtattc

SEQ ID NO: 43762 - DNA, 16 bp, synthetic construct
  misc_feature 1..16: note = synthetic [barcode part1]
  source 1..16: mol_type = other DNA
tgatcttcgcgtggtc

SEQ ID NO: 43763 - DNA, 16 bp, synthetic construct
  misc_feature 1..16: note = synthetic [barcode part1]
  source 1..16: mol_type = other DNA
ccagtaatcactggac

SEQ ID NO: 43764 - DNA, 16 bp, synthetic construct
  misc_feature 1..16: note = synthetic [barcode part1]
  source 1..16: mol_type = other DNA
atcctgaggttagtcg

SEQ ID NO: 43765 - DNA, 16 bp, synthetic construct
  misc_feature 1..16: note = synthetic [barcode part1]
  source 1..16: mol_type = other DNA
gtcactaataccttcg

SEQ ID NO: 43766 - DNA, 16 bp, synthetic construct
  misc_feature 1..16: note = synthetic [barcode part1]
  source 1..16: mol_type = other DNA
actacagaggttccac

SEQ ID NO: 43767 - DNA, 16 bp, synthetic construct
  misc_feature 1..16: note = synthetic [barcode part1]
  source 1..16: mol_type = other DNA
cagacgccaattcctc

SEQ ID NO: 43768 - DNA, 16 bp, synthetic construct
  misc_feature 1..16: note = synthetic [barcode part1]
  source 1..16: mol_type = other DNA
acaactactggtctct

SEQ ID NO: 43769 - DNA, 16 bp, synthetic construct
  misc_feature 1..16: note = synthetic [barcode part1]
  source 1..16: mol_type = other DNA
gttacagataagtggc

SEQ ID NO: 43770 - DNA, 16 bp, synthetic construct
  misc_feature 1..16: note = synthetic [barcode part1]
  source 1..16: mol_type = other DNA
tgccagagagttacct

SEQ ID NO: 43771 - DNA, 16 bp, synthetic construct
  misc_feature 1..16: note = synthetic [barcode part1]
  source 1..16: mol_type = other DNA
agttcttgacttgcac

SEQ ID NO: 43772 - DNA, 16 bp, synthetic construct
  misc_feature 1..16: note = synthetic [barcode part1]
  source 1..16: mol_type = other DNA
gatcgacgagaagagt

SEQ ID NO: 43773 - DNA, 16 bp, synthetic construct
  misc_feature 1..16: note = synthetic [barcode part1]
  source 1..16: mol_type = other DNA
gtgccgataacctctc

SEQ ID NO: 43774 - DNA, 16 bp, synthetic construct
  misc_feature 1..16: note = synthetic [barcode part1]
  source 1..16: mol_type = other DNA
caagatcgtaccgtac

SEQ ID NO: 43775 - DNA, 16 bp, synthetic construct
  misc_feature 1..16: note = synthetic [barcode part1]
  source 1..16: mol_type = other DNA
ccgcgtactagagaag

SEQ ID NO: 43776 - DNA, 16 bp, synthetic construct
  misc_feature 1..16: note = synthetic [barcode part1]
  source 1..16: mol_type = other DNA
gtattgcctcaagacg

SEQ ID NO: 43777 - DNA, 16 bp, synthetic construct
  misc_feature 1..16: note = synthetic [barcode part1]
  source 1..16: mol_type = other DNA
gttggttgactgactg

SEQ ID NO: 43778 - DNA, 16 bp, synthetic construct
  misc_feature 1..16: note = synthetic [barcode part1]
  source 1..16: mol_type = other DNA
acgaggtgtagatccg

SEQ ID NO: 43779 - DNA, 16 bp, synthetic construct
  misc_feature 1..16: note = synthetic [barcode part1]
  source 1..16: mol_type = other DNA
ttcaccgttagtgcgc

SEQ ID NO: 43780 - DNA, 16 bp, synthetic construct
  misc_feature 1..16: note = synthetic [barcode part1]
  source 1..16: mol_type = other DNA
actggcctcagttaag

SEQ ID NO: 43781 - DNA, 16 bp, synthetic construct
  misc_feature 1..16: note = synthetic [barcode part1]
  source 1..16: mol_type = other DNA
tcggttaccagaatcg

SEQ ID NO: 43782 - DNA, 16 bp, synthetic construct
  misc_feature 1..16: note = synthetic [barcode part1]
  source 1..16: mol_type = other DNA
cagtgcgagagattgc

SEQ ID NO: 43783 - DNA, 16 bp, synthetic construct
  misc_feature 1..16: note = synthetic [barcode part1]
  source 1..16: mol_type = other DNA
ttccaatccagtgtac

SEQ ID NO: 43784 - DNA, 16 bp, synthetic construct
  misc_feature 1..16: note = synthetic [barcode part1]
  source 1..16: mol_type = other DNA
cgagatcacacgtact

SEQ ID NO: 43785 - DNA, 16 bp, synthetic construct
  misc_feature 1..16: note = synthetic [barcode part1]
  source 1..16: mol_type = other DNA
taccagtctgattctg

SEQ ID NO: 43786 - DNA, 16 bp, synthetic construct
  misc_feature 1..16: note = synthetic [barcode part1]
  source 1..16: mol_type = other DNA
gattacctcacacttg

SEQ ID NO: 43787 - DNA, 16 bp, synthetic construct
  misc_feature 1..16: note = synthetic [barcode part1]
  source 1..16: mol_type = other DNA
gcaagtcggagtgact

SEQ ID NO: 43788 - DNA, 16 bp, synthetic construct
  misc_feature 1..16: note = synthetic [barcode part1]
  source 1..16: mol_type = other DNA
tagatcgaagaacacc

SEQ ID NO: 43789 - DNA, 16 bp, synthetic construct
  misc_feature 1..16: note = synthetic [barcode part1]
  source 1..16: mol_type = other DNA
tgaggaggttgtatac

SEQ ID NO: 43790 - DNA, 16 bp, synthetic construct
  misc_feature 1..16: note = synthetic [barcode part1]
  source 1..16: mol_type = other DNA
tgaactaccttcgtgt

SEQ ID NO: 43791 - DNA, 16 bp, synthetic construct
  misc_feature 1..16: note = synthetic [barcode part1]
  source 1..16: mol_type = other DNA
atcacgagtcctgaac
